United States Patent Application Publication US 2013/0309769 A1 - sequence listing, part 6

SEQ ID NO: 5817 - DNA, 7446 bp, Homo sapiens
ctgtctacggcagctattccagaggcaacaactgcttccctctgttctcatctccccattggtggctggcgacccgaatttgggaatggggagattgcccacctgttatctttgagcagactaatctcttgtaagcagaagtgccattcggagtctccagagccctgtggcttggggctgggaatgtccccctgacttcaggctttcctaagtgtattgcttttctctgagaatggtctaggtttttaattttttaattgtaagaatctgtaatacagcatttttatttcggtcttattcgttgtgctcaaaggcaggaaacaactattaatttgccttctcgaatcttaatagttataagattcattctctttcattgctctgctaggcataaaacacacttcgaacatgggtaactcattcgactgtggagttcttttaattcttatgaaagatttcaaatcctctagaagccaaaatgggacacagtaaacagattcgaattttacttctgaacgaaatggagaaactggaaaagaccctcttcagacttgaacaagggtatgagctacagttccgattaggcccaactttacagggaaaagcagttaccgtgtatacaaattacccatttcctggagaaacatttaatagagaaaaattccgttctctggattgggaaaatccaacagaaagagaagatgattctgataaatactgtaaacttaatctgcaacaatctggttcatttcagtattatttccttcaaggaaatgagaaaagtggtggaggttacatagttgtggaccccattttacgtgttggtgctgataatcatgtgctacccttggactgtgttactcttcagacatttttagctaagtgtttgggaccttttgatgaatgggaaagcagacttagggttgcaaaagaatcaggctacaacatgattcattttaccccattgcagactcttggactatctaggtcatgctactcccttgccaatcagttagaattaaatcctgacttttcaagacctaatagaaagtatacctggaatgatgttggacagctagtggaaaaattaaaaaaggaatggaatgttatttgtattactgatgttgtctacaatcatactgctgctaatagtaaatggatccaggaacatccagaatgtgcctataatcttgtgaattctccacacttaaaacctgcctgggtcttagacagagcactttggcgtttctcctgtgatgttgcagaagggaaatacaaagaaaagggaatacctgctttgattgaaaatgatcaccatatgaattccatccgaaaaataatttgggaggatatttttccaaagcttaaactctgggaatttttccaagtagatgtcaacaaagcggttgagcaatttagaagacttcttacacaagaaaataggcgagtaaccaagtctgatccaaaccaacaccttacgattattcaagatcctgaatacagacggtttggctgtactgtagatatgaacattgcactaacgactttcataccacatgacaaggggccagcagcaattgaagaatgctgtaattggtttcataaaagaatggaggaattaaattcagagaagcatcgactcattaactatcatcaggaacaggcagttaattgccttttgggaaatgtgttttatgaacgactggctggccatggtccaaaactaggacctgtcactagaaagcatcctttagttaccaggtattttactttcccatttgaagagatagacttctccatggaagaatctatgattcatctgccaaataaagcttgttttctgatggcacacaatggatgggtaatgggagatgatcctcttcgaaactttgctgaaccgggttcagaagtttacctaaggagagaacttatttgctggggagacagtgttaaattacgctatgggaataaaccagaggactgtccttatctctgggcacacatgaaaaaatacactgaaataactgcaacttatttccagggagtacgtcttgataactgccactcaacacctcttcacgtagctgagtacatgttggatgctgctaggaatttgcaacccaatttatatgtagtagctgaactgttcacaggaagtgaagatctggacaatgtctttgttactagactgggcattagttccttaataagagaggcaatgagtgcatataatagtcatgaagagggcagattagtttaccgatatggaggagaacctgttggatcctttgttcagccctgtttgaggcctttaatgccagctattgcacatgccctgtttatggatattacgcatgataatgagtgtcctattgtgcatagatcagcgtatgatgctcttccaagtactacaattgtttctatggcatgttgtgctagtggaagtacaagaggctatgatgaattagtgcctcatcagatttcagtggtttctgaagaacggttttacactaagtggaatcctgaagcattgccttcaaacacaggtgaagttaatttccaaagcggcattattgcagccaggtgtgctatcagtaaacttcatcaggagcttggagccaagggttttattcaggtgtatgtggatcaagttgatgaagacatagtggcagtaacaagacactcacctagcatccatcagtctgttgtggctgtatctagaactgctttcaggaatcccaagacttcattttacagcaaggaagtgcctcaaatgtgcatccctggcaaaattgaagaagtagttcttgaagctagaactattgagagaaacacgaaaccttataggaaggatgagaattcaatcaatggaacaccagatatcacagtagaaattagagaacatattcagcttaatgaaagtaaaattgttaaacaagctggagttgccacaaaagggcccaatgaatatattcaagaaatagaatttgaaaacttgtctccaggaagtgttattatattcagagttagtcttgatccacatgcacaagtcgctgttggaattcttcgaaatcatctgacacaattcagtcctcactttaaatctggcagcctagctgttgacaatgcagatcctatattaaaaattccttttgcttctcttgcctccagattaactttggctgagctaaatcagatcctttaccgatgtgaatcagaagaaaaggaagatggtggagggtgctatgacataccaaactggtcagcccttaaatatgcaggtcttcaaggtttaatgtctgtattggcagaaataagaccaaagaatgacttggggcatcctttttgtaataatttgagatctggagattggatgattgactatgtcagtaaccggcttatttcacgatcaggaactattgctgaagttggtaaatggttgcaggctatgttcttctacctgaagcagatcccacgttaccttatcccatgttactttgatgctatattaattggtgcatataccactcttctggatacagcatggaagcagatgtcaagctttgttcagaatggttcaacctttgtgaaacacctttcattgggttcagttcaactgtgtggagtaggaaaattcccttccctgccaattctttcacctgccctaatggatgtaccttataggttaaatgagatcacaaaagaaaaggagcaatgttgtgtttctctagctgcaggcttacctcatttttcttctggtattttccgctgctggggaagggatacttttattgcacttagaggtatactgctgattactggacgctatgtagaagccaggaatattattttagcatttgcgggtaccctgaggcatggtctcattcctaatctactgggtgaaggaatttatgccagatacaattgtcgggatgctgtgtggtggtggctgcagtgtatccaggattactgtaaaatggttccaaatggtctagacattctcaagtgcccagtttccagaatgtatcctacagatgattctgctcctttgcctgctggcacactggatcagccattgtttgaagtcatacaggaagcaatgcaaaaacacatgcagggcatacagttccgagaaaggaatgctggtccccagatagatcgaaacatgaaggacgaaggttttaatataactgcaggagttgatgaagaaacaggatttgtttatggaggaaatcgtttcaattgtggcacatggatggataaaatgggagaaagtgacagagctagaaacagaggaatcccagccacaccaagagatgggtctgctgtggaaattgtgggcctgagtaaatctgctgttcgctggttgctggaattatccaaaaaaaatattttcccttatcatgaagtcacagtaaaaagacatggaaaggctataaaggtctcatatgatgagtggaacagaaaaatacaagacaactttgaaaagctatttcatgtttccgaagacccttcagatttaaatgaaaagcatccaaatctggttcacaaacgtggcatatacaaagatagttatggagcttcaagtccttggtgtgactatcagctcaggcctaattttaccatagcaatggttgtggcccctgagctctttactacagaaaaagcatggaaagctttggagattgcagaaaaaaaattgcttggtccccttggcatgaaaactttagatccagatgatatggtttactgtggaatttatgacaatgcattagacaatgacaactacaatcttgctaaaggtttcaattatcaccaaggacctgagtggctgtggcctattgggtattttcttcgtgcaaaattatatttttccagattgatgggcccggagactactgcaaagactatagttttggttaaaaatgttctttcccgacattatgttcatcttgagagatccccttggaaaggacttccagaactgaccaatgagaatgcccagtactgtcctttcagctgtgaaacacaagcctggtcaattgctactattcttgagacactttatgatttatagtttattacagatattaagtatgcaattacttgtattataggatgcaaggtcatcatatgtaaatgccttatatgcacaggctcaagttgttttaaaaatctcatttattataatattgatgctcaattaggtaagattgtaaaagcattgattttttttaatgtacagaggtagatttcaatttgaatcagaaagaaatatcattaccaatgaaatgtgtttgagttcagtaagaattattcaaatgcctagaaatccatagtttggaaaagaaaaatcatgtcatcttctatttgtacagaaatgaaaataaaatatgaaaataatgaaagaaatgaaaagatagcttttaattgtggtatatataatcttcagtaacaatacatactgaatacgctgtggttcattaatattaacaccacgtactatagtattcttaatacagtgctcactgcatttaataaatatttaataaatgatgaatgatagaagtttccatctacaatatatgttcctaaatggagcacagatgttcaaactatgctttcattttttcactgatatattaatttttgtgtaatgaatgccaacagtatattttatatgatttacttatgtgaggaaacatgcaaagcattaggaaatttatttcctaaaaacagttttgtaaaattagtattgagttctattgagtattataagatagcttacattttcaaaatggaaattgtcggtcatatttctagaactttaaagaaaaaagaatgttatattagttttctaaaactcaactatctttagtcatgttcaaaaatctattgctagatcatagtagatactggttttctattaactcaaaacctacattgacaagtttaacattgagaagaatcttaacaaaaatatggatatgaattcagtagatatcttaaattcaataaaatcactggaagtttttcatgataacttattttaagatgccttaaaaatcttaaagtcacaaaaggaaaaaggtttttaacatttacatgagttaacattttttcatagaacttatttcctagatagaattttttactgttttttactgttttcttaagaaaacagttaaatcattatgcattcagttggaagaaagtagtggcaagaattctttcattgctatataatattcagtggctcatttatacctaataaaataatggtattttaaaataatgctactttcaaagtagcatttttttagttagtttacaggttacatacccaaaaccttaactatgactaagaaattaaagaagaaaaccagcaaactaaaacttctgggcagcaaaaatatataaatgcttcagatgtcaaatacccatgcttgaaagctcgtgtaatttactttaagattatctgcctgctcttcttcaaagctgaccttgctttagaaatagttttaactagcttagttttctggtttccaaaactaaaatagattaaatcctacaaatttaaggacagttgtgacagtaatctgaccactatctataaatacattggacattggtttccaaatctccctttcttcttcagttccttccttgttcaatatatacccttctctaaactgtgcgggtaaaaggaatgactgtccttgagagaaccattagtttatcaaaggtttatgtagttttgttgctgtaccctaactttgatattcagggaggtaggaaaggtaacagaaaaccagcatatttaatcaaagcaagaagtaatcgctgacagttaaatgtgaccaaaaaaattaaaagttcacaatttttttaatgtagccatttggggttatctctagtaaggcagatacccacgttggtaaatttttaggatattgtgttgcactagaaaactaagtggttcatatttctaatgaggaagattaatgaaagaacattgttatattctgcgtggtatattttaaagtttaagaaggcatgttaaacattatttcctctatggtagttaaaatacagaattagatttttaacaggtgtcatttgactaaacgtttcggtagaatgcttcatacttgagtgatgctggataaggtattgtatttcaacaatggactatgccttggtttttcactaatcaaaatcaaaattactctttaacatgataaatgaatttaccagtttagtatgctgtggtattttaataagttttcaaagataattgggaaaacatgagactggtcatattgatgaatattgtaacatgtgaattgtgatccatttctgatatgtcttgaactactgtgtctagtgggcaaatgtcattgttacctctgtgtgttaagaaaataaaaatattttctaaaggtc

SEQ ID NO: 5818 - DNA, 6500 bp, Homo sapiens
gcttcccgcgggaacctctccagccgtccacctgaagggcactggcatcatggtctaacgtggcaccttcctggattcccctctatctcctgttcttcctaccttctactccttccctcctcttctcctccgaagaccctggcgcccactccactgcggacccctgaacacttaaggaataacccttggcagctgcacgactacgctctccgaaacctcatgggcagtttctcccgccggcgatgatggagaacctaataaggggaaggaatcccccgcaataccagagaagtccttgtaaagaggttcgtgcagcacttcggaagaggcctgaagaggagtgagcccgctacatgaaaaaaaatgcaagtcaaagtggtcacaacctagaagtctgcagagacaggaataactagcaatgcagtgcctggagatgaccaccaaacggaaaatcatcggccgtctggtgccatgccgatgtttccgaggtgaagaagaaatcatctcagttttagattactcccactgcagtcttcagcaggtgccaaaggaggtctttaacttcgaacgaacattagaggagctttatctagatgccaatcaaattgaagaactacccaagcaattgttcaactgtcaagctctacgaaaactaagtattcctgataacgacctttcaaatctgccaaccactattgctagtttagttaatcttaaagaactcgacatcagtaaaaatggtgtacaagaatttccagaaaacataaagtgctgtaagtgtttaacaattattgaagccagtgtcaatcccatttctaaactacctgatggcttcacacagctcctaaacctgacccagctctacctgaatgacgcctttcttgaatttcttccagccaattttggaagacttgtcaaattgcggatcttggagttaagagaaaatcacttgaaaactctaccaaagtcaatgcacaaactggcccagttggaaagacttgacctaggcaataatgaattcggtgagctgcctgaagttctggatcaaatacaaaatttgagggagttatggatggataataatgcattacaagtgttacctgggtctatagggaagttaaagatgttggtatacctggatatgtcaaaaaacagaatagaaacagttgacatggacatttctggatgtgaagcccttgaggacctcttattgtcatccaatatgttgcaacaattgcctgattctataggacttttgaaaaaactaacaactctaaaagtagatgacaatcaacttacaatgctacccaatacaattggaaatttatctttattagaagaatttgactgtagctgtaatgaactggagtcactaccttctactattggctaccttcatagtcttcggacattagcagttgatgagaatttccttccagaattacccagagaaattggaagttgtaagaatgtaacagtcatgtctctacgctccaacaaattagaatttcttcctgaagagattggacagatgcagaaactaagagtcctaaatttgagtgacaacagattgaagaatttaccattctcatttaccaaacttaaagagcttgcagctttgtggctttctgacaatcagtccaaagcccttatccctttacaaacagaagcccatccagaaacaaagcaaagagtattgactaactacatgtttccccagcagcctcgtggtgatgaagatttccagtcagacagtgacagctttaaccctacactgtgggaagagcagagacaacaacgcatgactgttgcctttgaatttgaagacaaaaaagaagatgacgaaaatgctgggaaagttaaggatctctcctgccaagccccctgggaaaggggccagcgtgggattactctccaacctgccagactgtctggcgattgctgcacaccatgggccaggtgtgatcagcagatccaagatatgcccgtcccccagaatgacccacagctggcatggggttgtataagtggcctccagcaggaaaggagcatgtgtactccattgccagttgcagcacaatccaccactcttccctctctaagtggcagacaggttgaaataaacctaaaacgatatccaactccttacccagaggatttaaagaatatggtaaaatctgttcaaaatttggtgggtaagccaagccatggagtgcgtgttgagaattcaaatccaactgctaacacggagcaaactgtgaaagaaaaatatgaacacaagtggccggtagccccaaaggagattacagtggaggattcttttgttcatccagctaatgaaatgaggattggggaacttcacccttcattagctgagacccctctgtacccacccaaacttgttctgctagggaaggacaaaaaagaatcaactgatgagtctgaagttgacaaaactcactgtctgaataacagtgtttcctcaggcacttactcagactactcgccttcccaggcttcctcaggatcctctaatacccgggttaaagtggggtccttgcagacaacagctaaagatgcagtacataattctttgtggggtaacaggattgcaccatctttcccacagcctcttgattcaaagccattactcagccagcgggaggctgttcccccaggcaatataccacagcgtcctgaccggctgcccatgagtgatactttcactgacaactggactgatggctcgcattatgacaacacagggtttgttgctgaggaaaccacagccgagaatgccaacagtaatcctctcttaagttcgaaatctagaagcacatcttcgcatggacgcaggcctttgatcaggcaagacaggattgttggtgttcccctggaactcgagcagtctacacacagacacacaccagaaacagaagtgcctccttccaatccttggcagaattggaccagaacccctagtccgtttgaagacaggaccgcttttccttccaaattagagacaacccccactaccagcccattgcctgaaaggaaagaacatataaaggaatctactgaaatacctagtcctttttctccaggcgtaccatgggagtatcatgattccaatcccaacaggagtcttagtaatgtcttttctcaaatccactgccgcccggaatcttctaaaggtgttatttcaattagcaaaagcacagagaggctttcccccctaatgaaagatatcaagtctaataaattcaaaaagtcacagagtatcgatgagattgacattggtacatataaggtgtataacataccattagaaaactatgcttctgggagtgatcacttaggaagccacgaacgaccggataagatgctgggaccagagcatggtatgtccagtatgtctcgaagccagtcagtcccaatgctggatgatgagatgctcacctacggaagtagtaaggggccacaacaacaaaaagcttctatgacaaaaaaagtctatcagtttgaccaaagcttcaatcctcaaggatcagtggaagtgaaagccgaaaagaggataccacccccttttcaacacaatcccgagtacgtgcaacaggccagcaaaaacatcgccaaggatttgattagtcctagagcttacagaggatacccaccgatggagcaaatgttttcattttctcagccatctgtgaatgaggatgctgtggtgaatgcccagttcgcaagccaaggggccagggcgggcttcctgagaagggccgactccctggtgagcgccacagaaatggccatgtttagaagggtcaatgagcctcatgagctgcccccaactgataggtacggcagacccccatataggggagggctggatcgccaaagcagcgttacagtgactgagtcccagttcctgaaaaggaatggcaggtatgaagatgaacacccttcatatcaagaagtgaaagctcaggcgggaagttttccggttaaaaaccttacccaaaggaggccattgtctgcgagaagctacagtacagagagttacggtgcctcccaaaccaggccagtttcagctaggcctactatggcagctcttttggaaaaaataccatctgactataacttgggtaactatggtgacaagccatcagataacagtgatttaaagacgaggcctactcctgtgaagggagaggagagctgtggtaaaatgcctgcagactggagacaacagctgcttagacatatagaagctagacggttagacaggaccccgtcccagcaaagcaacattttagacaatggacaagaagatgtatctcctagtggccaatggaatccttatccacttgggaggcgggatgtacctccggacaccattactaagaaggcaggcagccacatccagacgttgatggggtcccaaagccttcagcatcgcagccgggagcagcagccgtatgaaggaaatataaacaaagtgaccatccagcaatttcagtcaccattgcctattcagatcccctcttcacaggccacccggggacctcagcctggacggtgcttaattcaaactaaagggcaaaggagtatggatggatatccagagcagttttgtgtgagaatagaaaagaatcctggccttggatttagtatcagtggtggaattagtggacaaggaaatccattcaaaccttctgacaagggtatctttgttactagggttcagcctgatgggccagcatcaaacctactgcagcctggtgataagatccttcaggcaaatggacacagttttgtacatatggaacatgaaaaagctgtattactactgaagagtttccagaacacagtagacctagttattcaacgtgagcttactgtctaaatattttttataaatagtgaagatacgtctagccagacctaatgttcaaaaataaatttatacatagaaacaaattttgccaattgctggaccaatggcaaacattagtgccaaatgtataatactatatgttagcactgaccatccttaaaaaatgttaactctataaatatgatgttcatgtggttatgtattagttttaattgtcagcctctggctgtgcattggtgcagttttgtttctgtttttgtttttgtttttaatcaaataagtttcttctcaaaatggatttcatataatttcggagcacggaagcacacacaagctctttatgaattctgctctccatcagaaacactgcctcaaagttgtatatgcctttatatagaaaatacaaatataaagaattgtaattcccataaaatatttctagcacaaggtatatgttggcatatatacaaaaagaatatagagaaaaacaatattttcataaactaaacatctcagatagagaaaaaatatatcttaaaataagactttactatattgaatctttttcaataaaaattacatgataatgccttatgaaagtaactgtacatatggtataaagtgtttatatttggttccatattcatttgctaaattctcatgacacagagtgaaatatttcataaattagccatttatctctgggacccaaataaaaataggatgaactaatttgttcaatgcctttagctaattacaatacatgcagagtttagaaacagactaaaggtcattgtagttaagtctttttcaccacaaatttaagcagtggatgatgggtggcaggaaaggtattgctttatttctttcaagttcatgttgattataaactgtagcccctgtgatttctttacttgtaaatgtggaatttatttgtgtgttgcttaatctaatttgctgctttttaaattatttaaaacgaattttggaaattgataaaatttatcattacgaaagactgctgttagaaagttatggtaggtgattttaaatccttggtatttaaatatgaaacttcaaatataatttctcagagctgtggtctacctgtatcattaatttcaatggctgtttttctgggcagaaatagataaaatactttttttccaaaaacagtttcaaggtatgtaaaatcctgaatgctttttcactgaagagaaagacaagcatggttaatgtagaattatttacttttccattgaaactattttcctgcataaatgatcaaaatttattttataatcctttaaaatacttatctttcatattagtcattaatttaattacaatattaatttgaatttccaggataatttcccggagttggttgcatgcattatctttcataattttacatagttcttttgttatataatgaatttactttacatgctagtgtttcaagtattgtatgaggattttcacaatagtatcactgaatgatgtcaccagagctctgagaataatatttgtaagttaactgttttatggggacattgaaaatattgtatttttgtagggtctattaaaatgagtgtcactt

SEQ ID NO: 5819 - DNA, 1625 bp, Homo sapiens
aaaatgtgcttcttacaggaatataaatagtttctggaaaggacactgacaacttcaaagcaaaatgaagctcttttggttgcttttcaccattgggttctgctgggctcagtattcctcaaatacacaacaaggacgaacatctattgttcatctgtttgaatggcgatgggttgatattgctcttgaatgtgagcgatatttagctcccaagggatttggaggggttcaggtctctccaccaaatgaaaatgttgccattcacaaccctttcagaccttggtgggaaagataccaaccagttagctataaattatgcacaagatctggaaatgaagatgaatttagaaacatggtgactagatgcaacaatgttggggttcgtatttatgtggatgctgtaattaatcatatgtgtggtaatgctgtgagtgcaggaacaagcagtacctgtggaagttacttcaaccctggaagtagggactttccagcagtcccatattctggatgggattttaatgatggtaaatgtaaaactggaagtggagatatcgagaactataatgatgctactcaggtcagagattgtcgtctgactggtcttcttgatcttgcactggagaaggattacgtgcgttctaagattgccgaatatatgaaccatctcattgacattggtgttgcagggttcagacttgatgcttccaagctcatgtggcctggagacataaaggcaattttggacaaactgcataatctaaacagtaactggttccctgcaggaagtaaacctttcatttaccaggaggtaattgatctgggtggtgagccaattaaaagcagtgactactttggtaatggccgggtgacagaattcaagtatggtgcaaaactcggcacagttattcgcaagtggaatggagagaagatgtcttacttaaagaactggggagaaggttggggtttcgtaccttctgacagagcgcttgtctttgtggataaccatgacaatcaacgaggacatggggctggaggagcctctattcttaccttctgggatgctaggctgtacaaaatggcagttggatttatgcttgctcatccttacggatttacacgagtaatgtcaagctaccgttggccaagacagtttcaaaatggaaacgatgttaatgattgggttgggccaccaaataataatggagtaattaaagaagttactattaatccagacactacttgtggcaatgactgcgtctgtgaacatcgatggcgccaaataaggaacatggttattttccgcaatgtagtggatggccagccttttacaaattggtatgataatgggagcaaccaagtggcttttgggagaggaaacagaggattcattgttttcaacaatgatgactggtcattttctttaactttgcaaactggtcttcctgctggcacatactgtgatgtcatttctggagataaaattaatggcaattgcacaggcattaaaatttacgtttctgatgatggcaaagctcatttttctattagtaactctgctgaagatccatttattgcaattcatgctgaatctaaattgtaaaatttaaaattaaatgcatgtcctc

SEQ ID NO: 5820 - DNA, 3084 bp, Homo sapiens
tctttgccaaaggggggaccagaattcccccatgcgagctgtttgaggactgggatgccgagaacgcgagcgatccgagcagggtttgtctgggcaccgtcggggtaggatccggaacgcattcggaaggctttttgcaagcatttacttggaaggagaacttgggatctttctgggaaccccccgccccggctggattggccgagcaagcctggaaaatggtaaatgatcatttggatcaattacaggcttttagctggcttgtctgtcataattcatgattcggggctgggaaaaagaccaacagcctacgtgccaaaaaaggggcagagtttgatggagttgggtggacttttctatgccatttgcctccacacctagaggataagcacttttgcagacattcagtgcaagggagatcatgtttgactgtatggatgttctgtcagtgagtcctgggcaaatcctggatttctacactgcgagtccgtcttcctgcatgctccaggagaaagctctcaaagcatgcttcagtggattgacccaaaccgaatggcagcatcggcacactgctcaatcaattgaaacacagagcaccagctctgaggaactcgtcccaagccccccatctccacttcctccccctcgagtgtacaaaccctgcttcgtctgccaggacaaatcatcagggtaccactatggggtcagcgcctgtgagggatgtaagggctttttccgcagaagtattcagaagaatatgatttacacttgtcaccgagataagaactgtgttattaataaagtcaccaggaatcgatgccaatactgtcgactccagaagtgctttgaagtgggaatgtccaaagaatctgtcaggaatgacaggaacaagaaaaagaaggagacttcgaagcaagaatgcacagagagctatgaaatgacagctgagttggacgatctcacagagaagatccgaaaagctcaccaggaaactttcccttcactctgccagctgggtaaatacaccacgaattccagtgctgaccatcgagtccgactggacctgggcctctgggacaaattcagtgaactggccaccaagtgcattattaagatcgtggagtttgctaaacgtctgcctggtttcactggcttgaccatcgcagaccaaattaccctgctgaaggccgcctgcctggacatcctgattcttagaatttgcaccaggtataccccagaacaagacaccatgactttctcagacggccttaccctaaatcgaactcagatgcacaatgctggatttggtcctctgactgaccttgtgttcacctttgccaaccagctcctgcctttggaaatggatgacacagaaacaggccttctcagtgccatctgcttaatctgtggagaccgccaggaccttgaggaaccgacaaaagtagataagctacaagaaccattgctggaagcactaaaaatttatatcagaaaaagacgacccagcaagcctcacatgtttccaaagatcttaatgaaaatcacagatctccgtagcatcagtgctaaaggtgcagagcgtgtaattaccttgaaaatggaaattcctggatcaatgccacctctcattcaagaaatgctggagaattctgaaggacatgaacccttgaccccaagttcaagtgggaacacagcagagcacagtcctagcatctcacccagctcagtggaaaacagtggggtcagtcagtcaccactcgtgcaataagacattttctagctacttcaaacattccccagtaccttcagttccaggatttaaaatgcaagaaaaaacatttttactgctgcttagtttttggactgaaaagatattaaaactcaagaaggaccaagaagttttcatatgtatcaatatatatactcctcactgtgtaacttacctagaaatacaaacttttccaattttaaaaaatcagccatttcatgcaaccagaaactagttaaaagcttctattttcctctttgaacactcaagattgcatggcaaagacccagtcaaaatgatttacccctggttaagtttctgaagactttgtacatacagaagtatggctctgttctttctatactgtatgtttggtgctttccttttgtcttgcatactcaaaataaccatgacaccaaggttatgaaatagactactgtacacgtctacctaggttcaaaaagataactgtcttgctttcatggaatagtcaagacatcaaggtaaggaaacaggactattgacaggactattgtacagtatgacaagataaggctgaagatattctactttagttagtatggaagcttgtctttgctctttctgatgctctcaaactgcatcttttatttcatgttgcccagtaaaagtatacaaattccctgcactagcagaagagaattctgtatcagtgtaactgccagttcagttaatcaaatgtcatttgttcaattgttaatgtcactttaaattaaaagtggtttattacttgtttaatgacataactacacagttagttaaaaaaaatttttttacagtaatgatagcctccaaggcagaaacacttttcagtgttaagtttttgtttacttgttcacaagccattagggaaatttcatgggataattagcaggctggtctaccacctggaccatgtaactctagtgtccttcctgattcatgcctgatattgggatttttttttccagccttcttgatgccaaggggctaattaatattaacaactcccaaagaaacaggcatagaatctgcctcctttgaccttgttcaatcactatgaagcagagtgaaagctgtggtagagtggttaacagatacaagtgtcagtttcttagttctcatttaagcactagtggaattttttttttttgatatattagcaagtctgtgatgtactttcactggctctgtttgtacattgagattgtttgtttaacaatgctttctatgttcatatactgtttacctttttccatggagtctcctggcaaagaataaaatatatttattttaaa

SEQ ID NO: 5821 - DNA, 872 bp, Homo sapiens
aggcgggccatggcggatgtccccggggcacagcgagcggttcctggtgacggcccagagccccgggaccccctggactgttgggcctgcgctgttcttgtaacagcccagaatctgctggtggctgccttcaatcttctcctgctggtgctggtgctagggaccatcttgctacccgctgtcaccatgctgggcttcggcttcctctgccactctcagttcctgcgctcccaggcacccccttgcaccgcgcacctgcgggaccccggtttcacggccctactggtcaccggattcctgctcctcgtgccgctgctcgtgcttgctctggccagctaccgccgcctctgcctgcgcctccgcctagccgattgcctcgtgccctacagccgagccctttatcggcgtcggcgcgccccgcagccgcggcaaatccgggcctcaccagggtcccaggccgttcccacatcaggaaaggtctgggtctaatgaccctcgagtcaagaacaaccctgacggctgccctccctcttattcggcccaaggacttgaagcccggcatcttccgacctgccctgcccccacccctgcctgagcggagtcctagcatccccttgggagcagcagcgtcagtggacccagtgctgagaaaagcccccacatcccggaaaacccactttcctttcacgacccacatctcaatcctgaacatctaggctggaacctgcacacctccccctcagctccgtcgtgaatgggacaacaatctcgtgccctcgttttatggtgcagcttctctagtatttctggggctggggggcggggctggaggggaaggagtgtccacgcatcaataaagatttaacgaactg

SEQ ID NO: 5822 - DNA, 1169 bp, Homo sapiens
catttgggcaacggacgaattaagcggcgtggagatgcggcagccactgagctggggccgctggcgcgcgatgcttgcccgaacctacggccccgggccttcggcgggttaccgctgggcctcgggcgcacagggttacgtgcggaatccgccagttggagcgtgcgatctgcagggcgagctggacagattcgggggcatctcggtgcgcctggcgcggctcgatgcgctggaccgcctggacgctgccgccttccagaagggcttgcaggctgcagtacagcaatggcgatcagaaggtagaacagctgtatggctgcacattcccatcctccaaagccgatttattgcccctgctgcttccctgggcttctgctttcaccacgcagaatcggattcatcaacgttgactctgtggctgagagaagggcccagcagattaccaggatatgcttcacatcaagtaggagttgcaggagctgtatttgatgaaagtactagaaaaatactggttgtacaagatcgaaataaattgaaaaatatgtggaagtttccaggaggcctgtcagagcctgaagaagatattggagacacagcggttcgagaagtttttgaagagactggtataaaatcagaattcaggtccgtcctgagtattcggcaacagcacacaaatcctggagcttttgggaagtcagatatgtatatcatctgccgcctaaagccatattcattcaccataaatttttgccaggaagaatgcttaagatgtgagtggatggatctcaatgacctggcgaagactgaaaatacaactcccatcaccagcagagttgctaggctgctgctgtatgggtacagagaagggtttgacaaaattgacctgactgtggaagaacttccagcagtttacacaggactgttttataaactctatcataaggaactgccagagaattataaaactatgaaaggaattgattaaattcacatttatatgtttagaaacatgtagactaacgaatgacataagaaatagtggacattttggattgattaaacatctgactgtgattttctaatgtatatgatttccatgaagaaattttgtttctaaacatgcacattttaaaagcctcttttcgaataaagcaaatgcgtgaaaaaga

SEQ ID NO: 5823 - DNA, 2420 bp, Homo sapiens
cccgcccacttccaactaccgcctccggcctgcccagggagagagagggagtggagcccagggagagggagcgcgagagagggagggaggaggggacggtgctttggctgacttttttttaaaagagggtgggggtggggggtgattgctggtcgtttgttgtggctgttaaattttaaactgccatgcactcggcttccagtatgctgggagcggtgaagatggaagggcacgagccgtccgactggagcagctactatgcagagcccgagggctactcctccgtgagcaacatgaacgccggcctggggatgaacggcatgaacacgtacatgagcatgtcggcggccgccatgggcagcggctcgggcaacatgagcgcgggctccatgaacatgtcgtcgtacgtgggcgctggcatgagcccgtccctggcggggatgtcccccggcgcgggcgccatggcgggcatgggcggctcggccggggcggccggcgtggcgggcatggggccgcacttgagtcccagcctgagcccgctcggggggcaggcggccggggccatgggcggcctggccccctacgccaacatgaactccatgagccccatgtacgggcaggcgggcctgagccgcgcccgcgaccccaagacctacaggcgcagctacacgcacgcaaagccgccctactcgtacatctcgctcatcaccatggccatccagcagagccccaacaagatgctgacgctgagcgagatctaccagtggatcatggacctcttccccttctaccggcagaaccagcagcgctggcagaactccatccgccactcgctctccttcaacgactgtttcctgaaggtgccccgctcgcccgacaagcccggcaagggctccttctggaccctgcaccctgactcgggcaacatgttcgagaacggctgctacctgcgccgccagaagcgcttcaagtgcgagaagcagctggcgctgaaggaggccgcaggcgccgccggcagcggcaagaaggcggccgccggagcccaggcctcacaggctcaactcggggaggccgccgggccggcctccgagactccggcgggcaccgagtcgcctcactcgagcgcctccccgtgccaggagcacaagcgagggggcctgggagagctgaaggggacgccggctgcggcgctgagccccccagagccggcgccctctcccgggcagcagcagcaggccgcggcccacctgctgggcccgccccaccacccgggcctgccgcctgaggcccacctgaagccggaacaccactacgccttcaaccacccgttctccatcaacaacctcatgtcctcggagcagcagcaccaccacagccaccaccaccaccaaccccacaaaatggacctcaaggcctacgaacaggtgatgcactaccccggctacggttcccccatgcctggcagcttggccatgggcccggtcacgaacaaaacgggcctggacgcctcgcccctggccgcagatacctcctactaccagggggtgtactcccggcccattatgaactcctcttaagaagacgacggcttcaggcccggctaactctggcaccccggatcgaggacaagtgagagagcaagtgggggtcgagactttggggagacggtgttgcagagacgcaagggagaagaaatccataacacccccaccccaacacccccaagacagcagtcttcttcacccgctgcagccgttccgtcccaaacagagggccacacagataccccacgttctatataaggaggaaaacgggaaagaatataaagttaaaaaaaagcctccggtttccactactgtgtagactcctgcttcttcaagcacctgcagattctgatttttttgttgttgttgttctcctccattgctgttgttgcagggaagtcttacttaaaaaaaaaaaaaaattttgtgagtgactcggtgtaaaaccatgtagttttaacagaaccagagggttgtactattgtttaaaaacaggaaaaaaaataatgtaagggtctgttgtaaatgaccaagaaaaagaaaaaaaaagcattcccaatcttgacacggtgaaatccaggtctcgggtccgattaatttatggtttctgcgtgctttatttatggcttataaatgtgtattctggctgcaagggccagagttccacaaatctatattaaagtgttatacccggttttatcccttgaatcttttcttccagatttttcttttctttacttggcttacaaaatatacaggcttggaaattatttcaagaaggagggagggataccctgtctggttgcaggttgtattttattttggcccagggagtgttgctgttttcccaacattttattaataaaattttcagac

SEQ ID NO: 5824 - DNA, 1650 bp, Homo sapiens
gctcagcaaggggtccgtccttctctgtcactgtctcttttgcctgttgtaattctgtctgcctctctgggactctgcctgtctcactctttctgtctgtgcctctcctcactcttgttctttctgcctgaatcacagccctcagtttttctgtcctcatgcatttgtctttgtggctctttccgtctttctgcccttgacaccatcccctctcccagtgcttcccctctgcttccagatcgcttcatgacttaggcagggaaacagaggtcagggcctccttccaggcttccctctgcatcttactgagtatgcaggtcggaagagcctcgggtcctgcctccgcgggtggcctagagccaaaggaaggcggagcccgtcggggcgggattggcccttagggccacctcataaagcctggggcgaggggcacaacggccttgggaaggagccctgctggggccgtccagtcccccagacctcacaggctcagtcgcggatctgcagtgtcatgcctgggagccctcggcccgcgccaagctgggtgctgttgctgcggctgctggcgttgctgcggcccccggggctgggtgaggcatgcagctgcgccccggcgcaccctcagcagcacatctgccactcggcacttgtgattcgggccaaaatctccagtgagaaggtagttccggccagtgcagaccctgctgacactgaaaaaatgctccggtatgaaatcaaacagataaagatgttcaaagggtttgagaaagtcaaggatgttcagtatatctatacgccttttgactcttccctctgtggtgtgaaactagaagccaacagccagaagcagtatctcttgactggtcaggtcctcagtgatggaaaagtcttcatccatctgtgcaactacatcgagccctgggaggacctgtccttggtgcagagggaaagtctgaatcatcactaccatctgaactgtggctgccaaatcaccacctgctacacagtaccctgtaccatctcggcccctaacgagtgcctctggacagactggctgttggaacgaaagctctatggttaccaggctcagcattatgtctgtatgaagcatgttgacggcacctgcagctggtaccggggccacctgcctctcaggaaggagtttgttgacatcgttcagccctagtagggaccagtgaccatcacatcccttcaagagtcctgaagatcaagccagttctccttccctgcagagctttggccattaccacctgacctcttgctgccagctaataagaagtgccaagtggacagtctggccactgtcaaggcagggaaggggccatgacttttctgccctgccctcagcctgttgcccctgcctcccaaaccccattagtctagccttgtagctgttactgcaagtgtttcttctggcttagtctgttttctaaagccaggactattccctttcctccccaggaatatgtgttttcctttgtcttaatcgatctggtaggggagaaatggcgaatgtcatacacatgagatggtatatccttgcgatgtacagtatcagaaggtggtttgacagcatcataaacaggctgactggcaggaatgaaaacaagaacatactgtggctgtgta

SEQ ID NO: 5825 - DNA, 993 bp, Homo sapiens
atttacaggagacagcaatggaaacctggtcagttgagcaggtctgcagttggttggtggagaaaaatttaggagagctagttcatagatttcaagaggaagaagtaagtggggccgctcttcttgcacttaatgatcggatggttcagcaactggtaaagaaaattgggcaccaggctgttctgatggatttaattaaaaaatacaagcagaacactcaaggactgaagtccccagaaaaccccaaaaaggcagccctggtcatgcaaacagaagcagctcgagattacagggatgaagagtcctccagtccagccaggcatggggagcagatgccatctttctatccagctgaaaaccttgataatggactaattgaccaaagagtattgaaacagagaagaaatgtgaaacaaattctagcaagaagcaaagcattacagtggacgaagtcctatgttttaccagagtttccctatgatgtcaaatgcatgttagcagagcagaagtgcccggatcacagcatgaggataaggatcattgagtttctccaggccgacatgactaagtatctggaaggctcactgtaccccagcacccagcagtacaatgacgtggttaatgccctgctgcaggcccaccctttcctggatgaggatggctgtggcttcgctggagtatagtggcgcgatctcagctcactgcaacctccgcctcctgggttcaagcaattctctggggcagcagttctaagctctggttgcacattaggattcctagagattcagattgaattaatttgaggatgggattattctaatgtacaaccacggctgagaaccactgccgctgacgtttcaacacaaagtttgctgtttgaacctgcctgtctcctggatttcaaagaccactgtcttcattgcacaacaatgtgaatataatcaacactattgaactgtacctaagaatagttaataaaaaactgagtgttta

SEQ ID NO: 5826 - DNA, 11558 bp, Homo sapiens
tctttgagccggaaccgccggtgaacttaggcgccacgttcccggtgactgaccccggaggatggtgaacaggaactactgctgaccctgtcttcgccgctgcctctcgggggctgccgagcgcggggcccctgtctcctccccttgcccggctgtgggtgaacctgcaggctccttacccacccggaggacttttttttgaaaggaaacgagggagggagggagagggagagagggagaaaacgaaggggagctcgtccatccattgaagcacagttcactatgatcttactcacattcagcactggaagacggttggatttcgtgcatcattcgggggtgtttttcttgcaaaccttgctttggattttatgtgctacagtctgcggaacggagcagtatttcaatgtggaggtttggttacaaaagtacggctaccttccaccgactgaccccagaatgtcagtgctgcgctctgcagagaccatgcagtctgccctagctgccatgcagcagttctatggcattaacatgacaggaaaagtggacagaaacacaattgactggatgaagaagccccgatgcggtgtacctgaccagacaagaggtagctccaaatttcatattcgtcgaaagcgatatgcattgacaggacagaaatggcagcacaagcacatcacttacagtataaagaacgtaactccaaaagtaggagaccctgagactcgtaaagctattcgccgtgcctttgatgtgtggcagaatgtaactcctctgacatttgaagaagttccctacagtgaattagaaaatggcaaacgtgatgtggatataaccattatttttgcatctggtttccatggggacagctctccctttgatggagagggaggatttttggcacatgcctacttccctggaccaggaattggaggagatacccattttgactcagatgagccatggacactaggaaatcctaatcatgatggaaatgacttatttcttgtagcagtccatgaactgggacatgctctgggattggagcattccaatgaccccactgccatcatggctccattttaccagtacatggaaacagacaacttcaaactacctaatgatgatttacagggcatccagaagatatatggtccacctgacaagattcctccacctacaagacctctaccgacagtgcccccacaccgctctattcctccggctgacccaaggaaaaatgacaggccaaaacctcctcggcctccaaccggcagaccctcctatcccggagccaaacccaacatctgtgatgggaactttaacactctagctattcttcgtcgtgagatgtttgttttcaaggaccagtggttttggcgagtgagaaacaacagggtgatggatggatacccaatgcaaattacttacttctggcggggcttgcctcctagtatcgatgcagtttatgaaaatagcgacgggaattttgtgttctttaaaggtaacaaatattgggtgttcaaggatacaactcttcaacctggttaccctcatgacttgataacccttggaagtggaattccccctcatggtattgattcagccatttggtgggaggacgtcgggaaaacctatttcttcaagggagacagatattggagatatagtgaagaaatgaaaacaatggaccctggctatcccaagccaatcacagtctggaaagggatccctgaatctcctcagggagcatttgtacacaaagaaaatggctttacgtatttctacaaaggaaaggagtattggaaattcaacaaccagatactcaaggtagaacctggatatccaagatccatcctcaaggattttatgggctgtgatggaccaacagacagagttaaagaaggacacagcccaccagatgatgtagacattgtcatcaaactggacaacacagccagcactgtgaaagccatagctattgtcattccctgcatcttggccttatgcctccttgtattggtttacactgtgttccagttcaagaggaaaggaacaccccgccacatactgtactgtaaacgctctatgcaagagtgggtgtgatgtagggttttttcttctttctttcttttgcaggagtttgtggtaacttgagattcaagacaagagctgttatgctgtttcctagctaggagcaggcttgtggcagcctgattcggggctgacctttcaaacccagagggttgctggtcctgcacatgagtggaaatacactcatggggaagcttccatgatgcacagtatctgctgttcttcagtcctttgtctttctttgtcattcagttctaggcctttcctctgcacgctcaatgcccagtaaaatttcaggattaactaaagaagaggagaaaaagaagaaaagattcttcttaaaagtttctaatgttattttccttctgaagtctgagcccatttctggggggagaaaaaaaaagcaaatcagaaaacccacggtttttctttttttctttttttctttttttctttttttgctttaaaacaaagggaaaaaagagtttaaacaaaaaacccacaattgaacttccaggaaagtgtgaagacccaaaacagctttgtctccaaagaagatagctctctgactgctttggatagtctcctacgcaccattttgtcaggtgggagatttggaatacacatgcaggacgttagactgttgggacagccattttccaacaaccaaggggccaaaatatctgcaatatagtaacagccttaataatacatccatttttcgttttatacagctgttctcagctatgtcctcagtgtttcatcgcatttatattcatagctattttcaaacacgaccttttaattgtttttgaagtatttctaaaccccttctttccaccttactcctccatcattgtgataatcttcccaagttgtattaggccattgccccaggccttccatgggtctgtcaggaatattcgttacaaagcagagcaagaagcagtatgtctctgaagtggattacagtggcagttattttacaaggatttgtgacactagtaacatacccgtgtaaccctttgagaactatcagaccagctttcagagtcttaggattgtcggtcttgcgatctgataaattatagaactgggcaatggtaaaaacagtcacaagttcaagaagttcaggtttttaaaacagatatcctataatgtcatataatttttaaatgatttacaagactacataaatgtgtttataacaaacagaaatgatgttacttgccaaaatttttctggcaaataaaaaaggtattttattaagattctcataaatctgaaattttatttgaaaaactgataatagcctaagtcttcttttcttttttttaggcatactgaatttctgttttaaaatccattgcatgaaaattcaatttgccttggtatatgcagttagcattgccattttaaaaatgaattaaaacggtgactctgaagttgcatgaatatcctccagtgcattacctattgcatgtccaccatagttctcaaagggttagtgtggcttctggcatttagccgtccatttgatcactgacagagccaagagaccaccaaagcatttcattgttgagtgtaatttgtcctaacagcagtattgtcattttcatgtgacctgcagagcaggtttgtatcaatatttttttcctagagaaaagtcagcaactgacagacctctttattgatttttaggagctgcttcttgcagtgaaaggctttacagccactgggctgtgaacttattagagatggtcagaatgaatgcaccccatgagtcagacattggctttgtgtgaaagccagctttgaggggattagcttttgaaacaatgaacagcttgccttgaacttgattattgatctattgactgtcattaacaacaacttaaacattgtcttctgtgaaaattttccttgaagagtcctgttctatgtctttgccctttgacctttaacttgcaaactggcacaaactgaaggaaatctggtgttgcttctccattggattagttgttctctaaaacctagtaagcatgagctgtttccttagagtggagagagtggtgatggcagatctgcagatggacactttgctctttacatgcacactctgaaaatgccctataggtagaagtgaattttaatttcattttaatataatttcaagtctaaattcatcattttagtacaaattacaaaaactataggaaaaaaaaaacctcaaatacttgaatggccagtgtggcttttatataaagcaggaattttatactagtaaaaatttcttactcatttgctaatacacatttccagatgatttttaatgagtgtaggtatacattcttatttggaaatggatagtttggctgccttgaatttatatttatactcaacgtagcatgaaaattagaatgccttttggttaaactacatgtttatgatttggttggggaaaatattttataattgtgggtggcatgctgcaaagccttgcagattgttatttcttacaacctgagcgtatatagtatgagcctaagaaaaaagaagagtaagaaaagaagaatggctttacagtaaaatatcatacaatgcagacaatattttaagaggatattggagattatgtacgcaagggccaagaaagcaagaaatgagaaccagagtcagccctgtagctttacttcagtgcttccattctagatgatgctgatattataaagagttagtcactgctgctaagcatggaggactatatacataagctcgtttatacagtgtttgcttgtgggagggtttaatccttttagggccttgatgtcaagaaaaaaataactggaaactatattttgctaaagatagaaatgaggaactgtgtcattttgggacatgtgcaaatcattgaggaactccatcaccctgcattgaaaattgatttttttttcctctaaaatgagaaagaaactgaataagcaatctgttgcctctttactcattcatcacaatatcctgattcgtcataaggctatcagtatataagggctagaaaataatcatagcattaagaaggaaggagtctatcattatgcttgaattctggcaaatgtcatgaataagggttgggtcatatttactttaatatgagacaagatttatgtgataagcaaaggcatataaggctgctcttttgaacagaacatttcagttatcaggctgtactattacaagagataagaagacaataaggacaatgtaatcacaaacagtgggattccatttgtttattgtacaccagctactttgtgggtatggttcctgactcctcttctacatgaggtttgggaaaaaagtctcaaaccaaatggaacagtgaaagggaaagtaattcatctagcacataagaatagtgattcaaaaccaatgcagaataaatttccatgggtcaataacataaggtgtcagttcagtgttactagagatatgcaaggcataaaatattttcatcaccccatcactaataacatgaaaagctcagacataggatttcccaaattgaaatgaaaacacattcatgcctgcaaaaataattctccttctgcttcatttctcattactttatctaatataaacacaaatgtaaacaaggtaatggtcttcatgtaaaatgaccatatagttaagaattttagtaaaatattgttgttctgtgtattattaaacaaatgcaatgaagtattaaaatagctgatcagtttgaatttcctgtaaagcagtaattccgcatcagaattgtagataaggttgtgaatttattgactcatttcagaacagtgtctgttgacatggcagtcagagcaggtgaatacagatgctctttctgattgcaaaggttatagagctaaattagacagcattatgtgatactagcaaagacaacttctgttataaatcagagggcaaggcttttctgaatcgatgtgataaattactaagtaatgattaccaaaaataattactaagtaataaaagatacagactggtttactgaaataagcaagtgttacatttaataattacctataatctttttttgttaacacataagcaagtgttacctttaataattacctataatctttttttgttaacacataatttggccatttcatatactgtgtacctattttcattccctctctgtgggtcattaaaaaacacaatgtggtggataagaacattgtccaaacttcactgctagttccaatacatagatgatggtgtgtaaactggattgtaggggtagtcatatttgcaagttctacatgttatgctaatatatctagtatggtacacatacacgcccacactttgtggatcttacagtggaataaatagtgtgtccatattaactaaactcaaagtgctatctgaagaggaatggatgttataagcagacagacagactgagttaaactgagtcatgaaaaaatatatattttaaagtttttggaatcatttccagaaactaataaagggaattatttactggtagtattgagtctgtgagattgtagtatatactgaaacaatcttctggatggtggtaaggtcttttttagcaaacacagtaaagagcttatttcatttctgatgctttcaagggcatattccaaagtatcacagatgtcaaatagaatatgctatataaaccaaaaatgtgcatttcagatgacctattacagcaatctcagccaatatgtaatatcacaaaatgtgtcaagtcaatcatataagaggatctaatcattcggctgtatttcatgtaccttcatgttgttgatatattgtgaccacaggaaataggtgccagagcatatgcagttaagttacaggctccacgttgcctaggagggaatcataactacatcagaaaatttttaacagttatatcttaaaaattagaattttatgtaataaataaagcggcaaccaggaatagcaacgcaacaaatatgaaagctaattattatatttagctttcatatttatataatatgatggaaatggaggaggaaaaatgagtcttttgttaaatataaagacaaactataacactccttgataatacaactggaaattttactttagcaagcataaaatagtggaggaaaaaaatccaacttcaagctctttgcactagtgatgattatgtgatatatcaatgtaatatttagccagtggtcattagatgttactgtgcttaaacacatctgatactcatgcattgccttacaggctaaaaatgtaagaggtaggtgttcagtaacctcaagttggaaagatatataatgttagaatcccctgagacaagccatttccctgaaatagaaatttacctcaatactcatgtaatctaagacacttggcgtagtagcaaagaagttgccttcatgttctagtctcatctaattgtgacctttgtctttcatgtacttctgaaatcattttccactttttccactggtgtgattttgaaacaattctgaaatatttcaggtaagattaataacatccaattacaaatatatgtttcaatattttatacgtatgtctactttgaaagttaaaccaatagtatagaaagcctaagaatgaacactgattggacatactcacagaaattaagggaaaaacacatattgtaaaattcctgtcaatgtttgagtagaatacagaagtacatagcagtcttcaatttttaaacacaattatgggcttataactggacgtgacatgcatcatttattagaacaatattatttatttatactaagtaaggatataagatcacagaagcttagtgttataacggagacttcacagacattcataactaatgttttctaaggcaaataagggcataaaccagaactcatggtcagtgcagagtaagtataaaaagttatgtatgaaagacatttatttatagagatttctgaggattctatgccttttcaacttaaagatgagtgtgtcttagaatttgttttatgcatcattggactggggatgatattcaaatgtgcactcagcgtgtcctcacattaaagggcacattgaacagtataggaaaatacatcataaactagaatgttgtacagattcatataactttcccatgtgctctgctgtagagctgaatttatatgcccttaaaaagggataagaatcaattaaatataaatacggaaatatacttatgttaggtcacttagcttcagagcaagatgtcattaacctttatttcacagagaaaaactggaagaaaagaatggtgaacaagaataaaatgataaactttttggcttatagagatgtttcttgggaattttttccacttgtttttatacatgaaaaaaatatcagtcacaatacagacatttctgtagtatttggtctgtgggtaaactggatcccaggcagaatactttttgacacaggcctttttatacatgctttatatatgatgaagctttggtgagatgtgactgcatggtaggatgcattttcctaggataggatatggtgctgcttgtacttgccaccttttatatgaatgtatgtcgctacattggcctgtcttgccaagacatggttgaatgaagcctggtgtgagctgtctatttgaaaagtcactaggatgcatgtttcatttgccgttacataatgccaatttgaacctgtttcctctatatattaacaatccaattgttaagataaaatatactttgcttgaatgaatgattttggtagtaatatgagcgttatccttaaatcaatgttacaatttttgctattactgaaataccgtcacagaggccacattattggctgtctataccattgcctgagtaaaattaggtttttaggtctttttggcatttacttcttttacagctgatgtggaatcaattattcctttatatgttcataagtacaaaatttcactatcttaattacttccaaacaaacaatttccaagcaagggtatgtgtgcctggtttttctgctcctccaattctaagatcgttatttgtttgccttctgtttctcacccaaaaatacagatggttgggaaagatacatcttattgagttgtcctatgcagtctctgtctatatttgcatttctttctattcctatcttgccttttttttttttttttacacagatttggttttcccttccctttgtgaaaaccagaattgagcagcattgtacatcagagatggtacccaggaaatgtctttgttcctcagtatttttcgtcaaaacttccatgcaaagacagtcccagcaaagttgacatacatcccaacctctctcattggcttttctaactttttatagagctattcccctgagaaaagtgaaatgctgagtatgatgggtattgcctgttgataggatagctaaggaaatttgcttttggagaatgtatcttaaataattatacaggaaagtagtcacagtatagtgttctgtttaaggtacatcatgggtacataaatgcctaaaaccttcatcctttggtctatttctctgtaagtgtaaattacatatatattagaaagagagatagaatcaaagaattaggggtgttacagaggcagctttttgctgccttggttttgactgtatcagcatttctattgcagacctctattttcaggggttttagagactcgaccataaaaatttgtttcaggcttaaaagttttgaaagatttttttaggtatctgattttaaacaaatagatcttgtttttatattataggagggaaataaatggagtttactagttcaattttgcgctaatataacttttaataaacttaactttttaaacaaaaacataaaatctaattagttcatagttggttgatgcttttttaaaagaatcaattattgaccttgagaaacttgcctgcttcatcagtatagtaacctatctttaagatattttaaaacgtgtatacctttattaacattatcttgattccagcggtggatcagtatgataatgcagatttatgacatccatataagctatctggtaatatagatttaggaatatatagtatatatgatacatatatatatatatatttactagatagattaaggagaaaaagctcccataaacttagtttgtcaaataaataccatatatttaaaaaatgcacagacatttatcattcagagtcagaatgagattcaagtaattgcaaagggaagttgtctcttgggtaaacaatacacattttatagcttcttgtgaaactaattttttcctttctatattgtggttatgggaaagtaaaagaattaaaattaatacagactttatttaaataacattaaactgtgaagcagagagaaacgccaggaaattaaatatttaggccattatcttgtggttgtctgacaatacttcacctttcttttaattccccatgatgttttcaattatggagagagtattaaaatctagatttaagtttctgcattgttctcattacactcaacactatttcattaagttcttgataatatgtagtcttctgtgtgcaaggaaagaaataaataacacatttatttgctgaatgagttttaaggtgtgcaagttgtagtgatgtttttcccacacaggattctatacacttataccatcttaaatctggcattttttttttcagatagcttctactgacaaacacaaagcttgtttgtgtgcaaatataaggctaaataaatggtgctaaagtgtattatgactgtcagataaaatcaggcaaaattttgtggtgcttaaattaattttttcattgattttattgatcagtgcattgaacagtgtttattattcacaagttgtcttttattagtaaatcaaggcctcatagcacattgttaaataaagtggttgactagtctatgtaacagctcaccaagctactatctcttttaactccttataatgttgcgtcattaaaggtcaaggggtcatgctattaatctcattgctatagaccattaacatgactgaacttttccacaaagtacttatgtttacaatgctataaccctttgactgctgcggcaacctttaaccacacaaatgtcacaagctagaatcatcagcatggttcttgccatggcaatcaaagagttaagggctgtgcagtgatttgttttgtatttattaatttatatttattttgtttccattcaaggaggggattaggggtggggcagtttttgtctgctgtaagtgtcttaacctagggaagggttaaatggctttttatactattgcatcttctgtatttaccatcaattcattgtgttgtaattaaaagaaactgtcaataaataagagaacagaaaaatg

SEQ ID NO: 5827 - DNA, 2696 bp, Homo sapiens
gtggggggagcggtgatctgagctccgagcagctggtcttcgcggctcgctccctccttcgcgctctctcgctccctgccgccgcccgcagggctgcggggctcggtggcatctcccgggcgcggcccgcagtccttgcccctgcctccgggccgctcccgcccccggcgccgctcgctcccccgacccggactcccccatgtatgacgactcctacgtgcccgggtttgaggactcggaggcgggttcagccgactcctacaccagccgcccatctctggactcagacgtctccctggaggaggaccgggagagtgcccggcgtgaagtagagagccaggctcagcagcagctcgaaagggccaagcacaaacctgtggcatttgcggtgaggaccaatgtcagctactgtggcgtactggatgaggagtgcccagtccagggctctggagtcaactttgaggccaaagattttctgcacattaaagagaagtacagcaatgactggtggatcgggcggctagtgaaagagggcggggacatcgccttcatccccagcccccagcgcctggagagcatccggctcaaacaggagcagaaggccaggagatctgggaacccttccagcctgagtgacattggcaaccgacgctcccctccgccatctctagccaagcagaagcaaaagcaggcggaacatgttcccccatatgacgtggtgccctccatgcggcctgtggtgctggtgggaccctctctgaaaggttatgaggtcacagacatgatgcagaaggctctcttcgacttcctcaaacacagatttgatggcaggatctccatcacccgagtcacagccgacctctccctggcaaagcgatctgtgctcaacaatccgggcaagaggaccatcattgagcgctcctctgcccgctccagcattgcggaagtgcagagtgagatcgagcgcatatttgagctggccaaatccctgcagctagtagtgttggacgctgacaccatcaaccacccagcacagctggccaagacctcgctggcccccatcatcgtctttgtcaaagtgtcctcaccaaaggtactccagcgtctcattcgctcccgggggaagtcacagatgaagcacctgaccgtacagatgatggcatatgataagctggttcagtgcccaccggagtcatttgatgtgattctggatgagaaccagctggaggatgcctgtgagcacctggctgagtacctggaggtttactggcgggccacgcaccacccagcccctggccccggacttctgggtcctcccagtgccatccccggacttcagaaccagcagctgctgggggagcgtggcgaggagcactccccccttgagcgggacagcttgatgccctctgatgaggccagcgagagctcccgccaagcctggacaggatcttcacagcgtagctcccgccacctggaggaggactatgcagatgcctaccaggacctgtaccagcctcaccgccaacacacctcggggctgcctagtgctaacgggcatgacccccaagaccggcttctagcccaggactcagagcacaaccacagtgaccggaactggcagcgcaaccggccttggcccaaggatagctactgacagcctcctgctgccctaccctggcaggcacaggcgcagctggctggggggcccactccaggcagggtggcgttagactggcatcaggctggcactaggctcagcccccaaaaccccctgcccagccccagcttcagggctgcctgtggtcccaaggttctgggagaaacaggggaccccctcacctcctgggcagtgacccctactaggctcccattccaggtactagctgtgtgttctgcacccctggcaccttcctctcctcccacacaggaagctgccccactgggcagtgccctcaggccaggatccccttagcagggtccttcccaccagactcagggaagggatgccccattaaagtgacaaaagggtggggtgtgggcaccatggcatgaggaagaaacaaggtccctgagcaggcacaagtcctgacagtcaagggactgctttggcatccagggcctccagtcacctcactgccatacattagaaatgagacaatcaaagcccccccagggtggcacacccatctgtttgctggggtgtggcagccacatccaagactggagcagcaggctggccacgctcgggccagagagagctcacagctgaagctcttggagggaagggctctcctcaccctgccaggaagcttcttaacatgtgacaggaccagggaccaggagcatggtgaagccaagtggcagatgggagccaacctggatgggggtttggggaaggagggcatgtgtagcagagaacttaggggggcctccttgcctttctcattcttttgccctgcatcctgtcatttctgttcttgtccctcatacatctttggagaaccgggctccagactttgttccctgactcatagctgccgcttgttaggttagggttagatggggagagacagggcacagaggacctgtctccccggctactcttgccttatggctctagtgtgtgacctacagagcatgctccacaagcccctgcctcacctcactgtcatcactaataaacatcatgcacagtc

SEQ ID NO: 5828 - DNA, 5862 bp, Homo sapiens
gagtgttgtgataagagcagatgaaagccttatgccacagtagtgcctgtagcagagaaaggattccctcctccacctcagggcccactgctgctgctctccagcctgcagtttcctctaaggctctggattggctggaagagcaacagagggctgggaaagagcttctatatatacctcaggaggaaaggcatcccagacagttttgaagttttcaaagactggctctgctgttaagaagttgtacttaaagcggaggagctaagccacctgccaaaatgtgcaaaggacttgcagctttgccccactcatgcctggaaagggccaaggagattaagatcaagttgggaattctcctccagaagccagactcagttggtgaccttgtcattccgtacaatgagaagccagagaaaccagccaagacccagaaaacctcgctggacgaggccctgcagtggcgtgattccctggacaaactcctgcagaacaactatggacttgccagtttcaaaagtttcctgaagtctgaattcagtgaggaaaaccttgagttctggattgcctgtgaggattacaagaagatcaagtcccctgccaagatggctgagaaggcaaagcaaatttatgaagaattcattcaaacggaggctcctaaagaggtgaatattgaccacttcactaaggacatcacaatgaagaacctggtggaaccttccctgagcagctttgacatggcccagaaaagaatccatgccctgatggaaaaggattctctgcctcgctttgtgcgctctgagttttatcaggagttaatcaagtagtaatttagccaggctatgaaatcatcctgtgagttatttcctccataataaccctgcatttcccattaatctacatatcttcccacagcagctttgctcagtgatacccacatgggaaaaatcccaggggatgttgcttactctttttgcccacactgctttggatacttatctactgtccgaaggccttctttccccactcaattcttcctgccctgttattaattaagatatcttcagcttgtagtcagacacaatcagaatcacagaaaaatcctgcctaaggcaaagaaatataagacaagactatgatatcaatgaatgtgggttaagtaatagatttccagctaaattggtctaaaaaagaatattaagtgtggacagacctatttcaaaggagcttaattgatctcacttgttttagttctgatccagggagatcacccctctaattatttctgaacttggttaataaaagtttataagatttttatgaagcagccactgtatgatattttaagcaaatatgttatttaaaatattgatccttcccttggaccaccttcatgttagttgggtattataaataagagatacaaccatgaatatattatgtttatacaaaatcaatctgaacacaattcataaagatttctcttttataccttcctcactggccccctccacctgcccatagtcaccaaattctgttttaaatcaatgacctaagatcaacaatgaagtattttataaatgtatttatgctgctagactgtgggtcaaatgtttccattttcaaattatttagaattcttatgagtttaaaatttgtaaatttctaaatccaatcatgtaaaatgaaactgttgctccattggagtagtctcccacctaaatatcaagatggctatatgctaaaaagagaaaatatggtcaagtctaaaatggctaattgtcctatgatgctattatcatagactaatgacatttatcttcaaaacaccaaattgtctttagaaaaattaatgtgattacaggtagaggccttctaggtgagacacttttaaggtacactgcattttgcaaaaaaaaaaaaaaaaagtaatcttttagcaaccccagtattccttcactatttcgcttcctgcattagcaaattttacttacagtcaaaagtgcagatttatactcctgacgtgtctcattcacagctaaataataggccataggacttttggtaggtttaaacttttaattctgtatttcatgattataagtcttgctagaattttttctaatctttagtagatttgattaaataatgattcacagaatttagtaacagaatcaaactaagccatgtatgagggtaatcgagatgaggatattaactcaaaagaaatagggtgatttttaaaggattaataaaattctgaaatgttaagtagaagattacattgtctagtcttgtatttcctccttctgttgctctctttcattcacacactctcagtttctcatatttgtagctcatttatttggttatttcctaagaatattgaaagtgaagcaactatgtgactgtattcttcaggtaaacactgactgcgcttgttggattttccctatttttgtgacttcaagaataatatgccctgctgaatacatgccatttcacattctgaaactgggtagagtggttgggtgttctgccaacaattgctagtggtgtgaattcattcatatttgccagtattgctcacttcaaagaaactccttcatcaagcagtccagagctaggccagatcaatgctacaatcatgaagttctcattgcatgcaattgtgtaggattgacaaggaactcagataaaaatttccagggtgcacttccagaaccagcttcaacatatgtctacattgcccccaagttaataaagtgccaaccctttactctctcatacagccagaaatgttagaaatccaaaatcttggtgcattattttttcataaacgctaaaacatttgaagaaacaatttaattatttaaaattcaagtattttattcacattatttgcaatatccaaatgtttaaaaattcccagataattaactagctattacagatctcacctagagggttgatgttatgaagactccagtggactgtactcacaaattgactggacaccctatgaaagtgggtagacctctcagcggaaaataagaagggcttttacctacagggcaggacagggtcccatgagagcagttctgtggagatataaaaagaatggaagaaggaatgccttatagtgatattgtgacattatatctatatatctacatatatctatctatctatatctacatctatataatcttacatttaaaattgtattcctacacatattagaaactcttctaataaatgaagtaaaaaaattaaaaagaatacaaatattccagccccaaatgagaaatcaaacatattaaaattgttcaagaaaatttctttgaacacttctgaaagtttttggaaacttagaaaagagggaaaaaaatccagtgttactagtaatttccatggtaatacagataaaatacattcttttaattctgggaaattagaaaaagtggggtgatctttccaggaaaaacatgtgtaacatctgcttatcactccagctccctcctcctcctcctctccacgttcccttgagtaaatgtctgggaaagcatgaagcttgatgcaagaaccctgttgtactggcgttttcctcccctgtgaaaacgtaactactgttgggagtgaattgaggatgtagaaaggtggtggaaccaaattgtggtcaatggaaataggagaatatggttctcactcttgagaaaaaaacctaagattagcccaggtagttgcctgtaacttcagtttttctgcctgggtttgatatagtttagggttggggttagattaagatctaaattacatcaggacaaagagacagactattaactccacagttaattaaggacgtatgttccatgtttatttgttaaagcagtgtgaatagccttcaagcatgtgaataatcttccatcttccccgccacacatacacacacacactttttgtttctttcaggtagacaccttttaaaatgcagaactaactgaggcatttcagtaactttgctttcaaatcaataaagtcaaatgtatggaaacattttgtgccctactctccataccccgtgtactcaaattctctactgtatgaattatgctttaagtagaattcagtgccaaggagaacttggtgaaataaattattttaattttttttttatcctttacaaagccatggattttatttggttgatgtgtgctctgtacacaagccatttcaataggatggagctgttaattattttccaaagagtaatagacatgcaaaagtttcaataaaaactgggccattaacaaataaattaataaactaataagcattcccttctaggtttttgccaaactgcctatccaataacaaatttgagaatcgttgtaaaagctagttatatttcagagaaatgattttcattattgaaactgttctccctagcaggccattttccctttttcctgggagtttagcaagtttaggagagaatagtcatgaaaagaaagggaagaaaggggagaagggaagaggttaaaaagtaagtgctcagacctatgaacgtaatccctttgctacaaatatttaagagcagctcagcttggttgaaactgagttttgtcatcttccatatttgcaggaaggtattttctgacttgcaatgcagctagatgtaaaattttattttatcatcctagaaagccttgactagaaaaatgaataaatattgagggtttcctgtccatatctggcttgcatgtgccagaaagcagagaatagaaaatgtaatctccaacatccaagcatcgaaacccaaggggtaggcaattctatgtaggttttggacatgaagtttggtgcatcttggtttatgctggctcaactgctattaaacctctctggcttatagtctcttcattctattagacaagcacgtatcgaacacttgcttcgcacaaggctctttagttaacaatttagcagctactgtttgtgttaaacacacttttcaccaaataggttctgaggcaaacgagagcaatgactatttaaagaaaggctttcccagcatcacttacacatcccaaaactaaaaagatcaactcttccaactgagaaaagactcctggctttgaatggaaacttacagcagagagtcacaggccacggcaacaacaacgacaacaacaaacatttggaatattattctcaactcacgttttaataatacatcttattatttttctagtagagaaactacaaatcagcctcttcaacatttatatacagtttaataagcctcttgcaagttacttgttctctcacctgaggtatttttttcctccccaccttgcccctgttcctcccttcctcttctccctttgcaagaggaaatatttaacatatttgggtccaacttcaataatgtaataattaatacattaaaagcatttaacttcctttctagaaaaatgcacaggctaaggcatagacaaaacaaagagaaatgctgagaaatttgccactggagacaagcaatctgaataaatatttgccaaaagttctttttatgtcatatagtgtcaggatttgaaggagctatttttttttaatgttgcaactagcaactcatcttcggaagacacagccaggagaatgaagtagaagtgaaaggtttataaatccatttgtaagcatttatcccatatattttaaattcaagaaaaattgtgtttatctttagaattttgtattcaatactttatgtactatgtgactcatgcttctggataaataaagcaccaaatatgtatctgtaaccacaatcacacatattatattaaatatatatctatataa

SEQ ID NO: 5829 - DNA, 3194 bp, Homo sapiens
atatacaggaggagataaaaaatttagtcaaattacagactagtagtgcttccttagcttcctgtgaaggaaattcttcaaacaaacaagtatcttcggaaagtcaaatgggttttttttctctaagcagtgagagaaatgaatctgttatccattatcctgaatccacagaacctgaaatacagcaagaaatgtccacgtcacaaccagactgcaatgtggatagttgctcagtaagcagtggatatggcaccttttgtatctcagaattaaatctgtacaaatctaaagaccctaaggagttcatggagcacatagatgttcccaaaggacagtatgtagcacctgcggtgccggctgagtcacttgtagatggtgtgaaaaatgagaatttttatatacagactcctgaagagtgtcatgtgtctttaaaggaagatgtatccatttctcctggtgaatttgaacataattttcttggtgaaaataaggtttctgaagtatacagtgggaaaacaaatagtaatgctataacatcatgggcacaaaaactgaagcagaaccaaccaaagagagcacatgtagaagatggaggttcaagatctaaacaaggaaatgagcaaagtaagaagacaccaattgagaaatctgattttgctgctgctacacatcctcgtgctttttacctcagtaaaccagatgaaactccaaatgcttggatgtctgattcaggaacaggattgacttactggaaactagaggaaaaggatatgcaccactctttgcctgaaactttagagaagacgttcatatcattgtcttccacagatgtgtcaccaaaccagtctaatactagtaatgagatgaagctaccgtcactgaaggatatttattataaaaaacaaagggaaaacaagcagttacctgagaggaatctcacttctgcttccaacccaaatcatccaccagaggtcctgactctagatcctacgttacacatgaagccaaagcagcagatttcagggattcaacctcacggccttccgaatgcccttgatgacagaatatccttttccccggactctgttctagagcctagtatgtctagtccctctgacatagactcattttcacaagcaagtaatgtcacttctcagttacctggatttccaaaatatccctcacacacaaaagcttctccggtggactcttggaaaaatcagacattccaaaacgaaagtaggaccagttccacgtttccgtcagtatataccattactagtaatgatatctcggtcaacactgtagatgaagaaaacactgtcatggttgcttcggcctcagtcagtcagtcccagcttccaggtacagccaacagtgtcccagaatgcatttcattgacttccttggaagatcctgtgatattgtctaagattaggcagaatctgaaggaaaagcatgctcgacacatagcagatcttcgagcttattatgaatcagaaataaatagtttgaaacagaagctggaggcaaaagaaatctctggagttgaagattggaagataaccaatcaaattcttgtagacagatgtggccaattagatagtgctttgcatgaagctactagtcgcgtgagaacacttgaaaataagaataacttactggaaattgaagtgaatgatttgagagaacgcttcagtgcagccagcagtgcttccaaaattttgcaggaacgaattgaagaaatgagaacaagcagtaaagaaaaagacaataccatcattcgactaaaatctagactgcaagatttagaagaagcatttgagaatgcttacaaactctcagatgataaagaagctcaactaaaacaagagaacaaaatgtttcaagatcttttaggagagtatgagtcccttggaaaagaacacaggagagtaaaggatgcattaaatacaactgagaacaaattgcttgatgcatatactcagatttctgatttgaaaagaatgatttcaaaacttgaagctcaggtcaagcaagtagaacatgaaaatatgttaagccttcgtcataattctagaattcacgtgagaccctcgcgtgccaacacactagcaacttcagacgtcagcaggcggaaatggctgattccaggtgcagagtattccatctttactggccagcctctggacacccaggacagtaacgtggataaccagctggaggaaacctgtagcctagggcaccgttcacctctggaaaaggattcttcacctggaagttcatcaacaagcttgttgataaaaaagcaaagagagacttcagacacgccgatcatgagagctttaaaagaacttgatgagggaaaaatatttaaaaattgggggacacagacagagaaagaggacacctcaaatataaatcctcggcaaactgaaacttcagttaatgcaagtcgttctccagaaaagtgtgcccaacagagacaaaagagacttaattcggcctcacagagatcatcatctttaccaccttcaaatcgtaaatcaagtactccaacaaaaagagagattatgctaacaccagtgactgtggcttatagtccaaagcgatcccctaaagaaaacttgtccccaggatttagtcatctgcttagcaaaaatgagagcagtccaattcgatttgatatacttttggatgatttagatactgttcctgtgtctacattacaacgtaccaatccaagaaagcaactccagtttcttcctctagatgactcggaagaaaaaacttattctgagaaagccaccgataaccatgttaatcatagctcttgccctgaaccggtgccaaatggagtgaagaaagtatctgtgagaacagcctgggagaagaataaatcagttagctacgaacagtgtaagccggtttcagtcactccacaggggaatgattttgaatatacagcaaaaattcggaccctagctgaaacagaacgattttttgatgaacttacaaaagaaaaggaccagattgaggcagcactaagcaggatgccttctcctggaggacgaatcactttacagacaagattaaatcagacccctcagatatgtgaggaatcaagccataaatgtgcatttgctggacattatgtaccatgtcatctctatgactacagatttcaaggataa

SEQ ID NO: 5830 - DNA, 6164 bp, Homo sapiens
ttacatcttatagcacccagtgaattatgatatggggctgcggtttatttgctctggcgacaatatggcttacttgccgtggaatatcccggtatttcagaagtaacatattatttttaaagagggagctttgctttctctaaatcacatggtgcaaagttgggaatacagtggcctgtaaattacaaatattatttacaaactagaaggaaagctgacatgtgtttgtgcctgtgtgacagtttcactaaggaattccaaaactgtggatagcctgttacttgagaaaaatacacggtggcagtcttgcagatgtttttcccgcctgttagccctccaggttcaaaaactgtttggtgcattttaaggcggcagtctcaccagatcgcaggattctagtctaattggcttctaaccttcaatctaaccttgccggcttccttgcaaagcccggtgcaagggcctctttcaaaatgaacccactggtgtgcctagcagtcggtagaagaagcgggagggcgtccggtctgcacgcccgccgcgaggttacaatgctgaacgcatgagatggaagataccaacgggaggccgaggggatccacggcgcccgcgcgggctccggcttcctcctgctctcggcgccgctgggcgaccgcccatgacccgctcttgcgggctctgtccggttgacaggcgaccctgtggcccggggaagcgcgggagggcgccggcggaaagttgaagagcgtttttctcgccgccgcgtgcattaggagctcgacgagtccgccctgggcttcctggtggggctgggcgggcgggggaggggccgcgcagcagcagcggaagccagacctcggcgataagaggctgcacagcgacatgcaacagtcttttcactgcagctgaatgagttgtggcgcccacaatgctcccatgacaaggagctgacaagttccattttccgtcgcgggcatcttggaatcatgactcccacaatgccttgggcacttggtcgacagtggggccgcctctgaaaaaaaaatgtgagaggttggtactaagaagtgcctttcctgacgtctctgctgcttggaaccgcttctagagcagtctctgcttttgccttgcttgctgccagctagactgtgacgacagcacatccaccctccacctctagcccagacacccccatttctacttataatcaagagaaaagctctaagtatctggcattgccctaggctgctttagtgttaaaagaaaagtttgctgaaaaagtaagatatcttctgccaggaaatcaaggaggaaaaaaaaaatcattttctcgattttgctctaaactgctgcatctgtctatgccaaactaatcaataccgattgcaccaccaaactccattgcaaattcagctgtgaggagattccctttcagacaactttgctgaaagcagcttggaaattcggtgtcgaagggtctgccacgttttcatgcttgcattttgggctccaaattggcactgggaaggggttactgagagcacaaggctgataccaggccctacttttaaacgttcatctacttacaatcctagtatttctctaaaaaccaaaacctctttgaattaacagtttcatgctgtgaatttctagtgggagatcttttccttgatattgacgacacaattttccatgtacttttaaagcagggagtggggaaaagtattttgaggggacattttcatcatcagttcagctttttttttttggttgttgctcttttttgggggggttgggtttgttggtttcactgaaacatttaactacctgtaaaatctaaacatggctgttagtgtcacaccaattcgggacacaaaatggctaacactggaagtatgtagagagttccagagggggacttgctcacggccagacacggaatgtaaatttgcacatccttcgaaaagctgccaagttgaaaatggacgagtaatcgcctgctttgattcattgaaaggccgttgctccagggagaactgcaaatatcttcatccacccccacatttaaaaacgcagttggagataaatggacgcaataacttgattcagcagaagaacatggccatgttggcccagcaaatgcaactagccaatgccatgatgcctggtgccccattacaacccgtggtatgtcgagagtaccaacgtggcaattgcaaccgaggagaaaatgattgtcggtttgctcatcctgctgacagcacaatgattgacaccaatgacaacacagtcactgtgtgtatggattacatcaaagggagatgctctcgggaaaagtgcaaatactttcatccccctgcacatttgcaagccaagatcaaggctgcccaataccaggtcaaccaggctgcagctgcacaggctgcagccaccgcagctgccatgggaattcctcaagctgtacttcccccattaccaaagaggcctgctcttgaaaaaaccaacggtgccaccgcagtctttaacactggtattttccaataccaacaggctctagccaacatgcagttacaacagcatacagcatttctcccaccagttcccatggtgcacggtgctacgccagccactgtgtccgcagcaacaacatctgccacaagtgttcccttcgctgcaacagccacagccaaccagatacccataatatctgccgaacatctgactagccacaagtatgttacccagatgtagaattttcatcactaaacaatcatgctaaagaggaaaggacagtgtgcttggttagagtaaaggacgaggtcattagccatattgtatatatcgtcaagcaacacacacaaaagttcctcagccacaagacatccacatattgcatgttaaccagaagaaaagacaacattttccggaaatccactgcacactgttgcctatacactttgtacatttaattgatatttgtgctgaggtgatattcctgtctaaaagaacaacattgtctttcttttctagcacagagttatgcattcaaagatgcatacctagttagtttcctatatattcatgccatcttgaaaagacagactatggtgtaaccatgattctattatgtattggtacgtctgtagaccaagatataattttttaaaaataagtttatttctttcaaggtttacaaataacaaaggtgcaccttgtatttaaaattgccattatagatgagagcgtgcatgcacagtcatttttgtttaagagtaatatttttaatgtaatagattgtaagacgtggtgagggagggatctgacagagatgaatgtgccaagcaaaaccacaactgtgtatattttaaagcacatcatggctttaagtaccatgttgttaaggattctcatgaagtgccatagactgtacatcaaattagagtattatttcttcagtgttattgttttcagagccacattttgttgcatatttgctagtactaatcagtcaaagggcaccattctttttttttttttttgaaaccaaagctgtctcagaaatggccaatttaactttacagtaacaatagacagcacaacacaaactctctcaatacagataaactcacacatactggagatatatatataatagatatatataaaattattttaatgcattgtagtgtaatatttatgcatactatactgtataacatgttattcaaaagggattgccatttctgagacacagtaacaaaaaaatgaggaaattattttgcttctatttatagcctctgtcaaaagtcaaaagactataaatgctttgcaaaaatggtttcacgtttgcttaaatgcttcatcacagtcacattcaaaatagtgactctaaacaaagaagaaagcagcactgtcatcagatgcatgataaaccaaaatatgaaaatgggaaatgtttaattaacctagtaattgggtgggttaagtacatgggtgaattttatatgtgatttttgttttgttttgttttgttcagattaactgcttatagccttagaaagccttttacaaaattaaaaaaaaaatagatgtgcattcagtttttaagaatggaatcatccaaaggaattcctttttttgaggtttggatgttgcagctagtaaaggatatttttgctctgttcagcagttctaaaaattgctgaagtaggggccaggtcactggtagttatagtatggaatgggagaagtgaaagttcagttatagaactttccatacttccaagtttactgcaagtttttatgcttgagagagatgctttctaatataagactgatgtgttgattttactgattgtactgtacatctattaaagccttagattattacattacgggttggaacccataccaatgtaatttcaatcgtgttaagaaagtaatggtgacttcacatgttattgtagttagttacattatagaatattacttatttttcttgttaaaatgtagtttttcatttcctacatttattagattttcattttctattaacaattgaataccatttcagtttatagacttgttttattagattttaccaatgaatttttcaaaatacaaaaaaaagtagtttttccttcataacatactcagttttgaattacatgtagtgtcacatgaatattcgtattgttaactaaatgatttatattttactgatttaatattacagtgtaagaatgtcagtcattgttagttcttgtctagttttcattaaaagaacaaagatcttttatatggatatcttataaatatataatcattgctaagtaagaagttaagttgttgctatcgcaacaatcctggcagacaattgagtaatattttgatgatttattttgtttgtaattagttattataagaagatctagatcctagatattagaataaaatttattttctactgtatccatttcaaatgttaaaatattgtttaatatttttgaaatccctgagtatcaggccttgttataaataagctgcataatcaataaatagaacaagggactttttgttgataatccaaatactcaaagtttacgtaatgaaaattatagcgtgtgtgcaaactcttgagggttgattatgctgcaatttagcatgttggaacgtctagggagaaggttgactttttgcacttctgtatatagtcaaaagagagaaacctgtataatagtaagatcttattttgaataaaaacgtctataattacaaggagttttgttaaggctaatacaatgacagactgagcaaaattgcttgcaaaagtggcacagagttagcactccataccccttcaaacatgttgctttgctttcttgtggacagcttgtagtttgccaggattttttcagctggaaagatacgccatcctttcaaaccctcatgactgacaaaaactccatggggccaaatctgcctgaagatcattaccaaaaatagcaggtacttctaccattaaggtgaaatcatggatcagatattccttacatttttcaaaactactgcatgtttaaaacttcaacaaaaaaagagagaaagaactatactaagaacatatattattcagatcagtttctgccaatttcagtggtttattgttcacaaaaaaatcttcaaaacaagtattgactttcacaaaatttaaatcataaacaggcaaaccaaacagcacactgtagctatagttgttatgtgattgttttttaattgctgtaggatcctgttctttcagcaggtgaaaaataaaacgcagttcaaatttcatggttttaattttcaactcagaagcactcaaaaatgcaaaatgtgataatgggcacttgtttaaaagaattagtgtatccagccttcactccagctggttaaaaatgttgcacttatcagcaaccctaccactttcatctgctgaaaggacaaatgtgcttggttttactattatgtaatcacaacttactttctgcttgtagttgcttaaaattatgtattttgtcttgggctgcaatttgttttatgcttattttattattactgcagtagttgactttgctgtatggaaaaataaagtgaaattgccctaataaaacttctctttcttaagt

SEQ ID NO: 5831 - DNA, 4336 bp, Homo sapiens
acccactcccgctgccccgtccggcccgcgccgcttcctcgcagcagctgctcccggctccgcggccgcagcccgcgtggacgctccgagcgccccccgacggacgggaccggctccctggcggtcgggcgagcgggcggcaacgctgcccggccggcagcgctggggttaagtggcccaagtaaacctagctcggcgatcggcgccggagattcgcgagcccagcgccctgcacggccgccagccggcctcccgccagccagccccgacccgcggctccgccgcccagccgcgccccagccagccctgcggcaggaaagcatgaagggagacaccaggcatctcaatggagaggaggacgccggcgggagggaagactcgatcctcgtcaacggggcctgcagcgaccagtcctccgactcgcccccaatcctggaggctatccgcaccccggagatcagaggccgaagatcaagctcgcgactctccaagagggaggtgtccagtctgctaagctacacacaggacttgacaggcgatggcgacggggaagatggggatggctctgacaccccagtcatgccaaagctcttccgggaaaccaggactcgttcagaaagcccagctgtccgaactcgaaataacaacagtgtctccagccgggagaggcacaggccttccccacgttccacccgaggccggcagggccgcaaccatgtggacgagtcccccgtggagttcccggctaccaggtccctgagacggcgggcaacagcatcggcaggaacgccatggccgtcccctcccagctcttaccttaccatcgacctcacagacgacacagaggacacacatgggacgccccagagcagcagtaccccctacgcccgcctagcccaggacagccagcaggggggcatggagtccccgcaggtggaggcagacagtggagatggagacagttcagagtatcaggatgggaaggagtttggaataggggacctcgtgtggggaaagatcaagggcttctcctggtggcccgccatggtggtgtcttggaaggccacctccaagcgacaggctatgtctggcatgcggtgggtccagtggtttggcgatggcaagttctccgaggtctctgcagacaaactggtggcactggggctgttcagccagcactttaatttggccaccttcaataagctcgtctcctatcgaaaagccatgtaccatgctctggagaaagctagggtgcgagctggcaagaccttccccagcagccctggagactcattggaggaccagctgaagcccatgttggagtgggcccacgggggcttcaagcccactgggatcgagggcctcaaacccaacaacacgcaaccagtggttaataagtcgaaggtgcgtcgtgcaggcagtaggaaattagaatcaaggaaatacgagaacaagactcgaagacgcacagctgacgactcagccacctctgactactgccccgcacccaagcgcctcaagacaaattgctataacaacggcaaagaccgaggggatgaagatcagagccgagaacaaatggcttcagatgttgccaacaacaagagcagcctggaagatggctgtttgtcttgtggcaggaaaaaccccgtgtccttccaccctctctttgagggggggctctgtcagacatgccgggatcgcttccttgagctgttttacatgtatgatgacgatggctatcagtcttactgcactgtgtgctgcgagggccgagagctgctgctttgcagcaacacgagctgctgccggtgtttctgtgtggagtgcctggaggtgctggtgggcacaggcacagcggccgaggccaagcttcaggagccctggagctgttacatgtgtctcccgcagcgctgtcatggcgtcctgcggcgccggaaggactggaacgtgcgcctgcaggccttcttcaccagtgacacggggcttgaatatgaagcccccaagctgtaccctgccattcccgcagcccgaaggcggcccattcgagtcctgtcattgtttgatggcatcgcgacaggctacctagtcctcaaagagttgggcataaaggtaggaaagtacgtcgcttctgaagtgtgtgaggagtccattgctgttggaaccgtgaagcacgaggggaatatcaaatacgtgaacgacgtgaggaacatcacaaagaaaaatattgaagaatggggcccatttgacttggtgattggcggaagcccatgcaacgatctctcaaatgtgaatccagccaggaaaggcctgtatgagggtacaggccggctcttcttcgaattttaccacctgctgaattactcacgccccaaggagggtgatgaccggccgttcttctggatgtttgagaatgttgtagccatgaaggttggcgacaagagggacatctcacggttcctggagtgtaatccagtgatgattgatgccatcaaagtttctgctgctcacagggcccgatacttctggggcaacctacccgggatgaacaggcccgtgatagcatcaaagaatgataaactcgagctgcaggactgcttggaatacaataggatagccaagttaaagaaagtacagacaataaccaccaagtcgaactcgatcaaacaggggaaaaaccaacttttccctgttgtcatgaatggcaaagaagatgttttgtggtgcactgagctcgaaaggatctttggctttcctgtgcactacacagacgtgtccaacatgggccgtggtgcccgccagaagctgctgggaaggtcctggagcgtgcctgtcatccgacacctcttcgcccctctgaaggactactttgcatgtgaatagttccagccaggccccaagcccactggggtgtgtggcagagccaggacccaggaggtgtgattcctgaaggcatccccaggccctgctcttcctcagctgtgtgggtcataccgtgtacctcagttccctcttgctcagtgggggcagagccacctgactcttgcaggggtagcctgaggtgccgcctccttgtgcacaaatcagacctggctgcttggagcagcctaacacggtgctcattttttcttctcctaaaactttaaaacttgaagtaggtagcaacgtggctttttttttttcccttcctgggtctaccactcagagaaacaatggctaagataccaaaaccacagtgccgacagctctccaatactcaggttaatgctgaaaaatcatccaagacagttattgcaagagtttaatttttgaaaactggctactgctctgtgtttacagacgtgtgcagttgtaggcatgtagctacaggacatttttaagggcccaggatcgttttttcccagggcaagcagaagagaaaatgttgtatatgtcttttacccggcacattccccttgcctaaatacaagggctggagtctgcacgggacctattagagtattttccacaatgatgatgatttcagcagggatgacgtcatcatcacattcagggctattttttcccccacaaacccaagggcaggggccactcttagctaaatccctccccgtgactgcaatagaaccctctggggagctcaggaaggggtgtgctgagttctataatataagctgccatatattttgtagacaagtatggctcctccatatctccctcttccctaggagaggagtgtgaagcaaggagcttagataagacaccccctcaaacccattccctctccaggagacctaccctccacaggcacaggtccccagatgagaagtctgctaccctcatttctcatctttttactaaactcagaggcagtgacagcagtcagggacagacatacatttctcataccttccccacatctgagagatgacagggaaaactgcaaagctcggtgctccctttggagattttttaatccttttttattccataagaagtcgtttttagggagaacgggaattcagacaagctgcatttcagaaatgctgtcataatggtttttaacaccttttactcttcttactggtgctattttgtagaataaggaacaacgttgacaagttttgtggggctttttatacactttttaaaatctcaaacttctatttttatgtttaacgttttcattaaaattttttttgtaactggagccacgacgtaacaaatatggggaaaaaactgtgccttgtttcaacagtttttgctaatttttaggctgaaagatgacggatgcctagagtttaccttatgtttaattaaaatcagtatttgtcta

SEQ ID NO: 5832 - DNA, 3002 bp, Homo sapiens
caggagaagaggacaaagatactcagagagaaaaagtaaaagaccgaagaaggaggctggagagaccaggatccttccagctgaacaaagtcagccacaaagcagactagccagccggctacaattggagtcagagtcccaaagacatgggcttgttagagtgctgtgcaagatgtctggtaggggccccctttgcttccctggtggccactggattgtgtttctttggggtggcactgttctgtggctgtggacatgaagccctcactggcacagaaaagctaattgagacctatttctccaaaaactaccaagactatgagtatctcatcaatgtgatccatgccttccagtatgtcatctatggaactgcctctttcttcttcctttatggggccctcctgctggctgagggcttctacaccaccggcgcagtcaggcagatctttggcgactacaagaccaccatctgcggcaagggcctgagcgcaacggtaacagggggccagaaggggaggggttccagaggccaacatcaagctcattctttggagcgggtgtgtcattgtttgggaaaatggctaggacatcccgacaagtttgtgggcatcacctatgccctgaccgttgtgtggctcctggtgtttgcctgctctgctgtgcctgtgtacatttacttcaacacctggaccacctgccagtctattgccttccccagcaagacctctgccagtataggcagtctctgtgctgatgccagaatgtatggtgttctcccatggaatgctttccctggcaaggtttgtggctccaaccttctgtccatctgcaaaacagctgagttccaaatgaccttccacctgtttattgctgcatttgtgggggctgcagctacactggtttccctgctcaccttcatgattgctgccacttacaactttgccgtccttaaactcatgggccgaggcaccaagttctgatcccccgtagaaatccccctttctctaatagcgaggctctaaccacacagcctacaatgctgcgtctcccatcttaactctttgcctttgccaccaactggccctcttcttacttgatgagtgtaacaagaaaggagagtcttgcagtgattaaggtctctctttggactctcccctcttatgtacctcttttagtcattttgcttcatagctggttcctgctagaaatgggaaatgcctaagaagatgacttcccaactgcaagtcacaaaggaatggaggctctaattgaattttcaagcatctcctgaggatcagaaagtaatttcttctcaaagggtacttccactgatggaaacaaagtggaaggaaagatgctcaggtacagagaaggaatgtctttggtcctcttgccatctataggggccaaatatattctctttggtgtacaaaatggaattcattctggtctctctattaccactgaagatagaagaaaaaagaatgtcagaaaaacaataagagcgtttgcccaaatctgcctattgcagctgggagaagggggtcaaagcaaggatctttcacccacagaaagagagcactgaccccgatggcgatggactactgaagccctaactcagccaaccttacttacagcataagggagcgtagaatctgtgtagacgaagggggcatctggccttacacctcgttagggaagagaaacagggtgttgtcagcatcttctcactcccttctccttgataacagctaccatgacaaccctgtggtttccaaggagctgagaatagaaggaaactagcttacatgagaacagactggcctgaggagcagcagttgctggtggctaatggtgtaacctgagatggccctctggtagacacaggatagataactctttggatagcatgtctttttttctgttaattagttgtgtactctggcctctgtcatatcttcacaatggtgctcatttcatgggggtattatccattcagtcatcgtaggtgatttgaaggtcttgatttgttttagaatgatgcacatttcatgtattccagtttgtttattacttatttggggttgcatcagaaatgtctggagaataattctttgattatgactgttttttaaactaggaaaattggacattaagcatcacaaatgatattaaaaattggctagttgaatctattgggattttctacaagtattctgcctttgcagaaacagatttggtgaatttgaatctcaatttgagtaatctgatcgttctttctagctaatggaaaatgattttacttagcaatgttatcttggtgtgttaagagttaggtttaacataaaggttattttctcctgatatagatcacataacagaatgcaccagtcatcagctattcagttggtaagcttccaggaaaaaggacaggcagaaagagtttgagacctgaatagctcccagatttcagtcttttcctgtttttgttaactttgggttaaaaaaaaaaaaagtctgattggttttaattgaaggaaagatttgtactacagttcttttgttgtaaagagttgtgttgttcttttcccccaaagtggtttcagcaatatttaaggagatgtaagagctttacaaaaagacacttgatacttgttttcaaaccagtatacaagataagcttccaggctgcatagaaggaggagagggaaaatgttttgtaagaaaccaatcaagataaaggacagtgaagtaatccgtaccttgtgttttgttttgatttaataacataacaaataaccaacccttccctgaaaacctcacatgcatacatacacatatatacacacacaaagagagttaatcaactgaaagtgtttccttcatttctgatatagaattgcaattttaacacacataaaggataaacttttagaaacttatcttacaaagtgtattttataaaattaaagaaaataaaattaagaatgttctcaatcaaa

SEQ ID NO: 5833 - DNA, 3021 bp, Homo sapiens
ggggttggaatcccgcttctcctcggcagcagtaggctcgcaagtcgctggggttaggtggggcaagagtttcgccggcgcatcagcgctgcttcggactgtttgcaacgtgtttccagcgagctgggagcggggttgtgactgcgagtcgtctgggggagggggacttgtttttcttttcctctagagacctcggcttgcaactggatcaaacgctgtcgaaaggatgtaaataggcagagcaactgttaccaagaaggccaccacccccacccaaaggcagtgaggagtgtggggcttcgtctgggctcccccgagtctcaacagtaatcaacagtcaggtgttgattgcaacttttcaaggtcagccaccgggagtagcctattccctctaggaaccttggagggcataccttgctgggactcaacttggctgagaaatgcacaagatgccaaaggaggaaggattatagggggcgtgtgtgtgacccccaagaccgatcttccgctatcaccctaatctccggttccccgctacccgggcgggggtgagtatgtgacatgtgcctaactctcagcagcaacttcggcagcaggtgtcgatcctaactaagcaggagctgcggctgccgggtgtgccctcaccaagccatgcgagccccgggcgcgcttctcgcccgcatgtcgcggctactgcttctgctactgctcaaggtgtctgcctcttctgccctcggggtcgcccctgcgtccagaaacgaaacttgtctgggggagagctgtgcacctacagtgatccagcgccgcggcagggacgcctggggaccgggaaattctgcaagagacgttctgcgagcccgagcacccagggaggagcagggggcagcgtttcttgcgggaccctcctgggacctgccggcggccccgggccgtgacccggctgcaggcagaggggcggaggcgtcggcagccggacccccgggacctccaaccaggccacctggcccctggaggtggaaaggtgctcggggtcaggagccttctgaaactttggggagagggaaccccacggccctccagctcttccttcagatctcagaggaggaagagaagggtcccagaggcgctggcatttccgggcgtagccaggagcagagtgtgaagacagtccccggagccagcgatcttttttactggccaaggagagccgggaaactccagggttcccaccacaagcccctgtccaagacggccaatggactggcggggcacgaagggtggacaattgcactcccgggccgggcgctggcccagaatggatccttgggtgaaggaatccatgagcctgggggtccccgccggggaaacagcacgaaccggcgtgtgagactgaagaaccccttctacccgctgacccaggagtcctatggagcctacgcggtcatgtgtctgtccgtggtgatcttcgggaccggcatcattggcaacctggcggtgatgtgcatcgtgtgccacaactactacatgcggagcatctccaactccctcttggccaacctggccttctgggactttctcatcatcttcttctgccttccgctggtcatcttccacgagctgaccaagaagtggctgctggaggacttctcctgcaagatcgtgccctatatagaggtcgcttctctgggagtcaccactttcaccttatgtgctctgtgcatagaccgcttccgtgctgccaccaacgtacagatgtactacgaaatgatcgaaaactgttcctcaacaactgccaaacttgctgttatatgggtgggagctctattgttagcacttccagaagttgttctccgccagctgagcaaggaggatttggggtttagtggccgagctccggcagaaaggtgcattattaagatctctcctgatttaccagacaccatctatgttctagccctcacctacgacagtgcgagactgtggtggtattttggctgttacttttgtttgcccacgcttttcaccatcacctgctctctagtgactgcgaggaaaatccgcaaagcagagaaagcctgtacccgagggaataaacggcagattcaactagagagtcagatgaactgtacagtagtggcactgaccattttatatggattttgcattattcctgaaaatatctgcaacattgttactgcctacatggctacaggggtttcacagcagacaatggacctccttaatatcatcagccagttccttttgttctttaagtcctgtgtcaccccagtcctccttttctgtctctgcaaacccttcagtcgggccttcatggagtgctgctgctgttgctgtgaggaatgcattcagaagtcttcaacggtgaccagtgatgacaatgacaacgagtacaccacggaactcgaactctcgcctttcagtaccatacgccgtgaaatgtccacttttgcttctgtcggaactcattgctgaaggacagtacttggttgggtcagatttatttgtttgattttcatatcccgtgaaagtttttaattcatatttttccttatagggaaaaatgcaaaaaagaaacaataaagaaagaaatattaactactgtagaactgattttacaaattaatatttgtgctttgaaaaaaagtttctatttagttatttaagaagaatgagaaggccaatagttttagattattttatctggtatggtgctaatattttatttgaaaaaagttactgcaacttaacttaaaattgctaacgttttttcttcttttaaaaatacaattattgtatattgattatagcaatgtgattttgtaggttattttatatttgagttgtgattgaaagtatgttgtatatggtattgtgagatgatttgtacttggaagcattcacaaagtagcaccaaataaattacactttattctttaatgtcattgtcaatctacttttaaccaatattcaataaatcttctaattgccttaaagatacaa

SEQ ID NO: 5834 - DNA, 3195 bp, Homo sapiens
aacagctgcagccggcgctgggcccgcctggaatgcgggaacaggctgcacaccaggacttttatggaaacttgctgctggagacggcggcggcggcggcggcagcggcagccagaggactcccagcggctggagcagaagtgttagcggccagagctcccagacccctacccacagccaggcgggacgcgcacagtccctccacgcggaaagaagtaccttcgccggtcaccggctcctgcagggtgcaaatatatacagagcttcataatcagcccaagaccacatagagcaaacatgaatgatatttcccaaaaggctgagattaaagaaatgcttgcttctgatgatgaggaagatgtatcttctaaagtagaaaaggcttatgttccaaaattaacaggaactgtgaagggtagatttgctgaaatggagaaacaaagacaagaggaacaaaggaagagaacggaggaggaacgaaaacgcagaattgagcaggatatgttagaaaagaggaaaatacagcgtgaattagcaaaaagggctgaacagattgaggacataaacaatacgggaactgaatcagcatcagaggaaggagatgattcactacttataactgtggtacctgtcaaatcatataaaacatctggaaaaatgaaaaagaattttgaggatctagaaaaagaacgtgaagagaaagaaaggatcaagtacgaggaagataaaagaataagatatgaagaacaacgaccatctctcaaggaagcaaagtgtctttcattagttatggatgatgaaatagaaagtgaagcaaaaaaagaatcactttctcccggaaaattgaaactaacttttgaagaactggagcgacaaagacaagaaaaccgaaagaagcaagctgaagaggaagcaagaaaacgtttagaagaagagaagcgtgcttttgaagaagcaaggcggcaaatggtaaatgaagatgaggaaaaccaagacacagcaaaaatttttaaagggtaccgccctggtaaactcaaactcagttttgaagaaatggaaaggcaaagaagagaagatgaaaaaaggaaagcagaagaagaagccagaaggagaatagaggaagaaaagaaggcgtttgctgaagcaaggagaaatatggtagtagatgatgactccccagagatgtataagacaatctctcaagaatttcttacaccgggaaaactggaaattaattttgaagaattattaaaacaaaaaatggaagaagaaaaacgacgaacagaggaggaacggaagcataagctagaaatggagaaacaagaatttgaacaactgagacaggaaatgggagaggaagaggaagaaaatgaaacctttggattgagcagagaatatgaagaactgatcaaattaaaaaggagtggctctattcaagctaaaaacctaaaaagcaagtttgaaaaaattggacagttgtctgaaaaagaaatacagaaaaaaatagaagaagagcgagcaagaaggagagcaattgaccttgaaattaaagagcgagaagctgaaaattttcatgaggaagatgatgttgatgttaggcctgcaagaaaaagcgaggctccatttactcacaaagtgaatatgaaagctagatttgaacaaatggctaaggcaagagaagaagaagaacaaagaagaattgaagaacaaaagttactacgcatgcagtttgaacaaagggaaattgatgcagcactacaaaagaaaagagaagaggaggaggaggaagaaggtagcatcatgaatggctccactgctgaagatgaagagcaaaccagatcaggagctccatggttcaagaagcctcttaaaaacacatcagttgtagacagtgagccagtcagatttacggttaaagtaacaggagaacccaaaccagaaattacatggtggtttgaaggagaaatactgcaggatggagaagactatcaatatattgaaaggggagaaacttactgcctttacttaccagaaactttcccagaagatggaggagagtatatgtgtaaagcagtcaacaataaaggatctgcagctagtacctgtattcttaccattgaaagtaagaattaatcactctttttatcttttattctattaatttttttttccttaaaatcacttttcttcttctcttttttagctgatgactactagctcccctcccctctccctggaactttctctttcactccaactttcttactacatccatcttttctgtggcggggccaaaaaaggaaaccaggagtgccactatgctgacttcttattccttttcataacagtcttcaaagcacagctcatctaaagaatgcctacttcttttccaaataagcatcagatttatcgcctattatgcagtaacagtcaataaaatgtacttatgggggggaattactcaattattctatcagaacctattataaagactgtatttcccatagacgtttacagcaactatgtttaaaaaacaaaaacaaaaaaaaaacacacaaacctaagtagaatacattattttgcatgaaggaatgtcatttctgagctttttacacctaaaattaggctgaaatagctgagataattaatttggaacctatcaatttgagtggactttttctttagtagtacaccattttggttgttgtagtttcaaagtctttctgaagcagatatattgggattggagcggggtggggaaaactgtcactcctttcagaggaaaaggggaggagcatggagaaaaacaaaaattaaaggacttaaagaatggctatacagtgttgagtgttgaggatattaaacatgttatttttcaaacgtatgtaatatatattaaatttataaagcaaatttatgttgtgatcttgcctgaacaaattatattttaatgaaaaaactttctattaatagttcacgcaagagaaaacactttcaacatagtcgaaggcttcaagatctaagtgtatcagacttagggaaaaagtggcacaaccttcgatttaaaattctagtctttaaaatgagtttgtaaataattagctattacgttctattaagttgttttatattttaattttctggaagacaattttattttacaacgtgaacccaaataaagtaacttctgtattt

SEQ ID NO: 5835 - DNA, 4349 bp, Homo sapiens
acctgcacttctgggggcgtcgagcctggcggtagaatcttcccagtaggcggcgcgggagggaaaagaggattgaggggctaggccgggcggatcccgtcctcccccgatgtgagcagttttccgaaaccccgtcaggcgaaggctgcccagagaggtggagtcggtagcggggccgggaacatgaggcagtctctcctattcctgaccagcgtggttcctttcgtgctggcgccgcgacctccggatgacccgggcttcggcccccaccagagactcgagaagcttgattctttgctctcagactacgatattctctctttatctaatatccagcagcattcggtaagaaaaagagatctacagacttcaacacatgtagaaacactactaactttttcagctttgaaaaggcattttaaattatacctgacatcaagtactgaacgtttttcacaaaatttcaaggtcgtggtggtggatggtaaaaacgaaagcgagtacactgtaaaatggcaggacttcttcactggacacgtggttggtgagcctgactctagggttctagcccacataagagatgatgatgttataatcagaatcaacacagatggggccgaatataacatagagccactttggagatttgttaatgataccaaagacaaaagaatgttagtttataaatctgaagatatcaagaatgtttcacgtttgcagtctccaaaagtgtgtggttatttaaaagtggataatgaagagttgctcccaaaagggttagtagacagagaaccacctgaagagcttgttcatcgagtgaaaagaagagctgacccagatcccatgaagaacacgtgtaaattattggtggtagcagatcatcgcttctacagatacatgggcagaggggaagagagtacaactacaaattacttaatagagctaattgacagagttgatgacatctatcggaacacttcatgggataatgcaggttttaaaggctatggaatacagatagagcagattcgcattctcaagtctccacaagaggtaaaacctggtgaaaagcactacaacatggcaaaaagttacccaaatgaagaaaaggatgcttgggatgtgaagatgttgctagagcaatttagctttgatatagctgaggaagcatctaaagtttgcttggcacaccttttcacataccaagattttgatatgggaactcttggattagcttatgttggctctcccagagcaaacagccatggaggtgtttgtccaaaggcttattatagcccagttgggaagaaaaatatctatttgaatagtggtttgacgagcacaaagaattatggtaaaaccatccttacaaaggaagctgacctggttacaactcatgaattgggacataattttggagcagaacatgatccggatggtctagcagaatgtgccccgaatgaggaccagggagggaaatatgtcatgtatcccatagctgtgagtggcgatcacgagaacaataagatgttttcaaactgcagtaaacaatcaatctataagaccattgaaagtaaggcccaggagtgttttcaagaacgcagcaataaagtttgtgggaactcgagggtggatgaaggagaagagtgtgatcctggcatcatgtatctgaacaacgacacctgctgcaacagcgactgcacgttgaaggaaggtgtccagtgcagtgacaggaacagtccttgctgtaaaaactgtcagtttgagactgcccagaagaagtgccaggaggcgattaatgctacttgcaaaggcgtgtcctactgcacaggtaatagcagtgagtgcccgcctccaggaaatgctgaagatgacactgtttgcttggatcttggcaagtgtaaggatgggaaatgcatccctttctgcgagagggaacagcagctggagtcctgtgcatgtaatgaaactgacaactcctgcaaggtgtgctgcagggacctttctggccgctgtgtgccctatgtcgatgctgaacaaaagaacttatttttgaggaaaggaaagccctgtacagtaggattttgtgacatgaatggcaaatgtgagaaacgagtacaggatgtaattgaacgattttgggatttcattgaccagctgagcatcaatacttttggaaagtttttagcagacaacatcgttgggtctgtcctggttttctccttgatattttggattcctttcagcattcttgtccattgtgtggataagaaattggataaacagtatgaatctctgtctctgtttcaccccagtaacgtcgaaatgctgagcagcatggattctgcatcggttcgcattatcaaaccctttcctgcgccccagactccaggccgcctgcagcctgcccctgtgatcccttcggcgccagcagctccaaaactggaccaccagagaatggacaccatccaggaagaccccagcacagactcacatatggacgaggatgggtttgagaaggaccccttcccaaatagcagcacagctgccaagtcatttgaggatctcacggaccatccggtcaccagaagtgaaaaggctgcctcctttaaactgcagcgtcagaatcgtgttgacagcaaagaaacagagtgctaatttagttctcagctcttctgacttaagtgtgcaaaatatttttatagatttgacctacaaatcaatcacagcttgtattttgtgaagactgggaagtgacttagcagatgctggtcatgtgtttgaacttcctgcaggtaaacagttcttgtgtggtttggcccttctccttttgaaaaggtaaggtgaaggtgaatctagcttattttgaggctttcaggttttagtttttaaaatatcttttgacctgtggtgcaaaagcagaaaatacagctggattgggttatgaatatttacgtttttgtaaattaatcttttatattgataacagcactgactagggaaatgatcagtttttttttatacactgtaatgaaccgctgaatatgaggcatttggcatttatttgtgatgacaactggaatagttttttttttttttttttttttttgccttcaactaaaaacaaaggagataaatctagtatacattgtctctaaattgtgggtctatttctagttattacccagagtttttatgtagcagggaaaatatatatctaaatttagaaatcatttgggttaatatggctcttcataattctaagactaatgctctctagaaacctaaccacctaccttacagtgagggctatacatggtagccagttgaatttatggaatctaccaactgtttagggccctgatttgctgggcagtttttctgtattttataagtatcttcatgtatccctgttactgatagggatacatgctcttagaaaattcactattggctgggagtggtggctcatgcctgtaatcccagcacttggagaggctgaggttgcgccactacactccagcctgggtgacagagtgagactctgcctcaaaaaaaaaaaaaaaaaaaaaaaattcactatctacaaacctagaatatttaaaatacaaagattgcctgttttcaaacactattgaataagagggtgagatatttcttaacaacaacaacaacaaaaaaaacaggttgttttgaatgtgatgagccagccaggagatagaatactacctgcccttagggttgggggctgtccccacaagacttgatacttcagaaaccctttttattgacccacaagcagatatttgaattacttcttactttattgctccaggattctggatgggctgcatttactgtgtgaaggataaaaatcattagcctggattctgatttctataaattgccattaaaagctttttttcccctaagaactgaaatgtgctcaccagccaaaacattttaacttgtaaattttgagggcagttaaccaaacctgtgactaatcatatctcctcctaccccccatttccaaggacatttgttactcagatacttgttatactaatacttgaacttgtaccttatggtatttgctatcttttaactagtcatgatattcttatactttagttacacttttggaatttgatacaaggttgagtggggtgtgtgggtgtatgtatgagtgaaacagttctcaaaagaatgtaagaaaaaccatttttataaaattgtgactttttaaaaacatagtctttgtcatttatagaattaacaagctgctcagggtatattttatagctgtagcactgatatctgcattaataaatactgtcgaaacacaa

SEQ ID NO: 5836 - DNA, 2961 bp, Homo sapiens
aatatttatatttcctctgtcttttaaaactgaacaccgaggtgggttttgtggtgggtggtgaacggacaggtttgggcctcgatcccccacccgaccctagcacccacaggtgggggtgccccctctgctgatgcgcctcctccctcagcaccatggacctgctggactggagcagcctcatcgacagcaggaccaagctgtccaagcacttggtagtccccaacgcacaggtaacacctccgctcctcagtgaggcccagctcagcagggcgctgcgctaagaagggaattcagcctgccacgtgtgtctcttgttgcctaccctgggaacttaacatgaccaaaatcactgcacactatggccccacagaccccctgtggtccagggggaagaagacaagcccactagtgtccacagagtgcttggcgggacagagacccacgcggagccttaagacaccacaaggagagggggtctgggggccttccccaagtcatctgtcttgtgcatcaggtcaccccaaacttcagaggcctgaaacggcagcagccactctgcttctgcctcatggttctggggttgacagggctcagctgggcagtcctcccctggggtctcctgggtagctgtactcacagagtggtggcgctgggacctgggggaggcacccattcacatgtctgggagttggtgctggctgtggcttgggctttttcccaacatggcagctgggctctaagggccagtgtcacctgagacgtgagagccaggcagaagctgggtgaccttttcctgcctcgcctcagaagtcacacggtgtcttttctggcaagttctgtttgttagaagcatgtcaccaggccagcctgtatacagcggggagaggaatgagactcatctgcctgtgggaggggggcccaggacctggcagactgcttgaaaccacagcttaaactgggattcaaagaaagaacagaagcaccttcagaaaacatcctgcagaggcagctttccatgacacatctagccccagtccactaagggcccagcctcaaacttagagcccccgacccagagcctcggggcgcagtgcgtacagtgtggctgtgcaccaaggccaccagctgttggagactttagcatggtgtagcaagggatagagtggtactgtttgtgcccagtgaggcaaggctgctggggccagcaaaggggtgagcgggaggccctgcgggatgggtccccacggcctctgagcaccagcaacttgaaggcctcatcctggtggttgccctggtccctggctacgtgtcagcacgtgctgcacaactgccctgtctgcctgtagccaggggtcttcctcctgggccctctgcctgctccgggtggagcccttctgtttgacgattgggtgatcagtgttcacttgttcaatgtcacatgggagttgcagggggctctcccacaacggtggggcctctgtgggaactggggagtacacacttcggagtgcaggcctggactgagcctggggcccactgacatgggcactgagctccctcgtggtacccctaggccccgcatagggcagtgcactggctgcgttggaggttcaggggcactgtgctgcttgtccaggtggccctccctcccagccctgcacagacgggtgagagggttcctgtgggctgggaatactgagagaggtttagcctgggcctcagggtggcactttcccgcccttgctgtggcctgaccgcgtgttgcacccccagacaggacagctggagcccctgctgtcccggttcactgaggaggaggagctacagatgaccaggatgctacagcggatggatgtcctggccaagaaagccacagagatgggcgtgcggctgatggtggatgccgagcagacctacttccagccggccatcagccgcctgacgctggagatgcagcggaagttcaatgtggagaagccgctcatcttcaacacataccagtgctacctcaaggatgcctatgacaatgtgaccctggacgtggagctggctcgccgtgagggctggtgttttggggccaagctggtgcggggcgcatacctggcccaggagcgagcccgtgcggcagagatcggctatgaggaccccatcaaccccacgtacgaggccaccaacgccatgtaccacaggtgcctggactacgtgttggaggagctgaagcacaacgccaaggccaaggtgatggtggcctcccacaatgaggacacagtgcgctttgcactgcgcaggatggaggagctgggcctgcatcctgctgaccaccgggtgtactttggacagctgctaggcatgtgtgaccagatcagcttcccgctgggccaggccggctaccccgtgtacaagtacgtgccctatggccccgtgatggaggtgctgccctacttgtcccgccgtgccctggagaacagcagcctcatgaagggcacccatcgggagcggcagctgctgtggctggagctcttgaggcggctccgaactggcaacctcttccatcgccctgcctagcacccgccagcacacccttagcctccagcaccccccgcccccgcccaggccatcaccacagctgcagccaaccccatcctcacacagattcaccttttttcaccccacacttgcagagctgctggaggtgaggtcaggtgcctcccagccctgcccagagtatgggcactcaggtgtgggccgaacctgatacctgcctgggacagccactggaaacttttgggaactctcctcgaatgtgtgggcccaaggcccccacctctgtgacccccatgtccttggacctagaggattgtccaccttctgccaaggccagcccacacagcccgagccccttggggagcagtggccgggctggggaggcctgcctggtcaataaaccactgttcctgc

SEQ ID NO: 5837 - DNA, 1892 bp, Homo sapiens
gcgcatccagctccagggaccctaggttttctatgggattcccaatctgcagcagagatttacccgagcgtgttgcggcagcggctgggcttgcaaggcgcgatccaagagggatttaagcagcccagagctccagagaaaaagagagcgagagagaaccacacacagagacggcttaagcgtttacccgaattaaatatatatttttaaaaagaactgttgagttttatcattttcgttaagtgaccgtgcgcagcgctgtaactgcaggatggggaagcagaatagcaaactggcccctgaagtgatggaggacctggtgaagagcacagagtttaatgagcatgaactcaagcagtggtacaaaggatttctcaaggactgtccaagtgggaggctaaatctcgaggaatttcagcagctctatgtgaagttctttccttatggagacgcctccaagtttgcccagcatgccttccgaaccttcgacaagaatggggacggcaccattgacttccgagagttcatctgcgctctgtccatcacctccaggggcagctttgagcagaagctgaactgggccttcaatatgtatgacctggatggtgatggcaagatcacccgagtggagatgctggagatcatcgaggctatctacaaaatggtaggcactgtgatcatgatgaaaatgaatgaggatggcctgacgcctgagcagcgagtagacaagattttcagcaagatggataagaacaaagatgaccagattacactggatgaattcaaagaagctgcaaagagcgacccttccattgtattacttctgcagtgcgacatccagaaatgagctgatgtcaatgctatggactgcacaaaagtctcaatgttccattcagtctgcagctattcacacacacacacacacacacacacacacacacacacacacacacaaatattgcttggactacctataaatggacttgcttcttgtgtttgaaacactcgtgtgcatgagaatgtcatttgctaatgaattttaaaagcatatataaaacaaaacaaacaacctgccacaatgtgatatgtgtaatatcatttcataaaaatccctcttcctccaaagcctgggcagaaatgtgctgcaaagagttatatgacttcttgttcatgttttgctaatgctcgtatctccttgattacataatgttagtagcactgagacccccatggtaatgtaacttaattataagctatgtcactaccctcctgtaaaatactattggacagacacagagggacccttggctcctgtgtctggtccacacaccacagaagcttgtattatcagtgaatataaatgtactacatttgcatgccttttgggtttgccttaattcttacctcatttgcatcctatcgatctggaaagagctgttttggatgaatgcagtataaaatgtaaaaaccctgctaaatgacttattgattaagtatatctatctatatatacatatacacaaagatattatttatcgaaagtaaaaaagatggaagtgtattggtttctgtttgaattttcaaaggcttccaatgtggtggcaataaatgtcccaaataaatttataacaattgattttccccctaattcttattttataattttaaaattgcagcagttgctagcaacaacttactaaatctactcttaaatatacaactttggaatttgaagaattaatgacaacaaaagggaaaaaagcaactttccaacttttcatccaggctcccaaaagagggacaacgaacatggcatgtgaaaagtaaaacagatttgttcattccgaaaaaaaaatgttcattctatgacaataaattttatctcagtgtga

SEQ ID NO: 5838 - DNA, 6708 bp, Homo sapiens
ctcccggccccggggagaacgcacggcctgcccctgcccggctccgtctggatcatgcggggggctcccgaggaggagagggcgagtgaccggcctgcgccgcccctgttctgggggcgccccccactctgagtcgcccccacctgctgccatgtgccgctgccacgggtacccagcctgtcgctaaactttccgggcgccagcccggctctgagtcgcgcttctcagcggagtgacccagggacggaggacccaggctggctggggactgtctgctcttctcggcgggatccgtggagagtcctttccctggaatccgagccctaaccgtctctccccagccctatccggcgaggagcggagcgctgccagcggaggcagcgccttcccgaagcagtttatctttggacggttttctttaaaggaaaaagcaaccaacaggttgccagccccggcgccacacacgagacgccggagggagaagccccggcccggattcctctgcctgtgtgcgtccctcgcgggctgctggaggcgaggggagggagggggcgatggctcggcctgacccatccgcgccgccctcgctgttgctgctgctcctagcgcagctggtgggccgggcggccgccgcgtccaaggccccggtgtgccaggaaatcacggtgcccatgtgccgcggcatcggctacaacctgacgcacatgcccaaccagttcaaccacgacacgcaggacgaggcgggcctggaggtgcaccagttctggccgctggtggagatccaatgctcgccggacctgcgcttcttcctatgctctatgtacacgcccatctgtctgcccgactaccacaagccgctgccgccctgccgctcggtgtgcgagcgcgccaaggccggctgctcgccgctgatgcgccagtacggcttcgcctggcccgagcgcatgagctgcgaccgcctcccggtgctgggccgcgacgccgaggtcctctgcatggattacaaccgcagcgaggccaccacggcgccccccaggcctttcccagccaagcccacccttccaggcccgccaggggcgccggcctcggggggcgaatgccccgctgggggcccgttcgtgtgcaagtgtcgcgagcccttcgtgcccattctgaaggagtcacacccgctctacaacaaggtgcggacgggccaggtgcccaactgcgcggtaccctgctaccagccgtccttcagtgccgacgagcgcacgttcgccaccttctggataggcctgtggtcggtgctgtgcttcatctccacgtccaccacagtggccaccttcctcatcgacatggaacgcttccgctatcctgagcgccccatcatcttcctgtcagcctgctacctgtgcgtgtcgctgggcttcctggtgcgtctggtcgtgggccatgccagcgtggcctgcagccgcgagcacaaccacatccactacgagaccacgggccctgcactgtgcaccatcgtcttcctcctggtctacttcttcggcatggccagctccatctggtgggtcatcctgtcgctcacctggttcctggccgccggcatgaagtggggcaacgaggccatcgcgggctacgcgcagtacttccacctggctgcgtggctcatccccagcgtcaagtccatcacggcactggcgctgagctccgtggacggggacccagtggccggcatctgctacgtgggcaaccagaacctgaactcgctgcgcggcttcgtgctgggcccgctggtgctctacctgctggtgggcacgctcttcctgctggcgggcttcgtgtcgctcttccgcatccgcagcgtcatcaagcagggcggcaccaagacggacaagctggagaagctcatgatccgcatcggcatcttcacgctgctctacacggtccccgccagcattgtggtggcctgctacctgtacgagcagcactaccgcgagagctgggaggcggcgctcacctgcgcctgcccgggccacgacaccggccagccgcgcgccaagcccgagtactgggtgctcatgctcaagtacttcatgtgcctggtggtgggcatcacgtcgggcgtctggatctggtcgggcaagacggtggagtcgtggcggcgtttcaccagccgctgctgctgccgcccgcggcgcggccacaagagcgggggcgccatggccgcaggggactaccccgaggcgagcgccgcgctcacaggcaggaccgggccgccgggccccgccgccacctaccacaagcaggtgtccctgtcgcacgtgtaggaggctgccgccgagggactcggccggagagctgaggggaggggggcgttttgtttggtagttttgccaaggtcacttccgtttaccttcatggtgctgttgccccctcccgcggcgacttggagagagggaagaggggcgttttcgaggaagaacctgtcccaggtcttctccaaggggcccagctcacgtgtattctattttgcgtttcttactgccttctttatgggaaccctctttttaatttatatgtatttttcttaatttgtaactttgttgcattttggcaacaatttacctttgctttgggggctttacaatcctaaggttggcgttgtaatgaagttccacttggttcaggtttctttgaactgtgtggtctcaattgggaaaatatatttcctatacgtgtgtctttaaaaaaaaatgtgaacagtgaacgtttcggttgctgtgactgggaagttgttgggtgtgctttttcagccagcttctccttccactgcttaaagtgtccatgattctttaaggtgagctgcagtttatagccccaggtcatacctaggaggggagcataatgagctcagggcctccccaaagtgacaaggttagggagtgcttagcggttttgtgttcagccttagctttgtttatagagggaggttcagtttcttttctgtagtgcttgtaataattctcactcctaacagcaccatcgttgtgtcttgaataagttagaggtagcattatagaggatctggcataaatatttgcagtagtgagagcctaagcgatggtgattggtggagcttgaattttaggctggtgagatggcagctttgtgcctgagaggtagtgggtggttcttaagcttcagtgatcccctttttttttttttttttttttttttaaggaacttgtgttataattttggtaaaagtataaacccactccctctggacaatacttagcgacagttgctaaagggggctcctttttaaatgtaaggactgaaatggatatacttctaataagtaaatttccaacacttatttgctccaccccctcccccctcccccctccccctttatcatgttaaacagcctttttgcttttcttattcctcctctcctggagagctgtgattagaaaccacacccacccttgaatgaagtgcttgaactgggggagggaggctggctacctgtgaacaaacattggcccaaataagggaaaataagtgttcctggactttggactagtttatagccagatattccaagagcagcaagacgttgctctctgccgtctctgaaaacaaaagagatgcataacatgcttgcacaaccttttaaaatatagatcagtatagtgctacctctatagttttcttcctcttctgagaaagcctgtatattgatgatcacacacacacacactttgcaattagagaatttggtttgctttactaatctgtttaactattccttcattcattatgaacgcttatattgatgaacatacacacagaggtttctttgctattagaaaattctgtttgctttcctaatctgtttaagcattcattcatgaagagtgtggggccattactggggaaggggggtgacagtgcctcagccagcaaaataccaatgaccaggattggggactaaatttaggaagctaaaatggccagagcaattaacatttgagaaaatcctgtctaggaaaacaacttgagtgtaggcatttgtaattcacttataccaaagttggaaaagtaaaatttaagcctaggacaatttttacttcatggatgttaaatagacaaatgcatagttcccagggggaatttaaacactttactggtgggaagaaacctagtattaaagttgtaaggactctcaaaaacttcacatttattaaaatgcactgctcttacccaatttatcctctgaattaaaatttcagtggattctacaaaacctcgtacaaatagctacagaactttgtgcctattttattcctctatttattcttctaggaagaagcctcttcctagaatcttgaaatagatcccttgactgaatgccaattcctctcctgtttttcaaatgagagaaccttttctgatcaccttgaccttttccctcatttcatatgtcttcccagaaagtagacagactgctctgctgccttcagtcattgtgcctcatttgggttgtccctccttctttgtggagaaatctggaaatgatgcacagtgtatccaaaagttgtgggatgaagtggatgaaagtgatttaattcatttttagaatttttttttgttttgttttagcaacatgctgaacaactaatttactttaaaaataagccagttaaaacaaaggacgctaagcccaagtggggggcaatattagtcaggatctttggggtctaattccagaccaactttcagaagcacttctttgtctctgttctcacctctgctgtccctctcttccctcatcccctaagagagacaaagataaaagcccacctgcatccctaagtcttactgagatcagccaccccaggggagagaaactggatctacttacagccaccccctgtttccatccatatagttacttcccccaatttgcatgtgattatggaaacaagtcatgctcatgaaagcaactgtaaaataaaaggttatggagtagttcagcaacttcttcacagccagctttgtggagctggggaggacttagggcccattggagtctcttatgtgtacagcttcagggctgtccctttcagtttgattttaagcaatgcctcacttcatagcttagggggtaaggattccattcaggtaggttgtctaaaggaactaatgggacctctcagtgaattagctgaccagattttaggaaatctttttaatttctatgattttccttctcacattttgaaatggtaaaattgactggaaataatttttcttggtgccttattggttttccttgcaaacctttctcatattttctcatgaccattgccagtgaccaaggcccatgtgtgtgttgtgtgtaattgtgggcatgtacaagcttaaataacgtgccgacagcactgtttcaaagttggtattcattaggctgttgcctcctgggctggagctgcgctaatcctgacaccggctgccaggagaaaacctcatggatcacacaccaaaccttaataacagcatccgtgacctgcactctccagtacagaatgggaaccccagagctaggaaatgtagttgtatattttaatgaactgctaccccagccaaagaagcttctttcacttttgtgctctacagaaagcccaaggggggtaggagggacagagctttgaataactgctttctaacactaaatgtggccaacaggacagagcacatcacacgtataggcaggtgtgagggacagtggctaagaattgcctgctccctctgcatgctctttcttgtttccaaagtccaatcaagtgatcctgggaaacaaatctgtctggattgcggagggtggttctgaaagaactgccaagacgttaaagaagggtgaagagtaggcagaatataagtagctaacctgagtcaagactctcaaaagctagcagcctgatgacaataggatttatttcagccaggatagtgtctgtctgtgagtgcatcattttaagacagtatgacttcatgttgttacaaactatgtatagtatgtatgttttgtgggttgtatatatacataatatatattatatatatatatgagagatttggtgacttttgatacgggtttggtgcaggtgaatttattactgagccaaatgaggcacataccgagtcagtagttgaagtccagggcattcgatactgtttatgatttccatatatgtatagtgcctatcccatgctgtagtcactgttatgttaaatccagaagttacactagagccagcgatactttatttgtagacaatcaatttgaatccatatgttattactggcagatgatacatgattacagttctgaatctgtaacacttacaaaaggaaacccagagcagcttgatgagtttttgtttctgcttcgttcctgggagtcagtagaaacagcagttgtatgtggttatgttagtctcaagatacttaatttgttgaccttacttcagaaaaattttgtatgtattatatttgtgggaaggtaaaataatcatttgagatttttatcaaatatgaagattagttatttatgaaaaacaaagaaatgtctatttttctttgttcccaattaatgtagataaattttaaaatgcattaaagtaatggtaaagacaataaaaagatgctgtagaa

SEQ ID NO: 5839 - DNA, 3414 bp, Homo sapiens
ggacttggaggcggccggcgcaggggccgcgagaggcttcgtcgccgctgcagctccgggggctcccaggggagcgtgcgcggaacctccaggcccagcaggaccccggctgcggcgaggaggaaggagccagcctagcagcttctgcgcctgtggccgcgggtgtcctggaggcctctcggtgtgacgagtgggggacccgaaggctcgtgcgccacctccaggcctggacgctgccctccgtcttctgcccccaataggtgcgccggaccttcaggccctggggtgaattcagctgctcctacatcagcttccggaaccaccaaaaattcaaattgggattttccggagtaaacaagagcctagagccctttgctcaatgctggatttaatacgtatatatttttaagcgagttggttttttcccctttgatttttgatcttcgcgacagttcctcccacgcatattatcgttgttgccgtcgttttctctccccgcgtggctccttgacctgcgagggagagagaggacaccgaagccgggagctcgcagggaccatgtatcagagcttggccatggccgccaaccacgggccgccccccggtgcctacgaggcgggcggccccggcgccttcatgcacggcgcgggcgccgcgtcctcgccagtctacgtgcccacaccgcgggtgccctcctccgtgctgggcctgtcctacctccagggcggaggcgcgggctctgcgtccggaggcgcctcgggcggcagctccggtggggccgcgtctggtgcggggcccgggacccagcagggcagcccgggatggagccaggcgggagccgacggagccgcttacaccccgccgccggtgtcgccgcgcttctccttcccggggaccaccgggtccctggcggccgccgccgccgctgccgcggcccgggaagctgcggcctacagcagtggcggcggagcggcgggtgcgggcctggcgggccgcgagcagtacgggcgcgccggcttcgcgggctcctactccagcccctacccggcttacatggccgacgtgggcgcgtcctgggccgcagccgccgccgcctccgccggccccttcgacagcccggtcctgcacagcctgcccggccgggccaacccggccgcccgacaccccaatctcgatatgtttgacgacttctcagaaggcagagagtgtgtcaactgtggggctatgtccaccccgctctggaggcgagatgggacgggtcactatctgtgcaacgcctgcggcctctaccacaagatgaacggcatcaaccggccgctcatcaagcctcagcgccggctgtccgcctcccgccgagtgggcctctcctgtgccaactgccagaccaccaccaccacgctgtggcgccgcaatgcggagggcgagcctgtgtgcaatgcctgcggcctctacatgaagctccacggggtccccaggcctcttgcaatgcggaaagaggggatccaaaccagaaaacggaagcccaagaacctgaataaatctaagacaccagcagctccttcaggcagtgagagccttcctcccgccagcggtgcttccagcaactccagcaacgccaccaccagcagcagcgaggagatgcgtcccatcaagacggagcctggcctgtcatctcactacgggcacagcagctccgtgtcccagacgttctcagtcagtgcgatgtctggccatgggccctccatccaccctgtcctctcggccctgaagctctccccacaaggctatgcgtctcccgtcagccagtctccacagaccagctccaagcaggactcttggaacagcctggtcttggccgacagtcacggggacataatcactgcgtaatcttccctcttccctcctcaaattcctgcacggacctgggacttggaggatagcaaagaaggaggccctgggctcccaggggccggcctcctctgcctggtaatgactccagaacaacaactgggaagaaacttgaagtcgacaatctggttaggggaagcgggtgttggattttctcagatgcctttacacgctgatgggactggagggagcccacccttcagcacgagcacactgcatctctcctgtgagttggagacttctttcccaagatgtccttgtcccctgcgttccccactgtggcctagaccgtgggttttgcattgtgtttctagcaccgaggatctgagaacaagcggagggccgggccctgggacccctgctccagcccgaatgacggcatctgtttgccatgtacctggatgcgacgggcccctggggacaggcccttgccccatccatccgcttgaggcatggcaccgccctgcatccctaataccaaatctgactccaaaattgtggggtgtgacatacaagtgactgaacacttcctggggagctacaggggcacttaacccaccacagcacagcctcatcaaaatgcagctggcaacttctcccccaggtgccttccccctgctgccggcctttgctccttcacttccaacatctctcaaaataaaaatccctcttcccgctctgagcgattcagctctgcccgcagcttgtacatgtctctcccctggcaaaacaagagctgggtagtttagccaaacggcaccccctcgagttcactgcagacccttcgttcaccgtgtcacacatagaggggttctgagtaagaacaaaacgttctgctgctcaagccagtctggcaagcactcagcccagcctcgaggtccttctggggagagtgtaagtggacagagtcctggtcagggggcaggagtgtcccaagggctggcccacctgctgtctgtctgctcctcctagcccttggtcagatggcagccagagtccctcaggacctgcagcctcgccccggcagaagtcttttgtccaggaggcaaaaagccagagattctgcaacacgaattcgaagcaaacaaacacaacacaacagaattcctggaaagaagacgactgctaagacacggcaggggggcctggagggagcctccgactctgagctgctccgggatctgccgcgttctcctctgcacattgctgtttctgcccctgatgctggagctcaaggagactccttcctctttctcagcagagctgtagctgactgtggcattactacgcctccccacacgcccagacccctcactccaaaatcctactggctgtagcagagaatacctttgaaccaagattctgttttaatcatcatttacattgttttcttccaaaggccccctcgtataccctccctaacccacaaacctgttaacattgtcttaaggtgaaatggctggaaaatcagtatttaactaataaatttatctgtattcctctttc

SEQ ID NO: 5840 - DNA, 3104 bp, Homo sapiens
acttctcacttctgcccataacaagaaaaacatagacttgtgccttactcttaaaaaaataataataataaatataggttttttaaaatttatatataatttttaaaaccccgtttgttgcatgtggtccctttccctcctgttgttgagcagaataaaagcccattttgccagggcccgcagtcctggcggcccccgcagctgcggccctgtaactttaaacctggcctgagatcatcgttttggcgccggccaaacagagcccgagggcgggcctagcgcgcccggacggagaccaccttgcggccgaccccgctcccccgcctcctcgggagagataaatgctgactccgctcggaaagttctcaactgcaaagtttgctgtccggctgcctagggtctgggaagctcgggcaccctccctctccggggctcctgctcccacccctccggcccccccaccgtcgcgctcctccaggctgggcctgtggccgcggtgctttttaattttcccccagctcagaatcttgctgctcggcccccaggagagcaacaactcaacgggaacgatgtggaaggtgtcagctctgctcttcgttttgggaagcgcgtcgctctgggtcctggcagaaggagccagcacaggccagccagaagatgacactgagactacaggtttggaaggcggcgttgccatgccaggtgccgaagatgatgtggtgactccaggaaccagcgaagaccgctataagtctggcttgacaactctggtggcaacaagtgtcaacagtgtaacaggcattcgcatcgaggatctgccaacttcagaaagcacagtccacgcgcaagaacaaagtccaagcgccacagcctcaaacgtggccaccagtcactccacggagaaagtggatggagacacacagacaacagttgagaaagatggtttgtcaacagtgaccctggttggaatcatagttggggtcttactagccatcggcttcattggtgcaatcatcgttgtggttatgcgaaaaatgtcgggaaggtactcgccctaaagagctgaagggttacgccctgctgccaacgtgcttaaaaaaagaccgtttctgactctgtgccctgtccctgagctcgtgggagaagatgacccgtggaacacttgcctggcccactcagaatccacggtgacctctccgcttgccaaaataaccgaaggaaagaccgttcaccagacttggctcctctaaacatttgctgttcaaacatgtttttgaatatacattctataaaagattatttgaaagacaaaattcatagaaaatggagcaaaactgtataaactgatttgtaactaacactggaccattggatcgatattatatgctgtaaccatgtgtctccgtctgaccattcttgttattgttaaaatgcagaggaatctggaaatatttatatccacggagtccttggatccagtgctacgtcagtaaatagcaccagcattttgcaattgctgatctgctgaaatgtacacattctggtctagtttggtctatcttttaaagcctgatctggtgtgaataatcaactaggaaatctaaacttggataacacgtggtgaacaactgcctttagctggtccagattaatcatttcaaagacatccattttagatcacaagcaggaagtcgatagtctcaaaggcactttgtttctcccaagtaggccaccaggcagcctctagagttgctttacccaaatccttctccagccatgacttggtgactctaagcttgctcccacctgccccctccacttccctcagatgatgaggagccagggctaagggggcagccttctctcttcccagtgatgcacatccttcacattggctgctttgttctggaatatggatatctcagcctggatgccgaggaagctgctggatgcttaatggtgctagaggctcaagtgtgtttgaaaccaagagccagttgtcccccatgcagaaagaaatcctgtgtgagcctctggtatgagaaataaaatctgccagttttataacattcactttctgcctctgaggaaagatacagggaacaaaaatcaatttgtacagtcttaatattaaaagcagcttgactaaatacctgatttaaaaatagaagacatccccagtcctcatgacataccgcaaatatctgtggggtcctgttgaaaagaacaaaataaaggagcccaaggggtcattctgtctcagcaccatccagcctggcacttctcttcccatatatccattggatttttttttttttttcctaaacaaagtttttacactgagcagatgctctgtcatgatggcggttgtgcaattctggtatcctctaaatttgtaagcattcataaaacaggaaaaagtaaactatcattcggaagcacagcccattcctcccattttttgcaatgatgtctggatgttattttaaacagtgtgtctgtgtgttcccaaatccagctggccccaccagctcagattccattttttttgtgtgtgtgtgtgaaacgtagtctgcaactctgcctcccggcaattatacatgtgtcaggatgtcaaaaagcaattctcctgcctcagcctcctgagtagctgggactacaggttcctaccaccacacccggccaatttttgtatttttagtagagatggggtttcaccgtatcggcgaggatgatctctatctcttgacctcgtgatctgcccgcctcggcctcccaaagtgctgggattacaggcgtgtgccactgcgctcggcctcagattccatatttgaacaccagctgattgagagaaggggaatgagaagagctggatgagtttaaataactcattgttcagattcctgaacaggagttgggataatggccatcttttctttcctatcctttcttcccccctcactgtgaaaaataacagtccaccccaagtcatacactggacccagtgcctgcggggacaggactgtgggtttcttggtcacacctgtgttggtgctcaatgcagtgtagacatgttttcaaataaaacaaatgattgtgtacaa

SEQ ID NO: 5841 - DNA, 2368 bp, Homo sapiens
aggtggatacatttgcaaagtggaatcctccaggtgcctttaaggagtttacagtctagtaggtatgaatccagccatcctcagcagtggcaccgatatcttcaaaagtgtcgtttgtctggctctctgccttctggatgggaagcctaccctgatgtctctcttcaaatctgataaatcatgaggaacctataacccttttggccacatgcaaaaaagcaagacccgtgaccaaggtgtagactaagaagtggagtcatgcttcacacggccatatcatgctggcagccattcctgggtctggctgtggtgttaatcttcatgggatccaccattggctgccccgctcgctgtgagtgctctgcccagaacaaatctgttagctgtcacagaaggcgattgatcgccatcccagagggcattcccatcgaaaccaaaatcttggacctcagtaaaaacaggctaaaaagcgtcaaccctgaagaattcatatcatatcctctgctggaagagatagacttgagtgacaacatcattgccaatgtggaaccaggagcattcaacaatctctttaacctgcgttccctccgcctaaaaggcaatcgtctaaagctggtccctttgggagtattcacggggctgtccaatctcactaagcttgacattagtgagaataagattgtcattttactagactacatgttccaagatctacataacctgaagtctctagaagtgggggacaatgatttggtttatatatcacacagggcattcagtgggcttcttagcttggagcagctcaccctggagaaatgcaacttaacagcagtaccaacagaagccctctcccacctccgcagcctcatcagcctgcatctgaagcatctcaatatcaacaatatgcctgtgtatgcctttaaaagattgttccacctgaaacacctagagattgactattggcctttactggatatgatgcctgccaatagcctctacggtctcaacctcacatccctttcagtcaccaacaccaatctgtctactgtacccttccttgcctttaaacacctggtatacctgactcaccttaacctctcctacaatcccatcagcactattgaagcaggcatgttctctgacctgatccgccttcaggagcttcatatagtgggggcccagcttcgcaccattgagcctcactccttccaagggctccgcttcctacgcgtgctcaatgtgtctcagaacctgctggaaactttggaagagaatgtcttctcctcccctagggctctggaggtcttgagcattaacaacaaccctctggcctgtgactgccgccttctctggatcttgcagcgacagcccaccctgcagtttggtggccagcaacctatgtgtgctggcccagacaccatccgtgagaggtctttcaaggatttccatagcactgccctttctttttactttacctgcaaaaaacccaaaatccgtgaaaagaagttgcagcatctgctagtagatgaagggcagacagtccagctagaatgcagtgcagatggagacccgcagcctgtgatttcctgggtgacaccccgaaggcgtttcatcaccaccaagtccaatggaagagccaccgtgttgggtgatggcaccttggaaatccgctttgcccaggatcaagacagcgggatgtatgtttgcatcgctagcaatgctgctgggaatgataccttcacagcctccttaactgtgaaaggattcgcttcagatcgttttctttatgcgaacaggacccctatgtacatgaccgactccaatgacaccatttccaatggcaccaatgccaatactttttccctggaccttaaaacaatactggtgtctacagctatgggctgcttcacattcctgggagtggttttattttgttttcttctcctttttgtgtggagccgagggaaaggcaagcacaaaaacagcattgaccttgagtatgtgcccagaaaaaacaatggtgctgttgtggaaggggaggtagctggacccaggaggttcaacatgaaaatgatttgaaggcccacccctcacattactgtctctttgtcaatgtgggtaatcagtaagacagtatggcacagtaaattactagattaagaggcagccatgtgcagctgcccctgtatcaaaagcagggtctatggaagcaggaggacttccaatggagactctccatcgaaaggcaggcaggcaggcatgtgtcagagcccttcacacagtgggatactaagtgtttgcgttgcaaatattggcgttctggggatctcagtaatgaacctgaatatttggctcacactcacggaca

SEQ ID NO: 5842 - DNA, 1715 bp, Homo sapiens
actcggtgtcaccacaggaggagactcaggcaggccgcgctccagcctcaccaggctccccggctcgccgtggctctctgagcccccttttcagggaccccagtcgctggaacatttgcccagactcgtaccaaacttttccgccctgggctcgggatcctggactccggggcctccccgtcctcccctttcccgggttccagctccggcctctggactaggaaccgacagcccccctccccgcgtccctccctctctctccagccgttttggggaggggctctccacgctccggatagttcccgagggtcatccgcgccgcactcgcctttccgtttcgccttcacctggatataatttccgagcgaagctgcccccaggatgaccacgctggccggcgctgtgcccaggatgatgcggccgggcccggggcagaactacccgcgtagcgggttcccgctggaagtgtccactcccctcggccagggccgcgtcaaccagctcggcggtgtttttatcaacggcaggccgctgcccaaccacatccgccacaagatcgtggagatggcccaccacggcatccggccctgcgtcatctcgcgccagctgcgcgtgtcccacggctgcgtctccaagatcctgtgcaggtaccaggagactggctccatacgtcctggtgccatcggcggcagcaagcccaagcaggtgacaacgcctgacgtggagaagaaaattgaggaatacaaaagagagaacccgggcatgttcagctgggaaatccgagacaaattactcaaggacgcggtctgtgatcgaaacaccgtgccgtcagtgagttccatcagccgcatcctgagaagtaaattcgggaaaggtgaagaggaggaggccgacttggagaggaaggaggcagaggaaagcgagaagaaggccaaacacagcatcgacggcatcctgagcgagcgagcctcagcaccccaatcagatgaaggctctgatattgactctgaaccagatttaccactaaagaggaaacagcgcagaagccgaaccaccttcacagcagaacagctggaggaactggagcgtgcttttgagagaactcattaccctgacatttatactagggaggaactggcccagagggcgaagctcaccgaggcccgagtacaggtctggtttagcaaccgccgtgcaagatggaggaagcaagctggggccaatcaactgatggctttcaaccatctcattcccggggggttccctcccactgccatgccgaccttgccaacgtaccagctgtcggagacctcttaccagcccacatctattccacaagctgtgtcagatcccagcagcaccgttcacagacctcaaccgcttcctccaagcactgtacaccaaagcacgattccttccaacccagacagcagctctgcctactgcctccccagcaccaggcatggattttccagctatacagacagctttgtgcctccgtcggggccctccaaccccatgaaccccaccattggcaatggcctctcacctcaggtgcctttcattatctcaagccagatatcgcttggtttcaaatccttttgaacacgttcgacaaaagcagtggagaagaggaagacctggagcaataaaagacaaatgcaacattttaaggcaatggtttcacatggttacatatcaaaacatcccaattc

SEQ ID NO: 5843 - DNA, 4190 bp, Homo sapiens
gaagtcaagacgtctggaaagaattacccagtcctggcttcgagcagcccattgaaccagagacttgaaacagccccagccaaagacttttctcccaattctgcgcttcctgggttctgctgagtcttccacaggctttttttttttttttttttttttttaagacgaaaaagagattttctgttatcgggggcagaaagactgaagcccaaaaaaaaaaaaaaaaaaaaaagaaaagaaaagaaaaaagaaaagttaatttatttttaaagcataatttttttaagaattagactgaagtgcaacggaaacataaagagaatattagtgaaattattttttaaagtggggaagaatcaaacatttaagactcccctatcctttttaaatgttgtttttaaatttcttattttttttggccggtcgtctcaaattcatctgatctcttattacctcaattttggaaactgcccgccaccgaccctccgggaccacacagacaggctgaggacgactttatgaccaagagctgaacaagatgcattgtgagaggtttctatgtatcctgagaataattggaaccacactctttggagtctctctcctccttggaatcacagctgcttatattgttggctaccagtttatccaaacggataattactatttctcttttggactgtatggtgcctttttggcatcacacctcatcatccaaagcctgtttgcctttttggagcaccgaaaaatgaaaaaatccctagaaacccccataaagttgaacaaaacagttgccctttgcatcgctgcctatcaagaagatccagactacttaaggaaatgtttgcaatctgtgaaaaggctaacctaccctgggattaaagttgtcatggtcatagatgggaactcagaagatgacctttacatgatggacatcttcagtgaagtcatgggcagagacaaatcagccacttatatctggaagaacaacttccacgaaaagggtcccggtgagacagatgagtcacataaagaaagctcgcaacacgtaacgcaattggtcttgtccaacaaaagtatctgcatcatgcaaaaatggggtggaaaaagagaagtcatgtacacagccttcagagcactgggacgaagtgtggattatgtacaggtttgtgattcagacactatgcttgacccagcctcatctgtggagatggtaaaagttttagaagaagatcccatggttggaggtgttgggggagatgtccagattttaaacaagtacgattcctggatctcattcctcagcagtgtaagatattggatggcttttaatatagaaagggcctgtcagtcttattttgggtgtgttcagtgcattagtggacctctgggaatgtacagaaactccttgttgcatgagtttgtggaagattggtacaatcaagaatttatgggcaaccaatgtagctttggtgatgacaggcatctcacgaaccgggtgctgagcctgggctatgcaacaaaatacacagctcgatctaagtgccttactgaaacacctatagaatatctcagatggctaaaccagcagacccgttggagcaagtcctacttccgagaatggctgtacaatgcaatgtggtttcacaaacatcacttgtggatgacctacgaagcgattatcactggattctttcctttctttctcattgccacagtaatccagctcttctaccggggtaaaatttggaacattctcctcttcttgttaactgtccagctagtaggtctcataaaatcatcttttgccagctgccttagaggaaatatcgtcatggtcttcatgtctctctactcagtgttatacatgtcgagtttacttcccgccaagatgtttgcaattgcaacaataaacaaagctgggtggggcacatcaggaaggaaaaccattgttgttaatttcataggactcattccagtatcagtttggtttacaatcctcctgggtggtgtgattttcaccatttataaggagtctaaaaggccattttcagaatccaaacagacagttctaattgttggaacgttgctctatgcatgctattgggtcatgcttttgacgctgtatgtagttctcatcaataagtgtggcaggcggaagaagggacaacaatatgacatggtgcttgatgtatgatcttccatgttttgacgtttgcagtcacacacaacaccttagttcctctaggggctgtacagtattgtggcatcagataatgccaccaaaggagacatatcactgctgctgggacttgaacaaagacatttatatgggtttattttcattctgccaaagtaaaacaatacatcaacaagaagaaactcagatttaacctgttatttctatgaaaatgggatgaattctttgtttatgcactttttccttactgtgcatccgcctgaaagtgttttgccctatatacctcactagccatgctttatgtgggttatcatggaagaaaaggattttggaaactcaaggaaaagttctttcaacctatacaacctaacttatggactgttttgatagatgataattttttttttttaggaaggattttctttttaactttaccaaatgaaatgccaaaggaagttttaaaggccgttggctgtgctgtattttgatataattgtactgtgtttttaaattttgtatgccaatcttaaagacaaattttgcatattctctattttacttttctgccaaaataaacctgttcttccttttttaaaataaaataagttcttaaaaaatttatacttaaaaaatcctgcccaaaatgtgaagcttggttgactgatgttcatgatagaaagaataaaatgtttctctctctctaccttttaaaattgaatagtttatttctgtgaaagaagtatttaaactttcaatattttaactttttgtttttatttcttttagaaaaggccaatatacctatcacactttggaagtaaaaatacacactttcgtgtgtacctaaaaaaaaaatcgttgaaaatcaaggccaaaggtagtgcaattttttcattaagatttaaaaaaaagggaatgatagtctttgaaagaaaacagtaggcatccagcactggacaaaacatgggtatcaaagatgaataatctttggagattctggcagtgttttcccagaacaagtcaagtggaaagtggagaaattatctgtataattttggacacatacaatgcagtttatcaaaggttttgttctgtggcctgaatttactgggtcctacctacacattgaacatgttttgcctgtcttttttttttttttcaacttgccagttcactttacatgttagtataatgtttacacgggtgagttggataaattataaaacatataaattcaaaattggcagatagaatcaccaagtatctatcctcttttactttcaaatgaggaattttgtttttctgaattacacagatcatcacttcctatttcctgttctggacctgtataaaaatgtctacacagtagaagtgacatcaaggtttaataagtatatcaatgattggcacatataaaaattgttgaaccacatactctgaacttggctaatttagttactgcaaggcctccattatccagttttattttttacacgattgaccttgccttgtagctggtgctgtgtagacctgtgttgaaaacacaatcggaatatatgaataattgaataaacagcattatggtgaggcagagacacatggagaagtgttaaaaaaaaaatgggcttcctgcctttctgcctcttttttatgcagtcatctatgttacatctatcctgcctaagaaaaagctgcacatcctaccttcagagtacaaaaaggtacatctgagactcaagactctcactgattggagagcttgtggaaaacaaaacacaccatgccaataaatgagatgaaaacttgagtttgcctttttaactatttatgttctaagttaagctttgataacattcaaatgtcaaattctctcattcttataaaaagttgaattaattgcctgtatttattttagcaattattcaatgtatttccagtataggatgtatagtataattaattttttgtaaataaaatatttttgataaga

SEQ ID NO: 5844 - DNA, 3045 bp, Homo sapiens
ctaataaaggtgacataaataaaggtgtcataaagacagggcatggcacacgcttataaggggcatgagcatctcagggctgccagaatggcttttgctgagtgcatagcaccagcgtgtgtcatgtcttggctgcgtttctggggcccatggcccctccttacgtggcaactattgtctttactagtcaaggaggctcagcctctggtgtgggtcaaggacccgctccagctgacctctaaccccctggggccacctgagccctggtcttcccgctcctcccatctcccatgggaatctccccatgcacctgctcccccagcagccccgggggactttgattacctggggccctctgcttcttcgcagatgtcagccctgcctcaggaaccaactgaaaatttggctccattcctgaaggaattggattcagctggagagctgcccctggggccagagccgttcttggctgcacatcaggacttaaatgacaagcggactccagaagaaaggctcccagaggtggttccgcttctcaaccgggatcagaaccaggccctagttcagcttcctcgcctcaagtgggttcaaactacagatctagatcgggctgcaggtcatcaggcagatgaaatacttgttccactagacagtaaggtttcaagaccaaccaaatttgttgtttcgcccaagaacctgaagaaagatctagctgaacgttggagccttcctgagattgttgggattccacaccaattatccaaacctcagcgtcagaaacagactttgccagatgattatttgagtatggacacactgtatcccggcagcctacctccagaactccgggtgaacgcagatgagcctccagggcctcctgagcaagttggactttctcaattccatctagagcccaaaagtcaaaatccagagacccttgaagacatccagtcctcttcactccaggaagaagccccagcgcagcttctacagctccctcaggaggtagaaccttcaacccagcaggaggccccagctctgcctccagagtcctctatggagagtctagctcaaactccactgaatcatgaagtgacagttcaacctccaggtgaggatcaagctcattataatttgcccaagtttacagtcaaacctgcagatgtggaggttaccatgacttcagagcctaaaaatgagacagaatctacccaagcccagcaggaggccccaattcagcctcccgaggaggcggaaccttcttctacagccctgaggactacagatcctcctccagaacaccctgaggtgacacttccaccttcagacaagggtcaggctcagcattcacacctgactgaagccacagttcaacctctggacctggagcttagcataactacagagcctactacagaggttaaaccgtctccaaccacggaggaaacctcagctcagcctccagacccggggcttgccataactccagaacccactacagagattggacattccacagccctggagaagactagagctcctcatccagaccaggttcagactctgcatcgaagcctgactgaagtcacaggtccacctacaaagttagaatcttcgcaggattcattggtgcagtctgaaactgcaccagaggaacagaaggcctccacaagcaccaacatatgtgagctctgcacctgcggagatgagactctgtcatgtgttggtctcagcccaaagcagaggctccgccaagtgcctgtgccagagcccgacacctacaatggcatcttcaccaccttaaatttccaaggaaactatatttcataccttgatggaaatgtatggaaagcatacagttggaccgagaaactaattctcagtgaaaattatttgactgaattacctaaggattcatttgaaggcctgctatacctccagtatttagatttatcctgcaataaaatacgatatattgaaagacaaacatttgaatcactaccatttttgcagtatataaatctgggctgcaatttaattacaaaactgagccttggaacatttcaggcctggcacggaatgcagtttttacacaacttaattctcaatcgcaatcctctgactactgtcgaagatccatatctctttgaactgccggcattaaaatatctagacatgggaacaacacacatcacacttacaacacttaagaacattctcacgatgactgttgaactggaaaaactgatcttacctagccatatggcctgctgcctctgccaatttaaaaatagcattgaggctgtctgcaagacagtcaagctgcattgcaacactgcatgtctgactaacagcatacattgtcctgaagaagcatctgtagggaatccagaaggagcgttcatgaagatgttacaagcccggaagcagcacatgagcactcagctgactattgagtcggaggcgccctcagacagcagtggcatcaacttgtcaggctttgggggtgatcagcttgaaattcagctaaccgagcagctacggtccctcatccccaacgaggatgtgagaaagttcatgtctcatgttatccggaccttgaaaatggaatgttcagaaacacatgtgcaagggagctgtgccaagctcatgttgcgaacaggcctcctgatgaagcttctcagcgagcagcaggaagcaaaggcattgaatgtagaatgggatacggaccaacaaaaaacaaattatattaatgagaacatggaacagaatgaacagaaagagcagaagtcaagtgagctcatgaaagaagttccaggagatgactataagaacaaactcatcttcgcaatatctgtgactgtaatactaataattttgattataattttttgtcttatagaggtgaattcacataaaagggcatcagaaaaatacaaagacaacccatcaatatcaggagcctgagcatgagttaaagcatgtggatggcctggagctatgtttttaaaattgttattaaatattggttttttacttaaatca

SEQ ID NO: 5845 - DNA, 4824 bp, Homo sapiens
gcggccgcggtgaagcgcggagggcggcgcgggcaccggggccgggccggggctgcagccgcagcggccatgggggccctgacgagccggcagcacgcgggcgtggaggaggtggacatcccgtctaattccgtgtaccgctacccgcccaagtccggaagctattttgccagccacttcattatgggaggagagaagtttgactcaactcatcctgaaggttacctgtttggagagaacagcgatctgaactttctggggaacagaccagttgtgtttccttacgccgccccacctccccaagaacccgtgaagactctgagaagcctggtcaatatccgaaaggacacactgaggctcgtcaaatgtgctgaggaagtgaagagccctggagaagaggccagtaaagctaaagtccactacaatgttgagttcacctttgacacagatgctcgggtagccatcaccatctattaccaggccacggaagagttccagaatggtattgccagctacattcccaaagacaacagcctccagtcggagactgtgcagtacaagcgaggagtgtgtcagcagttctgcctgccctcccacaccgtggatccctccgagtgggccgaagaggagcttggctttgatttagaccgagaagtttaccctctagtggtacatgccgtggtggatgaaggagacgagtattttggccattgccatgtactgctgggtacttttgagaagcacacagatggaactttctgtgtcaagcccctcaaacagaaacaagtagtagacggggtcagctacctccttcaggagatctatggaattgaaaacaagtacaacacacaagattctaaggtggctgaagacgaagtgagtgataacagtgccgagtgtgtggtgtgtctctcggatgtccgggacaccttgattctgccctgtcgccacctctgcctctgtaacacctgtgcagacacgctgcgctaccaggccaacaactgccccatctgccgactgcccttccgggcactgcttcagatccgagccatgaggaaaaaattgggccccttgtccccaaccagctttaaccccatcatctcatcccagacatctgactctgaagagcatccatcctcagagaatattccaccaggctatgaagtagtatctcttctggaggccctcaacgggcccctcaccccgtccccagcagttcctccacttcacgtgcttggagatggccacctctcaggaatgctcccttcatatggcagtgatggccacctgccccccgtcaggacgatctcgcctcttgaccgcctgtctgacagcagcagtcagggactcaaactcaaaaagagtctctccaaatccacttcccaaaactcttccgtgctgcatgaagaggaagatgagcattcctgcagcgagtcggagacacagctctctcagagaccgtcggttcagcatctcggagaggaatgtggtgtgactccagaaagtgagaatctcaccttgtcgtcatctggagctattgaccagtcgtcttgcacagggacgcctctgtcatccactatttcctccccagaaggccctgccagcagcagcttggcccagtctgtcatgtccatggcatcctcccagatcagcactgacaccgtctcctccatgtctggctcctacatcgcccctggcactgaagaggagggagaggctctctcttccccccagcctgccagcagggccccctcagaagaaggagagggaaatgatgttatagaggaagaggatggatcacccacgcaggaaggccagaggacgtgcgcatttctaggtatggagtgtgacaataacaatgactttgacatcgcaagcgtgaaagcactggacaataagctgtgctctgaggtctgcttacctggtgcctggcaggctgatgacaatgccgtcagtcggaatgcccagcgccggcgcttgtcatccagcagcctggaggactctgagacgaggccctgtgtgtggggccctttggctgtctgagccccagcctctgcacttgggctcccctcctgccctgcattccatccatcctcactcagctgctgcctactgggcatcctcagcaagatgctggagactttttaccctcctgtgacagctgttacaacctgtaaccacaatccctcacctctcagagggaactggaaccctcctttctccgtgtgacctaaagccactcaatgaactgcagctcacgagaccttttgcagggactctggaatgtcctcacggtatattgatgttcaggtggagctggggtccatgggctaatttcttacacatcttttttctccttagggggtagaacaagaaggcttagagtttggcagctttgttacaaacatccctctggcatttcctggtctctggcacatcataaccaattggaaacctgcagtttggggtagggctggaggatcgctcctgtggaaagggagagccatactgcacggacgtagcgtttccctctacaagcactaggagcacctttctcaaggacaagaaatggtagcaaccaaaaggttggttgaaggaaacaatccttccttctggtggcagagccagtcttctgggcctcacatgcctgtgcggttaagaaggagctcttggccgggcgcggtggctcacgcctgtaatcccagcactttgggaggccgaggcgggtggatcatgagatcaggagatcgagaccatcctggctaacacggcgaaaccccgtctctactaaaaatacaaaaaattagctgggcatggttgcaggcgcctgtagtcccagctacttgggaggctgaggcaggagaatggcctgaacccgggaggcggagcttgcagtgagccgagatcgcgccaatgcactccagcctgggcgacagagaaaaaaaaaaaaaaagaaggagcccttgaatctgagaatcccccagttaagatgatttcccttaaggagcatttctcctgatcaggtgcattcagggaggcctgcaactccatcctaaggtgacatttcaagaaacacatgtgttgaccacctctgtgtgccaagcactgggtgaggagtggtcgtatattaccataattcatcctcactcaattgggaggtggcattcttgtccctgttgcccccatctctacccccttttgttaatggttgagagaaatgtggaccagtgattctcagtttggtgcccaggtccccaaaggaagtgatggagagccttgagctaagttcaggcagcagcatgtggccagcagcagtgtgctgggagcagaggttggaatcagggctcagggccttcacttcaagggccctccccagctactcgggaggctgaggcaggagaatcgcttgaactcaggaggtggaggttgcggtgagccaagatcgtgccactgcactccagcctgggctacaagattgaaaagatcgaaactctgtctcaaacaaaaaaaaaaaaattcaaggctgtttccaaggcagcctcaaaaagagcctggtgcccagggggtccttcgtttctgtgtggctgcagaggccaggagtgcagtgactgtctcactgcctagtggttgtggctcacatcctgccctgatggagaggggggcctgtcgtccaaccctctctgaaaaactgcagtagactttaccatttcaggccccacctaatgttctttccttccttccccctacattcttcccgcccctttcatagttaagatgcataagctgagcaataaccccacttcctgatttccctgaaatatgagcccagaagcagcaggtgacagggagcttcccttaccctggggtggtggcacacagaccacctcctgtcctgtcccctgcaggtagtattcacagtgtggtgttacctgggaggagggaggaaggagctgagatgaaggagattcaggtaaacagtagccacagtggccaggacccccttcctgaggatccctgtccttcctcgcagcaggtgcttagtcctctcctagggagaagcacggaaagattcctcaaggcctcagtcccatgtccaaggcatacctaggttagaaatgtcctttacttgtttctcagttactatttctcctcttcctccctccccctgccttctcttggctgtcatttagctctctggcccacagaaatactccatccaaggagctggtcctcagtcagcctgatgaggacaggtcagtggccaacccttttgccccagtccttcatctggagacagtcacatagtcacgtcaacagttcacccaaagagaagaggtggggcctggcttctcccacagggcacagcctaactatggagacccagggctccttcctgctgcactaggcctgtgctctccctattgccttcaggtggtgtgatcccggcttcctcacagagcccttttttccttctgcccagctccatcccaccagagtttctacccccgctgaggcatctcctgggcacagaccaccacactctaagccggctggcctgggagttagggtcctgcccacctcacctgggagttggggtcctgcccacctggagtttagcacgctggtcgctcactttgctttggtctgcacacctggtgtgtgcatgtgtatactgcttgtgccatctgtgtacccctctccctggagtacacttgtggtcacactacagtggggacatcaagaatgcaatatttatggattgctgcatgattcttaaaaatgaataaaactgtttacaagggaaggagagctaactgcaaagtg

SEQ ID NO: 5846 - DNA, 8435 bp, Homo sapiens
gcccgcgccggctgtgctgcacagggggaggagagggaaccccaggcgcgagcgggaagaggggacctgcagccacaacttctctggtcctctgcatcccttctgtccctccacccgtccccttccccaccctctggcccccaccttcttggaggcgacaacccccgggaggcattagaagggatttttcccgcaggttgcgaagggaagcaaacttggtggcaacttgcctcccggtgcgggcgtctctcccccaccgtctcaacatgcttaggggtccggggcccgggctgctgctgctggccgtccagtgcctggggacagcggtgccctccacgggagcctcgaagagcaagaggcaggctcagcaaatggttcagccccagtccccggtggctgtcagtcaaagcaagcccggttgttatgacaatggaaaacactatcagataaatcaacagtgggagcggacctacctaggcaatgcgttggtttgtacttgttatggaggaagccgaggttttaactgcgagagtaaacctgaagctgaagagacttgctttgacaagtacactgggaacacttaccgagtgggtgacacttatgagcgtcctaaagactccatgatctgggactgtacctgcatcggggctgggcgagggagaataagctgtaccatcgcaaaccgctgccatgaagggggtcagtcctacaagattggtgacacctggaggagaccacatgagactggtggttacatgttagagtgtgtgtgtcttggtaatggaaaaggagaatggacctgcaagcccatagctgagaagtgttttgatcatgctgctgggacttcctatgtggtcggagaaacgtgggagaagccctaccaaggctggatgatggtagattgtacttgcctgggagaaggcagcggacgcatcacttgcacttctagaaatagatgcaacgatcaggacacaaggacatcctatagaattggagacacctggagcaagaaggataatcgaggaaacctgctccagtgcatctgcacaggcaacggccgaggagagtggaagtgtgagaggcacacctctgtgcagaccacatcgagcggatctggccccttcaccgatgttcgtgcagctgtttaccaaccgcagcctcacccccagcctcctccctatggccactgtgtcacagacagtggtgtggtctactctgtggggatgcagtggctgaagacacaaggaaataagcaaatgctttgcacgtgcctgggcaacggagtcagctgccaagagacagctgtaacccagacttacggtggcaactcaaatggagagccatgtgtcttaccattcacctacaatggcaggacgttctactcctgcaccacagaagggcgacaggacggacatctttggtgcagcacaacttcgaattatgagcaggaccagaaatactctttctgcacagaccacactgttttggttcagactcgaggaggaaattccaatggtgccttgtgccacttccccttcctatacaacaaccacaattacactgattgcacttctgagggcagaagagacaacatgaagtggtgtgggaccacacagaactatgatgccgaccagaagtttgggttctgccccatggctgcccacgaggaaatctgcacaaccaatgaaggggtcatgtaccgcattggagatcagtgggataagcagcatgacatgggtcacatgatgaggtgcacgtgtgttgggaatggtcgtggggaatggacatgcattgcctactcgcagcttcgagatcagtgcattgttgatgacatcacttacaatgtgaacgacacattccacaagcgtcatgaagaggggcacatgctgaactgtacatgcttcggtcagggtcggggcaggtggaagtgtgatcccgtcgaccaatgccaggattcagagactgggacgttttatcaaattggagattcatgggagaagtatgtgcatggtgtcagataccagtgctactgctatggccgtggcattggggagtggcattgccaacctttacagacctatccaagctcaagtggtcctgtcgaagtatttatcactgagactccgagtcagcccaactcccaccccatccagtggaatgcaccacagccatctcacatttccaagtacattctcaggtggagacctaaaaattctgtaggccgttggaaggaagctaccataccaggccacttaaactcctacaccatcaaaggcctgaagcctggtgtggtatacgagggccagctcatcagcatccagcagtacggccaccaagaagtgactcgctttgacttcaccaccaccagcaccagcacacctgtgaccagcaacaccgtgacaggagagacgactcccttttctcctcttgtggccacttctgaatctgtgaccgaaatcacagccagtagctttgtggtctcctgggtctcagcttccgacaccgtgtcgggattccgggtggaatatgagctgagtgaggagggagatgagccacagtacctggatcttccaagcacagccacttctgtgaacatccctgacctgcttcctggccgaaaatacattgtaaatgtctatcagatatctgaggatggggagcagagtttgatcctgtctacttcacaaacaacagcgcctgatgcccctcctgacacgactgtggaccaagttgatgacacctcaattgttgttcgctggagcagaccccaggctcccatcacagggtacagaatagtctattcgccatcagtagaaggtagcagcacagaactcaaccttcctgaaactgcaaactccgtcaccctcagtgacttgcaacctggtgttcagtataacatcactatctatgctgtggaagaaaatcaagaaagtacacctgttgtcattcaacaagaaaccactggcaccccacgctcagatacagtgccctctcccagggacctgcagtttgtggaagtgacagacgtgaaggtcaccatcatgtggacaccgcctgagagtgcagtgaccggctaccgtgtggatgtgatccccgtcaacctgcctggcgagcacgggcagaggctgcccatcagcaggaacacctttgcagaagtcaccgggctgtcccctggggtcacctattacttcaaagtctttgcagtgagccatgggagggagagcaagcctctgactgctcaacagacaaccaaactggatgctcccactaacctccagtttgtcaatgaaactgattctactgtcctggtgagatggactccacctcgggcccagataacaggataccgactgaccgtgggccttacccgaagaggacagcccaggcagtacaatgtgggtccctctgtctccaagtacccactgaggaatctgcagcctgcatctgagtacaccgtatccctcgtggccataaagggcaaccaagagagccccaaagccactggagtctttaccacactgcagcctgggagctctattccaccttacaacaccgaggtgactgagaccaccattgtgatcacatggacgcctgctccaagaattggttttaagctgggtgtacgaccaagccagggaggagaggcaccacgagaagtgacttcagactcaggaagcatcgttgtgtccggcttgactccaggagtagaatacgtctacaccatccaagtcctgagagatggacaggaaagagatgcgccaattgtaaacaaagtggtgacaccattgtctccaccaacaaacttgcatctggaggcaaaccctgacactggagtgctcacagtctcctgggagaggagcaccaccccagacattactggttatagaattaccacaacccctacaaacggccagcagggaaattctttggaagaagtggtccatgctgatcagagctcctgcacttttgataacctgagtcccggcctggagtacaatgtcagtgtttacactgtcaaggatgacaaggaaagtgtccctatctctgataccatcatcccagctgttcctcctcccactgacctgcgattcaccaacattggtccagacaccatgcgtgtcacctgggctccacccccatccattgatttaaccaacttcctggtgcgttactcacctgtgaaaaatgaggaagatgttgcagagttgtcaatttctccttcagacaatgcagtggtcttaacaaatctcctgcctggtacagaatatgtagtgagtgtctccagtgtctacgaacaacatgagagcacacctcttagaggaagacagaaaacaggtcttgattccccaactggcattgacttttctgatattactgccaactcttttactgtgcactggattgctcctcgagccaccatcactggctacaggatccgccatcatcccgagcacttcagtgggagacctcgagaagatcgggtgccccactctcggaattccatcaccctcaccaacctcactccaggcacagagtatgtggtcagcatcgttgctcttaatggcagagaggaaagtcccttattgattggccaacaatcaacagtttctgatgttccgagggacctggaagttgttgctgcgacccccaccagcctactgatcagctgggatgctcctgctgtcacagtgagatattacaggatcacttacggagagacaggaggaaatagccctgtccaggagttcactgtgcctgggagcaagtctacagctaccatcagcggccttaaacctggagttgattataccatcactgtgtatgctgtcactggccgtggagacagccccgcaagcagcaagccaatttccattaattaccgaacagaaattgacaaaccatcccagatgcaagtgaccgatgttcaggacaacagcattagtgtcaagtggctgccttcaagttcccctgttactggttacagagtaaccaccactcccaaaaatggaccaggaccaacaaaaactaaaactgcaggtccagatcaaacagaaatgactattgaaggcttgcagcccacagtggagtatgtggttagtgtctatgctcagaatccaagcggagagagtcagcctctggttcagactgcagtaaccaacattgatcgccctaaaggactggcattcactgatgtggatgtcgattccatcaaaattgcttgggaaagcccacaggggcaagtttccaggtacagggtgacctactcgagccctgaggatggaatccatgagctattccctgcacctgatggtgaagaagacactgcagagctgcaaggcctcagaccgggttctgagtacacagtcagtgtggttgccttgcacgatgatatggagagccagcccctgattggaacccagtccacagctattcctgcaccaactgacctgaagttcactcaggtcacacccacaagcctgagcgcccagtggacaccacccaatgttcagctcactggatatcgagtgcgggtgacccccaaggagaagaccggaccaatgaaagaaatcaaccttgctcctgacagctcatccgtggttgtatcaggacttatggtggccaccaaatatgaagtgagtgtctatgctcttaaggacactttgacaagcagaccagctcagggagttgtcaccactctggagaatgtcagcccaccaagaagggctcgtgtgacagatgctactgagaccaccatcaccattagctggagaaccaagactgagacgatcactggcttccaagttgatgccgttccagccaatggccagactccaatccagagaaccatcaagccagatgtcagaagctacaccatcacaggtttacaaccaggcactgactacaagatctacctgtacaccttgaatgacaatgctcggagctcccctgtggtcatcgacgcctccactgccattgatgcaccatccaacctgcgtttcctggccaccacacccaattccttgctggtatcatggcagccgccacgtgccaggattaccggctacatcatcaagtatgagaagcctgggtctcctcccagagaagtggtccctcggccccgccctggtgtcacagaggctactattactggcctggaaccgggaaccgaatatacaatttatgtcattgccctgaagaataatcagaagagcgagcccctgattggaaggaaaaagacagacgagcttccccaactggtaacccttccacaccccaatcttcatggaccagagatcttggatgttccttccacagttcaaaagacccctttcgtcacccaccctgggtatgacactggaaatggtattcagcttcctggcacttctggtcagcaacccagtgttgggcaacaaatgatctttgaggaacatggttttaggcggaccacaccgcccacaacggccacccccataaggcataggccaagaccatacccgccgaatgtaggacaagaagctctctctcagacaaccatctcatgggccccattccaggacacttctgagtacatcatttcatgtcatcctgttggcactgatgaagaacccttacagttcagggttcctggaacttctaccagtgccactctgacaggcctcaccagaggtgccacctacaacgtcatagtggaggcactgaaagaccagcagaggcataaggttcgggaagaggttgttaccgtgggcaactctgtcaacgaaggcttgaaccaacctacggatgactcgtgctttgacccctacacagtttcccattatgccgttggagatgagtgggaacgaatgtctgaatcaggctttaaactgttgtgccagtgcttaggctttggaagtggtcatttcagatgtgattcatctagatggtgccatgacaatggtgtgaactacaagattggagagaagtgggaccgtcagggagaaaatggccagatgatgagctgcacatgtcttgggaacggaaaaggagaattcaagtgtgaccctcatgaggcaacgtgttatgatgatgggaagacataccacgtaggagaacagtggcagaaggaatatctcggtgccatttgctcctgcacatgctttggaggccagcggggctggcgctgtgacaactgccgcagacctgggggtgaacccagtcccgaaggcactactggccagtcctacaaccagtattctcagagataccatcagagaacaaacactaatgttaattgcccaattgagtgcttcatgcctttagatgtacaggctgacagagaagattcccgagagtaaatcatctttccaatccagaggaacaagcatgtctctctgccaagatccatctaaactggagtgatgttagcagacccagcttagagttcttctttctttcttaagccctttgctctggaggaagttctccagcttcagctcaactcacagcttctccaagcatcaccctgggagtttcctgagggttttctcataaatgagggctgcacattgcctgttctgcttcgaagtattcaataccgctcagtattttaaatgaagtgattctaagatttggtttgggatcaataggaaagcatatgcagccaaccaagatgcaaatgttttgaaatgatatgaccaaaattttaagtaggaaagtcacccaaacacttctgctttcacttaagtgtctggcccgcaatactgtaggaacaagcatgatcttgttactgtgatattttaaatatccacagtactcactttttccaaatgatcctagtaattgcctagaaatatctttctcttacctgttatttatcaatttttcccagtatttttatacggaaaaaattgtattgaaaacacttagtatgcagttgataagaggaatttggtataattatggtgggtgattattttttatactgtatgtgccaaagctttactactgtggaaagacaactgttttaataaaagatttacattccacaacttgaagttcatctatttgatataagacaccttcgggggaaataattcctgtgaatattctttttcaattcagcaaacatttgaaaatctatgatgtgcaagtctaattgttgatttcagtacaagattttctaaatcagttgctacaaaaactgattggtttttgtcacttcatctcttcactaatggagatagctttacactttctgctttaatagatttaagtggaccccaatatttattaaaattgctagtttaccgttcagaagtataatagaaataatctttagttgctcttttctaaccattgtaattcttcccttcttccctccacctttccttcattgaataaacctctgttcaaagagattgcctgcaagggaaataaaaatgactaagatattaaaa

SEQ ID NO: 5847 - DNA, 551 bp, Homo sapiens
taacgctctttaagcaaacagagcctgccctataaaatccggggctcgggcggcctctcatccctgactcggggtcgcctttggagcagagaggaggcaatggccaccatggagaacaaggtgatctgcgccctggtcctggtgtccatgctggccctcggcaccctggccgaggcccagacagagacgtgtacagtggccccccgtgaaagacagaattgtggttttcctggtgtcacgccctcccagtgtgcaaataagggctgctgtttcgacgacaccgttcgtggggtcccctggtgcttctatcctaataccatcgacgtccctccagaagaggagtgtgaattttagacacttctgcagggatctgcctgcatcctgacgcggtgccgtccccagcacggtgattagtcccagagctcggctgccacctccaccggacacctcagacacgcttctgcagctgtgcctcggctcacaacacagattgactgctctgactttgactactcaaaattggcctaaaaattaaaagagatcgatattaa

SEQ ID NO: 5848 - DNA, 1293 bp, Homo sapiens
agccccgccccgctagggcggggcctgcgcctgcgcgctcagcggccgggcgtgtaacccacgggtgcgcgcccacgaccgccagactcgagcagtctctggaacacgctgcggggctcccgggcctgagccaggtctgttctccacgcaggtgttccgcgcgccccgttcagccatgtcgtccggcatccatgtagcgctggtgactggaggcaacaagggcatcggcttggccatcgtgcgcgacctgtgccggctgttctcgggggacgtggtgctcacggcgcgggacgtgacgcggggccaggcggccgtacagcagctgcaggcggagggcctgagcccgcgcttccaccagctggacatcgacgatctgcagagcatccgcgccctgcgcgacttcctgcgcaaggagtacgggggcctggacgtgctggtcaacaacgcgggcatcgccttcaaggttgctgatcccacaccctttcatattcaagctgaagtgacgatgaaaacaaatttctttggtacccgagatgtgtgcacagaattactccctctaataaaaccccaagggagagtggtgaacgtatctagcatcatgagcgtcagagcccttaaaagctgcagcccagagctgcagcagaagttccgcagtgagaccatcactgaggaggagctggtggggctcatgaacaagtttgtggaggatacaaagaagggagtgcaccagaaggagggctggcccagcagcgcatacggggtgacgaagattggcgtcaccgttctgtccaggatccacgccaggaaactgagtgagcagaggaaaggggacaagatcctcctgaatgcctgctgcccagggtgggtgagaactgacatggcgggacccaaggccaccaagagcccagaagaaggtgcagagacccctgtgtacttggcccttttgcccccagatgctgagggtccccatggacaatttgtttcagagaagagagttgaacagtggtgagctgggctcacagctccatccatgggccccattttgtaccttgtcctgagttggtccaaagggcatttacaatgtcataaatatccttatataagaaaaaaaatgatctcttatcaattagcactcactaatgtactactaattgagcaacctacgcactcagttgactacgtaaatctgtcaggtcttttgtgatttcctctgatgcaggagaggaaaaattgtaattgatgaaaataatgaatgaaaatcaacagatgaataaatggttctttataagtgtc

SEQ ID NO: 5849 - DNA, 1564 bp, Homo sapiens
accccccaccccctcctccctgcacacaaaagcagcataaattaaccgtcttcgggaagccgagcctctgccagccctgagctgggaagaagcagctacctcggaggcagggcgcgcaggcgggcggcgatgagagggggcgcagccgcagccccgcgctggggagcccaccgctaaccctgcaccccacccacccctgcacaaaagagctggcgggcgctggccacgtcgccctgggtgaccttcctcggatgcagaatccgcccctgcgagcatcctcttcctcctaggctctgaaggcccggggagcgtgagcgatgcccagctgcacccgggcagggctcgcctttgtttgccagtaaggaggagaggctgtctcagctgcagaggggtcatccctgcttcaagccagtgcctcttcccagctcccatggggaccaccgaagccacgctccggatggaaaacgtggacgtgaaggaggaatggcaggacgaagatcttcccaggccactcccagaagagacgggggtggaactgcttggcagcccggtggaagacacatcctctcctcccaacacgctaaatttcaacggagcgcatcgtaagaggaagacgctggtggccccagagatcaacatttctctggatcagagtgaggggtccctgctgtccgatgacttcttggatacccctgatgacctggatattaacgtggatgacatcgagacccccgatgagaccgactcgctggagttcctggggaatggcaacgaactggagtgggaagacgacacccccgtggccaccgccaagaacatgcccggggacagcgcggatctatttggggacggcacgacggaggacggcagcgccgccaacgggcgcctgtggcggacagtgatcatcggggagcaagagcaccgtatagacctgcacatgatccggccttacatgaaagtggtcacccacggagggtactacggcgaaggcctcaacgccatcatcgtcttcgcagcctgcttccttccagacagcagcctccccgactaccactacatcatggagaacctcttcctgtacgtcatcagcagcttagagctcctggtggctgaggactacatgatcgtgtacctgaacggtgccacgccccggcggaggatgcctggaatcggctggctgaagaagtgctaccagatgatcgaccggaggttgcggaaaaacctgaagtccttgatcatcgtccacccctcgtggttcattcggactgtgctggccatctctcgccctttcatcagcgtcaagttcatcaacaagatccagtacgtgcacagcttggaagacctggagcaactcatccctatggaacacgtccagatcccagactgcgtcctgcaatacgaagaggaaagactgaaggccaggagggagagcgcgaggccccagccggagtttgtgctgcccaggtctgaagagaagccagaggtggcaccagtggaaaacaggtctgctctggtctcagaagatcaggaaacaagcctccagcccctgcacagatcaagctga

SEQ ID NO: 5850 - DNA, 485 bp, Homo sapiens
gcgcccagaacgccccggccatgggcatccgaggcatgctgcgagccgcagtgatcctgctgctcatcaggacctggctcgcggagggcaactaccccagtcccatcccgaaattccacttcgagttctcctctgctgtgcccgaagtcgtcctgaacctcttcaactgcaaaaattgtgcaaatgaagctgtggttcaaaagattttggacagggtgctgtcaagatacgatgtccgcctgagaccgaattttggaggtgtcctagagactaacagtacctggggccttaatgatgatgagctcatggcccatggccaagagaaggacagtagctcagagtctgaggatagttgccccccaagccctgggtgctccttcactgaagggttctccttcgatctctttaatcctgactacgtcccaaaggtcgacaagtggtcccggttcctcttccctctggcctttgggttgttcaacattgtt

SEQ ID NO: 5851 - DNA, 1587 bp, Homo sapiens
attgggacatatctgaactatgaatgccgccctggttattccggaagaccgttttctatcatctgcctaaaaaactcagtctggacaagtgctaaggacaagtgcaaacgtaaatcatgtcgtaatcctccagatcctgtgaatggcatggcacatgtgatcaaagacatccagttcagatcccaaattaaatattcttgtcctaaaggataccgactcattggttcctcgtctgccacatgcatcatctcaggcaacactgtcatttgggataataaaacacctgtttgtgacagaattatttgtgggctaccccccaccatcgccaatggagatttcactagcatcagcagagagtattttcactatggatcagtggtgacctaccactgcaatcttggaagcagagggaaaaaggtgtttgagcttgtgggtgagccctccatatactgcaccagcaaagatgatcaagtgggcatctggagtggcccagcccctcagtgcattatacctaacaaatgcacgcctccaaatgtggaaaatggaatattggtatctgacaacagaagcttattttccttaaatgaagttgtggagtttaggtgtcagcctggctttggcatgaaagggccctcccatgtgaagtgccaggccctgaacaaatgggagccagagttaccaagctgctccagggtatgtcagccacctccagatgtcctgcatgctgagcgtacccaaagggacaaggacaacttttcacccgggcaggaagtgttctacagctgtgagcccggctacgacctcagaggatctacgtatttgcactgcacaccccagggagactggagccctgcagcccccagatgtgaagtgaaatcctgtgatgacttcctgggccaacttcctaatggccatgtgctatttccacttaatctccagcttggagcaaaagtggattttgtttgtgatgaaggatttcaattaaaaggcagctctgctagttactgtgttttggctggaatggaaagcctttggaatagcagtgttccagtgtgtgaacgtaaatcatgtgaaactcctccagttccagtgaatggcatggtgcatgtgatcacagacatccatgttggatccagaatcaactattcttgtactacagggttctgattaaaaggcaggtctgctagtcattgtgtcttggctggaatgaaagccctttggaatagcagtgttccagtgtgtgaacaaatcttttgtccaaatcctccagctatccttaatgggagacacacaggaactccccttggagatattccctatggaaaagaagtatcttacacatgtgacccccacccagacagagggatgaccttcaacctcattggggagagcaccatccgccgcacaagtgaacctcatgggaatggggtttggagcagccctgcccctcgctgtgaacttcctgttggtgctggttcacatgatgctcttatagttggcactttacttggtacgatcatctttattttaatcatcattttcctctattggataattttcaagcacagaaaaagggaccttccttga

SEQ ID NO: 5852 - DNA, 4524 bp, Homo sapiens
tgggggcgtcctccttcgtccccgcccggctgtcaagctgtgttctagcggccgagggaccgaggggggctaagaaagggggcgcccagccatgcagaggcaaaaaggcgctgcggaacggggtccccgtcgccagtgctgaggcaggaggtcggagccacaagtgaggggctgggaagcaggacccagcacgggcgtcttggcaggcggccgggcgcagggccaggctgctggggacgctcagggctttccacccaagccatgggcgctgtcgggcactcgggggtcccctcgtggctccggccactcggcgtgggcattacgttggcttcacatcgccatccagcctcgaagccaacaggactgaaaaatagcttcggccaaacgttctcctcccgctaaggagaggggtcgagtgcgtcagcccgaggggactggagagggatgccctagccctcgaggggcggaggacccgcggttgaaggaggcagcgggagcggagagcgccctccttgaccatcgaatgcctccttctgtgtttccattcctgtcgagtgggctgggccacgctgaccaccctggaggagggacggacgacgctcggcgggctctgaccgtgccgccttcttgtggctgctgactgggatccaggagggagtgggcatggggcgcagccgcgcctccctccctccccgcctcccgggcgccggggttggcgatgtggagacgtgaggggacccgtcggctgctccggcttctccaggactccgccaggcgcccgcgcgtccctcctcacccggaggaggagaggctccgcgcggggctccgaggcgggcggcgcgcggagccggagtcccagcctcgccatgggacataacgggagctggatctctccaaatgccagcgagccgcacaacgcgtccggcgccgaggctgcgggtgtgaaccgcagcgcgctcggggagttcggcgaggcgcagctgtaccgccagttcaccaccaccgtgcaggtcgtcatcttcataggctcgctgctcggaaacttcatggtgttatggtcaacttgccgcacaaccgtgttcaaatctgtcaccaacaggttcattaaaaacctggcctgctcggggatttgtgccagcctggtctgtgtgcccttcgacatcatcctcagcaccagtcctcactgttgctggtggatctacaccatgctcttctgcaaggtcgtcaaatttttgcacaaagtattctgctctgtgaccatcctcagcttccctgctattgctttggacaggtactactcagtcctctatccactggagaggaaaatatctgatgccaagtcccgtgaactggtgatgtacatctgggcccatgcagtggtggccagtgtccctgtgtttgcagtaaccaatgtggctgacatctatgccacgtccacctgcacggaagtctggagcaactccttgggccacctggtgtacgttctggtgtataacatcaccacggtcattgtgcctgtggtggtggtgttcctcttcttgatactgatccgacgggccctgagtgccagccagaagaagaaggtcatcatagcagcgctccggaccccacagaacaccatctctattccctatgcctcccagcgggaggccgagctgcacgccaccctgctctccatggtgatggtcttcatcttgtgtagcgtgccctatgccaccctggtcgtctaccagactgtgctcaatgtccctgacacttccgtcttcttgctgctcactgctgtttggctgcccaaagtctccctgctggcaaaccctgttctctttcttactgtgaacaaatctgtccgcaagtgcttgatagggaccctggtgcaactacaccaccggtacagtcgccgtaatgtggtcagtacagggagtggcatggctgaggccagcctggaacccagcatacgctcgggtagccagctcctggagatgttccacattgggcagcagcagatctttaagcccacagaggatgaggaagagagtgaggccaagtacattggctcagctgacttccaggccaaggagatatttagcacctgcctggagggagagcaggggccacagtttgcgccctctgccccacccctgagcacagtggactctgtatcccaggtggcaccggcagcccctgtggaacctgaaacattccctgataagtattccctgcagtttggctttgggccttttgagttgcctcctcagtggctctcagagacccgaaacagcaagaagcggctgcttccccccttgggcaacaccccagaagagctgatccagacaaaggtgcccaaggtaggcagggtggagcggaagatgagcagaaacaataaagtgagcatttttccaaaggtggattcctagcaaggattgtaaattcttggaagcaacggggagcttccatattcccaccagagtgtgggaatgctgtggccatgtgattgtatgatctccttgcaactcagtgtgagttgattcctccaatatgggccagatgcttttgaatgatagggaaatctacataaaatccagtgtcctctttattgagggagtatatgtatccatctcagtgatccatgtccttagtgaagtccacattattctctgtggggacaagagctgggcagttttgaatgggtcttgaggtgggtaccccatgtgcactttctgaggatgcctcacttccctgggctctgcagagaacacacagagagaagactttcagagctcacaggagcagggagcaggagcactctaagggaattccaagatcatgatggagcatggtggctccagagaaaatgcctgtttgatgaacttaaacatgtcaaacattttctgttgagaaggtagggatttggtgtcttacactgtttctctggaagccccagtcatatgactcactgtttctcctgatacccttcgtccctttcattgggatgtaggtaaggaatgacgattcctcacctatggtacacatggcgatagatgtgcccgggagtaagggagatattttgtccttgataattctgattttcccttggcatcaccaacgcctcagagagatacacctgcaccctccagtcagggtcagtgttggctggaaaacactgaaaagtcttcgctctgtctttcaccttaaattgtgttttctcaacaaatgagagagaagcttacgggggagatgcctgagagatgcctatggcgctgtagtttttttttcttccctatgatctcacatgaaaggtgctatgtaacaaccagtatgagtcaaatatattgaaaaaatcatcttatgcaaactttaggaattaaaaggtatttttaaaatggagagttagtgtaagctgggtcctttggaaacatcaaactgaaaaggcctgatttggaaaggtgactctgcccaaaaggttggcaagaatctgacaaagatggtttccttccgaggaagactccggaactcaggtgtggccagtctccttttcagtctgtttgtacagctgcggttctctcttaattttggacacagaggaggaacagaacagggagaaataatcattgtagagtgccaaggcaacatctgacccagatgagctcttcacttcctccttccctgtcgttgtagagccagactgggtagaagagggagggcagtgtcctcaactcatcagcctcacaagcaatttgggacccctctggggtggatttcaccaggttgaattagaaccgcagataatacttccctgttagtgaggacaaaccaagcgccagctctgcccttttctctagagtgttgtgttcttgctcttggtacttacaggagctagtctggtgccttgagcaagcttgaagggaagtgggtgtcctcaccagcaaacttccacatctcaactcgtgccctcttttggccacactggccccgtctcttggagggagcccagaccctgtagggagttttgttttcctttcttctcttgggtgtggtgtcttgtgtttctgaatgtgaacccaaagaccctacccctggagaggaagcaccttcctctttgtgttggtctcctcatagcactgtttgctcacagcagaaacggggctgccacagcctcctgcggctctgctgccttctgggccctgcgtgcatggcatctatagctccttgccctgatagtcaatgctgtggcccttcaagcttgtctttcaaagctttcacaatcattacaacttttatcaaggggaataataatctctaggaaaattatgtccactttaggagaatctgtcaagtgtagccactttggtgttgttctgataatatactgtatatgtacaacttaataaattttgatgaggcagaatctggttgggtatgtttcttatatatgtttgaagcagatggctgactactaacaggtcattgccaggtgtatttctatactctttgaagaataacattttaataaaaaattgaaaagca

SEQ ID NO: 5853 - DNA, 5517 bp, Homo sapiens; identical to SEQ ID NO: 302

SEQ ID NO: 5854 - DNA, 2235 bp, Homo sapiens
ataaggggcgcttggcgcgcaacgaccccaagccgcagctttgaagcctgagcggccgaactcggcagctccaacccaactcggcttaactccgcctcaccgagcccagtccaagactctgtgctccctaggtttgcaacagctctctggatgccgtggcaagcatttcgcagatttggtcaaaagctggtacgcagacgtacactggagtcaggcatggctgagactcgccttgccagatgcctaagcaccctggatttagtggccctgggtgtgggcagcacattgggtgcaggcgtgtatgtcctagctggcgaggtggccaaagataaagcagggccatccattgtgatctgctttttggtggctgccctgtcttctgtgttggctgggctgtgctatgcggagtttggtgcccgggttccccgttctggttcggcatatctctacagctatgtcactgtgggtgaactctgggccttcaccactggctggaacctcatcctctcctatgtcattggtacagccagtgtggcccgggcctggagctctgcttttgacaacctgattgggaaccacatctctaagactctgcaggggtccattgcactgcacgtgccccatgtccttgcagaatatccagatttctttgctttgggcctcgtgttgctgctcactggattgttggctctcggggctagtgagtcggccctggttaccaaagtgttcacaggcgtgaaccttttggttcttgggttcgtcatgatctctggcttcgttaagggggacgtgcacaactggaagctcacagaagaggactacgaattggccatggctgaactcaatgacacctatagcttgggtcctctgggctctggaggatttgtgcctttcggcttcgagggaattctccgtggagcagcgacctgtttctatgcatttgttggtttcgactgtattgctaccactggagaagaagcccagaatccccagcgttccatcccgatgggcattgtgatctcactgtctgtctgctttttggcgtattttgctgtctcttctgcactcaccctgatgatgccttactaccagcttcagcctgagagccctttgcctgaggcatttctctacattggatgggctcctgcccgctatgttgtggctgttggctccctctgtgctctttctaccagcctcctgggctccatgttccccatgcctcgggtgatctacgcgatggcagaggatggcctcctgttccgtgtacttgctcggatccacaccggcacacgcaccccaatcatagccaccgtggtctctggcattattgcagcattcatggcattcctcttcaaactcactgatcttgtggacctcatgtcaattgggaccctgcttgcttactccctggtgtcgatttgtgttctcatcctcaggtatcaacctgatcaggagacaaagactggggaagaagtggagttgcaggaggaggcaataactactgaatcagagaagttgaccctatggggactatttttcccactcaactccatccccactccactctctggccaaattgtctatgtttgttcctcattgcttgctgtcctgctgactgctctttgcctggtgctggcccagtggtcagttccattgctttctggagacctgctgtggactgcagtggttgtgctgctcctgctgctcattattgggatcattgtggtcatctggagacagccacagagttccactccccttcactttaaggtgcctgctttgcctctcctcccactaatgagcatctttgtgaatatttaccttatgatgcagatgacagctggtacctgggcccgatttggggtctggatgctgattggctttgctatctacttcggctatgggatccagcacagcctggaagagattaagagtaaccaaccctcacgcaagtctagagccaaaactgtagaccttgatcccggcactctctatgtccactcagtttgacatcgtcacacctaaatgctgtctggtcccctgcacaataatggagagtactcctgaccccagtgacagctagccctcccctgtgatggtggtggtggatactaatacagttctgtacgatgtgaaggatgtgtctttgctatttcttgtctattttaacccgtctgcttctaaatgatgtctagctgcttaccaactttaaaaaatgatattaaaagaaagtag

SEQ ID NO: 5855 - DNA, 2341 bp, Homo sapiens
agagagcagattcgcacaaacccggaagcgggtcgcgtggagtgacggtcccaccgcggggatatctcttccaaatgcatgatgaaggagttctcatccacagcgcaaggcaatacagaagtgatccacacagggacattgcaaagacatgaaagtcatcacattagagatttttgcttccaggaaattgagaaagatattcataactttgagtttcagtggcaagaagaggaaaggaatggtcacgaagcacccatgacagaaatcaaagagttgactggtagtacagaccgacatgatcaaaggcatgctggaaacaagcctattaaagatcagcttggatccagctttcattcgcatctgcctgaactccacatatttcagcctgaatggaaaattggtaatcaagttgagaagtctatcatcaatgcctccttaattttgacatcccaaagaatttcttgtagtcccaaaacccgtatttctaataactatgggaataattccctccattcttcattacccatacaaaaattgggaagtacacatgagagaaaaatctttccaatgtaatgagagtggcaaatcctttaattatagctaactcttaaggaaatatcagataatccatttaggatagaaacaatataaatgtgaggtatgtgacaaggtctttaatcagaattgattccttgtatgccataatagatgtcacactggtaagaaaccttacagttgttatgagtgtggcaagaccttcagtcagacgtcatcctttacatgctatcgtagacttcatactggagggaaaccttacaagtgtagtgagcataacaagacctttggttgaaattcagcccttgtaattcataaggcaattcatactggagagaatccttgcaagtgtaatgaatgtggcaaggtttttaatcagaaagcacaccttgcacgtcatcatagacttcatactagagagaagccttacaaatgtgaagaatgtgaaaaagttttcagtcgcaaatcacatcttgaaagacaaaacttaaaagaggtggcgttgcccttgtttttgagaatgccctactgtgtaagtggtagtgttctttcttttttttttttttttaagacggagtctcacctgagcgagcctctgcactggccttatttattattgttattaattttttgtttttgagacggagtttcactcttattgcccaggctggagtgcaatggtgcaatcttggctcactgcaccctctgtctgttgggctcaagcgtttctcttgcctcagcctcccaagtagctgggactacaggtgcatgccaccacgcctggttaatttttgtatttatagtggagatggggtttctccatattggtcaggctggtcttgaacccttgacctcaggtcatccacccgcctcggccttccaaaacgctggatttacaggcttgagccacgcgtccggcctgaagtggtattttttagaaagtaactaaaccttttttcagtttaatgacccagggatgtatttctgaaggacttgggagcgatccttttaaggcaaacaagggagatagtacctgtatcttagtaggaaattaaataattcaaacatcaaatgtttcaaattaaaagctaccgacctttaaataattctgagccttgagaggaacgtggtcatgcaacaagagtccagtggcatgcaggcacaaggttttttcttttttgttttttgtttttttttgagacagtctcgctctgtcgcccaagctgaagtgcagtggtgcgatctcagctcactgcaagctccgcctcctgggttcacgtcattttcctgtctcagcctccccagtagctgggactccaggcacccaccaccactcccggctaattttttgtatttttagtacagacagggtttcactgtgttagccaggatggtcttgatctcctgaccttgtgatccacccacctcagcctcccaaagtgctgggattacaggcatgaatgaccgcgcccagccgcaggcgcaacttttttgagttttcctggccaggcgcagtggctcaagcctgtaatcccagcattttgggaggccgaggtgggcggatcacttgaggtcaggagttagaaaccagcctggccaacgtggtgaaaccccgtctccagtaaacatacaaagccattacagggcatggtggggcacgcctgtattcccagctacttgggaggctgaggcaggagaactgcttgatccggggaggtggaagttgcagtgggccaagatcatgccactgcaccccagcctgggcaacagagcaagactccgtacc

SEQ ID NO: 5856 - DNA, 3834 bp, Homo sapiens
tagttcggctccgccatgccggccgccgggagtaacgagccggacggcgtcctcagctatcagagaccagatgaagaagctgtggtggatcagggtgggaccagtacaattctcaacattcactatgaaaaagaagagctggaaggtcacagaactctgtatgtgggagttcggatgccgcttggccggcagagccatcggcatcaccgcactcatggccagaagcaccggagacgagggcggggcaaaggagccagccagggggaggaaggcctggaagccctggcccacgacacaccatctcagcgtgttcagttcattcttggcaccgaggaagatgaagagcatgtgcctcatgagctgtttacagagctggatgagatctgtatgaaagagggagaagatgctgagtggaaggaaacagccaggtggctgaagtttgaagaagatgttgaagatgggggagaacgctggagcaagccttatgtggcaaccctttcattgcacagcctgtttgagctaaggagctgccttattaatggaacagtcctcctggatatgcatgcaaatagcatagaagaaatttcagacctgatcctggatcagcaagaactgtccagtgacctgaatgacagcatgagggttaaagtgcgggaagcccttctcaaaaagcatcatcatcagaatgaaaagaagagaaacaacctcattcccattgttcgctcctttgctgaggttggcaagaagcagtctgatcctcatttgatggataaacatggtcaaaccgtgtctcctcagtctgttccaactacaaatcttgaagtaaaaaatggagtgaattgtgaacatagtcctgtggatttaagcaaggtagaccttcatttcatgaaaaaaattcctactggggccgaggcctccaatgtcctggttggagaggtggatattttggaccgtcccattgttgcctttgtgaggctgtctccagctgttcttctctcaggcctaacagaagtgccaatcccaacaagatttttgtttatcttattgggtccagtagggaaaggtcagcagtaccatgagattggcagatccatggccaccatcatgacagatgagatttttcatgacgtagcatataaggcaaaagagcgagatgatctcctggcggggattgatgagttcctagaccaggtgacggtgctccctccaggagagtgggatccctccattagaattgagccacccaaaaatgtcccttcccaggagaaaaggaaaatgcctggagttccaaatggaaatgtttgccacatagaacaggaaccacatgggggtcacagtgggccagaacttcagcgcactgggcggctatttgggggcttggtgctggacatcaagcggaaggccccctggtactggagcgactaccgagatgcactcagcttacagtgtttggcttcctttctgttcctgtactgtgcctgcatgtcacctgtcatcacctttgggggactgcttggagaagccactgagggacgcataagtgcaattgaatccttgtttggagcttccatgactgggattgcttattccttgtttgcgggacaggctctcaccatcctgggaagtactggaccagtgcttgtgtttgaaaagattttgttcaaattctgcaaagactatgctctttcatacctctccctgcgagcttgtattggactgtggaccgctttcctgtgtattgtccttgtggcaactgatgccagttcccttgtctgctacattacccgtttcactgaagaagcatttgcctccctaatttgcattattttcatctatgaagcaatagaaaaactgattcacctggcagagacctaccccatccacatgcacagccagctggaccaccttagcctctattactgcaggtgtactctgccagagaatccaaacaatcacaccctccagtactggaaggaccacaacatcgtgacagcagaagtccactgggctaacctgactgtcagtgaatgccaggagatgcatggagagttcatgggatctgcgtgcggccatcatggaccctacactcctgatgtcctcttttggtcctgtattctctttttcaccaccttcatcctctcaagcaccttaaagacgtttaagacgagccgttatttcccaaccagagtacgctccatggtgagtgactttgctgttttcctcactatcttcacaatggtgattattgattttttgattggagtcccatcaccaaagcttcaagttcccagtgtgttcaagccaacaagggatgatcgcggatggattattaatcccattggccccaatccctggtggactgtgatagctgcaattatcccagctcttctctgtactatcttgatattcatggatcagcagatcacagccgtcattattaacaggaaggaacataagctcaagaaaggctgtggctaccacctggacctactgatggtggccatcatgctgggtgtctgctccatcatgggcctgccctggtttgtagctgcaactgtcttgtccatcacacatgtgaacagcctcaagctagaatctgaatgctctgctcctggagaacagcccaagttcctgggcatccgagaacagagagtgacaggccttatgatctttgtgctgatgggctgctcagtcttcatgacggctatcttaaagtttattccaatgccagtactctacggagttttcctttacatgggagtttcttcactacagggaattcagttctttgatcgtctaaagctctttgggatgcccgcaaagcaccagccagatttcatctacctgcggcatgtgccgctgcgcaaagtgcacctcttcaccctcatccagttgacctgtctcgtcctgctctgggtcatcaaggcatctccagctgccattgttttcccaatgatggttttggccttggtctttgtcaggaaagtcatggatctctgtttctctaagcgagagctgagctggctagatgatctcatgcctgaaagcaaaaagaagaagttggatgatgccaaaaagaaggccaaggaggaagaggtcatagtccttgcaccaactgtatacctgggggcctcaaattacagaacataggaagggtcatgtgaaaagtcagcatgtctggaatcccgagggttatatttaggagctgggaagattacccccaaagatgttctcagctaagaatggattagggattcttgcttctgtctgttcttaatttttgggtttgacaaccacttattttttcctttgtttacaatctactcaccaggctcatacctacaatgtgaacatacagtatgcccttattagcagattcaatggctcacattctttcaaaaggtctaatttgacaaatacataagacccattatttcctagaatgtttgtaatatatctaattgcaaatggtgctgtggttggcaccatgcaaagataacttgcataggactttctgtcttttttcatttccctcagcacttggcatcttgtcatctacacaatggaccctcaataaatggcctatatgtgcaaagaaagaatgtgtagcaaatgaaaataccagaccaagaaatgagtgagctgggaagtgtttccaaatacagttagtgcctaaaatagtgtcctttgaaaaaacttttaaaagacttttttttaggccaggcataatgggttatccctgtaattccagggcttttgggagttgaagctggaggattacttgaggccagaagtttgagactagcctaggcaatataatgagaccctgtctct

SEQ ID NO: 5857 - DNA, 2326 bp, Homo sapiens
gggggataggctcagacacaaggagaggcttggagagagcagacgccttctggattcaagaagacgaggcccattcccctcaggctcacctgttactcggcctcccagaaagatggataggagaaatgactacggatatagggtgcctctatttcagggccctctgcctcccccggggagcctggggcttcccttccctccagatatacagactgagaccacagaagaggacagtgtcctgctgatgcataccctgttggcggcaaccaaggactccctggccatggacccaccagttgtcaaccggcctaagaaaagcaagaccaagaaggcccctataaagactattactaaggctgcacctgctgcccctccagtcccagctgccaatgagattgccaccaacaagcccaaaataacttggcaggctttaaacctgccagtcattacccagatcagccaggctttacctaccactgaggtaaccaatactcaggcttcttcagtcactgctcagcctaagaaagccaacaagatgaagagagttactgccaaggcagcccaaggctcccaatccccaactggccatgagggtggcactatacagctgaagtcacccttgcaggtcctaaagctaccagtcatctcacagaatattcacgctccaattgccaatgagtcagccagttcccaagccttgataacctctatcaagcctaagaaagcttccaaggctaagaaggctgcaaataaggccatagctagtgccaccgaggtctcgctggctgcaactgccacccatacagctaccacccaaggccaaattaccaatgagacagccagtatccacaccacagcagcctccatccgaaccaagaaagcctccaaagccaggaagacaattgctaaggtcataaatactgacactgagcatatagaggctctaaatgtcactgacgcagctaccaggcagattgaggcctcagtagtggctatcaggcccaaaaaatccaagggcaagaaggctgccagcaggggcccaaattctgtctctgagatctctgaggccccacttgccactcagatagtcacaaaccaagccctggcagccaccctgcgggtcaagagagggtctagggctcggaaggctgccactaaggctcgggcaactgaaagccagactccaaatgctgaccaaggggcccaggccaagatagcctctgctcagaccaacgtaagtgcccttgagactcaggttgctgctgctgtccaggccctggcagatgactatctggctcagttgagcctggagcccacaaccaggacccggggcaaaagaaaccgaaagtccaagcatctgaatggggatgagagaagtggcagtaattacaggcggatcccatggggccggaggcctgcaccaccgcgagatgtggccattttacaagaaagggctaataagttggtgaaatacctgttggttaaggaccagacaaagatccccatcaaacgctcagacatgctgagggatgtcatccaagaatatgatgaatatttcccagaaatcattgaacgagcaagctacactctggagaagatgtttcgagtcaatctgaaagaaattgataagcaaagtagcttgtatattctcatcagcactcaggaatcctctgcaggcatactgggaacgaccaaggacacacccaagctgggtctcctcatggtgattctgagtgtcatttttatgaatggcaacaaggccagtgaggctgtcatctgggaggtgctgcgcaagttggggctgcgccctggggtgaggcattcactctttggggaagtgaggaagctcatcacagacgagtttgtgaagcagaagtacctggagtacaagagggtccctaacagcagaccacctgaatatgagttcttctggggcttgcgctcctaccacgagactagcaagatgaaagtcctcaagtttgcatgcagggtgcagaagaaagaccccaaggactgggctgtgcagtaccgcgaggcagtggagatggaagtccaagctgcagctgtggctgtggctgaggctgaagccagggctgagatttattccccatgtttacagataccgctaataaattgcagtagtccttcccatggagccaaagtacatccttggaatctttgtccacacagcagtcaaggcagttatggccaatcagctgagggtgtcatgtgatggaaaaatctgtttgctgttcctgctttattgtttgctttctgtgtgctgtcatattttggtatcagagttacattaaatttgcaaaatgaa

SEQ ID NO: 5858 - DNA, 1975 bp, Homo sapiens
gaagtcattcctagcagaggactcagatatatataggattgaagatctctcagttaagtctacatgaaaaggatggtttcttggagcttccacaaacttaaaaccatgaaacatctattattgctactattgtgtgtttttctagttaagtcccaaggtgtcaacgacaatgaggagggtttcttcagtgcccgtggtcatcgaccccttgacaagaagagagaagaggctcccagcctgaggcctgccccaccgcccatcagtggaggtggctatcgggctcgtccagccaaagcagctgccactcaaaagaaagtagaaagaaaagcccctgatgctggaggctgtcttcacgctgacccagacctgggggtgttgtgtcctacaggatgtcagttgcaagaggctttgctacaacaggaaaggccaatcagaaatagtgttgatgagttaaataacaatgtggaagctgtttcccagacctcctcttcttcctttcagtacatgtatttgctgaaagacctgtggcaaaagaggcagaagcaagtaaaagataatgaaaatgtagtcaatgagtactcctcagaactggaaaagcaccaattatatatagatgagactgtgaatagcaatatcccaactaaccttcgtgtgcttcgttcaatcctggaaaacctgagaagcaaaatacaaaagttagaatctgatgtctcagctcaaatggaatattgtcgcaccccatgcactgtcagttgcaatattcctgtggtgtctggcaaagaatgtgaggaaattatcaggaaaggaggtgaaacatctgaaatgtatctcattcaacctgacagttctgtcaaaccgtatagagtatactgtgacatgaatacagaaaatggaggatggacagtgattcagaaccgtcaagacggtagtgttgactttggcaggaaatgggatccatataaacagggatttggaaatgttgcaaccaacacagatgggaagaattactgtggcctaccaggtgaatattggcttggaaatgataaaattagccagcttaccaggatgggacccacagaacttttgatagaaatggaggactggaaaggagacaaagtaaaggctcactatggaggattcactgtacagaatgaagccaacaaataccagatctcagtgaacaaatacagaggaacagccggtaatgccctcatggatggagcatctcagctgatgggagaaaacaggaccatgaccattcacaacggcatgttcttcagcacgtatgacagagacaatgacggctggttaacatcagatcccagaaaacagtgttctaaagaagacggtggtggatggtggtataatagatgtcatgcagccaatccaaacggcagatactactggggtggacagtacacctgggacatggcaaagcatggcacagatgatggtgtagtatggatgaattggaaggggtcatggtactcaatgaggaagatgagtatgaagatcaggcccttcttcccacagcaatagtccccaatacgtagatttttgctcttctgtatgtgacaacatttttgtacattatgttattggaattttctttcatacattatattcctctaaaactctcaagcagacgtgagtgtgactttttgaaaaaagtataggataaattacattaaaatagcacatgattttcttttgttttcttcatttctcttgctcaccaagaagtaacaaaagtatagttttgacagagttggtgttcataatttcagttctagttgattgcgagaattttcaaataaggaagaggggtcttttatccttgtcgtaggaaaaccatgacggaaaggaaaaactgatgtttaaaagtccacttttaaaactatatttatttatgtaggatctgtcaaagaaaacttccaaaaagatttattaattaaaccagactctgttgcaataa

SEQ ID NO: 5859 - DNA, 4411 bp, Homo sapiens
agggcctgtccctctcacttccactcgattgtaatttcatccccgggccggtcgagcctccctccctcccgcggccagcccttccctcccagtcggcctccttcgtcgcccccgcccccgcgaaaagccctgcagcttgcagccggcttcactcgcgcacgccgacctcccggctgcagtcctacctcttggaactacccgtgtttccgggcccagccctcgcagccccccacctcctcgccccggcccggggatccgttggggccgcgtcccccacgcgcccccggagacgccctttccgtgtgcgcccgggacttggtgaaactttgcaggcgccggctgcgaaatggatttaatccgaggcgtcttgctccggctcctgctcctggcttccagcctcggacccggcgcggtgtcgctccgagcggccatccgaaaaccaggcaaggtagggcctcctcttgacatcaagctgggcgcattgaactgtacggctttcagcatccagtggaaaatgccaaggcatcctggaagtcccatccttgggtacactgtcttttactctgaggttggcgcagataaatccctgcaggagcagttgcacagcgtgcctctcagccgggacatcccgaccacggaggaagtgattggagatttgaaaccaggcactgaatatcgtgtgagcatagcagcttacagccaggctggcaaagggcggctgagctctcctcggcatgtcaccactttgtcccaagattcctgcctgcctcctgcagctccccagcagccacatgtcattgtggtttcggattctgaggtggccctgtcttggaaacctggagcgagtgaaggaagcgcccctattcagtactattctgtggaattcatcaggccagatttcgacaagaagtggacctcaatccatgagcggatccagatggactccatggttatcaagggcctcgatccagataccaactaccagtttgccgtgagggcaatgaattcccatggccccagcccccgcagctggcccagtgacatcatccggaccctctgccctgaggaggcgggaagtggccgctatggaccccgttatatcaccgacatgggagctggtgaggatgatgaaggatttgaagacgacttagatttggatatttcctttgaggaggttaaaccacttcctgctaccaaaggagggaataagaaatttttggtggaaagcaagaagatgtctatatctaacccaaagaccatttctaggctcatcccccctacctcagcatctctccctgtgaccacggtggctccccagcccattcccatacagagaaaggggaagaatggtgtggccataatgtcaaggctctttgacatgccttgtgatgaaactctctgctctgctgacagcttctgtgtcaatgactacacctgggggggctcgcgatgccagtgcaccctgggcaaaggtggtgagagctgctcagaagatattgttatccagtatcctcagttctttggccactcctatgtaacgtttgaacctctgaagaattcttatcaggcatttcaaattactcttgaatttagggcggaggcagaggatggcttactgctctactgtggggagaacgaacacgggaggggggatttcatgtccctggctatcatccgacgctccctgcagttcaggtttaattgtggaactggggttgccatcatcgtaagtgagaccaaaatcaaactagggggttggcacacggttatgctctacagagatgggctgaacgggctgctgcagctgaacaatggcaccccagtgacaggccagtctcagggccaatacagtaaaattactttccggacacctctctatcttggtggcgctcccagcgcttactggttggttagagcaacagggacaaaccgaggctttcaaggctgtgtgcagtcgctcgctgtgaatgggaggagaattgacatgaggccctggcccctgggaaaagcactcagtggggctgatgtgggggaatgcagcagtggaatctgtgatgaggcctcgtgcatccatggtggcacctgcacagcaatcaaagccgactcctacatttgcctctgtccccttgggtttaaaggtcgacactgtgaagatgctttcaccttgaccattcctcagttcagagagtctctgagatcttacgctgcaactccctggccactggagccccagcattacctttccttcatggaatttgagatcacatttcggccagactcaggagatggtgtcctcctgtacagctatgacacaggcagcaaagacttcctgtccatcaacttggcagggggccacgtggagttccgctttgactgtggctctgggaccggtgtcctcaggagtgaagatcccctcaccctgggcaactggcacgagcttcgtgtatctcgcacagcaaagaatggaatcttacaggtggataagcagaagatagtggagggaatggcagagggaggcttcacacagattaagtgcaacacagacattttcattggcggagtccccaattatgatgatgtgaagaagaactcgggtgtcctgaagcctttcagcgggagcatccagaagatcatcctgaatgaccgaaccatccatgtgaagcatgacttcacctccggagtgaatgtggagaatgcggcccacccctgtgtgagagccccttgtgcccatgggggcagctgccggcccaggaaggagggctatgactgtgactgccccttgggctttgaggggcttcactgccagaaagcgatcatagaagccattgagatcccgcagtttatcggccgcagttacctgacgtatgacaacccagatatcttgaagagggtgtcaggatcaagatcaaatgtgttcatgaggtttaaaacaactgccaaggatggccttttgctgtggaggggagacagccccatgagacccaacagcgacttcatttccttgggccttcgggatggagccctcgtgttcagctataacctgggcagtggtgtggcatccatcatggtgaatggctccttcaacgatggtcggtggcaccgagttaaggccgttagggatggccagtcaggaaagataaccgtggatgactatggagccagaacaggcaaatccccaggcatgatgcggcagcttaacatcaatggagctctgtatgtgggtggaatgaaggaaattgctctgcacactaacaggcaatatatgagagggctcgtgggctgtatctctcacttcaccctgtccaccgattaccacatttccctcgtggaagatgccgtggatgggaaaaacatcaacacttgtggagccaagtaacaccagctggccttgtccaagggacagagccttctattctgagaatcccaggggccctcagaccctgcctgatgctatatgcagaggcccagggaccaggtgtgtttcctctcaccaagaagaaagtacacactgatgagaaactgagaaccaagacaggcatccctgggtggcctttcctgctgacactccacgagctgacccagcagaattctctgtgtaggaagcatcggactttgtccattgaatatgtagcggctgccagagatcacacatcaatgcaaattccagagcctgtctgctatagctcagtgactgtgttgtgattcatagtacattaaaaagagagagagagagaaagaatcccacagggcactattaaaatacttctctccttccctgactcatgacactcttcctgacagcagaatgactgtgtgaccttgaacttcacatttcccacattggcccttggattgttcggattaaccccttccactcctcactggctggttcactgtgttctgactagtccataaaaataaagatggaaggagatcaaacacagaatcataatcataatgcggcccccttccccagagcttacctcgaatgtgaaatccctacttcttataatgcagagttaaggagctgagcccccatgattttgtagctgtacttttgtatgtgtatatttttatagctgcagattgtccacacagtatacttttggaagtttgggtggatgactctgaattcttgcacacctttcctaaaaatttctcccaagagagacttgtttgggccttttgtggtgtcagtggaatggataggtaacttgggtgggcaacttggggagctgaccattctcttttggtaaatgttgacggctcaagaggatgaatatgaagctttccaagataagcagattaaaaggaacatgtgttaccgaggtaggtcactgtcatttttgttttaagagttggggggagtatctatagtaaacttgaataaaggggacaaagctagaactta

SEQ ID NO: 5860 - DNA, 1803 bp, Homo sapiens; identical to SEQ ID NO: 1161

SEQ ID NO: 5861 - DNA, 721 bp, Homo sapiens
cttgttcgtctcactggtgtgagctccagcatcccctttgctcgaaatggaccccaactgctcttgcgccactggtggctcctgcacgtgcgccggctcctgcaagtgcaaagagtgcaaatgcacctcctgcaagaagagtgagtgcggggccatctccaggaatctggggctgtggctcaggttgggagggaactcaaggctggccctgagtgcatccttctggggaactgggctttctttgccctcattgcccgtgtcattccctctccaggctttctgccctaaattcagatggggcaggacagcatttttctcgtgggacacaaaccccaactgtaccccctatggtttcagaacagagctgtgccagacgaaaaaaagcatcctctgggtctgggttctgagctcgagccaggcttgctattagggcagggaggtgcccggtcaagtctactgccacctctcactctccccttcttccccaggctgctgttcctgctgccccgtgggctgtgccaagtgtgcccagggctgcgtctgcaaaggggcatcggagaagtgcagctgctgtgcctgatgtgggaacagctcttctcccagatgtaaatagaacaacctgcacaacctggatttttttaaaaatacaacactgagccatttgctgcatttctttttatactaaatatgtgactgacaataaaaacaattttgactttaa

SEQ ID NO: 5862 - DNA, 2141 bp, Homo sapiens
tggaaagagcttcacctggaagtcacagttcaaggcatcacagaattcataccggagaaaaactatatgaatgtagtgaatgtgggaaaggtttcccttataactcagatctcagtatacatgagaaaattcatactggagagagacaccatgaatgcactgactgtggcaaagcgttcacacaaaagtccacactcaagattcatcagaaaatccatacaggcgagagatcctacatctgtattgaatgcgggcaggccttcatccagaaaacacaattgattgcacaccgaagaattcatagtggagaaaaaccatatgaatgcaataactgtggcaaatccttcatttccaagtcacaacttcaggtacatcaacgtgttcacacaagagtgaagccctatatatgtaccgaatatgggaaggtcttcagcaataattccaacctcattacacatgagaagattcaaagtagagagaaatcttccatatgtactgagtgtgggaaggcctttacctacaggtcagagttgattattcatcagagaattcacactggagagaaaccttatgaatgcagtgactgtgggagagccttcactcagaagtcagcactcacagtgcatcagagaattcatacaggagaaaaatcgtatatatgcatgaaatgtggactggccttcatccggaaggcacacttgattacacatcaaataattcatactggagagaaaccttataaatgtggtcactgtgggaaattgtttacttccaagtcacaactccatgttcataaacgaattcacacaggagaaaagccctatgtatgcaataaatgtgggaaggcattcaccaaccggtcaaatctcattacacatcagaaaactcatacaggagagaaatcttatatatgttccaaatgtggaaaggccttcacccagaggtcagacttgattacacatcagagaatccatactggggagaagccttatgaatgcaatacttgtggaaaagcctttactcagaagtcaaatcttaatatacatcagaaaattcacactggagagagacagtatgaatgccacgaatgtgggaaagccttcaaccagaaatcaatactcattgttcatcagaaaattcatacaggagagaaaccctatgtatgcactgagtgtggaagagctttcatccgcaagtcaaactttattactcatcaaagaattcatactggagagaagccttatgaatgcagtgactgtgggaagtcctttacctccaagtctcagctcctggtgcatcagccagttcacacaggagagaaaccctatgtgtgtgccgagtgtgggaaagcctttagtggcaggtcaaatctcagtaagcaccagaaaactcataccggagaaaagccctacatttgttctgaatgtgggaagacctttcgacagaagtcagagttgattacacatcacagaattcatactggagagaaaccttatgagtgcagtgactgtgggaagtctttcactaaaaaatcacagctccaagtgcatcagcgaattcacactggagagaagccttacgtgtgtgctgagtgtgggaaggcctttagcaacaggtccaatttgaataaacatcagacaacacacactggagacaaaccctacaagtgtggcatctgtgggaaaggcttcgttcagaaatcagtgttcagtgttcatcagagcagccacgcttgagagaaacagtgtgagaaaacccccctgagggttgggtctgattgtacactgttgcacgcatgcagcagaaaaatatgtatattattgtaaatagaaatgaccacatcagaatgtcacacatggctgttctggagagggcctctgagaaggcactgaatgaggcgagggacccttcctacattgtcaccatccccagtaaaccttgggtcattattcatactgacaaggaaccgagtcaatttggtgaataggaaaagccttctcatgaaaactacaatagaatactgttaccaaattcttcataagaaagatcatattatgggaatgataatcctgtttactgtggattaggtatagtgccaacagtttgaatggtaagacaacataatatatatgatagtgatg

SEQ ID NO: 5863 - DNA, 7546 bp, Homo sapiens
cgtccctgcagccctcgcccggcgctccagtagcaggacccggtctcgggaccagccggtaatatgcacgtgtcactagctgaggccctggaggttcggggtggaccacttcaggaggaagaaatatgggctgtattaaatcaaagtgctgaaagtctccaagaattattcagaaaagtaagcctagctgatcctgctgcccttggcttcatcatttctccatggtctctgctgttgctgccatctggtagtgtgtcatttacagatgaaaatatttccaatcaggatcttcgagcattcactgcaccagaggttcttcaaaatcagtcactaacttctctctcagatgttgaaaagatccacatttattctcttggaatgacactgtattggggggctgattatgaagtgcctcagagccaacctattaagcttggagatcatctcaacagcatactgcttggaatgtgtgaggatgttatttacgctcgagtttctgttcggactgtgctggatgcttgcagtgcccacattaggaatagcaattgtgcaccctcattttcctacgtgaaacacttggtaaaactggttctgggaaatctttctgggacagatcagctttcctgtaacagtgaacaaaagcctgatcgaagccaggctattcgagatcgattgcgaggaaaaggattaccaacaggaagaagctctacttctgatgtactagacatacaaaagcctccactctctcatcagacctttcttaacaaagggcttagtaaatctatgggatttctgtccatcaaagatacacaagatgagaattatttcaaggacattttatcagataattctggacgtgaagattctgaaaatacattctccccttaccagttcaaaactagtggcccagaaaaaaaacccatccctggcattgatgtgctttctaagaagaagatctgggcttcatccatggacttgctttgtacagctgacagagacttctcttcaggagagactgccacatatcgtcgttgtcaccctgaggcagtaacagtgcggacttcaactactcctagaaaaaaggaggcaagatactcagatggaagtatagccttggatatctttggccctcagaaaatggatccaatatatcacactcgagaattgcccacctcctcagcaatatcaagtgctttggaccgaatccgagagagacaaaagaaacttcaggttctgagggaagccatgaatgtagaagaaccagttcgaagatacaaaacttatcatggtgatgtctttagtacctccagtgaaagtccatctattatttcctctgaatcagatttcagacaagtgagaagaagtgaagcctcaaagaggtttgaatccagcagtggtctcccaggggtagatgaaaccttaagtcaaggccagtcacagagaccgagcagacaatatgaaacaccctttgaaggcaacttaattaatcaagagatcatgctaaaacggcaagaggaagaactgatgcagctacaagccaaaatggcccttagacagtctcggttgagcctatatccaggagacacaatcaaagcgtccatgcttgacatcaccagggatccgttaagagaaattgccctagaaacagccatgactcaaagaaaactgaggaatttctttggccctgagtttgtgaaaatgacaattgaaccatttatatctttggatttgccacggtctattcttactaagaaagggaagaatgaggataaccgaaggaaagtaaacataatgcttctgaacgggcaaagactggaactgacctgtgataccaaaactatatgtaaagatgtgtttgatatggttgtggcacatattggcttagtagagcatcatttgtttgctttagctaccctcaaagataatgaatatttctttgttgatcctgacttaaaattaaccaaagtggccccagagggatggaaagaagaaccaaagaaaaagaccaaagccactgttaattttactttgtttttcagaattaaattttttatggatgatgttagtctaatacaacatactctgacgtgtcatcagtattaccttcagcttcgaaaagatattttggaggaaaggatgcactgtgatgatgagacttccttattgctggcatccttggctctccaggctgagtatggagattatcaaccagaggttcatggtgtgtcttactttagaatggagcactatttgcccgccagagtgatggagaaacttgatttatcctatatcaaagaagagttacccaaattgcataatacctatgtgggagcttctgaaaaagagacagagttagaatttttaaaggtctgccaaagactgacagaatatggagttcattttcaccgagtgcaccctgagaagaagtcacaaacaggaatattgcttggagtctgttctaaaggtgtccttgtgtttgaagttcacaatggagtgcgcacattggtccttcgctttccatggagggaaaccaagaaaatatctttttctaaaaagaaaatcacattgcaaaatacatcagatggaataaaacatggcttccagacagacaacagtaagatatgccagtacctgctgcacctctgctcttaccagcataagttccagctacagatgagagcaagacagagcaaccaagatgcccaagatattgatgtgctacacaaaagatggagcatagtatcttcaccagaaagggagatcaccttagtgaacctgaaaaaagatgcaaagtatggcttgggatttcaaattattggtggggagaagatgggaagactggacctaggcatatttatcagttcagttgcccctggaggaccagctgacttggatggatgcttgaagccaggagaccgtttgatatctgtgaatagtgtgagtctggagggagtcagccaccatgctgcaattgaaattttgcaaaatgcacctgaagatgtgacacttgttatctctcagccaaaagaaaagatatccaaagtgccttctactcctgtgcatctcaccaatgagatgaaaaactacatgaagaaatcttcctacatgcaagacagtgctatagattcttcttccaaggatcaccactggtcacgtggtaccctgaggcacatctcggagaactcctttgggccatctgggggcctgcgggaaggaagcctgagttctcaagattccaggactgagagtgccagcttgtctcaaagccaggtcaatggtttctttgccagccatttaggtgaccaaacctggcaggaatcacagcatggcagcccttccccatctgtaatatccaaagccaccgagaaagagactttcactgatagtaaccaaagcaaaactaaaaagccaggcatttctgatgtaactgattactcagaccgtggagattcagacatggatgaagccacttactccagcagtcaggatcatcaaacaccaaaacaggaatcttcctcttcagtgaatacatccaacaagatgaattttaaaactttttcttcatcacctcctaagcctggagatatctttgaggttgaactggctaaaaatgataacagcttggggataagtgtcacgggaggtgtgaatacgagtgtcagacatggtggcatttatgtgaaagctgttattccccagggagcagcagagtctgatggtagaattcacaaaggtgatcgcgtcctagctgtcaatggagttagtctagaaggagccacccataagcaagctgtggaaacactgagaaatacaggacaggtggttcatctgttattagaaaagggacaatctccaacatctaaagaacatgtcccggtaaccccacagtgtaccctttcagatcagaatgcccaaggtcaaggcccagaaaaagtgaagaaaacaactcaggtcaaagactacagctttgtcactgaagaaaatacatttgaggtaaaattatttaaaaatagctcaggtctaggattcagtttttctcgagaagataatcttataccggagcaaattaatgccagcatagtaagggttaaaaagctctttcctggacagccagcagcagaaagtggaaaaattgatgtaggagatgttatcttgaaagtgaatggagcctctttgaaaggactatctcagcaggaagtcatatctgctctcaggggaactgctccagaagtattcttgcttctctgcagacctccacctggtgtgctaccggaaattgatactgcgcttttgaccccacttcagtctccagcacaagtacttccaaacagcagtaaagactcttctcagccatcatgtgtggagcaaagcaccagctcagatgaaaatgaaatgtcagacaaaagcaaaaaacagtgcaagtccccatccagaagagacagttacagtgacagcagtgggagtggagaagatgacttagtgacagctccagcaaacatatcaaattcgacctggagttcagctttgcatcagactctaagcaacatggtatcacaggcacagagtcatcatgaagcacccaagagtcaagaagataccatttgtaccatgttttactatcctcagaaaattcccaataaaccagagtttgaggacagtaatccttcccctctaccaccggatatggctcctgggcagagttatcaaccccaatcagaatctgcttcctctagttcgatggataagtatcatatacatcacatttctgaaccaactagacaagaaaactggacacctttgaaaaatgacttggaaaatcaccttgaagactttgaactggaagtagaactcctcattaccctaattaaatcagaaaaaggaagcctgggttttacagtaaccaaaggcaatcagagaattggttgttatgttcatgatgtcatacaggatccagccaaaagtgatggaaggctaaaacctggggaccggctcataaaggttaatgatacagatgttactaatatgactcatacagatgcagttaatctgctccgggctgcatccaaaacagtcagattagttattggacgagttctagaattacccagaataccaatgttgcctcatttgctaccggacataacactaacgtgcaacaaagaggagttgggtttttccttatgtggaggtcatgacagcctttatcaagtggtatatattagtgatattaatccaaggtccgtcgcagccattgagggtaatctccagctattagatgtcatccattatgtgaacggagtcagcacacaaggaatgaccttggaggaagttaacagagcattagacatgtcacttccttcattggtattgaaagcaacaagaaatgatcttccagtggtccccagctcaaagaggtctgctgtttcagctccaaagtcaaccaaaggcaatggttcctacagtgtggggtcttgcagccagcctgccctcactcctaatgattcattctccacggttgctggggaagaaataaatgaaatatcgtaccccaaaggaaaatgttctacttatcagataaagggatcaccaaacttgactctgcccaaagaatcttatatacaagaagatgacatttatgatgattcccaagaagctgaagttatccagtctctgctggatgttgtggatgaggaagcccagaatcttttaaacgaaaataatgcagcaggatactcctgtggtccaggtacattaaagatgaatgggaagttatcagaagagagaacagaagatacagactgcgatggttcacctttacctgagtattttactgaggccaccaaaatgaatggctgtgaagaatattgtgaagaaaaagtaaaaagtgaaagcttaattcagaagccacaagaaaagaagactgatgatgatgaaataacatggggaaatgatgagttgccaatagagagaacaaaccatgaagattctgataaagatcattcctttctgacaaacgatgagctcgctgtactccctgtcgtcaaagtgcttccctctggtaaatacacgggtgccaacttaaaatcagtcattcgagtcctgcggggtttgctagatcaaggaattccttctaaggagctggagaatcttcaagaattaaaacctttggatcagtgtctaattgggcaaactaaggaaaacagaaggaagaacagatataaaaatatacttccctatgatgctacaagagtgcctcttggagatgaaggtggctatatcaatgccagcttcattaagataccagttgggaaagaagagttcgtttacattgcctgccaaggaccactgcctacaactgttggagacttctggcagatgatttgggagcaaaaatccacagtgatagccatgatgactcaagaagtagaaggagaaaaaatcaaatgccagcgctattggcccaacatcctaggcaaaacaacaatggtcagcaacagacttcgactggctcttgtgagaatgcagcagctgaagggctttgtggtgagggcaatgacccttgaagatattcagaccagagaggtgcgccatatttctcatctgaatttcactgcctggccagaccatgatacaccttctcaaccagatgatctgcttacttttatctcctacatgagacacatccacagatcaggcccaatcattacgcactgcagtgctggcattggacgttcagggaccctgatttgcatagatgtggttctgggattaatcagtcaggatcttgattttgacatctctgatttggtgcgctgcatgagactacaaagacacggaatggttcagacagaggatcaatatattttctgctatcaagtcatcctttatgtcctgacacgtcttcaagcagaagaagagcaaaaacagcagcctcagcttctgaagtgacatgaaaagagcctctggatgcatttccatttctctccttaacctccagcagactcctgctctctatccaaaataaagatcacagagcagcaagttcatacaacatgcatgttctcctctatcttagaggggtattcttcttgaaaataaaaaatattgaaatgctgtatttttacagctactttaacctatgataattatttacaaaattttaacactaaccaaacaatgcagatcttagggatgattaaaggcagcatttgatgatagcagacattgttacaaggacatggtgagtctatttttaatgcaccaatcttgtttatagcaaaaatgttttccaatattttaataaagtagttattttataggggatacttgaaaccagtatttaagctttaaatgacagtaatattggcatagaaaaaagtagcaaatgtttactgtatcaatttctaatgtttactatatagaatttcctgtaatatatttatatactttttcatgaaaatggagttatcagttatctgtttgttactgcatcatctgtttgtaatcattatctcactttgtaaataaaaacacaccttaaaacatg

SEQ ID NO: 5864 - DNA, 2333 bp, Homo sapiens
ttccttcctagtcgcggggagtctgagaaagcgcacctgttccgcgaccgtcacgcacccctcctccgcctgccgcgatgtaccgctacctggccaaagcgctgctgccgtcccgggccgggcccgctgccctgggctccgcggccaaccactcggccgcgttgctgggccggggccgcggacagcccgccgccgcctcgcagccggggctcgcattggccgcccggcgccactacagcgagttggtggccgaccgcgaggacgaccccaacttcttcaagatggtggagggcttcttcgatcgcggcgccagcatcgtggaggacaagttggtgaaggacctgaggacccaggaaagcgaggagcagaagcggaaccgggtgcgcggcatcctgcggatcatcaagccctgcaaccatgtgctgagtctctccttccccatccggcgcgacgacggctcctgggaggtcatcgaaggctaccgggcccagcacagccagcaccgcacgccctgcaagggaggtatccgttacagcactgatgtgagtgtagatgaagtaaaagctttggcttctctgatgacatacaagtgtgcagtggttgatgtgccgtttgggggtgctaaagctggtgttaagatcaatcccaagaactataccgaaaatgaattggaaaagatcacaaggaggttcaccatggagctagcaaagaagggctttattggtcctggcgttgatgtgcctgctccagacatgaacacaggtgagcgggagatgtcctggattgctgatacctatgccagcaccatagggcactatgatattaatgcacacgcctgtgttactggtaaacccatcagccaagggggaatccatggacgcatctctgctactggccgtggtgtcttccatgggattgaaaacttcatcaatgaagcttcttacatgagcattttaggaatgacaccagggtttagagataaaacatttgttgttcagggatttggtaatgtgggcctacactctatgagatatttacatcgttttggtgctaaatgtattgctgttggtgagtctgatgggagtatatggaatccagatggtattgacccaaaggaactggaagacttcaaattgcaacatgggtccattctgggcttccccaaggcaaagccctatgaaggaagcatcttggaggtcgactgtgacatactgatcccagctgccactgagaagcagttgaccaaatccaacgcacccagagtcaaagccaagatcattgctgaaggtgccaatgggccaacaactccagaagctgataagatcttcctggagagaaacattttggttattccagatctctacttgaatgctggaggagtgacagtatcttactttgagtggctgaagaatctaaatcatgtcagctatggccgtttgaccttcaaatatgaaagggattctaactaccacttgctcctgtctgttcaagagagtttagaaagaaaatttggaaagcatggtggaactattcccattgtacccacggcagagttccaagacagtatatcgggtgcatctgagaaagacattgtgcactctgccttggcatacacaatggagcgttctgccaggcaaattatgcacacagccatgaagtataacctgggattggacctgagaacagctgcctatgtcaatgccattgaaaaagtcttcaaagtgtacagtgaagctggtgtgaccttcacatagatggatcatggctgacttcctcactaacctcttcacgtgtaacttctgcagacctaccacaagtttacatgtaaccacagaaatccctttctctcctgactcattactaatggataccattctcaacaagtcaatccaaatcagcccgttaaggagaaagaaattaatatacaagctgagtgtgaaagtagaaatcacctacaccagagagctattttggtattttgcctttaaataaaaagcctcctccatatggctgtgcagccttgctctgtggcttttcccagcacaatcagtgctagtgctggggaagggacagtcaagagcagtcagttgcttacttattttgctctggatgagtctgggacacgctgtaactttaacacatttaagaagaaggtgtgtggccttttcagaaggtggcatggtcctcaagtgagttcttagtattttatatcagcaaaataactcaattttgcagattgcaaacaaatataaaagctgtttctgtttatgaattttattcttttagaatagaataagtacatgctgctgtaataaaattgcctttaatcactt

SEQ ID NO: 5865 - DNA, 2244 bp, Homo sapiens
gcgggagggtcagggccagggtgagcgcccgactccgagctgtccccgctcccggcgcggcgctccgctctcagccacctcacggctgccaggagtgcgcgggagtttgccccggagcgcggggaagtttcctccgaagctgcgctcctggaacagcagcacctgcaagcgcccggcagcggcccgcgaggttactttatggaattgggctcttagagaacaagaaaagactgaagttttacgggaaaacaaatcatgtggtcttcagattctgaaataaggagaaatgcagccatctgaaatggtcatgaaccccaaacaagtcttcctctctgtgctgatatttggagtagctgggctactcctcttcatgtatttgcaagtctggattgaagaacaacatacagggagagtggagaagagaagagaacaaaaagtaacttcaggatggggaccagtgaagtacttgcggcctgtacccagaatcatgagtacagaaaaaatccaggaacatatcaccaaccagaaccccaagtttcacatgcctgaggatgtacgagaaaaaaaggaaaatcttctactcaattctgagagatctactaggctcttaacaaagaccagtcattcacaaggaggggatcaagctttaagtaagtccacagggtcaccaacagagaagttgattgaaaaacgtcaaggagctaagactgtttttaacaagttcagcaacatgaattggccagtggacattcaccctttaaacaaaagtttagtcaaagataataaatggaagaaaactgaggagacccaagagaaacgaaggtctttccttcaggagttttgcaagaaatacggtggggtgagtcatcatcagtcacatctttttcatacagtatccagaatctatgtagaagataaacacaaaatcttatattgtgaggtacctaaggctggctgttccaattggaaaagaattctgatggtactaaatggattggcttcctctgcatacaacatctcccacaatgctgtccactacgggaagcatttgaagaagctagatagctttgacctaaaagggatatatacccgcttaaatacttacaccaaagctgtgtttgttcgtgatcccatggaaagattagtatcagcctttagggacaaatttgaacaccccaatagttattaccatccagtattcggaaaggcaattatcaagaaatatcgaccaaatgcctgtgaagaagcattaattaatggatctggagtcaagttcaaagagtttatccactacttgctggattcccaccgtccagtaggaatggacattcactgggaaaaggtcagcaaactctgctatccgtgtttgatcaactatgattttgtagggaaatttgagactttggaagaagatgccaattactttttacagatgatcggtgctccaaaggagctgaaatttcccaactttaaggataggcactcttccgatgaaagaaccaatgctcaagtcgtgagacagtatttaaaggatctgactagaactgagagacaattaatctatgacttttattacttggactatttaatgtttaattatacaactccatttttgtagtttgcattcattttctaaaaccctgtatatacttaatgatgataagttcaaatcagctgtaatttttctataattctctgtatgacagaaatttaaccaagtgcagttgtcttgatttaatgtagatttttaccaaatagtatgacaccaattggcacaaagttataggaaaatcacctacaggagatgtaaacaacttgagttgctctaaaatgtttggaaaagagctgcttttgcattatgaattatattgttgaagcaataacctagccagctgttgcattagctaaagcagcctcttgcaatggtaggaaaaaaggatctcaaatagcatgagtgtatgtctatatcctgaaatttattgtctaaaatgcatgaatatatttttagcagtctgtggcatattaatcaaactgttgaattgttttcttacaccctggaaatctttctatcaactataatgataaatccattttgaagtgatattttggacttaggcattttactttagattggaaggcattatgtgatttacaatatgagaatatagcagaaaaaccagatgaggctgtggctttttatattcaacagccaataaaaaatgcacaacatgctaagatcaaagc

SEQ ID NO: 5866 - DNA, 2148 bp, Homo sapiens; identical to SEQ ID NO: 241

SEQ ID NO: 5867 - DNA, 1771 bp, Homo sapiens
ggaaagcgcatgcgcgtcgggcacagcgcgtgcagcctcgtgcagctcttctggtctccggcgcccgcccctcagacgtaatgttgaattaaagaaaatactttatcagaagaagatggccactgcccagttgcagaggactcccatgagtgcactggtatttcccaataagatatcaactgaacaccagtctttggtgttagtgaagaggcttctagcagtttcagtatcctgtatcacgtatttgaggggaatattcccagaatgcgcttatggaacaagatatctagatgatctttgtgtcaaaatactgagagaagataaaaattgcccaggatctacacagttagtgaaatggatgctaggatgttatgatgctttacagaaaaaatatgtatacacaaacccagaagatcctcagacaatttcagaatgttaccaattcaaattcaaatacaccaataatggaccactcatggacttcataagtaaaaaccaaagcaacgaatctagcatgttgtctactgacaccaagaaagcaagcattctcctcattcgcaagatttatatcctaatgcaaaatctggggcctttacctaatgatgtttgtttgaccatgaaacttttttactatgatgaagttacacccccagattaccagcctcccggttttaaggatggtgattgtgaaggagttatatttgaaggggaacctatgtatttaaatgtgggagaagtctcaacaccttttcacatcttcaaagtaaaagtgaccactgagagagaacgaatggaaaatattgactcaactatactatcaccaaaacaaataaaaacaccatttcaaaaaatcctgagggacaaagatgtagaagatgaacaggagcattatacaagtgatgatttggacattgaaactaaaatggaagaacaggaaaaaaaccctgcatcttctgaacttgaagaaccaagtttagtttgtgaggaagatgaaattatgaggtctaaagaaagtccagatctttctatttctcattctcaggttgagcagttagtcaataaaacatctgaacttgatatgtctgaaagcaaaacaagaagtggaaaagtctttcagaataaaatggcaaatggaaatcaaccagtaaaatcttccaaagaaaatcggaagagaagtcaacatgaatctgggagaatagtcctccatcactttgattcttctagtcaagagtcagtgccaaaaaggagaaagtttagtgaaccaaaggaacatatataaaaattatttttgttctgcaggcttgcagagttcttctcaccatttaaactgaaggaccctatattatatttccctaactctgaagatgtatatgtagtttaaagcagtttgtacactaaaactaagtttttggctgactgtcatattgtggtccttaatcttgagataaatccaatagaacttttgaataaaagcaaaagtacaaatgtcataattgattcggtaataagtaaaatttcaaaattgattttgttcattacctacttaatatttcctttaaatatatactaactgttaaggccctctaatgccatttttctaaacagtaatgtttactttggtattaaaatttggtatggattcactttttacttatgttaaaattataccatttaactggctcttttgtcattgtgctgttattaaaacaatgttcttcaatattttgacataatgtattaacattttaatatataatgtacaatttaagaa

SEQ ID NO: 5868 - DNA, 3386 bp, Homo sapiens
tttccttccggaaaggacgctggattcagggcgcgccagtacgcgcagtagcggcccgcgagtcggcaggtgggtagccccggcgcgggaggaaggggaagttaccttcccctcggaagagggcgctggctcccccatcctgcctttataataaggccaccggaggagaggaagcagccagctgccgtctgcgctttgcaaagcatgcagttaggggagcagctcttggtgagctcagtgaacctgcctggcgcgcacttctacccgctggagagtgcgcgaggcggcagcggcgggagcgctggccacctccccagcgcggccccctctcctcagaagttggacttagacaaagcgtccaagaagttttccggcagtctctcctgcgaggcggtgagcggggagcccgcagccgccagcgcaggggcccccgcggccatgcttagtgacaccgacgccggggacgcatttgccagcgctgcggcagtggccaagccggggcccccggacggccgcaagggctccccctgcggggaggaggagctgccctccgccgctgcagccgccgccgccgccgccgccgcggctgcggccactgcgcgctactccatggacagcctgagctccgagcggtactacctccagtcccccggtcctcaggggtcggagctggctgcgccctgctcactcttcccgtaccaggcggcggctggggcgccccacggacctgtgtacccggctcctaacggggcgcgctacccctacggctccatgctgccccccggcggcttccccgcggctgtgtgcccacccgggagggcgcagttcggcccaggagccggtgcgggcagtggcgcgggcggtagcagcggcgggggcggcggcccgggcacctatcagtacagccagggggctccgctctacgggccgtaccctggagccgcagcggcgggatcttgcggaggactggggggcctgggggttccaggttctggcttccgtgcccacgtctacctgtgcaaccggcctctgtggctcaaattccaccgccaccaaactgagatgatcattacgaaacagggcaggcgcatgtttcctttcttgagcttcaacataaacggactcaatcccactgcccactacaatgtgttcgtagaggtggtgctggcggaccccaaccactggcgcttccaggggggcaaatgggtgacctgtggcaaagccgacaataacatgcagggcaacaaaatgtatgttcacccagagtctcctaatactggttcccactggatgagacaggagatttcattcgggaaattaaaactcaccaataacaaaggcgcaaataacaacaacacccagatgatagtcttacaatccttacacaaataccaaccccgactgcatattgttgaagttacagaggatggcgtggaggacttgaatgagccctcaaagacccagacttttaccttctcagaaacgcaattcattgcagtgactgcctaccaaaacaccgatattactcaactaaagattgatcataacccctttgcaaaaggcttcagagacaactatgattcatcccatcagattgtccctggaggtcggtacggcgttcaatccttcttcccggagccctttgtcaacactttacctcaagcccgctattataatggcgagagaaccgtgccacagaccaacggcctcctttcaccccaacagagcgaagaggtggccaaccctccccagcggtggcttgtcacgcctgtccagcaacctgggaccaacaaactagacatcagttcctatgaatctgaatatacttctagcacattgctcccatatggcattaaatccttgccccttcagacatcccatgccctggggtattacccagacccaacctttcctgcaatggcagggtggggaggtcgaggttcttaccagaggaagatggcagctggactaccatggacctccagaacaagccccactgtgttctctgaagatcagctctccaaggagaaagtgaaagaggaaattggctcttcttggatagagacacccccttccatcaaatctctagattccaatgattcaggagtatacaccagtgcttgtaagcgaaggcggctgtctcctagcaactccagtaatgaaaattcaccctccataaagtgtgaggacattaatgctgaagagtatagtaaagacacctcaaaaggcatgggagggtattatgctttttacacaactccctaaagagttattttaacctcaaaaattagctaactttttgcagatggacttggtggtgttttttgttgtcttctttgcctaggttgccaaaaagatgtttgccttccaccttgatgcatcctgttttgtgcaattctctaaaagaaggtgccaaagctttttgattgctgcaggtaactgaaacaaacctagcatttttaaaaaataagattaatggaagactttaaggtattttaaaattcgaagggtatccaaggttctgtatttatttattggggagacactaacccttcaaagaagcaggctgtgaacattgggtgcccagtgctatcagatgagttaaaacctttgattctcatttctatttgtaaattcttaagcaaatagaagccgagtgttaaggtgttttgcttctgaaagagggctgtgccttccgtttcagaaggagacattttgctgttacattctgccaggggcaaaagatactaggcccaggagtcaagaaaagcttttgtgaaagtgatagtttcacctgactttgattccttaacccccggcttttggaacaagccatgtttgccctagtccaggattgcctcacttgagacttgctaggcctctgctgtgtgctggggtggccagtgggactcaggagagagcaagctaaggagtcaccaaaaaaaaaaaaaaaaaaaagggagaatttaaaagtgtacagttgtgtgtttagatacactatagaataatgtggtatatattgtacaaatagtctacataggtgtctgggataatgtaaaactggtgctttggctttgtaaagaatttgcaaatcacttaacagctgcaggggcaaggggagagtttcatcatccccatgatatttgggaatattctgtttacttcttagatagttaagaatgtattcagctactatgtactaacttgaaccgtgtttaaggaaaactcctatttcatcctcttcttgcgccatcccctctccctaacttggtaatgtgaagaaactaaaacctgataccacagctcctataggcattttagagatcttggatttttatgtacagtcttagtcatttttaataaatgtggttcagtaagggaacgga

SEQ ID NO: 5869 - DNA, 3475 bp, Homo sapiens
aaactgcagggattacaggcagaagccaccatgcccggctaataacctgaatctcttgacggtgaagagaaataaggagaggggtaaaatggctaaaggatgtctgtttggaggcaaggaaggtcgcccagaggtcaggcacgctccccttggcggacacagctgggcttctcagagactcctaaatcctgcctcgcatctcaaatcggcttaacgacgcgaaagagctgggcgacgcgcgcgcactctcgcggaagcttgagtctcggcgcccgccgtagacgtcgtgacagaggcggcccgttgccttggagccagagagacgcagctaggcctgcacggctgtggagagatcctgccacgggccttgttcaccatgtcggtgctggatgcgctttgggaggatcgggatgtccgtttcgacctgtccgcgcagcaaatgaaaacaagacctggagaagtccttattgattgtttagattccattgaagacaccaaaggaaataatggagatagaggtagactcttggtaacaaatttaagaattctctggcactctttggcattatcaagagtcaatgtttctgtcggttacaattgcatattgaatattacaacaaggactgctaactctaaattacgaggccaaactgaagctctctatatactaacaaaatgtaacagtactcgttttgaatttatatttacaaatttggttcctggaagccctagactttttacttctgtgatggcagtacacagagcttatgaaacttctaaaatgtatcgtgattttaaattaagaagtgcactaattcagaacaagcaactaagactgttgccacaagaacatgtatatgataaaataaatggagtttggaatttatccagtgatcagggcaatttaggaaccttttttattaccaatgtgagaattgtgtggcatgcaaatatgaatgatagttttaatgtcagtataccatatctgcaaattcgttcaataaagattagagattcaaaatttggtttagctcttgtcatagaaagctctcagcagagtggtggatatgttcttggctttaaaatagatcctgtggaaaaactacaagaatcagttaaggaaatcaattcacttcacaaagtctattctgccagtcccatatttggagttgattatgagatggaagaaaagccccagccgctcgaagctctgacagtcgaacaaattcaagatgatgtagaaatagactctgatggtcacacggatgcttttgtggcttattttgctgatggcaataagcaacaagatcgtgaacctgtattttcagaagaactggggcttgcaatagagaaattgaaggatggattcaccctacagggactttgggaagtaatgagttgattgaccttgagttgagatggatttctattaaagatatctctagtttaaagatactagtcacctgccataagtcatggaatagtttttatatttacagcttttatatttaaaacttgtaagagtttttttaatgattgaggaaaaagtcatttagaaaacttcagttttcggccagcgcgtcgagggaggggccagcgacacatggcctagtaaccgtccggccgcggcgctggcttaagccatggctgagggtagctggattcctcaggcccgggcgctcctacagcagtgcctgcacgcccggctgcaaattcgcccagccaatggggacgttgcggcccagtgggtggaggtccaaagaggactggtgatctacgtgtgctttttcaagggagctgataaagaacttcttcccaaaatggccgaagctggactgtactgctgccatctctggctcactgcaacctccctgcctgattctcctgcctcagcctgccgagtgcctgcgattacaggcgcgcgccgccacacctgactggttttcgtatttttttggtggagacggggtttcgctgtgttggccgggctggtctccagctcctaaccgcgagtgatccgccagcctcggcctcccgaggtgccgggattgcagacggagtctggttcacttagtgctcaatggtgcccaggctggagtgcagtggcgtgatctccgctcgctacaacctccacctcccagctgcctgccttggcctcccgaagtgccaagagtgcagcctctgcccggccgccaccccgtctgggaagtgaggagcgtctctgcctggctgcccattgtctgggacgtgagcagcccctctgcctggctgcccagtctggaaagtgaggagcgtctctgcccggccgccatcccatctaggaagtgaggagcgcctcttcccacccgccatcccatctaggaagtgaggagcttctctgcctggccgcccatcgtctgagatgtggggagcacctctgcccggccgcgaccccatttgggaggtgaggagcaactctgcccagccgccccgtctgagaagtgaggagaccctccgcctggcaaccgccccgtctgataagtaaggagcccctctgcccagcagccgccccgtctgagaagtgaggagcccctctgcccagcagccaccctgtctgggaagtgaggagcgtctccgcccggcagccacccagtccgggagggaggtgggggggtcagtcccccgtccggccagccgccccgtccgggaggtgaggggcgcctctgcccagctgcccctactgggaagtgaggagcccctctgccccgccagccaccccgtccgggagggaggtgggggggtcagccccccgcccggccagccgccccgtccgggagggaggtgggggatcagccccccgcccggctagccgccccgtccgggaggcgaggggcgcctctgcccggctgcccctactgggaagtgaggagcccctctgcccggccagccgccccgtccaggagggaggtgggggggtcagccccccgcccggccagccgcccggtccgggagggaggtgggggggtcagccccccgcccggccagccgccccgtccgggaggttaggggcgcctctgcccggccgcccctactgggaagtgaggagcccctctgcccggccaccaccccgtctgggaggtgtacccaacagctcattgagagcgggcgatgatgacagtggcggctttgtggagtggaggtggggggaaggtggggaaaagattgagaaatcggatggttgccgtgtctgtgtagaaagaagtagacatgggagacttttcattttgttctgtactaagaaaaattcttaccctaaaacttaaagtataataaaaaaaaaaaaacttcagttttctaaaaattatatttaaaattgtaatcaaaatgtacctagtttataaatgtttattttgtacttaatacctgtaaagtcttagttttcagacattaagtgactgtatcatgttcggtttaataaagaatttatgcagcacca

SEQ ID NO: 5870 - DNA, 2263 bp, Homo sapiens
atttcagtccccgttaccctctgctttttctgctcctcagagtcaacagctgttgcagcatgagcgatacgcttggttctcctaactagcaccttcccctctcccctgactcagctggtagcccctcctccccgcacctgcccaaaggtcactggacaggcatttgtctggccttcccttttactgctggctgggaaggaggagcatcagaccacagatcctggaaggcacttctctccctgactgctgctcacactgccgtgagaacctgcttatatccaggaccaaggagtgagtggcaatgccaggaagctggtgaagggtttcctctcctccaccatggttgacagcactgagtatgaagtggcctcccagcctgaggtggaaacctcccctttgggtgatggggccagcccagggccggagcaggtgaagctgaagaaggagatctcactgcttaacggcgtgtgcctgattgtggggaacatgatcggctcgggcatctttgtttcccccaagggtgtgctcatatacagtgcctcctttggtctctctctggtcatctgggctgtcgggggcctcttctccgtctttggggccctttgttatgcggaactgggcaccaccattaagaaatctggggccagctatgcctatatcctggaggcctttggaggattccttgctttcatcagactctggacctccctgctcatcattgagcccaccagccaggccatcattgccatcacctttgccaactacatggtacagcctctcttcccgagctgcttcgccccttatgctgccagccgcctgctggctgctgcctgcatttgtctcttaaccttcattaactgtgcctatgtcaaatggggaaccctggtacaagatattttcacctatgctaaagtattggcactgatcgcggtcatcgttgcaggcattgttagacttggccagggagcctctactcattttgagaattcctttgagggttcatcatttgcagtgggtgacattgccctggcactgtactcagctctgttctcctactcaggctgggacaccctcaactatgtcactgaagagatcaagaatcctgagaggaacctgcccctctccattggcatctccatgcccattgtcaccatcatctatatcttgaccaatgtggcctattatactgtgctagacatgagagacatcttggccagtgatgctgttgctgtgacttttgcagatcagatatttggaatatttaactggataattccactgtcagttgcattatcctgttttggtggcctcaatgcctccattgtggctgcttctaggcttttctttgtgggctcaagagaaggccatctccctgatgccatctgcatgatccatgttgagcggttcacaccagtgccttctctgctcttcaatggtatcatggcattgatctacttgtgcgtggaagacatcttccagctcattaactactacagcttcagctactggttctttgtggggctttctattgtgggtcagctttatctgcgctggaaggagcctgatcgacctcgtcccctcaagctcagcgttttcttcccgattgtcttctgcctctgcaccatcttcctggtggctgttccactttacagtgatactatcaactccctcatcggcattgccattgccctctcaggcctgcccttttacttcctcatcatcagagtgccagaacataagcgaccgctttacctccgaaggatcgtggggtctgccacaaggtacctccaggtcctgtgtatgtcagttgctgcagaaatggatttggaagatggaggagagatgcccaagcaacgggatcccaaatctaactaaacaccatctggaatcctgatgtggaaagcaggggtttctggtctactggctagagctaaggaagttgaaaaggaaagctcacttctttggaggcacctgtccagaagcctggcctaggcagcttcaacctttgaacttactttttgaaatgaaaagtaatttatttgttttgctacatactgttccagacttttaaaggggacaatgaaggtgactgtggggaggagcatgtcaggtttgggcttggttgttttagaagcacctgggtgtgcctacctactcctcttttcttttaaaagggcccacaatgctccaatttcctgtctcctttagagagacatgaaactatcacaggtgctggatgacaataaaagtttatgttcctaaa

SEQ ID NO: 5871 - DNA, 5251 bp, Homo sapiens
gacggagttttgctcttattgcccaggctggaatgcaatgatgcgatctcggctcactgaaacctcggtctcctgggttcaagcgattgtcctgcctcagcctctgagtagctgagattacagacatctgaatgggactccgagtgccttacatccctgcagccccttcctcttcctacacccccagcagcaaatgaggcacacctgcagacagcagctatctctctgtggacagtggtggccgccgtgcaggctatagagaggaaggtggagatccacagccggcgactcctacacctggaaggtcggacagggacagcagagaagaaactagccagctgtgaaaagacagttaccgagcttgggaaccagctggagggcaagtgggccgtgctgggaaccctgctgcaggagtacgggctgctgcagaggcggctggagaacttggagaacctgctgcgcaacaggaacttctggatcctgcggctccctccaggtattaagggagatatcccaaaggtgcctgtggcatttgatgatgtctccatctacttttccactccagagtgggaaaaattagaagaatggcaaaaggaactttacaagaatatcatgaagggcaactacgagtctctcatctccatggattatgctataaatcaacctgatgtcttatctcagattcaaccagaaggggaacataatacagaggaccaggcagggccagaggaaagtgagattcccacagaccccagtgaagagcctggtatttcaacatcagatattctgtcttggattaaacaagaagaagagcctcaggttggggccccaccggagtccaaggagagtgacgtgtacaaaagcacttatgctgatgaagagcttgtcatcaaagctgaaggccttgctagatcctcgttgtgccctgaggttccagtccctttctcttctccaccagcagcagcaaaggatgctttttcagatgtggctttcaaaagccagcagtctacatccatgacaccttttggacgtccagccactgacctgcctgaagcctctgagggacaagtgacttttactcagttgggtagctatcccctcccacctccagttggcgagcaggtgttctcatgccaccactgtggcaagaatctcagccaagacatgttgctgacccaccaatgtagccatgctactgagcaccccttaccctgtgcccagtgccctaagcactttactccacaggcggacctcagcagcacctcccaggaccatgccagcgagacaccccccacctgcccacactgtgccaggacttttactcacccatcaagacttacctaccatcttcgggtccataacagcactgagcgtcctttcccctgtcctgattgccccaagcgctttgctgaccaggctcgactcaccagccaccggagagctcatgcaagcgaaaggcccttccgctgtgcccagtgcggcaggagcttcagcttgaaaatcagcctcctgctccaccagcggggtcatgcacaagagcgccctttctcctgccctcagtgtggcattgacttcaacggccactcggccctgatccgccaccagatgatccacacaggcgagcgtccttacccctgcactgactgcagtaagagcttcatgcgcaaggagcacctgctgaaccaccggcggctgcacacaggcgagcggcccttcagttgtcctcactgtggcaagagcttcatccgcaagcaccacctaatgaaacaccagcgcatccacaccggggagcggccctacccctgctcctactgtggcaggagcttccgctacaaacagacactcaaggaccacctccgttcaggccacaatggaggctgtgggggtgatagtgacccatcaggtcagccacccaacccaccaggtcccctcataactgggcttgaaacttctggcctgggtgtcaacactgaaggtctagagaccaaccagtggtatggggaagggagtggagggggagttttgtaaatccaaatctctgtggcttcatgcttgtatatgctcacagcagggcacaaaatccaagagaaggtctgtgagccccatccaacacccacagtaattattatctggcacatcaatgaatttggggtcctatacacttgactagagacatgcttgtgttttggaatttcacacccttacaagaataccacattttgaaacccagaaagacctggaaaggagcccagcatgtccatcttttcaaagatacaacaaaagcagaagttacaagaatattgcggagaggttggaaagcaggatttaacctctagttctcttgttctcagagaacagcaggttgatagtagattatgtctctaggtagagacagatacatgagaagagcctccaaaactggaagcccatcataaggcatgagaatgtttaactataaagccttttattagttctttgatagctaagatggttgttggagaaagtgcttaagccactgtttatgttgctgcctcctctctcaaaaccagccaagatctgttcacacacctctgtggctgtctttccctgaaacatggtaactcaagactgcctgcctaggtttcttagattaattattcacataaattttgtttaatattggttgaacaagaaatctgactttaaaagattattaaggagaatattccttaactatactggcttgatttgaaacaggctcttattgccatttaaactgccagaaatctttgccaaggtcctggttaaaaaaattggaaacggttttcttagccccagctttaaaagctagagatctcagagaaatagctggcttaacaatgacagaacagcttaaaatttgtgcctacaccatgttctgagagtcgttcacatcaaattcttatcttttccaagccagtaagttggcttctccattcctggtgtctgatattcttgacaatcatcagcaacaaagatcacagcactttccagaagcatggagcttcagaaagtgccagtgaactcttggtcctcagtagtgagatgataacagtgttataatgcagcttccttgagccatcagagagagtgtatgttcaccctatctggctgtatcccattggcagtggacagattgaggaaattcctagatcactgagagctaagcaccatgcatagacaacagtttgttcttgcctgtgttgcttttagggactttgactaccacatgttcttttcttggggtgatttaatcacctgggagcatctgagtctgctcctaagtggctttgcaactgggcctaagttctgtttcctttatggatctcaaattttcatctgcacaatgaggctgttgaaaggaaaaaaagtgagcctctaggaattattcaaaaaaagtctgtgatacattccttttcctgccaaagttctgtctctgtctttggcttctgtccaggcaaagctaaataagacagcaaagtcaaagcagataaattcttgttgaaacttgactaaaatttatttgatttgttgttttactcccacttggaatcctgaggtagaagacagaatgcagaagtcttacatcttgggcaggaaactggtttattcctatactcttgtttcctctgcttcttcctgaggtctagaacaaggtctggaaatgtttagacaggatattttcttgatgaagtgataaggaaaggacccatttttttgctcatcacctagcccatccttcactctctctagttatgcataacaacactagaagaaggtgttagcccagctaactttgcttctgggaaggctatgtctgaacatgttgctctgtaggataatcacacttagaaaacatctgctccatgacattcacaataccagggaccatgggagacacaagaaatgtgtgtctgctgtcataacttacagtgaaaaagcccaataatacagaacaagacatgatgggcaataccctagcatattgggattaagagctttctagccagaatctggacctataccatgggaaaatttaggggtgctgggaatcccaaagccaaggttctggcttcattggcaacccactaggaacttgaatgtgagattcagctctagtttgcaccttgatttccccagtgaaaagggagaagagccaaagtattgtctaggtgctgagttcccttttctgagtggatttcaagcatttgccagggtatgctggaggagggactcctaaagtaggtgagatgtgggactaggtaacactttaaatacttttttactcaaagatttgccaagaacacagcttattagtgaaagagacctgtggattgaaatggctgcagatagatcccgcagtcccttctgaaaggaactgtgtagccagcagggacctaaactttggcaaaaagtgaacacaattcaaatacgaatgaaggaagagccctcagatggaacgaaaggcgatgtgcaaggccatcccagagagacggaagcaggtgcgatactaagcctcagcccaagaataaaagagagttcaactgttactcttttctttcatcaatcccctatcagttagaactgcaggccagttccaaagagtgtttgcttaagattcaaaagtgggtaagtaaaatggatcagtgggaaggataaggtgtccaacagaaagtgtggaggagaaactcttggcctatcaagtgctcctgagagaaaccatgcaatttaacacttcagttaaagaaatacatgagaactgcttgtcatgaccagacaagataggaaaggggaaaccccagaaacgtgctcttcatctgtcagccttttggaccaagaagctgtcactatcacacataagcaccattcccttagagtggatccaggtgttgactataaccagatttactctttgcttactaggttttccattgtcaccattggatgaacctctggtttagccacagttgtgaaaataaatggaagttggttgattgtctagaaagtgcaagaagatggccctgctccttttctgctgaacatttagtattggaaactcctacttcccttttcattaataatgtgtgcaagtttcctattagcggggaaggtgtggggctctgctgggcttctcttgagcatatctgagaagtgatgttcatgtctatctcaaccaggaccagaccctgtgacttactcggtaataacagtccacacaagcctcgttgatatt

SEQ ID NO: 5872 - DNA, 4469 bp, Homo sapiens
aaaagctcgccggcagggcgcggcgctagctccgtgtgcctcgcaggcgtggtgggcgcgtcctggcagccgcccgcttggttctcgcgggatccgggctccggctcgacgccggctctctttttgacgccccgccgccggggttgccatggttcatttcttgcacccgggccacacgccccggaacatcgtccctcctgacgctcagaaggatgccctgggctgctgcgtggtacaggaagaggcatctccctacactttggtcaacatctgcctgaatgtcctgattgctaacctggagaaattgtgttctgaaagacctgatggaacactgtgccttccggagcattggagtttccctcaggaagtagccgagcgatttctcagggtgatgacttggcaaggcaagctgactgacagaacagccagcattttccgaggcaaccaaatgaaactgaagctggtcaatatccaaaaagctaaaatctctacagctgcattcataaaagccttctgccgtcataagctcattgaactgaatgctactgcagtgcacgctgacctcccagttccagacatcataagtggactctgcagcaataggtggatccagcaaaacctccagtgtctcctgttagactcgacaagcatccctcaaaattcaagattactgttctttagtcagctcactggtcttcgcattttaagtgtttttaatgtttgttttcatactgaagacctggctaatgtttctcagttaccaagactggaaagcttagatatctctaatactctagtcactgatatttctgcactgcttacctgtaaggatcgattgaagtctctcacaatgcactatctgaaatgcctggccatgaccaaatcacaaattcttgcagtcattagagaacttaaatgtctgcttcaccttgatatttctgatcacaggcaactcaaatcagacctagcttttcatttgctacagcagaaggatatcctgcccaatgttgtgtcattggatatttctgggggcaattgcatcactgatgaagctgtagaactgtttatacgactgcggcctgccatgcaatttgtgggactattggccacggatgctggctcttctgacttctttactacaaagcaaggcttgagggttgctggaggagccagtatgagtcagatttcagaagcactgagccgatacaggaacagatcatgttttgtgaaggaagccctccacaggctgttcacagagacattttcaatggaggtaaccatgcctgctattttaaagcttgtggctataggaatgaggaatcacccattggatttgcgagtgcagttcacagccagtgcttgcgctctcaacctaacacgccagggcctggccaaggggatgcctgttcgcctgttgtcagaggtcacctgtctacttttcaaggctctgaaaaatttcccccattaccagcagttacagaagaattgtcttctctccttaaccaattccaggattcttgtggatgttccatttgacaggtttgatgctgccaagtttgtcatgagatggctctgtaagcatgaaaaccccaagatgcaaacaatggcagtgagtgtcacctctattctggctctgcagctctcacctgagcaaacggcacagcttgaagagcttttcatggcagttaaggaacttctagcaatagtaaaacaaaagactactgagaatttagatgatgtcaccttcttgtttactttgaaagcactttggaatcttacagatgggtctccagctgcctgcaagcacttcattgaaaatcaaggattgcaaatcttcatccaagtcttggagaccttttcagagtcagcaatacaaagcaaagtacttggtcttttgaacaacatagcagaagtcagagagctctcttccaagctggtgaccgaagatgtgctgaagcatatcaacagtttactctgtagcagggaaatggaagtcagctattttgctgcaggtatcatagcccacctgacatctgacagacagctttggatatcccgtgacttccagaggcgtactcttctccaagatctgcatgcaaccatacagaattggccaagttcaagttgtaagatgacagcattggtgacctatagatctttcaagacatttttcccgctccttggcaacttctctcaaccagaggttcagctctgggcactatgggctatgtatcatgtctgcagtaaaaatcccagcaaatactgcaaaatgttagttgaagaagaaggattgcagcttttgtgtgatatccaggagcacagtgaggcaacccccaaagcacagcagattgcagcctccattctggatgacttcagaatgcatttcatgaattatcagaggcccactctgtgtcaaatgcccttctgaacctaaggaatttcagaggtgtgtgctcttcctcaatgtcaggtgttctgccctggcagtaattgcacatcagttgtcattggagtttgtgagttggctgtctcattggcctttgattgttgattttatatatgttacaaaaggttggatttgtatgatagctgtaatcccaagtcaagttggactcattctgcagcctttcagcagcaattttgaagactcaaaccgtggactctgggaaggcctgggagcttgtgttggaacagctatgcaagttacttttctctagccttggacaattttttccctttgggagcttgtcatgggagtgggacctgttcactagaagagaaaggaaacctacagggagactttgatatttatattaaatttcctttgttgttatcgtcatgtgaagctatgagaaaagcttgggaagcatatgcttcaaaatgtagtgtttagaaggcagaacccctgttggagagcggggaaaagaatttatttatttatttatttatctatggctgggtatggtggctcacgcctgtaatcccagcactttgggaggccaaggcaggtggattgtctgaactcaggagttcgagatcagccttgccaacgtggtaaaactccgtctctaccaaaaaatacaaaaattagctgagcgtggtggtgtgcacctttactcctagctacttggaggctgaggtgggaggaccacttgagcccaggaggcagaggttgcagtgagctgagattgcaccactgcactccagcctggatgacagagtgagacctcatctcaaatgaatagaggggtggagaaaagagaaatatatttttttacctttttttttttttttttttttgtgacggaatctcgctctgtcgcccaggctggagtgcagtggcacaatctcggctcactgcaacctctgcctcccaggttccagcaattctcctgcctcagcctcctgagtagctgggactacaggcacatgccgccacgcccggctaatttttgtattttttagtagagacagggtttcaccatattggtcaggctggtctcgacctcctgacctcgtgatccacccgtctcggcctcccaaagtgctgggattacaggtgtgagtcactgcacctggcctttttacaattttgggtgtctatctttggcatgtttcctgttatgtgagcatgacatgctgtgtatgtgagtgagcttgtagggcgtggtgggacttaggcatttgcagacagtgtttagatgaaagattacatgtaatgataaatctgaatccctccattttatttgggtggaaccatgaccaaaaatggtaggaagacgaaaggccagaaagagactttgccagagagttcacggagttttcttaccccgcatgctgactaaagaaaacatgggcttttctgaaaccagcttcaactacagtataaactatatcagaagcttacttgataagccttgcggagctgctctgaggaatagtgtgaattccttccttgccttattgttgactgttaatgaacatgttttgtcatttatctgtttaagtttttcagaaaataaaagtaaatttctgttagcacattttaggattagatttttgtgcttttggctggcttggttcagattcttaactagagtaccatgtactgtctttggaaatcaaatgaggaagaagctcattctcttactctaaaccatgttccaaactattaccagagtccaaccagataagcagaatttgtaaccttacttccttccatagtccttaaactgtactgtattttttcacactcttgcatgattccaaaaggatatcttcctgacctgggttctagtacctcagagcattgttatcagatgctagcttattctaatgtgaggatgtgttaggggaactagtgtgttaagtccaattctgtacaagacatcctttcaagttctgtgtcattcacaacaatcctcacgggtaggtgagttttattttcctcacttaacagatgagaaaaa

SEQ ID NO: 5873 - DNA, 352 bp, Homo sapiens
ttccagacctaccagcagctcaatggccttcccaaagaagaaacttcagggtcttgtggctgcaaccatcacgccaatgactgagaatggagaaatcaacttttcagtaattggtcagtatgtggattatcttgtgaaagaacagggagtgaagaacatttttgtgaatggcacaacaggagaaggcctgtccctgagcgtctcagagcgtcgccaggttgcagaggagtgggtgacaaaagggaaggacaagtcaaaccatcataagttggggaccatccgcacaacccaaagtagacggagtagctttagaagacagctgaaggcctggcacagtggctcacacctgtaa

SEQ ID NO: 5874 - DNA, 1692 bp, Homo sapiens
atgcgcgtcgggcacagcgcgtgcagcctcgtgcagctcttctggtctccggcgcccgcccctcagacgtaatgttgaattaaagaaaatactttatcagaagaagatggccactgcccagttgcagaggactcccatgagtgcactggtatttcccaataagatatcaactgaacaccagtctttggtgttagtgaagaggcttctagcagtttcagtatcctgtatcacgtatttgaggggaatattcccagaatgcgcttatggaacaagatatctagatgatctttgtgtcaaaatactgagagaagataaaaattgcccaggatctacacagttagtgaaatggatgctaggatgttatgatgctttacagaaaaaatatctaaggatggttgttctagctgtatacacaaacccagaagatcctcagacaatttcagaatgttaccaattcaaattcaaatacaccaataatggaccactcatggacttcataagtaaaaaccaaagcaacgaatctagcatgttgtctactgacaccaagaaagcaagcattctcctcattcgcaagatttatatcctaatgcaaaatctggggcctttacctaatgatgtttgtttgaccatgaaacttttttactatgatgaagttacacccccagattaccagcctcccggttttaaggatggtgattgtgaaggagttatatttgaaggggaacctatgtatttaaatgtgggagaagtctcaacaccttttcacatcttcaaagtaaaagtgaccactgagagagaacgaatggaaaatattgactcaactatactatcaccaaaacaaataaaaacaccatttcaaaaaatcctgagggacaaagatgtagaagatgaacaggagcattatacaagtgatgatttggacattgaaactaaaatggaagaacaggaaaaaaaccctgcatcttctgaacttgaagaaccaagtttagtttgtgaggaagatgaaattatgaggtctaaagaaagtccagatctttctatttctcattctcaggttgagcagttagtcaataaaacatctgaacttgatatgtctgaaagcaaaacaagaagtggaaaagtctttcagaataaaatggcaaatggaaatcaaccagtaaaatcttccaaagaaaatcggaagagaagtcaacatgaatctgggagaatagtcctccatcactttgattcttctagtcaagagtcagtgccaaaaaggagaaagtttagtgaaccaaaggaacatatataaaaattatttttgttctgcaggcttgcagagttcttctcaccatttaaactgaaggaccctatattatatttccctaactctgaagatgtatatgtagtttaaagcagtttgtacactaaaactaagtttttggctgactgtcatattgtggtccttaatcttgagataaatccaatagaacttttgaataaaagcaaaagtacaaatgtcataattgattcggtaataagtaaaatttcaaaattgattttgttcattacctacttaatatttcctttaaatatatactaactgttaaggccctctaatgccatttttctaaacagtaatgtttactttggtattaaaatttggtatggattcactttttacttatgttaaaattataccatttaactggc

SEQ ID NO: 5875 - DNA, 7819 bp, Homo sapiens
ggtcggcggcggtgctgggccaggggaaggaagggacacggaggccgccctcgtcccgccacctcctacccgcttccccccagccccggctccgggagatgtgccgggcggggggcccgggttcgccgagccgcaggagagacacgctgggccgaccccagagaggcgctggacaggctggtggtccaggccgtggtgcctgccaggtgatgtggggcaaagccccccgcacaggccactgagagctccggacacgcacccggctgccaccatggcccgcctagccgcagtgctctggaatctgtgtgtcaccgccgtcctggtcacctcggccacccaaggcctgagccgggccgggctcccgttcgggctgatgcgccgggagctggcgtgtgaaggctaccccatcgagctgcggtgccccggcagcgacgtcatcatggtggagaatgccaactacgggcgcacggacgacaagatttgcgatgctgaccctttccagatggagaatgtgcagtgctacctgccggacgccttcaagatcatgtcacagaggtgtaacaaccgcacccagtgcgtggtggtcgccggctcggatgcctttcctgacccctgtcctgggacctacaagtacctggaggtgcagtacgactgtgtcccctacatcttcgtgtgcccagggaccctgcagaaggtgctggagcccacctcgacacacgagtcagagcaccagtctggcgcatggtgcaaggacccgctgcaggcgggtgaccgcatctacgtgatgccctggatcccctaccgcacggacacactgactgagtatgcctcgtgggaggactacgtggccgcccgccacaccaccacctaccgcctgcccaaccgcgtggatggcacaggctttgtggtctacgatggtgccgtcttctacaacaaggagcgcacgcgcaacatcgtcaagtatgacctacggacgcgcatcaagagcggggagacggtcatcaataccgccaactaccatgacacctcgccctaccgctggggcggaaagaccgacattgacctggcggtggacgagaacgggctgtgggtcatctacgccactgagggcaacaacgggcggctggtggtgagccagctgaacccctacacactgcgctttgagggcacgtgggagacgggttacgacaagcgctcggcatccaacgccttcatggtgtgtggggtcctgtacgtcctgcgttccgtgtacgtggatgatgacagcgaggcggctggcaaccgcgtggactatgccttcaacaccaatgccaaccgcgaggagcctgtcagcctcaccttccccaacccctaccagttcatctcctccgttgactacaaccctcgcgacaaccagctgtacgtctggaacaactatttcgtggtgcgctacagcctggagttcgggccgcccgaccccagtgctggcccagccacttccccacccctcagcacgaccaccacagccaggcccacgcccctcaccagcacagcctcgcccgcagccaccaccccgctccgccgggcacccctcaccacgcacccagtgggtgccatcaaccagctgggacctgatctgcctccagccacagccccagtccccagcacccggcggcccccagccccgaatctacacgtgtcccctgagctcttctgcgagccccgagaggtacggcgggtccagtggccggccacccagcagggcatgctggtggagaggccctgccccaaggggactcgaggaattgcctccttccagtgtctaccagccttggggctctggaacccccggggccctgacctcagcaactgcacctccccctgggtcaaccaggtggcccagaagatcaagagtggggagaacgcggccaacatcgccagcgagctggcccgacacacccggggctccatctacgcgggggacgtctcctcctctgtgaagctgatggagcagctgctggacatcctggatgcccagctgcaggccctgcggcccatcgagcgcgagtcagccggcaagaactacaacaagatgcacaagcgagagagaacttgtaaggattatatcaaggccgtggtggagacagtggacaatctgctccggccagaagctctggagtcctggaaggacatgaatgccacggagcaggtgcacacggccaccatgctcctcgacgtcctggaggagggcgccttcctgctggccgacaatgtcagggagcctgcccgcttcctggctgccaaggagaacgtggtcctggaggtcacagtcctgaacacagagggccaggtgcaggagctggtgttcccccaggaggagtacccgagaaagaactccatccagctgtctgccaaaaccatcaagcagaacagccgcaatggggtggtcaaagttgtcttcatcctctacaacaacctgggcctcttcctgtccacggagaatgccacagtgaagctggccggcgaagcaggcccgggtggccctgggggcgcctctctagtggtgaactcacaggtcatcgcagcatccatcaacaaggagtccagccgcgtcttcctcatggaccctgtcatcttcaccgtggcccacctggaggacaagaaccacttcaatgctaactgctccttctggaactactcggagcgttccatgctgggctactggtcgacccaaggctgccgcctggtggagtccaacaagacccataccacgtgtgcctgcagccacctcaccaacttcgctgtgctcatggctcaccgtgagatctaccagggccgcatcaacgagctgctgctgtcggtcatcacctgggtgggcattgtgatctccctggtctgcttggccatctgcatctccaccttctgcttcctgcgggggctgcagaccgaccgcaacaccatccacaagaacctgtgcatcaacctcttcctggctgagctgctcttcctggtcgggatcgacaagactcagtatgagattgcctgccccatcttcgccggcctgctgcactatttcttcctggctgccttctcctggctgtgcctggagggcgtgcacctctacctgctactagtggaggtgtttgagagcgagtattcccgcaccaagtactactacctgggtggctactgcttcccggccctggtggtgggcatcgcggctgccattgactaccgcagctacggcaccgagaaggcctgctggctccgagtggacaattacttcatctggagtttcatcgggccagtctccttcgttatcgtggtcaacctggtgttcctcatggtgaccctgcacaagatgatccgaagctcatctgtgctcaagcccgactccagccgcctggacaacattaaatcctgggcgctgggggccatcgcgctgctgttcctgctgggcctcacctgggctttcggcctcctcttcatcaacaaggagtcggtggtcatggcctatctcttcaccaccttcaacgccttccagggggtcttcatcttcgtctttcactgcgccttacagaagaaggtgcacaaggagtacagcaagtgcctgcgtcactcctactgctgcatccgctccccacccgggggcactcacggatccctcaagacctcagccatgcgaagcaacacccgctactacacagggacccagagccgaattcggaggatgtggaatgacactgtgaggaaacagacggagtcctccttcatggcgggtgacatcaacagcacccccaccctgaaccgaggtaccatggggaaccacctgctgaccaaccccgtgctgcagccccgtgggggcaccagtccctacaacaccctcatcgccgagtcagtgggcttcaatccctcctcgccccctgtcttcaactccccagggagctaccgggaacccaagcaccccttgggaggccgggaagcctgtggcatggacaccctgcccctgaacggcaacttcaataacagttactccttgcgaagtggggatttccctcccggggatgggggccctgagccgccccgaggccggaacctagccgatgcggcggcctttgagaagatgatcatctcagagctggtgcacaacaacctgcgggggagcagcagcgcggccaagggccctccaccgcctgagccccctgtgccacctgtgccagggggcgggggcgaggaagaggcgggcgggcccgggggtgctgaccgggccgagattgaacttctctataaggccctggaggagcctctgctgctgccccgggcccagtcggtgctgtaccagagcgatctggacgagtcggagagctgcacggccgaggacggcgccaccagccggcccctctcctcccctcctggccgggactccctctatgccagcggggccaacctgcgggactcaccctcctacccggacagcagccctgaggggcccagtgaggccctgcccccaccccctcccgcaccccccggcccccccgaaatctactacacctcgcgcccgccagccctggtggcccggaatcccctgcagggctactaccaggtgcggcgtcctagccacgagggctacctggcagccccaggccttgaggggccagggcccgatggggacgggcagatgcagctggtcaccagtctctgagggcacctcatggaccaggggctggtggcccaggccagggagggaaccctgggcagggctctggtgggagagggagacagatggaggcagtggctggtgggccactctctccaggtgcccctcagccatgggccctacagtcccctcaggggactctaacctgggggcctgaggtgccagggttcacagacagggtttcccaccagccacacgcaccagctctatttgggggaagtgtagtgaggaggagcccagaggaccccaggggagtgaggagggagaacttggaagggtgcagcccacttccagactctcccctctcccacccttctaccctgtgaagggaaatgagggctttagtttcctgggcagggaggggcagcttctgaggttgccaaaggcccccactggatggaacctgttagctgctcctctccgcagccagaaatgctgccggctgcacccagagggagcagtgaggcaggacagatggacaggttcctcctgcgctgtaattccctgctccctggagactgggaaaaggccgcagggcagggggactgggcggtggtggctggtggtttaaaggttgaactttctctgaagctcctttccccttgctcttggtccctgccccgcaagcaaacctgccccctctgcctcccagtgcacccaatgaccccctcccttggggcgactcctgatgaagcacaactccccgcagggcccccagcccacaggggtggccatatttgggcagttcccagtcctgtgggctcggctatctggggagcagattttgggtctggatctccctggggagtgggtcctgggcttggatctttccctagggggccctcttactccttcctctctcctcctccttccccattgctgtaaatatttcaacgaaatggaaaagaaaaaaaaaagacaaaaaaaaaaaaaaagaaaagaaaaaaaatctcatcacttgaagccaccgggagcctgcggcccgggccagcccgggctttctccggagcagagcagcgctgctggcctggcagccaggacttctccgtgtacgtgcatccccagtccccgccggggcgggcgggccgccagagcagctttttacaatccagagacagaaaacaaaatctagatgcaacagcgaaacaaagaacccatttccttcctggcaccctcctttcctgctccgcctgcccggcatcatcagcccttctggggcgtgtacctctcactgcctgccccaggaccagaggcctgtctcccccttccctccccaccggcccgggggagacctcttcacacccaaagatgctttgtcaagatggctgcgctgtccctttgagttcctgcttcttgtatattgctctggggactctcgccggggaagatggggctgatttcccacctagagaggttgatggcagaaggaaaatggggaggcactggggttgtggagggcatgggtatggctgaggagggtgctgggaacggcaaggcggtctgggggatggggaggggcaaaggtgagagatcaccttccctatcctccaccttcccgcagggaagacgaagccaggtgccagggctggggtcgggacacccatgttctgggcggcttgaccccaaatcccagaccccggaagctccaggctcgggatgtgtcctgagcacctgtcccggccccctcctctccagcctgtcaggccagcctccccagcccccttccctcaactctaggggcagcatagccccaggccaccctagcccagcccctgcattgccgtttccccagaggtggcccctccacctctgctctgacctctccccatctctctgcccctccttttctcacaagtgccatgagttttcaaacatcttcgggtctcagcctgctgctgccatgaactttgttgggttaagggggaggggctctaggaaggaactggggggaaggggacaggtaggtggctggagggaccctttttgctgctagaaagcccctcccttctcccggggagctggggctggcttgtccccatcaattaggggagaaggggtcagaccaaagatggtggtttgtcccgtgtaagggaacaggtgtggggaagaggtggggttgggttccaactctggctttttctggtagaaaggcctaacccattacaccagaagaccatgggtgaagtctagatggggaggagaagtgaggccagggacagtcttgccagacgactctgaggagggcaagggacagttccatggcccttcccggactgcactaggctgggagctctgttgtgtggaggggtggtcagaggtctgtgaagagcgggcaggaggcatgagcaggcgaggagctggcctgtcccgggaagcagcccagcctgtggctgcccccgacaccaggaggagggccaggagagttccagggggctgaggcacacagagaggccaacttcctccctgcccagccttccttgtatctctccagactcggacaatcaaagggagagagggtgtatcgggtcctgttccagccggcatcgccgggtggcttccaggcctcagagctgtgtggcagggccccctgctggggctggacatcactgcagtccagtgcaaagccgcccccagagcccaggtgtccccccaacctaaccagacctggtgccttgacgcccccaccccagctgggacggtacagagaagggtcttggtttcctctcctactcccttccttaggctcctgaactcgtttgctcctaaatcttgttaattctttttctctggattttggtttcttttggctttcccttgccttcccctttctctgtctccaacactctttccccatgtctttctggctgtctctatgttcctcttctcttatcctcaactttctgtccattcgggcctcctccccacctcccacgccccagcccctccctccttggtctccttttcgatatgccaaaccaattttgggtcgagtgcatttaacgagaacaaaacaaaaggctcataacaacaagaacgtttcagaaaaaaacaaaaagttttaaaaaaattgttgagtcaaaaagtcaaacaataaagaaattaagatttcttggaatgacaaga

SEQ ID NO: 5876 - DNA, 5053 bp, Homo sapiens; identical to SEQ ID NO: 382

SEQ ID NO: 5877 - DNA, 4061 bp, Homo sapiens
atggacttgttgtccgggacgtacattttcgcggtcctgctagcatgcgtggtgttccactctggcgcccaggagaaaaactacaccatccgagaagaaatgccagaaaacgtcctgataggcgacttgttgaaagaccttaacttgtcgctgattccaaacaagtccttgacaactgctatgcagttcaagctagtgtacaagaccggagatgtgccactgattcgaattgaagaggatactggtgagatcttcactactggcgctcgcattgatcgtgagaaattatgtgctggtatcccaagggatgagcattgcttttatgaagtggaggttgccattttgccggatgaaatatttagactggttaagatacgttttctgatagaagatataaatgataatgcaccattgttcccagcaacagttatcaacatatcaattccagagaactcggctataaactctaaatatactctcccagcggctgttgatcctgacgtaggaataaacggagttcaaaactacgaactaattaagagtcaaaacatttttggcctcgatgtcattgaaacaccagaaggagacaagatgccacaactgattgttcaaaaggagttagatagggaagagaaggatacctacgtgatgaaagtaaaggttgaagatggtggctttcctcaaagatccagtactgctattttgcaagtgagtgttactgatacaaatgacaaccacccagtctttaaggagacagagattgaagtcagtataccagaaaatgctcctgtaggcacttcagtgacacagctccatgccacagatgctgacataggtgaaaatgccaagatccacttctctttcagcaatctagtctccaacattgccaggagattatttcacctcaatgccaccactggacttatcacaatcaaagaaccactggatagggaagaaacaccaaaccacaagttactggttttggcaagtgatggtggattgatgccagcaagagcaatggtgctggtaaatgttacagatgtcaatgataatgtcccatccattgacataagatacatcgtcaatcctgtcaatgacacagttgttctttcagaaaatattccactcaacaccaaaattgctctcataactgtgacggataaggatgcggaccataatggcagggtgacatgcttcacagatcatgaaatccctttcagattaaggccagtattcagtaatcagttcctcctggagactgcagcatatcttgactatgagtccacaaaagaatatgccattaaattactggctgcagatgctggcaaacctcctttgaatcagtcagcaatgctcttcatcaaagtgaaagatgaaaatgacaatgctccagttttcacccagtctttcgtaactgtttctattcctgagaataactctcctggcatccagttgacgaaagtaagtgcaatggatgcagacagtgggcctaatgctaagatcaattacctgctaggccctgatgctccacctgaattcagcctggattgtcgtacaggcatgctgactgtagtgaagaaactagatagagaaaaagaggataaatatttattcacaattctggcaaaagataacggggtaccacccttaaccagcaatgtcacagtctttgtaagcattattgatcagaatgacaatagcccagttttcactcacaatgaatacaacttctatgtcccagaaaaccttccaaggcatggtacagtaggactaatcactgtaactgatcctgattatggagacaattctgcagttacgctctccattttagatgagaatgatgacttcaccattgattcacaaactggtgtcatccgaccaaatatttcatttgatagagaaaaacaagaatcttacactttctatgtaaaggctgaggatggtggtagagtatcacgttcttcaagtgccaaagtaaccataaatgtggttgatgtcaatgacaacaaaccagttttcattgtccctccttccaactgttcttatgaattggttctaccgtccactaatccaggcacagtggtctttcaggtaattgctgttgacaatgacactggcatgaatgcagaggttcgttacagcattgtaggaggaaacacaagagatctgtttgcaatcgaccaagaaacaggcaacataacattgatggagaaatgtgatgttacagaccttggtttacacagagtgttggtcaaagctaatgacttaggacagcctgattctctcttcagtgttgtaattgtcaatctgttcgtgaatgagtcggtgaccaatgctacactgattaatgaactggtgcgcaaaagcactgaagcaccagtgaccccaaatactgagatagctgatgtatcctcaccaactagtgactatgtcaagatcctggttgcagctgttgctggcaccataactgtcgttgtagttattttcatcactgctgtagtaagatgtcgccaggcaccacaccttaaggctgctcagaaaaacaagcagaattctgaatgggctaccccaaacccagaaaacaggcagatgataatgatgaagaaaaagaaaaagaagaagaagcattcccctaagaacttgctgcttaattttgtcactattgaagaaactaaggcagatgatgttgacagtgatggaaacagagtcacactagaccttcctattgatctagaagagcaaacaatgggaaagtacaattgggtaactacacctactactttcaagcccgacagccctgatttggcccgacactacaaatctgcctctccacagcctgccttccaaattcagcctgaaactcccctgaattcgaagcaccacatcatccaagaactgcctctcgataacacctttgtggcctgtgactctatctccaagtgttcctcaagcagttcagatccctacagcgtttctgactgtggctatccagtgacgaccttcgaggtacctgtgtccgtacacaccagaccgtcccagcggcgtgtcacatttcacctgccagaaggctctcaggaaagcagcagtgatggtggactgggagaccatgatgcaggcagccttaccagcacatctcatggcctgccccttggctatcctcaggaggagtactttgatcgtgctacacccagcaatcgcactgaaggggatggcaactccgatcctgaatctactttcatacctggactaaagaaagctgcagaaataactgttcaaccaactgtggaagaggcctctgacaactgcactcaagaatgtctcatctatggccattctgatgcctgctggatgccggcatctctggatcattccagctcttcgcaagcacaggcctctgctctatgccacagcccaccactgtcacaggcctctactcagcaccacagcccacgagtgacacagaccattgctctctgccacagccctccagtgacacagaccatcgcattgtgccacagcccaccaccgatacaggtgtctgctctccaccacagtcctcctctagtgcaggctactgcacttcaccacagcccaccatcagcacaggcctcagccctctgctacagccctcctttagcacaggctgctgcaatcagccacagctctcctctgccacaggttattgccctccatcgtagtcaggcccaatcatcagtcagtttgcagcaaggttgggtgcaaggtgctgatgggctatgctctgttgatcagggagtgcaaggtagtgcaacatctcagttttacaccatgtctgaaagacttcatcccagtgatgattcaattaaagtcattcctttgacaaccttcactccacgccaacaggccagaccgtccagaggtgattcccccattatggaagaacatcccttgtaaagctaaaatagttacttcaaattttcagaaaagatgtatatagtcaaaatttaagatacaattccaatgagtattctgattatcagatttgtaaataactatgtaaatagaaacagataccagaataa

SEQ ID NO: 5878 - DNA, 6835 bp, Homo sapiens
agcttagcaggcgacgttgcgggccctgggcgccaggagagcttcccggagtcgaccttcctgctggctgctctgtgaccgcttcccggctctgccctcttggccgaagtgcccgctgccgggcgcgggcctcagacaatacaatggtgggtgaagagaagatgtctctaagaaaccggctgtcaaagtccagggaaaatcctgaggaagatgaagaccagagaaaccctgcaaaggagtccctagagacacctagtaatggtcgaattgacataaaacagttgatagcaaagaagataaagttgacagcagaggcagaggaattgaagccattttttatgaaggaagttggcagtcactttgatgattttgtgaccaatctcattgaaaagtcagcatcattagataatggtgggtgcgctctcacaaccttttctgttcttgaaggagagaaaaacaaccatagagcgaaggatttgagagcacctccagaacaaggaaagatttttattgcaaggcgctctctcttagatgaactgcttgaagtggaccacatcagaacaatatatcacatgtttattgccctcctcattctctttatcctcagcacacttgtagtagattacattgatgaaggaaggctggtgcttgagttcagcctcctgtcttatgcttttggcaaatttcctaccgttgtttggacctggtggatcatgttcctgtctacattttcagttccctattttctgtttcaacattgggccactggctatagcaagagttctcatccgctgatccgttctctcttccatggctttcttttcatgatcttccagattggagttctaggttttggaccaacatatgttgtgttagcatatacactgccaccagcttcccggttcatcattatattcgagcagattcgttttgtaatgaaggcccactcatttgtcagagagaacgtgcctcgggtactaaattcagctaaggagaaatcaagcactgttccaatacctacagtcaaccagtatttgtacttcttatttgctcctacccttatctaccgtgacagctatcccaggaatcccactgtaagatggggttatgtcgctatgaagtttgcacaggtctttggttgctttttctatgtgtactacatctttgaaaggctttgtgcccccttgtttcggaatatcaaacaggagcccttcagcgctcgtgttctggtcctatgtgtatttaactccatcttgccaggtgtgctgattctcttccttactttttttgcctttttgcactgctggctcaatgcctttgctgagatgttacgctttggtgacaggatgttctataaggattggtggaactccacgtcatactccaactattatagaacctggaatgtggtggtccatgactggctatattactatgcttacaaggactttctctggtttttctccaagagattcaaatctgctgccatgttagctgtctttgctgtatctgctgtagtacacgaatatgccttggctgtttgcttgagctttttctatcccgtgctcttcgtgctcttcatgttctttggaatggctttcaacttcattgtcaatgatagtcggaaaaagccgatttggaatgttctgatgtggacttctcttttcttgggcaatggagtcttactctgcttttattctcaagaatggtatgcacgtcagcactgtcctctgaaaaatcccacatttttggattatgtccggccacgttcctggacttgtcgttacgtgttttagaagcttggactttgtttcctccttgtcactgaagattgggtagctccctgatttggagccagctgtttccagttgttactgaagttatctgtgttatttggaccactccaggctttacagatgactcactccattcctaggtcacttgaagccaaactgttggaagttcactggagtcttgtacacttaagcagagcagaactttttttgtggggctgggtggggggagaagaccgactaacagctgaagtaatgacagattgttgctgggtcatatcagctttatcccttggtaattatatctgttttgtttcttgactctgtccaatcagagaataaacatcatagtttcttggccactgaattagccaaaacacttaggaagaaatcacttaaatacctctggcttagaaattttttcatgcacactgttggaatgtatgctaattgaacatgcaattggggaagaaaaaatgtagaatgatttttgctatttctagtagaaagaaaatgtctgttttccaaagataatgttatacatcctattttgtaatttttttgaaaaaagttcaatgttcagttttccttagtttttaccttgttttctctataggtcatgatttctgtgaagcaaaaagatgccttttaccatgaattcttgagtttacatcaataatattgtatattaaggggatcagaagtaggaaggaaaaaataagagatagcagaggaaaaagaaaaacatttcctcttataacttctgaagtaatttgtaaaaaagatttgtagagtcaatcatgtgtttaaattattttatcacaaacttaacatggaagatattcctttttaactttgtggtaacttctttgaagttatttagaaatatcctttggaacaattattttattgtctaataaatattgacttctcttgaattattttgcagactagtgagtctgtaccataagtattaatcacctccactcatattaaagtgatcattaagaatccagaagctggcttctgcatttgctcagttatacttttaatggtagtatgtttttaggtggaataaattaatatgtgattggtttcaaggaaatgtactctattatgtaatacttccattttataagatgcccatttctaatacaatgtgtgtaggaattatttgtatgtatgaggtatgattgtaaagattgagcattggaaggggtatcagagaccatgtagttcaactttccactcaaagtaagatttatgaattatttaaatgatagttgttacttggaacagccacttgagaggctctcttggtattgtttggaattgttttaaagtcagtttgagtctcacaagaaggtaagtagagtttcttaatagtcacaacttaatttgaaccacaagtatccagcttaatcacgtatcttactcacgataccactggtccagatgagtttaggtaattttcaaacattaaatccaacttcaacggaaacaaatacactcaagggaagttatttttaaaaaggtactctgcatgttcccgcagtaatgttctgcacaacagtattgtaattgtaatggaatcataacctgctaactagtttgctttaatatggcttgtaattcttgacatttttcttaaaattaaaacgaatttttattttgaatttataactgcattttaaatatattggggacagattgcgctgagacctggttatgagcaagccaatcttttgaatctagagaatggaattcttaggtttatatttctgttaagaaatactataaatatgactcttatgagaagactttgttgctctgtagtgtttctgaatactgtatttgttggattgatcaaggctatttttcaaaaagctctctgcttcctgtttgtttgtttgtttgtttttgagacagagtcttgctctgtcgccggggctggagtgcaatggcgtgaactcagctcactgcaacctctgcctccctggttcaagctattctcctgcctcagcctcctgagtagctgggattacagggccacgcctggctaatttttgtatttttagtagagatggggtttcaccctgttggtcaggctggtctcaaactcctgaccttgtgatctgcccacctcagcctcccaaagtgctgggaagacaggcgttagccaccgtgcccggcctctgtttcctgttattagtgattttcctgcccaagattgcaacaacaaatatgtagaactacagactgtttagaatgctgagactgttctaagaaactttcaaaaacagtagcacttcaaggaatggtcactttctatgaaagaaactggtttgatagccataatcttattgctagctgcttttagcaaaagtcttttcttgaaaccaccacctatactctttaaacaaataaaaactaaaatctcttgctaatgtttcaggaagatttattttttctattttgctattgtggcgaaaattattttcagttataggatacttttttccttctgaaaagtaataagcttaaagtttttgtttctgtaagatgtaatgatagtaactattattttgggcatattaaccaacagaacaattatgtagtatgtatatcactttctcattagatctctaacttgaccttctagtacctttatgtgtgaggataaatttgttagatccttttattctcaatcttggataatgatgcaaaatggaattttgttttgtttgttggtagattcacatactaaaactttgcaggtaaagttgcttgcctcatgttagaatttaattagaaaactgaggctgcctttttttttttttttttttttttttaagacagagtcttgttctgtcgcccaggccagttttttttttcttgtacagatggggttttaccatgttgctcaggctggtctcaaactcctggagtcaagggatctatttgcctcagcctctcaaagtgctgggattacaggtgtgagccacggctcctggctccttgctccagaatcagttttttaatggaagatagctcatactttgtttttgtttttaaagagacagggtctcactctgttgcccaggctggtagtagcgtgatcatagctcactgcagtctcaaactcctggactcaaatagtgctctggagtacctagaactacaagtgcctaccaccacacccagctaatttatttgtttttttttttttagagatggggggggtctccctatgttgcccaggctggtctcaaactcttcacctcaagcaaaactcccactgcagaaagctttgggattacaggcatgagccaccatgccaagcccatacttattgttaataaagtttcagtgacttgcttactaatcttatgcaaaatttcatgtaatttatgtaatactacataacaatgctacatatggtatgtatacatacactgtatacacacaaaggtctgttctgggtattttatgtatcttatctctaggctttatggctctgaaatggagggaactggacataaatgtttcaaggaataaagtgaatgttttgtttgtttgtttgttttgagacggagtctcagtcaccaggctggagtgcagtgctgtgatctcagctcactgcaacctctgcctcctgggttcaagcgattctcctgcctcagcctcccgagtagctggcattacaggtgcctgccaccatgtccagctaatttttgtgtttttagtagagatggggtttcaccatgatggtcaggctggtctcgaactcctgacctcatgatccgccagcctcagcctcccatagtgctgggattataggcatgagccatgctcccggccaaagtgaatgttttgggtgaagtttatataaggatttgacttttgtatcattattaaagtttctgtcaggtaatacagtgttggccctctgttgaaataaaatgttacatatcgctgggtgtagtggctcatgcctttaatcccagtactttgggaggccaaggcaggaggattgcttgagctcagaagtttgagaccagcctgggcaacatagcaaaaccttgtcactataaaaaatacaaaaattagccaggcgtggtggtgcacgcctgtagtctcagctactcagtcggctgaggtgggaagatggcttcaagccgggagatggaggcttcagtgacctgtgacctgtgatcacaccacttaattcctcaaaacatttatgtcccagttccctccatttcagagccatgggcaacagagcgagaccctgtctcaaaaaaaaaattacatataagcccggtttaaagagaggataatatgcaaccaccctagttgaaacagagtgtatcacttctttctcaccctaaatttaatgcctagtttgaaaatcagtagacaataataaagttgataagctttaggttggtaggaaagctatgtaatctatatagtgtactaaatccttatatgtttttggtaaaaaaagactttaatagctaatttggacttcagaaaatgggttaatttcacgagtgcatatcacttttgactatattagtcaagcatattattaaagtttaaaaaactctaaaacttctgtactgtttttttcttaagtgctctcttccttatttctacattactacattcacatttctgctgtcaataagccctaatggagtgataaactttaagctagtagatactgcaccatgtcttgtggtggtgttttcttaatgaaatggaagctgtacttcctgtttgtttttaaatacttttgaaacagacagttcatgtaccccatcatttagagatgcagtttgaatttccatggaaaaaggtgccaattttggattgggaaaggagctgaagccccagtcaagactttgccatttggggtaatgcagcagattcctgtgtctgtatctttccagtgtgtgtgttaatccatagtgttctgagcaccagaagggtcatgtaaatctgaagttgttattaaaggtttttctatagtgaaa

SEQ ID NO: 5879 - DNA, 5960 bp, Homo sapiens
attacagaggaaggagctcgctatataagccagccaaagttggctgcaccggccacagcctgcctactgtcacccgcctctcccgcgcgcagatacacgcccccgcctccgtgggcacaaaggcagcgctgctggggaactcgggggaacgcgcacgtgggaaccgccgcagctccacactccaggtacttcttccaaggacctaggtctctcgcccatcggaaagaaaataattctttcaagaagatcagggacaactgatttgaagtctactctgtgcttctaaatccccaattctgctgaaagtgagataccctagagccctagagccccagcagcacccagccaaacccacctccaccatgggggccatgactcagctgttggcaggtgtctttcttgctttccttgccctcgctaccgaaggtggggtcctcaagaaagtcatccggcacaagcgacagagtggggtgaacgccaccctgccagaagagaaccagccagtggtgtttaaccacgtttacaacatcaagctgccagtgggatcccagtgttcggtggatctggagtcagccagtggggagaaagacctggcaccgccttcagagcccagcgaaagctttcaggagcacacagtggatggggaaaaccagattgtcttcacacatcgcatcaacatcccccgccgggcctgtggctgtgccgcagcccctgatgttaaggagctgctgagcagactggaggagctggagaacctggtgtcttccctgagggagcaatgtactgcaggagcaggctgctgtctccagcctgccacaggccgcttggacaccaggcccttctgtagcggtcggggcaacttcagcactgaaggatgtggctgtgtctgcgaacctggctggaaaggccccaactgctctgagcccgaatgtccaggcaactgtcaccttcgaggccggtgcattgatgggcagtgcatctgtgacgacggcttcacgggcgaggactgcagccagctggcttgccccagcgactgcaatgaccagggcaagtgcgtaaatggagtctgcatctgtttcgaaggctacgccggggctgactgcagccgtgaaatctgcccagtgccctgcagtgaggagcacggcacatgtgtagatggcttgtgtgtgtgccacgatggctttgcaggcgatgactgcaacaagcctctgtgtctcaacaattgctacaaccgtggacgatgcgtggagaatgagtgcgtgtgtgatgagggtttcacgggcgaagactgcagtgagctcatctgccccaatgactgcttcgaccggggccgctgcatcaatggcacctgctactgcgaagaaggcttcacaggtgaagactgcgggaaacccacctgcccacatgcctgccacacccagggccggtgtgaggaggggcagtgtgtatgtgatgagggctttgccggtgtggactgcagcgagaagaggtgtcctgctgactgtcacaatcgtggccgctgtgtagacgggcggtgtgagtgtgatgatggtttcactggagctgactgtggggagctcaagtgtcccaatggctgcagtggccatggccgctgtgtcaatgggcagtgtgtgtgtgatgagggctatactggggaggactgcagccagctacggtgccccaatgactgtcacagtcggggccgctgtgtcgagggcaaatgtgtatgtgagcaaggcttcaagggctatgactgcagtgacatgagctgccctaatgactgtcaccagcacggccgctgtgtgaatggcatgtgtgtttgtgatgacggctacacaggggaagactgccgggatcgccaatgccccagggactgcagcaacaggggcctctgtgtggacggacagtgcgtctgtgaggacggcttcaccggccctgactgtgcagaactctcctgtccaaatgactgccatggccagggtcgctgtgtgaatgggcagtgcgtgtgccatgaaggatttatgggcaaagactgcaaggagcaaagatgtcccagtgactgtcatggccagggccgctgcgtggacggccagtgcatctgccacgagggcttcacaggcctggactgtggccagcactcctgccccagtgactgcaacaacttaggacaatgcgtctcgggccgctgcatctgcaacgagggctacagcggagaagactgctcagaggtgtctcctcccaaagacctcgttgtgacagaagtgacggaagagacggtcaacctggcctgggacaatgagatgcgggtcacagagtaccttgtcgtgtacacgcccacccacgagggtggtctggaaatgcagttccgtgtgcctggggaccagacgtccaccatcatccaggagctggagcctggtgtggagtactttatccgtgtatttgccatcctggagaacaagaagagcattcctgtcagcgccagggtggccacgtacttacctgcacctgaaggcctgaaattcaagtccatcaaggagacatctgtggaagtggagtgggatcctctagacattgcttttgaaacctgggagatcatcttccggaatatgaataaagaagatgagggagagatcaccaaaagcctgaggaggccagagacctcttaccggcaaactggtctagctcctgggcaagagtatgagatatctctgcacatagtgaaaaacaatacccggggccctggcctgaagagggtgaccaccacacgcttggatgcccccagccagatcgaggtgaaagatgtcacagacaccactgccttgatcacctggttcaagcccctggctgagatcgatggcattgagctgacctacggcatcaaagacgtgccaggagaccgtaccaccatcgatctcacagaggacgagaaccagtactccatcgggaacctgaagcctgacactgagtacgaggtgtccctcatctcccgcagaggtgacatgtcaagcaacccagccaaagagaccttcacaacaggcctcgatgctcccaggaatcttcgacgtgtttcccagacagataacagcatcaccctggaatggaggaatggcaaggcagctattgacagttacagaattaagtatgcccccatctctggaggggaccacgctgaggttgatgttccaaagagccaacaagccacaaccaaaaccacactcacaggtctgaggccgggaactgaatatgggattggagtttctgctgtgaaggaagacaaggagagcaatccagcgaccatcaacgcagccacagagttggacacgcccaaggaccttcaggtttctgaaactgcagagaccagcctgaccctgctctggaagacaccgttggccaaatttgaccgctaccgcctcaattacagtctccccacaggccagtgggtgggagtgcagcttccaagaaacaccacttcctatgtcctgagaggcctggaaccaggacaggagtacaatgtcctcctgacagccgagaaaggcagacacaagagcaagcccgcacgtgtgaaggcatccactgaagccgaaccggaagttgacaaccttctggtttcagatgccaccccagacggtttccgtctgtcctggacagctgatgaaggggtcttcgacaattttgttctcaaaatcagagataccaaaaagcagtctgagccactggaaataaccctacttgcccccgaacgtaccagggacataacaggtctcagagaggctactgaatacgaaattgaactctatggaataagcaaaggaaggcgatcccagacagtcagtgctatagcaacaacagccatgggctccccaaaggaagtcattttctcagacatcactgaaaattcggctactgtcagctggagggcacccacagcccaagtggagagcttccggattacctatgtgcccattacaggaggtacaccctccatggtaactgtggacggaaccaagactcagaccaggctggtgaaactcatacctggcgtggagtaccttgtcagcatcatcgccatgaagggctttgaggaaagtgaacctgtctcagggtcattcaccacagctctggatggcccatctggcctggtgacagccaacatcactgactcagaagccttggccaggtggcagccagccattgccactgtggacagttatgtcatctcctacacaggcgagaaagtgccagaaattacacgcacggtgtccgggaacacagtggagtatgctctgaccgacctcgagcctgccacggaatacacactgagaatctttgcagagaaagggccccagaagagctcaaccatcactgccaagttcacaacagacctcgattctccaagagacttgactgctactgaggttcagtcggaaactgccctccttacctggcgacccccccgggcatcagtcaccggttacctgctggtctatgaatcagtggatggcacagtcaaggaagtcattgtgggtccagataccacctcctacagcctggcagacctgagcccatccacccactacacagccaagatccaggcactcaatgggcccctgaggagcaatatgatccagaccatcttcaccacaattggactcctgtaccccttccccaaggactgctcccaagcaatgctgaatggagacacgacctctggcctctacaccatttatctgaatggtgataaggctgaggcgctggaagtcttctgtgacatgacctctgatgggggtggatggattgtgttcctgagacgcaaaaacggacgcgagaacttctaccaaaactggaaggcatatgctgctggatttggggaccgcagagaagaattctggcttgggctggacaacctgaacaaaatcacagcccaggggcagtacgagctccgggtggacctgcgggaccatggggagacagcctttgctgtctatgacaagttcagcgtgggagatgccaagactcgctacaagctgaaggtggaggggtacagtgggacagcaggtgactccatggcctaccacaatggcagatccttctccacctttgacaaggacacagattcagccatcaccaactgtgctctgtcctacaaaggggctttctggtacaggaactgtcaccgtgtcaacctgatggggagatatggggacaataaccacagtcagggcgttaactggttccactggaagggccacgaacactcaatccagtttgctgagatgaagctgagaccaagcaacttcagaaatcttgaaggcaggcgcaaacgggcataaattccagggaccactgggtgagagaggaataaggcccagagcgaggaaaggattttaccaaagcatcaatacaaccagcccaaccatcggtccacacctgggcatttggtgagagtcaaagctgaccatggatccctggggccaacggcaacagcatgggcctcacctcctctgtgatttctttctttgcaccaaagacatcagtctccaacatgtttctgttttgttgtttgattcagcaaaaatctcccagtgacaacatcgcaatagttttttacttctcttaggtggctctgggaatgggagaggggtaggatgtacaggggtagtttgttttagaaccagccgtattttacatgaagctgtataattaattgtcattatttttgttagcaaagattaaatgtgtcattggaagccatccctttttttacatttcatacaacagaaaccagaaaagcaatactgtttccattttaaggatatgattaatattattaatataataatgatgatgatgatgatgaaaactaaggatttttcaagagatctttctttccaaaacatttctggacagtacctgattgtattttttttttaaataaaagcacaagtacttttgagtttgtt

SEQ ID NO: 5880 - DNA, 5757 bp, Homo sapiens
tttctgtactctgggtgactcagagagggaagagattcagccagcacactcctcgcgagcaagcattactctactgactggcagagacaggagaggtagatgtccacgcccacagaccctggtgcgatgccccacccagggccttcgccggggcctgggccttcccctgggccaattcttgggcctagtccaggaccaggaccatccccaggttccgtccacagcatgatggggccaagtcctggacctccaagtgtctcccatcctatgccgacgatggggtccacagacttcccacaggaaggcatgcatcaaatgcataagcccatcgatggtatacatgacaaggggattgtagaagacatccattgtggatccatgaagggcactggtatgcgaccacctcacccaggcatgggccctccccagagtccaatggatcaacacagccaaggttatatgtcaccacacccatctccattaggagccccagagcacgtctccagccctatgtctggaggaggcccaactccacctcagatgccaccaagccagccgggggccctcatcccaggtgatccgcaggccatgagccagcccaacagaggtccctcacctttcagtcctgtccagctgcatcagcttcgagctcagattttagcttataaaatgctggcccgaggccagcccctccccgaaacgctgcagcttgcagtccaggggaaaaggacgttgcctggcttgcagcaacaacagcagcagcaacagcagcagcagcagcagcagcagcagcagcagcagcagcaacagcagccgcagcagcagccgccgcaaccacagacgcagcaacaacagcagccggcccttgttaactacaacagaccatctggcccggggccggagctgagcggcccgagcaccccgcagaagctgccggtgcccgcgcccggcggccggccctcgcccgcgccccccgcagccgcgcagccgcccgcggccgcagtgcccgggccctcagtgccgcagccggccccggggcagccctcgcccgtcctccagctgcagcagaagcagagccgcatcagccccatccagaaaccgcaaggcctggaccccgtggaaattctgcaagagcgggaatacagacttcaggcccgcatagctcataggatacaagaactggaaaatctgcctggctctttgccaccagatttaagaaccaaagcaaccgtggaactaaaagcacttcggttactcaatttccagcgtcagctgagacaggaggtggtggcctgcatgcgcagggacacgaccctggagacggctctcaactccaaagcatacaaacggagcaagcgccagactctgagagaagctcgcatgaccgagaagctggagaagcagcagaagattgagcaggagaggaaacgccgtcagaaacaccaggaatacctgaacagtattttgcaacatgcaaaagattttaaggaatatcatcggtctgtggccggaaagatccagaagctctccaaagcagtggcaacttggcatgccaacactgaaagagagcagaagaaggagacagagcggattgaaaaggagagaatgcggcgactgatggctgaagatgaggagggttatagaaaactgattgatcaaaagaaagacaggcgtttagcttaccttttgcagcagaccgatgagtatgtagccaatctgaccaatctggtttgggagcacaagcaagcccaggcagccaaagagaagaagaagaggaggaggaggaagaagaaggctgaggagaatgcagagggtggggagtctgccctgggaccggatggagagcccatagatgagagcagccagatgagtgacctccctgtcaaagtgactcacacagaaaccggcaaggttctgttcggaccagaagcacccaaagcaagtcagctggacgcctggctggaaatgaatcctggttatgaagttgcccctagatctgacagtgaagagagtgattctgattatgaggaagaggatgaggaagaagagtccagtaggcaggaaaccgaagagaaaatactcctggatccaaatagcgaagaagtttctgagaaggatgctaagcagatcattgagacagctaagcaagacgtggatgatgaatacagcatgcagtacagtgccaggggctcccagtcctactacaccgtggctcatgccatctcggagagggtggagaaacagtctgccctcctaattaatgggaccctaaagcattaccagctccagggcctggaatggatggtttccctgtataataacaacttgaacggaatcttagccgatgaaatggggcttggaaagaccatacagaccattgcactcatcacttatctgatggagcacaaaagactcaatggcccctatctcatcattgttcccctttcgactctatctaactggacatatgaatttgacaaatgggctccttctgtggtgaagatttcttacaagggtactcctgccatgcgtcgctcccttgtcccccagctacggagtggcaaattcaatgtcctcttgactacttatgagtatattataaaagacaagcacattcttgcaaagattcggtggaaatacatgatagtggacgaaggccaccgaatgaagaatcaccactgcaagctgactcaggtcttgaacactcactatgtggcccccagaaggatcctcttgactgggaccccgctgcagaataagctccctgaactctgggccctcctcaacttcctcctcccaacaatttttaagagctgcagcacatttgaacaatggttcaatgctccatttgccatgactggtgaaagggtggacttaaatgaagaagaaactatattgatcatcaggcgtctacataaggtgttaagaccatttttactaaggagactgaagaaagaagttgaatcccagcttcccgaaaaagtggaatatgtgatcaagtgtgacatgtcagctctgcagaagattctgtatcgccatatgcaagccaaggggatccttctcacagatggttctgagaaagataagaaggggaaaggaggtgctaagacacttatgaacactattatgcagttgagaaaaatctgcaaccacccatatatgtttcagcacattgaggaatcctttgctgaacacctaggctattcaaatggggtcatcaatggggctgaactgtatcgggcctcagggaagtttgagctgcttgatcgtattctgccaaaattgagagcgactaatcaccgagtgctgcttttctgccagatgacatctctcatgaccatcatggaggattattttgcttttcggaacttcctttacctacgccttgatggcaccaccaagtctgaagatcgtgctgctttgctgaagaaattcaatgaacctggatcccagtatttcattttcttgctgagcacaagagctggtggcctgggcttaaatcttcaggcagctgatacagtggtcatctttgacagcgactggaatcctcatcaggatctgcaggcccaagaccgagctcaccgcatcgggcagcagaacgaggtccgggtactgaggctctgtaccgtgaacagcgtggaggaaaagatcctcgcggccgcaaaatacaagctgaacgtggatcagaaagtgatccaggcgggcatgtttgaccaaaagtcttcaagccacgagcggagggcattcctgcaggccatcttggagcatgaggaggaaaatgaggaagaagatgaagtaccggacgatgagactctgaaccaaatgattgctcgacgagaagaagaatttgacctttttatgcggatggacatggaccggcggagggaagatgcccggaacccgaaacggaagccccgtttaatggaggaggatgagctgccctcctggatcattaaggatgacgctgaagtagaaaggctcacctgtgaagaagaggaggagaaaatatttgggagggggtcccgccagcgccgtgacgtggactacagtgacgccctcacggagaagcagtggctaagggccatcgaagacggcaatttggaggaaatggaagaggaagtacggcttaagaagcgaaaaagacgaagaaatgtggataaagatcctgcaaaagaagatgtggaaaaagctaagaagagaagaggccgccctcccgctgagaaactgtcaccaaatccccccaaactgacaaagcagatgaacgctatcatcgatactgtgataaactacaaagataggtgtaacgtggagaaggtgcccagtaattctcagttggaaatagaaggaaacagttcagggcgacagctcagtgaagtcttcattcagttaccttcaaggaaagaattaccagaatactatgaattaattaggaagccagtggatttcaaaaaaataaaggaaaggattcgtaatcataagtaccggagcctaggcgacctggagaaggatgtcatgcttctctgtcacaacgctcagacgttcaacctggagggatcccagatctatgaagactccatcgtcttacagtcagtgtttaagagtgcccggcagaaaattgccaaagaggaagagagtgaggatgaaagcaatgaagaggaggaagaggaagatgaagaagagtcagagtccgaggcaaaatcagtcaaggtgaaaattaagctcaataaaaaagatgacaaaggccgggacaaagggaaaggcaagaaaaggccaaatcgaggaaaagccaaacctgtagtgagcgattttgacagcgatgaggagcaggatgaacgtgaacagtcagaaggaagtgggacggatgatgagtgatcagtatggacctttttccttggtagaactgaattccttcctcccctgtctcatttctacccagtgagttcatttgtcatataggcactgggttgtttctatatcatcatcgtctataaactagctttaggatagtgccagacaaacatatgatatcatggtgtaaaaaacacacacatacacaaatatttgtaacatattgtgaccaaatgggcctcaaagattcagattgaaacaaacaaaaagcttttgatggaaaatatgtgggtggatagtatatttctatgggtgggtctaatttggtaacggtttgattgtgcctggttttatcacctgttcagatgagaagatttttgtcttttgtagcactgataaccaggagaagccattaaaagccactggttattttatttttcatcaggcaattttcgaggtttttatttgttcggtattgtttttttacactgtggtacatataagcaactttaataggtgataaatgtacagtagttagatttcacctgcatatacatttttccattttatgctctatgatctgaacaaaagctttttgaattgtataagatttatgtctactgtaaacattgcttaatttttttgctcttgatttaaaaaaaagttttgttgaaagcgctattgaatattgcaatctatatagtgtattggatggcttcttttgtcaccctgatctcctatgttaccaatgtgtatcgtctccttctccctaaagtgtacttaatctttgctttctttgcacaatgtctttggttgcaagtcataagcctgaggcaaataaaattccagtaatttcgaagaatgtggtgttggtgctttcctaataaagaaataatttagcttgacaaa

SEQ ID NO: 5881 - DNA, 2364 bp, Homo sapiens
cccagcaggcagtgcagcctagagacgctgacaaaggagcggaggagcagtcgcagctgctttccgaggaagccggtgttgccgagattgccaaaatgctttggagtttttaactgaatctaagaaaagtccaaaatagatttgagactgtaaaaacagaaactgcagcaagggggattcagtgccaatgcatcaacaaaaaagacaaccagagttagtggaaggaaatcttcctgttttcgtgttccccacggagctcatattttatgcagatgatcagtcaacacataagcaagtgttgacactgtacaatccctatgagtttgccttaaagttcaaagttttgtgtactactccaaataagtatgttgtcgttgatgctgcaggtgcagtaaagcctcagtgttgtgtggatattgtgattcgtcatcgagatgttcgatcctgtcactatggtgtaatagacaaattccgtctccaagtttccgagcaaagccaaaggaaggctttgggaagaaaagaggttgttgctactcttctcccatcagcaaaagaacaacaaaaggaagaagaggaaaaaagattaaaggaacatttaactgaaagtttattttttgagcagtcgtttcaaccagaaaacagagctgtatcctcaggacctagtttactaactgtcttcctgggagtggtgtgcattgcagccctgatgctgcctacactgggggatgtggaatcgctggtgcctctctacctccacttaagtgtgaatcaaaaattagtggctgcttatatcttaggtcttatcacaatggccatacttagaacatgagcaaggatttcaattgacttctgaagtaaatctgtcttgaaaatatgaatgtggactgccttttatctctatttcactccattaacatgcaacaaactattgaatgatttcaaataattgcaaatgtataatatatattttaaattataatttaatttgaaggactgcagaacattattttacagacagcaaggatgcttctgagtgacacctaggaaattatttgaagaaattctttttatatctatacctgttgtgtaagaaactttaaaacatttgttattttctcacctttttttctaattcactttgattgctaggggtcatgtatgcttcgaagttacaggactaaaagagcaaactgaccggcctaaaactaaaatgacatttattccctagctacaaacatcagcgttattatgttaattataccttgccctctatcattataaatggttgccatggtgtttctaaaaataagtgttttaccattaatgtgtagagggcaaacaaagcataaagtactaagggatcatgcttatcctagggtctcacagaagagaggacatatttaattaatcttgtgaattacagaacaggttgtggtccagacaccaagaatcataggggtttttttttaaaaaacctaatagaagtagggtgacctctctctttggtctaagagttctaaaggaaggtaggcatctgtttaattagttggttcaccctggctttacctctggttaatgctttgtgttaataggaaggaaaaatcactttatcttttcttccaagcccctccctgcctgacttacccagactgggattaccagataccaggtgatttatgtggagatgatttttcacctttaaactctaagccaagtgtaagaaactcttgatagctatgtctattttatatcagtcactgagacttttttttaagtttttatttattattaagacaactttgccaaaaaagtcccctaagcacaactatttacatttctttatagcctcttctgatctctaacacatatgcagttttaactgttattttcatagtaactgatcttttgtctaaggatttttacctgaaagcacaatgtattgagtctcttgaaaatcatctttcagatctttttacagaatgaacttatgcactgctactgtagtattctcaaggaatatatgtaaacacaaatgtatgcctgaggttggtttttgcagaaaacagtctctgcttctaaaaacttctatgtctagtcttccataggaaatcctcactgtttaaccatgtgaggagcctaagtcattaaacggatcatgtctgtacattgtgtaatgaatgaaaagcacataaatgtaatctactttgaactttgtaaaaatgatgtgtggaggctattcttgtttctccatctcaagtcctgtgtgtgcacgtgtgtgcaagtgcacatgtgtgtgtgtaataacacattgtaaagaacagaaattactttaaaaaataaacagaaatggagacctgagcttca

SEQ ID NO: 5882 - DNA, 4969 bp, Homo sapiens
gcccctcccgtcagttcgccagctgccagccccgggaccttttcatctcttcccttttggccggaggagccgagttcagatccgccactccgcacccgagactgacacactgaactccacttcctcctcttaaatttatttctacttaatagccactcgtctctttttttccccatctcattgctccaagaatttttttcttcttactcgccaaagtcagggttccctctgcccgtcccgtattaatatttccacttttggaactactggccttttctttttaaaggaattcaagcaggatacgtttttctgttgggcattgactagattgtttgcaaaagtttcgcatcaaaaacaacaacaacaaaaaaccaaacaactctccttgatctatactttgagaattgttgatttcttttttttattctgacttttaaaaacaacttttttttccacttttttaaaaaatgcactactgtgtgctgagcgcttttctgatcctgcatctggtcacggtcgcgctcagcctgtctacctgcagcacactcgatatggaccagttcatgcgcaagaggatcgaggcgatccgcgggcagatcctgagcaagctgaagctcaccagtcccccagaagactatcctgagcccgaggaagtccccccggaggtgatttccatctacaacagcaccagggacttgctccaggagaaggcgagccggagggcggccgcctgcgagcgcgagaggagcgacgaagagtactacgccaaggaggtttacaaaatagacatgccgcccttcttcccctccgaaaatgccatcccgcccactttctacagaccctacttcagaattgttcgatttgacgtctcagcaatggagaagaatgcttccaatttggtgaaagcagagttcagagtctttcgtttgcagaacccaaaagccagagtgcctgaacaacggattgagctatatcagattctcaagtccaaagatttaacatctccaacccagcgctacatcgacagcaaagttgtgaaaacaagagcagaaggcgaatggctctccttcgatgtaactgatgctgttcatgaatggcttcaccataaagacaggaacctgggatttaaaataagcttacactgtccctgctgcacttttgtaccatctaataattacatcatcccaaataaaagtgaagaactagaagcaagatttgcaggtattgatggcacctccacatataccagtggtgatcagaaaactataaagtccactaggaaaaaaaacagtgggaagaccccacatctcctgctaatgttattgccctcctacagacttgagtcacaacagaccaaccggcggaagaagcgtgctttggatgcggcctattgctttagaaatgtgcaggataattgctgcctacgtccactttacattgatttcaagagggatctagggtggaaatggatacacgaacccaaagggtacaatgccaacttctgtgctggagcatgcccgtatttatggagttcagacactcagcacagcagggtcctgagcttatataataccataaatccagaagcatctgcttctccttgctgcgtgtcccaagatttagaacctctaaccattctctactacattggcaaaacacccaagattgaacagctttctaatatgattgtaaagtcttgcaaatgcagctaaaattcttggaaaagtggcaagaccaaaatgacaatgatgatgataatgatgatgacgacgacaacgatgatgcttgtaacaagaaaacataagagagccttggttcatcagtgttaaaaaatttttgaaaaggcggtactagttcagacactttggaagtttgtgttctgtttgttaaaactggcatctgacacaaaaaaagttgaaggccttattctacatttcacctactttgtaagtgagagagacaagaagcaaattttttttaaagaaaaaaataaacactggaagaatttattagtgttaattatgtgaacaacgacaacaacaacaacaacaacaaacaggaaaatcccattaagtggagttgctgtacgtaccgttcctatcccgcgcctcacttgatttttctgtattgctatgcaataggcacccttcccattcttactcttagagttaacagtgagttatttattgtgtgttactatataatgaacgtttcattgcccttggaaaataaaacaggtgtataaagtggagaccaaatactttgccagaaactcatggatggcttaaggaacttgaactcaaacgagccagaaaaaaagaggtcatattaatgggatgaaaacccaagtgagttattatatgaccgagaaagtctgcattaagataaagaccctgaaaacacatgttatgtatcagctgcctaaggaagcttcttgtaaggtccaaaaactaaaaagactgttaataaaagaaactttcagtcagaataagtctgtaagtttttttttttctttttaattgtaaatggttctttgtcagtttagtaaaccagtgaaatgttgaaatgttttgacatgtactggtcaaacttcagaccttaaaatattgctgtatagctatgctataggttttttcctttgttttggtatatgtaaccatacctatattattaaaatagatggatatagaagccagcataattgaaaacacatctgcagatctcttttgcaaactattaaatcaaaacattaactactttatgtgtaatgtgtaaatttttaccatattttttatattctgtaataatgtcaactatgatttagattgacttaaatttgggctctttttaatgatcactcacaaatgtatgtttcttttagctggccagtacttttgagtaaagcccctatagtttgacttgcactacaaatgcattttttttttaataacatttgccctacttgtgctttgtgtttctttcattattatgacataagctacctgggtccacttgtcttttcttttttttgtttcacagaaaagatgggttcgagttcagtggtcttcatcttccaagcatcattactaaccaagtcagacgttaacaaatttttatgttaggaaaaggaggaatgttatagatacatagaaaattgaagtaaaatgttttcattttagcaaggatttagggttctaactaaaactcagaatctttattgagttaagaaaagtttctctaccttggtttaatcaatatttttgtaaaatcctattgttattacaaagaggacacttcataggaaacatctttttctttagtcaggtttttaatattcagggggaaattgaaagatatatattttagtcgatttttcaaaaggggaaaaaagtccaggtcagcataagtcattttgtgtatttcactgaagttataaggtttttataaatgttctttgaaggggaaaaggcacaagccaatttttcctatgatcaaaaaattctttctttcctctgagtgagagttatctatatctgaggctaaagtttaccttgctttaataaataatttgccacatcattgcagaagaggtatcctcatgctggggttaatagaatatgtcagtttatcacttgtcgcttatttagctttaaaataaaaattaataggcaaagcaatggaatatttgcagtttcacctaaagagcagcataaggaggcgggaatccaaagtgaagttgtttgatatggtctacttcttttttggaatttcctgaccattaattaaagaattggatttgcaagtttgaaaactggaaaagcaagagatgggatgccataatagtaaacagcccttgtgttggatgtaacccaatcccagatttgagtgtgtgttgattatttttttgtcttccacttttctattatgtgtaaatcacttttatttctgcagacattttcctctcagataggatgacattttgttttgtattattttgtctttcctcatgaatgcactgataatattttaaatgctctattttaagatctcttgaatctgttttttttttttttaatttgggggttctgtaaggtctttatttcccataagtaaatattgccatgggaggggggtggaggtggcaaggaaggggtgaagtgctagtatgcaagtgggcagcaattatttttgtgttaatcagcagtacaatttgatcgttggcatggttaaaaaatggaatataagattagctgttttgtattttgatgaccaattacgctgtattttaacacgatgtatgtctgtttttgtggtgctctagtggtaaataaattatttcgatgatatgtggatgtctttttcctatcagtaccatcatcgagtctagaaaacacctgtgatgcaataagactatctcaagctggaaaagtcataccacctttccgattgccctctgtgctttctcccttaaggacagtcacttcagaagtcatgctttaaagcacaagagtcaggccatatccatcaaggatagaagaaatccctgtgccgtctttttattcccttatttattgctatttggtaattgtttgagatttagtttccatccagcttgactgccgaccagaaaaaatgcagagagatgtttgcaccatgctttggctttctggttctatgttctgccaacgccagggccaaaagaactggtctagacagtatcccctgtagccccataacttggatagttgctgagccagccagatataacaagagccacgtgctttctggggttggttgtttgggatcagctacttgcctgtcagtttcactggtaccactgcaccacaaacaaaaaaacccaccctatttcctccaatttttttggctgctacctacaagaccagactcctcaaacgagttgccaatctcttaataaataggattaataaaaaaagtaattgtgactcaa

SEQ ID NO: 5883 - DNA, 1877 bp, Homo sapiens
atttaaagggcccgctcgccgcgccgctctgggagccgctgctggtcccggccttgcggcctgcgggggaggctgcccggaggaggcagcggcggcggcagcgcgtcctcggtccccaggaccacggcttctttcctgccagatctatccatctggccatccatccgtgggggtctgcaatggccacctttagccgccaggaatttttccagcagctactgcaaggctgtctcctgcctactgcccagcagggccttgaccagatctggctgctccttgccatctgcctcgcctgccgcctcctctggaggctcgggttgccatcctacctgaagcatgcaagcaccgtggcaggcgggttcttcagcctctaccacttcttccagctgcacatggtttgggtcgtgctgctcagcctcctgtgctacctcgtgctgttcctctgccgacattcctcccatcgaggcgtcttcctatccgtcaccatcctcatctacctactcatgggtgagatgcacatggtagacaccgtgacatggcacaagatgcgaggggcacagatgattgtggccatgaaggcagtgtctctgggcttcgacctggaccggggcgaggtgggtacggtgccctcgccagtggagttcatgggctacctctacttcgtgggcaccatcgtcttcgggccctggatatccttccacagctacctacaagctgtccaaggccgcccactgagctgccggtggctgcagaaggtggcccggagcctggcactggccctgctgtgccttgtgctgtccacttgcgtgggcccctacctcttcccgtacttcatccccctcaacggtgaccgcctccttcgcaagggcaccatggtaaggtggctgcgagcctacgagagtgctgtctccttccacttcagcaactattttgtgggctttctttccgaggccacggccacgttggcgggggctggctttaccgaggagaaggatcacctggaatgggacctgacggtgtccaagccactgaatgtggagctgcctcggtcaatggtggaagttgtcacaagctggaacctgcccatgtcttattggctaaataactatgttttcaagaatgctctccgcctggggaccttctcggctgtgctggtcacctatgcagccagcgccctcctacatggcttcagtttccacctggctgcggtcctgctgtccctggcttttatcacttacgtggagcatgtcctccggaagcgcctggctcggatcctcagtgcctgtgtcttgtcaaagcggtgcccgccagactgttcgcaccagcatcgcttgggcctgggggtgcgagccttaaacttgctctttggagctctggccatcttccacctggcctacctgggctccctgtttgatgtcgatgtggatgacaccacagaggagcagggctacggcatggcatacactgtccacaagtggtcagagctcagctgggccagtcactgggtcacttttggatgctggatcttctaccgtctcataggctgaggcacatctgtggaccctcataaccctcttaagacccctctcagggtgccactgatgggggatgagggaaggccctctctctactccttgaccccctccatccttgacccccaacacctcaacacacacacacacacacacacacaaaatcacaccattttcatgcctgtcaatccccaccccaccacaaggcaggaagggggtggtgcctgctggggcctagagggggatgcttggggaaacagagaaggggagatccagggcctccccgccttccttcttcctttttatatacaatttgttattgtcaaataaaagtaggaaatattc

SEQ ID NO: 5884 - DNA, 1700 bp, Homo sapiens
aagaggcaagaggtagcaacagcgagcgtgccggtcgctagtcgcgggtccccgagtgagcacgccagggagcaggagaccaaacgacgggggtcggagtcagagtcgcagtgggagtccccggaccggagcacgagcctgagcgggagagcgccgctcgcacgcccgtcgccacccgcgtacccggcgcagccagagccaccagcgcagcgctgccatggagcccagcagcaagaagctgacgggtcgcctcatgctggccgtgggaggagcagtgcttggctccctgcagtttggctacaacactggagtcatcaatgccccccagaaggtgatcgaggagttctacaaccagacatgggtccaccgctatggggagagcatcctgcccaccacgctcaccacgctctggtccctctcagtggccatcttttctgttgggggcatgattggctccttctctgtgggccttttcgttaaccgctttggccggcggaattcaatgctgatgatgaacctgctggccttcgtgtccgccgtgctcatgggcttctcgaaactgggcaagtcctttgagatgctgatcctgggccgcttcatcatcggtgtgtactgcggcctgaccacaggcttcgtgcccatgtatgtgggtgaagtgtcacccacagcccttcgtggggccctgggcaccctgcaccagctgggcatcgtcgtcggcatcctcatcgcccaggtgttcggcctggactccatcatgggcaacaaggacctgtggcccctgctgctgagcatcatcttcatcccggccctgctgcagtgcatcgtgctgcccttctgccccgagagtccccgcttcctgctcatcaaccgcaacgaggagaaccgggccaagagtgtgctaaagaagctgcgcgggacagctgacgtgacccatgacctgcaggagatgaaggaagagagtcggcagatgatgcgggagaagaaggtcaccatcctggagctgttccgctcccccgcctaccgccagcccatcctcatcgctgtggtgctgcagctgtcccagcagctgtctggcatcaacgctgtcttctattactccacgagcatcttcgagaaggcgggggtgcagcagcctgtgtatgccaccattggctccggtatcgtcaacacggccttcactgtcgtgtcgctgtttgtggtggagcgagcaggccggcggaccctgcacctcataggcctcgctggcatggcgggttgtgccatactcatgaccatcgcgctagcactgctggagcagctaccctggatgtcctatctgagcatcgtggccatctttggctttgtggccttctttgaagtgggtcctggccccatcccatggttcatcgtggctgaactcttcagccagggtccacgtccagctgccattgccgttgcaggcttctccaactggacctcaaatttcattgtgggcatgtgcttccagtatgtggagcaactgtgtggtccctacgtcttcatcatcttcactgtgctcctggttctgttcttcatcttcaccctgaatggttccatgcctgagggtggagactaagccctgtcgagacacttgccttcttcacccagctaatctgtagggctggacctatgtcctaaggacacactaatcgaactatgaactacaaagcttctatcccagg

SEQ ID NO: 5885 - DNA, 1390 bp, Homo sapiens
gctcctcccgcgaatcgcagcttctgagaccagggttgctccgtccgtgctccgcctcgccatgacttcctacagctatcgccagtcgtcggccacgtcgtccttcggaggcctgggcggcggctccgtgcgttttgggccgggggtcgcctttcgcgcgcccagcattcacgggggctccggcggccgcggcgtatccgtgtcctccgcccgctttgtgtcctcgtcctcctcgggggcctacggcggcggctacggcggcgtcctgaccgcgtccgacgggctgctggcgggcaacgagaagctaaccatgcagaacctcaacgaccgcctggcctcctacctggacaaggtgcgcgccctggaggcggccaacggcgagctagaggtgaagatccgcgactggtaccagaagcaggggcctgggccctcccgcgactacagccactactacacgaccatccaggacctgcgggacaagattcttggtgccaccattgagaactccaggattgtcctgcagatcgacaatgcccgtctggctgcagatgacttccgaaccaagtttgagacggaacaggctctgcgcatgagcgtggaggccgacatcaacggcctgcgcagggtgctggatgagctgaccctggccaggaccgacctggagatgcagatcgaaggcctgaaggaagagctggcctacctgaagaagaaccatgaggaggaaatcagtacgctgaggggccaagtgggaggccaggtcagtgtggaggtggattccgctccgggcaccgatctcgccaagatcctgagtgacatgcgaagccaatatgaggtcatggccgagcagaaccggaaggatgctgaagcctggttcaccagccggactgaagaattgaaccgggaggtcgctggccacacggagcagctccagatgagcaggtccgaggttactgacctgcggcgcacccttcagggtcttgagattgagctgcagtcacagctgagcatgaaagctgccttggaagacacactggcagaaacggaggcgcgctttggagcccagctggcgcatatccaggcgctgatcagcggtattgaagcccagctgggcgatgtgcgagctgatagtgagcggcagaatcaggagtaccagcggctcatggacatcaagtcgcggctggagcaggagattgccacctaccgcagcctgctcgagggacaggaagatcactacaacaatttgtctgcctccaaggtcctctgaggcagcaggctctggggcttctgctgtcctttggagggtgtcttctgggtagagggatgggaaggaagggacccttacccccggctcttctcctgacctgccaataaaaatttatggtccaaggga

SEQ ID NO: 5886 - DNA, 3615 bp, Homo sapiens
ggacgggacggagccggggcagccagaagaggtgggaaaagcggaggaggacgcccaggaggaggcggcggcggcggccgggaagtgaaaggtctcgcaaagttcagcggcggctgcgggcgccgagccccgggctagcggcagacgagcccgcagggccgctccgcggggcagcgcagccaggccggctatggtcccggggctcccgccgccccccaggtgcccgggacccgccaggccggtgcgcgagggtcaccccacctccccgcgcggtcccggcccctggctcccagctgccggcgaccgctgaccgagcccggcgccccaggaggaggaagaaaccagggccccgttccctcccgaggacggcggcgcttcatcccgcagcccagaggtctcggctccctccggcacccgcccggcccggctgctcccggctcctcccggccatggggagctgcgcgcggctgctgctgctctggggctgcacggtggtggccgcaggactgagtggagtagctggagtgagttcccgctgtgaaaaagcctgcaaccctcggatgggaaatttggctttggggcgaaaactctgggcagacaccacctgcggtcagaatgctaccgaactgtactgcttctacagtgagaacacggatctgacttgtcggcagcccaaatgtgacaagtgcaatgctgcctatcctcacctggctcacctgccatctgccatggcagactcatccttccggtttcctcgcacatggtggcagtctgcggaggatgtgcacagagaaaagatccagttagacctggaagctgaattctacttcactcacctaattgtgatgttcaagtcccccaggccggctgccatggtgctggaccgctcccaggactttgggaaaacatggaagccttataagtactttgcgactaactgctccgctacatttggcctggaagatgatgttgtcaagaagggcgctatttgtacttctaaatactccagtccttttccatgcactggaggagaggttattttcaaagctttgtcaccaccatacgatacagagaacccttacagtgccaaagttcaggagcagctgaagatcaccaaccttcgcgtgcagctgctgaaacgacagtcttgtccctgtcagagaaatgacctgaacgaagagcctcaacattttacacactatgcaatctatgatttcattgtcaagggcagctgcttctgcaatggccacgctgatcaatgcatacctgttcatggcttcagacctgtcaaggccccaggaacattccacatggtccatgggaagtgtatgtgtaagcacaacacagcaggcagccactgccagcactgtgccccgttatacaatgaccggccatgggaggcagctgatggcaaaacgggggctcccaacgagtgcagaacctgcaagtgtaatgggcatgctgatacctgtcacttcgacgttaatgtgtgggaggcatcagggaatcgtagtggtggtgtctgtgatgactgtcagcacaacacagaaggacagtattgccagaggtgcaagccaggcttctatcgtgacctgcggagacccttctcagctccagatgcttgcaaaccgtgttcctgccatccagtaggatcagctgtccttcctgccaactcagtgaccttctgcgaccccagcaatggtgactgcccttgcaagcctggggtggcagggcgacgttgtgacaggtgcatggtgggatactggggcttcggagactatggctgtcgaccatgtgactgtgcggggagctgtgaccctatcaccggagactgcatcagcagccacacagacatagactggtatcatgaagttcctgacttccgtcccgtgcacaataagagcgaaccagcctgggagtgggaggatgcgcaggggttttctgcacttctacactcaggtaaatgcgaatgtaaggaacagacattaggaaatgccaaggcattctgtggaatgaaatattcatatgtgctaaaaataaagattttatcagctcatgataaaggtactcatgttgaggtcaatgtgaagattaaaaaggtcttaaaatctaccaaactgaagattttccgaggaaagcgaacattatatccagaatcatggacggacagaggatgcacttgtccaatcctcaatcctggtttggaataccttgtagcaggacatgaggatataagaacaggcaaactaattgtgaatatgaaaagctttgtccagcactggaaaccttctcttggaagaaaagtcatggatattttaaaaagagagtgcaagtagcattaagatggatagcacataatggcacttgtctatgtacaaaacacaaactttagagcaagaagacctcagacaggaaactggaattttttaaagtgccaaaacatatagaaatgtttgaatgcatgggtcttatctaacttatctcttctggacccatgtttaaatacagttttatttcatgaagagaaatgaaaacccctacactgatatctgttttctatgggactgattctgaaattcttaactattaagaatattttaatagcagcatgacatttagcagtaatccattaagggcagtacctctaacaaggacgccttccagcttcagcgatgttacttacgtttgatgctacttaaagtaatgaatgacgttttaaggaatccctaaccctactatcagaaaaggtgtttgttaaagagccttctcttgtgtgttacgcatgaactttggtctgtaggtgttaaatggaacctctccatgtgtatatagtatttccttgtataaagcactttactacctaccacttgtgttgtgaacgtttggtgactgctgttgaaagaaggaaaagggtgtgtgagaaagcctactgaagcagcagcactgccactacatgtggacaaaagtgaccatataaaagaagttgtgctatttaactctgaatacttggagaaactaggtgaagatgcaaccagaaaggagaatatgtatgcgtgaagtctcagctttgagctggaggctagattccaagatgacagccatgatgaaactttttaaaaaactaaaccagaagagactttaaaataagagaaagaaatcataaatgtagacatatgcttggctaaaggggaaatggactttaaattttaaagagctcatttgcaatgcacttgtatacacttcaaaaattattgtagacacagaatttgttatatttttgtgcttagtatttaaacctgaacattgaaacagttttcctccttgtctttcttaacagtaatagtcattatatttacctgttttttaacacaatgtatgtgatagtcaaaaaatcacagtttttcattattattcatcttctgtacccacgcataaccactatacatagtttcttttgtacttgaatatacaaaacatgaacacagtgccatatgaataatttcacatacagaacctttttttctctgaagtcctgtggacttgcaaatatatatatatattgctttgttaatttgtttttatatttcatatatgtaataaaggaatatgatctga

SEQ ID NO: 5887 - DNA, 82402 bp, Homo sapiens; identical to SEQ ID NO: 5010

SEQ ID NO: 5888 - DNA, 5906 bp, Homo sapiens; identical to SEQ ID NO: 233

SEQ ID NO: 5889 - DNA, 1381 bp, Homo sapiens
accgcagcggacagcgccaagtgaagcctcgcttcccctccgcggcgaccagggcccgagccgagagtagcagttgtagctacccgcccagaaactagacacaatgtgcgacgaagacgagaccaccgccctcgtgtgcgacaatggctccggcctggtgaaagccggcttcgccggggatgacgcccctagggccgtgttcccgtccatcgtgggccgcccccgacaccagggcgtcatggtcggtatgggtcagaaagattcctacgtgggcgacgaggctcagagcaagagaggtatcctgaccctgaagtaccctatcgagcacggcatcatcaccaaggccaaccgcgagaagatgacccagatcatgtttgagaccttcaacgtgcccgccatgtacgtggccatccaggccgtgctgtccctctacgcctccggcaggaccaccggcatcgtgctggactccggcgacggcgtcacccacaacgtgcccatttatgagggctacgcgctgccgcacgccatcatgcgcctggacctggcgggccgcgatctcaccgactacctgatgaagatcctcactgagcgtggctactccttcgtgaccacagctgagcgcgagatcgtgcgcgacatcaaggagaagctgtgctacgtggccctggacttcgagaacgagatggcgacggccgcctcctcctcctccctggaaaagagctacgagctgccagacgggcaggtcatcaccatcggcaacgagcgcttccgctgcccggagacgctcttccagccctccttcatcggtatggagtcggcgggcattcacgagaccacctacaacagcatcatgaagtgtgacatcgacatcaggaaggacctgtatgccaacaacgtcatgtcggggggcaccacgatgtaccctgggatcgctgaccgcatgcagaaagagatcaccgcgctggcacccagcaccatgaagatcaagatcatcgccccgccggagcgcaaatactcggtgtggatcggcggctccatcctggcctcgctgtccaccttccagcagatgtggatcaccaagcaggagtacgacgaggccggcccttccatcgtccaccgcaaatgcttctagacacactccacctccagcacgcgacttctcaggacgacgaatcttctcaatgggggggcggctgagctccagccaccccgcagtcactttctttgtaacaacttccgttgctgccatcgtaaactgacacagtgtttataacgtgtacatacattaacttattacctcattttgttatttttcgaaacaaagccctgtggaagaaaatggaaaacttgaagaagcattaaagtcattctgttaagctgc

SEQ ID NO: 5890 - DNA, 5256 bp, Homo sapiens
gttggtactaagaagtgcctttcctgacgtctctgctgcttggaaccgcttctagagcagtctctgcttttgccttgcttgctgccagctagactgtgacgacagcacatccaccctccacctctagcccagacacccccatttctacttataatcaagagaaaagctctaagtatctggcattgccctaggctgctttagtgttaaaagaaaagtttgctgaaaaagtaagatatcttctgccaggaaatcaaggaggaaaaaaaaaatcattttctcgattttgctctaaactgctgcatctgtctatgccaaactaatcaataccgattgcaccaccaaactccattgcaaattcagctgtgaggagattccctttcagacaactttgctgaaagcagcttggaaattcggtgtcgaagggtctgccacgttttcatgcttgcattttgggctccaaattggcactgggaaggggttactgagagcacaaggctgataccaggccctacttttaaacgttcatctacttacaatcctagtatttctctaaaaaccaaaacctctttgaattaacagtttcatgctgtgaatttctagtgggagatcttttccttgatattgacgacacaattttccatgtacttttaaagcagggagtggggaaaagtattttgaggggacattttcatcatcagttcagctttttttttttggttgttgctcttttttgggggggttgggtttgttggtttcactgaaacatttaactacctgtaaaatctaaacatggctgttagtgtcacaccaattcgggacacaaaatggctaacactggaagtatgtagagagttccagagggggacttgctcacggccagacacggaatgtaaatttgcacatccttcgaaaagctgccaagttgaaaatggacgagtaatcgcctgctttgattcattgaaaggccgttgctccagggagaactgcaaatatcttcatccacccccacatttaaaaacgcagttggagataaatggacgcaataacttgattcagcagaagaacatggccatgttggcccagcaaatgcaactagccaatgccatgatgcctggtgccccattacaacccgtgccaatgttttcagttgcaccaagcttagccaccaatgcatcagcagccgcctttaatccctatctgggacctgtttctccaagcctggtcccggcagagatcttgccgactgcaccaatgttggttacagggaatccgggtgtccctgtacctgcagctgctgcagctgctgcacagaaattaatgcgaacagacagacttgaggtatgtcgagagtaccaacgtggcaattgcaaccgaggagaaaatgattgtcggtttgctcatcctgctgacagcacaatgattgacaccaatgacaacacagtcactgtgtgtatggattacatcaaagggagatgctctcgggaaaagtgcaaatactttcatccccctgcacatttgcaagccaagatcaaggctgcccaataccaggtcaaccaggctgcagctgcacaggctgcagccaccgcagctgccatgggaattcctcaagctgtacttcccccattaccaaagaggcctgctcttgaaaaaaccaacggtgccaccgcagtctttaacactggtattttccaataccaacaggctctagccaacatgcagttacaacagcatacagcatttctcccaccaggctcaatattgtgcatgacacccgctacaagtgttgatacccataatatctgccgaacatctgactagccacaagtatgttacccagatgtagaattttcatcactaaacaatcatgctaaagaggaaaggacagtgtgcttggttagagtaaaggacgaggtcattagccatattgtatatatcgtcaagcaacacacacaaaagttcctcagccacaagacatccacatattgcatgttaaccagaagaaaagacaacattttccggaaatccactgcacactgttgcctatacactttgtacatttaattgatatttgtgctgaggtgatattcctgtctaaaagaacaacattgtctttcttttctagcacagagttatgcattcaaagatgcatacctagttagtttcctatatattcatgccatcttgaaaagacagactatggtgtaaccatgattctattatgtattggtacgtctgtagaccaagatataattttttaaaaataagtttatttctttcaaggtttacaaataacaaaggtgcaccttgtatttaaaattgccattatagatgagagcgtgcatgcacagtcatttttgtttaagagtaatatttttaatgtaatagattgtaagacgtggtgagggagggatctgacagagatgaatgtgccaagcaaaaccacaactgtgtatattttaaagcacatcatggctttaagtaccatgttgttaaggattctcatgaagtgccatagactgtacatcaaattagagtattatttcttcagtgttattgttttcagagccacattttgttgcatatttgctagtactaatcagtcaaagggcaccattctttttttttttttttgaaaccaaagctgtctcagaaatggccaatttaactttacagtaacaatagacagcacaacacaaactctctcaatacagataaactcacacatactggagatatatatataatagatatatataaaattattttaatgcattgtagtgtaatatttatgcatactatactgtataacatgttattcaaaagggattgccatttctgagacacagtaacaaaaaaatgaggaaattattttgcttctatttatagcctctgtcaaaagtcaaaagactataaatgctttgcaaaaatggtttcacgtttgcttaaatgcttcatcacagtcacattcaaaatagtgactctaaacaaagaagaaagcagcactgtcatcagatgcatgataaaccaaaatatgaaaatgggaaatgtttaattaacctagtaattgggtgggttaagtacatgggtgaattttatatgtgatttttgttttgttttgttttgttcagattaactgcttatagccttagaaagccttttacaaaattaaaaaaaaaatagatgtgcattcagtttttaagaatggaatcatccaaaggaattcctttttttgaggtttggatgttgcagctagtaaaggatatttttgctctgttcagcagttctaaaaattgctgaagtaggggccaggtcactggtagttatagtatggaatgggagaagtgaaagttcagttatagaactttccatacttccaagtttactgcaagtttttatgcttgagagagatgctttctaatataagactgatgtgttgattttactgattgtactgtacatctattaaagccttagattattacattacgggttggaacccataccaatgtaatttcaatcgtgttaagaaagtaatggtgacttcacatgttattgtagttagttacattatagaatattacttatttttcttgttaaaatgtagtttttcatttcctacatttattagattttcattttctattaacaattgaataccatttcagtttatagacttgttttattagattttaccaatgaatttttcaaaatacaaaaaaaagtagtttttccttcataacatactcagttttgaattacatgtagtgtcacatgaatattcgtattgttaactaaatgatttatattttactgatttaatattacagtgtaagaatgtcagtcattgttagttcttgtctagttttcattaaaagaacaaagatcttttatatggatatcttataaatatataatcattgctaagtaagaagttaagttgttgctatcgcaacaatcctggcagacaattgagtaatattttgatgatttattttgtttgtaattagttattataagaagatctagatcctagatattagaataaaatttattttctactgtatccatttcaaatgttaaaatattgtttaatatttttgaaatccctgagtatcaggccttgttataaataagctgcataatcaataaatagaacaagggactttttgttgataatccaaatactcaaagtttacgtaatgaaaattatagcgtgtgtgcaaactcttgagggttgattatgctgcaatttagcatgttggaacgtctagggagaaggttgactttttgcacttctgtatatagtcaaaagagagaaacctgtataatagtaagatcttattttgaataaaaacgtctataattacaaggagttttgttaaggctaatacaatgacagactgagcaaaattgcttgcaaaagtggcacagagttagcactccataccccttcaaacatgttgctttgctttcttgtggacagcttgtagtttgccaggattttttcagctggaaagatacgccatcctttcaaaccctcatgactgacaaaaactccatggggccaaatctgcctgaagatcattaccaaaaatagcaggtacttctaccattaaggtgaaatcatggatcagatattccttacatttttcaaaactactgcatgtttaaaacttcaacaaaaaaagagagaaagaactatactaagaacatatattattcagatcagtttctgccaatttcagtggtttattgttcacaaaaaaatcttcaaaacaagtattgactttcacaaaatttaaatcataaacaggcaaaccaaacagcacactgtagctatagttgttatgtgattgttttttaattgctgtaggatcctgttctttcagcaggtgaaaaataaaacgcagttcaaatttcatggttttaattttcaactcagaagcactcaaaaatgcaaaatgtgataatgggcacttgtttaaaagaattagtgtatccagccttcactccagctggttaaaaatgttgcacttatcagcaaccctaccactttcatctgctgaaaggacaaatgtgcttggttttactattatgtaatcacaacttactttctgcttgtagttgcttaaaattatgtattttgtcttgggctgcaatttgttttatgcttattttattattactgcagtagttgactttgctgtatggaaaaataaagtgaaattgccctaataaaacttctctttcttaagt

SEQ ID NO: 5891 - DNA, 1530 bp, Homo sapiens
tatattgctctggtattcatgccaaagacacaccagccctcagtcactgggagaagaacctctcataccctcggtgctccagtccccagctcactcagccacacacaccatgtgtgaagaggagaccaccgcgctcgtgtgtgacaatggctctggcctgtgcaaggcaggcttcgcaggagatgatgccccccgggctgtcttcccctccattgtgggccgccctcgccaccagggtgtgatggtgggaatgggccagaaagacagctatgtgggggatgaggctcagagcaagcgagggatcctaactctcaaataccccattgaacacggcatcatcaccaactgggatgacatggagaagatctggcaccactccttctacaatgagctgcgtgtagcacctgaagagcaccccaccctgctcacagaggctcccctaaatcccaaggccaacagggaaaagatgacccagatcatgtttgaaaccttcaatgtccctgccatgtacgtcgccattcaagctgtgctctccctctatgcctctggccgcacgacaggcatcgtcctggattcaggtgatggcgtcacccacaatgtccccatctatgaaggctatgccctgccccatgccatcatgcgcctggacttggctggccgtgacctcacggactacctcatgaagatcctcacagagagaggctattcctttgtgaccacagctgagagagaaattgtgcgagacatcaaggagaagctgtgctatgtggccctggattttgagaatgagatggccacagcagcttcctcttcctccctggagaagagctatgagctgccagatgggcaggttatcaccattggcaatgagcgcttccgctgccctgagaccctcttccagccttcctttattggcatggagtccgctggaattcatgagacaacctacaattccatcatgaagtgtgacattgacatccgtaaggacttatatgccaacaatgtcctctctgggggcaccaccatgtaccctggcattgctgacaggatgcagaaggagatcacagccctggcccccagcaccatgaagatcaagattattgctcccccagagcggaagtactcagtctggatcgggggctctatcctggcctctctctccaccttccagcagatgtggatcagcaagcctgagtatgatgaggcagggccctccattgtccacaggaagtgcttctaaagtcagaacaggttctccaaggatcccctcgagactactctgttaccagtcatgaaacattaaaacctacaagccttacttctctgtgtggggctcttttttcctgggctatgtctcatacacagtgctaaggacttttcacacattacttttaatccatgcaatagtgctgtaaggtaggtgctatcattatacccatattacagatgaggaaattgaggctcagagaagtcaaggacttgcgaagatcacacagattccagattaaaattcaagtatctgactgcaaa

SEQ ID NO: 5892 - DNA, 1080 bp, Homo sapiens
gaaacccaaggcttttcacccaaatatactgcctgctgtccagagggcacacttaggatcatgagccatcagctcctctggggccagctataggacaacagaactctcaccaaaggaccagacacagtgggcaccatgggacagtgtcggtcagccaacgcagaggatgctcaggaattcagtgatgtggagagggccattgagaccctcatcaagaactttcaccagtactccgtggagggtgggaaggagacgctgaccccttctgagctacgggacctggtcacccagcagctgccccatctcatgccgagcaactgtggcctggaagagaaaattgccaacctgggcagctgcaatgactctaaactggagttcaggagtttctgggagctgattggagaagcggccaagagtgtgaagctggagaggcctgtccgggggcactgagaactccctctggaattcttggggggtgttggggagagactgtgggcctggagataaaacttgtctcctctaccaccaccctgtaccctagcctgcacctgtcctcatctctgcaaagttcagcttccttccccaggtctctgtgcactctgtcttggatgctctggggagctcatgggtggaggagtctccaccagagggaggctcaggggactggttgggccagggatgaatatttgagggataaaaattgtgtaagagccaaagaattggtagtagggggagaacagagaggagctgggctatgggaaatgatttgaataatggagctgggaatatggctggatatctggtactaaaaaagggtctttaagaacctacttcctaatctcttccccaatccaaaccatagctgtctgtccagtgctctcttcctgcctccagctctgccccaggctcctcctagactctgtccctgggctagggcaggggaggagggagagcagggttgggggagaggctgaggagagtgtgacatgtggggagaggaccagctgggtgcttgggcattgacagaatgatggttgttttgtatcatttgattaataaaaaaaaatgaaaaaagtgaaa

SEQ ID NO: 5893 - DNA, 2040 bp, Homo sapiens; identical to SEQ ID NO: 4277

SEQ ID NO: 5894 - DNA, 3957 bp, Homo sapiens
tttcaccaggctgcagctgacaagaagcttcaagcataggttaatatcagagaagcacatgacctgggcaatctgcatgtgatgccaaccaagccttggaaagacagtgcaaccacagaagtgccgagctgggtaaaggccctgctggacaagcagttggagtgagaatcaagacagccggaccacaggaccagacccaccaggatccacatgacagtggtatcttccggtatcatcctattcaaacaacgtgttcaagcatccttggaaaattgaggtggagaacaggccacacaagctgtaaaccctttgtagtcataagacgaaagaggatttgttaagagtattgttttgggtagaacttgcattagcagtgacaaagatagccacctcaacctttggtaataacccttggcacacaaatataaaccataatggagtctgagtatgtcctatgcaactggaaagaccagttgtggccagcaaaagttttgtccagatctgaaacttcatcaaacagtaagaggaaaaaggcattttctctagaagttcaaatactctcactagatgaaaaaattaaattggacagcacagaaacaaagatcctaaataaatctcaaattgaagccattgctgcctcattaggactacagtcagaggacagtgctccacctacagaggaaactgcctatggaagatcactaaaagtggcactgggtattctgaatgagagaacaaatttgagtcaagcaagcacttcagatgaagaggagatcactatgctgtctcaaaatgtaccacaaaaacagtccgattcaccccctcataaaaaataccggaaggatgaaggtgacttaccagggtgtcttgaggaaagggaaaactcagcatgcttgttagcatcttcagagagtgatgattccctgtatgatgataaatcacaagcacccacaatggtcgatactattccaagtgaagtggaaacaaagtcattacaaaactctagctggtgcgagactttcccttcactttcggaagataatgatgaaaaagagaacaagaataagattgatatctcagcagttatgtctgtgcattctgcagtcaaagaggaaagtgcatgtgttaaagatgaaaagtttgctccacctttgtcacctttgtcatcagatatgctcattatgcccaaagctttgaaagaagagagcgaggatacctgcctagagaccctggctgttccctctgaatgctctgctttctcagagaatattgaggatcctggagagggtccctcaaatccatgcttagataccagccagaatcaaccttccatggaatcagagatgggggctgcagcatgccctgggagttgttcaagggaatgcgaggtttcatttagtgcctctaaccctgtctgggattattcacatcttatgagtagtgaaagaaattttcagagactggattttgaagaacttgaggaagaaggtcaagcctctgacaagtcattgcttccaagtcgcattaatctttctctattagatgatgatgaggaagacgaagaacttccacgcttcattttacattatgagacacatccgtttgaaacaggaatgatagtctggtttaaatatcagaaatatccattttggccagcagtgataaaaagtatcagacgaaaagagaggaaagcaagtgtgctttttgttgaggcaaacatgaattctgaaaagaagggcattagagtaaattttagaagattaaagaaatttgattgtaaagagaaacaaatgctagtggacaaagccagggaggattatagtgagagtattgactggtgcatctcactaatttgtgactacagagttagaataggttgtggttctttcacgggctctttgcttgagtattatgctgctgatattagttacccagttaggaaagaaacaaaacaggatactttcaggaacaaatttccaaagctgcataatgaagatgccagggaaccgatggctgtaacttcccagaccaagaaaatgtccttccaaaaaattctccctgaccggatgaaggctgctcgggaccgagccaacaagaacctggtggacttcattgtgaatgcaaagggaacagagaaccatcttctggccattgtaaatggcacaaaaggatccagatggctgaaatcatttttgaatgcaaataggttcacaccctgtattgaaacatactttgaggatgaagatcagttggatgaagtggtgaaatatttacaagaagtctgcaatcaaatagatcaaataatgccaacttggataaaagatgataaaattaaatttatcctagaagttcttctgccagaagcaattatttgttcaatttctgctgttgatgggttagattacgaggcagctgaagcaaagtatctaaaaggaccatgtctaggctacagggaaagagaattatttgatgcaaaaataatatatgaaaagagacgaaaagcaccaacaaatgaagctcactaaatgtgctgaaagttgaaaccatgacagggagctctcatagatactagttgaaaaaagtctctgaacaattctctctaatacatattttctgcaaatgggagcatggataatgtgttcacttttttttgagatctctaggatctgtggttataattacatctttatttccttttcttgcgcttcttcaaagttaattttgtcaacatatttcagcagttctactttcccgtacattttttagaaagcataattcctaaatgattttgaagggaaagtactattttgttttatgacacttttgagtctatgctgtattgttaaatatattgtgcacaattattttaatgttaaaattgcactggtgttagatattaacgaagatgattggaaaaaagtctgaaagatacatcatttctatattccttgcttaatttttataaaatattgggttttcccttaagatagttgaagtatttttcttgccatgcctatttatttttgcaaaaaaattatctgctatatagaaccaaagatagattcgctttgctatatattataactatacttgcttttgcaataaaacaacttgtaattcaaaaatgaagattatctgcatatagtatttatgtgtgtgaataacatcttggcatgcagaaaataattttggctgctttgaacaggattgttcattctacacttccctgaaattccatttttgggagtgtctatccttcaatggctgaatagttccttaaatcagacaagctcctggctatcttcataaccagcagtgagtagatcttcttaatatagctgtctgaccacatgtggaaggcagctagacttattgtatttacagcctggccactctagacatatgaatccaggctgactgcttaagtgcccatctcgtttgatataaactgtagaaaaggcaagcactttgttctgagtcttttatctccaaatacatagttgtctcaaaccaagcaagctttatcaaaatggcttatttgcagaatagttccaatgatataaatgccaactggcaagtcattccaaactgcttgaaggagtagatgaaccagaatctgagaatttggaaataggtcacagaaaaagcctccatttggctaaatatgacaattatctgagtatggttaaatacatacaattaaatgtctgaagccaatgagttgtttattctaacttgaaatatatttttgtgagaataaatgttagaaaagttagtttattttggaaacctgccgtgaaaggaaattctaaaggcttaacatgaaactgtctgcatttctacctgttagacaatggttgctcttgggctcttgttatacagtcatatggctacacgtttatgtaaagtttgcaaaagtttggtgttttgatttataataaaactgttatattattc

SEQ ID NO: 5895 - DNA, 2517 bp, Homo sapiens
aggaagtgagaaagttggcacagtcacgccgggcttcgcaggaccaggtcactcagtgacagatggacaatgcaagaatgaactccttcctggaataccccatacttagcagtggcgactcggggacctgctcagcccgagcctacccctcggaccataggattacaactttccagtcgtgcgcggtcagcgccaacagttgcggcggcgacgaccgcttcctagtgggcaggggggtgcagatcggttcgccccaccaccaccaccaccaccaccatcgccacccccagccggctacctaccagacttccgggaacctgggggtgtcctactcccactcaagttgtggtccaagctatggctcacagaacttcagtgcgccttacagcccctacgcgttaaatcaggaagcagacgtaagtggtgggtacccccagtgcgctcccgctgtttactctggaaatctctcatctcccatggtccagcatcaccaccaccaccagggttatgctgggggcgcggtgggctcgcctcaatacattcaccactcatatggacaggagcaccagagcctggccctggctacgtataataactccttgtcccctctccacgccagccaccaagaagcctgtcgctcccccgcatcggagacatcttctccagcgcagacttttgactggatgaaagtcaaaagaaaccctcccaaaacagggaaagttggagagtacggctacctgggtcaacccaacgcggtgcgcaccaacttcactaccaagcagctcacggaactggagaaggagttccacttcaacaagtacctgacgcgcgcccgcagggtggagatcgctgcatccctgcagctcaacgagacccaagtgaagatctggttccagaaccgccgaatgaagcaaaagaaacgtgagaaggagggtctcttgcccatctctccggccaccccgccaggaaacgacgagaaggccgaggaatcctcagagaagtccagctcttcgccctgcgttccttccccggggtcttctacctcagacactctgactacctcccactgaggcggctccagccccagacaacagcccaggcatctccttgggctgggacttcttacccaaagcacatgcttagcttatctttctttccatttacagtctctttcttcctttctaatcctatctggggagctcctggccaggataatatatttgcagataattctggaccagagacttggtgcggggttaacaccttcatccagattgggtgccagcatacattttctggtgggccttaacatccctcctgcttttaggagaattcacagaacctactgttcctttcagatgaccttttggaaaatagttccctttgccaacagaaacatgccagaaggaatcttctcatcttttatctaactatatgtacagctctcccctcccttgtccttgaaagtaggatatagcgaaaggcgagtccaggagctcaggaagaagagatgcactatatgtttacacaattaattcatcccttaatttaagtcattttcatgtgtgtgagtttgctggttgtaaatactttgtcctaagagatttatctttatacagattttctagaaatgtttaggttactaaaacagggtgggcaaactctctaaactggtacaattttataggtgaaagaaaaaattccctcatttaaacccaatcagatgcctcagagggtagccttgatttgttcttacagttaagaagccctgcagagcacaaacttcagaaacccggcttcctgtgctaagtctttcccaatctctacccctttcttctcgggccaccctctgtttaaaatttgtgctgggttattcagaacctaaaagtattattcaaaccaatttcttccttccacagttatcttagctggatataatgtattttcagctcaattgttaatgtgatggatggcacaatgaatgtatattttgtgttattcgtgaatagtcttttgcatgtcgcacaatgtttgatgtccccaaagtaccacactgagttctatcagttatcctttgtgagcctatgatattccccatttcctgtacaatcatgaacagctctgagatcctggagtgatatgatccagagcagagtttacgggtcttaggatgtctgtaataaataaatatactcaagtttcaggtatgcttaagcatccgtgtatttggctgggctacaatttgttaattcctatgaagttggcacatttcatgaggggaaagggagaagggtggtaaatattttcaaagagatgggccttttcttgaataaaagttaataacagctcctttattataatcaaagctcataatggaaaaaaagactgatgaagaaatttatgaagcagatttatttttgaaacaaacatggatacttcctgggtcaagtgctaaccttttcacctccaactggatgttgacgtatatataaacagaactcccttcaaaagccaaaa

SEQ ID NO: 5896 - DNA, 2066 bp, Homo sapiens
cgccgccgcgccggctgcatcctcgcctccacctcgctcaccccctcctccccgcactttctcggcgctccctccctctcggctcgcacagctcgactccgcgctctcctcgccggccgccgccgcccagcctgcgcccgccgtccccccagtgcctgggcacctgttggaggcagagccaggggtgctgcatgaggggccgcaggggcgatcgcatgaccatcaacatccaggagcacatggccatcaacgtgtgccccgggcccatccggcccatccgccagatctctgactacttcccccggggaccaggacctgaagggggcggcgggggcggcggggaggcccccgcccatctggtccccctggctctggccccccctgcagccctccttggggccaccacgcctgaggatggtgcggaggtggacagctatgactcggatgatgccaccgccctaggcacgctggagtttgaccttctctacgaccgggcctcctgcactctgcactgtagcatcctcagggccaagggcctcaagcccatggatttcaatggcctcgccgacccctacgtcaagctgcacttgctgcctggagcctgtaaggccaataagctaaaaacgaagactcagaggaacacactgaatcccgtgtggaatgaggacctgacttacagcgggatcacagatgacgacatcacgcacaaggtgctcaggatcgccgtctgtgatgaggacaagctgagtcacaatgagtttattggggagatccgcgtgcccctccgccgcctcaagccttcgcagaagaagcattttaacatctgcctcgagcgccaggtcccgctggcgtccccctcttccatgtcagcggcgctgaggggcatctcctgttatctgaaggagttggagcaggcggagcaggggcaggggctgctggaggagcgtggccgcatcctgctgagtctcagctacagctcgcggcgccggggactgctggtaggcatcttgcgctgcgcccatctggctgccatggacgtcaacggttactcggacccctacgtcaagacgtacctgaggcccgatgtggacaagaaatccaagcataagacgtgtgtgaagaagaagactctcaacccagaatttaacgaggagtttttctacgagatagagctctccactctggccaccaagaccctggaagtcaccgtctgggactatgacattggcaaatccaatgacttcattggtggcgtgtccctggggccaggtgcccgaggcgaggctcggaagcactggagtgactgcctgcagcagccggacgcagccctggagcgctggcacaccctgaccagtgagctgccccctgcggccggggctctgtcctcagcctgagtggacagcagtgtcccggcacaggcccatcgagccgggtccagtacccaaccttcgcacgagtgtgttgcacgtttacacagggtgggctgcccccaccctgcactacctatttttgtgagtctccgtgacccgggtctgtctgctcatgaggggctgcggagttctatattcacatatgcaaacctcctgcctgactcgctagtccctgcaaatatgcaaaccccccatcatctgcacacccgggcagtgctcagagcccggccccaggcccccgcgctcctcactcctgcctctccacgctgccccgtccctctcccccaacagggaggaggtcggattaggggaggttcagaggaggagaatgtctcaaaaaaaaaggacaaaaaacaaacccagagccactcctttaatacagaaacttcattgaaaaaacctagccctgtacagctgcccttttaaagaggtggccattgcagggtctctgcctccccagcaggtggcagatgctcccggccactcgtttaaataactgtcccctggagggggccggggtttgaaggcagggcccctgccaccctcctgggggacacccgtgcatgtttacgccttttctggttgtgtcagtggccggagcatggcagctgggcatcaataaacacctccgaggaa

SEQ ID NO: 5897 - DNA, 2271 bp, Homo sapiens
agtgcgcgcagtggctcatccattgcaaggtgctgcccaccaaccaccgggtgacctgggactcggctcaggtgttcgaccttgcgcagaccctccgcgatggagtcctgctctgccagctgcttaacaacctccgggcgcactccatcaacctgaaggagatcaacctgaggccgcagatgtcccagtttctctgtttgaagaacataaggacatttctcacggcctgttgtgagacgtttggaatgaggaaaagtgaacttttcgaggcatttgacttgtttgatgttcgtgactttggaaaggttatagaaacattatcacgactttctcgaacacctatagcattggccacaggaatcaggcccttcccaacagaagaaagcattaatgatgaagacatctacaaaggccttcctgatttaatagatgaaacccttgtggaagatgaagaagatctctatgactgtgtttatggggaagatgaaggtggagaagtctatgaggacttaatgaaggcagaggaagcacatcagcccaaatgtccagaaaatgatatacgaagttgttgtctagcagaaattaagcagacagaagaaaaatatacagaaactttggagtcaatagaaaagtatttcatggcaccactaaaaagatttctgacagcagcagaatttgattcagtattcatcaacattcctgaacttgtaaaacttcatcggaacctaatgcaagagattcatgattccattgtaaataaaaatgaccagaacttgtaccaagtttttattaactacaaggaaagattggttatttacgggcagtactgcagtggagtggagtcagccatctctagtttagactacatttctaagacaaaagaagatgtcaaactgaaattagaggaatgttccaaaagagcaaataatgggaaatttactcttcgagacttgcttgtggttcctatgcaacgtgttttaaagtaccaccttctcctccaggaactggtcaaacataccactgatccgactgagaaggcaaatctgaaactggctcttgatgccatgaaggacttggcacaatatgtgaatgaagtgaaaagagataatgagacccttcgtgaaattaaacagtttcagctatctatagagaatttgaaccaaccagttttgctttttggacgacctcagggagatggtgaaattcgaataaccactctagacaagcataccaaacaagaaaggcatatcttcttatttgatttggcagtgatcgtatgtaagagaaaaggtgataactatgaaatgaaggaaataatagatcttcagcagtacaagatagccaataatcctacaaccgataaagaaaacaaaaagtggtcttatggcttctacctcatccatacccaaggacaaaatgggttagaattttattgcaaaacaaaagatttaaagaagaaatggctagaacagtttgaaatggctttgtctaacataagaccagactatgcagactccaatttccacgacttcaagatgcataccttcactcgagtcacatcctgcaaagtctgccagatgctcctgaggggaacattttatcaaggctatttatgttttaagtgtggagcgagagcacacaaagaatgtttgggaagagtagacaattgtggcagagttaattctggtgaacaagggacactcaaactaccagagaaacggaccaatggactgcgaagaactcctaaacaggtggatccagatgtgccctgtctccttcatttctttatttccatggcccctgctactagaagcattgtaaaaagccaaaagaagaacaagaaattctgaggacatgggtgaaaatgcagccttgaggtttctgaaaataacaggagacagacaaggctggtgtccagcaacaatactgggtagctctttttgtccccacttacacagcgaaggataaagaagagatcctatggacacttagtaaggattacttcatgttttaattcaaagtactttggaaagaagactttgagcagagtggaatagcaggaggtttttgtaaggtgaaatagaatgaaagtgcagccaagaatttttctgtcttcaattttaaagaacaccggcataactcatttttctttttttcccctgtgttctttttgaccttcttagcagctcctgactttctcccttggggatttttctctgtatagtcagcgctgactcccttagaaatcctgaaccccacacccgtatcgcg

SEQ ID NO: 5898 - DNA, 2370 bp, Homo sapiens
caggagaagtgaagatgtaacatgttatctgtcgctcctcttagctggcggagagaatttacatttaaagattagcagagtgagaaagagaaatctgccttttgttgtgtggggtgaggaggaggcatctacccctggccttgacgctatctcccatcacctctgctatccagacaggactcaccgagatcgtactgagaagcactccacaatgccagactcacctgtggatgtgaagacgcaatctaggctgactcctccaacaatgccacctcccccaactactcaaggagctccaagaaccagttcatttacaccgacaacgttaactaatggcacgagccattctcctacagccttgaatggcgccccctcaccacccaatggcttcagcaatgggccttcctcttcttcctcctcctctctggctaatcaacagctgcccccagcctgtggtgccaggcaactcagcaagctgaaaaggttccttactaccctgcagcagtttggcaatgacatttcacccgagataggagaaagagttcgcaccctcgttctgggactagtgaactccactttgacaattgaagaatttcattccaaactgcaagaagctactaacttcccactgagaccttttgtcatcccatttttgaaggccaacttgcccctgctgcagcgtgagctcctccactgcgcaagactggccaaacagaaccctgcccagtacctcgcccagcatgaacagctgcttctggatgccagcaccacctcacctgttgactcctcagagctgcttctcgatgtgaacgaaaacgggaagaggcgaactccagacagaaccaaagaaaatggctttgacagagagcctttgcactcagaacatccaagcaagcgaccatgcactattagcccaggccagcggtacagtccaaataacggcttatcctaccagcccaatggcctgcctcaccctaccccacctccacctcagcattaccgtttggatgatatggccattgcccaccactacagggactcctatcgacaccccagccacagggacctcagggacagaaacagacctatggggttgcatggcacacgtcaagaagaaatgattgatcacagactaacagacagagaatgggcagaagagtggaaacatcttgaccatctgttaaactgcataatggacatggtagaaaaaacaaggcgatctctcaccgtactaaggcggtgtcaagaagcagaccgggaagaattgaattactggatccggcggtacagtgacgccgaggacttaaaaaaaggtggcggcagtagcagcagccactctaggcagcagagtcccgtcaacccagacccagttgcactagacgcgcatcgggaattccttcacaggcctgcgtctggatacgtgccagaggagatctggaagaaagctgaggaggccgtcaatgaggtgaagcgccaggcgatgacggagctgcagaaggccgtgtctgaggcggagcggaaagcccacgacatgatcacaacagagagggccaagatggagcgcacggtcgccgaggccaaacggcaggcggcggaggacgcactggcagttatcaatcagcaggaggattcaagcgagagttgctggaattgtggccgtaaagcgagtgaaacctgcagtggctgtaacacagcccgatactgtggctcattttgccagcacaaagactgggagaagcaccatcacatctgtggacagaccctgcaggcccagcagcagggagacacacctgcagtcagctcctctgtcacgcccaacagcggggctgggagcccgatggacacaccaccagcagccactccgaggtcaaccaccccgggaaccccttccaccatagagacaacccctcgctagacgtgaactcagaactgtcggaggaaagacaacacaaccaacgcgaaaccaattcctcatcctcagatgctcaaagttgttttttttgtttgtttgtttattagatgaattatcctatttcagtacttcagcaagagagaacctaactgtatcttgaggtggtagtaaaacacagagggccagtaacgggtcgtaatgacttattgtggataacaaagatatcttttctttagagaactgaaaagagagcagagaatataacatgaaatgatagatttgacctcctccctgttattttcaagtagctgggattttaaactagatgacctcattaaccgatgctttaccaaacagcaaaccaagagattgctaattgctgttgaaagcaaaaatgctaatattaaaagtcacaatgttctttatatacaataatggaaaaaaaaaaaagaggaaaa

SEQ ID NO: 5899 - DNA, 4758 bp, Homo sapiens
ccccgggagcccagccagagcgagcgccggggccgggcgcgcaggagtgaaaaggaggcggcggccgcagctgcgagcaacagatccggacgccgcgagctgacccgctctgctgttgggcgatttttttttaattgcagaaaaatttattaaattggaaaatcttgcgtttttcaatggcgctggccccgggtcagcgggcgattttctctgcatcaagatgggctttgccgtttccgtagtgggcaccagtggtggcctgattgtcagtcttctcccggcatttttaaggccaggagccgagcgctgcttgtaggcgaataccctacagagcggtttggctttttaaattactgttattattttgggcagagaacagtcggtctggtgcaccccgtcctcgctgcagaagaggctgcgagtccgaggtgggtctctcggaaggtgaaattccttctggggtgagcgagccccggccccgcgcgcagtccagcggccccgcgtgtgtgccctcgccctgccggagccgggaaaatggaggctgtgattgagaaggaatgcagcgcgctcggaggcctcttccagaccatcatcagcgacatgaaggggagctatccagtttgggaagatttcataaacaaagcaggaaagctgcagtcccagcttcggacaacagtagtagcagcagctgccttcttggacgcctttcagaaagtggctgacatggccaccaacacacgtggtgggaccagggagattggatctgctctcaccaggatgtgcatgaggcacagaagcattgaagccaagctgaggcagttttcgagcgctttaattgattgtctgataaacccacttcaagaacagatggaagaatggaagaaagtggccaaccagctggataaagaccacgcaaaagaatataagaaagcccgccaagagataaaaaagaagtcctcggatacgctgaaactgcagaagaaagcaaaaaaagggagaggtgatatccagcctcagttggacagtgctctccaagatgtcaatgataagtatctcttattggaagaaacagaaaagcaggctgtccggaaggctttgattgaagaacgtggccgattctgtaccttcatctctatgctgcggccagtgattgaagaagaaatctcaatgctaggggaaataacccaccttcagaccatctcggaagatctaaaaagcctgaccatggaccctcacaaactgccctcctcaagtgaacaggtgattctggacttgaaaggttctgattacagctggtcgtatcagacgccaccctcttcccccagcaccaccatgtccagaaagtccagtgtctgcagcagcctgaacagtgtcaacagcagtgactcccggtccagcggctcccactcgcattcccccagctcacattaccgctaccgcagctccaacctggcccagcaggctcctgtgaggctgtccagcgtgtcctcccatgactcaggattcatatcccaggatgccttccagtccaagtcaccatcccccatgccgccagaggcccccaaccagcgccgcaaagagaagcgagaaccggaccccaacgggggaggacccactaccgccagcggcccacctgcagcagctgaggaggctcagagaccacggagcatgactgtatcggctgccaccaggcctggtgaggagatggaggcttgtgaggagctggccctggccctgtctcggggcctgcagctggacacccagaggagcagccgggactcgcttcagtgctccagcggctacagcacccagacaaccaccccctgctgctctgaggacaccatcccttcccaagtttcagattatgattatttctctgtaagtggtgaccaggaggcagatcagcaggagttcgacaagtcctccaccattccaagaaacagcgacatcagccagtcctaccgacggatgttccaagccaagcgtccagcctcaactgctggcctccccaccaccctgggacctgctatggtcactccaggggttgcaactatccgacggaccccttccaccaagccttctgtccgccggggaaccattggagctggtcccatccccatcaagacacccgtgatccctgtcaagaccccaaccgtcccagacctcccaggggtgttgccagcccctccagatgggccagaagagcggggggagcacagccctgagtcgccatctgtgggtgagggcccccaaggtgtcaccagcatgccctcctcaatgtggagcggccaagcttccgttaaccctccacttccaggcccgaagcccagtatccctgaggagcacagacaggcaattccagaaagtgaagctgaagaccaggaacgggaacccccaagtgccactgtctccccaggccagattccagagagtgaccctgcagacctgagcccaagggatactccacaaggagaagacatgctgaacgccatccgaaggggcgtgaaactgaagaagaccacgacaaacgatcgctcagcccctcgcttttcttaggttcacaagaaatgcgccggtggggaatgaactgtttcattaataaaacctaatttgtcttgatccattccactctataataaaacaaaagattttgtaggcaactcggaatatagctcttttgaaagtactcgacacctttagataagaattaaaaccaacctatgtaactgacataatcttgatcttttaatttgtaaatattgacaattttctttctgcacattttaatcttagtttcccttttgatttttctgaaggtgccaaattccatttaacttttttacaagtctttgtaaaattttaaatgcataaagggggttggggcaggggaaccacgaagtagttaattttagaaaaggatttactatacttcactcttctttttttttccccacaagcttttgtagatgcattgtagtagtctagcttagaagcaaatgcaagttattttaatgtacaaactaaatgggtaagaggtaaaatcttcatttaaatatactatgttctggatgaaaagagcaggagtaacaattgatgagcaatattcagagtgaagtaaatctggaaatggtagactgtgttgggattggggggagggccatgggaggggtacatcgtcaacatagccgatcctgttacatttaagagtagcctcgtaggttgaatttcttctggtagcttcatggtaaatgcatccgaataagccatactggattgcagtgtttgtttctgtagggtgtttaaggacttgacttcctttctcccatgattcctctggactgcacacagcacccacaaccagccccatgcatgctgctgcctctgggcagtcgtagaatctcccacttcagtttctcgttgattgtactcacctttatggaatccaaatacatccaaaagggtaaggcagttttaaaaatgtgaaaacatttaaaaatgataatagcagggaattcttagattatagtaaatgccttttacttaactgtgcccagcaggctgggtgcgttaaaaagcccaagtattttgaaaaaactcgaacagatttgacaagggtagccagcttggagtctagcaacttgccaatgtgtttaccaatctgggggcttgtttttcttttcttctttcaaataaatggcagttaactggctttacagtaaacattgaagagaggaggatttgtttattgtcactgggaatctgaccactatactgtcctttttttgtattctgggtaaatgttttttggaaaagatttgtcttttctaagtggaagttaaatttgttatactgcccatcccctaaagccaacagagatttgtagatttaaagggatcacatttgaagacaatagtgtttaagaaagcaagcaagtcccttagcagtcaggtcataacagggcacatttctgaccgaaccctctcaaggcagaggaggagtttggtgggtttcatacaccctgcagattcctgttggctctaaccctcaattacctaatcttatgctttaacacataactgcattggatgtgagagtaacgtaccgtatggtcattgttctatatattaacattgaacactgctgcgattgctcaaggacattttatgttacggctttaaagcaaaggcatgattattagaaactatttaagcttttttctttgaaaaacaagctccttttacagaatataaacaacagtagtgcctgtggtttagcccaccaatcttgatgactaaaagtagctgatgcattgtgcatatgatgcttgagatggtttttgcaaaagcagaaatcgctgcaaggtaatcacaatagataaaagtggtattttaaacctttgaaataaatggatgtaactgtaccttggtacagcttttcacttgtttagtttttaaacgttagtataatctgaataaataaaatgttgccaaattcaatgtagaaagaatgtgacaacacaccttgggtagttctgcttgtgtttttgcatattgtaaaagcagtgtcacagctaaaaagaaagaaatcgtttctaacagtaaattattgtgctttagttgctagtttgtactgagagttgacctctccctgtgcagttttttgttctaaacttgtataaataacaattgtgtaatgtgtctccctcctacattgtaacaattgcttcagcctacgttataaataaagaaccactagatt

SEQ ID NO: 5900 - DNA, 3700 bp, Homo sapiens
aaatctcacagtgctcatttttaaaagggtacacaaaaaaatctcaattccaaagaatttggatcagccaagagaaggcatgggaaaatatcaaatgtttgtatgattacctgggcaaccttttctgtgctatgtaaatgtgtaatgactaatcaaccaggacggccaagggatttgtttctagagataggcaattttcatttgtgcctgtgattggctcagctctgcgtgtgaagagggaaaaggcttccgtttatttagcataatgatggaccaaaacaaaagaagaaatcatttcactcatgcttaggtaatatatgctttaaacactaaaaatgatgagcatgaatctgcaattcaagccctcaaagatgctcatgaagaagaaattcaacaaattcttgctgaaacaagagaaaaaatattgcagtataaaagcaaagtaacagaggagctagaccttagaagaaagattcaagttttagaatcatcattagaagatcacataaaaatgaagcagcaggctttgacagaatttgaagcttataagcacagagttgaggacatgcaactttgtgcagaagcccagcatgtccaacgcatagtgaccatgtctagagaagtcgaagagattagaaggaaatttgaagaaaaattacggagctttggacaacttcaagtacagtttgaaaaagacaaacgattggcattggaagacttgcaagctgctcacagacgggagatacaagagctattgaagtcacagcaggatcacagtgcctcagtaaataaaggccaggaaaaggcagaggaactacacagaatggaggtggagtccctaaacaaaatgcttgaggagctaagacttgaacggaagaaactaattgaggattatgaaggcaagttgaataaagctcagtccttttatgaacgtgagcttgatactttgaaaaggtcacagctttttacagcagaaagcctacaggccagcaaagaaaaggaagctgatcttagaaaagaatttcagggacaagaagcaattttacgaaaaactataggaaaattaaagacagagttacagatggtacaggatgaagctggaagtcttcttgacaaatgccaaaagcttcagacggcacttgccatagcagagaacaatgttcaggttcttcaaaaacagcttgatgatgccaaggagggagaaatggccctattaagcaagcacaaagaagtggaaagtgagctagcagctgccagagaacgtttacaacagcaagcttcagatcttgtcctcaaagctagtcatattggaatgcttcaagcaactcaaatgacccaggaagttacaattaaagatttagaatcagaaaaatcgagagtcaatgagagattatctcaacttgaagaggaaagagcttttttgcgaagcaaaacccaaagtctggatgaagagcagaagcaacagattctagaactggagaagaaagtaaatgaagcaaagagaactcagcaagaatattatgaaagggaacttaaaaacctgcaaagtagattggaagaggaggtgactcaattaaacgaggcccattctaagactttggaagaattagcttggaagcaccatatggcaattgaagctgtccacagtaatgcaattagggataagaaaaaactgcaaatggatttggaagaacaacataacaaagataaactaaacctggaagaggataaaaatcagcttcaacaagagctagaaaacctaaaggaagtactggaagacaagttgaatacagccaatcaagagattggccacctccaagatatggtaaggaaaagtgaacaaggtcttggctctgcagaaggacttattgctagtcttcaggactcccaggaaaggcttcagaatgagcttgacttgactaaagacagcctaaaggagaccaaggatgctctattaaatgtggagggtgagctagaacaagaaaggcaacagcatgaagaaacaattgctgccatgaaagaagaagagaagctcaaagtggacaaaatggcccatgacttagaaattaagtggactgaaaatcttagacaagagtgttctaaacttcgtgaagagttaaggcttcaacatgaagaggataagaagtcagcaatgtctcaacttttgcagttgaaagatcgagagaaaaatgcagcaagagattcatggcagaagaaagtagaagatctcttaaaccagatttccttgctgaaacagaatctggagatacagctttcccagtctcagacttctttgcaacaactgcaagcccagtttacgcaagaacgacagcggcttacgcaagagcttgaagaattagaggagcaacatcagcaaagacacaaatcattaaaagaagcacatgtccttgcatttcaaactatggaagaggaaaaggaaaaggagcaaagagctcttgaaaatcatttacaacagaagcattctgcagagcttcaatcactaaaagatgcacacagagagtcaatggagggcttccggatagaaatggaacaggaacttcagactcttcggtttgaattagaagatgaaggaaaggctatgcttgcttccttgcgctcagaactcaaccatcaacatgcagctgcaattgatttgttacggcataatcatcatcaagaattggcagctgctaaaatggaattagagagaagcatagacatcagcagaagacagagtaaggagcacatatgtagaattacagatctacaagaggaattaagacacagagagcatcacatctctgaattggataaggaggttcagcaccttcatgagaatataagtgccctaaccaaagaactggaatttaaggggaaagaaattctcagaatacgaagtgaatctaaccaacagataagattagaagaaatggaagaaaaatatctaatgagagaatcaaaaccagaagatatacagatgattacagaattaaaagccatgcttacagaaagagaccagatcataaagaaactaattgaggataataagttttatcagctggaattagtcaatcgagaaactaacttcaacaaagtgtttaactcaagtcctactgttggtgttattaatccattggctaagcaaaagaagaagaatgataaatcaccaacaaacaggtttgtgagtgttcccaatctaagtgctctggaatctggtggagtgggcaatggacatcctaaccgcctggatcccattcctaattctccagtccacgatattgagttcaacagcagcaaaccacttccacagccagtgccacctaaagggcccaagacatttttgagtcctgctcagagtgaagcttctccagtggcttctccagatccccagcgccaggagtggtttgcccggtacttcacattctgaaagaattgtgttggcacagctctgtatagactgttactaagagcatgactttatacagattgttatgtaaataggctttcctatgtcaaacactgtgaatgagaaagtatttgtctctccaacttgaaaatgcactgtatttcctgtgatatttattggaatcattctataaggtactatattatgtgtgtaattataactgttatttttatttgagatggaagagtctttaacctttgtaattactgcataataaattttgttagaatcaaa

SEQ ID NO: 5901 - DNA, 1031 bp, Homo sapiens
gaggtagcaacagcgagcgtgccggtcgctagtcgcgggtccccgagtgagcacgccagggagcaggagaccaaacgacgggggtcggagtcagagtcgcagtgggagtccccggaccggagcacgagcctgagcgggagagcgccgctcgcacgcccgtcgccacccgcgtacccggcgcagccagagccaccagcgcagcgctgccatggagcccagcagcaagaagctgacgggtcgcctcatgctggccgtgggaggagcagtgcttggctccctgcagtttggctacaacactggagtcatcaatgccccccagaaggtgatcgaggagttctacaaccagacatgggtccaccgctatggggagagcatcctgcccaccacgctcaccacgctctggtccctctcagtggccatcttttctgttgggggcatgattggctccttctctgtgggccttttcgttaaccgctttggccggcggaattcaatgctgatgatgaacctgctggccttcgtgtccgccgtgctcatgggcttctcgaaactgggcaagtcctttgagatgctgatcctgggccgcttcatcatcggtgtgtactgcggcctgaccacaggcttcgtgcccatgtatgtgggtgaagtgtcacccacagcccttcgtggggccctgggcaccctgcaccagctgggcatcgtcgtcggcatcctcatcgcccaggtaagctggggcaggatctacctgcctggcacggcccctgcccacagcttcagtggctctcggatctgtgcccagcagggcagagtttctcttccgcccagcccccacagccttgcagaggacaactatggtacacaggtccagagaacacagcaccatggcctcccagttgacagcaagatgacttgactcttctcagtccctttcttctcactctaggcttccaaccacagggcccgccttcccccaacatgccgcaggctgttatgcacagtaccctctctccaggaggcttccccttccctgt

SEQ ID NO: 5902 - DNA, 4213 bp, Homo sapiens
atggccaccaggcgtttaaccgacgctttcttgttgttgcggaataattccatccaaaaccggcagctgttagccgagcaagtgagtagtcacatcacctccagccctctgcattcacgtagcattgctgcggccctggatgagcttgctgatgaccgtatggcactggtgtcaggcatcagcttagatccagaagcagcgattggtgtgacaaaacggccacctcctaagtgggtggatggagtggatgaaattcagtatgatgttggccggattaagcagaagatgaaagaattggccagccttcatgacaagcatttaaacagacccaccctggatgacagcagcgaagaggaacatgccattgagataactacccaagagatcactcagctcttccacaggtgccagcgtgccgtgcaggccctgccgagccgggcccgggcctgctccgagcaggaggggcggctgcttgggaacgtggtggcctcgctggcgcaggccctgcaggaactctccaccagcttccggcacgcacagtcaggctacctcaaacgcatgaagaatcgagaggaaagatcccagcattttttcgacacatcagtaccactaatggatgatggagacgataacactctttaccatcggggttttacagaggaccagttagttctggtggagcagaacacactgatggtggaagagcgggaacgagagattcgccagattgtacagtccatttctgacctgaatgaaatattcagggacttaggggcgatgattgtagaacagggtacagtccttgacagaattgactataacgttgaacagtcctgtatcaaaactgaagatggtttgaaacagcttcacaaggcagaacagtatcaaaagaagaatcggaagatgcttgtgattttaatattatttgtcatcatcattgtgctcattgttgtcctcgttggcgtgaagtctcgataagtggcattgggttttcgtgtgtgccgcgcgtgtggatctcccgggtgtgaggggcttggcctgcgccccgccagctgcccgcagaggtgcagcctcgaggaatctgagggcgtcggggcagcgaacctttgcatccacggactcctccttccctagtcctgctcaagcggtccggggaatgggtttttgtttttccttcattgttgagaatttaaggacctttgatactgctgcacaatagagattgagttctgggatcagttataatatatattttttttagaaagagaaaatgagctgagagtttacaggcactgcagaagctgttcagtattatatgtgtatatgctatttttttagcagccatgtctgagcagaatgttaacataatttttggaaaaattttctttaaaccatctggtttttaagaaatttggtaccaaaaattgatgagtagaggcaaaaatgccccttcatctttctctatatattttccagttgaaaacaaactaagaagtcctttaagaatttataatccgttccccattaacttaatttagcttttccatcactgttaatgatcagagtaacaaagtgtgaaaaataagaaaccatcattgatgttaattaacacatttagatgggccagttaaaacagcttcataagttttaaattaattgtaaatggaatattcctcatttaaaatttttgcactgcattttctactgtaaaccaaaagaggttactaagcaaaaccacctaaatttaagttggtgatttaaatgaatctcacattaaaagaaagcttgacagtgttatgaaagccaccagactcagccagtgtgtccccatgggtatccccagccatccttgctcaatccattacttatatactaactacataatgacctgttcaaaccagactctatttaatgaactgtgaatttacacagaggccattttaaatgggtcaccccatttaggattagtggatctcaaattattaaccaaacatcactccatttcaaagtaaaatattccaccagcgatttgatttattggctcttccattgccactgagcaatgcccaggaagcaggcacattgccaaggactgggggcatcttgactaggaagctcctcgtttgtgtgagcgtgggtcagaccgccaaagtaggacttcatcgtttacctacctattatcaatatggtgcttgaatatattcctataactgtagaacagtgtggaaagtgatggtaactttgaagttgttcatgttttattggctttgttttaattgacactagtagagttttaatggtctttgtgtaaattttaatggcttttccattgtttttgcttctcttaaaaagtttaagaagaatatgacctcattaaatgtgctgttttatttggaccagtcacacaaaatgtctctctagagttgactttaaagttgtttacagaaatttaaactcaattccagagattgaagttgtccaaacagctcatgggcttagtgtccaaacccctgcccagccttccctttccaagttggtgccacctccaggtagccattggtggttttcctattactgatgtggctgtggaatgataaggtcctagaggggccctggcatttcaggaagcggacctggtattccctgacaaacattgcttaggaaagagggccggagaataagaagccagcacctcatcagtcagccctgcaatgtgagacttccgtagctgttgagagtcactgcaggtgttctttcatcccatctgattttaacccatggttgagacgttccaagttagatctgctgctcttaggtgtggggctgtccacattagggaacttgcctcaaaaacagtccacagtggcaataccggacttctgttcaagctttttaaagtgctgagccttacaaacccctgaaggaaagtgaccctttaagagaggatcatctttttttatatttattttcaccaaatagggtgatgagggttggtttttgttccctcaacccatttgggtaaaataacggatctgattagaaactgttttaaggaggggctgggctcggtggctcacgcctgtaatcccagactttgagaggccaaggcggtcacgaggtcaggagttcgagaccagcctagccaacatggtgaaaccccgtctctacaaaaaatacaaaaattagccgggtgggacacgcctgtaatcccagctactcaagaggctgaggcaggagaatagcttgaacccgggaggcagaggttgcagtgagccgagatcacaccactgcactccagcctgggtgacagagcgaggctccgtctcaaaaaaaaaaaaaaaaaattgttttagcgctgggtttcccaaggtgggagagacagacccagcctggagctggcccctggcctgtgtgctgacttcttggggtcctcaaaccactgtatttttctgttgagcctgtacttggggagagatcagtagcatttgaggaagtaagagaaaagaatcatggtacctcagggtttctttccctttactcgctggcagccattgtctgtgggcacctcatgtttttccacactctactgggccgtggaggtaacgatcacccaggccagtctcctctgcctgggatgcgccctctgagaggaggcctagcagggcaggctccctctgggcatccctggatgcagcctctggacacatgcctcctttaaagtgtccgggtgcagctcaggttgagtggaggtagaaggagaaacagacatgtttaccacgcgttttccaaagctcctgatctttcccaagattgtaactgaaaactgctgtctcttgttttgttcgttttgggggtggtggtgctggctgggccatgcttgtgaagtgatgtgtgtctctgatttaacggattcactgttttctctgctaattgagagagcgttatttacattatttatttgttttgacacaagtgctttcagtgttttatcctagctaatggcttcttaaaggtaataaaacccttccaacgtaattggtcagataaaactttttttcttgtatgcttaaataaagcaattagtgaagcacttctatccaaaatgacttttttgtccttttttaaaaccaatttactgttactggaaactttttgtacaataaagcaatcacgcagattaaagaacatcctgcaatcctagtattaattttaa

SEQ ID NO: 5903 - DNA, 2099 bp, Homo sapiens
tcatcaacatgcattcccagaaatgccatgaaaggaaagaccaagtcttgactgagaaacggaccgggcagatgagggactcccacatatacctgtttcctgctcttcccgaagacattttgccacaagcatataattcagcttctgaaaaatacggtcttcctcactgcagacaccatgccagcgttttaaatcaagttggctactcgtgctgtttagagtatgcagtttgcctgtggcaatattaaactcatctggaagaaagcacttaaacctatccagttcctcatcggtgatgttatccaggctggttagcaagagtatctccttatatttactctccatctcacgacttttcagcttataagggatccaaactatgtaagattataccaccaaaagtgattcaacattcaaaatgaagcaagatacttcattttcttagcgtttctggagattacaacatcctgcggttccgtttctgggaactttactgatttatctcccccctcacacaaataagcattgattcctgcatttctgaagatctcaagatctggactactgttgaaaaaatttccagtgaggctcacttatgtctgtaaagatgggaaaaaaatacaagaacattgttctactaaaaggattagaggtcatcaatgattatcattttagaatggttaagtccttactgagcaacgatttaaaacttaatttaaaaatgagagaagagtatgacaaaattcagattgctgacttgatggaagaaaagttccgaggtgatgctggtttgggcaaactaataaaaattttcgaagatataccaacgcttgaagacctggctgaaactcttaaaaaagaaaagttaaaagtaaaaggaccagccctatcaagaaagaggaagaaggaagtggatgctacttcacctgcaccctccacaagcagcactgtcaaaactgaaggagcagaggcaactcctggagctcagaaaagaaaaaaatcaaccaaagaaaaggctggacccaaagggagtaaggtgtccgaggaacagactcagcctccctctcctgcaggagccggcatgtccacagccatgggccgttccccatctcccaagacctcattgtcagctccacccaacagttcttcaactgagaacccgaaaacagtggccaaatgtcaggtaactcccagaagaaatgttctccaaaaacgcccagtgatagtgaaggtactgagtacaacaaagccatttgaatatgagaccccagaaatggagaaaaaaataatgtttcatgctacagtggctacacagacacagttcttccatgtgaaggttttaaacaccagcttgaaggagaagttcaccccaaagaagatcattgccatagcaaattatgtttgccgcaatgggttcctggaggtatatcctttcacacttgtggctgatgtgaatgctgaccgaaacatggagatcccaaaaggattgattagaagtgccagcgtaactcctaaaatcaatcagctttgctcacaaactaaaggaagttttgtgaatggggtgtttgaggtacataagaaaaatgtaaggggtgaattcacttattatgaaatacaagataatacagggaagatggaagtggtggtgcatggacgactgaccacaatcaactgtgaggaaggagataaactgaaactcacctgctttgaattggcaccgaaaagtgggaataccggggagttgagatctgtaattcatagtcacatcaaggtcatcaagaccaggaaaaacaagaaagacatactcaatcctgattcaagtatggaaacttcaccagactttttcttctaaaatctggatgtcattgacgataatgtttatggagataaggtctaagtgcctaaaaaaatgtacatatacctggttgaaatacaacactatacatacacaccaccatatatactagctgttaatcctatggaatggggtattgggagtgcttttttaatttttcatagtttttttttaataaaatggcatattttgcatctacaacttctataatttgaaaaaataaataaacattatcttttttgtg

SEQ ID NO: 5904 - DNA, 3610 bp, Homo sapiens
gtccctccctctctctccagccgttttggggaggggctctccacgctccggatagttcccgagggtcatccgcgccgcactcgcctttccgtttcgccttcacctggatataatttccgagcgaagctgcccccaggatgaccacgctggccggcgctgtgcccaggatgatgcggccgggcccggggcagaactacccgcgtagcgggttcccgctggaagtgtccactcccctcggccagggccgcgtcaaccagctcggcggtgtttttatcaacggcaggccgctgcccaaccacatccgccacaagatcgtggagatggcccaccacggcatccggccctgcgtcatctcgcgccagctgcgcgtgtcccacggctgcgtctccaagatcctgtgcaggtaccaggagactggctccatacgtcctggtgccatcggcggcagcaagcccaagcaggtgacaacgcctgacgtggagaagaaaattgaggaatacaaaagagagaacccgggcatgttcagctgggaaatccgagacaaattactcaaggacgcggtctgtgatcgaaacaccgtgccgtcagtgagttccatcagccgcatcctgagaagtaaattcgggaaaggtgaagaggaggaggccgacttggagaggaaggaggcagaggaaagcgagaagaaggccaaacacagcatcgacggcatcctgagcgagcgagcctcagcaccccaatcagatgaaggctctgatattgactctgaaccagatttaccactaaagaggaaacagcgcagaagccgaaccaccttcacagcagaacagctggaggaactggagcgtgcttttgagagaactcattaccctgacatttatactagggaggaactggcccagagggcgaagctcaccgaggcccgagtacaggtctggtttagcaaccgccgtgcaagatggaggaagcaagctggggccaatcaactgatggctttcaaccatctcattcccggggggttccctcccactgccatgccgaccttgccaacgtaccagctgtcggagacctcttaccagcccacatctattccacaagctgtgtcagatcccagcagcaccgttcacagacctcaaccgcttcctccaagcactgtacaccaaagcacgattccttccaacccagacagcagctctgcctactgcctccccagcaccaggcatggattttccagctatacagacagctttgtgcctccgtcggggccctccaaccccatgaaccccaccattggcaatggcctctcacctcaggtaatgggactcctgaccaaccacggtggggtacctcatcagccccagactgattacgcgctctcccctctcaccgggggtctggaacctaccaccacggtgtcggccagctgcagtcagagactagaccatatgaagagcttggacagtctgccaacatctcagtcctactgtccacccacctatagcaccacaggctacagtatggaccctgtcacaggctaccaatatgggcagtatggacaaagtaagccttggactttttagggggcaatttctcctggaagggagataaactcaactcttccttaagaaaggtgaattagaggcaagattaagccacacatgccggtatcaatttttttttttttttgcaaagccagctgactgttccagcaggggcttccttgtgtaattattttcttaactgatgtcaacaacatcttgcggttattaattgttgagacgtgaaacctgattgccactaggtaaaacacaagggttggccaaaatgaaataatccctgacattagaaacacatgttcttaatgaggtcagctccaggatcatatgggggataatcccagggacacaaagttgtgtcaaacttgtctcaggaataaaaatattagtctcaagcctttgatagcacggtattaaatatgacattgtcagcctgtagctgatcttgcccctgactgtgaattgtcccagcatgacctaaaaagctgcgtgtgtttccttacaggtgcctttcattatctcaagccagatatcgcgtaagtgaactgtccacttggagctaaaactggccctgtttctggtcttcgcagcctagatatgaagaatctgctctgaaaacaaaaaaaaattacccttttgttggggggggtggggcagtggtcccaataggagacaaaggagagtgattgattttcttcctccaatagttggtttcaaatccttttgaacacgttcgacaaaagcagtggagaagaggaagacctggagcaataaaagacaaatgcaacattttaaggcaatggtttcacatggttacatatcaaaacatcccaattctttagtgctgatcatcgaggagctagaacattccatttgcttgtgtgcgtgcgtgcgtgtgtgtgtgtgtgtgtgtattgagatttacccagactggtttgggcaagcagactgttctaaaatataatagaataccctaaagtataacatgtcgatgttcgatgctgatacttctacaactttaaaactgctcatttcatgaagcaagaatggaggaatccttgactcttacacactggaaattgaaataaagataaatgcaaccatttttaggaagctagactagctgtaaaggacctcctaaataaattatttgttactgtatcctcatttgtaatctagttgtcaataaatggcccggacatgtcttgctaacaggatatgggctaccaggaagaaggacttgtttccctttcctgtgtggggagaggtgtgtgacgtttttccagttcacatttatttggtagcccacctgggttggaggaagggcacggtggagagaaagtgacatgcattcacatatctgcttatcagtgtgcaatactgtgtacctcatggatgctttggcaatgcccaaggcgatataagcaaaatcagaagtatatttttgcaggtgcttttattttcacagcccataattcatagtgatagagtgcagtgatgtttgccatttgctggacaaccaacacccgggttgctcctttgattagagaccagatcagataattatgcttttaaactgattacgtttacattcttctcttttctatgaaaggcagggcaagaacagaagtgttcacatggctctcatgtacttttaaattatacaatgatatccaatattaaaagattataggaactgaggtttacatacgtttgtgtggtgacattttagaatgtcaataaatttgctttttgagatgttgagaggaacaagaaggtggaaggcagtgttatttatttctttctattcttggaaccacgaatgaggtaggcacaaatacattccttttagagttaagaactatgacgtagcgagttagtgagactagacatagtaccgaatttagttcatgcattggtcttagagggtgatggaacaagagaagtactatctttgtgttgcagcctcaaccaacaacaatgtgttgtaaaaatgtctttcatgtaaaaagtgcagtaaatatttactatttataatgaataaacagttatgaaaa

SEQ ID NO: 5905 - DNA, 1369 bp, Homo sapiens
gttgcggtggccaatagacgcattcggaacatcggcggctgcccgggtgacttggttatatgtcacagaataacattcgagaatgggacatggaatgaggcgacggccccagcaagccccagcagccccagccccagccccaggcccagcagcagcagcagcagcccctgctctcccgccgcccggagaggctctgcagccatgaagccaaccgtcccgaggcaccgccggtaagcagggagcctccgcggagctcccgccgccgctcccccttggtgacctcgccaccagcgggggctcagaggaggaggacaaagacggcggggtgctgttccacgtcaacaagagcggcttccccatcgacagccacacctgggagcgcatgtggatgcacgtggccaaggtgcaccctaaggggggagaaatggtgggcgccatcaggaacgccgccttcttggcaaagccttcaataccccaggtcccaaactacaggctgtcgatgacgatcccagactggctccaggcgatccagaattacatgaagaccctacaatataatcacacagggacccagttctttgaaattaggaaaatgagaccgctgagtgggttaatggaaacagcaaaagaaatgacccgagagtccttgcctatcaaatgccttgaagctgtcatcctgggcatctacttaaccaatgggcagccttccattgagcggttccccatcagctttaaaacctacttctcaggaaactactttcaccacgttgtgctggggatttactgcaatggccgctatggctcattgggcatgagccgcagggctgagctgatggacaagccattgacttttcggactctgagtgacctcatctttgactttgaggactcttacaagaaatacctgcacacagtcaagaaggtcaagattgggctgtacgtcccccatgagcctcatagcttccagcccattgagtggaagcagctggtcctcaacgtctcaaagatgctgagggctgacataaggaaggagctggagaaatatgccagggacatgagaatgaagatcctgaaacctgcaagtgcccactctccgacccaagtgagaagccggggaaaatccctgtcccccagaaggagacaggcaagccccccgaggaggctcggccggcgagagaagtcgcctgcactgcctgaaaagaaggtggctgatctgagcactctgaatgaagtgggctatcaaatccgaatttagccaagccataccggccagcaagagggtttctgtggtgcttctctctgcactttacccagcatcttcaggaggaactgcaactatttattaagaacttgtgaattttatttttaa

SEQ ID NO: 5906 - DNA, 1580 bp, Homo sapiens
tccacgaggctgccggcttaggacccccagctccgacgtaagtccctctcgtgcgccacctccatccgctgcccctctgcccacgggccgggctcaggtgggtaggggtttgaccccttccgctcctctccgccccccatccacgcccacatctctctgcctcctctcctgggctacagtgggccgctctgcctcgctcccgcccgcctgcctcagtctccccagctctctgccacccccctcggaccagtgcctcttaggtctctccagcgcgccatccctgcaaggcggcccctgacaccaactcactttttcctctgagcgcgggaggcgttactcactcttcctccttcccctcctcgccgactcccgggctctgggcccctgggggagggaagaggcctcctatctactcctctgccccagtcccctccttgcgtcagtcccagtgagggataagcgcctggcggaaggcgcagggaggtgtttctctgcttcaggagtgcccgccggcccttgcagctgctggaagacccatttatctcatgcttcttgttttctttggggacctgcaggggaaggaagcagggtgacggtttggtatccccacctaagaccctcccctttcccctgaggccagccgtcagcccctggcagggggtcttggaagccagaggtttttgctcagggcagggaaagggctgcaggatccccgggggctgccggaggtcggtctcactgacatcatggctgaccccagcatcgcctggtcccacagatgtcgccctctggtcgcctgtgtcttctcaccatcgttggcctgattctccccaccagaggacagacgttgaaagataccacgtccagttcttcagcagactcaactatcatggacattcaggtcccgacacgagccccagatgcagtctacacagaactccagcccacctctccaaccccaacctggcctgctgatgaaacaccacaaccccagacccagacccagcaactggaaggaacggatgggcctctagtgacagatccagagacacacaagagcaccaaagcagctcatcccactgatgacaccacgacgctctctgagagaccatccccaagcacagacgtccagacagacccccagaccctcaagccatctggttttcatgaggatgaccccttcttctatgatgaacacaccctccggaaacgggggctgttggtcgcagctgtgctgttcatcacaggcatcatcatcctcaccagtggcaagtgcaggcagctgtcccggttatgccggaatcgttgcaggtgagtccatcagaaacaggagctgacaacctgctgggcacccgaagaccaagccccctgccagctcaccgtgcccagcctcctgcatcccctcgaagagcctggccagagagggaagacacagatgatgaagctggagccagggctgccggtccgagtctcctacctcccccaaccctgcccgcccctgaaggctacctggcgccttgggggctgtccctcaagttatctcctctgctaagacaaaaagtaaagcactgtggtctttg

SEQ ID NO: 5907 - DNA, 767 bp, Homo sapiens
tatgatctcgtgaaatcttgagagaaactgaatgacgaatgaaactattgttcctgtttcacacagaagaaaactgaggttaaaaggggtaaagtaattttgcatggcatgaagtagaaattcaaagtacaggaatttgaacttggttctgtccttttctgaagcccttgaccactatagactcaaacatcaccttgtttttccactcattcaacacttttttttttaaattatctaataggttggcactcatcatgagcccctgttctcattctgcaaatggtgaagctctctattgtcctgaccccacagttcctgtcccatgaccagggccagctcaccaaggagctgcagcagcatgtaaagtcagtgacatgcccatgcgagtacctgaggaaggttatcaatactctggctgaccatcatcatcgtgggactgactttggtggaagtccttggttacatgtcattattgcatttccgacaagttataaagttgtcattaccctctggatagtttacctttgggtgtctctcctgaagactatcttctggtctcgaaatggacatgatggatccacggatgtacagcagagagcctggaggtccaaccgccgtagacaggaagggctgaggtccatttgtatgcacacaaagaaaagagtttcttcctttcgaggaaataaaattgtcctgaaagacgtcattactctacggagacatgtggaaacaaaagttagagctaaaatccgtaagaggaaggtgac

SEQ ID NO: 5908 - DNA, 1714 bp, Homo sapiens
tttctttgatgaaacaagtaaagaagaaacaacacaatcatattaatagaagagtcttcgttccagacgcagtccaggaatcatgctggagaagttctgcaactctactttttggaattcctcattcctggacagtccggaggcagacctgccactttgttttgagcaaactgttctggtgtggattcccttgggctacctatggctcctggccccctggcagcttctccacgtgtataaatccaggaccaagagatcctctaccaccaaactctatcttgctaagcaggtattcgttggttttcttcttattctagcagccatagagctggcccttgtactcacagaagactctggacaagccacagtccctgctgttcgatataccaatccaagcctctacctaggcacatggctcctggttttgctgatccaatacagcagacaatggtgtgtacagaaaaactcctggttcctgtccctattctggattctctcgatactctgtggcactttccaatttcagactctgatccggacactcttacagggtgacaattctaatctagcctactcctgcctgttcttcatctcctacggattccagatcctgatcctgatcttttcagcattttcagaaaataatgagtcatcaaataatccatcatccatagcttcattcctgagtagcattacctacagctggtatgacagcatcattctgaaaggctacaagcgtcctctgacactcgaggatgtctgggaagttgatgaagagatgaaaaccaagacattagtgagcaagtttgaaacgcacatgaagagagagctgcagaaagccaggcgggcactccagagacggcaggagaagagctcccagcagaactctggagccaggctgcctggcttgaacaagaatcagagtcaaagccaagatgcccttgtcctggtaactttcccttgagtgtctgtgtgagcgcgctgcatgtttcaggcaagggtacatcagcatcatggcgattctgtccttacatttttatagcacttcatacttctcagtgcacttcatattattaatggtattcacaatactgatactaccttagtgatggatacatggcgtgtaatgtactgttctctttcctttggggtacttttgaaattttccagaatgaaacgtggttttgaaaaaaataataccttagcatttctagattttgcaccttggtacaaattagcataagcaggcaatttgttgattcattcacttgaaaatatttattgagcacaactgtgtgtcagtgaccattctgggcactaaaagattgctcatcttttgtgagctagaaaatatgtagtaagcccatacataggttactctttgaaagtaataatagctattaagaaaataaaacaatagtgtatttggagtgaagtgcgacttgagacagggtaacaggggaagcttctcagaggagatgacatctgaacagacactcaaatgatgagatcaggccctctgagggacagtcagagggaagtgtgttccagtcagaaggagcaggcatgcgaggctgagaggggaacacatttggcttgctcagggaatggcaagaagatccaggacagggtgcgcatggggtgagatgggctcaaggaagtggacagggattaagctatgtggacccctgtgggccacaataaggaatctgga

SEQ ID NO: 5909 - DNA, 4240 bp, Homo sapiens
caccggcgccgcgtcagcccccaggccgcctgcaggtgtgcgctcagaactagcacgtgtgccggacactatttaagggcccgcctctcctggctcacagctgcttgctgctccagccttgccctcccagagctgccggacgctcgcgggtctcggaacgcatcccgccgcgggggcttcggccgtggcatgggcgccgcgggcctgctcggggttttcttggctctcgtcgcaccgggggtcctcgggatttcttgtggctctcctccgcctatcctaaatggccggattagttattattctacccccattgctgttggtaccgtgataaggtacagttgttcaggtaccttccgcctcattggagaaaaaagtctattatgcataactaaagacaaagtggatggaacctgggataaacctgctcctaaatgtgaatatttcaataaatattcttcttgccctgagcccatagtaccaggaggatacaaaattagaggctctacaccctacagacatggtgattctgtgacatttgcctgtaaaaccaacttctccatgaacggaaacaagtctgtttggtgtcaagcaaataatatgtgggggccgacacgactaccaacctgtgtaagtgttttccctctcgagtgtccagcacttcctatgatccacaatggacatcacacaagtgagaatgttggctccattgctccaggattgtctgtgacttacagctgtgaatctggttacttgcttgttggagaaaagatcattaactgtttgtcttcgggaaaatggagtgctgtcccccccacatgtgaagaggcacgctgtaaatctctaggacgatttcccaatgggaaggtaaaggagcctccaattctccgggttggtgtaactgcaaactttttctgtgatgaagggtatcgactgcaaggcccaccttctagtcggtgtgtaattgctggacagggagttgcttggaccaaaatgccagtatgtgaagaaattttttgcccatcacctccccctattctcaatggaagacatataggcaactcactagcaaatgtctcatatggaagcatagtcacttacacttgtgacccggacccagaggaaggagtgaacttcatccttattggagagagcactctccgttgtacagttgatagtcagaagactgggacctggagtggccctgccccacgctgtgaactttctacttctgcggttcagtgtccacatccccagatcctaagaggccgaatggtatctgggcagaaagatcgatatacctataacgacactgtgatatttgcttgcatgtttggcttcaccttgaagggcagcaagcaaatccgatgcaatgcccaaggcacatgggagccatctgcaccagtctgtgaaaaggaatgccaggcccctcctaacatcctcaatgggcaaaaggaagatagacacatggtccgctttgaccctggaacatctataaaatatagctgtaaccctggctatgtgctggtgggagaagaatccatacagtgtacctctgagggggtgtggacaccccctgtaccccaatgcaaagtggcagcgtgtgaagctacaggaaggcaactcttgacaaaaccccagcaccaatttgttagaccagatgtcaactcttcttgtggtgaagggtacaagttaagtgggagtgtttatcaggagtgtcaaggcacaattccttggtttatggagattcgtctttgtaaagaaatcacctgcccaccaccccctgttatctacaatggggcacacaccgggagttccttagaagattttccatatggaaccacggtcacttacacatgtaaccctgggccagaaagaggagtggaattcagcctcattggagagagcaccatccgttgtacaagcaatgatcaagaaagaggcacctggagtggccctgctcccctgtgtaaactttccctccttgctgtccagtgctcacatgtccatattgcaaatggatacaagatatctggcaaggaagccccatatttctacaatgacactgtgacattcaagtgttatagtggatttactttgaagggcagtagtcagattcgttgcaaagctgataacacctgggatcctgaaataccagtttgtgaaaaaggctgccagtcacctcctgggctccaccatggtcgtcatacaggtggaaatacggtcttctttgtctctgggatgactgtagactacacttgtgaccctggctatttgcttgtgggaaacaaatccattcactgtatgccttcaggaaattggagtccttctgccccacggtgtgaagaaacatgccagcatgtgagacagagtcttcaagaacttccagctggttcacgtgtggagctagttaatacgtcctgccaagatgggtaccagttgactggacatgcttatcagatgtgtcaagatgctgaaaatggaatttggttcaaaaagattccactttgtaaagttattcactgtcaccctccaccagtgattgtcaatgggaagcacacaggcatgatggcagaaaactttctatatggaaatgaagtctcttatgaatgtgaccaaggattctatctcctgggagagaaaaaattgcagtgcagaagtgattctaaaggacatggatcttggagcgggccttccccacagtgcttacgatctcctcctgtgactcgctgccctaatccagaagtcaaacatgggtacaagctcaataaaacacattctgcatattcccacaatgacatagtgtatgttgactgcaatcctggcttcatcatgaatggtagtcgcgtgattaggtgtcatactgataacacatgggtgccaggtgtgccaacttgtatcaaaaaagccttcatagggtgtccacctccgcctaagacccctaacgggaaccatactggtggaaacatagctcgattttctcctggaatgtcaatcctgtacagctgtgaccaaggctacctgctggtgggagaggcactccttctttgcacacatgagggaacctggagccaacctgcccctcattgtaaagaggtaaactgtagctcaccagcagatatggatggaatccagaaagggctggaaccaaggaaaatgtatcagtatggagctgttgtaactctggagtgtgaagatgggtatatgctggaaggcagtccccagagccagtgccaatcggatcaccaatggaaccctcccctggcggtttgcagatcccgttcacttgctcctgtcctttgtggtattgctgcaggtttgatacttcttaccttcttgattgtcattaccttatacgtgatatcaaaacacagagcacgcaattattatacagatacaagccagaaagaagcttttcatttagaagcacgagaagtatattctgttgatccatacaacccagccagctgatcagaagacaaactggtgtgtgcctcattgcttggaattcagcggaatattgattagaaagaaactgctctaatatcagcaagtctctttatatggcctcaagatcaatgaaatgatgtcataagcgatcacttcctatatgcacttattctcaagaagaacatctttatggtaaagatgggagcccagtttcactgccatatactcttcaaggactttctgaagcctcacttatgagatgcctgaagccaggccatggctataaacaattacatggctctaaaaagttttgccctttttaaggaaggcactaaaaagagctgtcctggtatctagacccatcttctttttgaaatcagcatactcaatgttactatctgcttttggttataatgtgtttttaattatctaaagtatgaagcattttctggggttatgatggctttacctttattaggaagtatggttttattttgatagtagcttcctcctctggtggtgttaatcatttcatttttacccttacttggtttgagtttctctcacattactgtatatactttgcctttccataatcactcagtgattgcaatttgcacaagtttttttaaattatgggaatcaagatttaatcctagagatttggtgtacaattcaggctttggatgtttctttagcagttttgtgataagttctagttgcttgtaaaatttcacttaataatgtgtacattagtcattcaataaattgtaattgtaaagaaaacatacaa

SEQ ID NO: 5910 - DNA, 1927 bp, Homo sapiens
atggaggaccccacgctctatattgtcgagcggccgcttcccgggtaccccgacgccgtagaccagatccagctgactcaagcacagctggaggagcggcaggcggagatggagggcgcagtgcagagcatccagggcgagctgagcaagctgggcaaggcgcacgccaccacgagcaatacggtgagcaagctgctggagaaggtgcgcaaggtcagcgtcaacgtgaagaccgtgcgcggcagcctggagcgccaggcggggcagatcaagaagctggaggtcaacgaggccgagctgctgcggcgccgcaactttaaagtcatgatctaccaggatgaagtgaagctgccggccaaactgagcatcagcaaatcgctgaaagagtcggaggcgctgccagagaaggagggcgaggagctgggcgagggcgagcggcccgaggaggacgcagcggcgctggagctttcgtcggacgaggcggtggaggttgaggaggttattgaggagtcccgcgcagagcgtatcaagcgcagcggcctgcggcgcgtggacgacttcaagaaggccttctccaaggagaagatggagaagaccaaggtgcgtacccgcgagaacctggagaagacgcgcctcaagaccaaggaaaacctggagaagacgcggcacaccctggagaagcgcatgaacaagctgggcacgcgcctggtgcccgccgagcggcgcgagaaactgaagacgtcgcgggacaagttgcgcaaatccttcacgcccgaccacgtggtgtacgcgcgctccaagaccgcggtctacaaggtgccacccttcaccttccacgtcaagaagatccgcgagggccaggtggaagtgctcaaggccaccgagatggtggaggtgggcgccgacgacgacgagggcggcgcggagcgcggggaggccggcgacctgcggcgcgggagcagccccgacgtgcacgcgctgctggagatcaccgaggagtcggacgccgtgctggtggacaagagcgacagcgactgagccgcccccgctgccacccaccccattcctcgctccttccgaacttcctctttcgcattctctctcggctcgagctggctgagatttttctaaattgaaaacacgcccccctccccacacctccaggaactccactcccagtcttagagctgccttcccctcagcctctccccacaccacccacccagctgctgtcattccgctcactgagctcttcttcattctcaccctgatccctgggggactcaaagccaaaactgcccaaagaggaaagattgaatcctaaaggggatccctgcccccatgggaggccccctactagaaggacgtgaaagcagcttttgggggaaactgaggcagtggggaagacagagcagaatgagccctcaccctggctgggggtccagcacaggctgtatctgcagagggtcccagaggaacgctggagccaagagaagccctgggaaggaggggtggggaacgacatgcatgtgagggatggcacactgatgtgtttatgcacctgtacacaggagcgcatggccatggctttggaaaggagaatggaaaaatagaagaaggtcggccgggcttggtggcttatgcctgtaaccccagcactttgggaggccgaggtgggcggatcacctgaagtcaggagttcgggaccagcctggcaaacaccccatctctactaagcgaaaacccatctctactaaaattacaaaaattagctgggcatggttgcgcatgcctgtaatcccagctactttggaggctgaggtggggagaattgcttgaacctgggaggtggaggttgcagtgagccaaggtcgcgacactgcactccagcctgggtgacagagtgagactccatctcaacagaagg

SEQ ID NO: 5911 - DNA, 9642 bp, Homo sapiens
atggtccgcttcggggacgagctgggcggccgctatgggggccccggcggcggagagcgggcccggggcggcggggccggcggggcggggggcccgggtcccggggggctgcagcccggccagcgggtcctctacaagcaatcgatcgcgcagcgcgcgcggaccatggcgctgtacaaccccatcccggtcaagcagaactgcttcaccgtcaaccgctcgctcttcgtcttcagcgaggacaacgtcgtccgcaaatacgcgaagcgcatcaccgagtggcctccattcgagtatatgatcctggccaccatcatcgccaactgcatcgtgctggccctggagcagcacctccctgatggggacaaaacgcccatgtccgagcggctggacgacacggagccctatttcatcgggatcttttgcttcgaggcagggatcaaaatcatcgctctgggctttgtcttccacaagggctcttacctgcggaacggctggaacgtcatggacttcgtggtcgtcctcacagggatccttgccacggctggaactgacttcgacctgcgaacactgagggctgtgcgtgtgctgaggcccctgaagctggtgtctgggattccaagtttgcaggtggtgctcaagtccatcatgaaggccatggttccactcctgcagattgggctgcttctcttctttgccatcctcatgtttgccatcattggcctggagttctacatgggcaagttccacaaggcctgtttccccaacagcacagatgcggagcccgtgggtgacttcccctgtggcaaggaggccccagcccggctgtgcgagggcgacactgagtgccgggagtactggccaggacccaactttggcatcaccaactttgacaatatcctgtttgccatcttgacggtgttccagtgcatcaccatggagggctggactgacatcctctataatacaaacgatgcggccggcaacacctggaactggctctacttcatccctctcatcatcatcggctccttcttcatgctcaacctggtgctgggcgtgctctcgggggagtttgccaaggagcgagagagggtggagaaccgccgcgccttcctgaagctgcgccggcagcagcagatcgagcgagagctcaacgggtacctggagtggatcttcaaggcggaggaagtcatgctggccgaggaggacaggaatgcagaggagaagtcccctttggacgcagtgctgaagagagcggccaccaagaagagcagaaatgacctgatccacgcagaggagggagaggaccggtttgcagatctctgtgctgttggatcccccttcgcccgcgccagcctcaagagcgggaagacagagagctcgtcatacttccggaggaaggagaagatgttccggttttttatccggcgcatggtgaaggctcagagcttctactgggtggtgctgtgcgtggtggccctgaacacactgtgtgtggccatggtgcattacaaccagccgcggcggcttaccacgaccctgtattttgcagagtttgttttcctgggtctcttcctcacagagatgtccctgaagatgtatggcctggggcccagaagctacttccggtcctccttcaactgcttcgactttggggtcatcgtggggagcgtctttgaagtggtctgggcggccatcaagccgggaagctcctttgggatcagtgtgctgcgggccctccgcctgctgaggatcttcaaagtcacgaagtactggagctccctgcggaacctggtggtgtccctgctgaactccatgaagtccatcatcagcctgctcttcttgctcttcctgttcattgtggtcttcgccctgctggggatgcagctgtttgggggacagttcaacttccaggatgagactcccacaaccaacttcgacaccttccctgccgccatcctcactgtcttccagatcctgacgggagaggactggaatgcagtgatgtatcacgggatcgaatcgcaaggcggcgtcagcaaaggcatgttctcgtccttttacttcattgtcctgacactgttcggaaactacactctgctgaatgtctttctggccatcgctgtggacaacctggccaacgcccaagagctgaccaaggatgaagaggagatggaagaagcagccaatcagaagcttgctctgcaaaaggccaaagaagtggctgaagtcagccccatgtctgccgcgaacatctccatcgccgccaggcagcagaactcggccaaggcgcgctcggtgtgggagcagcgggccagccagctacggctgcagaacctgcgggccagctgcgaggcgctgtacagcgagatggaccccgaggagcggctgcgcttcgccactacgcgccacctgcggcccgacatgaagacgcacctggaccggccgctggtggtggagctgggccgcgacggcgcgcgggggcccgtgggaggcaaagcccgacctgaggctgcggaggcccccgagggcgtcgaccctccgcgcaggcaccaccggcaccgcgacaaggacaagacccccgcggcgggggaccaggaccgagcagaggccccgaaggcggagagcggggagcccggtgcccgggaggagcggccgcggccgcaccgcagccacagcaaggaggccgcggggcccccggaggcgcggagcgagcgcggccgaggcccaggccccgagggcggccggcggcaccaccggcgcggctccccggaggaggcggccgagcgggagccccgacgccaccgcgcgcaccggcaccaggatccgagcaaggagtgcgccggcgccaagggcgagcggcgcgcgcggcaccgcggcggcccccgagcggggccccgggaggcggagagcggggaggagccggcgcggcggcaccgggcccggcacaaggcgcagcctgctcacgaggctgtggagaaggagaccacggagaaggaggccacggagaaggaggctgagatagtggaagccgacaaggaaaaggagctccggaaccaccagccccgggagccacactgtgacctggagaccagtgggactgtgactgtgggtcccatgcacacactgcccagcacctgtctccagaaggtggaggaacagccagaggatgcagacaatcagcggaacgtcactcgcatgggcagtcagcccccagacccgaacactattgtacatatcccagtgatgctgacgggccctcttggggaagccacggtcgttcccagtggtaacgtggacctggaaagccaagcagaggggaagaaggaggtggaagcggatgacgtgatgaggagcggcccccggcctatcgtcccatacagctccatgttctgtttaagccccaccaacctgctccgccgcttctgccactacatcgtgaccatgaggtacttcgaggtggtcattctcgtggtcatcgccttgagcagcatcgccctggctgctgaggacccagtgcgcacagactcgcccaggaacaacgctctgaaatacctggattacattttcactggtgtctttacctttgagatggtgataaagatgatcgacttgggactgctgcttcaccctggagcctatttccgggacttgtggaacattctggacttcattgtggtcagtggcgccctggtggcgtttgctttctcaggatccaaagggaaagacatcaataccatcaagtctctgagagtccttcgtgtcctgcggcccctcaagaccatcaaacggctgcccaagctcaaggctgtgtttgactgtgtggtgaactccctgaagaatgtcctcaacatcttgattgtctacatgctcttcatgttcatatttgccgtcattgcggtgcagctcttcaaagggaagtttttctactgcacagatgaatccaaggagctggagagggactgcaggggtcagtatttggattatgagaaggaggaagtggaagctcagcccaggcagtggaagaaatacgactttcactacgacaatgtgctctgggctctgctgacgctgttcacagtgtccacgggagaaggctggcccatggtgctgaaacactccgtggatgccacctatgaggagcagggtccaagccctgggtaccgcatggagctgtccatcttctacgtggtctactttgtggtctttcccttcttcttcgtcaacatctttgtggctttgatcatcatcaccttccaggagcagggggacaaggtgatgtctgaatgcagcctggagaagaacgagagggcttgcattgacttcgccatcagcgccaaacccctgacacggtacatgccccaaaaccggcagtcgttccagtataagacgtggacatttgtggtctccccgccctttgaatacttcatcatggccatgatagccctcaacactgtggtgctgatgatgaagttctatgatgcaccctatgagtacgagctgatgctgaaatgcctgaacatcgtgttcacatccatgttctccatggaatgcgtgctgaagatcatcgcctttggggtgctgaactatttcagagatgcctggaatgtctttgactttgtcactgtgttgggaagtattactgatattttagtaacagagattgcgaacaatttcatcaacctcagcttcctccgcctctttcgagctgcgcggctgatcaagctgctccgccagggctacaccatccgcatcctgctgtggacctttgtccagtccttcaaggccctgccctacgtgtgtctgctcattgccatgctgttcttcatctacgccatcatcggcatgcaggtgtttgggaatattgccctggatgatgacaccagcatcaaccgccacaacaacttccggacgtttttgcaagccctgatgctgctgttcaggagcgccacgggggaggcctggcacgagatcatgctgtcctgcctgagcaaccaggcctgtgatgagcaggccaatgccaccgagtgtggaagtgactttgcctacttctacttcgtctccttcatcttcctgtgctcctttctgatgttgaacctctttgtggctgtgatcatggacaattttgagtacctcacgcgggactcttccatcctaggtcctcaccacttggatgagttcatccgggtctgggctgaatacgacccggctgcgtgtgggcgcatcagttacaatgacatgtttgagatgctgaaacacatgtccccgcctctggggctggggaagaaatgccctgctcgagttgcttacaagcgcctggttcgcatgaacatgcccatctccaacgaggacatgactgttcacttcacgtccacgctgatggccctcatccggacggcactggagatcaagctggccccagctgggacaaagcagcatcagtgtgacgcggagttgaggaaggagatttccgttgtgtgggccaatctgccccagaagactttggacttgctggtaccaccccataagcctgatgagatgacagtggggaaggtttatgcagctctgatgatattcgacttctacaagcagaacaaaaccaccagagaccagatgcagcaggctcctggaggcctctcccagatgggtcctgtgtccctgttccaccctctgaaggccaccctggagcagacacagccggctgtgctccgaggagcccgggttttccttcgacagaagagttccacctccctcagcaatggcggggccatacaaaaccaagagagtggcatcaaagagtctgtctcctggggcactcaaaggacccaggatgcaccccatgaggccaggccacccctggagcgtggccactccacagagatccctgtggggcggtcaggagcactggctgtggacgttcagatgcagagcataacccggaggggccctgatggggagccccagcctgggctggagagccagggtcgagcggcctccatgccccgccttgcggccgagactcagcccgtcacagatgccagccccatgaagcgctccatctccacgctggcccagcggccccgtgggactcatctttgcagcaccaccccggaccgcccaccccctagccaggcgtcgtcgcaccaccaccaccaccgctgccaccgccgcagggacaggaagcagaggtccctggagaaggggcccagcctgtctgccgatatggatggcgcaccaagcagtgctgtggggccggggctgcccccgggagaggggcctacaggctgccggcgggaacgagagcgccggcaggagcggggccggtcccaggagcggaggcagccctcatcctcctcctcggagaagcagcgcttctactcctgcgaccgctttgggggccgtgagcccccgaagcccaagccctccctcagcagccacccaacgtcgccaacagctggccaggagccgggaccccacccacagggcagtggttccgtgaatgggagccccttgctgtcaacatctggtgctagcacccccggccgcggtgggcggaggcagctcccccagacgcccctgactccccgccccagcatcacctacaagacggccaactcctcacccatccacttcgccggggctcagaccagcctccctgccttctccccaggccggctcagccgtgggctttccgaacacaacgccctgctgcagagagaccccctcagccagcccctggcccctggctctcgaattggctctgacccttacctggggcagcgtctggacagtgaggcctctgtccacgccctgcctgaggacactctcactttcgaggaggctgtggccaccaactcgggccgctcctccaggacttcctacgtgtcctccctgacctcccagtctcaccctctccgccgcgtgcccaacggttaccactgcaccctgggactcagctcgggtggccgagcacggcacagctaccaccaccctgaccaagaccactggtgctagctgcaccgtgaccgctcagacgcctgcatgcagcaggcgtgtgttccagtggatgagttttatcatccacacggggcagccggccctcgggggaggccttgcccaccttggtgaggctcctgtggcccctccctccccctcctcccctcttttactctagacgacgaataaagccctgttagaggatgcggctctctctgtccccttcctgtcctgccttcctgggtctcgtaccacacaccagaccctaaaccgcaggctgctgtgtgtggctgagaaggacccaggagtccaaatcccgtgtcctgggactcagcatccagcatgggtgcttggagccgttgtgaggagctctgcgtcctgtggggagcacccttcacgtggccgtgcggcacagagaagcagggcccacctgaaagtgcgccgagacctcgggacggaggggatggggagggggacacagtcgtggcttgtgcagcccgccagtgtcagcgaatgctcactcaggcaagctctgtcctccctggacaccgtcagccccacaggaaccgagctgggaagtgttcttgctgtggttgtgatttttaattgcaacacctctcattcttgtcacttctatatacgtgatgtagaaaaaatggaaaaccagaaaaatggggaaggaaatgttcacataactttaaaaaatcaaacctgtgaaagaaagatgtcagctttttgccacgtgtctttgtggcttatgcgaggagactccctgtgcagccctgtccggtccaggtggacgtagacggcccctggctctgctgctcttgaccaagtgcctgaccgccaggccctcacacccaggctcctgggcactgtggtgtgaggcgaggcctcgggatccatcaccgcaggatgctgtgaaaagtactcgcgatggcagccaggtagcaagcccttgccagtggagagcactggatgtcatggtggcaaacaaggcagccatttgctgtcctcctcccacgagtggaaggggtttccaaggaagccacagggcagctgaccacgtgcttgtgtgaggcattttcagtctgttctgcatatgattctcagggcacactctgtggtatgtgaaataggtttccttccacatacagcagaagagaggcaaaggctggtaggaaggaggaagacattggctgggggcttggatgtggggccgtcagggcaggagggaggaagccccagctggaatgaaactcagagcaagtgaccgagggaggacacggctcctgccactgaggccgggcacctgatgcccagcactgtcctggcgccagacacagggagcaggcagtcaagtgaggtctgacccccatggccacgctcaggagagaaagaccatgctcaggacactgtccaaggtgcacaagatgctgggaggtcccttgtttggtgaagaaagggagcatttagagcagttgatggtggtgtgtcctccgtgttctgaaattccagatgatctgtgttggattcttggcttctaccccatgattctcctcaaagaaattgtgtgtgatgtgtgtgtgtgtgtgtgtgtgtgtgtgtctgtgtcacaggagatgcagtgcctgtacaggtgtgttcagtgtgtggatgtcattaacccatagggctatgcaacaaaagacacatttaatagaagtaaaacacacaagaccgctgcctggtctcggggttcagcatgattgtgaccaaacctttttatagaatttccttacctgaaggcacaacactctgaaactttaaagataacagagtattttattccaatagaataaaccaggaatctcggactgtgcatgtgatcactgtgctcctgttgcaaagtagaaggatgtgtattttgacactgacgttttgtctcttgttccccagcccccagcccatgttatcttgggtgtcgaatgtgtccattccatgcagaaccacagccatttccccaggcagtgttgggtcgagaatccacttttctaaacccacacagcctagctggcttgtctagactcttctaggcattggaattgatgaaaactacagggagcggggaaaggagacattatgtcttgttttcctgactttgggttttgtttctcactgtgtcttctccggctatcatatatgtcccctgaatctcatagtgagctgccaaatttgaagtgcatcacccagttgtctgcatctggaaccagtcaagcagtggctgtagtttgaacaagttatgtgtgcatgtaacatatatacatatatacatatatacaagtatgtgcatgataatgtatatcttcgtactttttgatacaatgtattcatttgttaatttttaattatatttgatataaatcaaaggtttgttgcaaaactttatatttaagaagtgttaaaaaaaaaaaaaagtcccaaccatgcaacacaactgggacctacttaaaaagaaattctgtgattgactagtttgctgcctgagtcatatttatcagccaaactttggattctgctgttgtttctacaatgacattttgtatgaagcaaagtccttgaattaaaataaaaacttagcaaaaaatcaaaaacaaaacccca

SEQ ID NO: 5912 - DNA, 4828 bp, Homo sapiens
cacaagggtcaagtagtccagcattctacagtttgtgtgtttgagagaaaaataagcccataaaaacattctaaccttcagattaagttagatacaacaaaatttcaaaaattaggcagttttacaagtgctatgggaaaaatagcctaattaaatttttctctcctcttttttttctccaccgtcttagtgttttctgcattctctcccagcggatctgattcctgttctgaagaattgaagttgagcatcgttagttaaattcagctgctgcctgactgtataccacagcaaaggctttggaaacatttttcagttaaaacaataatgactttcttggagtgtaatcccagtggaggctgttctacgtatagcctgaaagaatacttaactaccatacgcaattctgcagagaccttgtaaaaatcacactttacaccaaacaactgagtgattctgaattggttgggggaatcttagttgtagatatcaattcaccttcttgaagattcaaccactgctactcagagctgctgctgaaataccatgtctaagaactcagagttcatcaatctgtcatttttattagatcatgagaaggaaatgatcctgggcgtcctaaagagagatgaatatttgaaaaaagtggaggacaagagaataaggaagctgaaaaatgaactcttagaagcaaaacgtagaagtgggaaaactcaacaagaggccagcagagtttgtgttcactgtcacagaaacctgggcctaatctttgaccggggagacccttgtcaggcttgctcactgagggtatgcagggagtgtcgagttgcaggccccaatggcagctggaagtgcactgtctgtgacaaaatcgcgcagctaaggattataactggtgagtggttttttgaagaaaaggcaaaacgtttcaagcaagtcaatgttctcggcactgatgttgtccgacagtccattttaagaagaagtccaggagctgaagaagtacagagccaagagcaaacccgccaggatgcagaaaagtcagacacttcacctgttgctgggaagaaggccagccatgatgggcccaagagaaagggatttcttcttagcaagttcagatcggcaaccagaggagaaatcataactcccaaaactgacactgggcggagctatagcttggacttagacggtcaacattttcggagtttaaaatcacctcctggttcagacaggggaagcactggctcatcagatctcaatgaccaggaacctggtcctaggaccccgaagagcagtcggagcaatggtgtgaccccaggcactcagagttcaccagccccaagcacacgaactgtgacctcagtcatcagtagagagtatggttttgaaaattccatggatttggctgctattgaaggtacctctcaggagctcacaaagagtcaccgcagaaacacttctggcacaccttccatagcagtgtctggaacctctctctcctcagatcagagtcgatctgagttagatttgagtgagtcatttacagaagactcagaggatactgtaagcataagaagcaagtctgtccctggggctttagacaaggactccttggaagagactgaagaaagcattgatgccttagtgtcctcgcagttatctacaaacactcaccgtctggcaagtggcctatcaactaccagccttaacagcatgatgagcgtttacagtgaaacgggagactatggcaacgtgaaagtcagtggtgaaatccttctccatatcagctactgctacaaaactggtgggctgtacatttttgtcaagaattgcagaaatctggccataggagatgaaaagaaacagaggacagatgcttatgtcaagtcatatcttcttcctgacaagtcccggaacaacaagcgtaagaccaaaatcagaacaggcaccaatccagaattcaatgaaacactaaagtacactatcagccatacccagctggaaacaagaactctgcagctctcagtctggcactatgatcgatttggacgtaatagcttcctcggggaagtagagattccttttgactcatggaactttgaaaatccaactgatgagtggtttgtgcttcaacccaaggtggagtttgctcctgatattggccttcaatacaaaggagagctgacagttgttttacgttacattcccccagaagagaacctgatgcttccaccagaacaactccaaggaaataagacttttaaaaagggaaagaagaaggagtcacctgtaatctctggaggaatactagaagtgttcatcaaagaggcaaagaatttgacagcagtgaagtcaggaggcacttctgatagctttgtgaagggctacctgctccctgatgatagcaaagccaccaagcacaaaactctggtaataaaaaagagtgttaaccctcagtggaatcatacattcatgttcagtggcatccatccccaggatataaagaatgtttgcctagaacttactatctgggacaaggaggccttttccagcaacatctttctgggaggagttcgtttgaattctggaagtggtgtgagccatgggaagaacgtggattggatggactctcagggggaagagcagcgcctttggcagaagatggccaacaaccctggaactccctttgagggtgtactcatgcttcgttccagcatgggaaaatgtaggctctaaagggaccagttctccaagaatgaggccaccaggacctatctggctgtcttttcctaccattagcaaactgagacctgggattctgcttccctgccatttctcacctgacagtgttgggacatgaggggagagatgtcagtagtatgaacatttagggtcttgctgagtgcctaaaaaacatatatttccatccaatcaaggccttcttgattggatgatagaaagtgtactacttgtcctgtcaacaagcaaattgtgcaaaggcttatagggtttatgccataaaagaaatggcacaagcctccatttgctaattataagttactttagatttcctcaaatcctttgaagagaaagaggaccactgagaaggtagatcacttgaaaagtcagaagaaaggatactggccaacttttactcaccctaggaatccacatgatctcaagaaggcatggtggagatggttgcttgagcaaggggattgtcctgttattgcagcaaacttgtggattaaccaagtagtatttcaagatggattgacagggctttctatgattactatagaatttatcatctaaatcagtttactttttagaacaaagagagctaaataactacatcagaacgattgatgttgattagaattgacctgggaaaattgggatgtagggtcaccctactgatgacctaagagagctctgttttaaacatttattttataaaatgttctaagccattaactaaaaggaaatgagatataatggtcaattgatataccttttcacattgtgttcactgacgagactagtttaatgaaaaaggaggtactctacctgctattttacttctgttcctcttctgccctgttatgggagagaatcaaagactccatctgctctcttcccccttgttttctccttcactgagtttttcttatctccttttgcagtggttaactattgtcacaataatgctgaatgaaaaaacacaccaaatgtcagtggcttaaaatgaccatcctttttctcacagttatgaagattggctatggcacctctgcttcctgctataggcctgaggttctagggcttcttatgcctcatcctctttaagccaaagggatagccagagcatcttgatggcagaagtgcaataagatgagccccactgctcgggtacattttcagcccctggttgtgtcatgtctactgatatctcattggtcaaaggaagtcagagggccaagatgaagaggcagggaaatatgcactgcccacagtgaagccatgacaagagtgaggatgcaggaaggcatgaagaattggggccaacagttcaatctaccataccttctctcacctggaattccagatgcttgagctacgaaacttagatgcaaagaaagttaaagctagaaggaacctcaggcccagttgctcattttgcagattccaaatgtgaatttcagagagctgagataacttgcccaaggccatatagaggctgtgactaaatctggacttaaatccagactatcaatcttaggccagtgttcttttttcaatatagtccttggcataatgctatgcttattaggtagataaaagggcttatgtcaagaaatttggagcagagtctgattacttgagcatgaacatacccgaccaaggtatgttctggagtcatattctagcctctgagctcattttttcatgcgagttcatataaaatcctcgaaagtttagaaactaggttttagtagtaacggagctagaatcatcttcgggcttattcctgctagttgttccatatttctagatttcatcttgaattttgaaaactgatttaagaatatatttagtattattattagtaagggaatacgcaatccagtttcaattttattcagaagtaggtcacctaattctagaaaatggttattagtctagtgtcgcttagcaaggtacttaaaagaaaatctgcacatatccttgtgctgcccttcttaaaaacagaaaacaaaaagtgtaagatcatcattgcttcccacataggaaaaataaaatgtcttcagacttgatgtgactc

SEQ ID NO: 5913 - DNA, 2564 bp, Homo sapiens
attgtttcctactccattttctctggggcaatagcagaataggagcaagccagcactagtcagctaactaagtgactcaaccaaggccttttttccttgttatctttgcagatacttcattttcttagcgtttctggagattacaacatcctgcggttccgtttctgggaactttactgatttatctcccccctcacacaaataagcattgattcctgcatttctgaagatctcaagatctggactactgttgaaaaaatttccagtgaggctcacttatgtctgtaaagatgggaaaaaaatacaagaacattgttctactaaaaggattagaggtcatcaatgattatcattttagaatggttaagtccttactgagcaacgatttaaaacttaatttaaaaatgagagaagagtatgacaaaattcagattgctgacttgatggaagaaaagttccgaggtgatgctggtttgggcaaactaataaaaattttcgaagatataccaacgcttgaagacctggctgaaactcttaaaaaagaaaagttaaaagtaaaaggaccagccctatcaagaaagaggaagaaggaagtggatgctacttcacctgcaccctccacaagcagcactgtcaaaactgaaggagcagaggcaactcctggagctcagaaaagaaaaaaatcaaccaaagaaaaggctggacccaaagggagtaaggtgtccgaggaacagactcagcctccctctcctgcaggagccggcatgtccacagccatgggccgttccccatctcccaagacctcattgtcagctccacccaacagttcttcaactgagaacccgaaaacagtggccaaatgtcaggtaactcccagaagaaatgttctccaaaaacgcccagtgatagtgaaggtactgagtacaacaaagccatttgaatatgagaccccagaaatggagaaaaaaataatgtttcatgctacagtggctacacagacacagttcttccatgtgaaggttttaaacaccagcttgaaggagaaattcaatggaaagaaaatcatcatcatatcagattatttggaatatgatagtctcctagaggtcaatgaagaatctactgtatctgaagctggtcctaaccaaacgtttgaggttccaaataaaatcatcaacagagcaaaggaaactctgaagattgatattcttcacaaacaagcttcaggaaatattgtatatggggtatttatgctacataagaaaacagtaaatcagaagaccacaatctacgaaattcaggatgatagaggaaaaatggatgtagtggggacaggacaatgtcacaatatcccctgtgaagaaggagataagctccaacttttctgctttcgacttagaaaaaagaaccagatgtcaaaactgatttcagaaatgcatagttttatccagataaagaaaaaaacaaacccgagaaacaatgaccccaagagcatgaagctaccccaggaacagcgtcagcttccatatccttcagaggccagcacaaccttccctgagagccatcttcggactcctcagatgccaccaacaactccatccagcagtttcttcaccaagttgaaaccaagactgaagactgaacctgaagaagtttccatagaagacagtgcccagagtgacctcaaagaagtgatggtgctgaacgcaacagaatcatttgtatatgagcccaaagagcagaagaaaatgtttcatgccacagtggcaactgagaatgaagtcttccgagtgaaggtttttaatattgacctaaaggagaagttcaccccaaagaagatcattgccatagcaaattatgtttgccgcaatgggttcctggaggtatatcctttcacacttgtggctgatgtgaatgctgaccgaaacatggagatcccaaaaggattgattagaagtgccagcgtaactcctaaaatcaatcagctttgctcacaaactaaaggaagttttgtgaatggggtgtttgaggtacataagaaaaatgtaaggggtgaattcacttattatgaaatacaagataatacagggaagatggaagtggtggtgcatggacgactgaccacaatcaactgtgaggaaggagataaactgaaactcacctgctttgaattggcaccgaaaagtgggaataccggggagttgagatctgtaattcatagtcacatcaaggtcatcaagaccaggaaaaacaagaaagacatactcaatcctgattcaagtatggaaacttcaccagactttttcttctaaaatctggatgtcattgacgataatgtttatggagataaggtctaagtgcctaaaaaaatgtacatatacctggttgaaatacaacactatacatacacaccaccatatatactagctgttaatcctatggaatggggtattgggagtgcttttttaatttttcatagtttttttttaataaaatggcatattttgcatctacaacttctataatttgaaaaaataaataaacattatcttttttgtgaaagg

SEQ ID NO: 5914 - DNA, 3795 bp, Homo sapiens
agatcgcaagtcctgcaaacttacgtggcatttctgaagtcatcagaggaggtagagatgcagtttcagagcttaaaagaattttatgaaaccgaaatccctcagaaggagcaggatgatgctaaagccaagcattgttctgactcggctgagaagcagtggcagctatttttaaagaagagttttataacacaagatctagggcttgagttccttaatttaataaatatggcaaaagagaacgagatattagatgtgaaaaatgaagtgtacctcatgaagaacaccatggaaaaccagaaagcagaacgggaagaacttagcctccttcggctggcatggcagcttaaagccacggaaagcaagcctggaaaacagcagtgggcggcattcaaagagcaacttaaaaagacttctcacaacttaaaacttcttcaggaagcacttatgcctgtgtctgcacttgacctcggagggagcctccagttcattttagatctacgacaaaaatggaatgacatgaagcctcagttccagcaattgaatgatgaggttcagtacattatgaaagaatcagaggagttaactggcagaggagcccctgtaaaagaaaagtctcaacaactgaaggaccttattcacttccatcaaaaacagaaagagagaatccaggattacgaggatatcctgtacaaggtggtccagttccatcaagtcaaggaagagctgggacgtctcatcaaatcaagagagctggagtttgtagagcagccgaaggaactgggtgatgcccatgatgtgcagattcacctccggtgctctcaggaaaagcaagcccgtgtagaccatctccacagactggccctttccttaggagtcgacatcatctcatcagtgcagcggcctcactgctctaatgtttctgcaaagaacctacagcagcagctggagctccttgaggaggacagcatgaagtggcgtgccaaagctgaggagtatggacggaccctgtcccgtagtgtggagtactgcgccatgagagacgagataaatgagctcaaagactcattcaaagatatcaaaaagaaattcaataatttgaagtttaattacactaagaaaaatgaaaaatctcggaatctgaaggcgcttaaatatcaaattcagcaagttgatatgtatgctgaaaaaatgcaggctttgaaaaggaaaatggaaaaagttagtaataaaacctctgattctttcttaaattatccaagtgataaagttaatgtccttttggaagtcatgaaggatttgcaaaaacatgtggatgactttgacaaagttgtgacagattacaagaagaatttggacctgactgagcatttccaggaggtgatagaagagtgtcatttttggtacgaagatgcaagtgccacagttgtaagagttggaaaatattccacagagtgcaagacaaaggaagctgtgaaaattctccaccagcagtttaataagtttattgcaccctcagtgccgcagcaagaagaaaggattcaggaggccactgaccttgctcagcacttatatggtttggaagaaggacagaaatatattgagaaaatagtgacaaaacacaaagaggttcttgaatctgtgactgaattatgtgagtccctcacagagctcgaagaaaaactgaagcagggagatgttttaaagatgaatccgaatttggaagacttccattatgattacattgacttgctaaaggaaccagcaaaaaataagcagacaatattcaatgaagaaaggaataaggggcaggtgcaggtggcagatcttttgggcatcaatggaacaggggaagagcgactaccacaagacctgaaggtgtccactgacaaggagggtggcgtccaggacctgctcctgcctgaagacatgctctcaggggaagaatatgagtgtgtctcacctgatgacatctccttgcctcctctcccaggaagccctgagtcccctcttgcaccatctgacatggaggtggaagagcctgtcagctcctccctcagccttcacataagcagctatggggtgcaggctgggaccagcagcccaggggatgcccaggaatctgttcttccaccacctgttgcctttgcggatgcatgcaatgataagagagaaacattttcaagtcattttgagaggccttacctccagttcaaagctgagcccccactaacctccagaggattcgtggaaaagagtactgccttacacagaatcagtgctgaacatccagagagcatgatgagtgaagtgcatgagagagctttacagcagcaccctcaggctcagggtggtttgctagaaacacgggagaaaatgcatgctgataataacttcactaaaacccaagataggctgcatgcttcctctgatgcattctcgggcctcaggtttcaatcaggcaccagcaggggctatcagaggcaaatggttcctcgagaagagattaaaagcacatcagcaaagagcagcgtggtcagcctagctgaccaggcacctaatttctccaggctcctgtctaatgtaactgtcatggaaggttctccagtgactttggaagttgaagtaacaggatttccagagcctacactgacatggtgggtagcctataatgacaagccataaatggaaacaaattcaatcacagagaaaaatcattctgtgagcactaactgaaaggtttagggctagctgattaatattctatgacactgcaactctgcatgattcaatctcacatcagacccctctcattttagtagcagcatagttaatacctttaagaaaaataaaaggtaaccatataaagtactaataatttaacaaatttccaaagcactgtaggttggttgtgcttgttttcttctgtgtttaacattccacatttctaaagattgtgggttgaaattattttttattgtctatttccatataagcatggcatctgcttgctttaactacctttatgcaattgaaaatataagaatttgtttttatttccctttactctcatttacctctttcatctttttcctctttccaacagagtcacacgtgtcatctttgtaacattttgttttactaggatttctttttacaaattttttcaatgtgagaggtggaatataaatatttctgtcacagttcctccaggtgacaggcaataaactcatttttgaaaggtagtataataactgagctgtaaacaatatgatttcactctggagacatcattattttttagcctctttttttcagtaaaagcaaactgtagaatactggttttggatcacctactattggtaacaaaagcagttctttctcaatatgtgggttacttttaaacatttagaaaattctcatccttaagtaaatttatttcaggacaaagttacaaatctgcaaaagccagtttatacttataaactaagattaagtaaaatagcatttattgatcacaatgtttcagtagatattaaatgatcagtttcagttattgtgtgtgcccattgatggtacttgaaatatgaaccagttatctaaggaacttatgagaaaactttggtttctcaaattatttaaaaaactgcacttgtgctatattagtgcagtcacttttgctttttgttttattgtctttactgttgcatgttttttacaaatcaagagtgtcatatttatgaattttaaagatatttaattcattattaaatctcagttcactccaaagaaaaa

SEQ ID NO: 5915 - DNA, 7834 bp, Homo sapiens
ggtcggcggcggtgctgggccaggggaaggaagggacacggaggccgccctcgtcccgccacctcctacccgcttccccccagccccggctccgggagatgtgccgggcggggggcccgggttcgccgagccgcaggagagacacgctgggccgaccccagagaggcgctggacaggctggtggtccaggccgtggtgcctgccaggtgatgtggggcaaagccccccgcacaggccactgagagctccggacacgcacccggctgccaccatggcccgcctagccgcagtgctctggaatctgtgtgtcaccgccgtcctggtcacctcggccacccaaggcctgagccgggccgggctcccgttcgggctgatgcgccgggagctggcgtgtgaaggctaccccatcgagctgcggtgccccggcagcgacgtcatcatggtggagaatgccaactacgggcgcacggacgacaagatttgcgatgctgaccctttccagatggagaatgtgcagtgctacctgccggacgccttcaagatcatgtcacagaggtgtaacaaccgcacccagtgcgtggtggtcgccggctcggatgcctttcctgacccctgtcctgggacctacaagtacctggaggtgcagtacgactgtgtcccctacaaagtggagcagaaagtcttcgtgtgcccagggaccctgcagaaggtgctggagcccacctcgacacacgagtcagagcaccagtctggcgcatggtgcaaggacccgctgcaggcgggtgaccgcatctacgtgatgccctggatcccctaccgcacggacacactgactgagtatgcctcgtgggaggactacgtggccgcccgccacaccaccacctaccgcctgcccaaccgcgtggatggcacaggctttgtggtctacgatggtgccgtcttctacaacaaggagcgcacgcgcaacatcgtcaagtatgacctacggacgcgcatcaagagcggggagacggtcatcaataccgccaactaccatgacacctcgccctaccgctggggcggaaagaccgacattgacctggcggtggacgagaacgggctgtgggtcatctacgccactgagggcaacaacgggcggctggtggtgagccagctgaacccctacacactgcgctttgagggcacgtgggagacgggttacgacaagcgctcggcatccaacgccttcatggtgtgtggggtcctgtacgtcctgcgttccgtgtacgtggatgatgacagcgaggcggctggcaaccgcgtggactatgccttcaacaccaatgccaaccgcgaggagcctgtcagcctcaccttccccaacccctaccagttcatctcctccgttgactacaaccctcgcgacaaccagctgtacgtctggaacaactatttcgtggtgcgctacagcctggagttcgggccgcccgaccccagtgctggcccagccacttccccacccctcagcacgaccaccacagccaggcccacgcccctcaccagcacagcctcgcccgcagccaccaccccgctccgccgggcacccctcaccacgcacccagtgggtgccatcaaccagctgggacctgatctgcctccagccacagccccagtccccagcacccggcggcccccagccccgaatctacacgtgtcccctgagctcttctgcgagccccgagaggtacggcgggtccagtggccggccacccagcagggcatgctggtggagaggccctgccccaaggggactcgaggaattgcctccttccagtgtctaccagccttggggctctggaacccccggggccctgacctcagcaactgcacctccccctgggtcaaccaggtggcccagaagatcaagagtggggagaacgcggccaacatcgccagcgagctggcccgacacacccggggctccatctacgcgggggacgtctcctcctctgtgaagctgatggagcagctgctggacatcctggatgcccagctgcaggccctgcggcccatcgagcgcgagtcagccggcaagaactacaacaagatgcacaagcgagagagaacttgtaaggattatatcaaggccgtggtggagacagtggacaatctgctccggccagaagctctggagtcctggaaggacatgaatgccacggagcaggtgcacacggccaccatgctcctcgacgtcctggaggagggcgccttcctgctggccgacaatgtcagggagcctgcccgcttcctggctgccaaggagaacgtggtcctggaggtcacagtcctgaacacagagggccaggtgcaggagctggtgttcccccaggaggagtacccgagaaagaactccatccagctgtctgccaaaaccatcaagcagaacagccgcaatggggtggtcaaagttgtcttcatcctctacaacaacctgggcctcttcctgtccacggagaatgccacagtgaagctggccggcgaagcaggcccgggtggccctgggggcgcctctctagtggtgaactcacaggtcatcgcagcatccatcaacaaggagtccagccgcgtcttcctcatggaccctgtcatcttcaccgtggcccacctggaggacaagaaccacttcaatgctaactgctccttctggaactactcggagcgttccatgctgggctactggtcgacccaaggctgccgcctggtggagtccaacaagacccataccacgtgtgcctgcagccacctcaccaacttcgctgtgctcatggctcaccgtgagatctaccagggccgcatcaacgagctgctgctgtcggtcatcacctgggtgggcattgtgatctccctggtctgcttggccatctgcatctccaccttctgcttcctgcgggggctgcagaccgaccgcaacaccatccacaagaacctgtgcatcaacctcttcctggctgagctgctcttcctggtcgggatcgacaagactcagtatgagattgcctgccccatcttcgccggcctgctgcactatttcttcctggctgccttctcctggctgtgcctggagggcgtgcacctctacctgctactagtggaggtgtttgagagcgagtattcccgcaccaagtactactacctgggtggctactgcttcccggccctggtggtgggcatcgcggctgccattgactaccgcagctacggcaccgagaaggcctgctggctccgagtggacaattacttcatctggagtttcatcgggccagtctccttcgttatcgtggtcaacctggtgttcctcatggtgaccctgcacaagatgatccgaagctcatctgtgctcaagcccgactccagccgcctggacaacattaaatcctgggcgctgggggccatcgcgctgctgttcctgctgggcctcacctgggctttcggcctcctcttcatcaacaaggagtcggtggtcatggcctatctcttcaccaccttcaacgccttccagggggtcttcatcttcgtctttcactgcgccttacagaagaaggtgcacaaggagtacagcaagtgcctgcgtcactcctactgctgcatccgctccccacccgggggcactcacggatccctcaagacctcagccatgcgaagcaacacccgctactacacagggacccagagccgaattcggaggatgtggaatgacactgtgaggaaacagacggagtcctccttcatggcgggtgacatcaacagcacccccaccctgaaccgaggtaccatggggaaccacctgctgaccaaccccgtgctgcagccccgtgggggcaccagtccctacaacaccctcatcgccgagtcagtgggcttcaatccctcctcgccccctgtcttcaactccccagggagctaccgggaacccaagcaccccttgggaggccgggaagcctgtggcatggacaccctgcccctgaacggcaacttcaataacagttactccttgcgaagtggggatttccctcccggggatgggggccctgagccgccccgaggccggaacctagccgatgcggcggcctttgagaagatgatcatctcagagctggtgcacaacaacctgcgggggagcagcagcgcggccaagggccctccaccgcctgagccccctgtgccacctgtgccagggggcgggggcgaggaagaggcgggcgggcccgggggtgctgaccgggccgagattgaacttctctataaggccctggaggagcctctgctgctgccccgggcccagtcggtgctgtaccagagcgatctggacgagtcggagagctgcacggccgaggacggcgccaccagccggcccctctcctcccctcctggccgggactccctctatgccagcggggccaacctgcgggactcaccctcctacccggacagcagccctgaggggcccagtgaggccctgcccccaccccctcccgcaccccccggcccccccgaaatctactacacctcgcgcccgccagccctggtggcccggaatcccctgcagggctactaccaggtgcggcgtcctagccacgagggctacctggcagccccaggccttgaggggccagggcccgatggggacgggcagatgcagctggtcaccagtctctgagggcacctcatggaccaggggctggtggcccaggccagggagggaaccctgggcagggctctggtgggagagggagacagatggaggcagtggctggtgggccactctctccaggtgcccctcagccatgggccctacagtcccctcaggggactctaacctgggggcctgaggtgccagggttcacagacagggtttcccaccagccacacgcaccagctctatttgggggaagtgtagtgaggaggagcccagaggaccccaggggagtgaggagggagaacttggaagggtgcagcccacttccagactctcccctctcccacccttctaccctgtgaagggaaatgagggctttagtttcctgggcagggaggggcagcttctgaggttgccaaaggcccccactggatggaacctgttagctgctcctctccgcagccagaaatgctgccggctgcacccagagggagcagtgaggcaggacagatggacaggttcctcctgcgctgtaattccctgctccctggagactgggaaaaggccgcagggcagggggactgggcggtggtggctggtggtttaaaggttgaactttctctgaagctcctttccccttgctcttggtccctgccccgcaagcaaacctgccccctctgcctcccagtgcacccaatgaccccctcccttggggcgactcctgatgaagcacaactccccgcagggcccccagcccacaggggtggccatatttgggcagttcccagtcctgtgggctcggctatctggggagcagattttgggtctggatctccctggggagtgggtcctgggcttggatctttccctagggggccctcttactccttcctctctcctcctccttccccattgctgtaaatatttcaacgaaatggaaaagaaaaaaaaaagacaaaaaaaaaaaaaaagaaaagaaaaaaaatctcatcacttgaagccaccgggagcctgcggcccgggccagcccgggctttctccggagcagagcagcgctgctggcctggcagccaggacttctccgtgtacgtgcatccccagtccccgccggggcgggcgggccgccagagcagctttttacaatccagagacagaaaacaaaatctagatgcaacagcgaaacaaagaacccatttccttcctggcaccctcctttcctgctccgcctgcccggcatcatcagcccttctggggcgtgtacctctcactgcctgccccaggaccagaggcctgtctcccccttccctccccaccggcccgggggagacctcttcacacccaaagatgctttgtcaagatggctgcgctgtccctttgagttcctgcttcttgtatattgctctggggactctcgccggggaagatggggctgatttcccacctagagaggttgatggcagaaggaaaatggggaggcactggggttgtggagggcatgggtatggctgaggagggtgctgggaacggcaaggcggtctgggggatggggaggggcaaaggtgagagatcaccttccctatcctccaccttcccgcagggaagacgaagccaggtgccagggctggggtcgggacacccatgttctgggcggcttgaccccaaatcccagaccccggaagctccaggctcgggatgtgtcctgagcacctgtcccggccccctcctctccagcctgtcaggccagcctccccagcccccttccctcaactctaggggcagcatagccccaggccaccctagcccagcccctgcattgccgtttccccagaggtggcccctccacctctgctctgacctctccccatctctctgcccctccttttctcacaagtgccatgagttttcaaacatcttcgggtctcagcctgctgctgccatgaactttgttgggttaagggggaggggctctaggaaggaactggggggaaggggacaggtaggtggctggagggaccctttttgctgctagaaagcccctcccttctcccggggagctggggctggcttgtccccatcaattaggggagaaggggtcagaccaaagatggtggtttgtcccgtgtaagggaacaggtgtggggaagaggtggggttgggttccaactctggctttttctggtagaaaggcctaacccattacaccagaagaccatgggtgaagtctagatggggaggagaagtgaggccagggacagtcttgccagacgactctgaggagggcaagggacagttccatggcccttcccggactgcactaggctgggagctctgttgtgtggaggggtggtcagaggtctgtgaagagcgggcaggaggcatgagcaggcgaggagctggcctgtcccgggaagcagcccagcctgtggctgcccccgacaccaggaggagggccaggagagttccagggggctgaggcacacagagaggccaacttcctccctgcccagccttccttgtatctctccagactcggacaatcaaagggagagagggtgtatcgggtcctgttccagccggcatcgccgggtggcttccaggcctcagagctgtgtggcagggccccctgctggggctggacatcactgcagtccagtgcaaagccgcccccagagcccaggtgtccccccaacctaaccagacctggtgccttgacgcccccaccccagctgggacggtacagagaagggtcttggtttcctctcctactcccttccttaggctcctgaactcgtttgctcctaaatcttgttaattctttttctctggattttggtttcttttggctttcccttgccttcccctttctctgtctccaacactctttccccatgtctttctggctgtctctatgttcctcttctcttatcctcaactttctgtccattcgggcctcctccccacctcccacgccccagcccctccctccttggtctccttttcgatatgccaaaccaattttgggtcgagtgcatttaacgagaacaaaacaaaaggctcataacaacaagaacgtttcagaaaaaaacaaaaagttttaaaaaaattgttgagtcaaaaagtcaaacaataaagaaattaagatttcttggaatgacaaga

SEQ ID NO: 5916 - DNA, 679 bp, Homo sapiens; identical to SEQ ID NO: 834

SEQ ID NO: 5917 - DNA, 4141 bp, Homo sapiens
gatgctgtgttctttgctcctttgtgaatgtctgttgctggtagctggttatgctcatgatgatgactggattgaccccacagacatgcttaactatgatgctgcttcaggaacaatgagaaaatctcaggcaaaatatggtatttcaggggaaaaggatgtcagtcctgacttgtcatgtgctgatgaaatatcagaatgttatcacaaacttgattctttaacttataagattgatgagtgtgaaaagaaaaagagggaagactatgaaagtcaaagcaatcctgtttttaggagatacttaaataagattttaattgaagctggaaagcttggacttgcacttgcagttacattcaccacatttgtaacggagccattgaagcatattggaaaaggaactggggaatttattaaagcactcatgaaggaaattccagcgctgcttcatcttccagtgctgataattatggcattagccatcctgagtttctgctatggtgctggaaaatcagttcatgtgctgagacatataggcggtcctgagagcgaacctccccaggcacttcggccacgggatagaagacggcaggaggaaattgattatagacctgatggtggagcaggtgatgccgatttccattataggggccaaatgggccccactgagcaaggcccttatgccaaaacgtatgagggtagaagagagattttgagagagagagatgttgacttgagatttcagactggcaacaagagccctgaagtgctccgggcatttgatgtaccagacgcagaggcacgagagcatcccacggtggtacccagtcataaatcacctgttttggatacaaagcccaaggagacaggtggaatcctgggggaaggcacaccgaaagaaagcagtactgaaagcagccagtcggccaagcctgtctctggccaagacacatcagggaatacagaaggttcacccgcagcggaaaaggcccagctcaagtctgaagccgcaggcagcccagaccaaggcagcacatacagccccgcaagaggtgtggctggaccacgtggacaggatccggtcagcagcccctgtggctagaggaacaccagcacaaacgacagcctcaagtctccttcgagctttatatccatttggggatgaagtctactttgacagctagcaaggcgacatgcaactgttgttgaatgatgacagcaattcaggaaagacttaaatatgaaagcaaattgaacacatcgggtgtttgttatcagaaaagagatgagatgagataagacttgtttattgactagccaatatgtcattaaaattaaggtttatattgtgaagcttttttgaaattttacttttttttgagagttttgctctgtcacccaggctggagtgaggtggtacaatctcggctcactgcaacctccacctcccaggttcaagagattctcctgcctcagtctcccgagtagctaggattacagatgtgcatcaccatgcctggctaatttttgtattttttagtagagatggggtttcaccatgttggtcaggctggtctcgaactcctgacctcaagtgacccgcccttgtcggcctcccaaagtgctgggattacaggcatgagccattgtgcccagcctatatagtgtgaagcttttaggaaaatcagaacagggtagacagctgttaaaaacaatgtttaaatggaataatgttgaatgtttacaggctgtaagaactattgtatacacaaaataatacacaaagtttgtactttgtgtacaaatacaaatttgtactttgtgtacaaataatacaaaaagtttgtatacacaaactttttacgttgtggtttggtatattgtcttaactgaattttcttataagaaccccatgaaacttacctgagtttttaaaatgctatccaggacatcataccttatagtatacatgaaacataatgtaatccaggttgtaatttagaactttttttttttttttagctgagcacttaatgtaattaattccaggttatgactcttaaaaaacattggccattagagaaatagttctatttgcccatccaaatcacctgaatgactttttgaaagaataggggtccacatccccagatcccatcccagctgtgcacagtctgaagcaagcagagtgaaacaagttggcaacttgttccaagcgtgggcctttgcagtctgtgatccagtgttactccaggtcccagtctgtcccatacttgtcttttgctacagttagttagttactttgttatcatccccttgtaaactgccttcaatatctgggataaggaagacaaagcttaatgacaactaaggttctagctgacatctttctttcatatttaatttttgtgagttttcatctgttttctgtttgtttatgtgtcctaggttcttgacctaaccacatgggttttgttttttgtttttatattagaacttagaaaagtttgttttacagcagtattatggaacagaagagaccattttaaataatttttttaaacagcccaaaacacacaaaagatacttgttttctagagacagggtcttgctctgtcacccaggctggagtgcagtggcacgatcatagctcagtgcagcctccacctcctgggctcaagtggtcctcctgcctcagcctcttaagcagttgggactacaggtgtgtgccagcatgcttgctgttttttttttttttgagacagagtcttgctctgtcactcaggctggagtccagtggcttggtctcagctcactgcaatctctgcctcccaggggttcaagtgattctcctgcctcagcctcccaagtagctgaaactacaggcgcatgccaccatgcccagctaatttttgtatttttagtagagacagggtttcactatgttggccaggctggtctcaaactcccgacctcaagtgatccgcccgcttcggcctcccaaagtgctgggattacaggtgtgagccactgcgcctggctgctgatttatttttcatagacacgggggtctatgttgcccaggttggtcttgaactcctagcctcaagcgatcctcctgcctcagcctcccaatgtgctgggattacaggaatgagccaccatgcccagcccaagaagtagagtttcttttatactgactttggcctaaaaaaacagattttcatggaggaaaaaaaaacctagatttttagtaagactattttatatacttttttacattgatcaagtacattatttttaccaaacaacattgtttcccactacatccatggttatgtataaaaaaacgccattgtcaattaagatgttaaaaaattatttccataagagtattaaattctaatctatgattcacttaacttcctactttataaacactaggtaaagtaatctcacaagctgccaaagaacacatcccaagcagtaatcacagacgatgaagcaccttacaggacccctccaccctcaaacgcgcatgtccagagaagtattaatgccttaatagactactgaaggttaactatttacatcattctaaaaatattttaagctgtattacagtgctataaattctccttttaaggaaaaaagtaatagattgtttccttaccgtgtttgaaaggaaaaaaaataaatccatagtaactaatggtctgccgattttttccctgaatttttaaactccaacaaagcattattttgcaaaaagtcctttagcccaaagtcagtgtctctgttttgatctctttgtaaaagaactctctgttcatccattctctttccctgggaccgtaaaataaggctgaaaaagtcttcatctggtactgtcggaccctttgtggtagcaggtggtggagcacatctttgatcatctaatctggatccctagaagtttatgagagagattaaaagacatactgtgggaaagaaagcaccaagctatgttaaatctctcagtcacaacaagaaaacgcagttgtaaacttttatttggggcttctcagaaattaatctttgtttttatattgttctctttagttcccagcctgatttctgaaagaaataatctttaaacctg

SEQ ID NO: 5918 - DNA, 3971 bp, Homo sapiens
ctgtgtgcagtaaactggaatgctctccctcgctcactcctcagtgtaggagtgatctgaagcaggacaagctcagcctgcagctgccgtgggctttgtgtggactggacgcagagcttgggagacgggggagggctattactccaattcactgtcaatggaattacagctatagcggcagtgtatataggattgctttttctcgtcttcctggagatgctcagtcccagtatattttaaggaagagaaatataaaggaaatttagtatgcctccttttctttaaatgaagaatttagtttcctttacttcttaaaagagaatacctgttcttgtataacgtgactgcaccagacattctgaaaaatcagcaagaagcaaaagctggaaatagctatttcacagcagggttctgaagtaacggaagctaccttgtataaagacctcaacactgctgaccatgatcagcgcagcctggagcatcttcctcatcgggactaaaattgggctgttccttcaagtagcacctctatcagttatggctaaatcctgtccatctgtgtgtcgctgcgatgcgggtttcatttactgtaatgatcgctttctgacatccattccaacaggaataccagaggatgctacaactctctaccttcagaacaaccaaataaataatgctgggattccttcagatttgaaaaacttgctgaaagtagaaagaatatacctataccacaacagtttagatgaatttcctaccaacctcccaaagtatgtaaaagagttacatttgcaagaaaataacataaggactatcacttatgattcactttcaaaaattccctatctggaagaattacatttagatgacaactctgtctctgcagttagcatagaagagggagcattccgagacagcaactatctccgactgcttttcctgtcccgtaatcaccttagcacaattccctggggtttgcccaggactatagaagaactacgcttggatgataatcgcatatccactatttcatcaccatctcttcaaggtctcactagtctaaaacgcctggttctagatggaaacctgttgaacaatcatggtttaggtgacaaagttttcttcaacctagttaatttgacagagctgtccctggtgcggaattccctgactgctgcaccagtaaaccttccaggcacaaacctgaggaagctttatcttcaagataaccacatcaatcgggtgcccccaaatgctttttcttatctaaggcagctctatcgactggatatgtccaataataacctaagtaatttacctcagggtatctttgatgatttggacaatataacacaactgattcttcgcaacaatccctggtattgcgggtgcaagatgaaatgggtacgtgactggttacaatcactacctgtgaaggtcaacgtgcgtgggctcatgtgccaagccccagaaaaggttcgtgggatggctattaaggatctcaatgcagaactgtttgattgtaaggacagtgggattgtaagcaccattcagataaccactgcaatacccaacacagtgtatcctgcccaaggacagtggccagctccagtgaccaaacagccagatattaagaaccccaagctcactaaggatcaccaaaccacagggagtccctcaagaaaaacaattacaattactgtgaagtctgtcacctctgataccattcatatctcttggaaacttgctctacctatgactgctttgagactcagctggcttaaactgggccatagcccggcatttggatctataacagaaacaattgtaacaggggaacgcagtgagtacttggtcacagccctggagcctgattcaccctataaagtatgcatggttcccatggaaaccagcaacctctacctatttgatgaaactcctgtttgtattgagactgaaactgcaccccttcgaatgtacaaccctacaaccaccctcaatcgagagcaagagaaagaaccttacaaaaaccccaatttacctttggctgccatcattggtggggctgtggccctggttaccattgcccttcttgctttagtgtgttggtatgttcataggaatggatcgctcttctcaaggaactgtgcatatagcaaagggaggagaagaaaggatgactatgcagaagctggcactaagaaggacaactctatcctggaaatcagggaaacttcttttcagatgttaccaataagcaatgaacccatctcgaaggaggagtttgtaatacacaccatatttcctcctaatggaatgaatctgtacaaaaacaatcacagtgaaagcagtagtaaccgaagctacagagacagtggtattccagactcagatcactcacactcatgatgctgaaggactcacagcagacttgtgttttgggttttttaaacctaagggaggtgatggtaggaaccctgttctactgcaaaacactggaaaaagagactgaaaaaaagcaatgtactgtacatttgccatataatttatatttaagaactttttattaaaagtttcaaatttcaggttactgctgcgattgatgtagtggagatgcctgaacacaattctatattttagtattttttagtaatttgtactgtattttccttgcaaatattggagttataaaccatttactttgtgttctactgagtaagatgacttgttgactgtgaaagtgaattttcttgctgtgtcgaacaatcaggactgcattcatatgagatccttgtagtataagcacaggccatttttcactttggtattaataaaatgtaaaaaaaaaaaactggctgaatggctgaatgagataaaatttaattttaaaaaatggttatgaaataatgttccaattattaaatttgtattatcccagtggtattcaataaatcaaaatgtgtgaagtaatgggcaatatcaaacttcctgcatatctccatttttgctctaggcaaattaattatccttaaaaaagttaagcatatcttctgaactgaatacatcagctggcataaaaggagcatgaagtctgttaaagccattgtcagcaaagctttgaaaataaaggacttcacaaaaacggtaatgtaaatgtgcttccaagttggggggaaaatgtgtacttaggaaaacatggaaacttagacttgtatagtgtaatgaacacaaataccaaaactgcattttggttttgcctataccatcctgatttttgaaaagtgaattataaacacaaaattgttagtgtttatgatgtttttatcataaaggatgtcagagaaactttatgcatattaaaaatgtaatgtaattataagcgattcccctcaacaatccagagaaagtagttctttaaataagagataatttaaagaaaaataaatactagacatcaaatttagatctggtttatgtcaaaggttttaacactgtacataaatgttcaatttacttttacaaagatcaagaatactgcccattactgtcacaattttccagatattatataatgaactcgtaatgtaacatttccttctagcttcctactgaattgtgagctgttacttgttgaaaaaccatatcacttttctgttgccatgattttttttttttcaacaaaaaaccaaagtgcattgtacgccctttggccagtcttgtatgtgccttgatccaacgctacatgtattcagcttttaaaactccacaaatttttcatactccttaaatatgaaaaattatggtcttattgctgaataaaacttttaaaaagtacagaataattgtgcttgctttttcaggattgtgttactatcactaagtagcaaattgcccagcacattagtcctaaacgtcccatgtatttttctaggcataaaaataaaagttggctaaaaattttaaaaaatcaa

SEQ ID NO: 5919 - DNA, 4168 bp, Homo sapiens
gctgaggccaggagggcgcactggggattggaggcgagggaagtgcagggcgcatcccaggcggcagggctcccagcatcggcagtcgccatcaccgccagaccgcagagacaggttcggatccgcggtcctcttgcctctttccaggcctcgatgagtgttaaatcgccatttaatgtgatgtcaagaaataatttggaagcacctccttgtaagatgacagagccatttaattttgagaaaaatgaaaacaagcttccaccacatgagtctttaagaagtcctggaacacttcctaaccaccctaatttcaggctgaaaagctcagagaatggaaataaaaagaacaattttttgctttgtgagcaaaccaaacaatatttggctagtcaggaagacaattcagtttcttcaaacccgaatggcatcaacggagaagtagttggctccaaaggagacaggaaaaaattgccagcaggaaactcagtgtcaccaccaagtgctgaaagtaattcaccacccaaagaagtgaatattaagcctggaaataatgtacgtcctgcaaaatcaaaaaaactaaacaagttggtcgagaattccttgtccataagtaatccagggctcttcacctccttaggacctcctcttcggtccacaacttgccatcgctgtggcctatttggatcgctgaggtgctctcagtgcaagcagacctactattgctccacagcatgtcaaagaagagactggtctgcacacagcatcgtgtgcaggcctgttcagccaaatttccacaaacttgaaaataaatcatctattgaaacaaaggatgtggaggtaaacaataagagtgactgtccacttggagttactaaggaaatagccatttgggctgagagaataatgttttctgatttgagaagtctacaactcaagaaaaccatggaaataaagggtacggttaccgaattcaaacacccaggggacttctacgtgcagttatattcttcagaagttttagaatacatgaaccaactctctgccagcttaaaagaaacatatgcaaatgtgcatgaaaaagactatattcctgttaagggggaagtttgtattgccaagtacactgttgatcagacctggaacagagcaatcatacaaaacgttgatgtgcagcaaaagaaggcacatgtcttatatattgattatggaaatgaagaaataattccattaaacagaatttaccacctcaacaggaacattgacttgtttcctccttgtgccataaagtgctttgtagccaatgttatcccagcagaagggaattggagcagtgattgtatcaaagctactaaaccactgttaatggagcagtactgctccataaagattgtcgacatcttggaagaggaagtggttacctttgctgtagaagttgagctgccaaattcaggaaaacttttagaccatgtgcttatagaaatgggatatggcttgaaacccagtggacaagattctaagaaggaaaatgcagatcaaagtgatcctgaagatgttggaaaaatgacaactgaaaacaacattgtcgtagacaaaagtgacctaatcccaaaagtgttaactttgaatgtaggtgatgagttttgtggtgtggttgcccacattcaaacaccagaagacttcttttgtcaacaactgcaaagtggccgaaagcttgctgaacttcaggcatcccttagcaagtactgtgatcagttgcctccacgctctgatttttatccagccattggtgatatatgttgtgctcagttctcaggagtaaagccatcattaggaatttggactccagaagctatttgtctcatgaaaaaacttgtacagaacaaaataatcacagtgaaagtggtggacaagttggaaaacagttccctggtggagcttattgataaatccgagacgcctcatgtcagtgttagcaaagttctcctagatgcaggctttgctgtgggagaacagagtatggtgacagataaacccagtgacgtgaaagaaaccagtgttcccttgggtgtggaaggaaaagtaaatccattggagtggacatgggttgaacttggtgttgaccaaacagtagatgttgtggtctgtgtgatatatagtcctggagaattttattgccatgtgcttaaagaggatgctttaaagaaactcaatgatttgaacaagtcattagcagaacactgccagcagaagttacctaatggtttcaaggcagagataggacaaccttgttgtgctttttttgcagatatacagtctagaaacaaacattggtctgaagaagccataacaagattccagatgtgtgttgctgggataaaattgcaagccagagtggttgaagtcactgaaaatgggataggagttgaactcaccgatctctccacttgttatcccagaataattagtgatgttctgattgatgaacatctggttttaaaatctgcttcaccacataaagacttaccaaatgacagacttgttaataaacatgagcttcaagttcatgtacagggacttcaagctacctcttcagctgagcaatggaagacgatagaattgccagtggataaaactatacaagcaaatgtattagaaatcataagcccaaacttgttttatgctctaccaaaagggatgccagaaaatcaggaaaagctgtgcatgttgacagctgaattattagaatactgcaatgctccgaaaagtcgaccaccctatagaccaagaattggagacgcatgctgtgccaaatacacaagtgatgatttttggtatcgtgcagttgttctggggacatcagacactgatgtggaagtgctctatgcagactatggaaacattgaaaccctgcctctttgcagagtgcaaccaatcacctctagccacctggcgcttcctttccaaattattagatgttcacttgaaggattaatggaattgaatggaagctcttctcaattaataataatgctattaaaaaatttcatgttgaatcagaatgtaatgctttctgtgaaaggaattacaaagaatgtccatacagtgtcagttgagaaatgttctgagaatgggactgtcgatgtagctgataagctagtgacatttggtctggcaaaaaacatcacacctcaaaggcagagtgctttaaatacagaaaagatgtataggatgaattgctgctgcacagagttacagaaacaagttgaaaaacatgaacatattcttctcttcctcttaaacaattcaaccaatcaaaataaatttattgaaatgaaaaaactgttaaaaaaaacagcatctcttggaggtaaacccttatgagacaggaaacagcaaaggctagctttaggagagaaagtacagcacctggtgtttttatttatgagaaccttttctttgtccactttctctgtaatgaccttctatccctccgtttttgcctgcctgccattctcctattaggttggtggtttttattttcctctaagttccttccaccaaataaatattacgtaaaaaattcataccaaatcaatgagaatactggcaaggaatacatagggactttctgctatatatgtaactttttattacttaaaggtaccgaaggaaggccaggtgcagtggctcacgcccagcactttgggaggctgaggtgggaggatcccttgaggccaggagttcaaggttacagtgagctatgatagtgccactgcactccagcctgggtgacagattttgtcttaaaaaaaaaaaaaaaaaagttgatatgagttttattttctgtccgtttgaaatattttgtaatattccctgcattctctgtcgtctgcctcttccacataatgtcctttgctttcatgtttgttatcttctttttctgttcactcagaggtcatcaatttctttctctccgtccttaattggattatttttcttttggcctttgggcacagagtctgacctctggaccactctaactggagaaggaactttatgttccctctcctgctgtgtccacaaccttagaaatctgtagctagatttttgttgttatagatagaatttactgtttctgaaacccaaatacagttatcagtttaaggtt

SEQ ID NO: 5920 - DNA, 3288 bp, Homo sapiens
acccgcgcgaggtaggcgctctggtgcttgcggaggacgcttccttcctcagatgcaccgatcttcccgatactgcctttggagcggctagattgctagccttggctgctccattggcctgccttgccccttacctgccgattgcatatgaactcttcttctgtctgtacatcgttgtcgtcggagtcgtcgcgatcgtcgtggcgctcgtgtgatggccttcgtccgtttagagtagtgtagttagttaggggccaacgaagaagaaagaagacgcgattagtgcagagatgctggaggtggtcagttactaagctagagtaagatagcggagcgaaaagagccaaacctagccggggggcgcacggtcacccaaaggaggtcgactcgccggcgcttcctatcgcgccgagctccctccattcctctccctccgccgaggcgcgaggttgcggcgcgcagcgcagcgcagctcagcgcaccgactgccgcgggctccgctgggcgattgcagccgagtccgtttctcgtctagctgccgccgcggcgaccgctgcctggtcttcctcccggacgctagtgggttatcagctaacacccgcgagcatctataacataggccaactgacgccatccttcaaaaacaactgtctgggaaaaaaagaataaaaagtagtgtgagagcagaaaacgtgattgaaacacgaccaatctttcttcagtgccaaagggtggaaaagaaaggatgatatgatgaacctagcctgttaatttcgtcttctcaattttaaactttggttgcttaagactgaagcaatcatggtgaacctgaggaatgcggtgcattcattccttgtgcacctaattggcctattggtttggcaatgtgatatttctgtgagcccagtagcagctatagtaactgacattttcaatacctccgatggtggacgcttcaaattcccagacggggtacaaaactggccagcactttcaatcgtcatcataataatcatgacaataggtggcaacatccttgtgatcatggcagtaagcatggaaaagaaactgcacaatgccaccaattacttcttaatgtccctagccattgctgatatgctagtgggactacttgtcatgcccctgtctctcctggcaatcctttatgattatgtctggccactacctagatatttgtgccccgtctggatttctttagatgttttattttcaacagcgtccatcatgcacctctgcgctatatcgctggatcggtatgtagcaatacgtaatcctattgagcatagccgtttcaattcgcggactaaggccatcatgaagattgctattgtttgggcaatttctataggtgtatcagttcctatccctgtgattggactgagggacgaagaaaaggtgttcgtgaacaacacgacgtgcgtgctcaacgacccaaatttcgttcttattgggtccttcgtagctttcttcataccgctgacgattatggtgattacgtattgcctgaccatctacgttctgcgccgacaagctttgatgttactgcacggccacaccgaggaaccgcctggactaagtctggatttcctgaagtgctgcaagaggaatacggccgaggaagagaactctgcaaaccctaaccaagaccagaacgcacgccgaagaaagaagaaggagagacgtcctaggggcaccatgcaggctatcaacaatgaaagaaaagcttcgaaagtccttgggattgttttctttgtgtttctgatcatgtggtgcccatttttcattaccaatattctgtctgttctttgtgagaagtcctgtaaccaaaagctcatggaaaagcttctgaatgtgtttgtttggattggctatgtttgttcaggaatcaatcctctggtgtatactctgttcaacaaaatttaccgaagggcattctccaactatttgcgttgcaattataaggtagagaaaaagcctcctgtcaggcagattccaagagttgccgccactgctttgtctgggagggagcttaatgttaacatttatcggcataccaatgaaccggtgatcgagaaagccagtgacaatgagcccggtatagagatgcaagttgagaatttagagttaccagtaaatccctccagtgtggttagcgaaaggattagcagtgtgtgagaaagaacagcacagtcttttcctacggtacaagctacatatgtaggaaaattttcttctttaatttttctgttggtcttaactaatgtaaatattgctgtctgaaaaagtgtttttacatatagctttgcaaccttgtactttacaatcatgcctacattagtgagatttagggttctatatttactgtttataataggtggagactaacttattttgattgtttgatgaataaaatgtttatttttgctctccctcccttctttccttccttttttcctttcttccttcctttctctctttcttttgtgcatatggcaacgttcatgttcatctcaggtggcatttgcaggtgaccagaatgaggcacatgacagtggttatatttcaaccacacctaaattaacaaattcagtggacatttgttctgggttaacagtaaatatacactttacattcttgctctgctcatctacacatataaacacagtaagataggttctgctttctgatacatctgtcagtgagtcagaggcagaacctagtcttgttgttcatataggggcaaaaatttgacattgtcagaatgttgtgttggtatttactgcaatgtctgtccctaaacatagtggtattttaacatagcagctggttaaccgggactacagaagtggaaggataatgagatgtaatacaccaaatagcttttcacttcttaaggacagtgttcaaattctgattattacaacaagcaaactgaaattagtgttttcattctggtccttagtaaattcctaattctatgattaaactgggaaatgagatcccagagttatttcccaacccaggattcaacatcaattgggttttgatctcagcatcctggaaatttgtgtgcttcacacaaagtgaaattagtattttgagccttattaaaatattttcttaattatggtacctctgtctataggacttaatttagcagtccatttttgagtaaaacttgtattggaagtatagatggtagaaactttggaagttttacttgattaaggactacagaattgggcccttagaatgtgaaaaaaaaaa

SEQ ID NO: 5921 - DNA, 2192 bp, Homo sapiens
agtgcactctagaaacactgctgtggtggagaaactggaccccaggtctggagcgaattccagcctgcagggctgataagcgaggcattagtgagattgagagagactttaccccgccgtggtggttggagggcgcgcagtagagcagcagcacaggcgcgggtcccgggaggccggctctgctcgcgccgagatgtggaatctccttcacgaaaccgactcggctgtggccaccgcgcgccgcccgcgctggctgtgcgctggggcgctggtgctggcgggtggcttctttctcctcggcttcctcttcgggtggtttataaaatcctccaatgaagctactaacattactccaaagcataatatgaaagcatttttggatgaattgaaagctgagaacatcaagaagttcttataattttcaacacatcattatttgaaccacctcctccaggatatgaaaatgtttcggatattgtaccacctttcagtgctttctctcctcaaggaatgccagagggcgatctagtgtatgttaactatgcacgaactgaagacttctttaaattggaacgggacatgaaaatcaattgctctgggaaaattgtaattgccagatatgggaaagttttcagaggaaataagaatatgcttataggcgtggaattgcagaggctgttggtcttccaagtattcctgttcatccaattggatactatgatgcacagaagctcctagaaaaaatgggtggctcagcaccaccagatagcagctggagaggaagtctcaaagtgccctacaatgttggacctggctttactggaaacttttctacacaaaaagtcaagatgcacatccactctaccaatgaagtgacaagaatttacaatgtgataggtactctcagaggagcagtggaaccagacagatatgtcattctgggaggtcaccgggactcatgggtgtttggtggtattgaccctcagagtggagcagctgttgttcatgaaattgtgaggagctttggaacactgaaaaaggaagggtggagacctagaagaacaattttgtttgcaagctgggatgcagaagaatttggtcttcttggttctactgagtgggcagaggagaattcaagactccttcaagagcgtggcgtggcttatattaatgctgactcatctatagaaggaaactacactctgagagttgattgtacaccgctgatgtacagcttggtacacaacctaacaaaagagctgaaaagccctgatgaaggctttgaaggcaaatctctttatgaaagttggactaaaaaaagtccttccccagagttcagtggcatgcccaggataagcaaattgggatctggaaatgattttgaggtgttcttccaacgacttggaattgcttcaggcagagcacggtatactaaaaattgggaaacaaacaaattcagcggctatccactgtatcacagtgtctatgaaacatatgagttggtggaaaagttttatgatccaatgtttaaatatcacctcactgtggcccaggttcgaggagggatggtgtttgagctagccaattccatagtgctcccttttgattgtcgagattatgctgtagttttaagaaagtatgctgacaaaatctacagtatttctatgaaacatccacaggaaatgaagacatacagtgtatcatttgattcacttttttctgcagtaaagaattttacagaaattgcttccaagttcagtgagagactccaggactttgacaaaagcaacccaatagtattaagaatgatgaatgatcaactcatgtttctggaaagagcatttattgatccattagggttaccagacaggcctttttataggcatgtcatctatgctccaagcagccacaacaagtatgcaggggagtcattcccaggaatttatgatgctctgtttgatattgaaagcaaagtggacccttccaaggcctggggagaagtgaagagacagatttatgttgcagccttcacagtgcaggcagctgcagagactttgagtgaagtagcctaagaggattctttagagaatccgtattgaatttgtgtggtatgtcactcagaaagaatcgtaatgggtatattgataaattttaaaattggtatatttgaaataaagttgaatattatatat

SEQ ID NO: 5922 - DNA, 4278 bp, Homo sapiens
gtttctcatagttggcgtcttctaaaggaaaaacactaaaatgaggaactcagcggaccgggagcgacgcagcttgagggaagcatccctagctgttggcgcagaggggcgaggctgaagccgagtggcccgaggtgtctgaggggctggggcaaaggtgaaagagtttcagaacaagcttcctggaacccatgacccatgaagtcttgtcgacatttataccgtctgagggtagcagctcgaaagtagaagaagtggagtgttgccagggacggcagtatctctttgtgtgaccctggcggcttatgggacgttggcttcagacctttgtgatacaccatgctgcgtgggacgatgacggcgtggagaggaatgaggcctgaggtcacactggcttgcctcctcctagccacagcaggctgctttgctgacttgaacgaggtccctcaggtcaccgtccagcctgcgtccaccgtccagaagcccggaggcactgtgatcttgggctgcgtggtggaacctccaaggatgaatgtaacctggcgcctgaatggaaaggagctgaatggctcggatgatgctctgggtgtcctcatcacccacgggaccctcgtcatcactgcccttaacaaccacactgtgggacggtaccagtgtgtggcccggatgcctgcgggggctgtggccagcgtgccagccactgtgacactagccaatctccaggacttcaagttagatgtgcagcacgtgattgaagtggatgagggaaacacagcagtcattgcctgccacctgcctgagagccaccccaaagcccaggtccggtacagcgtcaaacaagagtggctggaggcctccagaggtaactacctgatcatgccctcagggaacctccagattgtgaatgccagccaggaggacgagggcatgtacaagtgtgcagcctacaacccagtgacccaggaagtgaaaacctccggctccagcgacaggctacgtgtgcgccgctccaccgctgaggctgcccgcatcatctaccccccagaggcccaaaccatcatcgtcaccaaaggccagagtctcattctggagtgtgtggccagtggaatcccacccccacgggtcacctgggccaaggatgggtccagtgtcaccggctacaacaagacgcgcttcctgctgagcaacctcctcatcgacaccaccagcgaggaggactcaggcacctaccgctgcatggccgacaatggggttgggcagcccggggcagcggtcatcctctacaatgtccaggtgtttgaaccccctgaggtcaccatggagctatcccagctggtcatcccctggggccagagtgccaagcttacctgtgaggtgcgtgggaaccccccgccctccgtgctgtggctgaggaatgctgtgcccctcatctccagccagcgcctccggctctcccgcagggccctgcgcgtgctcagcatggggcctgaggacgaaggcgtctaccagtgcatggccgagaacgaggttgggagcgcccatgccgtagtccagctgcggacctccaggccaagcataaccccaaggctatggcaggatgctgagctggctactggcacacctcctgtatcaccctccaaactcggcaaccctgagcagatgctgagggggcaaccggcgctccccagacccccaacgtcagtggggcctgcttccccgcagtgtccaggagagaaggggcagggggctcccgccgaggctcccatcatcctcagctcgccccgcacctccaagacagactcatatgaactggtgtggcggcctcggcatgagggcagtggccgggcgccaatcctctactatgtggtgaaacaccgcaaggtcacaaattcctctgacgattggaccatctctggcattccagccaaccagcaccgcctgaccctcaccagacttgaccccgggagcttgtatgaagtggagatggcagcttacaactgtgcgggagagggccagacagccatggtcaccttccgaactggacggcggcccaaacccgagatcatggccagcaaagagcagcagatccagagagacgaccctggagccagtccccagagcagcagccagccagaccacggccgcctctcccccccagaagctcccgacaggcccaccatctccacggcctccgagacctcagtgtacgtgacctggattccccgtgggaatggtgggttcccaatccagtccttccgtgtggagtacaagaagctaaagaaagtgggagactggattctggccaccagcgccatccccccatcgcggctgtccgtggagatcacgggcctagagaaaggcacctcctacaagtttcgagtccgggctctgaacatgctgggggagagcgagcccagcgccccctctcggccctacgtggtgtcgggctacagcggtcgcgtgtacgagaggcccgtggcaggtccttatatcaccttcacggatgcggtcaatgagaccaccatcatgctcaagtggatgtacatcccagcaagtaacaacaacaccccaatccatggcttttatatctattatcgacccacagacagtgacaatgatagtgactacaagaaggatatggtggaaggggacaagtactggcactccatcagccacctgcagccagagacctcctacgacattaagatgcagtgcttcaatgaaggaggggagagcgagttcagcaacgtgatgatctgtgagaccaaagctcggaagtcttctggccagcctggtcgactgccacccccaactctggccccaccacagccgccccttcctgaaaccatagagcggccggtgggcactggggccatggtggctcgctccagcgacctgccctatctgattgtcggggtcgtcctgggctccatcgttctcatcatcgtcaccttcatccccttctgcttgtggagggcctggtctaagcaaaaacatacaacagacctgggttttcctcgaagtgcccttccaccctcctgcccgtatactatggtgccattgggaggactcccaggccaccaggccagtggacagccctacctcagtggcatcagtggacgggcctgtgctaatgggatccacatgaataggggctgcccctcggctgcagtgggctacccgggcatgaagccccagcagcactgcccaggcgagcttcagcagcagagtgacaccagcagcctgctgaggcagacccatcttggcaatggatatgacccccaaagtcaccagatcacgaggggtcccaagtctagcccggacgagggctctttcttatacacactgcccgacgactccactcaccagctgctgcagccccatcacgactgctgccaacgccaggagcagcctgctgctgtgggccagtcaggggtgaggagagcccccgacagtcctgtcctggaagcagtgtgggaccctccatttcactcagggcccccatgctgcttgggccttgtgccagttgaagaggtggacagtcctgactcctgccaagtgagtggaggagactggtgtccccagcaccccgtaggggcctacgtaggacaggaacctggaatgcagctctccccggggccactggtgcgtgtgtcttttgaaacaccacctctcacaatttaggcagaagctgatatcccagaaagactatatattgttttttttttaaaaaaaaaaagaagaaaaaagagacagagaaaattggtatttatttttctattatagccatatttatatatttatgcacttgtaaataaatgtatatgttttataattctggagagacataaggagtcctacccgttgaggttggagagggaaaataaagaagctgccacctaacaggagtcacccaggaaagcaccgcacaggctggcgcgggacagactcctaacctggggcctctgcagtggcaggcgaggctgcaggaggcccacagataagctggcaagaggaaggatcccaggcacatggttcatcacgagcatgagggaacagcaaggggcacggtatcacagcctggagacacccacacagatggctggatccggtgctacgggaaacattttcctaagatgcccatgagaacagaccaagatgtgtacagcactatgagcattaaaaaaccttccagaatcaataatccgtggcaacatatctctgtaaaaacaaacactgtaacttctaaataaatgtttagtcttccctgtaaccttc

SEQ ID NO: 5923 - DNA, 2897 bp, Homo sapiens
caggagaagaggacaaagatactcagagagaaaaagtaaaagaccgaagaaggaggctggagagaccaggatccttccagctgaacaaagtcagccacaaagcagactagccagccggctacaattggagtcagagtcccaaagacatgggcttgttagagtgctgtgcaagatgtctggtaggggccccctttgcttccctggtggccactggattgtgtttctttggggtggcactgttctgtggctgtggacatgaagccctcactggcacagaaaagctaattgagacctatttctccaaaaactaccaagactatgagtatctcatcaatgtgatccatgccttccagtatgtcatctatggaactgcctctttcttcttcctttatggggccctcctgctggctgagggcttctacaccaccggcgcagtcaggcagatctttggcgactacaagaccaccatctgcggcaagggcctgagcgcaacgtttgtgggcatcacctatgccctgaccgttgtgtggctcctggtgtttgcctgctctgctgtgcctgtgtacatttacttcaacacctggaccacctgccagtctattgccttccccagcaagacctctgccagtataggcagtctctgtgctgatgccagaatgtatggtgttctcccatggaatgctttccctggcaaggtttgtggctccaaccttctgtccatctgcaaaacagctgagttccaaatgaccttccacctgtttattgctgcatttgtgggggctgcagctacactggtttccctgctcaccttcatgattgctgccacttacaactttgccgtccttaaactcatgggccgaggcaccaagttctgatcccccgtagaaatccccctttctctaatagcgaggctctaaccacacagcctacaatgctgcgtctcccatcttaactctttgcctttgccaccaactggccctcttcttacttgatgagtgtaacaagaaaggagagtcttgcagtgattaaggtctctctttggactctcccctcttatgtacctcttttagtcattttgcttcatagctggttcctgctagaaatgggaaatgcctaagaagatgacttcccaactgcaagtcacaaaggaatggaggctctaattgaattttcaagcatctcctgaggatcagaaagtaatttcttctcaaagggtacttccactgatggaaacaaagtggaaggaaagatgctcaggtacagagaaggaatgtctttggtcctcttgccatctataggggccaaatatattctctttggtgtacaaaatggaattcattctggtctctctattaccactgaagatagaagaaaaaagaatgtcagaaaaacaataagagcgtttgcccaaatctgcctattgcagctgggagaagggggtcaaagcaaggatctttcacccacagaaagagagcactgaccccgatggcgatggactactgaagccctaactcagccaaccttacttacagcataagggagcgtagaatctgtgtagacgaagggggcatctggccttacacctcgttagggaagagaaacagggtgttgtcagcatcttctcactcccttctccttgataacagctaccatgacaaccctgtggtttccaaggagctgagaatagaaggaaactagcttacatgagaacagactggcctgaggagcagcagttgctggtggctaatggtgtaacctgagatggccctctggtagacacaggatagataactctttggatagcatgtctttttttctgttaattagttgtgtactctggcctctgtcatatcttcacaatggtgctcatttcatgggggtattatccattcagtcatcgtaggtgatttgaaggtcttgatttgttttagaatgatgcacatttcatgtattccagtttgtttattacttatttggggttgcatcagaaatgtctggagaataattctttgattatgactgttttttaaactaggaaaattggacattaagcatcacaaatgatattaaaaattggctagttgaatctattgggattttctacaagtattctgcctttgcagaaacagatttggtgaatttgaatctcaatttgagtaatctgatcgttctttctagctaatggaaaatgattttacttagcaatgttatcttggtgtgttaagagttaggtttaacataaaggttattttctcctgatatagatcacataacagaatgcaccagtcatcagctattcagttggtaagcttccaggaaaaaggacaggcagaaagagtttgagacctgaatagctcccagatttcagtcttttcctgtttttgttaactttgggttaaaaaaaaaaaaagtctgattggttttaattgaaggaaagatttgtactacagttcttttgttgtaaagagttgtgttgttcttttcccccaaagtggtttcagcaatatttaaggagatgtaagagctttacaaaaagacacttgatacttgttttcaaaccagtatacaagataagcttccaggctgcatagaaggaggagagggaaaatgttttgtaagaaaccaatcaagataaaggacagtgaagtaatccgtaccttgtgttttgttttgatttaataacataacaaataaccaacccttccctgaaaacctcacatgcatacatacacatatatacacacacaaagagagttaatcaactgaaagtgtttccttcatttctgatatagaattgcaattttaacacacataaaggataaacttttagaaacttatcttacaaagtgtattttataaaattaaagaaaataaaattaagaatgttctcaatcaaa

SEQ ID NO: 5924 - DNA, 7442 bp, Homo sapiens; identical to SEQ ID NO: 754

SEQ ID NO: 5925 - DNA, 5530 bp, Homo sapiens
atgctcccggcttgccgcctgcaggatgagttccacccgttcatcgaggcactgctgcctcacgtccgcgctttctcctacacctggttcaacctgcaggcgcggaagcgcaagtacttcaagaagcatgaaaagcggatgtcgaaggacgaggagcgggcggtgaaggacgagctgctgggcgagaagcccgagatcaagcagaagtgggcatcccggctgctggccaagctgcgcaaggacatccggcccgagttccgcgaggacttcgtgctgaccatcacgggcaagaagcccccctgctgcgtgctctccaaccccgaccagaagggcaagatccggcggattgactgcctgcgccaggctgacaaggtgtggcggctggacctggtcatggtgattttgtttaaggggatccccctggaaagtactgatggggagcggctctacaagtcgcctcagtgctcgaaccccggcctgtgcgtccagccacatcacattggagtcacaatcaaagaactggatctttatctggcttactttgtccacactccggaatccggacaatcagatagttcaaaccagcaaggagatgcggacatcaaaccactgcccaacgggcacttaagtttccaggactgttttgtgacttccggggtctggaatgtgacggagctggtgagagtatcacagactcctgttgcaacagcatcagggcccaacttctccctggcggacctggagagtcccagctactacaacatcaaccaggtgaccctggggcggcggtccatcacctcccctccttccaccagcaccaccaagcgccccaagtccatcgatgacagtgagatggagagccctgttgatgacgtgttctatcccgggacaggccgttccccagcagctggcagcagccagtccagcgggtggcccaacgatgtggatgcagggagcccccgggccacagcatcagccctgcacttcccctccacgtccatcatccagcagtcgagcccgtatttcacgcacccgaccatccgctaccaccaccaccacgggcaggactcactgaaggagtttgtgcagtttgtgtgctcggatggctcgggccaggccaccggacagcccaacggtagcggccagggcaaagtcccggggtcatttttgctaccgccgccgcctccagtggccagacctgtgccccttcctatgcctgattccaaatccaccagcactgccccagacggcgccgccttgactcctccatcaccttcattcgcaacgacaggcgcctcctctgccaaccggtttgtcagcatcggaccccgggacggcaactttctgaacatcccacagcagtctcagtcctggttcctctgataagatcgacaaaagaaacaacaaaatgagaagaagaggttcctcgaaaggggggagaagaaattttgagaatggaaaaatcccccagcccagcccagccccaccgaaaagcaaaaattacacgtcgtcagccactcagcccttctctcctccagcccggggacccccgcgggccccagaagcagcccagttctcagagagcccttggaaggggtctcggtggagctgtgcaccagcagccaagcagaaagaaacacgcgacatggactctgtcaagtagaggacagaaagcaagaaaggatgcagaactgccttcctccccctgaccccgccccggccttctggggaaggaacaaagtccccaaacaaagcaaccagcacaattctgaaggggcctggcctccaccctcaccccttcctaggggaaccccaccctccacacagccggagctgccctagggagcctggagggccagcttgtaaagatgatggggtttagatccctcaggctctcccctccagactccgcccttccctccctccctccctccctccctctctgccaaggctccagcttcttcccccagctgctcccgaccaggagggggagagcagcctccacttaccccaccccacccttgggctaaaagcccccaggcgggcagggggtgacccctggagctagttgcgtgtcccagaatggagggtgttctgacaccccaccctgagccgcaagagcagtcctggggccctggacccctctgtacagtccgtaggaaaaagtcggaatgctctcgacggcctcgtcccagcctgggacaggccccctttcccctctctctgcaggccaggagggcctccttcctgccacgagggaggggagtcgggccccaggtcgcccccgcccccagccctgcatgcaggtgccctcgctccgccccatcagttcctgcccctgcccctcatgcagactgccctgctggggccgggccggagggtggagcagaaaggggaccccggagccgagcgaggaggaccaggcagccgccgctgccgcgctaagccaccacctgcgcttaggtaggcgtcctgctcgccgactttcagttccttgggagggtgttgggtgtcgtccttttcaaaagtgttttggagctttctgtgccccccgactttcccccgcctccccgccccccacgtggccacttttctctggattttagctgtaatgtctttactctttatttaggggtggggcattcattgtttgggtcttttgctgttggaatgggaactcctcctccatttgagcaacttgggaacaatttggtaacacaccacaggaagtagctctcccccccagccccctcctccctcaagggagggttggggggcctgtccagagggtcttcagaagcccccctgggagggaggggaggatgagcacgcccagctcccctccagggtgtgacttggcccctctggcttgtctttctgtgccttactcctcctcctgcgtctcccgttcctggccccttcttgagtccttgtgcctctctctttctctctctttcttaattgtatgaaaacacaaagcacaggtcaggatcctctgagagaaaatcaacattgcaccacgtaggggtgggctatgggctgtatttattgtgaatctagtttgtgaggctgtggccccgagctggcggagggagggaagaggagggagtgacgggaggggaggaggtcagcgacctggggccgtagcggcaggcgaacggtgcctgctacccagctggaagccacaaggtggctggctccaggggcggcttttgttggaagttgagtgaagccctccccctgtcctcagcgtgcagccctagaggaccccagggctgaggggcagtggatcctgcgggagtctcccggggcgtggggagtaaggccccgggggtggggggccgggtgggccgggcgtgacgcgcggtcaaagtgcaatgatttttcagttcggttggctaaacagggtcagagctgagagcgaagcagaaggggctccctgtccggcccacgtgccctttccctcgacgacagtcgagggctcgggctctgtgggactgtgggagctagggtctgcggggcgcctgcccgggcgaggtcggaagctgcaggccagctgggcccgggccggagcgtgcccggcggggctgcccgggcgggcagggggtgggggctgctcctttcccaagtggtgttgtgaggggcaatgagggcaacaggagatgtggggacgtgttaggagagaaaaaaaaaaaaacaaaaatatatatgggggaaattaacttttttttttcattgaaccaagtgcaatgcatcagagagttttcctatctttgtatgttaagagattaagaaaaaaaaattctatttttgttgtaatgtcctcgcggctctggggacgctaaaagaaccgggcctgccccgccctgcgcggggataacgaaagctgagtgtttttcccttttttttgttcgtttttagtttttttttttttaagtcgttttcctgcgttgacgaggatgatctggggtttttatttgtttcgtcgttcgttctgtttcggtgggagggctgaaggaaacgttcacattttagagtttaaaaaaaacacctcgacatttaaaaaatcaaccaacacaagatcaaaaaggaaaaggacgagagaaaaattatttttaagataattaaacataaaaccctggtgcttcttacattataaagtacgttttaaagaacccacaaactattatacataagtttatgaatcaattaaatatcctgcacttgttaggaatacgcatatcccttctttgttgagtttaacggaacgggacagcggcgtgcccccggcggctggactgctccggccgcgggtctccccgggcgcccctccctggggcccagcacccctcctcgccccatccccgtccgggtacgggggcgcggcaggggtccccggcccctcccccgcagaggtcaatgccaacgaacaaacgtcccctccctccctccctctccgccccgagcgcccttctttgagccagacgccaacttgaccctcaccagcattatcaggagcgcgctcagcaagttggtagtttcctcccccctttcccggcgcccctcccgcccccattcaacatctctcatcctatccccgaccccctccggggaacaccgggaaggctcgacgctccaggacaggaccagccacgcagacaggtcgatttgcccaggcccgcgcccgcacgcacgcacgcacacggccccgcacacagccccgccccaccccgcaaccagccctgtcgactgccttatacacccgcccccgcgctggccggccgacctagtgccttgttctcacccccgtgctggcggagcggacgccgcgctctgggtcccagaggggccgggtggctcagacgacccaccactcccccaccctgaccgtgctgaacagacccccccacacgagagaaaataaaggagcaataaagtcacgagaactttcgtcccccaatcgagagcccgaggggcaccccagccccgcctctgctcccccccaccccacccaccctcggggcgcccccctccccccgcaagccagcctgggccagccccgcttcggcccctcccgggagatccgtgcgcccgaccagcaccagcatcgcggaccgcaaaggccgcccgtcccgtcaaacaagtttcttcttaggctaagaaacgcagtatatacgagtatctctatatatagtactaatggatttggtgtgcttcccccttagcgtccccctccctctgctcctcctccttcagcctggtctccccctcttctctgccctccacccccgtctctgcactgagatacataagaaacaagggtagtttactgtctgttttgttttctgggttttcagtgtcctagcggaatgcaagtaggcagccagcccgtctgttccctctccgccccgccccgccccgcccccgtcactgcgcttctgttataccatctttgcctgactctctccggcttctccattgaatggctaatgtgtatgtgaaataaagaaataaagaaaaacaaacgcga

SEQ ID NO: 5926 - DNA, 2168 bp, Homo sapiens
tgttgagcgcttcaggaaaggcggtgagatccggtaccgcagcagagcactctcagctctgggtcttgcaggcgcagggctcccccatgccagcagaaagatttcctctggtgaagaggaccgtcgaatctgtcctcctcaagacacctcttgtacagaatttattcgaatgccacggccaaggtcttccttgaaaaatgttaaccgatgtgtgctttttgtcttttgtcatcctttctttaggacaggcgacactaacaggtgaagatctcgggagaccatgactaagaaaagaattgctgtgattgggggaggagtgagcgggctctcttccatcaagtgctgcgtagaagaaggcttggaacctgtctgctttgaaaggactgatgacatcggagggctctggaggttccaggaaaatcctgaagaaggaagggccagtatttacaaatcagtgatcatcaatacttctaaagagatgatgtgcttcagtgactatccaatcccagatcattatcccaacttcatgcataatgcccaggtcctggagtatttcaggatgtatgccaaagaatttgaccttctaaagtatattcgatttaagaccactgtgtgcagtgtgaagaagcagcctgattttgccacttcaggccaatgggaagtggtcactgaatctgaagggaaaaaggagatgaatgtctttgatggagtcatggtttgcactggccatcacaccaatgctcatctacctctggaaagcttccctggaattgagaagttcaaagggcagtacttccacagtcgagactataagaacccagagggattcactggaaagagagtcattataattggcattgggaattctggaggggatctggctgtagagattagccaaacagccaagcaggttttcctcagcaccaggagaggggcttggatcctgaatcgtgtaggggactacggatatcctgctgatgtgttgttctcttctcgacttacacattttatatggaagatctgtggccaatcattagcaaacaaatatttggaaaaaaagataaaccaaaggtttgaccatgaaatgtttggcctgaagcctaaacacaggtctaaagacattgccctcacagagtgaaatgatggcagaaatatctaaagctcaagaggaaattgacaaaaggtatgtggagagccaacgccataccattcagggagactacatagataccatggaagagcttgctgatttggtgggggtcaggcccaatctgctgtctctggccttcactgaccccaagctggcattacacttattactgggaccctgcactccaatccactatcgtgtacagggccctggaaagtgggatggggctcgaaaagctatcctcaccacagatgatcgcatcaggaagcctctgatgacaagagtagttgaaaggagtagttctatgacttcaacaatgacaataggcaagtttatgctagctcttgccttctttgctataattatagcttacttctagttgtcctattgtcactgccctgtttttcattgggaagcttatctacagatgccttcagaatctgacgagattgactctcagtttcatattgcccagaaatctactttaatgtctctttcgaaagcattaattcactttcctttttcctacaatgaaacctgttttccatttgtattaactcatctcccttccactcatgatccgtcactcttccttgtggtaatccctagactgggagctcaggtactcttttagtcatctttgtatgtctttagcagagttcttgacatgtggtaggtgcttaataaatgtttgttgtttatcaaattttatggtagggagagtaagtcagcatcggtataaaatcgcttactccacgtaactcttcttctgatagggtttgattttctattagaagctcaattttagttttttttcatattataactaaatatgtttcctgagagataagagaaataatgttcctacaatagttgtatgtatctaagataagacatatagatgcttaagacattttgtttcacttgctattcactagtgtacttgaaacatggtcatttttagcccttttccttaggaaccatgtctttattttctcaataaagaaattactttcaa

SEQ ID NO: 5927 - DNA, 2291 bp, Homo sapiens
cctaccggtccatagtgtcagagtggtgaacccctgcagccagcaggcctcctgaaaaaaaagtccatgggtgacagaagattcattgacttccaattccaagattcaaattcaagcctcagacccaggttgggcaatgctactgccaataatacttgcattgttgatgattccttcaagtataatctcaatggtgctgtctacagtgttgtattcatcttgggtctgataaccaacagtgtctctctgtttgtcttctgtttccgcatgaaaatgagaagtgagactgctatttttatcaccaatctagctgtctctgatttgctttttgtctgtacactaccttttaaaatattttacaacttcaaccgccactggccttttggtgacaccctctgcaagatctctggaactgcattccttaccaacatctatgggagcatgctctttctcacctgtattagtgtggatcgtttcctggccattgtctatccttttcgatctcgtactattaggactaggaggaattctgccattgtgtgtgctggtgtctggatcctagtcctcagtggcggtatttcagcctctttgttttccaccactaatgtcaacaatgcaaccaccacctgctttgaaggcttctccaaacgtgtctggaagacttatttatccaagatcacaatatttattgaagttgttgggtttatcattcctctaatattgaatgtctcttgctcttctgtggtgctgagaactcttcgcaagcctgctactctgtctcaaattgggaccaataagaaaaaagtactgaaaatgatcacagtacatatggcagtctttgtggtatgctttgtaccctacaactctgtcctcttcttgtatgccctggtgcgctcccaagctattactaattgctttttggaaagatttgcaaagatcatgtacccaatcaccttgtgccttgcaactctgaactgttgttttgaccctttcatctattacttcacccttgaatcctttcagaagtccttctacatcaatgcccacatcagaatggagtccctgtttaagactgaaacacctttgaccacaaagccttcccttccagctattcaagaggaagtgagtgatcaaacaacaaataatggtggtgaattaatgctagaatccaccttttaggtatgagaaatgtgttcaggtccagatatggtttctcctataatttttcctatgctataaactaaagatttgaagctaatgatactgagaataatgcaccaaatccagtcagatacatttgtttgaaggtatactgtagagtttttattgctgttttgttcagtaattataggtcaaatctaattacaacaaccaagatggattgccaaactcttctgcttggttggaatttcattgtatcgcattatccaggtggctagtggcatttgataatatagagatgactttgaaactttcaaaaaggtatttctattccaatgatatttggtaattaggttgggcctataaatatagaacaaattcagggatttttaaaaaattgtgttactactgatatatgctagttttattttatttttttgaactgtcattgagtttattttagcacaagaatatttttagcctaacattattaataagaaatgtgtcaaatttttaacattggtaaaatatgttatgtgcattttgaaaacagaaaacaaattgcgttggcatgtacgtgggtgggaagaaaaagaaaattaacaggatttacacaattataatcaccagcagtgtgagtttaaaaaacttcgttgtttttacaccaaattaaaattttcatgtcaaacttcaaagccagaaagctgctaaatacgtgtctggcaggtaaaagctggaaaattacttaaaacaggaaagtgtcaataaaaaaacttgagcaacaccaacatattttttcttaaaatgtcacgttatcttcattttgggaaactaggttctataaaatatttatcctccctgttatactttggagcacagcacagccagaaaggggctgcatttgtgcccaggtcaggagcaaattgaaaaaaaaaataaagtaatacaaaaaaatcaaactataaagcaaaaacatttattaaaacctgaattaatcctttttggagggaggagtagagatatataacctgaaaatacttattctttcttatcgaattttggagcctaatatagccaggagctgctgaatttgtgcccctggattggaagcaaataaaaaaaaaaaacaa

SEQ ID NO: 5928 - DNA, 9690 bp, Homo sapiens
ttccccagcagctgctgctcgctcagctcacaagccaaggccaggggacagggcggcagcgactcctctggctcccgagaagtggatccggtcgcggccactacgatgccgggagccgccggggtcctcctccttctgctgctctccggaggcctcgggggcgtacaggcgcagcggccgcagcagcagcggcagtcacaggcacatcagcaaagaggtttattccctgctgtcctgaatcttgcttctaatgctcttatcacgaccaatgcaacatgtggagaaaaaggacctgaaatgtactgcaaattggtagaacatgtccctgggcagcctgtgaggaacccgcagtgtcgaatctgcaatcaaaacagcagcaatccaaaccagagacacccgattacaaatgctattgatggaaagaacacttggtggcagagtcccagtattaagaatggaatcgaataccattatgtgacaattaccctggatttacagcaggtgttccagatcgcgtatgtgattgtgaaggcagctaactccccccggcctggaaactggattttggaacgctctcttgatgatgttgaatacaagccctggcagtatcatgctgtgacagacacggagtgcctaacgctttacaatatttatccccgcactgggccaccgtcatatgccaaagatgatgaggtcatctgcacttcattttactccaagatacaccccttagaaaatggagagattcacatctctttaatcaatgggagaccaagtgccgatgatccttctccagaactgctagaatttacctccgctcgctatattcgcctgagatttcagaggatccgcacactgaatgctgacttgatgatgtttgctcacaaagacccaagagaaattgaccccattgtcaccagaagatattactactcggtcaaggatatttcagttggagggatgtgcatctgctatggtcatgccagggcttgtccacttgatccagcgacaaataaatctcgctgtgagtgtgagcataacacatgtggcgatagctgtgatcagtgctgtccaggattccatcagaaaccctggagagctggaacttttctaactaaaactgaatgtgaagcatgcaattgtcatggaaaagctgaagaatgctattatgatgaaaatgttgccagaagaaatctgagtttgaatatacgtggaaagtacattggagggggtgtctgcattaattgtacccaaaacactgctggtataaactgcgagacatgtactgatggcttcttcagacccaaaggggtatctccaaattatccaaggccatgccagccatgtcattgcgatccaattggttccttaaatgaagtctgtgtcaaggatgagaaacatgctcgacgaggtttggcacctggatcctgtcattgcaaaactggttttggaggtgtgagctgtgatcggtgtgccaggggctacactggctacccggactgcaaagcctgtaactgcagtgggttagggagcaaaaatgaggatccttgttttggcccctgtatctgcaaggaaaatgttgaaggaggagactgtagtcgttgcaaatccggcttcttcaatttgcaagaggataattggaaaggctgcgatgagtgtttctgttcaggggtttcaaacagatgtcagagttcctactggacctatggcaaaatacaagatatgagtggctggtatctgactgaccttcctggccgcattcgagtggctccccagcaggacgacttggactcacctcagcagatcagcatcagtaacgcggaggcccggcaagccctgccgcacagctactactggagcgcgccggctccctatctgggaaacaaactcccagcagtaggaggacagttgacatttaccatatcatatgaccttgaagaagaggaagaagatacagaacgtgttctccagcttatgattatcttagagggtaatgacttgagcatcagcacagcccaagatgaggtgtacctgcacccatctgaagaacatactaatgtattgttacttaaagaagaatcatttaccatacatggcacacattttccagtccgtagaaaggaatttatgacagtgcttgcgaatttgaagagagtcctcctacaaatcacatacagctttgggatggatgccatcttcaggttgagctctgttaaccttgaatccgctgtctcctatcctactgatggaagcattgcagcagctgtagaagtgtgtcagtgcccaccagggtatactggctcctcttgtgaatcttgttggcctaggcacaggcgagttaacggcactatttttggtggcatctgtgagccatgtcagtgctttggtcatgcggagtcctgtgatgacgtcactggagaatgcctgaactgtaaggatcacacaggtggcccatattgtgataaatgtcttcctggtttctatggcgagcctactaaaggaacctctgaagactgtcaaccctgtgcctgtccactcaatatcccatccaataactttagcccaacgtgccatttagaccggagtcttggattgatctgtgatggatgccctgtcgggtacacaggaccacgctgtgagaggtgtgcagaaggctattttggacaaccctctgtacctggaggatcatgtcagccatgccaatgcaatgacaaccttgacttctccatccctggcagctgtgacagcttgtctggctcctgtctgatatgtaaaccaggtacaacaggccggtactgtgagctctgtgctgatggatattttggagatgcagttgatgcgaagaactgtcagccctgtcgctgtaatgccggtggctctttctctgaggtttgccacagtcaaactggacagtgtgagtgcagagccaacgttcagggtcagagatgtgacaaatgcaaggctgggacctttggcctacaatcagcaaggggctgtgttccctgcaactgcaattcttttgggtctaagtcattcgactgtgaagagagtggacaatgttggtgccaacctggagtcacagggaagaaatgtgaccgctgtgcccacggctatttcaacttccaagaaggaggctgcacagcttgtgaatgttctcatctgggtaataattgtgacccaaagactgggcgatgcatttgccctcccaataccattggagagaaatgttctaaatgtgcacccaatacctggggccacagcattaccactggttgtaaggcttgtaactgcagcacagtgggatccttggatttccaatgcaatgtaaatacaggccaatgcaactgtcatccaaaattctctggtgcaaaatgtacagagtgcagtcgaggtcactggaactaccctcgctgcaatctctgtgactgcttcctccctgggacagatgccacaacctgtgattcagagactaaaaaatgctcctgtagtgatcaaactgggcagtgcacttgtaaggtgaatgtggaaggcatccactgtgacagatgccggcctggcaaattcggactcgatgccaagaatccacttggctgcagcagctgctattgcttcggcactactacccagtgctctgaagcaaaaggactgatccggacgtgggtgactctgaaggctgagcagaccattctacccctggtagatgaggctctgcagcacacgaccaccaagggcattgtttttcaacatccagagattgttgcccacatggacctgatgagagaagatctccatttggaacctttttattggaaacttccagaacaatttgaaggaaagaagttgatggcctatgggggcaaactcaagtatgcaatctatttcgaggctcgggaagaaacaggtttctctacatataatcctcaagtgatcattcgaggtgggacacctactcatgctagaattatcgtcaggcatatggctgctcctctgattggccaattgacaaggcatgaaattgaaatgacagagaaagaatggaaatattatggggatgatcctcgagtccatagaactgtgacccgagaagacttcttggatatactatatgatattcattacattcttatcaaagctacttatggaaatttcatgcgacaaagcaggatttctgaaatctcaatggaggtagctgaacaaggacgtggaacaacaatgactcctccagctgacttgattgaaaaatgtgattgtcccctgggctattctggcctgtcctgtgaggcatgcttgccgggattttatcgactgcgttctcaaccaggtggccgcacccctggaccaaccctgggcacctgtgttccatgtcaatgtaatggacacagcagcctgtgtgaccctgaaacatcgatatgccagaattgtcaacatcacactgctggtgacttctgtgaacgatgtgctcttggatactatggaattgtcaagggattgccaaatgactgtcagcaatgtgcctgccctctgatttcttccagtaacaatttcagcccctcttgtgtcgcagaaggacttgacgactaccgctgcacggcttgtccacggggatatgaaggccagtactgtgaaaggtgtgcccctggctatactggcagtccaggcaaccctggaggctcctgccaagaatgtgagtgtgatccctatggctcactgcctgtgccctgtgaccctgtcacaggattctgcacgtgccgacctggagccacgggaaggaagtgtgacggctgcaagcactggcatgcacgcgagggctgggagtgtgttttttgtggagatgagtgcactggccttcttctcggtgacttggctcgcctggagcagatggtcatgagcatcaacctcactggtccgctgcctgcgccatataaaatgctgtatggtcttgaaaatatgactcaggagctaaagcacttgctgtcacctcagcgggccccagagaggcttattcagctggcagagggcaatctgaatacactcgtgaccgaaatgaacgagctgctgaccagggctaccaaagtgacagcagatggcgagcagaccggacaggatgctgagaggaccaacacaagagcaaagtccctgggagaattcattaaggagcttgcccgggatgcagaagctgtaaatgaaaaagctataaaactaaatgaaactctaggaactcgagacgaggcctttgagagaaatttggaagggcttcagaaagagattgaccagatgattaaagaactgaggaggaaaaatctagagacacaaaaggaaattgctgaagatgagttggtagctgcagaagcccttctgaaaaaagtgaagaagctgtttggagagtcccggggggaaaatgaagaaatggagaaggatctccgggaaaaactggctgactacaaaaacaaagttgatgatgcttgggaccttttgagagaagccacagataaaatcagagaagctaatcgcctatttgcagtaaatcagaaaaacatgactgcattggagaaaaagaaggaggctgttgaaagcggcaaacgacaaattgagaacactttaaaagagggcaatgacatactcgatgaagccaaccgtcttgcagatgaaatcaactccatcatagactatgttgaagacatccaaactaaattgccacctatgtctgaggagcttaatgataaaatagatgacctctcccaagaaataaaggacaggaagcttgctgagaaggtgtcccaggctgagagccacgcagctcagttgaatgactcatctgctgtccttgatggaatccttgatgaggctaaaaacatctccttcaatgccactgcagccttcaaagcttacagcaatattaaggactatattgatgaagctgagaaagttgccaaagaagccaaagatcttgcacatgaagctacaaaactggcaacaggtcctcggggtttattaaaggaagatgccaaaggctgtcttcagaaaagcttcaggattcttaacgaagccaagaagttagcaaatgatgtaaaagaaaatgaagaccatctaaatggcttaaaaaccaggatagaaaatgctgatgctagaaatggggatctcttgagaactttgaatgacactttgggaaagttatcagctattccaaatgatacagctgctaaactgcaagctgttaaggacaaagccagacaagccaacgacacagctaaagatgtactggcacagattacagagctccaccagaacctcgatggcctgaagaagaattacaataaactagcagacagcgtcgccaaaacgaatgctgtggttaaagatccttccaagaacaaaatagttgccgatgcagatgccactgtcaaaaatttagaacaggaagctgaccggctaatagataaactcaaacccatcaaggaacttgaggataacctaaagaaaaacatctctgagataaaggaattgataaaccaagctcggaaacaagccaattctatcaaagtatctgtgtcttcaggaggtgactgcattcgaacatacaaaccagaaatcaagaaaggaagttacaataatattgttgtcaacgtaaagacagctgttgctgataacctcctcttttatcttggaagtgccaaatttattgactttctggctatagaaatgcgtaaaggcaaagtcagcttcctctgggatgttggatctggagttggacgtgtagagtacccagatttgactattgatgactcatattggtaccgtatcgtagcatcaagaactgggagaaatggaactatttctgtgagagccctggatggacccaaagccagcattgtgcccagcacacaccattcgacgtctcctccagggtacacgattctagatgtggatgcaaatgcaatgctgtttgttggtggcctgactgggaaattaaagaaggctgatgctgtacgtgtgattacattcactggctgcatgggagaaacatactttgacaacaaacctataggtttgtggaatttccgagaaaaagaaggtgactgcaaaggatgcactgtcagtcctcaggtggaagatagtgaggggactattcaatttgatggagaaggttatgcattggtcagccgtcccattcgctggtaccccaacatctccactgtcatgttcaagttcagaacattttcttcgagtgctcttctgatgtatcttgccacacgagacctgagagatttcatgagtgtggagctcactgatgggcacataaaagtcagttacgatctgggctcaggaatggcttccgttgtcagcaatcaaaaccataatgatgggaaatggaaatcattcactctgtcaagaattcaaaaacaagccaatatatcaattgtagatatagatactaatcaggaggagaatatagcaacttcgtcttctggaaacaactttggtcttgacttgaaagcagatgacaaaatatattttggtggcctgccaacgctgagaaacttgagactattcaataggccagaagtaaatctgaagaaatattccggctgcctcaaagatattgaaatttcaagaactccgtacaatatactcagtagtcccgattatgttggtgttaccaaaggatgttccctggagaatgtttacacagttagctttcctaagcctggttttgtggagctctcccctgtgccaattgatgtaggaacagaaatcaacctgtcattcagcaccaagaatgagtccggcatcattcttttgggaagtggagggacaccagcaccacctaggagaaaacgaaggcagactggacaggcctattatgcaatactcctcaacaggggccgtctggaagtgcatctctccacaggggcacgaacaatgaggaaaattgtgatcagaccagagccgaatctgtttcatgatggaagagaacattccgttcatgtagagcgaactagaggcatctttacagttcaagtggatgaaaacagaagatacatgcaaaacctgacagttgaacagcctatcgaagttaaaaagcttttcgttgggggtgctccacctgaatttcaaccttccccactcagaaatattcctccttttgaaggctgcatatggaatcttgttattaactctgtccccatggactttgcaaggcctgtgtccttcaaaaatgctgacattggtcgctgtgcccatcagaaactccgtgaagatgaagatggagcagctccagctgaaatagttatccagcctgagccagttcccaccccagcctttcctacgcccaccccagttctgacacatggtccttgtgctgcagaatcagaaccagctcttttgatagggagcaagcagttcgggctttcaagaaacagtcacattgcaattgcatttgatgacaccaaagttaaaaaccgtctcacaattgagttggaagtaagaaccgaagctgaatccggcttgcttttttacatggctcgcatcaatcatgctgattttgcaacagttcagctgagaaatggattgccctacttcagctatgacttggggagtggggacacccacaccatgatccccaccaaaatcaatgatggccagtggcacaagattaagataatgagaagtaagcaagaaggaattctttatgtagatggggcttccaacagaaccatcagtcccaaaaaagccgacatcctggatgtcgtgggaatgctgtatgttggtgggttacccatcaactacactacccgaagaattggtccagtgacctatagcattgatggctgcgtcaggaatctccacatggcagaggcccctgccgatctggaacaacccacctccagcttccatgttgggacatgttttgcaaatgctcagaggggaacatattttgacggaaccggttttgccaaagcagttggtggattcaaagtgggattggaccttcttgtagaatttgaattccgcacaactacaacgactggagttcttctggggatcagtagtcaaaaaatggatggaatgggtattgaaatgattgatgaaaagttgatgtttcatgtggacaatggtgcgggcagattcactgctgtctatgatgctggggttccagggcatttgtgtgatggacaatggcataaagtcactgccaacaagatcaaacaccgcattgagctcacagtcgatgggaaccaggtggaagcccaaagcccaaacccagcatctacatcagctgacacaaatgaccctgtgtttgttggaggcttcccagatgacctcaagcagtttggcctaacaaccagtattccgttccgaggttgcatcagatccctgaagctcaccaaaggcacaggcaagccactggaggttaattttgccaaggccctggaactgaggggcgttcaacctgtatcatgcccagccaactaataaaaataagtgtaaccccaggaagagtctgtcaaaacaagtatatcaagtaaaacaaacaaatatattttacctatatatgttaattaaactaatttgtgcatgtacatagaattctttctgtattcagatggtgctaattcagactccagactgaattttaattcaagttctttctcaagtctataaataatattaaactgattatttcattct

SEQ ID NO: 5929 - DNA, 1543 bp, Homo sapiens
accccccaccccctcctccctgcacacaaaagcagcataaattaaccgtcttcgggaagccgagcctctgccagccctgagctgggaagaagcagctacctcggaggcagggcgcgcaggcgggcggcgatgagagggggcgcagccgcagccccgcgctggggagcccaccgctaaccctgcaccccacccacccctgcacaaaagagctggcgggcgctggccacgtcgccctgggtgaccttcctcggatgcagaatccgcccctgcgagcatcctcttcctcctaggctctgaaggcccggggagcgtgagcgatgcccagctgcacccgggcagggctcgcctttgtttgccagtaaggaggagaggctgtctcagctgcagaggggtcatccctgcttcaagccagtgcctcttcccagctcccatggggaccaccgaagccacgctccggatggaaaacgtggacgtgaaggaggaatggcaggacgaagatcttcccaggccactcccagaagagacgggggtggaactgcttggcagcccggtggaagacacatcctctcctcccaacacgctaaatttcaacggagcgcatcgtaagaggaagacgctggtggccccagagatcaacatttctctggatcagagtgaggggtccctgctgtccgatgacttcttggatacccctgatgacctggatattaacgtggatgacatcgagacccccgatgagaccgactcgctggagttcctggggaatggcaacgaactggagtgggaagacgacacccccgtggccaccgccaagaacatgcccggggacagcgcggatctatttggggacggcacgacggaggacggcagcgccgccaacgggcgcctgtggcggacagtgatcatcggggagcaagagcaccgtatagacctgcacatgatccggccttacatgaaagtggtcacccacggagggtactacggcgaaggcctcaacgccatcatcgtcttcgcagcctgcttccttccagacagcagcctccccgactaccactacatcatggagaacctcttcctgtacgtcatcagcagcttagagctcctggtggctgaggactacatgatcgtgtacctgaacggtgccacgccccggcggaggatgcctggaatcggctggctgaagaagtgctaccagatgatcgaccggaggttgcggaaaaacctgaagtccttgatcatcgtccacccctcgtggttcattcggactgtgctggccatctctcgccctttcatcagcgtcaagttcatcaacaagatccagtacgtgcacagcttggaagacctggagcaactcatccctatggaacacgtccagatcccagactgcgtcctgcaatacgaagaggaaagactgaaggccaggagggagagcgcgaggccccagccggagtttgtgctgcccaggtctgaagagaagccagaggtggcaccagtggaaaacaggtctgctctggtctcagaagatcaggaaacaagaatgtcc

SEQ ID NO: 5930 - DNA, 2016 bp, Homo sapiens
tttttcttctccggccccatggaggaagtgagaaagttggcacagtcacgccgggcttcgcaggaccaggtcactcagtgacagatggacaatgcaagaatgaactccttcctggaataccccatacttagcagtggcgactcggggacctgctcagcccgagcctacccctcggaccataggattacaactttccagtcgtgcgcggtcagcgccaacagttgcggcggcgacgaccgcttcctagtgggcaggggggtgcagatcggttcgccccaccaccaccaccaccaccaccatcgccacccccagccggctacctaccagacttccgggaacctgggggtgtcctactcccactcaagttgtggtccaagctatggctcacagaacttcagtgcgccttacagcccctacgcgttaaatcaggaagcagacccaccaagaagcctgtcgctcccccgcatcggagacatcttctccagcgcagacttttgactggatgaaagtcaaaagaaaccctcccaaaacagggaaagttggagagtacggctacctgggtcaacccaacgcggtgcgcaccaacttcactaccaagcagctcacggaactggagaaggagttccacttcaacaagtacctgacgcgcgcccgcagggtggagatcgctgcatccctgcagctcaacgagacccaagtgaagatctggttccagaaccgccgaatgaagcaaaagaaacgtgagaaggagggtctcttgcccatctctccggccaccccgccaggaaacgacgagaaggccgaggaatcctcagagaagtccagctcttcgccctgcgttccttccccggggtcttctacctcagacactctgactacctcccactgaggcggctccagccccagacaacagcccaggcatctccttgggctgggacttcttacccaaagcacatgcttagcttatctttctttccatttacagtctctttcttcctttctaatcctatctggggagctcctggccaggataatatatttgcagataattctggaccagagacttggtgcggggttaacaccttcatccagattgggtgccagcatacattttctggtgggccttaacatccctcctgcttttaggagaattcacagaacctactgttcctttcagatgaccttttggaaaatagttccctttgccaacagaaacatgccagaaggaatcttctcatcttttatctaactatatgtacagctctcccctcccttgtccttgaaagtaggatatagcgaaaggcgagtccaggagctcaggaagaagagatgcactatatgtttacacaattaattcatcccttaatttaagtcattttcatgtgtgtgagtttgctggttgtaaatactttgtcctaagagatttatctttatacagattttctagaaatgtttaggttactaaaacagggtgggcaaactctctaaactggtacaattttataggtgaaagaaaaaattccctcatttaaacccaatcagatgcctcagagggtagccttgatttgttcttacagttaagaagccctgcagagcacaaacttcagaaacccggcttcctgtgctaagtctttcccaatctctacccctttcttctcgggccaccctctgtttaaaatttgtgctgggttattcagaacctaaaagtattattcaaaccaatttcttccttccacagttatcttagctggatataatgtattttcagctcaattgttaatgtgatggatggcacaatgaatgtatattttgtgttattcgtgaatagtcttttgcatgtcgcacaatgtttgatgtccccaaagtaccacactgagttctatcagttatcctttgtgagcctatgatattccccatttcctgtacaatcatgaacagctctgagatcctggagtgatatgatccagagcagagtttacgggtcttaggatgtctgtaataaataaatatactcaa

SEQ ID NO: 5931 - DNA, 4981 bp, Homo sapiens
gagatcgagagcgaacgaggcagccgccggcggagaggagggagcgggcgagggccgggcaggaggagcgggcgcggcgcgggcgaggctgggacccgagcgcgctcacttcgccgcaaagtgccaacttcccctggagtgccgggcgcgcaccgtccgggcgcgggggaaagaaaggcagcgggaatttgagatttttgggaagaaagtcggatttcccccgtccccttccccctgttactaatcctcattaaaaagaaaaacaacagtaactgcaaacttgctaccatcccgtacgtcccccactcctggcaccatgaaggcggccgtcgatctcaagccgactctcaccatcatcaagacggaaaaagtcgatctggagcttttcccctccccggatatggaatgtgcagatgtcccactattaactccaagcagcaaagaaatgatgtctcaagcattaaaagctactttcagtggtttcactaaagaacagcaacgactggggatcccaaaagacccccggcagtggacagaaacccatgttcgggactgggtgatgtgggctgtgaatgaattcagcctgaaaggtgtagacttccagaagttctgtatgaatggagcagccctctgcgccctgggtaaagactgctttctcgagctggccccagactttgttggggacatcttatgggaacatctagagatcctgcagaaagaggatgtgaaaccatatcaagttaatggagtcaacccagcctatccagaatcccgctatacctcggattacttcattagctatggtattgagcatgcccagtgtgttccaccatcggagttctcagagcccagcttcatcacagagtcctatcagacgctccatcccatcagctcggaagagctcctctccctcaagtatgagaatgactacccctcggtcattctccgagaccctctccagacagacaccttgcagaatgactactttgctatcaaacaagaagtcgtcaccccagacaacatgtgcatggggaggaccagtcgtggtagtggaccaatccagctatggcagtttcttctggaattactcactgataaatcctgtcagtcttttatcagctggacaggagatggctgggaattcaaactttctgacccagatgaggtggccaggagatggggaaagaggaaaaacaaacctaagatgaattatgagaaactgagccgtggcctacgctactattacgacaaaaacatcatccacaagacagcggggaaacgctacgtgtaccgctttgtgtgtgacctgcagagcctgctggggtacacccctgaggagctgcacgccatgctggacgtcaagccagatgccgacgagtgatggcactgaaggggctggggaaaccctgctgagaccttccaaggacagccgtgttggttggactctgaattttgaattgttattctattttttattttccagaactcattttttaccttcaggggtgggagctaagtcagttgcagctgtaatcaattgtgcgcagttgggaaaggaaagccaggacttgtggggtgggtgggaccagaaattcttgagcaaattttcaggagagggagaagggccttctcagaagcttgaaggctctggcttaacagagaaagagactaatgtgtccaatcatttttaaaaatcatccatgaaaaagtgtcttgagttgtggacccattagcaagtgacattgtcacatcagaactcatgaaactgatgtaaggcaattaatttgcttctgtttttaggtctgggagggcaaaaaagaggtgggtgggatgaaacatgttttggggggggatgcactgaaaatctgagaactatttacctatcactctagttttgaagcaaagatggacttcagtggggaggggccaaaaccgttgttgtgttaaaatttattttattaaattttgtgccagtattttttttcttaaaaatcgtcttaagctctaaggtggtctcagtattgcaatatcatgtaagtttgtttttatttgccggctgaggattctgtcacaatgaaagaaaactgtttatatagaccccattggaaaagcaaaacgctctcactgagatcagggatcccaaattcatgggacttatataagaaggacaattaatgctgatttgggtacaggggaattatgtgtgtgaatgtcatctacaattaaaaaaaattagcacatccctttacttacttgttatcagtggattctcggggtttggacttaatgttgagctaagaagcattaagtctttgaactgaatgtattttgcatccctggttttggacgacagtaaacgtaggagcactgttgaagtcctggaagggagatcgaaggaggaagattgacttggttctttcttagtcctatatctgtagcatagatgacttggaataaaagctgtatgcatgggcattacccctcaggtcctaagaaataagtcctgaatgcatgtcgttccaaactaacactctgtaatttttcttttatgtcttattttccaagagtcctccattttttgcaccccctcaccgccaactctgttattcagtagagagaagtgtacggctttctgattggtgagtgaaaaagtaacttgagacacgacctaagttgaagagtttagacttgctgagttttagaagtgatggaaattaagagagcatttcaataaaatgtgacttggctgtctttggaagagaagtgcaaggctttcctttgaagaatttaaattagtccggtaggatgtcaggtgagactgtgtatgcaaaatgaatggcacaggtgatgccagggcctcttgcttgggtctgatgtcttggcacagggtaagtgaaggttaattccagaagagaggaatgacttgaaggcaaaggaaactaaggaaggaggttcagtgaggaaaataaggttgtccatgagatttgaatagatttttagttcccccaaggtttaaatacaaacatagtcaagcaaggtagtcatctttctgctggttgtgagggggaatctgaaaatggagttttagaggaaaagtcaacatctaactagtgaggaaaagtgcctaatacaattagaatctccctcactctatagttgcccagttgaaaggataaggaggaggggtggcttttatggacttccatgagagaaggaaagaaatatttcaggtaagcttctcagggctggccctttttgggatttggatgagaaattggaagtactaactactttctagcatatctttaagaaaattgattgttatttactcccagatcctcttgcagacccagaattatcaggaacatagctctgtgattcatgagtgtccccatactgatgaattggagcatccatatggaaagcaaaggcagaattatcccagctgtattattttgatcttttggatgcaggtgccttaatgaagctctcaaaatattttaggagctgctcagggagtgttgggtggaactgtttggactacattgttttctcttagattatgtgatttttgttgggcactggcaaaaggtgtgtgtgtgaatgtgtgcatgtgtgtgaatgttgtgtgtgtgtgtgtgtgtgtgtgtgtgtgtgtgtgtgtgtgtgtttgcagacatgcaaaactgcagctgaaataataccttagatttctaggtaagtctttccacatttcaataatgggtaagagtagaaccagggccgggtatcaattattgcttgctgtttgcaaccaggcataaaatcactttctcaaatcatccaccgttcctattaaatttatgccggaaactctccttctgtgagtataactcctgcagttcctatagcagataagatataagaaagtgcctcctagtgctcctccgcccgcttgtttgctaaaattccctttctctctaagtccaccattttcaagatttgtagatagtgtattagttaagacagctttgtcgatctggccagatgttttttctcctttgtccaaaggccagagaccatcccaggaagagtggtgggtggtttatacactggaaatgttgcgtttatgctttttaaaaacacacgttaacttcagaggaaggatgggcaaatctggtctagctgggtgaaacccttattttcccagagatgccttaacctttgttggttttggctttagggttcagagtcacttttgttcccttctccattctggagagggacttcccctacatagagccctgatttttgtggctgtggggattggaggtagcattcaaagatcagatgtgcttttcctcactttggagatgaacactctgggttttacagcattaacctgcctaaccttcatggtgagaaatacaccatctctcttctagtcatgctgtgcatgccgcttactctgttggggtctatataaatttgttgaactcttacctacattccaaagaagtttcaaggaaccataaatatatgtatacatatacatatataaaatatatatattaaaataaaattatcaggaatactgcctcagttattgaacttttttttttaagaatactttttttttaagctgagaagtatagggatgaaaaagatgttatattgtgtttgactattttccaacttgtattttcatataatttatattttttaaaagctgaaaatttagaagcaagatgaaaaaaaggaaaagcaggtgctttttaaaaatcagaactgaggtagcttagagatgtagcgatgtaagtgtcgatgtttttttaaaaaaaaatgcaaaaaaattcttatggcggagttttttgtttgtttattttagtagctgatgctggcacatcattttgctggagagttttttatatactgtagcctgatttcatattgtattttaaactgtgtgaaattaaaaacaaagaatttcattcataatgct

SEQ ID NO: 5932 - DNA, 1979 bp, Homo sapiens; identical to SEQ ID NO: 260

SEQ ID NO: 5933 - DNA, 2720 bp, Homo sapiens
tcccctctccccaccacaacccaatgacctctacaagaatcccacaagttccagtgaattctacaaggcccaagggccacttcctaaccagcatagcctgaagggcatggaacaccgaggccccccaccagaatatcccttcaagggcatgccaccccaatctgtagtgtgcaagccccaagagccagggcacttctatagtgagcatcgcctgaaccagccagggagaacagaggggcaactgatgaggtatcagcatccccctgagtatggagcagccaggccagcgcaggacatctcattgccattgtcagccaggaactcgcagcctcacagccctacttcttctctgacctctggggggtccttgcccttgctacaatctccaccatccactagattgtctcctgcccgacaccccttggtcccaaaccagggagaccattcagctcacctgcctaggccgcagcagcatttccttcctaatcaggctcaccagggggatcattaccgtctctcccaacctggcctgagtcagcagcagcagcaacagcagcagcagcaccatcatcaccatcaccaccaacaacagcagcagcagcagccacagcagcagccaggagaagcctattcagctatgcctcgggctcagccatcctctgcttcttatcagccagtgccagcagacccttttgccattgtttccagagcccagcagatggttgagatcctctcagacgagaaccggaacttgaggcaagagttggaaggatgctatgagaaggtggcaagactgcagaaggtggagacagaaatccagcgcgtctcggaggcatatgagaacctcgtgaagtcatcctccaaaagagaggccctagagaaagccatgagaaacaagctagagggcgagattcggaggatgcatgatttcaacagggatctgagagagcgtctagagactgccaacaagcagcttgcagagaaggaatatgaggggtcagaggacaccagaaaaaccatctcgcagctctttgcaaaaaataaagaaagccagcgtgagaaggagaagctggaagcggagctggccactgcccgttctaccaatgaggaccaaagacgacacatcgaaatccgagatcaggccctgagtaatgcccaggccaaggtggtaaagctggaagaagagctgaaaaagaagcaagtgtacgttgacaaggtggagaagatgcagcaggcccttgtacagctccaggcagcatgtgaaaaacgtgagcagctagagcaccgtctccggacacgactggagagggaactggaatccctgagaatccagcagcgtcagggcaactgtcagcccaccaacgtttcagaatacaatgctgctgcactgatggagctccttcgggagaaagaggagaggattctggctctggaagctgatatgacaaagtgggagcagaaatatttggaggagaatgtgatgagacattttgctctggatgctgctgcaactgtggctgctcagagggacacaacagtcatcagtcactctcctaacaccagctatgacacagctctagaagctcgcatccagaaagaggaggaagaaatcttgatggccaataagcgttgccttgacatggagggcaggattaagaccctccatgcccagattattgagaaggatgccatgatcaaagtactccagcagcgttcccggaaggagccgagcaagacagagcagctgtcgtgcatgcggccagcgaagtctctgatgtccatttccaatgctggatcaggcttgctctcccactcatccaccctgactggctcccccatcatggaagaaaagcgagacgacaagagctggaaggggagcctaggcattctcctgggtggagactaccgtgctgaatatgtcccttccacaccctcgcctgtgccaccctcgactcccctgctctcggctcactccaagacaggcagccgagactgcagtacccaaactgaacgtgggacggaatcgaacaaaactgcagctgttgctcccatctctgttcctgctccagttgctgctgccgccactgctgccgccatcactgccactgctgccaccatcaccaccaccatggtagctgctgctccagttgctgttgctgctgctgctgctccagctgctgctgctgccccgtctccagccactgccgctgctactgctgctgctgtttctccagctgctgctggtcagattccagctgctgcctctgttgcctcagctgctgccgttgctccttctgctgctgctgctgctgctgttcaggttgctccagctgctccggctccagttccagctccggctctggttccggttccagctccagcagcggctcaggcttctgctcctgctcagactcaggcaccaacttcagctccggctgtggctccaactccagctccaactccaactccagctgtggctcaggctgaggttcctgcaagtccagctaccggtcctggaccacatcgtttgtctataccaagtttgacctgcaatccagacaaaacagatgggcctgtgttccactccaatactctggaaagaaaaactcccattcagatcctgggacaagagcctgatgcagagatggtggaatatctcatctaaacggccaaatcaagagctgcagattatcagcaaaaatgcttttaatcattttccc

SEQ ID NO: 5934 - DNA, 1577 bp, Homo sapiens
agatccggggatggagggagccggagaagaggagtgagaaggccggggaggcaggccctgctgtcttcctgcaggccggcagcctgctggcagtggaggaccaggccgtccaggaaaggaaggggtcaggaggtcgggcagggcctcagcaggttcagacaagtccccagaagggagctgcaggcgccctcgagtccaggccccaagcctggctccggttgtccaaagagggcctaggccaggcctctggtgcggaaactgagtcacagccagacctcagggcacggcctagacgcttacgagccaaagttaggggtagagagcagagacctccggggggtctcagggagtagggggcttcagggcctcccagtctagagccggattggcgagttagacgctttcttgttgttgcggaataattccatccaaaaccggcagctgttagccgagcaagtgagtagtcacatcacctccagccctctgcattcacgtagcattgctgcgcttgctgatgaccgtatggcactggtgtcaggcatcagcttagatccagaagcagcgattggtgtgacaaaacggccacctcctaagtgggtggatggagtggatgaaattcagtatgatgttggccggattaagcagaagatgaaagaattggccagccttcatgacaagcatttaaacagacccaccctggatgacagcagcgaagaggaacatgccattgagataactacccaagagatcactcagctcttccacaggtgccagcgtgccgtgcaggccctgccgagccgggcccgggcctgctccgagcaggaggggcggctgcttgggaacgtggtggcctcgctggcgcaggccctgcaggaactctccaccagcttccggcacgcacagtcaggctacctcaaacgcatgaagaatcgagaggaaagatcccagcattttttcgacacatcagtaccactaatggatgatggagacgataacactctttaccatcggggttttacagaggaccagttagttctggtggagcagaacacactgatggtggaagagcgggaacgagagattcgccagattgtacagtccatttctgacctgaatgaaatattcagggacttaggggcgatgattgtagaacagggtacagtccttgacagaattgactataacgttgaacagtcctgtatcaaaactgaagatggtttgaaacagcttcacaaggcagaacagtatcaaaagaagaatcggaagatgcttgtgattttaatattatttgtcatcatcattgtgctcattgttgtcctcgttggcgtgaagtctcgataagtggcattgggttttcgtgtgtgccgcgcgtgtggatctcccgggtgtgaggggcttggcctgcgccccgccagctgcccgcagaggtgcagcctcgaggaatctgagggcgtcggggcagcgaacctttgcatccacggactcctccttccctagtcctgctcaagcggtccggggaatgggtttttgtttttccttcattgttgagaatttaaggacctttgatactgctgcac

SEQ ID NO: 5935 - DNA, 5092 bp, Homo sapiens
gaattcatttttgaggtcaatttccaatcgagataaatctattggattagtaggattatctgattgcagccgaaagaagtaacgttgtttgatcatttgtatttcttgcctgatggtcggatttacatggaggtggctttgggtccccaggattctggatcgtggttgcatctggagagaaaaaaggatcaatcgacacgttttagaagtgtccgtgggtgaataaaaaaggaggggggggtgcaaaactggggttgcggatgcttaaagcaaaaaaagagaaaaggaagcgtcttgaatcctggaacaagaattaccgggtgctcgagatttcaaaaaagcgtctagaaactggtaaatacttggaccatttcagcttgaatttgacggcgaagtgttgtagagaccgtctccttgaatcattgcaaagggaccggggaaagatgagggggctccctctgtggatttatcttgctgagggatatagacctgcagctaactggatttgatttataagagagaaatctgcagtcaatgcccactcttgccacactgctaatatggaaaacagaatgttcaataggatatggtctgataaatagtgatgattgaagatgctgctccaatacatgtgaaatcaatgggagatatctgctgtctgaagatctttcagagcttttctcgacaagctcccctgtaagaaatcggaggtatattctaccattatacagtctttctcaagtggatataaatacgtttgcctcactgtaaccagacaactagacaactaatgtgggaccatggcactgcccagatgcacgtggccaaattatgtttggagagcagtgatggcatgcttggtacaccggggattgggtgccccattgactctctgtatgttgggatgtttgcttcaggctggccatgtgctatcacaaaaattggatgatgtggacccactggtggctaccaactttggaaagataagagggattaagaaggaactcaataatgaaattttggggcctgttattcaatttcttggggttccatatgcagccccaccaacaggggaacgtcgttttcagcctccagaaccaccatctccctggtcagatatcagaaatgccactcaatttgctcctgtgtgtccccagaatatcattgatggcagattgccagaagtcatgcttcctgtgtggtttactaataacttggatgtggtttcatcatatgtgcaagaccagagcgaagactgcctatatttaaatatatatgtcccgactgaggatgatattcgggacagtgggggtcccaaaccagtgatggtgtatatccatggtggctcatatatggaaggtactggaaatttatatgatggaagtgtcttggcaagttatggcaatgtgatcgtcatcacagtcaactatcgacttggagtactcggtttcttgagtacaggcgatcaggctgcaaaggggaactatggactccttgatctcatacaagctttaagatggactagtgaaaacattggattctttggtggtgaccccttaagaatcactgtttttggatctggtgctgggggttcatgtgtcaacctgctgactttatcccattattctgaaggtaaccgttggagcaattcaaccaaaggactttttcaacgagcaatagctcaaagtggaacagccctttccagctgggctgttagttttcaacctgcaaaatatgctagaatgttggccacaaaagttggttgcaatgtttcagatacagtagagttagtggaatgcctacagaagaagccttacaaagaacttgttgaccaagatattcaaccagctcgataccacatagcctttggacctgtgattgatggtgatgtaataccagacgacccccagatattgatggagcaaggagagtttctcaactatgatataatgttaggagtgaaccaaggggaagggttaaaatttgttgaaaatatagtagatagcgatgatggtatatcagctagtgattttgactttgctgtttcaaattttgttgataatttatatggatatcctgaaggcaaagatgttttgagagaaaccattaagttcatgtatactgactgggctgaccgtcataaccctgaaaccagaagaaagacattactggctttgtttacggaccatcagtgggtggcaccagctgtagccacagcggatcttcactcaaactttggttcacctacgtacttctatgccttttaccatcattgccaaacagatcaggttccagcttgggctgatgcagcccacggagacgaggttccctatgtactgggaatccccatgattggccctacagagttatttccttgcaatttctccaaaaatgatgtgatgctgagtgcagttgtaatgacatactggacaaattttgctaaaactggtgacccaaatcaaccagtccctcaagacacgaaattcattcataccaaacccaaccgttttgaagaagtagcatggaccagatattcccagaaagaccaactttatctccatattggattaaaaccaagagttaaagaacattacagagccaataaggtgaacctctggttggagttggtacctcatctgcataatctcaatgacatttctcagtatacctctacaacaactaaagtgccatcaactgacatcactttcagacctacgagaaaaaattctgtacctgtcacgtcagcctttcccactgccaagcaggatgatcccaaacaacaaccaagtccattttcagtggatcaaagggactactcaacagagctgagtgtcactattgcagttggagcatcactgctgtttctgaacatcttggcctttgcagccctgtactacaaaaaggataagaggagacatgatgttcacaggagatgcagccctcagcgcactactaccaatgatctaacccatgcacaagaagaggaaatcatgtccctccaaatgaagcacactgatttggatcatgaatgtgagtccattcatccacatgaggtggttcttcggaccgcctgtcccccagattacacactagctatgaggaggtcacctgatgatgttcccttaatgacacccaacaccattacaatgattcccaacactataccagggattcagcccttacacacattcaatacatttactggaggacagaacaatactctgccccatccccatccccacccccattcacattcaacaaccagggtatagccagataagagaaacaaactattttttttgatggattgcagtaaacgatcactgaagattccttggctttcaacctacaagacttactatttaaataaggaggaatattatgtgaatatacatatcaagaactttgggggttttgaaaaaaatgaattgtatatatacaaatcaactttaaaaacaaatttcaattgcttgaagcaattgttctgaatgatactttttcattcacattcaagaattaattttttgaagatttaagttacataatggaattaggcatgtggaacaccaaacaggaaagaactatgtctgaaatataaaaaataaaaataaaaaaacaactatgaatatgcacaagggacacaccagtggaatgtcagataattttcaccagtttttatttggagccgttttattgtgtagaccatatttacatatttggataagtacacaaagcgtcaatgctgttaatggccttagcaaaggctcatgctgaaatttgccagtaaaacaaagaagtttaaagactggcaggtacaccattatcacataagtgctgtcagtataaagttgtggggataaaggaaactggatatttttagcacgatgtgcatgataatttatatgcttggtggctgtgctgctgattaagccgtaattaaaattcttctcatcccattggagtttttaatagaagcttcctccatcaattggcagaacctaaagaagattttaaggggcaaaagtaattacaataaaataattcacagtagtttcaatatagaaggaattagctattaaaggtatttgaagaaactataggtatagtggtgaatactcgctgatatgaatcccagaaaaaaatttcctgtttttaatgttcttttcaatcccatctagataatttatagaaatataaccctaattggacatgtggtacaggatctataagttgctgtgtttttttgttactctgtattttgttccttttggtaaggtgaagtgtgtccaaagagttacttgcaacagtctttcatgatatgaggatgcccccgtattaccactctgattatagttctgagttctttgatttactcatgctgcatgacaaaatgtttactaataacaattcattataaagttatatccctctttacatcacttatctttctcactgaggttcattcactggaatttactcacgcaatctcagtagagtacaacgtagatacagaacctaggagagtcaacatctggaggattttagtctttcttacacatatgtgtgattttaaacgaatattctcagaccacaggaaactcttcatccccctgttgtttaccagtaacagtatatcacagacctttccaaatgtttgtatatgtaatcagatgtacatttatattgaaaaacaaatgagatggacttaaagagcacatcctgataaatactttctctctcacctgtactatatttctattagactaaagttatgtgattttttttttacattttttcagatgactagcaattttgatagtttataagataatgcaaagaactttctctgacaaactaactgcagtaacagaaacctttcttttcagttactctttttcaagaatgaaagattattatacaaaaaattgtatactacttgatggaaccaactttgtacatcttggccatgtcactggtcattgtgtgaaataaagataatctggataatgactattagtccaatgctaagaaacatgatctttgctcattaaagagctaaaatgtttattgctgttttgtctttcttttttct

SEQ ID NO: 5936 - DNA, 2485 bp, Homo sapiens
atgtccgaacatcagaaggaacaaactctggacacaccatctttaagaactgtaacactcactgtgagggtccatggcttcattcttgaagtcagcaagaccaagaacccaccaattccagacacattttggccacccagatgggaccatcgcccatcgccaggcggtgagactaatgcctattgccaaatgaatcatgtcaaccctgccatggacttcacgcagactccacctgggatgttggctctggacaacatgctgtactttgccaagcaccaccaagatgcctacatccggattgtgcttgagaacagtagtcgagaagacaagcatgaatgtccctttggccgcagtagtatagagctgaccaagatgctatgtgagatcttgaaagtgggcgagttgcctagtgagacctgcaacgacttccacccgatgttcttcacccacgacagatcctttgaggagtttttctgcatctgtatccagctcctgaacaagacatggaaggaaatgagggcaacttctgaagacttcaacaaggtaatgcaggtggtgaaggagcaggttatgagagcacttacaaccaagcctagctccctggaccagttcaagagcaaactgcagaacctgagctacactgagatcctgaaaatccgccagtccgagaggatgaaccaggaagatttccagtcccgcccgattttggaactaaaggagaagattcagccagaaatcttagagctgatcaaacagcaacgcctgaaccgccttgtggaagggacctgctttaggaaactcaatgcccggcggaggcaagacaagttttggtattgtcggctttcgccaaatcacaaagtcctgcattacggagacttagaagagagtcctcagggagaagtgccccacgattccttgcaggacaaactgccggtggcagatatcaaagccgtggtgacgggaaaggactgccctcatatgaaagagaaaggtgcccttaaacaaaacaaggaggtgcttgaactcgctttctccatcttgtatgactcaaactgccaactgaacttcatcgctcctgacaagcatgagtactgtatctggacggatggactgaatgcgctactcgggaaggacatgatgagcgacctgacgcggaatgacctggacaccctgctcagcatggaaatcaagctccgcctcctggacctggaaaacatccagatccctgacgcacctccgccgattcccaaggagcccagcaactatgacttcgtctatgactgtaactgaagtggccgggcccagacatgccccttccaaaactggaacacctagctaacaggagagaggaatgaaaacacacccacgccttggaaccgtcctttggtaaagggaagctgtgggtccacattcccttcagcatcacctctagccctggcaactttcagcccctagctggcatcttgctcaccgccctgattctgttcctcggctccactgcttcaggtcacttcccatggctgcagtccactggtgggacaagagcaaagcccactgccagtaagaaggccaaagggcccttccatcctagccctctgcaggcatgcccttccttcccttgggcaggaaagccagcagccccagactgcccaaaaacttgcccaccagaccaagggcagtgccccaaggcccctgtctggaggaaatggcctagctatttgatgagaagaccaaaccccacatcctcctttcccctctctctagaatcatctcgcaccaccagttacacttgaattaagatctgcgctcaaatctcctcccacctctctccctgcttttgccttgctctgttcctctttggtcccaagagcagcagccgcagcctcctcgtgatcctccctagcataaatttcccaaacagtccacaggtcccatgcccactttgcgtctgcactgtgatcgtgacaaatcttccctcctcaccagctagtctggggtttcctctccctgccccaggccagaactgccttcttcatttccacccacgctcccagcctcttagctgaaagcacaaatggtgaaatcagtagtctcgctccatctctaatagactaaacctaaatgcctctaggacggactgttgctatccaagcgtttggtgttaccttctcctgggaggtcctgctgcaactcaagttccacaggatggtcaagctgtcagacatccaagtttacatcattgtaattattactggtatttacaatttgcaagagttttgggttagtttttttttttttttttgctttgtttttgtacaaaagagtctaacattttttgccaaacagatatatatttaatgaaaagaagagatacataaatgtgtgaatttccagtttttttttaattattttaatcccaaacatcttcctgaaaataacattcccttaaacatgctgtggaataaaatggattgtgatgatttgg

SEQ ID NO: 5937 - DNA, 725 bp, Homo sapiens
gccgtcggagcccttgcacgcctgctctcttgtagcttctctcagcctagcccagcatcactatggtggacgctttcctgggcacctggaagctagtggacagcaagaatttcgatgactacatgaagtcactcggtgtgggttttgctaccaggcaggtggccagcatgaccaagcctaccacaatcatcgaaaagaatggggacattctcaccctaaaaacacacagcaccttcaagaacacagagatcagctttaagttgggggtggagttcgatgagacaacagcagatgacaggaaggtcaagtccattgtgacactggatggagggaaacttgttcacctgcagaaatgggacgggcaagagaccacacttgtgcgggagctaattgatggaaaactcatcctgacactcacccacggcactgcagtttgcactcgcacttatgagaaagaggcatgacctgactgcactgttgctgactactactctgccaatcggctacccctcgactcagcaccacattgcctcatttcttcctctgcattttgtacaaatccacgaattcttctggggtcaggtgccactgaccgggatccagttccagttcccatggtgtatgtggttttttttttttttttttaactgcactcatagggtgctctgaggtcaataaagcagagccaaggccacccagttgcctttttgcctttggtaacataa

SEQ ID NO: 5938 - DNA, 4854 bp, Homo sapiens
tttgtgtctatttttttaaacattacatttgtcataatcattcatattgttgtgtgtagttgtagtttgttcattattattgctataaagaatttcattttatgaataaaatgcaatgtattcattcattatagtgttcacgaacattttgactgtttctattttgggtttatgaatattctagtaaatattttttagtaaattctcacttgttgttaagtacaatttatagaggataggaagtggcaacaacaatgagtgttccccttttgcctatgggaaaagagaggcaaagggagaattagtgttagtggcccaataaggcttctggtgcctgtttcctgattcttgggacagagcacattcttcctgctacaccattgaaaaaactggatccagatctctcttctgaaggaactagtaatacatgattagcagcacgggtgactttttaactatgcccttcaaaatccaatcattgaaaacttattgaattaaaaggaatcaggtaagttaaagaaactgggctaaatgggttttgctttctcagtcactcaacctggctcttgcctcttcagttttctggacacgtagaaagcccctttgttctctttcttctacaccagcagtttttatttgcctgtttcccagagtaatgtgggccatggagtcaggccacctcctctgggctctgctgttcatgcagtccttgtggcctcaactgactgatggagccactcgagtctactacctgggcatccgggatgtgcagtggaactatgctcccaagggaagaaatgtcatcacgaaccagcctctggacagtgacatagtggcttccagcttcttaaagtctgacaagaaccggatagggggaacctacaagaagaccatctataaagaatacaaggatgactcatacacagatgaagtggcccagcctgcctggttgggcttcctggggccagtgttgcaggctgaagtgggggatgtcattcttattcacctgaagaattttgccactcgtccctataccatccaccctcatggtgtcttctacgagaaggactctgaaggttccctatacccagatggctcctctgggccactgaaagctgatgactctgttcccccggggggcagccatatctacaactggaccattccagaaggccatgcacccaccgatgctgacccagcgtgcctcacctggatctaccattctcatgtagatgctccacgagacattgcaactggcctaattgggcctctcatcacctgtaaaagaggagccctggatgggaactcccctcctcaacgccaggatgtagaccatgatttcttcctcctcttcagtgtggtagatgagaacctcagctggcatctcaatgagaacattgccacttactgctcagatcctgcttcagtggacaaagaagatgagacatttcaggagagcaataggatgcatgcaatcaatggctttgtttttgggaatttacctgagctgaacatgtgtgcacagaaacgtgtggcctggcacttgtttggcatgggcaatgaaattgatgtccacacagcatttttccatggacagatgctgactacccgtggacaccacactgatgtggctaacatctttccagccacctttgtgactgctgagatggtgccctgggaacctggtacctggttaattagctgccaagtgaacagtcactttcgagatggcatgcaggcactctacaaggtcaagtcttgctccatggcccctcctgtggacctgctcacaggcaaagttcgacagtacttcattgaggcccatgagattcaatgggactatggcccgatggggcatgatgggagtactgggaagaatttgagagagccaggcagtatctcagataagtttttccagaagagctccagccgaattgggggcacttactggaaagtgcgatatgaagcctttcaagatgagacattccaagagaagatgcatttggaggaagataggcatcttggaatcctggggccagtgatccgggctgaggtgggtgacaccattcaggtggtcttctacaaccgtgcctcccagccattcagcatgcagccccatggggtcttttatgagaaagactatgaaggcactgtgtacaatgatggctcatcttaccctggcttggttgccaagccctttgagaaagtaacataccgctggacagtcccccctcatgccggtcccactgctcaggatcctgcttgtctcacttggatgtacttctctgctgcagatcccataagagacacaaattctggcctggtgggcccgctgctggtgtgcagggctggtgccttgggtgcagatggcaagcagaaaggggtggataaagaattctttcttctcttcactgtgttggatgagaacaagagctggtacagcaatgccaatcaagcagctgctatgttggatttccgactgctttcagaggatattgagggcttccaagactccaatcggatgcatgccattaatgggtttctgttctctaacctgcccaggctggacatgtgcaagggtgacacagtggcctggcacctgctcggcctgggcacagagactgatgtgcatggagtcatgttccagggcaacactgtgcagcttcagggcatgaggaagggtgcagctatgctctttcctcatacctttgtcatggccatcatgcagcctgacaaccttgggacatttgagatttattgccaggcaggcagccatcgagaagcagggatgagggcaatctataatgtctcccagtgtcctggccaccaagccacccctcgccaacgctaccaagctgcaagaatctactatatcatggcagaagaagtagagtgggactattgccctgaccggagctgggaacgggaatggcacaaccagtctgagaaggacagttatggttacattttcctgagcaacaaggatgggctcctgggttccagatacaagaaagctgtattcagggaatacactgatggtacattcaggatccctcggccaaggactggaccagaagaacacttgggaatcttgggtccacttatcaaaggtgaagttggtgatatcctgactgtggtattcaagaataatgccagccgcccctactctgtgcatgctcatggagtgctagaatctactactgtctggccactggctgctgagcctggtgaggtggtcacttatcagtggaacatcccagagaggtctggccctgggcccaatgactctgcttgtgtttcctggatctattattctgcagtggatcccatcaaggacatgtatagtggcctggtggggcccttggctatctgccaaaagggcatcctggagccccatggaggacggagtgacatggatcgggaatttgcattgttgttcttgatttttgatgaaaataagtcttggtatttggaggaaaatgtggcaacccatgggtcccaggatccaggcagtattaacctacaggatgaaactttcttggagagcaataaaatgcatgcaatcaatgggaaactctatgccaaccttaggggtcttaccatgtaccaaggagaacgagtggcctggtacatgctggccatgggccaagatgtggatctacacaccatccactttcatgcagagagcttcctctatcggaatggcgagaactaccgggcagatgtggtggatctgttcccagggacttttgaggttgtggagatggtggccagcaaccctgggacatggctgatgcactgccatgtgactgaccatgtccatgctggcatggagaccctcttcactgttttttctcgaacagaacacttaagccctctcaccgtcatcaccaaagagactgaaaaagcagtgccccccagagacattgaagaaggcaatgtgaagatgctgggcatgcagatccccataaagaatgttgagatgctggcctctgttttggttgccattagtgtcacccttctgctcgttgttctggctcttggtggagtggtttggtaccaacatcgacagagaaagctacgacgcaataggaggtccatcctggatgacagcttcaagcttctgtctttcaaacagtaacatctggagcctggagatatcctcaggaagcacatctgtagtgcactcccagcaggccatggactagtcactaaccccacactcaaaggggcatgggtggtggagaagcagaaggagcaatcaagcttatctggatatttctttctttatttattttacatggaaataatatgatttcactttttctttagtttctttgctctacgtgggcacctggcactaagggagtaccttattatcctacatcgcaaatttcaacagctacattatatttccttctgacacttggaaggtattgaaatttctagaaatgtatccttctcacaaagtagagaccaagagaaaaactcattgattgggtttctacttctttcaaggactcaggaaatttcactttgaactgaggccaagtgagctgttaagataacccacacttaaactaaaggctaagaatataggcttgatgggaaattgaaggtaggctgagtattgggaatccaaattgaattttgattctccttggcagtgaactactttgaagaagtggtcaatgggttgttgctgccatgagcatgtacaacctctggagctagaagctcctcaggaaagccagttctccaagttcttaacctgtggcactgaaaggaatgttgagttacctcttcatgttttagacagcaaaccctatccattaaagtacttgttagaacact

SEQ ID NO: 5939 - DNA, 4727 bp, Homo sapiens
attataacagccaatgcagccgccatccacgcacaagcaaagaagcatgtcccatttaaatacacccacgcagccccagcgcccttagccgatcggggcgctcagcccacacgcaccgctgctcggggcttggagatccgcgcaggctgggctcccggacccggcggaccgacgcgcggaggatcgggatccggcgctgtggggctggggtgggcgggggaggctgggcccggggcctctggcgcgacacccgcatgaggacgcgagtgaaatagaccaaggtggaatttccaagggaaaagcttcggggtggttttggtccatttctccagcgaagaagtagacatggcgagcgactccccggctcgaagcctggatgaaatagatctctcggctctgagggaccccgcagggatctttgaattggtggaacttgttggaaatggaacatacgggcaagtttataagggtcgtcatgtcaaaacgggccagcttgcagccatcaaggttatggatgtcacaggggatgaagaggaagaaatcaaacaagaaattaacatgttgaagaaatattctcatcaccggaatattgctacatactatggtgcttttatcaaaaagaacccaccaggcatggatgaccaactttggttggtgatggagttttgtggtgctggctctgtcaccgacctgatcaagaacacaaaaggtaacacgttgaaagaggagtggattgcatacatctgcagggaaatcttacgggggctgagtcacctgcaccagcataaagtgattcatcgagatattaaagggcaaaatgtcttgctgactgaaaatgcagaagttaaactagtggactttggagtcagtgctcagcttgatcgaacagtgggcaggaggaatactttcattggaactccctactggatggcaccagaagttattgcctgtgatgaaaacccagatgccacatatgatttcaagagtgacttgtggtctttgggtatcaccgccattgaaatggcagaaggtgctccccctctctgtgacatgcaccccatgagagctctcttcctcatcccccggaacccagcgcctcggctgaagtctaagaagtggtcaaaaaaattccagtcatttattgagagctgcttggtaaagaatcacagccagcgaccagcaacagaacaattgatgaagcatccatttatacgagaccaacctaatgagcgacaggtccgcattcaactcaaggaccatattgatagaacaaagaagaagcgaggagaaaaagatgagacagagtatgagtacagtggaagtgaggaagaagaggaggagaatgactcaggagagcccagctccatcctgaatctgccaggggagtcgacgctgcggagggactttctgaggctgcagctggccaacaaggagcgttctgaggccctacggaggcagcagctggagcagcagcagcgggagaatgaggagcacaagcggcagctgctggccgagcgtcagaagcgcatcgaggagcagaaagagcagaggcggcggctggaggagcaacaaaggcgagagaaggagctgcggaagcagcaggagagggagcagcgccggcactatgaggagcagatgcgccgggaggaggagaggaggcgtgcggagcatgaacaggaatataagcgcaaacaattggaagaacagagacaagcagaaagactgcagaggcagctaaagcaagaaagagactacttagtttcccttcagcatcagcggcaggagcagaggcctgtggagaagaagccactgtaccattacaaagaaggaatgagtcctagtgagaagccagcatgggccaaggagatcccacatctggtagctgtaaaatcccagggacctgccttgaccgcctcccagtcagtgcacgagcagcccacaaagggcctctctgggtttcaggaggctctgaacgtgacctcccaccgcgtggagatgccacgccagaactcagatcccacctcggaaaatcctcctctccccactcgcattgaaaagtttgaccgaagctcttggttacgacaggaagaagacattccaccaaaggtgcctcaaagaacaacttctatatccccagcattagccagaaagaattctcctgggaatggtagtgctctgggacccagactaggatctcaacccatcagagcaagcaaccctgatctccggagaactgagcccatcttggagagccccttgcagaggaccagcagtggcagttcctccagctccagcacccctagctcccagcccagctcccaaggaggctcccagcctggatcacaagcaggatccagtgaacgcaccagagttcgagccaacagtaagtcagaaggatcacctgtgctcccccatgagcctgcgaaggtgaaaccagaagaatccagggacattacccggcccagtcgaccagctagctacaaaaaagctatagatgaggatctgacggcattagccaaagaactaagagaactccggattgaagaaacaaaccgcccaatgaagaaggtgactgattactcctcctccagtgaggagtcagaaagtagcgaggaagaggaggaagatggagagagcgagacccatgatgggacagtggctgtcagcgacatacccagactgataccaacaggagctccaggcagcaacgagcagtacaatgtgggaatggtggggacgcatgggctggagacctctcatgcggacagtttcagcggcagtatttcaagagaaggaaccttgatgattagagagacgtctggagagaagaagcgatctggccacagtgacagcaatggctttgctggccacatcaacctccctgacctggtgcagcagagccattctccagctggaaccccgactgagggactggggcgcgtctcaacccattcccaggagatggactctgggactgaatatggcatggggagcagcaccaaagcctccttcaccccctttgtggaccccagagtataccagacgtctcccactgatgaagatgaagaggatgaggaatcatcagccgcagctctgtttactagcgaacttcttaggcaagaacaggccaaactcaatgaagcaagaaagatttcggtggtaaatgtaaacccaaccaacattcggcctcatagcgacacaccagaaatcagaaaatacaagaaacgattcaactcagaaatactttgtgcagctctgtggggtgtaaaccttctggtggggactgaaaatggcctgatgcttttggaccgaagtgggcaaggcaaagtctataatctgatcaaccggaggcgatttcagcagatggatgtgctagagggactgaatgtccttgtgacaatttcaggaaagaagaataagctacgagtttactatctttcatggttaagaaacagaatactacataatgacccagaagtagaaaagaaacaaggctggatcactgttggggacttggaaggctgtatacattataaagttgttaaatatgaaaggatcaaatttttggtgattgccttaaagaatgctgtggaaatatatgcttgggctcctaaaccgtatcataaattcatggcatttaagtcttttgcagatctccagcacaagcctctgctagttgatctcacggtagaagaaggtcaaagattaaaggttatttttggttcacacactggtttccatgtaattgatgttgattcaggaaactcttatgatatctacataccatctcatattcagggcaatatcactcctcatgctattgtcatcttgcctaaaacagatggaatggaaatgcttgtttgctatgaggatgagggggtgtatgtaaacacctatggccggataactaaggatgtggtgctccaatggggagaaatgcccacgtctgtggcctacattcattccaatcagataatgggctggggcgagaaagctattgagatccggtcagtggaaacaggacatttggatggagtatttatgcataagcgagctcaaaggttaaagtttctatgtgaaagaaatgataaggtattttttgcatccgtgcgatctggaggaagtagccaagtgtttttcatgaccctcaacagaaattccatgatgaactggtaacagaagagcacttggcacttatcttcatggcgttatttctaatttaaaagaacataactcatgtggacttatgccagtctagaggcagaatcagaaggcttggttgaacatatcgctttccctttttcctctccctccgcccctcccagtacagtccatctttcaatgttgcagcctggttgagaaggagagaaaaaggtggcaggaatttccaggagatccccaagaatgctgccttgtctgtggacaaagatggaccatgtgcccttcggaattagggatagaaacaaatattgtgtgctcttaacgattaagctgtgttatggtgggttttcaggtttttaccttttttctttacccctttactctgcaagaatggggaaagaatgcatactgcgaaaatgagtcttttaaattctgtctgcctactagttttaagtatatggtatgttgtaaaatttccaatgatgagagacagcacaataaatgtaccttatctccttaggctgaaggccataactacatagtggagtaatttaagaactctcttg

SEQ ID NO: 5940 - DNA, 1963 bp, Homo sapiens
gtgcacagcattagtataacgtgagggctgaatgcagcccattctctggagaacttcctcacacaccgcagcaaagagaagactgaaagacaaacctgggtgcagccagagaggtccagatagatgagcttgtggcatccattccccaagttcagcctagggactccacgtaccccagctgggtctcattgttccagaactgcattagttaagattacccagacttggatttcaaaggaatactttcattgttccgtctgtaacacgaagtaattggggccagctggatgtcaggatgcgtgtggttaccattgtaatcttgctctgcttttgcaaagcggctgagctgcgcaaagcaagcccaggcagtgtgagaagccgagtgaatcatggccgggcgggtggaggccggagaggctccaacccggtcaaacgctacgcaccaggcctcccgtgtgacgtgtacacatatctccatgagaaatacttagattgtcaagaaagaaaattagtttatgtgctgcctggttggcctcaggatttgctgcacatgctgctagcaagaaacaagatccgcacattgaagaacaacatgttttccaagtttaaaaagctgaaaagcctggatctgcagcagaatgagatctctaaaattgagagtgaggcgttctttggtttaaacaaactcaccaccctcttactgcagcacaaccagatcaaagtcttgacggaggaagtgttcatttacacacctctcttgagctacctgcgtctttatgacaacccctggcactgtacttgtgagatagaaacgcttatttcaatgttgcagattcccaggaaccggaatttggggaactacgccaagtgtgaaagtccacaagaacaaaaaaataaaaaactgcggcagataaaatctgaacagttgtgtaatgaagaagaaaaggaacaattggacccgaaaccccaagtgtcagggagacccccagtcatcaagcctgaggtggactcaactttttgccacaattatgtgtttcccatacaaacactggactgcaaaaggaaagagttgaaaaaagtgccaaacaacatccctccagatattgttaaacttgacttgtcatacaataaaatcaaccaacttcgacccaaggaatttgaagatgttcatgagctgaagaaattaaacctcagcagcaatggcattgaattcatcgatcctgccgcttttttagggctcacacatttagaagaattagatttatcaaacaacagtctgcaaaactttgactatggcgtattagaagacttgtattttttgaaactcttgtggctcagagataacccttggagatgtgactacaacattcactacctctactactggttaaagcaccactacaatgtccattttaatggcctggaatgcaaaacgcctgaagaatacaaaggatggtctgtgggaaaatatattagaagttactatgaagaatgccccaaagacaagttaccagcatatcctgagtcatttgaccaagacacagaagatgatgaatgggaaaaaaaacatagagatcacaccgcaaagaagcaaagcgtaataattactatagtaggataaggtagaaattgttctgattgtaattagttttgtattttctatactggtgttagaaaacatatgtttacatttgattaactgtgttgcctatttatgcagggtaatccagctaaaggaagctttctttaattataagtattattgtgactattatagtaatcaagagaatgctatcatcctgcttgcctgtccatttgtggaacagcatctggtgatatgcaattccacactggtaacctgcagcagttgggtcctaatgatggcattagactttcataatgtcctgtataaatgtttttactgcttttagaaaataaagaaaaaaaacttggttcatgttta

SEQ ID NO: 5941 - DNA, 7576 bp, Homo sapiens
gggggccactgggaattcagtgaagagggcaccctataccatggcagtgcccggcgacgctgcacgagtcagggacaagcccgtccacagtggggtgagtcaagcccccacggcgggccgggactgccaccatcgtgcggaccccgcatcgccgcgggactcgggctgccgtggctgctggggagacctggtgctgcagccgctccggagctctcggaaactttcctccgcgctgtgcgcgggctccctgtcctttctgctggcgctgctggtgaggctggtccgcggggaggtcggctgtgacctggagcagtgtaaggaggcggcggcggcggaggaggaggaagcagccccgggagcagaagggggcgtcttcccggggcctcggggaggtgctcccgggggcggtgcgcggctcagcccctggctgcagccctcggcgctgctcttcagtctcctgtgtgccttcttctggatgggcttgtacctcctgcgcgccggggtgcgcctgcctctggctgtcgcgctgctggccgcctgctgcgggggggaagcgctcgtccagattgggctgggcgtcggggaggatcacttactctcactccccgccgcgggggtggtgctcagctgcttggccgccgcgacatggctggtgctgaggctgaggctgggcgtcctcatgatcgccttgactagcgcggtcaggaccgtgtccctcatttccttagagaggttcaaggtcgcctggagaccttacctggcgtacctggccggcgtgctggggatcctcttggccaggtacgtggaacaaatcttgccgcagtccgcggaggcggctccaagggagcatttggggtcccagctgattgctgggaccaaggaagatatcccggtgtttaagaggaggaggcggtccagctccgtcgtgtccgccgagatgtccggctgcagcagcaagtcccatcggaggacctccctgccctgtataccgagggaacagctcatggggcattcagaatgggaccacaaacgagggccaagaggatcacagtcttcaggaaccagtattactgtggacatcgccgtcatgggcgaggcccacggcctcattaccgacctcctggcagacccttctcttccaccaaacgtgtgcacatccttgagagccgtgagcaacttgctcagcacacagctcaccttccaggccattcacaagcccagagtgaatcccgtcacttcgctcagtgaaaactatacctgttctgactctgaagagagctctgaaaaagacaagcttgctattccaaagcgcctgagaaggagtttgcctcctggcttgttgagacgagtttcttccacttggaccaccaccacctcggccacaggtctacccaccttggagcctgcaccagtacggagagaccgcagcaccagcatcaaactgcaggaagcaccttcatccagtcctgattcttggaataatccagtgatgatgaccctcaccaaaagcagatcctttacttcatcctatgctatttctgcagctaaccatgtaaaggctaaaaagcaaagtcgaccaggtgccctcgctaaaatttcacctctttcatcgccctgctcctcacctctccaagggactcctgccagcagcctggtcagcaaaatttctgcagtgcagtttccagaatctgctgacacaactgccaaacaaagcctaggttctcacagggccttaacttacactcagagtgccccagacctatcccctcaaatcctgactccacctgttatatgtagcagctgtggcagaccatattcccaagggaatcctgctgatgagcccctggagagaagtggggtagccactcggacaccaagtagaacagatgacactgctcaagttacctctgattatgaaaccaataacaacagtgacagcagtgacattgtacagaatgaagatgaaacagagtgcctgagagagcctctgaggaaagcatcggcttgcagcacctatgctcctgagaccatgatgtttctggacaaaccaattcttgctcccgaacctcttgtcatggataacctggactcaattatggagcagctaaatacttggaattttccaatttttgatttagtggaaaatataggaagaaaatgtggccgtattcttagtcaggtatcttacagactttttgaagacatgggcctctttgaagcttttaaaattccaattagggaatttatgaattattttcatgctttggagattggatatagggatattccttatcataacagaatccatgccactgatgttttacatgctgtttggtatcttactacacagcctattccaggcctctcaactgtgattaatgatcatggttcaaccagtgattcagattctgacagtggatttacacatggacatatgggatatgtattctcaaaaacgtataatgtgacagatgataaatacggatgtctgtctgggaatatccctgccttggagttgatggcgctgtatgtggctgcagccatgcacgattatgatcatccaggaaggactaatgctttcctggttgcaactagtgctcctcaggcggtgctatataacgatcgttcagttttggagaatcatcacgcagctgctgcatggaatcttttcatgtcccggccagagtataacttcttaattaaccttgaccatgtggaatttaagcatttccgtttccttgtcattgaagcaattttggccactgacctgaagaaacactttgacttcgtagccaaatttaatggcaaggtaaatgatgatgttggaatagattggaccaatgaaaatgatcgtctactggtttgtcaaatgtgtataaagttggctgatatcaatggtccagctaaatgtaaagaactccatcttcagtggacagatggtattgtcaatgaattttatgaacagggtgatgaagaggccagccttggattacccataagccccttcatggatcgttctgctcctcagctggccaaccttcaggaatccttcatctctcacattgtggggcctctgtgcaactcctatgattcagcaggactaatgcctggaaaatgggtggaagacagcgatgagtcaggagatactgatgacccagaagaagaggaggaagaagcaccagcaccaaatgaagaggaaacctgtgaaaataatgaatctccaaaaaagaagactttcaaaaggagaaaaatctactgccaaataactcagcacctcttacagaaccacaagatgtggaagaaagtcattgaagaggagcaacggttggcaggcatagaaaatcaatccctggaccagacccctcagtcgcactcttcagaacagatccaggctatcaaggaagaagaagaagagaaagggaaaccaagaggcgaggagataccaacccaaaagccagaccagtgacaatggatagaatgggctgtgtttccaaacagattgacttgtcaaagactctcttcaagccagcacaacatttagacacaacactgtagaaatttgagatgggcaaatggctattgcattttgggattcttcgcattttgtgtgtatatttttacagtgaggtacattgttaaaaactttttgctcaaagaagctttcacattgcaacaccagcttctaaggattttttaaggagggaatatatatgtgtgtgtgtatataagctcccacatagatacatgtaaaacatattcacacccatgcacgcacacacatacacactgaaggccacgattgctggctccacaatttagtaacatttatattaagatatatatatagtggtcactgtgatataataaatcataaaggaaaccaaatcacaaaggagatggtgtggcttagcaaggaaacagtgcaggaaatgtaggttaccaactaagcagcttttgctcttagtactgagggatgaaagttccagagcattatttgaattctgatacatcctgccaacactgtgtgtgtgtgtgtgtgtgtgtgtgtgtgtgtgtgtgtgtgtgaaagagagacagaagggaatggtttgagagggtgcttgtgtgcatgtgtgtgcatatgtaaagagatttttgtggtttaagtaactcagaatagctgtagcaaatgactgaatacatgtgaacaaacagaaggaagttcactctggagtgtctttgggaggcagccattccaaatgccctcctccatttagcttcaataaagggccttttgctgatggagggcactcaagggctgggtgagagggccacgtgtttggtattacattactgctatgcaccacttgaaggagctctatcaccagcctcaaacccgaaagactgaggcattttccagtctacttgcctaatgaatgtataggaactgtctatgagtatggatgtcactcaactaagatcaaatcaccatttaaggggatggcattctttatacctaaacacctaagagctgaagtcaggtcttttaatcaggttagaattctaaatgatgccagagaaggcttgggaaattgtacttcagcgtgatagcctgtgtcttcttaatttgctgcaaaatatgtggtagagaaagaaaaggaaacagaaaaatcactctgggttatatagcaagagatgaaggagaatatttcaacacagggtttttgtgttgacataggaaaagcctgattcttggcaactgttgtagtttgtctttcaggggtgaaggtcccactgacaacccctgttgtggtgttccacacgctgtttgttggggtagcttccatcggcagtctggcccattgtcagtcatgcttcttctggccggggagattatagagagattgtttgaagattgggttattattgaaagtctttttttttgtttgttttgttttggtttgtttgtttatctacacttgtttatgctgtgagccaaacctctatttaaaaagttgatactcactttcaatattttatttcatattattatatatgtcatgatagttatcttgatgtaaatatgaagatttttttgtttctgtagatagtaaactctttttttaaaaaaggaaaagggaaacatttttataaagttatattttaatcaccatttttatacattgtagttctctccaagcccagtaagagaatgatgattcatttgcatggaggtcgatggacaaccaatcatctaccttttctaatttaaatgataatctgatatagttttattgccagttaaatgaggatgctgcaaagcatgttttttcactagtaacttttgctaactgaatgaattctgggtccatatctcccagatgaaaaactgttaaccaataccatattttatagttggtgtccatttctttccaacactgtttgttatgattcttccttgagtacttatatacagacctgctcattatctaaacaatcttaccttctaagtaaaccttgattgtgatttccagtttttattttctctgacgtagtagaaaggaatgtttacattaaaaatacttttgtttctcataaatggatattgtactcccccctttcaaagcattattttacaataattcatggcattttaaaaaataaggcaaagataatacgacaaaaaatatacatggtttcaaggcaaattctccaataagttggaaaatgtaaaaaggatcaagtggatgcagcctctacctaaataattaaaatatatttcagtatatttctgaattaacaccaggtcttcattatttagaacttactaaattgttttcattttcttagttttacctgtgtatctccatgtttgcaaaaattactataagtcaaattttgccagtgaatttaactatttttctttccttgcaattaaggggaaaaaagcatttatcttatcttctcataccccttgcatctaagtacttagcaaagtcaatattttcccattttccaaatgcgtccatctctaacataaatattaattgaacatagagctatgtttggagtgagtggactggcaggacagttggaagtccatcacagtctattgacagtttcatcaaagctgtatagtccaactagtggggcagcttggctactatggtggaagtctcagcaaactgcctggttttgtttgtttgttttgttttaaggtacaggaaataagaggaataatagtggccaaagcaattagaacatcttcattccagaactgtgttcagcaatccaggcagattgatacatttttctttaaaaataaattgctattacagctagacgtcaattgggataaataaagggatgaagatccactaagtttgtgactttcatacacacccagtacatctcaaaggatgctaagggacattttctgccagtagagttctccccctttttggtgacagcaatattattatgttcacatctaactccagagcttacttcctgtggtgccaatgtatttgttgcaatttactacatttttatatgagcctatttataggtgccattaaactcaggtctttcaaatgaaagagtttctagcccacttagggaaaaagataattgtttagaaaaccataaaatcaatggtaggaaaagttggaactggttacctggatgccatggttctctgttaaataaagtaagagaccaggtgtattctgagtgtcatcagtgttattttcagcatgctaataaatgtctttccggttatatatctatctaaattaacctttaaaatattggtttccttgataaaagcaccacttttgcttttgttagctgtaatattttttgtcatttagataagacctggtttggctctcaataaaagatgaagacagtagctctgtacagggatatatctatattagtcttcatctgatgaatgaagaaattttctcatattatgttcaagaaagtatttacttcctaaaaatagaattcccgattctgtctattttggttgaataccagaacaaatctttccgttgcaatcccagtaaaacgaaagaaaaggaatatcttacagactgttcatattagatgtatgtagactgttaatttgcaatttccccatatttcctgcctatcttacccagataactttctttgaaggtaaaagctgtgcaaaaggcatgagactcaggcctactctttgtttaaatgatggaaaaatataaattattttctaagtaataaaagtataaaaattatcattataaataaagtctaaagtttgaaattattaatttataaaagtgaactaattgtgtgattatcaaatcctgattaatgagaagtgaataatctaaaaatcatttatattctactgtgggaggtattcttggtgcttccatgtcagtatcgggctctccattgtcctcatcatttatagtacttctaaaataataatggaaacctcaataagggtcttgtcctcttctgtcatcctaaccctgattctagtttaatgcctttcctgacttatatgccatttgtaaataaacttcctttcaaactgttagaa

SEQ ID NO: 5942 - DNA, 2712 bp, Homo sapiens
ctgtgaagggtagatttgctgaaatggagaaacaaagacaagaggaacaaaggaagagaacggaggaggaacgaaaacgcagaattgagcaggatatgttagaaaagaggaaaatacagcgtgaattagcaaaaagggctgaacagattgaggacataaacaatacgggaactgaatcagcatcagaggaaggagatgattcactacttataactgtggtacctgtcaaatcatataaaacatctggaaaaatgaaaaagaattttgaggatctagaaaaagaacgtgaagagaaagaaaggatcaagtacgaggaagataaaagaataagatatgaagaacaacgaccatctctcaaggaagcaaagtgtctttcattagttatggatgatgaaatagaaagtgaagcaaaaaaagaatcactttctcccggaaaattgaaactaacttttgaagaactggagcgacaaagacaagaaaaccgaaagaagcaagctgaagaggaagcaagaaaacgtttagaagaagagaagcgtgcttttgaagaagcaaggcggcaaatggtaaatgaagatgaggaaaaccaagacacagcaaaaatttttaaagggtaccgccctggtaaactcaaactcagttttgaagaaatggaaaggcaaagaagagaagatgaaaaaaggaaagcagaagaagaagccagaaggagaatagaggaagaaaagaaggcgtttgctgaagcaaggagaaatatggtagtagatgatgactccccagagatgtataagacaatctctcaagaatttcttacaccgggaaaactggaaattaattttgaagaattattaaaacaaaaaatggaagaagaaaaacgacgaacagaggaggaacggaagcataagctagaaatggagaaacaagaatttgaacaactgagacaggaaatgggagaggaagaggaagaaaatgaaacctttggattgagcagagaatatgaagaactgatcaaattaaaaaggagtggctctattcaagctaaaaacctaaaaagcaagtttgaaaaaattggacagttgtctgaaaaagaaatacagaaaaaaatagaagaagagcgagcaagaaggagagcaattgaccttgaaattaaagagcgagaagctgaaaattttcatgaggaagatgatgttgatgttaggcctgcaagaaaaagcgaggctccatttactcacaaagtgaatatgaaagctagatttgaacaaatggctaaggcaagagaagaagaagaacaaagaagaattgaagaacaaaagttactacgcatgcagtttgaacaaagggaaattgatgcagcactacaaaagaaaagagaagaggaggaggaggaagaaggtagcatcatgaatggctccactgctgaagatgaagagcaaaccagatcaggagctccatggttcaagaagcctcttaaaaacacatcagttgtagacagtgagccagtcagatttacggttaaagtaacaggagaacccaaaccagaaattacatggtggtttgaaggagaaatactgcaggatggagaagactatcaatatattgaaaggggagaaacttactgcctttacttaccagaaactttcccagaagatggaggagagtatatgtgtaaagcagtcaacaataaaggatctgcagctagtacctgtattcttaccattgaaactgatgactactagctcccctcccctctccctggaactttctctttcactccaactttcttactacatccatcttttctgtggcggggccaaaaaaggaaaccaggagtgccactatgctgacttcttattccttttcataacagtcttcaaagcacagctcatctaaagaatgcctacttcttttccaaataagcatcagatttatcgcctattatgcagtaacagtcaataaaatgtacttatgggggggaattactcaattattctatcagaacctattataaagactgtatttcccatagacgtttacagcaactatgtttaaaaaacaaaaacaaaaaaaaaacacacaaacctaagtagaatacattattttgcatgaaggaatgtcatttctgagctttttacacctaaaattaggctgaaatagctgagataattaatttggaacctatcaatttgagtggactttttctttagtagtacaccattttggttgttgtagtttcaaagtctttctgaagcagatatattgggattggagcggggtggggaaaactgtcactcctttcagaggaaaaggggaggagcatggagaaaaacaaaaattaaaggacttaaagaatggctatacagtgttgagtgttgaggatattaaacatgttatttttcaaacgtatgtaatatatattaaatttataaagcaaatttatgttgtgatcttgcctgaacaaattatattttaatgaaaaaactttctattaatagttcacgcaagagaaaacactttcaacatagtcgaaggcttcaagatctaagtgtatcagacttagggaaaaagtggcacaaccttcgatttaaaattctagtctttaaaatgagtttgtaaataattagctattacgttctattaagttgttttatattttaattttctggaagacaattttattttacaacgtgaacccaaataaagtaacttctgtatttaaaa

SEQ ID NO: 5943 - DNA, 843 bp, Homo sapiens
gggaggtgtgttgtgcatgcctgtgtgtgtatatgtgtgtgtgtgcccctatgtgttcatgcacacatgcccttcactcgccgaggatttgactgctaaaagaaagatctactttttccccagaacaccttaacccgaagcctctctgaccatccagttggcaaagaccctcaggccatgaggactggccaaagacagtgagaggacgtgcaagggtaaattcctgagccccgcagtcttatttcctgccctgacgtccctgcataccagcccaagggttaaccgtaagctgatgcctgtatggcggccttactgatgccacgcaggaacaaagggatgaggactcgactgggatgcctgtctcacaagtcagactcgtgtagtgatttcacagctattcttccagacaaacccaaccgcgctctcaagagattatcgacagaagaagctacgaggtgggcagattcctttgatgtgcttctctctcataagtatggggtggctgcattccgtgccttcttgaagacggagttcagtgaggagaacctggaattctggttggcctgtgaggagttcaagaagaccaggtcaactgcaaaactggtctctaaggcccataggatctttgaggagtttgtggatgtgcaggctccacgggaggtaaacattgacttccagacccgagaagccacgaggaagaacctgcaggagccatccctgacttgctttgaccaagcccaaggaaaagtacacagcctcatggagaaagactcttaccccaggttcctgaggtccaaaatgtacttagatctgctgtcccaaagccagaggaggctcagttag

SEQ ID NO: 5944 - DNA, 2936 bp, Homo sapiens
gagacggcggcgcgtgcagcagctccagaaagcagcgagttggcagagcagggctgcatttccagcaggagctgcgagcacagtgctggctcacaacaagatgctcaaggtgtcagccgtactgtgtgtgtgtgcagccgcttggtgcagtcagtctctcgcagctgccgcggcggtggctgcagccggggggcggtcggacggcggtaattttctggatgataaacaatggctcaccacaatctctcagtatgacaaggaagtcggacagtggaacaaattccgagacgatgattatttccgcacttggagtccaggaaaacccttcgatcaggctttagatccagctaaggatccatgcttaaagatgaaatgtagtcgccataaagtatgcattgctcaagattctcagactgcagtctgcattagtcaccggaggcttacacacaggatgaaagaagcaggagtagaccataggcagtggaggggtcccatattatccacctgcaagcagtgcccagtggtctatcccagccctgtttgtggttcagatggtcatacctactcttttcagtgcaaactagaatatcaggcatgtgtcttaggaaaacagatctcagtcaaatgtgaaggacattgcccatgtccttcagataagcccaccagtacaagcagaaatgttaagagagcatgcagtgacctggagttcagggaagtggcaaacagattgcgggactggttcaaggcccttcatgaaagtggaagtcaaaacaagaagacaaaaacattgctgaggcctgagagaagcagattcgataccagcatcttgccaatttgcaaggactcacttggctggatgtttaacagacttgatacaaactatgacctgctattggaccagtcagagctcagaagcatttaccttgataagaatgaacagtgtaccaaggcattcttcaattcttgtgacacatacaaggacagtttaatatctaataatgagtggtgctactgcttccagagacagcaagacccaccttgccagactgagctcagcaatattcagaagcggcaaggggtaaagaagctcctaggacagtatatccccctgtgtgatgaagatggttactacaagccaacacaatgtcatggcagtgttggacagtgctggtgtgttgacagatatggaaatgaagtcatgggatccagaataaatggtgttgcagattgtgctatagattttgagatctccggagattttgctagtggcgattttcatgaatggactgatgatgaggatgatgaagacgatattatgaatgatgaagatgaaattgaagatgatgatgaagatgaaggggatgatgatgatggtggtgatgaccatgatgtatacatttgattgatgacagttgaaatcaataaattctacatttctaatatttacaaaaatgatagcctatttaaaattatcttcttccccaataacaaaatgattctaaacctcacatatattttgtataattatttgaaaaattgcagctaaagttatagaactttatgtttaaataagaatcatttgctttgagtttttatattccttacacaaaaagaaaatacatatgcagtctagtcagacaaaataaagttttgaagtgctactataataagtttttcacgagaacaaactttgtaaatcttccataagcaaaatgacagctagtgcttgggatcgtacatgttaattttctgaaagataattctaagtgaaatttaaaataaataaatttttaatgacctgggtcttaaggatttaggaaaaatatgcatgctttaattgcatttccaaagtagcatcttgctagacctagttgagtcaggataacagagagataccacatggcaagaaaaacaaagtgacaattgtagagtcctcaattgtgtttacattaatagtggtgtttttacctatgaaattattctggatctaataggacattttacaaaatggcaagtatggaaaaccatggattctgaaagttaaaaatttagttgttctccccaatgtgtattttaatttggatggcagtctcatgcagattttttaaaagattctttaataacatgatttgtttgcctttctagatttctttatctttctgaccagcaacttagggagcagaatttaaattaggaagacaaagggaaagattcatttaaaccatatttttacaaagtttgtcatttgccccaaggtcaaattttaaattcttaattttcattttatttcccattttaggtaaaagtttgcatttaatcttagaattatgttatttttgttagtagtgtggaaacttagagaacttattgtatggtgccttgcaaaaatagagatagaaagattttagcatgcataccaatatagtatattacgcaatatataagcacacctaattaacagattaatatcagtaaaggtattgctgctggaatgaagaaaatgggatacgtttgtttctttttttctattgttacataattgccatgtggacttgtttatgattattgtgtagagtagcatttaagatttaactgtagcaaaaattactttaaccgctgtatttaagttagcatgttaattaattgtgtagacattttggcacaccatcacttttaactatatcataccaatggttttgtgcccataataaaaatggaaaaacctgttgaatgttacgtattggtatctttaatttcaacagtgggtaaactggtttcccagtatacaattcattgaaagcaaaattgattaattatttccatttaatttatacacactcaatacaaaatttaatgttgactttacgtaataaagtataatgcattttcttttttactgtttatgtatagtttacaaaataaagaatcttgtaacc

SEQ ID NO: 5945 - DNA, 81921 bp, Homo sapiens
attagaggctcaccgattcatgtcggagatggtcagaaaaaccaactctccataggacgtcgtttcagaagcaaccttgggcttagtcccaccctttttaggcactcttgagaaatcagagtgcctagaaagatgacaactcaagcaccgacgtttacgcagccgttacaaagcgttgtggtactggagggtagtaccgcaacctttgaggctcacattagtggttttccagttcctgaggtgagctggtttagggatggccaggtgatttccacttccactctgcccggcgtgcagatctcctttagcgatggccgcgctaaactgacgatccccgccgtgactaaagccaacagtggacgatattccctgaaagccaccaatggatctggacaagcgactagtactgctgagcttctcgtgaaagctgagacagcaccacccaacttcgttcaacgactgcagagcatgaccgtgagacaaggaagccaagtgagactccaagtgagagtgactggaatccctacacctgtggtgaagttctaccgggatggagccgaaatccagagctcccttgatttccaaatttcacaagaaggcgacctctacagcttactgattgcagaagcataccctgaggactcagggacctattcagtaaatgccaccaatagcgttggaagagctacttcgactgctgaattactggttcaaggtgaagaagaagtacctgctaaaaagacaaagacaattgtttcgactgctcagatctcagaatcaagacaaacccgaattgaaaagaagattgaagcccactttgatgccagatcaattgcaacagttgagatggtcatagatggtgccgctgggcaacagctgccacataaaacacctcccaggattcctccgaagccaaagtcaagatccccaacaccaccgtctattgctgccaaagcacagctggctcggcagcagtccccatcgcccataagacactccccttccccggtcagacacgtgcgggcaccgaccccatctccggtcaggtccgtgtctccagcagcaagaatctccacatcccccatcaggtctgttaggtctccattgctcatgcgtaagactcaggcatccaccgtggccacaggtcctgaagtgcctcccccttggaagcaagagggctacgtggcctcctcatctgaggctgagatgagagagacaacgctgacaacctctactcagatcaggacagaagagagatgggaagggagatacggtgtccaggagcaagtgaccatcagtggtgctgcgggtgctgccgccagtgtgtcggccagtgctagctacgcagcagaggctgttgccactggtgctaaagaggtgaaacaagatgctgacaaaagtgcagctgttgcgactgttgttgctgccgttgatatggccagagtgagagaaccagtgatcagcgctgtagagcagactgctcagaggacaaccacgactgctgtgcacatccaacctgctcaagaacaggtaagaaaggaagcggagaagactgctgtaactaaggtagtagtggccgccgataaagccaaggaacaagaattaaaatcaagaaccaaagaagtaattaccacaaagcaagagcagatgcacgtaactcatgagcagataagaaaagaaactgaaaaaacatttgtaccaaaggtagtaatttccgcagctaaagccaaagaacaagaaactagaatttctgaagaaattactaagaaacagaaacaagtaactcaagaagcaataatgaaggaaactaggaaaacagttgtacctaaagtcatagttgccacacccaaagtcaaagaacaagatttagtatcaagaggtagagaaggcattactaccaaaagagaacaagtgcaaataactcaggagaagatgagaaaggaagccgagaaaactgccttgtctacaatagcagttgctactgctaaagccaaagaacaagaaacaatactgagaactagagaaactatggctactagacaagaacaaatccaagttacccatggaaaggtggacgttggaaaaaaggctgaagctgtagcaacagttgttgctgcagtagaccaggcccgagtcagagagcccagagagcctgggcatcttgaagaatcctatgctcagcagaccactttggagtacggatataaggaacgcatttccgccgcaaaggtagctgagcctccccaacgtccagcctcagaaccccacgttgtccctaaagcagtcaagcctagagtaatccaggctccttctgagactcatatcaaaactactgatcaaaagggaatgcacatatcatcacagatcaagaaaactacagatctaacaacggaaagattagtccatgtggataaacgcccccgcacagctagccctcactttactgtttcaaaaatttctgttcctaagacagaacatggatatgaggcatcaatagccggtagtgctattgccacattacaaaaagagttgtcagccacatcttctgctcagaagatcaccaaatcggtgaaggctcctactgtgaagcccagtgagactagagtaagggcagagcccacacccttgccacagttccccttcgctgacacaccagatacttacaagagtgaagctggcgttgaggtgaaaaaggaagtaggggtgagcatcactggcaccaccgtccgtgaagagcgctttgaagtactgcacggacgcgaagccaaggtaacagaaacagcaagagtaccagcacctgttgaaattcctgttactccaccaactttggtctcgggcttaaaaaatgtgactgtcatagaaggtgaatctgtcaccttggagtgccacatctctggatacccatccccgacagtgacatggtacagggaagactaccaaatcgaaagttccattgacttccagataaccttccagagtggaattgctcgtcttatgattcgcgaagcatttgcggaagacagcgggcgatttacttgcagtgctgtaaatgaggctggaaccgtcagcacatcctgctatctggctgtgcaggtgtcagaagaatttgaaaaggaaaccacagccgtgactgagaaatttactacagaagagaaacgctttgttgagtcaagagatgtggttatgactgatactagcctcacagaggaacaagcagggcctggagaacctgccgcgccttactttattacaaaaccagtggtccagaaactggtggaaggtgggagcgtggtgtttggatgccaagttggcggcaacccaaagccccatgtatactggaaaaaatctggtgttcctctaaccactggatacagatacaaagtgagttacaacaaacaaaccggtgaatgcaagctggtgatttctatgacttttgctgatgatgctggagaatacactattgttgttcgcaataagcatggagaaacttctgcatctgcttccttgcttgaagaagctgattatgagttactgatgaagtcccagcaagaaatgctttatcagacacaagtgactgcatttgttcaagaacctaaagttggagaaacagcacctggatttgtatactctgagtatgaaaaagagtatgaaaaagaacaagccttaattaggaagaaaatggccaaagatactgtagtggtcagaacttatgtagaagatcaggaattccatatttcttcctttgaagagagacttattaaagaaattgaatatagaataataaagactacattagaagaacttcttgaagaagatggagaagaaaagatggcagttgacatttctgaatctgaagctgttgaatcaggatttgattcaagaatcaagaattatagaattcttgaggggatgggtgtcacttttcattgcaagatgtctggatatccattaccaaagattgcttggtacaaagatggcaagcgcatcaaacatggagaaagataccaaatggactttctacaagatggcagagctagtctgcgtatacctgttgttcttccagaagatgaaggaatctacactgcatttgccagcaatattaaaggaaatgcaatttgctcagggaaattgtatgtggagcctgctgcaccacttggagctccgacttacattcccacactagagccagtgagcagaatcagatctctctctccacgttcagtgagcaggtctcctatacgcatgtctcctgcacggatgtcacctgcaaggatgtctcctgcacggatgtcccctgcaagaatgtcccctggacgtaggctggaggagacagatgagtcacaacttgagagactatataaaccagtctttgtgttaaaacctgtttctttcaaatgtttagaagggcaaactgccagatttgacttaaaggttgttggtagacctatgccagagacgttctggtttcatgatggccagcaaattgtcaatgactatacccataaagtagtcattaaagaagatggtactcaatcactaattattgtccctgccacacccagtgattctggggaatggactgtggttgcccaaaacagggcaggcagatcttcaatttcagtgattttaactgtggaagctgtggaacatcaggtaaaaccgatgtttgtagaaaaactgaaaaatgtcaatataaaggaaggttcccgacttgaaatgaaagtcagagctacgggtaaccccaaccctgacattgtatggttgaaaaacagtgacatcattgtgcctcataaatatcccaaaatcagaattgaaggaaccaagggagaagctgcccttaaaatcgattccactgtcagccaagattctgcctggtatactgcgactgctattaataaagctggcagagacactacaagatgcaaagtaaatgttgaagttgagtttgcagagcctgagccagagagaaagttaatcatcccacgggggacatatagagcaaaggagattgcagccccagaactggagcccctccatttgcgatatggccaagagcaatgggaagaaggtgatctctatgacaaagagaaacaacagaaaccatttttcaagaaaaaactcacttccttaagacttaagcgctttgggcctgcccactttgaatgcaggctaacacccattggtgacccaacgatggtggtggagtggctccatgatggaaagccacttgaagcagccaacaggctccgtatgatcaatgaatttgggtactgcagccttgattatggcgttgcatattctagagacagtggtatcattacttgcagagccactaacaaatatggaacagatcacacatctgctacccttattgttaaagatgagaaaagtcttgtggaagaatcccaattgcctgaggggaggaaaggcttacagagaattgaagaattagagagaatggctcatgaaggtgcacttacaggtgtaacaacagatcagaaagaaaagcaaaagccagacattgtcttgtacccagagccagttagagtacttgaaggggagactgcaaggttccgctgcagggtaacaggctaccctcagcccaaagtcaactggtacctcaatggacagctcatccgcaaaagcaaaaggttcagagttcgctatgatggtatccattacctggacatcgtggactgcaaatcatatgacacaggtgaagtgaaggtcaccgcggaaaatcctgaaggtgtgatagagcataaagtgaagcttgagattcaacagagggaagattttaggtctgtccttaggagagctcctgaaccaaggcctgagtttcacgtacatgaaccaggaaagcttcagtttgaagtacaaaaagtggatagacctgttgacaccactgaaaccaaagaagttgtgaagttgaaaagggctgaaagaattacccatgaaaaagtgcctgaagagtcggaagagctgcgcagtaaattcaagcgcagaacagaagagggctattatgaagccattaccgctgtggagctcaagtctcgaaagaaggatgaatcctatgaggaactcctcaggaagacaaaagatgaacttctccactggaccaaagagttaactgaagaggaaaagaaagctcttgccgaagaaggcaaaatcacgattccaacttttaaacctgacaagattgaactaagtcctagtatggaggctccaaaaatcttcgaaagaatccagagccaaacagtgggccaaggatctgatgcacacttccgggtcagagtcgtggggaaaccagaccccgaatgtgaatggtacaaaaatggtgtcaaaattgaacggtctgaccggatctactggtactggcccgaagacaatgtttgtgaattggtcataagagatgtgactgctgaggactctgccagcatcatggtaaaagccatcaacatagctggagaaacctccagtcacgcattcttacttgtccaagccaagcaattgatcactttcacacaggaattacaagatgttgttgctaaggaaaaagacactatggcaacctttgaatgtgaaacttcagaaccatttgtcaaagtgaaatggtataaagatggtatggaggttcatgagggagataaatacaggatgcactctgacagaaaggttcacttcctctccatactgaccattgatacgtctgatgctgaagattacagctgtgtacttgtggaagatgaaaatgtcaaaacgactgctaaacttattgttgaaggtgcagttgttgagtttgtgaaagaacttcaggacatagaagttccagaatcatattcaggagaattagagtgcattgtatccccagaaaatatagaaggaaaatggtatcataatgatgtggagcttaaatccaatggcaaatatacaattacatctcgtcgtggacgtcagaacctcacggtcaaggatgtaaccaaggaggaccagggagaatacagctttgtcatcgacgggaaaaagacaacctgtaaattaaagatgaaaccccgccccattgctatcctacaaggacttagtgaccaaaaagtctgtgagggtgacattgttcagcttgaagttaaagtctccttggaaagtgtggaaggcgtctggatgaaagacggccaagaagtgcagcccagtgacagggttcacattgtgatagacaaacaatctcatatgctgctcattgaagacatgactaaggaagatgctggaaattactctttcaccattccagcccttggcctctccaccagtgggcgtgtctctgtctatagtgtggacgtgataacacctctaaaagatgttaatgtgattgaaggcaccaaggctgtgcttgaatgtaaggtgtcagtccctgatgtgacttctgttaagtggtacttaaatgatgaacaaatcaagcctgatgaccgtgtacaggccattgtgaaaggtactaaacagcgactagtcattaaccgaactcatgcttcagacgaaggaccttacaagctgatagttggcagagttgaaaccaactgtaatctctctgtagaaaaaattaaaattatcagaggtcttcgtgaccttacctgtacagaaactcaaaatgtggtgtttgaggttgagctgtcccactctggaattgatgtcctgtggaattttaaggacaaggaaatcaagcccagttctaaatataaaattgaagcacatggaaaaatatataaattgacagttctaaatatgatgaaagatgatgaaggaaaatacacattttacgcgggagaaaatatgacatctggaaaacttactgtggcaggtggggccatctccaagccactcacagatcagaccgtagctgaatcccaggaagctgtgtttgaatgtgaagttgccaacccagattccaaaggcgaatggttgagggatggcaaacacctaccactgactaacaacatcagaagtgagtctgatggccacaaaaggagacttatcattgctgccaccaaattagatgacattggagaatatacctacaaggtggccacctccaaaacatctgccaaactcaaagttgaagctgtcaaaattaagaagactctgaagaacctcacagtgacagaaacacaggatgctgttttcactgtcgagcttacacaccctaatgtcaaaggtgtccagtggatcaaaaatggagttgtgctggaatccaatgaaaagtatgctatctctgtcaaaggaacaatttactctctgaggattaaaaactgtgccatcgtggatgagtctgtttatggcttcaggcttggaaggcttggagccagtgccagactgcacgtggagactgtcaagatcattaaaaagccaaaggatgtgacagccttggaaaatgccactgttgcctttgaagttagtgtttcccatgacactgttccagtaaaatggttccataagagtgtggaaattaagccaagtgacaaacacagactggtctcagaaaggaaagtccacaagctgatgctgcagaacatctccccctcagatgctggggaatacacagctgtggtcgggcaattggaatgcaaagcaaaactgtttgtggagacattacatattacaaaaaccatgaaaaatatcgaggtgcctgagaccaaaactgcctcttttgagtgtgaggtgtcccacttcaatgtcccttccatgtggctgaagaatggtgtggaaattgagatgagtgaaaagttcaagatagttgtgcagggaaaactccatcagctgatcatcatgaacaccagcacagaggactcggcagaatacacatttgtctgtggcaatgaccaagtcagtgccaccctgacagtcaccccaatcatgattacttccatgctgaaagacatcaacgctgaagaaaaagacactattacttttgaggtgacagtgaactatgaaggcatctcttacaaatggttaaagaatggtgtggaaatcaaatcaactgacaagtgccagatgagaaccaaaaagctcacacactcactgaacatcaggaatgttcactttggggatgctgctgactacacctttgtggctggaaaagcaacatcaacagccacactttatgtggaagctcgtcatatagaatttaggaaacacattaaggacattaaggtactggagaagaagcgagccatgtttgaatgtgaagtttctgaacctgacatcactgtacagtggatgaaagatgaccaggaactgcagatcacagacagaataaagattcagaaggagaaatatgtccaccgccttctgatcccatccacccggatgtctgatgctgggaagtacacagtggtggcaggaggcaacgtgtcaactgcaaaactctttgtagaaggcagagatgttcgcatccgaagtattaaaaaggaggttcaggtcattgagaaacagcgtgctgttgttgaatttgaggtcaatgaagacgatgttgatgcccactggtataaagatggcattgaaatcaatttccaagttcaagaacgacacaaatatgtagtggaaagaagaatccaccgaatgtttatctctgagaccagacagagcgatgcaggagaatacacctttgtggcaggaaggaacaggagttctgtcactctctatgtcaatgctcctgaaccgccccaagttctgcaggagctccagcctgtcactgtgcagtctggcaagcctgcccgcttctgtgccgtgatatccggaagaccacagcccaaaatttcctggtacaaggaagagcagctgctttccactggcttcaagtgcaaatttcttcatgatgggcaagaatacacgcttttgctaattgaagccttcccagaggatgcggcagtctatacctgtgaagccaagaatgactatggtgttgccacaacatcagcttcactctcagtggaagttccagaagttgtgtctcctgatcaggaaatgcctgtttatccacctgccatcatcaccccgcttcaggacactgtcacttctgaagggcagccagcccgttttcaatgccgggtttctggaacagatctaaaagtgtcgtggtacagcaaagacaagaaaatcaagccatctcggttctttagaatgactcaatttgaagacacttatcaactggaaattgccgaagcttatccagaagatgaaggaacttacacgtttgttgctagtaatgctgtaggccaagtatcaagcacagccaacctgagtctggaagctcctgaatcaattttgcatgagaggattgaacaagagattgagatggaaatgaaagagttttctagttcttttctgtctgccgaggaagaaggacttcatagcgccgaacttcaattatctaaaataaatgaaacacttgaacttttgtctgaatctccagtttacccaactaaatttgattccgaaaaggaaggcactggcccaattttcatcaaagaagtgtcaaatgctgatataagcatgggggatgtggctacactgtctgtaactgtcattggcatccccaaacctaaaattcagtggttctttaatggagtgctattaaccccttctgctgactacaaatttgtttttgacggtgatgatcatagcctgatcattctgttcaccaaattggaggatgagggagagtatacatgtatggccagtaatgactatggaaagacaatatgtagtgcctatctaaaaattaattccaaaggagagggtcacaaagacactgaaacagaatcagcagtggcaaaatctctggaaaagctgggaggtccttgtcctcctcacttccttaaggagttaaaaccaattcgctgtgctcaagggcttcctgccatctttgagtacacagtggttggagagcctgcccctactgttacatggttcaaagaaaacaagcagctttgcaccagtgtttattacactatcattcataaccctaatggctctggaactttcattgtcaatgaccctcagagggaagacagtggcctctatatctgtaaagcagagaatatgttgggtgagtccacctgtgcagcagagctgcttgtgcttctggaagacacagacatgactgataccccctgcaaagcaaagtccacaccagaggctcctgaggattttccacagacacccttaaagggtcccgcagttgaagcacttgactcagagcaggaaattgcaacgtttgtaaaagacaccattttgaaagctgctttaattacagaagaaaaccagcaactatcttatgagcatattgctaaagccaatgaattgagcagtcagcttcctttgggagctcaggaattgcaatccattttggagcaagacaagctcactcctgaaagcaccagggaatttctttgcatcaatggcagtattcactttcagcctctcaaggaaccatctcccaacctacagctgcagattgtacagtcccagaaaaccttctccaaagaaggtattctaatgcctgaagagcctgagacacaggcagttctatcagataccgagaaaatcttcccaagtgccatgtccatagaacaaattaattcattaacagttgagcctctgaaaactttattagctgaacctgaagggaattatccacagtcttcaatagaacctccaatgcattcttatctaacctctgtggctgaggaagtactttcaccaaaagaaaagacagtatctgacaccaacagagagcaaagagtgactcttcaaaagcaagaggcacaaagtgcgctcatcttgagtcagagcttagctgagggacacgtggagagtctccagagtcctgatgtcatgatctctcaggtaaactatgagcccctagtcccttcagaacactcatgcacagaaggaggtaaaattttgatagaaagtgcaaatccactggaaaatgcagggcaagattctgcggtcagaattgaggaaggcaagtccttaagatttccactagcacttgaagaaaagcaggtactgctcaaagaagagcattctgacaacgtggtgatgcccccagaccaaatcattgagtctaaaagagagcccgtggcaataaagaaagtgcaggaggtacagggaagggaccttctttctaaggaaagcttgctttctggtattccagaagagcagagattaaacctgaaaattcaaatctgccgggctttgcaagcagccgtggccagcgagcagccaggtcttttctctgagtggctaagaaatattgaaaaggtggaggtcgaggctgtaaacatcacccaagagcccagacacatcatgtgcatgtaccttgttacttcggcaaagtctgtaacagaagaagtaaccatcattattgaagatgttgatcctcaaatggctaacctgaaaatggaacttagggatgctttgtgtgctattatatatgaggaaatagacatcctaacagctgagggtcctagaattcagcaaggagccaaaacaagtttgcaagaagaaatggattctttttcaggttcacagaaggttgaacccattactgaaccagaagttgaatctaaatatctgatctcaactgaagaggtcagttattttaacgtgcaaagtagggttaaatatttggatgccacacctgtcactaaaggggttgcttcagctgttgtctctgacgaaaaacaagatgagagtctgaaaccatcagaggaaaaagaggagtcttcctctgaaagtggtactgaggaggttgctacagtaaagatacaggaagctgagggtggcttaatcaaagaggatggccccatgatacatacacctttagtggacactgtttctgaggaaggtgatattgtacacctcacaacatccataacaaatgctaaagaggtgaattggtattttgagaataaactggtgccttcagatgaaaagttcaagtgtttacaagatcaaaatacatatacgctagtcatcgacaaagtaaataccgaagaccatcaaggagagtatgtctgtgaggccttgaatgacagcggaaaaacagcaacttcagccaaactcactgtagtaaaaagagctgccccagtgatcaagaggaaaatcgaacccctggaagtagcactgggccacctagccaaattcacctgtgagatccaaagtgctcccaatgtccggttccagtggtttaaagctggccgagaaatttatgagagtgacaagtgttctattcgatcttcaaagtatatctccagccttgaaatcctgagaacccaggtggttgactgcggcgagtatacatgcaaagcttccaatgagtatggcagtgtcagctgtacagccacactaactgtgacagtgcctggaggtgaaaagaaagttcgcaaattacttccggaacgtaaacctgaaccaaaggaagaagttgttctgaaaagcgttctaagaaaaagacctgaagaagaagaacctaaagtagaacctaaaaaactagaaaaagttaaaaaacctgcagtaccagaaccaccacctccaaaacctgttgaagaggttgaagtacctactgttacaaaaagggaaaggaagattcctgaaccaacaaaagtgcctgaaatcaagccagcaatacctctccctgcacctgaaccgaaaccaaagcccgaagcagaagtgaaaacaatcaaaccacctcctgtggaacctgaaccaacccccatcgctgccccagtaacagtgccagtggttggaaagaaagcagaagccaaagcacctaaggaagaggctgccaagccaaaaggtcctatcaaaggtgtacccaaaaagactccttcaccaatagaagccgaaaggagaaagttaaggccaggaagtggtggagagaaacctcctgatgaagccccgttcacctaccagctaaaggctgtgccactgaagtttgtgaaagaaatcaaagacatcatcttgacagaatcagagttcgttggctcttcagcaatctttgaatgtttggtctccccttccactgcaattacaacctggatgaaagacggtagcaatatccgtgagagtcccaagcacaggtttattgcagatggtaaagacagaaagctgcacatcattgatgttcaactttccgatgctggtgaatacacctgtgttttacgtttgggaaacaaagaaaagacctccacggctaaacttgttgtagaagaacttcctgtgcgttttgtaaaaacactggaagaggaagtcacagtggtcaaaggacagccattgtacttgagctgcgagttaaacaaagagcgtgacgtggtctggaggaaggatggcaagattgtggtggagaaacctggccgaattgtgccaggcgtcattggcttgatgcgggctctgaccatcaacgatgcagatgacacagatgctggaacatacacagttactgtggaaaacgccaacaacctggagtgttcatcttgcgtaaaagtagtagaagtcattagagattggctggtgaaacctatacgagaccagcatgtgaaacccaaggggacagctatttttgcctgtgatatagcaaaagatactccaaacattaagtggttcaaaggatatgatgaaatccctgcggaaccaaatgataagactgaaatactgagagatggaaatcatctgtacctcaaaattaagaatgctatgccagaagatattgctgagtatgcagtggaaattgaaggaaaaagataccctgcaaagctgacacttggagagcgtgaagttgaactgcttaaaccaatagaggacgttaccatttatgagaaagaaagtgcaagctttgatgcagaaatctcagaggcagacattcctggacaatggaaactgaaaggagaacttctaaggccctcacctacttgtgaaatcaaagcagaaggtggaaaacgcttcttaactttgcacaaagtcaaactggaccaagctggtgaagtcctctaccaggcccttaatgcaattacaactgccattttgacagtaaaagaaatcgaacttgactttgctgtgcccctgaaggatgtcactgttccagaaaggcgacaggctcgattcgaatgtgtcctcacccgagaggcaaatgttatatggtccaaaggacctgatataattaagtcatctgacaaatttgatatcatcgctgatggaaagaaacatattcttgttattaatgattctcaatttgatgatgaaggggtctatactgctgaggtggagggcaagaagacctcagctcggttgtttgtcacaggtataagactgaaattcatgtcacctcttgaagatcaaacagtaaaagaaggtgaaacagcaacttttgtttgtgaactttctcatgaaaaaatgcatgtagtctggttcaaaaatgatgccaaactccatacaagcagaacagtactcatctcttctgagggcaagactcacaaattggaaatgaaagaagtgacattggatgatatatctcagataaaagctcaagtcaaggagctgagctccacagcacagctgaaggtcttagaggccgatccctacttcactgtgaaattacatgacaaaactgcagtggagaaggatgagattactttgaagtgtgaagtgagcaaagatgtaccagtgaaatggttcaaagatggtgaagagattgtcccttcacccaaatattctatcaaggcagatggcctgcgccgcatcttaaaaatcaaaaaggcggaccttaaagataaaggcgaatatgtgtgtgactgtggcacagacaagaccaaggcaaatgttactgttgaggctcgactaataaaagtggaaaagcctctgtacggagtagaggtgtttgttggtgaaacagcccactttgaaattgaactttctgaacctgatgttcacggccagtggaagctgaaaggacagcctttgacagcttcccctgactgtgaaatcattgaggatggaaagaagcatattctgatccttcataactgtcagctgggtatgacaggagaggtttccttccaggctgctaatgccaaatctgcagccaatctgaaagtgaaagaattgcctcttatcttcatcacacctctcagtgatgttaaagtcttcgagaaagatgaggctaagtttgagtgtgaagtatccagggagcccaaaacattccgttggctaaaaggaacccaggaaatcacaggtgatgacagatttgagcttataaaggatggcactaagcattcaatggtgatcaagtcagctgcttttgaagatgaagcaaaatacatgtttgaagctgaagataagcacacaagtggcaaactgatcattgaaggaatccggctcaaattcctcacccctctcaaagatgtaactgccaaagagaaggaaagtgctgtatttactgtggagttatctcatgataacatccgagttaaatggttcaagaatgaccagcgcctacacaccaccaggtcggtctcaatgcaagacgaagggaaaactcattcgatcacattcaaagacctgtctattgatgacacctcccaaattagagtagaagctatggggatgagttcagaagctaaactcactgtgcttgagggagacccatattttacaggaaaacttcaagattatactggtgtagagaaagatgaagttattctacagtgtgaaattagcaaagcagatgcaccagtgaaatggtttaaggatgggaaggaaataaagccatccaaaaatgctgttattaaggcagatggcaagaaacgcatgctaatcctaaagaaagccttgaaatcagatattggacagtacacctgtgactgtgggacagataagacctcaggaaaacttgacattgaggatcgggaaattaaactggtgcgacccctgcacagtgtggaggtgatggagactgagacagcacgctttgaaaccgaaatctctgaagatgatatccacgccaactggaaactcaagggagaggccctactccaaacacctgattgtgaaattaaggaagaaggcaaaatacactcccttgttttgcacaactgtcgcctggaccagacgggtggggtggatttccaagctgccaatgttaaatctagtgcccacctccgagttaagccacgagtaattggtcttctgaggcctttaaaggatgtcaccgtgactgcaggggaaacagccaccttcgactgcgagctctcctacgaagatatcccagtggaatggtatctcaaagggaagaaactagagcccagcgataaggtggtcccacgttcagaaggaaaagttcatacacttactctgagggatgtaaagttagaagatgctggggaagtccaactaacagcaaaagatttcaaaactcacgccaacctctttgtgaaagaacccccagttgaattcactaagcctcttgaggaccagacggtcgaagagggagccactgcagtgctggagtgtgaagtctccagagaaaatgctaaggtgaaatggttcaaaaatgggacagaaatcctcaaaagcaagaagtatgaaattgttgctgatggcagggtcagaaaacttgttatacatgactgtaccccagaggatattaaaacatacacttgtgatgctaaggattttaagacttcctgtaacctgaatgtcgtgcctcctcatgtggaattcttaagaccactcaccgaccttcaagttagagaaaaagaaatggctcgatttgagtgtgaactttcccgagaaaatgctaaggttaagtggtttaaagatggtgctgaaattaaaaagggcaaaaaatatgacatcatatccaagggagcagtgcgcattcttgtcatcaacaaatgtctactggatgatgaagctgaatattcctgtgaagtaaggacagcgagaacttctggcatgctgacagttctggaagaagaagctgtctttaccaaaaatcttgccaacattgaagttagtgaaacagacactataaaactggtttgtgaagtctccaaacctggcgcagaagtgatttggtataaaggggatgaggagatcattgaaacaggaagatatgaaatactgactgaaggacggaagagaatcctggtcattcagaacgctcaccttgaggatgctggcaactacaactgtcgactcccaagctctcgaaccgatggcaaagtcaaagtacatgaactggctgctgaatttatctcaaagcctcaaaaccttgaaatacttgaaggagaaaaggctgaatttgtctgctctatatcaaaagaaagctttccagtccagtggaagagggatgataagacacttgaatctggagataaatatgacgttattgctgatggtaaaaagagggtcctagttgtgaaagatgccacattacaagatatgggcacttacgttgtcatggtaggggccgccagagcagcagctcacttgacagtcattgaaaaactcaggatcgtagttcctcttaaggacacccgggtgaaggaacaacaggaagttgtcttcaactgtgaagtcaatactgaaggtgccaaagccaaatggttcagaaatgaagaagctatatttgatagttcaaaatacatcattctccaaaaagacctagtctacaccctcagaattagagatgcacacttagatgaccaagccaactataatgtgtctttgaccaatcacagaggtgaaaatgttaaaagtgcagccaatctaatagtagaagaggaagaccttaggattgttgagcctcttaaagatattgaaacaatggagaagaaatctgtcacattctggtgcaaggtgaatcgtctcaatgtaacactgaagtggaccaaaaatggtgaagaagtgccttttgacaaccgtgtctcatacagagttgataagtacaagcacatgttaaccattaaagactgtggcttcccagatgaaggtgaatacattgtcactgctggacaagataaatctgttgctgagcttctcatcatagaagccccgacagaatttgtggaacacttggaagatcagacagtcactgagttcgatgacgctgtcttctcctgccagctctccagagagaaagccaatgtaaaatggtacagaaatgggagagaaatcaaagaaggcaaaaaatacaaatttgaaaaagatggaagtatacacagactcattataaaagattgcaggctggatgatgagtgtgaatatgcttgcggggtagaagacaggaagtctcgtgctagactttttgtggaagaaattcctgttgagatcatcaggcctccacaagatattcttgaagcccctggtgctgatgttgtctttttagcagaactcaataaagataaggtggaagtccaatggctaagaaataacatggttgttgtccagggtgataaacaccagatgatgagtgaaggaaagatacatcgactacagatttgtgatattaagccccgtgaccagggtgaatacagatttattgccaaagacaaagaagccagagctaagcttgaactggcagctgcaccaaaaatcaagacagctgaccaagaccttgtggttgatgttggcaagcctctgacaatggtggtgccatatgatgcctaccccaaagcagaagctgaatggtttaaagaaaatgaacctttatctacaaaaaccattgatactacggctgaacaaacttctttcagaattttagaagccaagaaaggagacaaagggaggtataaaattgtgcttcagaacaaacatggaaaagcagaaggattcatcaatttaaaagttattgatgttcctgggccagtacgtaacttagaagtgacagaaacatttgatggtgaagtgagccttgcttgggaagaacctttaactgatggtggaagcaaaatcataggttacgttgttgaaagacgtgacattaagagaaagacctgggttctggccacagaccgtgcagagagttgtgagtttactgtcactggtctacagaaaggaggagttgagtacctattccgtgtgagtgcaagaaacagagttggcactggtgagccagtagaaactgacaatcctgtagaagcaaggagtaaatatgatgttccaggccctcctttgaatgtaaccatcactgatgtgaatcgatttggtgtctcactgacatgggaaccaccagagtatgatggaggtgctgagatcacaaactacgtcattgaattaagagacaagacttctatcaggtgggatactgccatgactgtgagagctgaagacctgtctgcaactgttactgatgtggtagaaggacaggagtacagtttccgagtgagagcccaaaatcgaattggagttggaaaaccaagtgcagccacacccttcgtcaaagttgctgatccaattgagagaccaagtcctcctgtaaacctaacttcctcagatcagactcagtcatcagttcagctcaaatgggaacctcctctgaaagatggaggaagcccaatattaggctatataattgagcgatgcgaagaaggaaaagataattggattcgttgcaatatgaaacttgtccctgaactgacttacaaggttaccggattggaaaaaggaaataaatatttatatagagtatctgcagaaaataaagctggtgtttcagatccatctgaaattcttggtcctctcaccgctgacgatgcatttgttgaaccaacaatggatttaagtgcatttaaagatggtctggaagttattgtcccaaatcctatcacgatcctggttccaagtacaggctatccaaggccaactgcaacctggtgttttggagataaagtactagaaacaggggaccgggtgaaaatgaagaccttgtctgcctatgccgaacttgtcatttctccaagtgaacgttcagacaagggcatttatacactgaaattagaaaaccgtgtgaaaacaatttctggggaaattgatgtcaatgtaattgctcgcccaagtgcacccaaagaattgaaatttggtgatataaccaaggactcagtacatttgacttgggaaccacctgatgatgatggaggaagtccgttaactggatacgttgttgaaaaacgagaagtcagccggaaaacatggactaaagttatggactttgtgactgatctagaattcacagttcctgatcttgttcaaggaaaagagtacttatttaaagtttgtgctcgtaacaaatgtggccctggagaacctgcatatgttgatgaacctgtaaatatgtcaactcctgcaacggtacctgacccaccagagaatgttaaatggagagatcgaacagccaatagcatcttcttaacatgggatccacctaaaaatgatggtggttcacgcatcaaaggatatatagttgaaagatgtccacgtggttctgataaatgggttgcctgtggagaacctgttgcagaaacaaaaatggaagtgacaggtcttgaggaaggcaaatggtatgcctaccgcgtgaaggccttaaacaggcagggtgctagcaaaccaagcagacccacagaggaaatccaggctgtggacacacaagaggccccagaaatcttcctcgatgtgaagctccttgctggtctcactgtaaaagctgggaccaagattgaacttcctgccaccgtaaccggaaaacctgaacctaaaataacttggacaaaggctgatatgattctgaagcaggacaaaagaattaccattgaaaatgtccctaagaaatccacagtgactattgttgatagtaagagaagtgacactggcacatatatcattgaggctgtgaatgtgtgtggccgggccactgctgtggtggaagtgaacgtcttagataaacccggaccaccagctgcctttgacatcacagatgtaaccaatgagtcatgtcttctaacatggaacccaccacgcgatgatggtggatctaagatcacaaactatgttgtggagagacgagcaactgatagtgaagtgtggcacaagctctcatccaccgtcaaggatacaaacttcaaggccaccaaattaatccccaataaagagtacatcttcagagttgctgcagaaaacatgtatggtgttggtgaaccagttcaggcctctccaataacagccaaatatcagtttgatccacctggtcctccaactcgcctagaaccttctgatatcactaaagacgcagtgactctcacatggtgtgagccagatgatgatggtggcagcccaatcacaggatactgggttgaaagactggatcctgatacagataaatgggttagatgcaataagatgccagtaaaggacacaacatacagagtgaaaggtctcactaataagaaaaaatacagattccgtgtgttggctgaaaatcttgctggacctggaaaaccaagcaaatcaactgaaccaatcttaataaaggatcccatagatcctccatggccccctggaaaaccaactgtaaaagatgtaggcaaaacatcagtaaggttgaattggacaaaaccagaacatgatggaggtgcaaagattgagtcttatgtcattgaaatgctgaagactggaacagatgagtgggtcagagtggcggaaggggttcccaccactcagcacttgctcccagggctcatggaaggacaggaatactcattccgagttagagctgtgaataaggctggggaaagtgaacccagtgaacccagtgaccctgtgctttgccgggagaagctatatcctccatcaccaccacgctggcttgaagttattaatatcacaaaaaatacagcagacctaaaatggacagttcctgagaaagatggagggtcccccatcaccaactacattgtggaaaagagagacgtcaggcgaaaaggctggcaaacagtggataccactgtcaaggacaccaagtgcacagtcaccccactgactgagggctctttatatgtgttccgagttgctgcagaaaatgctataggacaaagcgactacaccgaaattgaggactctgtgctggccaaagacacctttaccactcctggaccaccctacgccctggcagtggttgatgtgacaaaacgacatgttgacctaaagtgggagccacctaaaaatgatggtggaagaccaatacagagatatgtcattgagaagaaagaaaggttaggtacccgttgggtgaaagctggaaagactgcaggacctgactgtaacttcagagtaactgatgtcatcgaaggaacagaggtccagtttcaggttcgggctgaaaatgaagctggagttggccacccaagtgaacccacagaaatcctatccattgaagatccaacaagtcctccctcaccaccccttgacctacatgtgactgatgctgggagaaaacacattgccattgcttggaagcctccagagaaaaatggtggaagtcctatcataggataccatgttgaaatgtgtccagtaggcactgagaaatggatgagagttaattctcgcccaataaaggacttgaaattcaaggttgaagaaggtgttgttcctgacaaagaatatgtcctgagagtgagagcagtcaatgctattggtgtcagcgagccatctgaaatctctgaaaatgtggttgccaaagacccagactgcaagccaacaattgacctggagactcatgacattattgttattgaaggtgaaaagttaagcattcctgttcccttcagagctgtcccagttccaactgttagttggcataaagatggcaaagaagttaaagcaagtgatagattaacaatgaagaatgatcacatctctgcacaccttgaagttcccaagagtgtccgtgcagatgccggaatttataccattacactggagaataagctcggctcagcaacagcctcaatcaatgtcaaagtcataggcctacctggaccatgcaaagatattaaagcaagtgacattaccaagagttcttgtaagttaacttgggaacctccagaatttgatggtggaaccccaattcttcattatgtcctggagcgcagagaagctgggaggagaacatatataccagtcatgtctggtgagaacaaactgtcatggactgtgaaggatctcataccaaatggtgaatacttcttccgtgttaaagcagtcaacaaggttggtggaggagaatatattgaactgaaaaatccagtcattgctcaagatccaaagcaaccccctgatccacctgtagatgtagaggttcataatcctacagcggaggcaatgactattacatggaagccacctttgtatgatggagggagcaagataatgggctacatcatagagaagattgctaagggtgaagaaaggtggaagagatgcaatgaacacctggtaccaatcctgacctatacagcaaaaggacttgaagaggggaaagagtaccaattccgtgtgcgagcagagaacgccgcgggtattagtgaaccttctcgggctactcctccaaccaaagctgtagatcccattgatgcccccaaagtcattctgagaacaagcctagaagtgaaacgaggtgatgaaatagcacttgatgcaagtatttctggatcaccttacccaactattacatggataaaggatgaaaatgttattgtaccagaggaaattaagaagcgtgcagcacccttggttaggagaaggaagggtgaagttcaagaagaagaaccatttgtcctgcctctgacacagcgtttgagtattgacaacagcaaaaagggagaatctcagctacgcgtccgagattctctccgacctgaccatggtctgtatatgatcaaagttgaaaatgaccacggtattgcaaaagctccttgtactgtcagtgtgttagatacaccgggaccaccaatcaactttgtatttgaagatatcagaaagacctcagtcctttgtaaatgggaaccaccccttgatgatggtggcagtgaaatcataaactacactttggaaaagaaagacaagacaaaacccgactcagaatggattgttgtcacttcaacacttagacattgcaaatattcagtaacaaaactgattgaaggaaaagagtacctcttccgtgtaagagctgaaaacagatttgggccaggtccaccatgtgtttcaaagccacttgtggctaaagatccatttggaccacctgatgcaccagataagcccattgtggaagatgttaccagcaacagtatgctagtgaaatggaatgaaccaaaagataatggaagccccattttgggttactggcttgaaaaacgtgaagttaacagtacacattggtctcgtgtcaacaaaagccttctgaatgccttgaaagccaatgtagatggcttattagaaggactcacctatgtcttcagagtatgtgctgaaaatgcagctggacctggaaagttcagtccaccttcagatcccaaaacagcacatgatccaatctctcctcctgggccacctatcccaagagtcactgacacaagctctacaactattgaactagaatgggaacccccagctttcaatggtggtggggaaattgttggctattttgttgataagcagttggttggcacaaatgaatggtcacgctgcacagagaagatgatcaaggtccgtcagtacaccgtcaaagaaatccgagagggtgctgattacaaacttcgggtgagtgctgtcaatgccgcaggggaaggaccgcctggagaaacacaacctgttactgtggctgaaccacaagagcctccagctgtggaactggatgtttctgtcaagggtggaatacaaataatggctgggaagactcttagaattccagctgtggtgactggtcgccctgtacctacaaaagtatggaccaaagaagaaggggagctggataaagaccgtgttgtaatagacaacgttggaaccaaatctgaactaattatcaaggatgcactgcgaaaagaccatggcagatatgtgattacagctacaaatagctgtggttccaaatttgcagcagccagggtagaagtttttgatgtccctggtccagttcttgacttaaaacctgttgtaacaaacagaaaaatgtgtctacttaactggtctgatccagaagatgatggaggaagtgaaataacaggctttatcattgaaagaaaagatgccaagatgcatacttggagacaaccaatagagactgagagatctaaatgtgacatcacaggtctgcttgagggacaagaatataagttccgtgttattgccaagaacaagtttggctgtggccctcctgttgaaataggaccaattcttgcagttgatccactaggtcctccaacatctccagagaggctcacatacactgaaaggacaaagtccactatcacacttgactggaaagagccccgcagtaatggtggcagtcccatccaaggatatatcattgaaaaacggcgtcatgacaaacctgactttgaaagagttaacaagcgactctgcccaaccacatcttttctggttgaaaatcttgatgaacaccaaatgtatgagttccgtgtcaaagctgtcaatgaaattggtgaaagtgaaccatccctacctcttaatgtagtcatacaagatgatgaagtgcctccaactattaagttgcgtctgagtgttcgaggagacactatcaaagttaaggcaggagagcctgtccacatccctgcagatgtgacaggccttccaatgcctaagattgaatggtccaaaaatgaaactgtaattgaaaaacccactgatgcacttcagataaccaaggaagaggtatcccgaagtgaggcaaaaactgagcttagcattcccaaagcggtccgggaggacaaaggcacttacacagttactgcttccaatcgccttggctcagtgttccgaaatgttcacgttgaagtatatgaccgcccatccccaccaagaaatcttgctgttactgacattaaagctgaatcttgctacttgacatgggatgcccctcttgataatggtggcagtgaaatcacccattatgttattgacaaacgtgatgcaagtaggaagaaagcagaatgggaggaagtcaccaacactgctgtagagaaaagatatgggatctggaaacttatccccaatggtcagtatgagttccgagtcagggcagtgaataaatatggaatcagtgatgagtgcaaatcagataaagtagtcattcaagatccttatcgccttcctggacctccaggaaaaccaaaagttttggcacgcaccaaaggatcaatgctagtgagctggactcctcctttggacaatggtggctctccaattactggctactggctggagaaaagagaagagggaagtccttattggtcacgtgttagccgagcaccaataaccaaagtgggattgaaaggcgtggaatttaatgttcctcgtttgcttgaaggcgttaaataccagttcagagccatggcaataaatgctgcaggaattggtcctcccagtgaaccatcagatccagaggttgcaggagatcccatatttccaccggggccaccttcttgcccagaagttaaagataaaacgaagtcaagcatctcactaggatggaaacctccagccaaagatggtggcagcccaatcaaaggatacattgtagaaatgcaagaagaaggtactactgactggaaaagagtaaatgaaccagacaaacttataactacctgtgaatgtgtggtgcctaatctgaaagagctcaggaagtacagattcagagtgaaagctgtcaatgaagctggtgaatctgaaccaagtgatacaactggggagatccctgccactgatattcaagaggaaccagaagttttcattgacattggagcacaggactgtctggtttgtaaagctggctcacagattaggattcctgctgtcatcaagggacgcccaacaccaaaatcatcttgggaatttgatggaaaggcaaagaaagcaatgaaggatggagttcatgacatacccgaagatgcacagctggagactgctgaaaactcctcagtaattattattccggagtgtaaacgatctcatacaggcaaatacagcatcacagccaagaataaagcaggacaaaagactgcaaattgcagagttaaagtcatggatgtaccaggcccacccaaagatctgaaagtcagtgatatcacaaggggtagttgcagactttcatggaagatgccagacgacgatggaggagacaggatcaaaggctatgttattgagaagaggactattgatggaaaagcctggaccaaagtcaatccagactgtggaagcaccacatttgtagtgcctgatctcctctctgaacagcaatatttcttccgtgtgcgagcagaaaaccgttttggtattggcccacctgtggaaaccattcagaggaccactgccagagatccgatatatcctcctgatcctcctattaaactcaagattggcctcatcacaaagaacacagtgcatctgtcatggaaacccccgaagaatgatgggggctcccctgttacccactatattgttgagtgccttgcatgggaccctactgggacaaagaaagaagcctggaggcagtgcaataagcgtgatgtggaagaactgcaatttactgttgaagacctagtagagggtggggaatatgaattccgagtcaaagctgtcaatgctgcaggagtcagcaagccttcagccactgttggcccttgtcaaagaccagacatcccaccatcaattgatctaaaagaattcatggaggttgaagaaggaaccaatgttaacattgtggccaaaattaaaggtgtgccattcccgacactaacctggtttaaagctcctccaaagaagcctgataacaaagaacctgttctctatgacacccatgtcaacaaactggtggtagatgatacttgcactttagttattccgcagtctcgcaggagtgacactggcttatataccatcacagctgtaaataatctgggaacagcatcaaaggagatgagactgaatgtcctgggtcgtcctggccctccagtgggacccataaaatttgaatctgtttcagcagatcaaatgacactatcttggtttccacctaaagatgatggtgggtctaagattacaaactatgtaattgagaaaagagaagctaacaggaagacatgggtccatgtctccagtgaacctaaggagtgcacgtacacgattcccaaattgctagaaggccatgaatatgtattccgaatcatggcccagaataaatatggcattggagaacctcttgacagtgaacctgaaacagcaagaaacctcttctctgtccctggagcaccagataaaccaacagttagcagcgtgactcgtaactccatgactgtcaactgggaagagccagaatatgatggaggctctcctgtgacagggtactggctggaaatgaaagacaccacttcaaagagatggaagagagttaaccgagatcctatcaaagccatgactttgggtgtttcttataaagtgactggtcttattgaaggttccgactatcaattccgggtatatgcaatcaatgctgctggcgtgggtccagcaagtctgccatcagacccagcgactgctagagatccaattgcccctcctggtcctccatttcccaaagtgacagattggactaaatcatctgcagatctggagtggtctcccccactaaaagatggtggatccaaagtaactggatacatcgttgaatataaagaagaaggaaaagaagaatgggaaaagggtaaagataaagaagtgagaggaacaaagcttgttgtgacaggattaaaggaaggagcattctacaaatttagagttagagcagtcaacattgctggcattggagaacctggagaggtcacagatgtcattgaaatgaaggacagacttgtttcacctgaccttcagctagatgccagtgtcagagatagaattgttgtccatgctggaggggtgatccgaatcattgcctatgtgtctggaaagcctcctccaaccgtcacctggaacatgaatgaaagaaccttacctcaagaagccaccattgagaccacagccattagctcatccatggtcatcaagaactgccagaggagccatcaaggcgtctattctcttcttgccaaaaatgaagccggagaaagaaagaagacaattattgttgatgtattagatgttccaggtcccgttggaacaccattcctagctcacaacctaaccaatgagtcctgcaaactgacatggttttctccagaagatgatggaggctctccaatcaccaattatgtcattgaaaagcgtgaatctgaccgcagagcatggaccccagtgacatatacagttacccgacaaaatgctactgtccagggtctcattcaaggaaaagcctactttttccgaattgcggctgaaaatagtattggcatgggtccatttgttgagacatcagaggcacttgttatcagagagccaataactgtaccagagcgtcctgaagacctggaagtcaaagaagttactaaaaatactgtaactttgacttggaatcctcctaagtatgatggtgggtcagaaattattaactatgtcctagaaagtcggctcattgggactgagaagttccacaaagttacaaatgacaacttgcttagcagaaaatacactgttaaaggcttaaaagaaggtgatacctatgagtaccgtgtcagtgctgtcaacattgttggacaaggcaaaccatcattttgcaccaaaccaattacttgcaaggatgagctggcacccccaacgcttcacctcgacttcagagataagctcacgattcgagttggtgaagcttttgccctcactggccgttactcaggcaaaccaaagcctaaggtttcctggttcaaagatgaagctgatgtgctggaagatgatcgcactcatataaagactacaccagcaacacttgctttagagaagatcaaggccaaacgttcagattccggcaaatactgtgtggttgtggagaacagtacaggctctaggaaaggtttctgtcaagttaatgttgttgaccgtcctggaccaccagtaggaccagttagttttgatgaggtgaccaaagattacatggttatctcttggaagcctcctttagatgatggaggcagtaaaatcaccaattatattattgagaagaaggaagtgggtaaagacgtctggatgccagtgacatctgcaagtgctaaaacaacatgcaaagtttctaaactacttgaaggaaaagattatattttccggatacatgctgaaaatctgtatggaataagtgatcctctggtgtctgattcaatgaaagccaaagatcgtttcagggttcctgatgcacctgatcagccaattgttacagaagttaccaaagactctgcattagtaacctggaataagccacatgatggaggaaaacccatcacaaactacatcctggaaaagagagaaactatgtctaaacgatgggctagagttaccaaagatcctattcatccatacactaaatttagggttcctgatcttctagaaggatgtcagtatgaattccgggtttctgcagaaaatgaaattggtattggagatccaagcccaccatccaaaccagtctttgctaaagatccaattgctaaaccaagtccacctgttaatcctgaagcaatagatacaacatgcaattcagtcgatctaacttggcagccaccacgtcatgatggtgggagcaagattctgggttatattgttgagtaccagaaagttggagatgaagagtggagaagagccaatcacacccctgagtcatgtcctgaaactaaatataaagtcaccggtcttcgggacggtcaaacctataagtttagagtgttagcagtcaatgcagctggtgaatcagatccagctcatgttccggagccagtcctagtaaaagacaggcttgaaccccctgagttgattcttgatgccaacatggcaagagaacaacacattaaagttggtgatactctaagacttagtgccatcatcaaaggagtgccattcccaaaagtaacttggaaaaaagaagacagagatgctccaactaaagcaagaattgatgtgactccagttggtagcaagcttgaaattcgtaatgctgcccatgaagatggtggaatttattctttaacagtggagaatccagctggttcaaaaactgtctcagtaaaagtacttgtattagataaacctgggccacctagagatctggaagtcagtgaaattaggaaagattcatgttaccttacttggaaagaaccactggatgatggtggttctgttattaccaattatgtggttgagaggagagatgttgccagcgcccagtggtcacctctctcagctacatcaaagaaaaagagtcacttcgctaagcatctgaatgaggcaaccagtacctcttccgagtagctgcggagaaccagtatggacgtggtccttttgttgaaacaccaaaaccaatcaaggctttggatcctctccatcccccagggccacccaaggacctgcaccatgtagatgttgacaagactgaagtctccctagtctggaataagccggatcgtgatggtggttctccaatcactggatatttggtagaatatcaagaagaaggcacccaggactggattaaatttaagactgtgacaaacttagagtgtgtggttactggactacaacaaggaaagacctatagattccgtgtaaaagctgaaaacattgtgggtcttggtctccctgacacaactatcccgatagaatgtcaagaaaaactagtgcctccatccgtggagctagatgtgaaattaattgaaggtcttgtggtaaaggctggaaccacagtcagattccctgctattataagaggtgtgcctgttcctactgcaaagtggacaaccgatgggagtgagattaaaaccgatgagcactacacagttgaaacagacaacttctcatcagtacttaccattaagaactgcttaaggagagacactggggaatatcaaatcacagtttccaatgcagccggtagcaaaacagtagccgtacatcttactgttcttgatgttcctgggccaccaacaggtcctattaatattctggatgttactcctgaacacatgactatctcatggcagccacctaaggatgatggaggaagccctgtgataaattatattgttgagaaacaagatacaaggaaagacacgtggggtgttgtctcttccggaagcagtaagacaaagctgaaaatcccacatctgcagaagggctgtgaatatgttttccgagttagagcagagaataagataggtgttggtcctccccttgactccacacctactgttgctaagcataaatttagtcctccgtctcctcctggtaaaccagtggttactgacattactgaaaatgcagcaacagtgtcttggaccctgccaaaatctgatggtggcagtccaataactggctactatatggaacgtcgagaagtaactggcaaatgggtgagggtcaacaaaacacctatcgctgacctgaagttcagagtgactggactctatgaaggaaatacatatgagtttagagtttttgctgaaaatcttgcaggactaagcaaaccatccccaagttctgatccaataaaagcttgccggcccatcaaaccacctggaccacctattaatcctaaactgaaagacaagagcagagaaacagctgatttggtgtggacaaagcctctcagtgatggtggtagccccattctaggatatgtagtggaatgtcagaaacctggcacagcacaatggaacaggattaataaagatgaactcattaggcaatgtgcctttagggtacctggactaattgaaggaaatgagtacagattccgtataaaggcagctaatattgtaggagagggtgagccaagagaactagcagaatctgtgattgcaaaagatatccttcatcctccagaagtagaacttgatgttacttgtcgtgatgttattaccgtgagagtaggccaaactatccgcattctagctcgagtcaaaggcagacctgaaccagacataacttggactaaggaaggcaaagtattggtccgagaaaagagggtggaccttattcaggatctacctcgtgttgagttacaaattaaagaagctgttagagctgatcatggcaagtatatcatctcagctaagaacagcagtggacatgcccaaggttcagccatcgttaacgtccttgacagacctgggccttgccagaatttgaaggttaccaatgtaaccaaagagaactgtacaatttcttgggaaaacccactagataatggtggctcagaaataacaaacttcatagtagaatatcgcaaaccaaaccagaaaggctggtcaattgttgcatcagatgtcactaaacgattaatcaaggccaaccttttagccaacaatgaatactatttccgagtttgtgcagagaataaagtaggtgttgggccaaccatcgaaacaaaaactcccattctggctattaaccctattgacagaccaggtgagcctgaaaaccttcacattgcagataaaggaaagacatttgtctatctaaagtggcggaggcctgactatgatggtggcagtccaaatctgtcatatcatgttgagagaaggcttaagggctccgatgactgggaaagagtgcataaaggaagcattaaagaaactcactacatggttgacagatgtgttgaaaaccagatttatgagttcagagtgcaaacaaagaatgaaggtggggaaagtgactgggtgaagacagaggaagttgttgtgaaagaagacttacaaaaaccagtacttgatctgaaattaagtggggtcctaactgtcaaagcaggggacaccattaggcttgaggcaggggttagaggcaaaccattcccagaagttgcatggaccaaggacaaagacgctacagacttaacaagatcaccaagggtcaagattgatacccgtgctgattcatctaaattttctcttactaaagcaaagcgaagtgatgggggtaaatatgtagttacggcaactaacacggctggcagttttgtggcctatgccactgtcaatgttttagataagcctggtcctgtgagaaatctgaaaattgttgatgtgtccagtgataggtgtactgtttgctgggatccaccagaagatgatggtggctgtgaaatccaaaattatattctagaaaaatgtgagacaaagcgaatggtttggtctacctattctgctactgtcttgacacctggtactacagtaacacgtctcatagaaggaaatgaatatattttcagagtccgtgcagaaaataaaataggcacagggcctccaacagaaagtaaaccagtcatagccaaaaccaagtatgataaacctggtcgccctgatcccccagaagtcactaaagtaagcaaagaagagatgactgtggtttggaatccacctgaatatgatggtggaaagtctataactggatactttttggagaaaaaggaaaagcattcaacacgatgggtccctgtcaacaagagtgcaatccctgagagacgtatgaaagtacagaatctcctcccagaccatgaatatcagttccgtgtcaaggcagaaaatgaaattggaattggagaaccaagcttgccttcaagaccggtggtggcaaaagaccccatagagccacctggtccaccaaccaatttcagagtggttgatacaaccaaacattccataactcttgggtggggaaaaccagtctatgatggtggtgcaccgatcattggatatgttgtggaaatgagaccaaaaatagcagatgcgtctcctgatgaaggctggaaacggtgtaatgctgcagcacagcttgtacgcaaggaattcactgttaccagcttggatgaaaaccaggaatatgagttcagggtgtgtgcccaaaaccaagttggtattgggcgccctgcagagctaaaggaagctatcaaacctaaagaaatactagaacctccggagattgatttggatgccagcatgaggaaactggtcatagtgagagcaggatgccctattcgtctctttgctatagtgagaggacgaccagcccctaaagtcacttggcgaaaagttggcattgataatgtggtcagaaaaggacaagttgatctggttgacactatggccttccttgtcatccccaattctacccgtgatgactcaggaaaatattccttaacacttgtgaacccagcaggagaaaaggctgtattcgtaaatgtcagagtattagacactcctgggcctgtgtctgatttaaaagtttcagatgtcactaaaacatcatgccatgtgtcctgggcccctcctgaaaacgacggtgggagccaagtgacacattatatcgtggagaaacgtgaggcagacagaaagacatggtcgaccgttaccccagaagttaagaaaacaagcttccatgtaaccaatcttgtccctgggaatgagtattacttcagagtaactgctgtcaacgaatatggccctggcgtcccaacagatgtcccaaaaccagtgcttgcatcagatcctctaagtgagccggatcccccaaggaaattagaagtgactgaaatgaccaagaacagtgccaccttagcctggttacctcccctacgtgatggaggtgctaaaatcgatggctacatcactagttacagagaagaagagcagcctgcagatcgctggacagagtactcagtggtaaaagatctgagccttgttgtcactggcctaaaggaaggaaagaaatacaaatttagagtagcggccagaaatgctgttggagtcagtttgccaagagaagctgaaggagtgtatgaagccaaagaacaactgttgccaccaaagatccttatgccagagcaaataactatcaaagctgggaaaaaactccgaattgaagcccatgtgtatggaaagcctcatcccacctgtaaatggaaaaaaggagaagatgaagttgtcacatccagccacctggcagtgcataaagcagacagctcttcaattctgatcataaaagatgtgactaggaaagacagtggttactacagcctcacagcagagaacagttctgggacagacactcagaaaatcaaagttgtagtcatggatgcccccggcccccctcagcctccatttgacatttctgatatagacgctgatgcttgctccctgtcatggcacatccctctggaggacggaggcagtaacatcaccaattatatagtggagaagtgtgatgtaagccgaggtgactgggtcacggctctagcttcagtcacaaaaacttcctgcagggttggaaagctgatcccaggccaggagtacatcttccgggtccgtgctgaaaaccgatttggcatttcagagcctctcacatctccaaagatggttgcgcagttcccatttggtgttcctagtgaaccaaagaatgcacgagtcaccaaagtcaacaaggactgtatttttgttgcttgggacagaccagatagtgatggagggagccccattattggttatctgattgaacgcaaggaaagaaacagtttgctgtgggtgaaagccaatgatactcttgtccggtcaactgaatatccttgtgctggccttgtagaaggtcttgagtattcattcagaatctatgccctaaacaaagctggatccagcccacccagcaaacccacagaatatgtaactgcaagaatgccagttgatcctcctgggaaacctgaggttattgatgtcaccaagagtactgtatctctgatctgggctcgtccaaagcatgatggaggcagtaaaattattggctatttcgtagaagcttgcaaacttcctggtgataaatgggtacggtgcaatactgcacctcaccagattccccaggaagagtacacagctactggcctagaagagaaagctcagtatcaatttagagctattgccaggaccgcggtaaacattagcccaccttctgaaccttctgatccagtgactatcctcgcagaaaatgtccctcccaggatagacctgagtgtggctatgaaatctttgcttactgtgaaagctggaactaatgtctgcttggatgctactgtttttggtaaaccgatgccaacagtttcttggaaaaaagatggcacactgctaaaaccagcagaaggcataaagatggccatgcagcggaatctgtgcaccttggagctattcagcgtgaaccggaaggactcaggagactataccattactgctgaaaattcaagtggttctaaatcagccaccattaagcttaaagtgttagataaaccgggtcctccagcatctgttaaaatcaacaaaatgtattcagatcgtgctatgctttcttgggaaccgcctcttgaagatggaggctcagaaatcaccaactatattgttgacaaacgtgaaacaagcaggcccaactgggctcaagtctctgcaactgtgcctatcaccagctgcagcgtggagaaacttatagagggccatgagtatcagttccgtatttgtgctgaaaataaatatggagtaggcgatccagtcttcactgaaccagcaattgccaaaaacccatatgacccaccaggacgctgtgatcctcctgttattagcaacataaccaaagatcacatgacagtcagctggaagccaccagcagatgatgggggctcacccatcactggctatttgcttgaaaagcgggaaacccaggctgttaactggactaaggtcaacagaaaacctattatagaaagaacattaaaagcaacaggtcttcaagaaggtaccgaatatgagttccgtgttacagctataaataaagctggaccaggcaaacccagtgacgcatccaaggccgcttatgctcgggaccctcagtatcctcctggcccaccggctttccctaaagtatatgatacaactcgcagctctgtgagtctatcttggggcaagccagcctatgacggcggcagccctatcattggttatctcgttgaagtaaaacgggctgactccgataactgggtgaggtgcaacttaccacagaatctacagaaaacccgctttgaggttactggcctgatggaagacacacaatatcaattccgtgtgtatgccgttaataagattggatacagtgaccccagtgatgtgccagataaacactatcccaaggacatcttaattccacctgagggagaacttgatgcggacttaaggaagacactcatattacgtgctggagttactatgagactatatgtaccagtaaaaggacgcccacctccaaagattacttggtctaaaccaaatgtcaatctaagagacaggattggactggacataaagtcaactgactttgacactttcttgcgctgtgaaaatgtgaacaaatatgatgcaggaaaatatatcttaaccctggagaacagctgtggtaaaaaggaatataccattgttgtgaaagtgcttgatactcctgggccacctgtcaatgtgactgttaaggaaatatccaaagactctgcttatgttacctgggagcctcccattattgatggcggaagccccatcataaactatgtggtacaaaaacgtgatgcagagaggaaatcctggtctacagtgacaactgagtgctccaaaacaagcttcagagtagctaatttggaggagggaaaatcctacttcttccgagtgtttgctgaaaatgagtatggcattggtgatcccggtgaaactcgtgatgctgtcaaagcttcccaaactcctggaccagttgtggacctgaaagtgaggtctgtatctaagtcatcctgtagcattggctggaaaaagcctcacagtgatggtggaagtcggattattggatatgtagttgatttcctgactgaagaaaataagtggcaacgagttatgaaatccttaagcctacagtactctgcaaaagatttgactgaagggaaggaatataccttcagagtgagtgctgagaatgaaaatggagaaggaaccccaagcgaaatcactgttgtggcaagggatgatgttgtggctcctgatcttgacttaaagggtctacctgatttgtgctacttggctaaagaaaacagcaacttccggcttaagatccccataaaaggcaagccagctccatcagtctcctggaagaaaggggaagatcctctagcaactgacactagagtcagtgttgagtcatctgcggttaacacaactcttatagtgtacgattgccaaaaatctgatgctggaaaatacacaatcacacttaagaatgttgctggcaccaaggaaggaactatctccataaaggttgttggcaagcctggcatccccactggaccaatcaaatttgatgaagtcacagcagaagccatgaccttaaagtgggctcctccaaaggatgatggaggttctgaaatcaccaactatatcctagagaagagggattctgtgaacaacaagtgggtgacgtgcgcctcagctgtccagaaaaccacctttagagtaaccagacttcatgagggcatggaatataccttcagggtcagtgccgaaaataaatatggtgtaggggaaggcctgaaatcggagccaattgttgcgagacatccatttgatgtgcctgatgctcccccacctcccaatattgtggatgtcagacacgattcagtatctctaacttggactgaccccaagaaaactggtggttctccaattacagggtatcatctcgagttcaaggaaagaaacagccttttgtggaagagagctaacaagactccgataaggatgagagactttaaagtgacaggattaactgaaggtcttgaatatgaattccgagttatggcaatcaatttagcaggtgtgggcaagccaagcctaccatcagagcctgttgtggcactggacccaattgatcctcctggaaaacctgaggttattaacataacaaggaattcagtgactctcatttggactgaacctaaatatgacggtggtcataagttaactggatatatagtggagaagcgagatctaccttcgaagtcttggatgaaagccaaccatgttaatgtcccagaatgtgcctttactgtaactgaccttgttgagggtggaaaatatgaattcagaattagagcaaagaatacagcaggtgctatcagtgctccatcagaaagtacagaaaccattatttgcaaggatgaatacgaggcaccaacaattgtccttgatcccacaataaaagatgggctaacaattaaagcaggggataccattgttttgaatgccattagcattcttggcaaaccccttccaaaatcaagttggtccaaggcaggaaaagacattagaccatcagatatcactcagataacttcaaccccaacatcttccatgcttactatcaagtatgccactagaaaagatgcgggtgaatataccatcactgctaccaatccttttggcacgaaggtggaacatgtgaaggtaacagtccttgatgtacctggtcccccaggtcctgttgaaatcagtaatgtttctgctgaaaaagcaacacttacatggacacctcccttggaagatggcggctcaccaattaagtcctatatacttgaaaagagagaaaccagccgacttttgtggacagtggtttctgaagatattcagtcttgcaggcatgtggcaaccaaacttatccaaggaaatgagtacatcttccgggtctcagctgtaaaccactatggcaaaggagaacctgtacagtctgaacctgtcaaaatggtagacagatttggtccccctggccctcctgaaaaaccagaggtatcaaatgtcactaagaacactgccactgtcagctggaaaaggccagtggatgatggtggcagcgaaattacaggatatcatgtagaaaggagagaaaagaaaagcctgcgatgggtgagagcaataaaaacaccagtttccgatctcaggtgcaaagtaacaggactgcaagaaggaagcacctacgaattccgtgtcagtgcagaaaacagagcaggaattggtccacccagtgaggcttcagattctgttctgatgaaagatgcagcatatcctccaggaccaccttcaaatccgcatgtcactgatactaccaagaaatctgcttctttggcatggggcaagcctcattatgatggtggacttgaaatcactggctatgtcgtggagcatcaaaaagtaggagacgaggcctggataaaagataccacaggaaccgccctcagaatcactcagttcgttgttcctgatcttcagactaaagaaaaatacaacttcagaatcagtgccatcaacgatgcaggtgttggggagccagcggtgattccagatgttgaaatcgtagaacgggagatggctcctgattttgaactagatgccgagcttcgaagaacacttgttgttagagcaggactcagtattaggatatttgtgccaattaaaggtcgtcctgctcctgaagtgacatggaccaaagataacatcaacctgaaaaaccgagccaacattgaaaatacggaatcatttactcttctgattatcccagaatgtaacagatatgataccggtaaatttgtcatgaccattgaaaacccggctgggaagaaaagtggctttgtgaacgtcagagtcttggacacgccaggcccagtcctcaacctgcggcctacagacatcacaaaggacagtgtcaccctgcactgggacctccctctgatagatggaggctcacgtataacaaactacattgtagagaaacgtgaagcaacacggaaatcttattccacagccaccactaagtgccataaatgcacatataaagttaccggcttgtctgaagggtgtgaatatttcttcagagtgatggcagagaatgaatatggaattggtgagccaacagaaactacagagcccgtaaaagcctctgaagcaccatctccaccagacagccttaacatcatggacataactaagagcaccgtcagcctggcatggcctaagcccaaacacgatggtggcagcaagatcactggctatgtgattgaagcccaaagaaaaggctctgaccagtggacccacatcacaaccgtgaaagggttagaatgtgttgtgaggaatctaactgaaggagaggaatataccttccaagtgatggcagtgaacagcgcggggagaagtgcccctagagaaagcagacccgtcattgtcaaggagcagacaatgcttccagagctggatctccgtggcatctatcagaaactggtcattgccaaagctggtgacaacatcaaagttgaaattccagtgctcggtcgaccgaagcccacagtgacatggaaaaaaggagaccaaattcttaaacagacacagagagttaattttgaaaccacagcgacttcaaccattttaaatatcaatgagtgtgtcagaagtgatagtgggccctatccattaacagcaaggaacattgtaggagaggttggtgatgtcatcaccattcaagtccatgatatcccagggccacctactggaccaatcaaatttgatgaagtttcatctgattttgtaaccttctcttgggacccacctgagaacgatggtggtgtaccaataagcaactatgtagtggaaatgcggcagactgacagtactacctgggttgagttagcaaccaccgttatacgtactacctataaagccacccgccttactactggattagagtatcagttccgtgtaaaagctcagaatagatatggagttggaccaggcatcacatcagcatgcatagttgccaactatccatttaaggttcctggacctcctggtacccctcaggtaactgcagttaccaaggattcaatgacaattagctggcatgagccactttctgatggtggaagccccattttaggatatcatgttgaaagaaaagaacgaaatggtattctctggcagactgtgagcaaagctttagtaccaggcaacattttcaaatcaagtggacttacagatggtattgcttatgagttccgggtgattgcagaaaacatggcaggcaaaagtaagccaagcaagccatcagaacctatgttggctctggatcccattgacccacctggaaaaccagtacctctaaatattacaagacacacagtaacacttaaatgggctaagcctgaatatactgggggctttaaaattaccagttatatcgttgaaaagagagaccttcctaatggacggtggctgaaggccaacttcagcaacattttggagaatgaatttacagtcagtggcctaacagaagatgctgcatatgaattccgtgtgatcgccaaaaatgctgcaggtgccatcagtccaccatctgagccatctgatgctatcacttgcagggatgatgttgaggcaccaaagataaaggtggatgttaaatttaaggacacggttatattaaaagcaggtgaagcattcagactggaagctgatgtttcaggccgcccacctccaacaatggaatggagcaaagatggaaaagagctggaaggcacagcaaagttagaaataaaaattgcagatttctctactaatctggtaaacaaagattcaacaagaagggatagtggtgcctatacccttacagcgactaatcctggtggctttgctaaacacattttcaatgtcaaagttcttgacagaccaggcccacctgaaggacctttggctgtaactgaagtgacatcagaaaagtgtgtactatcatggttccctccactggatgatggaggtgccaaaattgatcattacatagtacagaaacgtgaaaccagcagattggcatggacaaatgtagcctcagaagtccaagtaacaaagctaaaggtcactaaactcttgaaaggcaatgaatacatattccgtgtcatggctgtaaataaatatggagtgggagagccactggaatcagagcctgtgcttgcagtgaatccttatggaccccctgatccgcccaaaaaccctgaagtgacaactattactaaagattcgatggttgtctgctggggacatcctgattctgatggtggaagtgaaatcatcaattatattgtggaacggcgtgataaagctggccaacgctggattaaatgcaacaaaaaaactcttactgatttaagatataaagtgtctggactgacagaaggacatgaatatgagttcaggattatggctgaaaatgctgctggaattagtgcaccaagtcctaccagtccattttacaaggcttgtgacactgtgtttaaacctggaccaccaggtaacccacgtgttctggatacaagcagatcatccatttcaatcgcttggaataaacctatctatgatggtggttcagaaatcactgggtatatggttgagattgccctgccagaggaagatgaatggcagattgtcactccaccagcaggactcaaggcaacttcgtatactatcactggcctcacagagaatcaggaatataagatccgcatctatgccatgaattccgaaggacttggggaacctgcccttgttcctggaactccaaaggctgaagacagaatgctgcctccagaaattgaactggatgctgacctgcgcaaagttgttactataagggcctgctgcaccctgagactttttgttcccatcaaaggaaggcctgcacctgaggtgaagtgggcccgggaccatggagaatctttagataaagctagcatcgaatccacaagctcttacaccctgcttattgttggaaatgtaaacagatttgacagtggcaaatatatactaactgtagaaaatagttcaggcagcaagtctgcatttgtcaatgttagagttctcgatacaccaggccccccacaggatctgaaggtaaaagaggtcactaagacatctgtcacactcacatgggacccacctctccttgatggaggttcaaaaatcaagaactatattgttgaaaagcgggaatcaacaagaaaagcatattcaactgttgcaacaaactgccacaagacttcctggaaggtagaccagcttcaagaaggctgtagctactatttcagggttctcgcagaaaatgaatatggcattgggctgcctgctgaaaccgcagaatctgtgaaagcatcagaacgacctcttcctccaggaaaaataactttgatggatgtcacaagaaatagtgtgtcactctcttgggagaaaccagagcatgatggaggcagccgaattctaggctacattgtggagatgcagaccaaaggcagtgacaaatgggccacgtgtgccacagtcaaggtcactgaagccactatcactggattaattcagggtgaagaatactctttccgtgtttcagctcagaatgaaaagggcatcagtgatcctagacaactgagtgtgccagtgatcgccaaagatcttgtcattccaccagccttcaaactcctgttcaatactttcactgtactggcaggtgaagacctaaaagttgatgttccattcattggccgccctaccccagctgtaacctggcataaagataatgtaccactgaagcagacaactagagtaaatgcagagagcacagaaaataattcactactgacaataaaggacgcctgccgagaagatgttggccattatgtggttaaactgactaactcagctggtgaagctattgaaacccttaatgttatcgttcttgacaaaccagggcctccaactggaccagttaaaatggatgaagtgacagctgatagtattactctttcctggggcccacccaagtatgatggtggaagttctatcaataattacattgttgagaaacgggacacttccacaaccacctggcaaattgtatcagctacagttgcaaggacaacaataaaggcttgcagactgaagactggatgtgaatatcagtttagaattgcagctgaaaacagatatgggaagagtacctacctcaattcagagcctactgtagcccaatatccattcaaagttcctggtcctcctggcactccagttgtcacactgtcctccagggacagcatggaagtacaatggaatgagccaatcagtgatggaggaagtagagtcattggctatcatctagaacgcaaggaaagaaatagcatcctctgggttaagttgaataaaacacctattcctcaaaccaagtttaagacaactggccttgaagaaggtgttgaatatgaatttagagtctctgcagagaacatcgtgggcattggcaagccgagtaaagtatcagaatgttatgtggctcgtgacccatgtgatccaccaggacggccagaggcaatcattgtcacaaggaattctgtgactcttcagtggaagaaacccacctatgacggtggaagcaagatcactggttatattgttgagaagaaagaattacctgagggccgttggatgaaagccagttttacaaatattattgacactcattttgaagtaactggcctagttgaagatcacagatatgagttccgggttatagcccgaaatgccgcaggagtgtttagtgagccttcagaaagcacaggagcaataacagctagagatgaggtagatccaccacgaataagtatggatccaaaatacaaagacacaatcgtggttcatgctggtgaatcattcaaggttgatgcagatatttatggcaaaccaataccaaccattcagtggataaaaggtgatcaggagctttcaaacacagctcgattagaaataaagagcaccgactttgccaccagtctcagtgtaaaagatgcagtacgtgtcgacagtggaaattacatactgaaggccaaaaatgttgcaggagaaagatcagttactgtgaatgtcaaggttcttgacagaccagggccacctgaaggacctgttgttatctcaggagttacagcagaaaaatgcacactagcttggaaacccccacttcaggatggtgggagtgacatcataaattatattgtggaaaggagagaaaccagccgcttagtttggactgtggttgatgccaatgtgcagactctcagctgcaaggttactaagcttcttgaaggcaatgaatatactttccgtataatggcagtaaacaaatatggtgttggtgaacctcttgaatctgagccagtagttgccaagaatccatttgtagtaccagatgcaccaaaagctccagaagtcacaacagtgaccaaggactcaatgattgttgtatgggaaagaccagcatctgatggtggtagtgaaattcttggatatgttcttgagaaacgggataaagaaggcattagatggacaagatgccataagcgtctgattggagagttgcgcctgagagtaactggactcatagaaaatcacgattatgagttcagagtttctgctgagaatgctgctggacttagtgaaccaagccctccttctgcttaccaaaaggcttgtgatcctatttataaaccaggacccccaaacaaccccaaagtcatagacataaccagatcttcagtattcctttcttggagcaaaccaatatatgatggtggctgtgaaattcaaggatacattgttgaaaaatgtgatgtgagtgttggtgaatggacaatgtgcactccaccaacaggaattaataaaacaaacatagaagtagagaagctgttggaaaagcatgaatacaacttccgtatctgtgctattaataaagctggagttggagaacatgctgacgtccctggacctattatagttgaagaaaaattagaagcaccagacattgatcttgacctagaactaaggaaaatcataaatataagggcaggtggctccttaaggttatttgttcctataaaaggtcgtcctacaccagaagttaaatggggaaaggtggatggtgaaatccgagatgcagctataattgatgtcactagcagtttcacctctcttgttcttgacaatgtcaaccgatatgatagtggaaaatatacgcttacattagaaaacagcagtggaacaaagtctgcctttgttactgtgagagttctggacacgccaagtccacctgttaacctgaaagtcacagaaatcaccaaagactcagtatcaattacatgggaacctcctttgttggatgggggatccaaaataaaaaattacattgttgagaaacgtgaagccacaagaaaatcatatgctgctgttgtaactaactgccataagaattcttggaaaatcgatcagctccaagaaggttgcagttattactttagagtcacagctgagaatgagtatggtattggccttcctgcccagactgctgatccaattaaggttgcagaagtgccacaacctcctggaaaaataactgtggatgatgtcaccagaaacagtgtctctctgagttggacaaaacctgaacatgatggtggcagtaaaatcattcagtatattgtggaaatgcaagctaaacacagtgagaaatggtcagagtgtgctcgagtaaagtctcttcaggcagtaattaccaacctaactcaaggggaagaatatctttttagagttgttgctgtaaatgaaaaggggagaagtgatcctcggtcccttgcagttccaatagttgccaaagatctggtaattgagccagatgtaaaacctgcattcagtagttacagtgtacaggttggccaagatttgaaaatagaagtgccaatttctggacgtcctaagccaaccattacctggactaaagatggtctcccactgaagcagaccacaagaatcaatgttaccgattcactggatctcaccacactcagtattaaagaaactcataaggatgatggtggacaatatggaatcacagttgccaatgttgttggtcagaagacagcatccatcgaaattgtaactctagataaacctgatcctccaaaaggacctgttaaatttgatgacgtcagtgctgaaagtattacattatcttggaaccctccattatatacagggggctgccaaatcaccaactacattgttcagaaaagagatacaaccaccacagtatgggatgttgtttctgctactgttgctagaactacactcaaagtgaccaaactgaaaactggtacagaataccaatttagaatatttgccgaaaacagatatggacaaagctttgccttagagtctgatccaattgtagctcaatatccctacaaagaaccaggccctccaggtacaccatttgccacagccatttccaaagactccatggtcatacagtggcatgaaccagtcaacaatggtggaagccccgtcataggttaccacctggagagaaaagaaagaaacagtattttgtggacaaaggtcaacaaaactattattcatgacacccaattcaaagcacagaatcttgaagaaggcattgaatatgaattcagagtgtatgctgaaaatattgttggtgtaggcaaagcaagcaagaattctgaatgctatgtagccagagatccctgtgacccaccaggaaccccagaaccaataatggttaaaagaaatgaaatcactttacagtggaccaaacctgtgtatgatggtggaagtatgattacaggctacattgtagagaaacgtgatttgcctgatggtcgttggatgaaagctagctttacaaatgtcattgaaactcaatttactgtgtcaggtcttactgaagatcaaagatatgaattcagagtcattgcaaagaatgcagctggtgcaataagtaaaccctctgacagtactggaccaataactgccaaggatgaggttgaactcccaagaatttcaatggatccaaaattcagagacacaattgtggtaaatgctggagaaacattcagacttgaggctgatgtccatggaaagcccctacctaccattgagtggttaagaggagataaggaaattgaagaatctgctagatgtgaaataaagaacacagatttcaaggctttacttattgtaaaagatgcaattagaattgatggtgggcagtatattttaagagcttccaatgttgcaggttctaagtcattcccagtaaatgtaaaagtattagatagaccaggacctccagaagggccagtccaggttactggagtcacttctgaaaaatgctctttaacatggtctccaccacttcaagatggtggcagtgacatttctcactatgttgttgaaaagcgagaaaccagtcgacttgcctggactgttgttgcttcagaagttgtgaccaattctctgaaagttaccaaactcttagaaggtaatgaatatgttttccgtataatggctgtcaacaaatatggtgttggagagcctttggaatctgcaccagtactaatgaaaaatccatttgtgcttcctggaccaccaaaaagcttggaagtcacaaatattgccaaagactccatgaccgtctgttggaaccgtccagatagtgatggtggaagtgagattattggttacattgtagagaaaagagacagaagtggcattcgatggataaaatgtaataaacgccgcattacagatttgcgtctaagagtgacaggattaacagaagatcatgagtatgaattcagggtctctgcagaaaatgctgctggagttggggaaccaagtccagctacagtttattataaagcctgtgatcctgtgttcaaacctggcccacctaccaatgcacacattgtagacaccactaaaaattcaatcacacttgcctggggtaaacccatctatgatggcggcagtgagatcttgggatatgtagtagaaatctgtaaagcagatgaagaagaatggcaaatagttactccacagactggcctgagagtcactcgatttgaaatttcaaaactcactgaacaccaagagtataaaatacgagtctgtgccctcaacaaagttggtttaggtgaggctacatcagttcctggtactgtgaaaccagaagataaacttgaagcacctgaacttgaccttgactccgaattaagaaaaggaattgttgtaagagctggtggatctgccagaattcacattccattcaaaggtcgtccaacgcctgagatcacttggtctcgagaggaaggtgaattcacagataaggtccaaattgaaaagggagtaaactatacccaactatcaatagataactgtgatagaaatgatgctggaaaatacattcttaagttggaaaacagcagtggatcaaagtctgcttttgtaactgtgaaagttcttgacactccaggaccaccacagaatttggcagtcaaagaagtgagaaaagattctgccttcctggtatgggagccacccatcattgatggaggggcaaaggtcaagaactatgtgattgacaaacgtgagtcaaccagaaaagcgtatgctaatgtgagtagtaaatgcagcaaaacaagttttaaagtggaaaaccttacagaaggagccatttattacttcagagtcatggctgaaaatgaatttggagttggtgttccagtggaaactgttgatgccgtgaaagctgctgaacctccttccccaccaggaaaggttacactcactgatgtgtcccagaccagtgcatcacttatgtgggagaaacctgaacatgatggcggtagcagagtcctggggtacgttgttgaaatgcagcccaaaggaactgaaaaatggagcattgtggctgaatccaaagtctgtaatgcagttgttactggtttgagttctggacaagaatatcagttccgtgtcaaggcttataatgagaaaggaaaaagcgatccaagagtgttgggtgttcctgtcatagccaaggacttgactatacagcctagtttaaagttaccatttaacacatatagtatccaagctggagaagatcttaaaatagaaattccagttataggccgaccaagacctaacatttcttgggtcaaagatggtgagcctcttaaacagacaacaagagtaaacgttgaagaaacagctacctcaactgttttgcacattaaagaaggtaacaaagatgactttggaaaatacaccgtaacggcaacaaatagtgcaggcacagcaacagaaaatctcagtgttatcgttttagaaaagcctggacctccagttggcccagttcggtttgatgaagttagtgcagactttgtagtcatatcttgggaacctccagcctatactggtggctgccaaataagcaactacattgtagagaagcgagatacaaccaccaccacttggcacatggtatcagcaacagttgcaagaacaacaattaaaataaccaaactgaaaacaggcacggagtaccagtttagaatttttgctgaaaacaggtatggaaaaagtgccccactggattctaaggcagttattgtacaatatccatttaaagaacctggaccacctggaactccttttgtgacatcaatctcaaaagatcagatgcttgtgcaatggcatgagccagtgaatgatggaggcaccaaaattattggctaccatcttgaacagaaagaaaagaacagtattttatgggtcaagttaaataagacccccattcaggacaccaaattcaaaacaactgggcttgatgagggccttgagtatgagttcaaagtttctgctgaaaatattgttggcattggcaagcctagcaaagtgtcagaatgctttgttgctcgtgatccatgtgacccacctggtcgccctgaagccattgttattacaagaaacaatgtcacactgaaatggaagaaacctgcctatgatggtggtagcaaaataacaggttatattgtagaaaagaaagatctacctgatggccgctggatgaaagccagctttaccaacgtattagaaactgaatttacagtgagtggacttgtagaagaccaaagatatgaatttagagtaattgcaagaaatgcagctggaaactttagtgaaccatctgatagtagtggtgccattactgcaagagatgaaattgatgcaccaaatgcctctctggatccaaaatataaagatgtcatcgttgttcatgcaggagagacttttgttcttgaagccgacatccgtggcaaacctatacctgatgttgtttggtcaaaagatggaaaagaacttgaagaaacagctgctagaatggaaattaaatctactattcagaaaacaactcttgttgtcaaagactgtatacggactgatggaggacaatatattctgaaactcagcaatgttggtggtacaaagtctatacccatcactgtaaaggtacttgacaggccagggcctcctgaagggcctctgaaagttactggagttactgcggaaaaatgttacctggcatggaacccacctttgcaagatggtggtgctaatatttcacattacatcattgaaaagagggagacaagccgactctcttggacccaggtttcaactgaggtacaggcccttaactacaaagttactaaacttcttcctggtaatgagtacattttccgtgtcatggctgtgaataaatatggaattggagagcccttggaatctgggcctgttacggcctgtaatccttataagccaccaggtcctccctcaacacctgaagtctcagcaatcaccaaagattctatggtagtaacatgggcacgcccagtagacgacggaggtaccgaaattgagggctacattcttgaaaaacgagataaggaaggcgttagatggaccaagtgcaacaagaaaacattaacggatctgcggctcagggtaactggtcttaccgaaggccattcctatgaattcagagttgctgctgaaaatgcagctggtgtgggagaacctagtgagccatctgttttctaccgtgcgtgtgatgccttgtatccaccaggtcccccaagcaatccaaaagtgacggacacttccagatcttctgtctccctggcatggagtaagccaatttatgatggtggcgcacctgttaaaggctatgttgtagaggtcaaagaagctgctgcggatgaatggacaacctgcactccaccaacaggattacaaggaaagcagttcacagtgaccaagcttaaagaaaacactgaatataacttccgtatttgtgccatcaattctgaaggtgtaggtgaacctgcaactctacctggctcagtggttgctcaggagaggatagagccaccagaaatagaactcgatgctgatctcagaaaggtggtcgttctgcgtgcaagtgctactttacgcttatttgtcactatcaaaggtcgaccagaacccgaagttaaatgggaaaaggcagaaggcattctcactgacagggctcagatagaggtgaccagctcatttacaatgttggtgattgataatgttaccagatttgacagtggtcggtataatctgacattagaaaataatagtggctccaaaacagcttttgttaacgtcagagttcttgactcaccaagtgcccctgtgaatttgaccataagagaagtgaagaaagactcagtgacgttgtcctgggaaccaccacttattgatggtggagctaagattacaaactacattgtcgaaaaacgagaaactacaagaaaagcctatgctaccattacaaataattgcactaaaactactttcagaattgaaaatctacaagaaggatgttcttactacttccgagtcttggcttccaatgaatatgggattggtttgccagctgaaacaacagaacccgttaaagtgtctgaaccacccctcccacctggaagagtaactcttgttgatgtgacccgtaatacagctacaattaagtgggagaaaccagaaagtgatggtggcagcaaaattactggttatgtggttgaaatgcagactaaagggagtgaaaagtggagcacctgcacacaagttaagactctagaagcaactatatctggcttaactgcaggagaagagtatgtcttcagggtagctgcagttaacgaaaagggaagaagtgatccaagacaacttggagtgccagtaattgcaagggatattgaaataaagccttcagttgagcttcctttccatactttcaatgtaaaggctagagaacaacttaagattgatgtgccattcaaaggaagacctcaagctactgtgaactggagaaaagatggtcagactcttaaagagacaactagagtcaatgtttcttcttcaaagactgtaacatcactatctattaaggaagcttcaaaggaagatgttggaacttatgaattatgtgtttcaaacagtgctggatccataacagttcctattactataattgtccttgacagaccaggacctccaggtcctatacgtattgatgaggttagttgtgacagcataaccatttcttggaatcctccagaatatgatggtggctgccaaattagcaattacattgttgaaaagaaagaaaccacctctacaacatggcacatagtttcacaagcagttgcaagaacatccattaaaatagttcgcctgacaacaggaagtgagtatcagttccgtgtttgtgcagaaaaccgctatggaaagagctcctacagtgaatcttcagctgttgttgcagagtatccattcagtcccccaggtcctcctggtactcctaaagttgtgcatgccacaaaatctaccatgcttgtaacctggcaagtgccagttaatgatggaggaagtcgagtaattggctatcatcttgagtataaagaaagaagcagcattctttggtcaaaagcaaataaaatcctcattgctgatactcaaatgaaagtctccggccttgatgaaggactgatgtatgagtatcgtgtatatgctgaaaatattgctggaattggtaaatgcagtaaatcttgtgaaccagtccctgcaagagatccttgtgaccctcctggacaacctgaagtcacaaatatcacaagaaaatcagtgtcacttaaatggtctaaaccacattatgatggtggagctaagatcacaggatacattgttgaacgcagagaactaccagatggccggtggctgaagtgcaattatactaatatacaagaaacatactttgaagtaactgaacttactgaagatcagcgttatgaattccgggtttttgcaaggaatgctgctgactcagttagtgagccatctgaatccactgggcctattatagttaaagatgatgttgagcctccaagagttatgatggatgtcaagttccgagacgttattgttgtcaaagctggagaggtccttaagataaatgcagacattgcagggcgacctctgccagtaatttcctgggccaaggatggtatagaaattgaagaaagagcaagaacagaaatcatctcaacagacaatcatactttgttaacagttaaagactgtataagacgagacactgggcaatatgtactaacactgaagaatgttgccggcactcggtctgtggccgttaattgcaaagtacttgataagcctggtccaccagcaggaccacttgaaataaatggcctcactgctgagaaatgctctctttcctggggacgtccccaagaagatggtggtgcagatatcgactattaccgtagaaaacgtgaaacaagccaccttgcatggacaatatgtgaaggagagttacagatgacatcctgtaaagtaaccaagttactcaaaggcaatgaatatatatttagagtaactggtgttaataaatatggtgttggtgagcccctagagagtgtagctataaaggcactagatccatttacagttccaagtccacccacgtctttggaaattacttctgtgaccaaagaatctatgacactttgctggtcaagacccgagagtgatggaggtagtgaaatatctggatatataattgaaaggcgagagaaaaatagcctaagatgggtgcgtgtaaacaaaaaaccagtttatgatctaagagtgaaatcaacaggacttcgggaaggatgtgaatatgaatatcgtgtttatgcagaaaatgctgctggcctaagtcttccaagtgaaacctctcccttaattagggcagaagatccagtgttcctaccatctcctccatccaaacccaaaattgtggactcaggcaagacaactataactattgcctgggttaagccgctgtttgatggtggggccccgataactggatatactgtagaatacaaaaaatctgatgacactgactggaaaacttccattcagagcttacgagggacagaatatacaataagcggactaacaacaggagctgaatatgttttcagagtaaaatctgtcaataaggttggtgctagtgaccccagtgatagctctgaccctcagatagcaaaggaaagagaagaagaacctttatttgatattgacagtgaaatgaggaagaccttgattgtcaaggctggtgcctcatttaccatgactgtgcctttccgaggaagaccagtacccaatgtcttgtggagtaagccagacactgacctccgtactagagcttatgttgataccacagactctcgtacatcactgaccattgaaaatgccaacagaaatgactctggaaagtacacattaacaattcagaatgttttgagtgctgcttcactgaccttagttgtcaaagttttagataccccaggtcctccaaccaacattactgtgcaagatgtaaccaaagagtctgcagtgttatcctgggatgttcctgaaaacgatggtggagcaccagtgaagaattaccacatagaaaaacgtgaggccagcaagaaagcatgggtctctgtgaccaacaactgtaaccgcctctcctacaaagttaccaatttacaagaaggagctatctattacttcagagtctctggagaaaatgagtttggtgttggtataccagctgaaacaaaggaaggagtaaaaataacagaaaaaccaagcccacctgaaaaacttggagtaacaagtatatccaaagacagtgtttccctgacctggctgaagcctgaacatgatggcggaagcagaattgtacactatgtcgttgaagcactagaaaaaggacagaaaaactgggttaaatgtgcagtggcaaagtcaacccatcacgttgtttccggtctgagagagaattctgaatactttttccgagtgtttgctgaaaatcaagctggcctgagtgacccgagagagcttctgcttcctgttcttattaaggagcaactagaaccacctgaaattgatatgaagaatttcccaagtcacactgtatatgttagagctggttcaaaccttaaagttgacattccaatctctggaaaaccacttcccaaagtgaccttatcaagagatggtgtcccccttaaggcaaccatgagatttaataccgaaattactgctgagaacctgaccatcaatctcaaagaaagtgttacagctgacgctgggagatatgaaatcactgctgccaactccagtggtacaaccaaagctttcattaacattgttgtgctagacaggcctggtcctccaactggccctgttgttattagtgatataactgaagaaagtgtgactctcaaatgggagccacctaagtatgacggtggaagtcaagttaccaactacattctactcaaaagagaaacaagtactgcagtgtggactgaagtgtctgcaacagttgcaagaaccatgatgaaagtcatgaaactgaccacaggagaagaataccaattccgcatcaaggcagaaaaccgctttggcatcagtgatcatatagattcagcttgtgtgactgtcaaactaccatacacaacacctggaccaccatctacaccatgggtcactaatgttactcgagaaagcatcactgtgggctggcatgaaccagtgtcaaatggaggcagtgcagtcgtaggctatcacctggaaatgaaagacagaaacagtattttatggcaaaaagccaacaaactggtcatccgcacaactcacttcaaagtcacaacaatcagtgctggacttatttatgaattcagggtgtatgcagaaaatgctgctggagttggaaaacctagccatccttctgaaccagtcttggcaattgatgcttgtgaacccccaagaaatgttcgtatcactgatatttcaaagaactctgtcagcctttcatggcaacaaccagctttcgatggaggtagcaagattacaggctacattgttgagagacgtgaccttccagatggcagatggaccaaggccagcttcaccaatgttactgaaactcaattcatcatctctggcttgactcagaattcccagtatgaattccgtgtctttgctaggaatgctgttggttccattagcaatccatctgaggttgtagggcccattacttgcatcgattcttatggtggtcctgtaattgatttgcctctagaatatacagaagttgtcaaatacagagcaggtacatctgtgaagctcagagctggcatttctggcaaacctgcgcctactattgagtggtataaagatgataaagaattacaaaccaatgcactggtgtgtgttgaaaataccacggacctcgcatctatactcatcaaagatgccgatcgccttaatagtggatgctatgaattaaaactaaggaatgccatgggctcagcctcagccaccatcagagtacagatccttgacaaaccaggcccacctggtggaccaattgaatttaagactgtaactgctgagaagatcacccttctctggcggcctccagctgatgatggtggtgcaaaaatcactcactacattgtggaaaagcgtgagacaagccgcgttgtgtggtctatggtgtctgaacatttggaagagtgcatcattacaaccaccaaaattatcaaaggaaatgaatacatcttccgggtccgagccgtgaacaaatatggaattggcgagccactggaatctgattccgttgtagccaagaacgcatttgttacacctgggccaccaggcataccagaagtgacaaagattaccaagaattcgatgactgttgtatggagcaggccaattgcagatggcggtagtgatataagtggctatttccttgaaaaacgagacaagaagagcctaggatggtttaaagtactaaaagagactatccgtgacaccagacaaaaagtaacaggactcacagaaaacagtgactatcaatacagagtttgtgctgtaaacgctgctggacagggtccattttctgaaccatctgaattctacaaagctgctgatcctattgatcctccaggtccacctgctaagataagaatcgcagattcaaccaagtcatccatcacccttggctggagtaagcctgtctatgatgggggcagtgctgttactgggtatgttgtcgagataagacaaggagaggaagaggaatggactactgtctctaccaaaggagaggtcagaactacagaatatgtggtatccaacctgaaacctggagtcaattactacttccgggtatctgctgtaaactgtgctggacaaggagaacctatagaaatgaatgaacctgtacaagctaaagatatacttgaggcaccagagattgacctggatgtggctctcagaacttctgttattgccaaagctggtgaagatgtacaagtgttgattccctttaaaggcagacctccacctactgtcacatggagaaaagatgagaagaatcttggcagtgatgccagatacagcattgaaaacactgattcatcctcattactcaccattcctcaagttactcgcaatgatacaggaaaatatattctcacaatagaaaatggagttggtgaacctaagtcttcaactgtgagtgttaaagtgcttgacacaccagctgcctgccagaaactacaggttaaacatgtttctcgaggcacagtcactttgctctgggatcctcctctcattgatggaggatctccaataattaattatgtcattgaaaagagagatgccaccaagagaacatggtctgtcgtgtcacacaaatgttctagcacatccttcaagctaatagatttgtcggagaagactccattcttcttcagagttcttgcagaaaatgaaattggaattggggaaccctgtgaaactacagagccagtgaaggctgctgaagtaccagctcctatacgtgatctctcaatgaaagactcaacaaagacatctgtcatcctcagctggaccaaacctgactttgatggtggtagcgtcatcacagaatatgttgtagaaaggaaaggtaaaggtgaacagacgtggtcccacgctggcataagtaagacatgtgaaattgaggttagccaacttaaggagcagtcagtcctggagttcagagtgtttgccaaaaatgagaaaggactgagtgatcctgtcactattgggccaattacagtgaaagaacttattattacacctgaagttgacctgtcagatatccctggggcacaagtcactgtgagaattgggcacaatgtgcaccttgaattaccttataagggaaaacccaaaccatccatcagttggctgaaagatggcttgccactgaaagaaagtgaatttgttcgcttcagtaaaactgaaaacaaaattactttgagtattaagaatgccaagaaggagcatggaggaaaatacactgttattcttgataatgcagtgtgtagaattgcagtccccattacagtcatcacccttggcccaccatcaaagcccaaaggacccattcgatttgatgaaatcaaggctgatagtgtcatcctgtcatgggatgtacctgaagataatggaggaggagaaattacttgttacagcatcgagaagcgggaaacttcacaaactaactggaagatggtgtgttcaagtgttgccagaacgactttcaaagttcctaatctagtcaaagatgctgagtaccagtttagagtgagagcagaaaacagatacggagtcagccaaccacttgtctcaagcattattgtggcaaaacaccagttcaggattcctggtcccccaggaaagccagttatatacaatgtgacttctgatggcatgtcactaacttgggatgctccagtttatgatggtggttcagaagttactggattccatgttgaaaagaaagaaagaaatagcatcctctggcaaaaagttaatacatcaccaatctctggaagagaatatagagccactggactggtagaaggtctggattaccaattccgtgtatatgctgaaaattctgctggcctaagctcacctagtgacccaagcaaatttaccttagctgtttctccagtagacccacctggcactcctgactacattgatgtcacccgggaaaccatcacacttaaatggaacccaccattgcgtgatggaggcagtaagattgtgggctatagcattgagaaacggcaaggaaatgaacgctgggtgagatgcaactttactgacgtcagtgaatgtcagtacacagttacaggactcagtcctggggatcgctatgagttcagaataattgcaagaaatgctgttggaactataagcccgccctcacagtcttctggcattattatgacaagagatgaaaatgttccaccaatagtagagtttggccctgaatactttgatggtctcattattaagtccggagagagccttagaattaaagctttggtacaaggaagaccagtgcctcgagtaacttggttcaaagatggagtggaaatcgaaaagaggatgaatatggaaataaccgacgtacttggatccaccagcctatttgttagagatgctactcgggaccatcgtggtgtatacacagtggaagccaaaaatgcatctggttctgcaaaagcagaaattaaagtgaaagtacaagatacaccaggaaaagtagttgggccaataagattcaccaatattactggggagaagatgactctgtggtgggatgccccactcaatgacggttgtgctcccataacccactacatcattgaaaaacgggaaaccagcagacttgcctgggcactaattgaggataaatgtgaagcccaaagttacactgccattaaactaataaacggcaatgaataccaattccgtgtttctgcagttaacaagtttggtgttggcaggccacttgattctgatccagtggttgctcaaatacaatatactgttcctgatgcccctggcattccagaacctagcaacataacaggcaacagcattaccctgacatgggcaaggccagaatcagatggtggcagtgaaattcaacagtatatccttgaaagaagagaaaagaaaagcacaagatgggtaaaagtgatcagcaaacgaccaatctctgaaacaagattcaaagtcactggtctgacagaaggcaatgagtatgaattccatgtcatggctgaaaatgctgcaggagttggacctgcaagtggcatctcaagactcattaaatgtagagagcccgtcaacccaccaggtcctcccacagtggtcaaagtaacagacacatcaaagacaactgtgagcttagaatggtccaaaccagtgtttgatggtggcatggaaataattgggtatattattgaaatgtgtaaggccgattaggagactggcacaaggtgaatgcagaggcatgtgtgaaaacaagatatacagtcactgatctacaagcaggtgaagaatacaaattccgagttagtgctatcaatggtgctggaaaaggcgacagctgtgaagtgactggcacaattaaagcagttgaccggttaacagctcctgagttagacatagatgcaaacttcaaacagactcatgttgttagagctggggccagtattcgcctcttcattgcctaccaaggtagacctactcctacagctgtgtggagcaaaccagactctaaccttagccttcgggctgatatccatacaacagattccttcagcaccctcactgtggaaaactgcaacagaaatgatgcagggaaatatacccttactgtggaaaacaacagtggtagtaagtcaatcacattcaccgtgaaagtgctagacactccaggcccacctggcccaattaccttcaaagatgtgacccggggatctgctacattgatgtgggatgcccctcttcttgacggtggtgcccgaatccatcattatgtggtagagaaacgagaggcaagtcgccgtagttggcaggttatcagtgaaaaatgcactcgtcagatcttcaaggtcaatgacctggccgaaggtgttccgtactatttccgtgtttctgcagtaaatgagtatggtgttggtgagccctatgaaatgccagaaccaattgtagccacagaacagcctgctccacctaggagacttgatgttgttgatactagcaaatcctccgcagtcttagcttggcttaaacctgaccacgatggaggcagccggatcactggctacctgcttgaaatgagacaaaagggatctgacttctgggttgaagctggtcacaccaaacagctaactttcacagtagagcgtcttgttgagaaaactgaatatgaattccgtgtgaaggccaagaatgatgctggctatagtgaacccagagaagccttctcttctgtcatcattaaggagcctcaaatcgagcccactgctgacctcactggaattaccaatcagcttataacttgcaaagcaggaagcccatttaccattgacgtaccaatcagtggtcgtcctgcccccaaagtaacatggaaactggaagaaatgagacttaaagagacagatcgagtgagcattacaacaacaaaagacagaaccacactgactgtaaaggacagcatgagaggtgactctggaagatacttcttgaccctggaaaatacagctggtgttaaaacatttagcgtcacagttgtggtcattggaaggccaggtccagtaaccggccccattgaggtctcatctgtctcagctgaatcgtgtgtcctgtcatggggagaacctaaagatggaggaggcactgaaattactaattacatagttgaaaagcgtgaatcgggtacaacagcttggcagcttgtcaattccagtgtcaagcgcactcaaattaaagtcactcatctcacaaaatacatggaatattctttccgtgtcagttcagagaacagatttggtgtcagcaaacctctagaatcagcaccaataattgctgaacatccatttgtcccaccaagcgctcctaccagacctgaggtctaccatgtgtctgccaatgccatgtctattcgttgggaagaaccctaccacgatggtggcagtaaaatcattggctactgggttgagaagaaagaacgtaatacaattctttgggtgaaagaaaacaaagtgccatgcttagagtgcaactacaaagtaactggtttagtagaaggactggaatatcagttcagaacttatgcactcaatgctgcaggtgttagcaaggccagcgaagcttcaagacctataatggctcaaaatccagttgatgcaccaggcagaccagaggtgacagatgtcacaagatcaacagtatcactgatttggtctgccccagcgtatgatggaggcagcaaggttgtgggctacatcatagagcgtaagccagtcagtgaggtaggagatggtcgctggctgaagtgcaactacaccattgtatctgacaatttcttcaccgtgactgctctcagtgaaggagacacttatgagttccgtgtgttagccaagaatgcagcaggcgtaattagcaaagggtctgaatctacaggccctgtcacttgccgagatgaatacgctccacccaaagccgaactggatgcccgattacacggtgatctggttaccatcagagcaggttctgatcttgttctggatgctgcagttggtggcaaacctgaacccaaaattatctggaccaaaggagacaaggagctagatctctgtgaaaaagtctctttgcagtatactggcaaacgagcaactgctgtgatcaagttctgtgacagaagtgacagtggaaaatacactttaacagtgaaaaatgccagcgggaccaaggccgtgtctgtcatggtcaaagtgcttgattcccctggcccatgtggaaagctcaccgtcagcagagtaacacaggagaagtgcactttagcctggagccttccgcaggaagacggaggagcagaaatcactcactacatcgtggaaagacgcgagactagcaggctcaactgggtgattgttgaaggcgaatgcccaaccctatcctatgtcgttaccaggctcatcaagaacaatgagtacatattccgagtgagggcagtaaacaaatatggccctggtgtgcctgttgaatcagagccaattgtagccagaaactcattcactattccatcaccacccggcatacctgaagaagttgggactggcaaagagcatatcatcattcagtggacaaaacctgaatctgatggtggcaatgaaatcagcaactacctagtagacaaacgtgagaagaagagcctgcgctggacacgtgtcaacaaagactatgtggtgtatgataccaggctgaaggtgaccagcctgatggagggttgtgattaccagttccgggtgaccgcagtgaatgcagctggtaacagtgagcccagcgaagcttccaacttcatctcatgcagagaaccatcatatacccctggaccaccttctgctccaagagttgtggataccaccaaacacagcattagtttggcatggaccaaacccatgtacgatggtggtactgacattgtaggatatgttctggaaatgcaagagaaggacactgatcagtggtaccgagtgcataccaatgccacaataagaaatactgaattcactgtgccagaccttaaaatgggccagaaatattccttcagagttgctgccgtgaacgtgaagggtatgagcgaatacagcgaatcaattgctgaaattgagcccgtggaaagaatagaaataccagatcttgagcttgcagatgatctaaagaagactgtgaccatcagggctggggcctccttgcgcttgatggtgtctgtatctggaagaccacctcctgtcataacgtggagcaagcagggcattgaccttgcaagccgggcaattattgacaccactgagagctactcattgctaatagtggacaaagttaatcggtacgatgctggaaaatacacaattgaagctgaaaaccaatctggcaagaaatcagcaacagtccttgttaaagtctatgatactcctggtccctgtccttcagtgaaagttaaggaagtatcaagagattctgtgactataacttgggaaattcccacgattgatggtggagctccagtcaacaattacatcgttgagaagcgtgaagctgctatgagagcattcaaaacagtaactaccaaatgcagcaagacactttacagaatttctggacttgtagaaggaaccatgtactatttcagagtgctgccagaaaatatttatggcattggagaaccttgtgaaacatctgatgcagtactggtctcagaagtgcctttggtgcctgcaaagctagaagtggtcgatgtcaccaaatccactgttacccttgcctgggaaaaaccactctacgatggtggtagccgactcactggatatgttctcgaggcctgcaaagctggcacagagagatggatgaaggttgtcaccttaaaacccacagtcctagagcacactgttacttccttaaatgaaggtgaacaatacttatttagaataagggcacaaaatgagaaaggtgtgtcagaaccaagagagactgtcacagccgtgactgtacaagacctcagagtgttgccaacaatcgatctttctacaatgcctcagaagaccatccatgtcccagctggcagaccagtagagctggtgatacctattgctggccgtccacctcctgctgcttcctggttctttgctggttctaaactgagagaatcagagcgtgtcacagttgaaactcacactaaagtagctaaattaaccatccgtgaaaccactatcagagatactggagaatacacacttgaattgaagaatgttaccggaactacttcagaaaccattaaagttatcattcttgacaagcctggtccaccaacaggacctattaagattgatgaaattgatgctacatcaattaccatttcctgggaaccacctgaattggacggtggtgctccactgagtggttatgtggtagaacaacgtgacgctcatcgtccaggatggctgcccgtttctgaatcagtgactaggtccacgtttaagtttaccagactcaccgaaggaaatgagtatgtgttccgtgtggctgcaacaaaccgcttcgggattggctcttacttgcagtctgaggtcatagagtgtcgcagcagcatccgtattcctggacccccagaaacattacagatatttgatgtttcccgtgatggcatgacacttacttggtacccaccagaggatgacggtggctcccaagtgactggatatattgtggagcgcaaagaagtgagagcagatcgatgggtccgtgtaaataaagtacctgtgacaatgacacggtaccgctccactggccttactgaaggcttagaatatgaacaccgtgtcacagccattaatgcaagagggtctgggaaaccaagtcgtccttccaaacccatcgttgccatggatccaattgctcctccaggaaagccacaaaacccaagagttactgatacaacaaggacatcagtctccctggcctggagtgttccagaagatgaaggaggatctaaagtcacaggctacttgattgaaatgcaaaaagtagatcaacatgaatggaccaagtgtaacaccactccaaccaagattcgagagtatactctaacacacctacctcagggtgcagaatacaggttccgcgtcctagcttgtaatgctggtggacctggtgagcctgctgaggtaccaggaacagtcaaagtcactgaaatgcttgaatatcctgattatgaacttgatgaaagataccaagaaggtatctttgtaaggcaaggtggcgtcatcagacttaccataccaatcaaaggaaaaccattcccaatatgtaaatggaccaaggaaggccaggatattagtaagcgtgccatgattgcaacatctgaaacacacactgagcttgtgatcaaagaagcagacaggggtgattctggcacttatgacctggttctggaaaataaatgtggcaagaaggctgtctacatcaaggtcagggtgataggaagtcccaacagtccagaagggccactggaatatgatgacatccaagtccgctctgtgagggtcagctggagacctcctgctgatgatggtggtgctgacatcttaggctacatcctcgagagacgagaagtgcctaaagccgcctggtataccattgattccagagtccgaggtacatctctggtggtaaaaggcctcaaagagaatgtagaataccatttccgtgtttcagcagaaaaccagtttggcataagcaaacccttgaaatctgaggaaccagtcacaccaaaaacaccattgaatcctccagaacctccaagcaatcctccagaagtactcgatgtaaccaagagttctgttagcttgtcctggtcccggcccaaagatgatggtggttctagagtcacaggctactacatcgaacgcaaagagacatccactgacaagtgggtcagacacaacaagactcagatcaccaccacaatgtacactgtcacagggcttgttcccgatgctgagtatcagttccgcatcatcgcacagaatgatgttggcctgagtgagaccagccctgcttctgaaccagttgtttgcaaagatccatttgataaaccaagccaaccaggagaacttgagattctttcaatatccaaagatagtgtcactctacagtgggagaaacctgaatgtgatggtggtaaagaaattcttggatactgggttgaatatagacagtctggagacagtgcctggaagaagagcaataaggaacgtattaaggacaagcaattcacaataggaggtttgctggaagctactgagtatgaattcagggtttttgctgagaatgagactgggctgagcagacctcgcagaactgctatgtctataaagactaaactcacatctggagaggccccaggaatacgcaaagaaatgaaggatgttaccacaaaattgggtgaagctgctcaactctcatgccagattgttggaaggcctcttcctgacattaaatggtacagatttggtaaagagctcatacaaagccggaaatacaaaatgtcttcagatggacgcacacacactcttacagtaatgacagaggaacaggaagatgaaggtgtttatacctgcatagccaccaatgaggttggagaagtagaaaccagtagtaagcttctcctgcaagcaacaccgcagttccatcctggttacccactgaaagagaaatattatggagctgtgggttccacacttcggcttcatgttatgtacattggtcgtccagtacctgccatgacttggttccatggtcagaaacttttgcaaaactcagaaaacattactattgaaaacactgagcactatactcatcttgtcatgaagaatgtccaacgtaagactcatgctgggaaatacaaagtccagctcagcaatgtttttggaacagttgatgccatccttgatgtggaaatacaagataaaccagacaaacctacaggaccaattgtgatcgaagctctattgaagaactccgcagtgatcagctggaaaccacccgcagatgacggaggctcctggatcaccaactatgtggtggaaaaatgtgaggccaaggagggggctgaatggcaattggtgtcttcagccatctcagtgacaacctgtagaattgtgaacctcacagaaaatgctggctattacttccgggtttcagctcagaacactttcggcatcagtgaccctctagaagtgtcctcagttgtgatcattaagagtccatttgaaaagccaggtgctcctggcaaaccaactattactgctgtcacaaaagattcttgtgttgtggcctggaagccacctgccagtgatggaggtgcaaagattagaaattactaccttgagaagcgtgagaagaagcagaataaatggatttctgtgacaacagaagaaattcgagaaactgtcttttcagtgaaaaaccttattgaaggtcttgaatacgagtttcgtgtgaaatgtgaaaatctaggtggggaaagtgaatggagtgaaatatcagaacccatcactcccaaatctgatgtcccaattcaggcaccacactttaaagaggaactgagaaatctaaatgtcagatatcagagcaatgctaccttggtctgcaaagtgactggtcatccaaaacctatcgtcaaatggtacagacaaggcaaagaaatcattgcagatggattaaaatataggattcaagaatttaagggtggctaccaccagctcatcattgcaagtgtcacagatgatgatgccacagtttaccaagtcagagctaccaaccaagggggatctgtgtctggcactgcctccttggaagtggaagttccagctaagatacacttacctaaaactcttgaaggcatgggagcagttcatgctctccgaggtgaagtggtcagcatcaagattcctttcagtggcaaaccagatcctgtgatcacctggcagaaaggacaagatctcattgacaataatggccactaccaagttattgtcacaagatccttcacatcacttgttttccccaatggggtagagagaaaagatgctggtttctatgtggtctgtgctaaaaacagatttggaattgatcagaagacagttgaactggatgtggctgatgttcctgacccacccagaggagtcaaagttagtgatgtctcacgagattctgtcaacttaacatggactgagccagcctctgatggtggcagcaaaatcaccaactacattgttgaaaaatgtgcaactactgcagaaagatggctccgtgtaggacaggcccgagaaacacgttataccgtgatcaacttatttggaaaaacaagttaccagttccgggtaatagctgaaaataaatttggtctgagcaagccttcagagccttcagaaccaaccataaccaaagaagataagaccagagctatgaactatgatgaagaggtagatgaaaccagggaagtctccatgactaaagcatctcactcttcaaccaaggaactctatgagaaatatatgattgctgaagatcttgggcgtggtgagtttggaattgtccatcgttgtgttgaaacatcctcaaagaagacatacatggccaaatttgttaaagtcaaagggactgatcaggttttggtaaagaaggaaatttccattctgaatattgctaggcatagaaacatcttacacctccatgaatcatttgaaagcatggaagaattagttatgatctttgagtttatatcaggacttgacatatttgagcgcattaacacaagtgcttttgaacttaatgaaagagaaattgtaagttatgttcaccaggtctgtgaagcacttcagtttttacacagtcataatattggacactttgacattagaccagaaaatatcatttaccaaaccagaagaagctctaccattaaaatcatagaatttggtcaagcccgtcagctgaaaccaggggacaacttcaggcttctattcactgccccagaatactatgcacctgaagtccaccagcatgatgttgtcagcacagccacagacatgtggtcacttggaacactggtatatgtgctattgagtggtatcaacccattcctggctgaaactaaccaacagatcattgagaatatcatgaatgctgaatatactttcgatgaggaagcattcaaagagattagcattgaagccatggattttgttgaccggttgttagtgaaagagaggaaatctcgcatgacagcatcggaggctctccagcacccatggttgaagcagaagatagaaagagtcagtactaaagttatcagaacattaaaacaccggcgttattaccacaccctgatcaagaaagacctcaacatggttgtgtcagcagcccggatctcctgtggtggtgcaattcgatctcagaagggagtgagtgttgctaaagttaaagtggcatccattgaaattggcccagtttctgggcagataatgcatgcagttggtgaagaaggaggacatgtcaaatatgtatgcaaaattgaaaattatgatcagtctacccaagtgacttggtactttggcgtccgacagctggagaacagtgagaaatacgaaatcacctacgaagatggagtggccatcctctatgtcaaagacattaccaaattagatgatggtacctacagatgcaaagtagtcaatgactatggtgaagacagttcttatgcagagctatttgttaaaggtgtgagagaagtctatgactattactgccgtagaaccatgaagaaaattaagcgcagaacagacacaatgagactcctggaaaggccaccagaatttaccctgcctctctataataagacagcttatgtaggtgaaaatgtccggtttggagtaactataactgtccacccagagcctcatgtaacatggtataaatcaggtcagaaaatcaaaccaggtgacaatgacaagaagtacacatttgagtcagacaagggtctttaccaattaacaatcaacagtgtcactacagatgatgacgctgaatatactgttgtggcaaggaacaaatatggtgaagacagctgtaaagcaaagctgacagtaaccctacacccacctccaacagatagtaccttaagacccatgttcaaaaggttactggcaaatgcagaatgccaagaaggccaaagtgtctgctttgagatcagagtgtctggcatccccccaccaacattaaaatgggagaaagatggtcagccactgtccctcgggcctaacattgaaattatccatgaaggcttggattattatgctctgcacatcagggacactttgcctgaagacacgggttattatagagtcacagccactaacacagctgggtccaccagctgccaggctcacctacaagtggaacgcctgaggtacaagaaacaggaattcaagagtaaggaggagcatgagcgacacgtacaaaaacaaattgacaaaaccctcagaatggctgaaattctttctggaactgaaagtgtaccactgacacaggtagctaaagaggctctgagagaagctgctgtcctttataaaccggctgtaagcaccaagactgtaaaaggggaattcagacttgagatagaagaaaagaaggaggagagaaaactccggatgccttatgatgtaccagagccacgcaagtataagcagactaccatagaagaagaccaacgcatcaagcagttcgtgcccatgtctgacatgaagtggtataaaaagatacgtgatcagtatgaaatgcctgggaaacttgacagagttgtacagaaacgacccaagcgcatccgcctttcaagatgggaacagttctatgtgatgcctcttccacgcattacagatcaatacagacctaaatggcgtattcctaaactgtcccaagatgatcttgagatagtgagaccagcccgccggcgtacaccttctcctgattatgacttttactaccgacctagaagacgttctcttggggacatctctgatgaagaattactcctccccattgatgactacttagcaatgaaaagaacagaggaagagaggctgcgtcttgaagaagagcttgagttaggtttttcagcttcacccccaagtcgaagccctccacactttgagctttctagcctacgttactcttcaccacaagctcatgtcaaggtggaggaaacaagaaaagacttcaggtattcaacctatcacatcccaacgaaggctgaagctagtacaagttatgcagaactgagggaacggcatgcccaggctgcgtacagacagccaaagcaacggcaaagaatcatggctgagagggaggatgaagagttgcttcgcccagttacgaccacccagcatctctcagaatacaaaagcgaacttgacttcatgtcaaaggaggaaaagtctagaaagaaatcaaggcgacaaagagaagtgacagaaataacagaaattgaggaagaatacgaaatctcaaaacatgctcaaagagaatcatcctcatctgcgtctagactactgagacgacggcgctccctgtctccaacttatattgagttaatgaggccagtgtctgagctgatccggtcacgtccacaaccggctgaggaatacgaagatgacacagaaagaaggtcacctactccagagagaactcgcccacgatcccccagccctgtgtctagtgagagatcactctcgagatttgagaggtctgcaagatttgatatcttttccaggtatgagtccatgaaagctgctttaaaaactcagaagacatcagaaaggaagtatgaagttttgagtcagcagcctttcacactggaccatgcccctcgaatcacactgagaatgcgctcgcacagggtaccatgtggccaaaatacacgttttattttaaatgttcagtctaagccaactgccgaggttaaatggtaccacaatggtgtggaactccaagaaagcagtaagattcattacaccaacacgagtggagtcctcaccctggaaattctggactgtcatactgatgacagtggaacctaccgtgctgtgtgcaccaactacaagggcgaagcttctgactatgcaacgttggacgtgacaggaggggattataccacctatgcttcccaacgcagagatgaagaggtccccagatctgttttccctgagctgacaagaacagaggcgtatgctgtttcatcatttaagaaaacatctgagatggaagcttcgtcttctgtcagggaagtgaaatcacagatgacggagacaagggaaagtctctcctcatatgaacactctgcatctgcagaaatgaaaagtgctgcattagaagaaaagtcactggaagaaaaatccacaaccagaaagatcaagacgactttggcagcaagaattctaacaaagccacggtccatgaccgtctacgagggcgagtctgcaaggttttcttgtgacaccgatggtgagccggtaccaactgtgacctggctgcgtaaaggacaagtgctaagtacttctgcccgccaccaagtgaccaccacaaagtacaaatcaacctttgagatctcttcagtccaggcttccgatgagggcaattacagcgtggtggtagaaaacagtgaagggaaacaagaagcagagttcactctgactattcaaaaggccagggtaactgaaaaggctgtgacatcaccaccaagagtcaaatccccagagcctcgggtgaaatccccagaagcagttaagtctccaaaacgagtgaaatctccagaaccttctcacccgaaagccgtatcacccacagagacaaaaccaacaccaacagagaaagttcagcacctcccagtctctgccccaccaaagattactcagttcctgaaagcagaagcttctaaagagattgcaaaactgacctgtgtggttgaaagcagtgtattaagggcaaaagaggtcacctggtataaagatggcaagaaactgaaggaaaatgggcatttccagtttcattattcagcagatggtacctatgagctcaaaatcaataacctcactgaatctgatcaaggagaatatgtttgtgagatttctggtgaaggtggaacgtctaaaaccaacttacaatttatggggcaagcctttaagagtatccatgagaaggtatcaaaaatatcagaaactaagaaatcagatcagaaaaccactgagtcaacagtaaccagaaaaactgaaccaaaagctcctgaaccaatttcctcaaaaccagtaattgttactgggttgcaggatacaactgtttcttcagacagtgttgctaaatttgcagttaaggctactggagaaccccggccaactgccatctggacaaaagatggaaaggccattacacaaggaggtaaatataaactctctgaagacaagggagggttcttcttagaaattcataagactgatacttctgacagtggactttatacttgtacagtaaaaaattcagctggatctgtgtcctctagctgcaaattaacaataaaagctataaaagatactgaggcacagaaagtctctacacaaaagacttctgaaattacacctcagaagaaagctgttgtccaagaggaaatttcccaaaaagccctaaggtctgaagaaattaagatgtcagaggcaaaatctcaagaaaagttagccctcaaagaggaagcttcaaaggttctgatttctgaagaagtcaagaaatcagcagcaacctccctggaaaaatccattgtccatgaggaaatcactaaaacatcacaggcatcagaagaagtcagaactcatgctgagattaaagcattttctactcagatgagcataaacgaaggtcaaagactggttttaaaagccaacattgctggtgccactgatgtgaaatgggtactgaatggcgtagagcttaccaactctgaggagtaccgatatggtgtctcaggcagcgatcagaccctaaccatcaagcaagccagtcacagagatgaaggaatcctcacctgcataagcaaaaccaaggaaggaatcgtcaagtgtcagtatgatttgacactgagcaaagaactctcagatgctccagccttcatctcacagcctagatctcaaaatattaatgaaggacaaaatgttctctttacttgtgaaatcagtggcgagccatcccctgaaatcgaatggtttaaaaacaacctgccaatttctatttcttcaaatgtcagcataagccgctccagaaatgtatactcccttgaaatccgaaatgcatcagtcagcgacagtggaaagtacacaattaaggccaaaaatttccgtggccagtgttcagctacagcttccttaatggtccttcctctagttgaagaaccttccagagaggtagtattgagaacaagtggtgacacaagcttgcaaggaagcttctcgtctcagtcagtccaaatgtctgcctccaagcaggaggcctccttcagcagtttcagcagcagcagtgctagcagcatgactgagatgaaatttgcaagcatgtctgcccaaagcatgtcctccatgcaagagtcctttgtagaaatgagttccagcagctttatgggaatatctaatatgacacaactggaaagctcaactagtaaaatgcttaaagcaggcataagaggaattccgcctaaaattgaagctcttccatctgatatcagcattgatgaaggcaaagttctaacagtagcctgtgctttcacgggtgagcctaccccagaagtaacatggtcctgtggtggaagaaaaatccacagtcaagaacaggggaggttccacattgaaaacacagatgacctgacaaccctgatcatcatggacgtacagaaacaagatggtggactttataccctgagtttagggaatgaatttggatctgactctgccactgtgaatatacatattcgatccatttaagagggcctgtgcccttatactctacactcattcttaacttttcgcaaacgtttcacacggactaatctttctgaactgtaaatatttaaagaaaaaaaagtagttttgtatcaacctaaatgagtcaaagttcaaaaatattcatttcaatcttttcataattgttgacctaagaatataatacatttgctagtgacatgtacatactgtatatagccggattaacggttataaagttttgtaccatttattttatgacattttacaatgtaagttttgaaactaactgttggtaggagaaagtttcttatggaacgaataccctgctcaacatttaatcaatctttgtgcctcaacatactgttgatgtctaagtatgcctcagtgggttgagaaaatccccattgaagatgtcctgtccacctaaaagagaatgatgctgtgcatatcacttgatatgtgcaccaatacctactgaatcagaaatgtaaggcattggtgatgtttgcatttaccctcctgtaagcaacactttaacgtcttacattttctctgatgatgtcacacaaaattatcatgacaaatattaccagagcaaagtgtaacggccaacactttgttcgctcattttacgctgtctctgacataaggagtgcctgaatagcttggaaaagtaacatctcctggccatcccttcatttaaccaagctattcaagtattcctatgccagagcagtgccaactcttggaggtcccagagtgcagccaatgcctttgtgtggtagttctaaattttaattgcacctgaaaaacctgggcacctaagcaatgagccacagcaaaaagtaaagaacaacaacaaaataaagctgttgttaaattttaaacaatattactaattgcccaaaatgtcaatttgatgtagttcttttcatgcaagtataaattcaattgttagttataattgttggacctccttgagatagtaacaacaaaataaagcaagctatctgcacctc

SEQ ID NO: 5946 - DNA, 1591 bp, Homo sapiens; identical to SEQ ID NO: 988

SEQ ID NO: 5947 - DNA, 710 bp, Homo sapiens
gcagttactgagaactcataagacgaagctaaaatccctcttcggatccacagtcaaccgccctgaacacatcctgcaaaaagcccagagaaaggagcgccatggattactacagaaaatatgcagctatctttctggtcacattgtcggtgtttctgcatgttctccattccgctcctgatgtgcaggattgcccagaatgcacgctacaggaaaacccattcttctcccagccgggtgccccaatacttcagtgcatgggctgctgcttctctagagcatatcccactccactaaggtccaagaagacgatgttggtccaaaagaacgtcacctcagagtccacttgctgtgtagctaaatcatataacagggtcacagtaatggggggtttcaaagtggagaaccacacggcgtgccactgcagtacttgttattatcacaaatcttaaatgttttaccaagtgctgtcttgatgactgctgattttctggaatggaaaattaagttgtttagtgtttatggctttgtgagataaaactctccttttccttaccataccactttgacacgcttcaaggatatactgcagctttactgccttcctccttatcctacagtacaatcagcagtctagttcttttcatttggaatgaatacagcatttagcttgttccactgcaaataaagccttttaaatcatcattcaa

SEQ ID NO: 5948 - DNA, 1218 bp, Homo sapiens
ctctgggccgctgaggggagctgaagggaggtcaggcaaacactcactcaatctgcctccctccatcaggctgcccttctctggcttcctcctgatccaagttctctacattcatctctctgcctccaggactggtataagagctgagctcaggtgagctggctcctcctgtcttgtctcagcggctgccaacagatcatgagccatcagctcctctggggccagctataggacaacagaactctcaccaaaggaccagacacagtgggcaccatgggacagtgtcggtcagccaacgcagaggatgctcaggaattcagtgatgtggagagggccattgagaccctcatcaagaactttcaccagtactccgtggagggtgggaaggagacgctgaccccttctgagctacgggacctggtcacccagcagctgccccatctcatgccgagcaactgtggcctggaagagaaaattgccaacctgggcagctgcaatgactctaaactggagttcaggagtttctgggagctgattggagaagcggccaagagtgtgaagctggagaggcctgtccgggggcactgagaactccctctggaattcttggggggtgttggggagagactgtgggcctggagataaaacttgtctcctctaccaccaccctgtaccctagcctgcacctgtcctcatctctgcaaagttcagcttccttccccaggtctctgtgcactctgtcttggatgctctggggagctcatgggtggaggagtctccaccagagggaggctcaggggactggttgggccagggatgaatatttgagggataaaaattgtgtaagagccaaagaattggtagtagggggagaacagagaggagctgggctatgggaaatgatttgaataatggagctgggaatatggctggatatctggtactaaaaaagggtctttaagaacctacttcctaatctcttccccaatccaaaccatagctgtctgtccagtgctctcttcctgcctccagctctgccccaggctcctcctagactctgtccctgggctagggcaggggaggagggagagcagggttgggggagaggctgaggagagtgtgacatgtggggagaggaccagctgggtgcttgggcattgacagaatgatggttgttttgtatcatttgattaataaaaaaaaatgaaaaaagtgaaa

SEQ ID NO: 5949 - DNA, 5312 bp, Homo sapiens
acatcagaatggtagataattcctgttccactttctttgatgaaacaagtaaagaagaaacaacacaatcatattaatagaagagtcttcgttccagacgcagtccaggaatcatgctggagaagttctgcaactctactttttggaattcctcattcctggacagtccggaggcagacctgccactttgttttgagcaaactgttctggtgtggattcccttgggctacctatggctcctggccccctggcagcttctccacgtgtataaatccaggaccaagagatcctctaccaccaaactctatcttgctaagcaggtattcgttggttttcttcttattctagcagccatagagctggcccttgtactcacagaagactctggacaagccacagtccctgctgttcgatataccaatccaagcctctacctaggcacatggctcctggttttgctgatccaatacagcagacaatggtgtgtacagaaaaactcctggttcctgtccctattctggattctctcgatactctgtggcactttccaatttcagactctgatccggacactcttacagggtgacaattctaatctagcctactcctgcctgttcttcatctcctacggattccagatcctgatcctgatcttttcagcattttcagaaaataatgagtcatcaaataatccatcatccatagcttcattcctgagtagcattacctacagctggtatgacagcatcattctgaaaggctacaagcgtcctctgacactcgaggatgtctgggaagttgatgaagagatgaaaaccaagacattagtgagcaagtttgaaacgcacatgaagagagagctgcagaaagccaggcgggcactccagagacggcaggagaagagctcccagcagaactctggagccaggctgcctggcttgaacaagaatcagagtcaaagccaagatgcccttgtcctggaagatgttgaaaagaaaaaaaagaagtctgggaccaaaaaagatgttccaaaatcctggttgatgaaggctctgttcaaaactttctacatggtgctcctgaaatcattcctactgaagctagtgaatgacatcttcacgtttgtgagtcctcagctgctgaaattgctgatctcctttgcaagtgaccgtgacacatatttgtggattggatatctctgtgcaatcctcttattcactgcggctctcattcagtctttctgccttcagtgttatttccaactgtgcttcaagctgggtgtaaaagtacggacagctatcatggcttctgtatataagaaggcattgaccctatccaacttggccaggaaggagtacaccgttggagaaacagtgaacctgatgtctgtggatgcccagaagctcatggatgtgaccaacttcatgcacatgctgtggtcaagtgttctacagattgtcttatctatcttcttcctatggagagagttgggaccctcagtcttagcaggtgttggggtgatggtgcttgtaatcccaattaatgcgatactgtccaccaagagtaagaccattcaggtcaaaaatatgaagaataaagacaaacgtttaaagatcatgaatgagattcttagtggaatcaagatcctgaaatattttgcctgggaaccttcattcagagaccaagtacaaaacctccggaagaaagagctcaagaacctgctggcctttagtcaactacagtgtgtagtaatattcgtcttccagttaactccagtcctggtatctgtggtcacattttctgtttatgtcctggtggatagcaacaatattttggatgcacaaaaggccttcacctccattaccctcttcaatatcctgcgctttcccctgagcatgcttcccatgatgatctcctccatgctccaggccagtgtttccacagagcggctagagaagtacttgggaggggatgacttggacacatctgccattcgacatgactgcaattttgacaaagccatgcagttttctgaggcctcctttacctgggaacatgattcggaagccacagtccgagatgtgaacctggacattatggcaggccaacttgtggctgtgataggccctgtcggctctgggaaatcctccttgatatcagccatgctgggagaaatggaaaatgtccacgggcacatcaccatcaagggcaccactgcctatgtcccacagcagtcctggattcagaatggcaccataaaggacaacatcctttttggaacagagtttaatgaaaagaggtaccagcaagtactggaggcctgtgctctcctcccagacttggaaatgctgcctggaggagatttggctgagattggagagaagggtataaatcttagtgggggtcagaagcagcggatcagcctggccagagctacctaccaaaatttagacatctatcttctagatgaccccctgtctgcagtggatgctcatgtaggaaaacatatttttaataaggtcttgggccccaatggcctgttgaaaggcaagactcgactcttggttacacatagcatgcactttcttcctcaagtggatgagattgtagttctggggaatggaacaattgtagagaaaggatcctacagtgctctcctggccaaaaaaggagagtttgctaagaatctgaagacatttctaagacatacaggccctgaagaggaagccacagtccatgatggcagtgaagaagaagacgatgactatgggctgatatccagtgtggaagagatccccgaagatgcagcctccataaccatgagaagagagaacagctttcgtcgaacacttagccgcagttctaggtccaatggcaggcatctgaagtccctgagaaactccttgaaaactcggaatgtgaatagcctgaaggaagacgaagaactagtgaaaggacaaaaactaattaagaaggaattcatagaaactggaaaggtgaagttctccatctacctggagtacctacaagcaataggattgttttcgatattcttcatcatccttgcgtttgtgatgaattctgtggcttttattggatccaacctctggctcagtgcttggaccagtgactctaaaatcttcaatagcaccgactatccagcatctcagagggacatgagagttggagtctacggagctctgggattagcccaaggtatatttgtgttcatagcacatttctggagtgcctttggtttcgtccatgcatcaaatatcttgcacaagcaactgctgaacaatatccttcgagcacctatgagattttttgacacaacacccacaggccggattgtgaacaggtttgccggcgatatttccacagtggatgacaccctgcctcagtccttgcgcagctggattacatgcttcctggggataatcagcacccttgtcatgatctgcatggccactcctgtcttcaccatcatcgtcattcctcttggcattatttatgtatctgttcagatgttttatgtgtctacctcccgccagctgaggcgtctggactctgtcaccaggtccccaatctactctcacttcagcgagaccgtatcaggtttgccagttatccgtgcctttgagcaccagcagcgatttctgaaacacaatgaggtgaggattgacaccaaccagaaatgtgtcttttcctggatcacctccaacaggtggcttgcaattcgcctggagctggttgggaacctgactgtcttcttttcagccttgatgatggttatttatagagataccctaagtggggacactgttggctttgttctgtccaatgcactcaatatcacacaaaccctgaactggctggtgaggatgacatcagaaatagagaccaacattgtggctgttgagcgaataactgagtacacaaaagtggaaaatgaggcaccctgggtgactgataagaggcctccgccagattggcccagcaaaggcaagatccagtttaacaactaccaagtgcggtaccgacctgagctggatctggtcctcagagggatcacttgtgacatcggtagcatggagaagattggtgtggtgggcaggacaggagctggaaagtcatccctcacaaactgcctcttcagaatcttagaggctgccggtggtcagattatcattgatggagtagatattgcttccattgggctccacgacctccgagagaagctgaccatcatcccccaggaccccatcctgttctctggaagcctgaggatgaatctcgaccctttcaacaactactcagatgaggagatttggaaggccttggagctggctcacctcaagtcttttgtggccagcctgcaacttgggttatcccacgaagtgacagaggctggtggcaacctgagcataggccagaggcagctgctgtgcctgggcagggctctgcttcggaaatccaagatcctggtcctggatgaggccactgctgcggtggatctagagacagacaacctcattcagacgaccatccaaaacgagttcgcccactgcacagtgatcaccatcgcccacaggctgcacaccatcatggacagtgacaaggtaatggtcctagacaacgggaagattatagagtgcggcagccctgaagaactgctacaaatccctggacccttttactttatggctaaggaagctggcattgagaatgtgaacagcacaaaattctagcagaaggccccatgggttagaaaaggactataagaataatttcttatttaattttattttttataaaatacagaatacatacaaaagtgtgtataaaatgtacgttttaaaaaaggataagtgaacacccatgaacctactacccaggttaagaaaataaatgtcaccaggtacttgagaaacccctcgattgtctacctcgatcgtacttccttgctacccacccctcccagggacaaccactgtcctgaatttcacgataattattcctttgcctttcatttctgttttatcacctttgtatgtatctttaaacaacatatacccttttttacttatgtaaatggactgactcatactgcatacatcttctatgacttgattcttttgttcaatattatatctgagattcatccatggtgatgcaaataggtgcattattttttttcactgctctgtagtctggcattgtatgaatacagcacaatgtatcagttttaatattggggatcattagcattattctcaggtttttaaaaattataagcagtactactatgg

SEQ ID NO: 5950 - DNA, 1455 bp, Homo sapiens
atgatggacgttaacagcagcggccgcccggacctctacgggcacctccgctctttccttctgccagaagtggggcgcgggctgcccgacttgagccccgacggtggcgccgacccggtcgcgggctcctgggcgccgcacctgctgagcgaggtgacagccagcccggcgcccacctgggacgcgcccccggacaatgcctccggctgtggggaacagatcaactacggcagagtcgagaaagttgtgatcggctccatcctgacgctcatcacgctgctgacgatcgcgggcaactgcctggtggtgatctccgtgtgcttcgtcaagaagctccgccagccctccaactacctgatcgtgtccctggcgctggccgacctctcggtggctgtggcggtcatgcccttcgtcagcgtcaccgacctcatcgggggcaagtggatctttggacactttttctgtaatgtcttcatcgccatggacgtcatgtgctgcacggcctcgatcatgaccctgtgcgtgatcagcattgacaggtaccttgggatcacaaggcccctcacataccctgtgaggcagaatgggaaatgcatggcgaagatgattctctccgtctggcttctctccgcctccatcaccttacctccactctttggatgggctcagaatgtaaatgatgataaggtgtgcttgatcagccaggactttggctatacgatttactctaccgcagtggcattttatatccccatgtccgtcatgcttttcatgtactaccagatttacaaggctgccaggaagagtgctgccaaacacaagtttcctggcttccctcgagtggagccagacagcgtcatcgccctgaatggcatagtgaagctccagaaggaggtggaagagtgtgcaaacctttcgagactcctcaagcatgaaaggaaaaacatctccatctttaagcgagaacagaaagcagccaccaccctggggatcatcgtcggggcctttaccgtgtgctggctgccatttttcctcctctcgacagccagacccttcatctgtggcacttcctgcagctgcatcccactgtgggtggagaggacatttctgtggctaggctatgcaaactctctcattaacccttttatatatgccttcttcaaccgggacctgaggaccacctatcgcagcctgctccagtgccagtaccggaatatcaaccggaagctctcagctgcaggcatgcatgaagccctgaagcttgctgagaggccagagagacctgagtttgtgctcataaccagaacctcaggagttcatcaggcactcgaaaattttccctggggtaatgaagtgaatagatggaggaaaagctgtgaatacttttgcactgacaaaatgctgactactgtagaaaaaaaggtcatgattcatgattgaaagcagaacaatgga

SEQ ID NO: 5951 - DNA, 3504 bp, Homo sapiens
gtgctgggctgttcgtctcttctatgtgctgatttcctgggttactttgggtcttccttttctttctcccttttaccctgtctcctttcttgaggctgatcgatcacagccaggcctctccattctatttacccagcgttttccttctctccagttagtggggtagatgaacgccctgtgtttataaggtgcctcccaggagcctgagacctgtgagaagaatggggggtggaggtgggggagactcgtcacgaagggagaccttggagcttcgagggtgggaatgttcttattagattcttcatctctgttgacacaaacatgtaggagaagctggagaacatagacagggatgaggttttatttatttattgttcctggtcactgtctctttgaggattggtatctctgctccagaaaagatggcagcctctttcttctctgattttggtcttatgtggtatctggaggagctcaaaaaggaggagttcaggaaatttaaagaacatctcaagcaaatgactttgcagcttgaactcaagcagattccctggactgaggtcaaaaaagcatcccgggaagaacttgcaaacctcttgatcaagcactatgaagaacaacaagcttggaacataaccttaagaatctttcaaaagatggatagaaaggatctctgcatgaaggtcatgagggagagaacaggatacacaaagacctatcaagctcacgcaaagcagaaattcagccgcttatggtccagcaagtctgtcactgagattcacctatactttgaggaggaagtcaagcaagaagaatgtgaccatttggaccgcctttttgctcccaaggaagctgggaaacagccacgtacagtgatcattcaaggaccacaaggaattggaaaaacgacactcctgatgaagctgatgatggcctggtcggacaacaagatctttcgggataggttcctgtacacgttctatttctgctgcagagaactgagggagttgccgccaacgagtttggctgacttgatttccagagagtggcctgaccccgctgctcctataacagagatcgtgtctcaaccggagagactcttgttcgtcatcgacagcttcgaagagctgcagggcggcttgaacgaacccgattcggatctgtgtggtgacttgatggagaaacggccggtgcaggtgcttctgagcagtttgctgaggaagaagatgctcccggaggcctccctgctcatcgctatcaaacccgtgtgcccgaaggagctccgggatcaggtgacgatctcagaaatctaccagccccggggattcaacgagagtgataggttagtgtatttctgctgtttcttcaaagacccgaaaagagccatggaagccttcaatcttgtaagagaaagtgaacagctgttttccatatgccaaatcccgctcctctgctggatcctgtgtaccagtctgaagcaagagatgcagaaaggaaaagacctggccctgacctgccagagcactacctctgtgtactcctctttcgtctttaacctgttcacacctgagggtgccgagggcccgactccgcaaacccagcaccagctgaaggccctgtgctccctggctgcagagggtatgtggacagacacatttgagttttgtgaagacgacctccggagaaatggggttgttgacgctgacatccctgcgctgctgggcaccaagatacttctgaagtacggggagcgtgagagctcctacgtgttcctccacgtgtgtatccaggagttctgtgccgccttgttctatttgctcaagagccaccttgatcatcctcacccagctgtgagatgtgtacaggaattgctagttgccaattttgaaaaagcaaggagagcacattggatttttttggggtgttttctaactggccttttaaataaaaaggaacaagaaaaactggatgcgttttttggcttccaactgtcccaagagataaagcagcaaattcaccagtgcctgaagagcttaggggagcgtggcaatcctcagggacaggtggattccttggcgatattttactgtctctttgaaatgcaggatcctgcctttgtgaagcaggcagtgaacctcctccaagaagctaactttcatattattgacaacgtggacttggtggtttctgcctactgcttaaaatactgctccagcttgaggaaactctgtttttccgttcaaaatgtctttaagaaagaggatgaacacagctctacgtcggattacagcctcatctgttggcatcacatctgctctgtgctcaccaccagcgggcacctcagagagctccaggtgcaggacagcaccctcagcgagtcgacctttgtgacctggtgtaaccagctgaggcatcccagctgtcgccttcagaagcttggaataaataacgtttccttttctggccagagtgttctgctctttgaggtgctcttttatcagccagacttgaaatacctgagcttcaccctcacgaaactctctcgtgatgacatcaggtccctctgtgatgccttgaactacccagcaggcaacgtcaaagagctagcgttggctttctgccacctcagcgagcagtgctgcgaatacatctctgaaatgcttctgcgtaacaagagcgtgcgctatctagacctcagtgccaatgtcctgaaggacgaaggactgaaaactctctgcgaggccttgaaacatccggactgctgcctggattcactgtgtttggtaaaatgttttatcactgctgctggctgtgaagacctcgcctctgctctcatcagcaatcaaaacctgaagattctgcaaattgggtgcaatgaaatcggagatgtgggtgtgcagctgttgtgtcgggctctgacgcatacggattgccgcttagagattcttgggttggaagaatgtgggttaacgagcacctgctgtaaggatctcgcgtctgttctcacctgcagtaagaccctgcagcagctcaacctgaccttgaacaccttggaccacacaggggtggttgtactctgtgaggccctgagacacccagagtgtgccctgcaggtgctcgggctgagaaaaactgattttgatgaggaaacccaggcacttctgacggctgaggaagagagaaatcctaacctgaccatcacagacgactgtgacacaatcacaagggtagagatctgattgcgaggaacctgggctctgactcgaacacctgcaaaggacagggactgggaccgttacttacatgacactgcacccaggagatacaaatcattgatactctgagttgtgagatttctggcaccccattcatagatttgatatgatacacgtggtttttatgtgctctgtggccttggatgagtcactgaaaggccttcatggtctctcggtctcacaaggacctcttaacccctcaataaagtgttacatttctaaacattgg

SEQ ID NO: 5952 - DNA, 1076 bp, Homo sapiens
gtctgggctcggggcgcggcggcagtcagctctatgttcgcggtcttaacctctcctctggccgagtccttgcaagaagtgaattacccgaccctgcaaaacacttactattttggagtttaaagtatgtcatcatggcaaagtttcggagaaggacttgcatcattttggcactttttattctatttattttctctctgatgatgggtttaaaaatgctgagaccaaatacagctacttttggagctccttttggacttgaccttcttccagaacttcatcaacgaactattcatttggggaaaaattttgatttccaaaagagtgacagaatcaacagtgaaacaaataccaagaatttaaaaagtgttgaaatcactatgaaaccttccaaagcctctgaacttaacttggatgaactaccacctctgaacaattatctacatgtattttattacagttggtatggaaatccacaatttgatggtaaatatatacattggaatcatccagtgttagagcattgggaccctagaatagccaagaattatccacaagggagacacaaccctccagatgacattggctccagcttttatcctgaattgggaagttacagttctcgggatccttctgtcatagaaactcacatgagacaaatgcgctcagcttcaattggtaattattgtatatatatatatgtgtgtttgtgtctgtatatatgcatataaatgattttttgtgtaactttactagttaattttctcattattattaattatattgttaagctcatacctccaaattaaactgtatgtatgatcttaaacatccaggcaaccacattttaacactgcccttagtgtatattgtttaatttttacattttggagcatttctggatatattgttgatttctaatttaattcactttctcaattttattaaattatgatttacataaaatacaatgaatttcccactttaagtttatagctcattgatgttactcaaaagtatatacctgtttgaataccaccccaatcaagaagtaaaatatttctatagcccaaaaa

SEQ ID NO: 5953 - DNA, 2462 bp, Homo sapiens
ggtctcactctgttgctgtcttcacggagagcaggagcagaggctttgagaagccagtgggccttggcctcagccctgccggcagagggtccccaccatgcagctgaagtgccagggtgcttgtgaagtctaagcccttgtctggcatttgtcaggaatatagggtgaggcctctgggaccgagcggggcggggcggggcggggcggggcggggcgggaccaacagcgcacacttaagcggcccgggcgggtaccgccgtcccgccatggctctgaggcgcgccctgcccgcgctgcgcccctgcattccccgcttcgtcccgctgtccacggcgccggcctcccgcgagcagcccgcagcgggcccagcggccgtgccaggaggtgggtcggccacggcagtgcggccgccggtgcccgccgtggacttcggcaacgcgcaggaggcgtaccgcagccggcgaacctgggagctggcgcggagcctgctggtgctgcgcttgtgcgcctggcccgcgctgctggcgcgccacgagcagctgctgtatgtttccaggaaacttctaggacagaggctattcaacaagctcatgaagatgaccttctatgggcattttgtagccggggaggaccaggagtccatccagcccctgcttcggcactacagggccttcggtgtcagcgccatcctggactatggagtggaggaggacctgagccccgaggaggcagagcacaaggagatggagtcctgcacctcagctgcggagagggatggcagtggcacgaataagcgggacaagcaataccaggcccactgggccttcggggaccgcaggaatggtgtcatcagtgcccgcacctacttctacgccaatgaggccaagtgcgacagccacatggagacattcttgcgctgcatcgaagcctcaggtagagtcagcgatgacggcttcatagccattaagctcacagcactggggagaccccagtttctgctgcagttctcagaggtgctggccaagtggaggtgcttctttcaccaaatggctgtggagcaagggcaggcgggcctggctgccatggacaccaagctggaggtggcggtgctgcaggaaagtgtcgcaaagttgggcatcgcatccagggctgagattgaggactggttcacggcagagaccctgggagtgtctggcaccatggacctgctggactggagcagcctcatcgacagcaggaccaagctgtccaagcacttggtagtccccaacgcacagacaggacagctggagcccctgctgtcccggttcactgaggaggaggagctacagatgaccaggatgctacagcggatggatgtcctggccaagaaagccacagagatgggcgtgcggctgatggtggatgccgagcagacctacttccagccggccatcagccgcctgacgctggagatgcagcggaagttcaatgtggagaagccgctcatcttcaacacataccagtgctacctcaaggatgcctatgacaatgtgaccctggacgtggagctggctcgccgtgagggctggtgttttggggccaagctggtgcggggcgcatacctggcccaggagcgagcccgtgcggcagagatcggctatgaggaccccatcaaccccacgtacgaggccaccaacgccatgtaccacaggtgcctggactacgtgttggaggagctgaagcacaacgccaaggccaaggtgatggtggcctcccacaatgaggacacagtgcgctttgcactgcgcaggatggaggagctgggcctgcatcctgctgaccaccgggtgtactttggacagctgctaggcatgtgtgaccagatcagcttcccgctgggccaggccggctaccccgtgtacaagtacgtgccctatggccccgtgatggaggtgctgccctacttgtcccgccgtgccctggagaacagcagcctcatgaagggcacccatcgggagcggcagctgctgtggctggagctcttgaggcggctccgaactggcaacctcttccatcgccctgcctagcacccgccagcacacccttagcctccagcaccccccgcccccgcccaggccatcaccacagctgcagccaaccccatcctcacacagattcaccttttttcaccccacacttgcagagctgctggaggtgaggtcaggtgcctcccagccctgcccagagtatgggcactcaggtgtgggccgaacctgatacctgcctgggacagccactggaaacttttgggaactctcctcgaatgtgtgggcccaaggcccccacctctgtgacccccatgtccttggacctagaggattgtccaccttctgccaaggccagcccacacagcccgagccccttggggagcagtggccgggctggggaggcctgcctggtcaataaaccactgttcctgc

SEQ ID NO: 5954 - DNA, 4803 bp, Homo sapiens
gcacgctgaaaccctgggcggcggcaagctgtgcgacctcttctgcggccggcctgggcaggtgtcttcctcgagaggcaggcaggggatcccggacccttatacaggatgctgtgttctttgctcctttgtgaatgtctgttgctggtagctggttatgctcatgatgatgactggattgaccccacagacatgcttaactatgatgctgcttcaggaacaatgagaaaatctcaggcaaaatatggtatttcaggggaaaaggatgtcagtcctgacttgtcatgtgctgatgaaatatcagaatgttatcacaaacttgattctttaacttataagattgatgagtgtgaaaagaaaaagagggaagactatgaaagtcaaagcaatcctgtttttaggagatacttaaataagattttaattgaagctggaaagcttggacttcctgatgaaaacaaaggcgatatgcattatgatgctgagattatccttaaaagagaaactttgttagaaatacagaagtttctcaatggagaagactggaaaccaggtgccttggatgatgcactaagtgatattttaattaattttaagtttcatgattttgaaacatggaagtggcgattcgaagattcctttggagtggatccatataatgtgttaatggtacttctttgtctgctctgcatcgtggttttagtggctactgagctgtggacatatgtacgttggtacactcagttgagacgtgttttaatcatcagctttctgttcagtttgggatggaattggatgtatttatataagctagcttttgcacagcatcaggctgaagtcgccaagatggagccattaaacaatgtgtgtgccaaaaagatggactggactggaagtatctgggaatggtttagaagttcatggacctataaggatgacccatgccaaaaatactatgagctcttactagtcaaccctatttggttggtcccaccaacaaaggcacttgcagttacattcaccacatttgtaacggagccattgaagcatattggaaaaggaactggggaatttattaaagcactcatgaaggaaattccagcgctgcttcatcttccagtgctgataattatggcattagccatcctgagtttctgctatggtgctggaaaatcagttcatgtgctgagacatataggcggtcctgagagcgaacctccccaggcacttcggccacgggatagaagacggcaggaggaaattgattatagacctgatggtggagcaggtgatgccgatttccattataggggccaaatgggccccactgagcaaggcccttatgccaaaacgtatgagggtagaagagagattttgagagagagagatgttgacttgagatttcagactggcaacaagagccctgaagtgctccgggcatttgatgtaccagacgcagaggcacgagagcatcccacggtggtacccagtcataaatcacctgttttggatacaaagcccaaggagacaggtggaatcctgggggaaggcacaccgaaagaaagcagtactgaaagcagccagtcggccaagcctgtctctggccaagacacatcagggaatacagaaggttcacccgcagcggaaaaggcccagctcaagtctgaagccgcaggcagcccagaccaaggcagcacatacagccccgcaagaggtgtggctggaccacgtggacaggatccggtcagcagcccctgtggctagaggaacaccagcacaaacgacagcctcaagtctccttcgagctttatatccatttggggatgaagtctactttgacagctagcaaggcgacatgcaactgttgttgaatgatgacagcaattcaggaaagacttaaatatgaaagcaaattgaacacatcgggtgtttgttatcagaaaagagatgagatgagataagacttgtttattgactagccaatatgtcattaaaattaaggtttatattgtgaagcttttttgaaattttacttttttttgagagttttgctctgtcacccaggctggagtgaggtggtacaatctcggctcactgcaacctccacctcccaggttcaagagattctcctgcctcagtctcccgagtagctaggattacagatgtgcatcaccatgcctggctaatttttgtattttttagtagagatggggtttcaccatgttggtcaggctggtctcgaactcctgacctcaagtgacccgcccttgtcggcctcccaaagtgctgggattacaggcatgagccattgtgcccagcctatatagtgtgaagcttttaggaaaatcagaacagggtagacagctgttaaaaacaatgtttaaatggaataatgttgaatgtttacaggctgtaagaactattgtatacacaaaataatacacaaagtttgtactttgtgtacaaatacaaatttgtactttgtgtacaaataatacaaaaagtttgtatacacaaactttttacgttgtggtttggtatattgtcttaactgaattttcttataagaaccccatgaaacttacctgagtttttaaaatgctatccaggacatcataccttatagtatacatgaaacataatgtaatccaggttgtaatttagaactttttttttttttttagctgagcacttaatgtaattaattccaggttatgactcttaaaaaacattggccattagagaaatagttctatttgcccatccaaatcacctgaatgactttttgaaagaataggggtccacatccccagatcccatcccagctgtgcacagtctgaagcaagcagagtgaaacaagttggcaacttgttccaagcgtgggcctttgcagtctgtgatccagtgttactccaggtcccagtctgtcccatacttgtcttttgctacagttagttagttactttgttatcatccccttgtaaactgccttcaatatctgggataaggaagacaaagcttaatgacaactaaggttctagctgacatctttctttcatatttaatttttgtgagttttcatctgttttctgtttgtttatgtgtcctaggttcttgacctaaccacatgggttttgttttttgtttttatattagaacttagaaaagtttgttttacagcagtattatggaacagaagagaccattttaaataatttttttaaacagcccaaaacacacaaaagatacttgttttctagagacagggtcttgctctgtcacccaggctggagtgcagtggcacgatcatagctcagtgcagcctccacctcctgggctcaagtggtcctcctgcctcagcctcttaagcagttgggactacaggtgtgtgccagcatgcttgctgttttttttttttttgagacagagtcttgctctgtcactcaggctggagtccagtggcttggtctcagctcactgcaatctctgcctcccaggggttcaagtgattctcctgcctcagcctcccaagtagctgaaactacaggcgcatgccaccatgcccagctaatttttgtatttttagtagagacagggtttcactatgttggccaggctggtctcaaactcccgacctcaagtgatccgcccgcttcggcctcccaaagtgctgggattacaggtgtgagccactgcgcctggctgctgatttatttttcatagacacgggggtctatgttgcccaggttggtcttgaactcctagcctcaagcgatcctcctgcctcagcctcccaatgtgctgggattacaggaatgagccaccatgcccagcccaagaagtagagtttcttttatactgactttggcctaaaaaaacagattttcatggaggaaaaaaaaacctagatttttagtaagactattttatatacttttttacattgatcaagtacattatttttaccaaacaacattgtttcccactacatccatggttatgtataaaaaaacgccattgtcaattaagatgttaaaaaattatttccataagagtattaaattctaatctatgattcacttaacttcctactttataaacactaggtaaagtaatctcacaagctgccaaagaacacatcccaagcagtaatcacagacgatgaagcaccttacaggacccctccaccctcaaacgcgcatgtccagagaagtattaatgccttaatagactactgaaggttaactatttacatcattctaaaaatattttaagctgtattacagtgctataaattctccttttaaggaaaaaagtaatagattgtttccttaccgtgtttgaaaggaaaaaaaataaatccatagtaactaatggtctgccgattttttccctgaatttttaaactccaacaaagcattattttgcaaaaagtcctttagcccaaagtcagtgtctctgttttgatctctttgtaaaagaactctctgttcatccattctctttccctgggaccgtaaaataaggctgaaaaagtcttcatctggtactgtcggaccctttgtggtagcaggtggtggagcacatctttgatcatctaatctggatccctagaagtttatgagagagattaaaagacatactgtgggaaagaaagcaccaagctatgttaaatctctcagtcacaacaagaaaacgcagttgtaaacttttatttggggcttctcagaaattaatctttgtttttatattgttctctttagttcccagcctgatttctgaaagaaataatctttaaacctg

SEQ ID NO: 5955 - DNA, 448 bp, Homo sapiens
gcggcggcaccgggcccggcacaaggcgcagcctgctcacgaggctgtggagaaggagaccacggagaaggaggccacggagaaggaggctgagatagtggaagccgacaaggaaaaggagctccggaaccaccagccccgggagccacactgtgacctggagaccagtgggactgtgactgtgggtcccatgcacacactgcccagcacctgtctccagaaggtggaggaacagccagaggatgcagacaatcagcggaacgtcactcgcatgggcagtcagcccccagacccgaacactattgtacatatcccagtgatgctgacgggccctcttggggaagccacggtcgttcccacacttgaaaaaaacgtgtgcctcttccttctgacctccatggtttctgatgagaaatccactgtcattcgaattgttttcttcctatag

SEQ ID NO: 5956 - DNA, 2538 bp, Homo sapiens
acagagacccagttctgatgatggtcacacaccccagcagttttcccctaacaggaaagttgtcagggctgttcaggcatttccttctctgccatctgccatccggactgaagagaaagtcttagtttcaattcctttcctgttcaggggaggaggacactctgattggaggctgctggaataaattctgactcactattgaagaattatcagagtttttcttctgagtccaaattcctgggtctgatggcccagtcagcaacctgaagaaaaatctatgaacttcattaaaactgggttccatgcttttaatggaaaacagagatggaagacgagacaaaaatgccatttcagtttgagcaatgcactttttgagactcctttgggtagaaagagggaggaggccactgaggtttccactgagtgtatattatagatttgttctctcctcctcacctcccttggcttttcttccatcattggggactgctgtaatcttgaaacagaatattttctcttagttattattgcattattaatattttctgtttttggccatttcttttgagtttaatttgcatatgtgtacatgggcaatgcttcaacgagacaatttttttaagtttgttctctaacatcttagatactagaagatatggattttggtcctgggagattatttaggtttttttcttattgtgttgttgcacatatacagttagcagttttttttttttctgttggaattttagaaacaaggatccttcttgcggacggggcggagtttaagaaggacaggggagagggcctggcccgagtgctgtgtggggaggagcaggctgatgctgatgctggggcccaggtatgctccctgctccttgcccagtctgaggtgaggcctcagtgtctactgctggtcttggccaacagaacagaaatttccagcaaactccaacttatgaaaaagcaccaatctgacctgaaaaagctggggatcctagatttcactgagcaagatgttgcaagccaccagagctattcccaaaagaccctgattgcactggtcacctcgggagccctgctggctgtcttgggcatcactggctatttcctgatgaatcgccgcagctggagccccacaggagaaaggctgggcgaagacccttattacacggaaaacggtggaggccagggctatagctcaggacctgggacctcccctgaggctcagggaaaggccagtgtgaaccgaggggctcaggaaaacgggaccggccaggccacctccagaaacggccattcagcaagacaacacgtggtggctgataccgaattgtgactcggctaggtggggcaaggctgggcagtgtccgagagagcacccctctctgcatctgaccacgtgctacccccatgctggaggtgacatctcttacgcccaacccttccccactgcacacacctcagaggctgttcttggggccctacaccttgaggaggggcaggtaaactcctgtcctttacacattcggctccctggagccagactctggtcttctttgggtaaacgtgtgacgggggaaagccaaggtctggagaagctcccaggaacaatcgatggccttgcagcactcacacaggacccccttcccctaccccctcctctctgccgcaatacaggaacccccaggggaaagatgagcttttctaggctacaattttctcccaggaagctttgatttttaccgtttcttccctgtattttctttctctactttgaggaaaccaaagtaaccttttgcacctgctctcttgtaatgatatagccagaaaaacgtgttgccttgaaccacttccctcatctctcctccaagacactgtggacttggtcaccagctcctcccttgttctctaagttccactgagctccatgtgccccctctaccatttgcagagtcctgcacagttttctggctggagcctagaacaggcctcccaagttttaggacaaacagctcagttctagtctctctggggccacacagaaactctttttgggctcctttttctccctctggatcaaagtaggcaggaccatgggaccaggtcttggagctgagcctctcacctgtactcttccgaaaaatcctcttcctctgaggctggatcctagccttatcctctgatctccatggcttcctcctccctcctgccgactcctgggttgagctgttgcctcagtcccccaacagatgcttttctgtctctgcctccctcaccctgagccccttccttgctctgcacccccatatggtcatagcccagatcagctcctaacccttatcaccagctgcctcttctgtgggtgacccaggtccttgtttgctgttgatttctttccagaggggttgagcagggatcctggtttcaatgacggttggaaatagaaatttccagagaagagagtattgggtagatattttttctgaatacaaagtgatgtgtttaaatactgcaattaaagtgatactgaaacac

SEQ ID NO: 5957 - DNA, 2332 bp, Homo sapiens
tccacaggcggcggagcggccacaatcacagctccgggcattgggggaacccgagccggctgcgccgggggaatccgtgcgggcgccttccgtcccggtcccatcctcgccgcgctccagcacctctgaagttttgcagcgcccagaaaggaggcgaggaaggagggagtgtgtgagaggagggagcaaaaagctcaccctaaaacatttatttcaaggagaaaagaaaaagggggggcgcaaaaatggctggggcaattatagaaaacatgagcaccaagaagctgtgcattgttggtgggattctgctcgtgttccaaatcatcgcctttctggtgggaggcttgattggagaaaatgcagaagtctccatggacgtttccctggcttaccgtgatgacgcgtttgctgagtggactgaaatggcccatgaaagagtaccacggaaactcaaatgcaccttcacatctcccaagactccagagcatgagggccgttactatgaatgtgatgtccttcctttcatggaaattgggtctgtggcccataagttttaccttttaaacatccggctgcctgtgaatgagaagaagaaaatcaatgtgggaattggggagataaaggatatccggttggtggggatccaccaaaatggaggcttcaccaaggtgtggtttgccatgaagaccttccttacgcccagcatcttcatcattatggtgtggtattggaggaggatcaccatgatgtcccgacccccagtgcttctggaaaaagtcatctttgcccttgggatttccatgacctttatcaatatcccagtggaatggttttccatcgggtttgactggacctggatgctgctgtttggtgacatccgacagggcatcttctatgcgatgcttctgtccttctggatcatcttctgtggcgagcacatgatggatcagcacgagcggaaccacatcgcagggtattggaagcaagtcggacccattgccgttggctccttctgcctcttcatatttgacatgtgtgagagaggggtacaactcacgaatcccttctacagtatctggactacagacattggaacagagctggccatggccttcatcatcgtggctggaatctgcctctgcctctacttcctgtttctatgcttcatggtatttcaggtgtttcggaacatcagtgggaagcagtccagcctgccagctatgagcaaagtccggcggctacactatgaggggctaatttttaggttcaagttcctcatgcttatcaccttggcctgcgctgccatgactgtcatcttcttcatcgttagtcaggtaacggaaggccattggaaatggggcggcgtcacagtccaagtgaacagtgcctttttcacaggcatctatgggatgtggaatctgtatgtctttgctctgatgttcttgtatgcaccatcccataaaaactatggagaagaccagtccaatggcgatctgggtgtccatagtggggaagaactccagctcaccaccactatcacccatgtggacggacccactgagatctacaagttgacccgcaaggaggcccaggagtaggaggctgcagcgcccggctgggacggtctctccataccccagcccctctaactagagtggggagcatgccagagagagctcaatgtacaaatgaatgcctcatggctcttagctgtggtttcttggaccagcggcatggacatttgtcagtttgccttctgacggtagcttttggaggaagattcctgcagccactaatgcattgtgtatgataacaaaaactctggtatgacacattttctgtgatcattgttaattagtgacatagtaacatctgtagcagctggttagtaaacctcatgtgggggtggggtgggggtgtattccttgggggatggtttgggccgaatggggagtggaatatttgacatttttcctgttttaaattctaggatagattttaacatcctttgcggtcccagtccaaggtaggctggtgtcatagtcttctcactcctaatccatgaccactgtttttttcctatttatatcaccaggtagcccactgagttaatatttaagttgtcaatagataagtgtccctgttttgtggcataatataactgaatttcatgagaagatttattccaccaggggtatttcagctttgaaaccaaatctgtgtatctaatactaaccaatctgttggatgtgggttttaaaaaatgtttgctaaactacccaagtaagatttactgtattaaatggccttcgggtctgaaaagcttttttaa

SEQ ID NO: 5958 - DNA, 546 bp, Homo sapiens
aggaactcgctttgaacgcttgcttatgagaataggacatcaatcaaagaatgccccagtggagctaaaaattagatgtttggatgcaatttcatctcttctgtacttaccacctgagcagcagactgatgaccttctgaggatgacagaatcctggttttcttctttatctcgggatccactggagctcttccgtggcattagtagtcagcccttccctgaactacactgtgctgccttaaaagtgtttacgggaaggaaacacctgcatcttgaagaactagtaggaggcaatcaagtgaagaatacagtggagtagcaaagcaagacagcaggtacacatgaaaacaagagaacatgtttgagaaactacaagtaattcaatatgaccaacgcctaggatttaaagggaaatttttgcaaaattctttatcattattactaataatagctaccatttcttagcattgattttatgttaggcacttggcatgcatttcttactttatcatcataatagccataaaagttacgtatcatttcaca

SEQ ID NO: 5959 - DNA, 1790 bp, Homo sapiens
ccctgcagtcaggactctgggaccgcagggggctcccggaccctgactctgcagccgaaccggcacggtttcgtggggacccaggcttgcaaagtgacggtcattttctctttctttctccctcttgagtccttctgagatgatggctctgggcgcagcgggagctacccgggtctttgtcgcgatggtagcggcggctctcggcggccaccctctgctgggagtgagcgccaccttgaactcggttctcaattccaacgctatcaagaacctgcccccaccgctgggcggcgctgcggggcacccaggctctgcagtcagcgccgcgccgggaatcctgtacccgggcgggaataagtaccagaccattgacaactaccagccgtacccgtgcgcagaggacgaggagtgcggcactgatgagtactgcgctagtcccacccgcggaggggacgcaggcgtgcaaatctgtctcgcctgcaggaagcgccgaaaacgctgcatgcgtcacgctatgtgctgccccgggaattactgcaaaaatggaatatgtgtgtcttctgatcaaaatcatttccgaggagaaattgaggaaaccatcactgaaagctttggtaatgatcatagcaccttggatgggtattccagaagaaccaccttgtcttcaaaaatgtatcacaccaaaggacaagaaggttctgtttgtctccggtcatcagactgtgcctcaggattgtgttgtgctagacacttctggtccaagatctgtaaacctgtcctgaaagaaggtcaagtgtgtaccaagcataggagaaaaggctctcatggactagaaatattccagcgttgttactgtggagaaggtctgtcttgccggatacagaaagatcaccatcaagccagtaattcttctaggcttcacacttgtcagagacactaaaccagctatccaaatgcagtgaactccttttatataatagatgctatgaaaaccttttatgaccttcatcaactcaatcctaaggatatacaagttctgtggtttcagttaagcattccaataacaccttccaaaaacctggagtgtaagagctttgtttctttatggaactcccctgtgattgcagtaaattactgtattgtaaattctcagtgtggcacttacctgtaaatgcaatgaaacttttaattatttttctaaaggtgctgcactgcctatttttcctcttgttatgtaaatttttgtacacattgattgttatcttgactgacaaatattctatattgaactgaagtaaatcatttcagcttatagttcttaaaagcataaccctttaccccatttaattctagagtctagaacgcaaggatctcttggaatgacaaatgataggtacctaaaatgtaacatgaaaatactagcttattttctgaaatgtactatcttaatgcttaaattatatttccctttaggctgtgatagtttttgaaataaaatttaacatttaatatcatgaaatgttataagtagacatacattttgggattgtgatcttagaggtttgtgtgtgtgtacgtatgtgtgtgttctacaagaacggaagtgtgatatgtttaaagatgatcagagaaaagacagtgtctaaatataagacaatattgatcagctctagaataactttaaagaaagacgtgttctgcattgataaactcaaatgatcatggcagaatgagagtgaatcttacattactactttcaaaaatagtttccaataaattaataataccta

SEQ ID NO: 5960 - DNA, 3823 bp, Homo sapiens
gggggcggcagctttgtgctttttagtggccgcgtcccaggatagctggaaggttaggacgctcttgcggtcccagagtggagtggaaggtctggagctttgggaggagacggggaggacagactggaggcgtgttcctccggagttttctttttcgtgcgagccctcgcgcgcgcgtacagtcatcccgctggtctgacgattgtggagaggcggtggagaggcttcatccatcccacccggtcgtcgccggggattggggtcccagcgagacctccccgggagaagcagtgcccaggaggttttctgaagccggggaagctgtgcagccgaagccgccgccgcgccggagcccgggacaccggccaccctccgcgccacccaccctcgccggctccggcttcctctggcccaggcgccgcgcggacccggcagctgtctgcgcacgccgagctccacggtgaaaaaaaagtgaaggtgtaaaagcagcacaagtgcaataagagatatttcctcaaatttgcctcaagatggaaaccctttgcctcagggcatccttttggctggcactggttggatgtgtaatcagtgataatcctgagagatacagcacaaatctaagcaatcatgtggatgatttcaccacttttcgtggcacagagctcagcttcctggttaccactcatcaacccactaatttggtcctacccagcaatggctcaatgcacaactattgcccacagcagactaaaattacttcagctttcaaatacattaacactgtgatatcttgtactattttcatcgtgggaatggtggggaatgcaactctgctcaggatcatttaccagaacaaatgtatgaggaatggccccaacgcgctgatagccagtcttgcccttggagaccttatctatgtggtcattgatctccctatcaatgtatttaagttctaccaagatgtaaaggactggtggctcttcgggttctatttctgtatgcccttggtgtgcactgcgatcttctacaccctcatgacttgtgagatgttgaacagaaggaatggcagcttgagaattgccctcagtgaacatcttaagcagcgtcgagaagtggcaaaaacagttttctgcttggttgtaatttttgctctttgctggttccctcttcatttaagccgtatattgaagaaaactgtgtataacgagatggacaagaaccgatgtgaattacttagtttcttactgctcatggattacatcggtattaacttggcaaccatgaattcatgtataaaccccatagctctgtattttgtgagcaagaaatttaaaaattgtttccagtcatgcctctgctgctgctgttaccagtccaaaagtctgatgacctcggtccccatgaacggaacaagcatccagtggaagaaccacgatcaaaacaaccacaacacagaccggagcagccataaggacagcatgaactgaccacccttagaagcactcctcggtactcccataatcctctcggagaaaaaaatcacaaggcaactgtgagtccgggaatctcttctctgatccttcttccttaattcactcccacacccaagaagaaatgctttccaaaaccgcaagggtagactggtttatccacccacaacatctacgaatcgtacttctttaattgatctaatttacatattctgcgtgttgtattcagcactaaaaaatggtgggagctgggggagaatgaagactgttaaatgaaaccagaaggatatttactacttttgcatgaaaatagagctttcaagtacatggctagcttttatggcagttctggtgaatgttcaatgggaactggtcaccatgaaactttagagattaacgacaagattttctactttttttaagtgatttttttgtccttcagccaaacacaatatgggctcaagtcacttttatttgaaatgtcatttggtgccagtattttttaactgcataatagcctaacatgattatttgaacttatttacacatagtttgaaaaaaaaaagacaaaaatagtattcaggtgagcaattagattagtattttccacgtcactgtttatttttttaaaacacaaattctaaagctacaacaaatactacaggcccttaaagcacagtctgatgacacatttggcagtttaatagatgttactcaaagaattttttaagaactgtattttattttttaaatggtgttttattacaagggaccttgaacatgttttgtatgttaaattcaaaagtaatgcttcaatcagatagttctttttcacaagttcaatctgtttttcatgtaaattttgtatgaaaaatcaatgtcaagtaccaaaatgttaatgtatgtgtcatttaactctgcctgagactttcagtgcactgtatatagaagtctaaaacacacctaagagaaaaagatcgaatttttcagatgattcagaaattttcattcaggtatttgtaatagtgacatatatatgtatatacatatcacctcctattctcttaatttttcttaaaatgttaactggcagtaagtcttttttgatcattcccttttccatataggaaacataattttgaagtggccagatgagtttatcatgtcagtgaaaaataattacccacaaatgccaccagaacttacgattcttcacttcttggggttttcagtatgaacctaactccccaccccaacatctccctcccacattgtcaccatttcaaagggcccacagtgacttttgctgggcattttcccagatgtttacagactgtgagtacagcagaaaatcttttactagtgtgtgtgtgtatatatataaacaattgtaaatttcttttagcccatttttctagactgtctctgtggaatatatttgtgtgtgtgatatatgcatgtgtgtgatggtatgtatggatttaatctaatctaataattgtgccccgcagttgtgccaaagtgcatagtctgagtaaaatctaggtgattgttcatcatgacaacctgcctcagtccattttaacctgtagcaaccttctgcattcataaatcttgtaatcatgttaccattacaaatgggatataagaggcagcgtgaaagcagatgagctgtggactagcaatatagggttttgtttggttggttggtttgataaagcagtatttggggtcatattgtttcctgtgctggagcaaaagtcattacactttgaagtattatattgttcttatcctcaattcaatgtggtgatgaaattgccaggttgtctgatatttctttcagacttcgccagacagattgctgataataaattaggtaagataatttgttgggccatattttaggacaggtaaaataacatcaggttccagttgcttgaattgcaaggctaagaagtactgcccttttgtgtgttagcagtcaaatctattattccactggcgcatcatatgcagtgatatatgcctataatataagccataggttcacaccattttgtttagacaattgtctttttttcaagatgctttgtttctttcatatgaaaaaaatgcattttataaattcagaaagtcatagatttctgaaggcgtcaacgtgcattttatttatggactggtaagtaactgtggtttactagcaggaatatttccaatttctacctttactacatcttttcaacaagtaactttgtagaaatgagccagaagccaaggccctgagttggcagtggcccataagtgtaaaataaaagtttacagaaaccttg

SEQ ID NO: 5961 - DNA, 1286 bp, Homo sapiens
ctgacggacagacagacagacaccgcccccagccccagctaccacctcctccccggccggcggcggacagtggacgcggcggcgagccgcgggcaggggccggagcccgcgcccggaggcggggtggagggggtcggggctcgcggcgtcgcactgaaacttttcgtccaacttctgggctgttctcgcttcggaggagccgtggtccgcgcgggggaagccgagccgagcggagccgcgagaagtgctagctcgggccgggaggagccgcagccggaggagggggaggaggaagaagagaaggaagaggagagggggccgcagtggcgactcggcgctcggaagccgggctcatggacgggtgaggcggcggtgtgcgcagacagtgctccagccgcgcgcgctccccaggccctggcccgggcctcgggccggggaggaagagtagctcgccgaggcgccgaggagagcgggccgccccacagcccgagccggagagggagcgcgagccgcgccggccccggtcgggcctccgaaaccatgaactttctgctgtcttgggtgcattggagccttgccttgctgctctacctccaccatgccaagtggtcccaggctgcacccatggcagaaggaggagggcagaatcatcacgaagtggtgaagttcatggatgtctatcagcgcagctactgccatccaatcgagaccctggtggacatcttccaggagtaccctgatgagatcgagtacatcttcaagccatcctgtgtgcccctgatgcgatgcgggggctgctgcaatgacgagggcctggagtgtgtgcccactgaggagtccaacatcaccatgcagattatgcggatcaaacctcaccaaggccagcacataggagagatgagcttcctacagcacaacaaatgtgaatgcagaccaaagaaagatagagcaagacaagaaaaaaaatcagttcgaggaaagggaaaggggcaaaaacgaaagcgcaagaaatcccggtataagtcctggagcgtgtacgttggtgcccgctgctgtctaatgccctggagcctccctggcccccatccctgtgggccttgctcagagcggagaaagcatttgtttgtacaagatccgcagacgtgtaaatgttcctgcaaaaacacagactcgcgttgcaaggcgaggcagcttgagttaaacgaacgtacttgcagatgtgacaagccgaggcggtgagccgggcaggaggaaggagcctccctcagggtttcgggaaccagatc

SEQ ID NO: 5962 - DNA, 4022 bp, Homo sapiens
gggggcggcagctttgtgctttttagtggccgcgtcccaggatagctggaaggttaggacgctcttgcggtcccagagtggagtggaaggtctggagctttgggaggagacggggaggacagactggaggcgtgttcctccggagttttctttttcgtgcgagccctcgcgcgcgcgtacagtcatcccgctggtctgacgattgtggagaggcggtggagaggcttcatccatcccacccggtcgtcgccggggattggggtcccagcgagacctccccgggagaagcagtgcccaggaggttttctgaagccggggaagctgtgcagccgaagccgccgccgcgccggagcccgggacaccggccaccctccgcgccacccaccctcgccggctccggcttcctctggcccaggcgccgcgcggacccggcagctgtctgcgcacgccgagctccacggtgaaaaaaaagtgaaggtgtaaaagcagcacaagtgcaataagagatatttcctcaaatttgcctcaagatggaaaccctttgcctcagggcatccttttggctggcactggttggatgtgtaatcagtgataatcctgagagatacagcacaaatctaagcaatcatgtggatgatttcaccacttttcgtggcacagagctcagcttcctggttaccactcatcaacccactaatttggtcctacccagcaatggctcaatgcacaactattgcccacagcagactaaaattacttcagctttcaaatacattaacactgtgatatcttgtactattttcatcgtgggaatggtggggaatgcaactctgctcaggatcatttaccagaacaaatgtatgaggaatggccccaacgcgctgatagccagtcttgcccttggagaccttatctatgtggtcattgatctccctatcaatgtatttaaggtacagagcagttgcctcctggagtcgtgttcagggaattgggattcctttggtaactgccattgaaattgtctccatctggatcctgtcctttatcctggccattcctgaagcgattggcttcgtcatggtaccctttgaatataggggtgaacagcataaaacctgtatgctcaatgccacatcaaaattcatggagttctaccaagatgtaaaggactggtggctcttcgggttctatttctgtatgcccttggtgtgcactgcgatcttctacaccctcatgacttgtgagatgttgaacagaaggaatggcagcttgagaattgccctcagtgaacatcttaagcagcgtcgagaagtggcaaaaacagttttctgcttggttgtaatttttgctctttgctggttccctcttcatttaagccgtatattgaagaaaactgtgtataacgagatggacaagaaccgatgtgaattacttagtttcttactgctcatggattacatcggtattaacttggcaaccatgaattcatgtataaaccccatagctctgtattttgtgagcaagaaatttaaaaattgtttccagtcatgcctctgctgctgctgttaccagtccaaaagtctgatgacctcggtccccatgaacggaacaagcatccagtggaagaaccacgatcaaaacaaccacaacacagaccggagcagccataaggacagcatgaactgaccacccttagaagcactcctcggtactcccataatcctctcggagaaaaaaatcacaaggcaactgtgagtccgggaatctcttctctgatccttcttccttaattcactcccacacccaagaagaaatgctttccaaaaccgcaagggtagactggtttatccacccacaacatctacgaatcgtacttctttaattgatctaatttacatattctgcgtgttgtattcagcactaaaaaatggtgggagctgggggagaatgaagactgttaaatgaaaccagaaggatatttactacttttgcatgaaaatagagctttcaagtacatggctagcttttatggcagttctggtgaatgttcaatgggaactggtcaccatgaaactttagagattaacgacaagattttctactttttttaagtgatttttttgtccttcagccaaacacaatatgggctcaagtcacttttatttgaaatgtcatttggtgccagtattttttaactgcataatagcctaacatgattatttgaacttatttacacatagtttgaaaaaaaaaagacaaaaatagtattcaggtgagcaattagattagtattttccacgtcactgtttatttttttaaaacacaaattctaaagctacaacaaatactacaggcccttaaagcacagtctgatgacacatttggcagtttaatagatgttactcaaagaattttttaagaactgtattttattttttaaatggtgttttattacaagggaccttgaacatgttttgtatgttaaattcaaaagtaatgcttcaatcagatagttctttttcacaagttcaatctgtttttcatgtaaattttgtatgaaaaatcaatgtcaagtaccaaaatgttaatgtatgtgtcatttaactctgcctgagactttcagtgcactgtatatagaagtctaaaacacacctaagagaaaaagatcgaatttttcagatgattcagaaattttcattcaggtatttgtaatagtgacatatatatgtatatacatatcacctcctattctcttaatttttcttaaaatgttaactggcagtaagtcttttttgatcattcccttttccatataggaaacataattttgaagtggccagatgagtttatcatgtcagtgaaaaataattacccacaaatgccaccagaacttacgattcttcacttcttggggttttcagtatgaacctaactccccaccccaacatctccctcccacattgtcaccatttcaaagggcccacagtgacttttgctgggcattttcccagatgtttacagactgtgagtacagcagaaaatcttttactagtgtgtgtgtgtatatatataaacaattgtaaatttcttttagcccatttttctagactgtctctgtggaatatatttgtgtgtgtgatatatgcatgtgtgtgatggtatgtatggatttaatctaatctaataattgtgccccgcagttgtgccaaagtgcatagtctgagtaaaatctaggtgattgttcatcatgacaacctgcctcagtccattttaacctgtagcaaccttctgcattcataaatcttgtaatcatgttaccattacaaatgggatataagaggcagcgtgaaagcagatgagctgtggactagcaatatagggttttgtttggttggttggtttgataaagcagtatttggggtcatattgtttcctgtgctggagcaaaagtcattacactttgaagtattatattgttcttatcctcaattcaatgtggtgatgaaattgccaggttgtctgatatttctttcagacttcgccagacagattgctgataataaattaggtaagataatttgttgggccatattttaggacaggtaaaataacatcaggttccagttgcttgaattgcaaggctaagaagtactgcccttttgtgtgttagcagtcaaatctattattccactggcgcatcatatgcagtgatatatgcctataatataagccataggttcacaccattttgtttagacaattgtctttttttcaagatgctttgtttctttcatatgaaaaaaatgcattttataaattcagaaagtcatagatttctgaaggcgtcaacgtgcattttatttatggactggtaagtaactgtggtttactagcaggaatatttccaatttctacctttactacatcttttcaacaagtaactttgtagaaatgagccagaagccaaggccctgagttggcagtggcccataagtgtaaaataaaagtttacagaaaccttg

SEQ ID NO: 5963 - DNA, 3766 bp, Homo sapiens
cgtttcctcccctcccctccactcggccgtccctccttcctcctccctcctccctcctcctcccgctcctgaagagcgcgccgcgtgggggacggcccggttacttcctccagagactgacgagtgcggtgtcgctccagctcagagctcccggagccgcccggccagcgtccggcctccctgatcgtctctggccggcgccctcgccctcgcccggcgcgcaccgagcagccgcgggcgccgagcagccaccgtcccgaccaagcgccggccctgcccgcagcggcaggatgaatgatttcggaatcaagaatatggaccaggtagcccctgtggctaacagttacagagggacactcaagcgccagccagcctttgacacctttgatgggtccctgtttgctgtttttccttctctaaatgaagagcaaacactgcaagaagtgccaacaggcttggattccatttctcatgactccgccaactgtgaattgcctttgttaaccccgtgcagcaaggctgtgatgagtcaagccttaaaagctaccttcagtggcttcaaaaaggaacagcggcgcctgggcattccaaagaacccctggctgtggagtgagcaacaggtatgccagtggcttctctgggccaccaatgagttcagtctggtgaacgtgaatctgcagaggttcggcatgaatggccagatgctgtgtaaccttggcaaggaacgctttctggagctggcacctgactttgtgggtgacattctctgggaacatctggagcaaatgatcaaagaaaaccaagaaaagacagaagatcaatatgaagaaaattcacacctcacctccgttcctcattggattaacagcaatacattaggttttggcacagagcaggcgccctatggaatgcagacacagaattaccccaaaggcggcctcctggacagcatgtgtccggcctccacacccagcgtactcagctctgagcaggagtttcagatgttccccaagtctcggctcagctccgtcagcgtcacctactgctctgtcagtcaggacttcccaggcagcaacttgaatttgctcaccaacaattctgggactcccaaagaccacgactcccctgagaacggtgcggacagcttcgagagctcagactccctcctccagtcctggaacagccagtcgtccttgctggatgtgcaacgggttccttccttcgagagcttcgaagatgactgcagccagtctctctgcctcaataagccaaccatgtctttcaaggattacatccaagagaggagtgacccagtggagcaaggcaaaccagttatacctgcagctgtgctggccggcttcacaggaagtggacctattcagctgtggcagtttctcctggagctgctatcagacaaatcctgccagtcattcatcagctggactggagacggatgggagtttaagctcgccgaccccgatgaggtggcccgccggtggggaaagaggaaaaataagcccaagatgaactacgagaagctgagccggggcttacgctactattacgacaagaacatcatccacaagacgtcggggaagcgctacgtgtaccgcttcgtgtgcgacctccagaacttgctggggttcacgcccgaggaactgcacgccatcctgggcgtccagcccgacacggaggactgaggtcgccgggaccaccctgagccggccccaggctcgtggactgagtgggaagcccatcctgaccagctgctccgaggacccaggaaaggcaggattgaaaatgtccaggaaagtggccaagaagcagtggccttattgcatcccaaaccacgcctcttgaccaggctgcctcccttgtggcagcaacggcacagctaattctactcacagtgcttttaagtgaaaatggtcgagaaagaggcaccaggaagccgtcctggcgcctggcagtccgtgggacgggatggttctggctgtttgagattctcaaaggagcgagcatgtcgtggacacacacagactatttttagattttcttttgccttttgcaaccaggaacagcaaatgcaaaaactctttgagagggtaggagggtgggaaggaaacaaccatgtcatttcagaagttagtttgtatatattattataatcttataattgttctcagaatcccttaacagttgtatttaacagaaattgtatattgtaatttaaaataattatataactgtatttgaaataagaattcagacatctgaggttttatttcatttttcaatagcacatatggaattttgcaaagatttaatctgccaagggccgactaagagaagttgtaaagtatgtattatttacatttaatagacttacagggataaggcctgtggggggtaatccctgctttttgtgtttttttgtttgtttgtttgtttgtttttggggggttttcttgccttggttgtctggcaaggactttgtacatttgggagtttttatgagaaacttaaatgttattatctgggcttatatctggcctctgctttctcctttaattgtaaagtaaaagctataaagcagtatttttcttgacaaatggcatatgttttccacttctttgcatgcgtttaagtcagtttatacacaaaatggattttattttttagtttaactgtgtttctccgacagctcacctctctctgaccacccagccatttccttcctgtgctccacgttcttctgtgtgattaaaataagaatattatttttggaaatatgcaactccttttcagagatcaggagggatttatgtagcagctatttttactgcaaaagtaattcactggaaaaaaaatgtaatttgtaagaaagctttatttttatctcagctctatgtaaagttaaagttactgtacagagctgaaggacggggggcggtaggggtcttgatgaaacctcttgaacgaagcacagtttgtcccatctttgttcactcgtgtgtctcaaccatcttaatagcatgctgctcctttttgctcagtgtccacagcaagatgacgtgattcttattttcttggacacagactattctgaggcacagagcggggacttaagatgggaaagagaaagcatcggagccattcattcggagaaaacgttttgatcaaaatggagacttttgtagtcgtttcaaaagagcacctgagtcatgtgtattcccggcctttataaatgacccggtcaagttggtttcaaagtccgacaggcttgtctgtttactagctgcgtggccttggacgggtggctgacatctgtaaagaatcctcctgtgatgaaactgaggaatcgggtggccgggcaagctgggaagagcaaagccagagctgcgctgcctcaatacccacaaaagaccattcccagtatacataagcacaggatgtttttctcaagagggatgtatttatcacttggacatctgtttataatataaacagacatgtgactgggaacatcttgctgccaaaagaatcctaggcagtggctcattgtatgtgaggttgaaccacgtgaaattgccaatattaggctggcttttatctacaaagaaggagtttcatggggttcagcctaacagttatggaaactacagtccttataaaccattggcatggtaataaacagatcttaagtataaaaattttgtaattgggcctttactctctcaataataaagtattttgtttatataaa

SEQ ID NO: 5964 - DNA, 3250 bp, Homo sapiens; identical to SEQ ID NO: 4373

SEQ ID NO: 5965 - DNA, 1865 bp, Homo sapiens
ggagttcctggtccctggagctccgcacttggcggcgcaacctgcgtgaggcagcgcgactctggcgactggccggccatgccttcccgggctgaggactatgaagtgttgtacaccattggcacaggctcctacggccgctgccagaagatccggaggaagagtgatggcaagatattagtttggaaagaacttgactatggctccatgacagaagctgagaaacagatgcttgtttctgaagtgaatttgcttcgtgaactgaaacatccaaacatcgttcgttactatgatcggattattgaccggaccaatacaacactgtacattgtaatggaatattgtgaaggaggggatctggctagtgtaattacaaagggaaccaaggaaaggcaatacttagatgaagagtttgttcttcgagtgatgactcagttgactctggccctgaaggaatgccacagacgaagtgatggtggtcataccgtattgcatcgggatctgaaaccagccaatgttttcctggatggcaagcaaaacgtcaagcttggagactttgggctagctagaatattaaaccatgacacgagttttgcaaaaacatttgttggcacaccttattacatgtctcctgaacaaatgaatcgcatgtcctacaatgagaaatcagatatctggtcattgggctgcttgctgtatgagttatgtgcattaatgcctccatttacagcttttagccagaaagaactcgctgggaaaatcagagaaggcaaattcaggcgaattccataccgttactctgatgaattgaatgaaattattacgaggatgttaaacttaaaggattaccatcgaccttctgttgaagaaattcttgagaaccctttaatagcagatttggttgcagacgagcaaagaagaaatcttgagagaagagggcgacaattaggagagccagaaaaatcgcaggattccagccctgtattgagtgagctgaaactgaaggaaattcagttacaggagcgagagcgagctctcaaagcaagagaagaaagattggagcagaaagaacaggagctttgtgttcgtgagagactagcagaggacaaactggctagagcagaaaatctgttgaagaactacagcttgctaaaggaacggaagttcctgtctctggcaagtaatccaggtatgagaatcaacttggtcaacagaagctggtgctacaaatgaagaaatgtgcaccagtgttgctcccaaagtggcttaggtagcccttttcatttacaaatctcaaattttaagatggatttcattgaatatatgcatttcaatggaaacaaaattctgttatagcaatgatttatttcctgggttcatagacctgaggcaatgagtcatagaatttcatgtttgattttctttaccttatcaaactacatgtttagtaattgatacttatttttattatcattatttatttttttattttttttgagatggagtctcactctgtagcccaggctggagtgcagtggcacaatctcggctcactgcaagctctgcctcccgggttcacgccattcttctgcctcagcctcccaagtagctgggactacagacacccgccaccaagcccggctaatttttgtatttttagtagagacggggtttcaccgtgttagccaggatggtctcgatttcctgacctcgtgatccgcctgcctcggcctcccaatgtgctgggattacaggcatgagacaccgtgcccagccgatacttatttttaaaaattagggcatttacaaaactattgtatgtttcagatttcagagagataaactgcatttcaagtaaaaataaa

SEQ ID NO: 5966 - DNA, 3210 bp, Homo sapiens
atggccagaagacatgaacgtgtcactagaaggatgtggacatgggctccgggactgttgatgatgactgtggtgttttggggtcatcaggggaatggacaaggccaaggatcgcgtcttcgccaggaggactttcccccgcggattgtggagcatccttccgatgtcatcgtctctaagggcgagcccacgactctgaactgcaaggcggagggccggccaacgcccaccattgagtggtacaaagatggggagcgagtggagactgacaaggacgatccccggtcccacaggatgcttctgcccagcggatccttattcttcttgcgcatcgtgcacgggcgcaggagtaaacctgatgaaggaagctacgtttgtgttgcgaggaactatcttggtgaagcagtgagtcgaaatgcgtctctggaagtggcattgttacgagatgacttccgacaaaaccccacagatgttgtagtggcagctggagagcctgcaatcctggagtgccagcctccccggggacacccagaacccaccatctactggaaaaaagacaaagttcgaattgatgacaaggaagaaagaataagtatccgtggtggaaaactgatgatctccaataccaggaaaagtgatgcagggatgtatacttgtgttggtaccaatatggtgggagaaagggacagtgacccagcagagctgactgtctttgaacgacccacatttctcaggaggccaattaaccaggtggtactggaggaagaagctgtagaatttcgttgtcaagtccaaggagatcctcaaccaactgtgaggtggaaaaaggatgatgcagacttgccaagaggaaggtatgacatcaaagacgattacacactaagaattaaaaagaccatgagtacagatgaaggcacctatatgtgtattgctgagaatcgggttggaaaaatggaagcctctgctacactcaccgtccgaggtggagttatagctcccccacagtttgtggttcggccaagagatcagattgttgctcaaggtcgaacagtgacatttccctgtgaaactaaaggaaacccacagccagctgttttttggcagaaagaaggcagccagaacctacttttcccaaaccaaccccagcagcccaacagtagatgctcagtgtcaccaactggagacctcacaatcaccaacattcaacgttccgacgcgggttactacatctgccaggctttaactgtggcaggaagcattttagcaaaagctcaactggaggttactgatgttttgacagatagacctccacctataattctacaaggcccagccaaccaaacgctggcagtggatggtacagcgttactgaaatgtaaagccactggtgatcctcttcctgtaattagctggttaaaggagggatttacttttccgggtagagatccaagagcaacaattcaagagcaaggcacactgcagattaagaatttacggatttctgatactggcacttatacttgtgtggctacaagttcaagtggagagacttcctggagtgcagtgctggatgtgacagagtctggagcaacaatcagtaaaaactatgatttaagtgacctgccagggccaccatccaaaccgcaggtcactgatgttactaagaacagtgtcaccttgtcctggcagccaggtacccctggaacccttccagcaagtgcatatatcattgaggctttcagccaatcagtgagcaacagctggcagaccgtggcaaaccatgtaaagaccaccctctatactgtaagaggactgcggcccaatacaatctacttattcatggtcagagcgatcaacccccaaggtctcagtgacccaagtcccatgtcagatcctgtgcgcacacaagatatcagcccaccagcacaaggagtggaccacaggcaagtgcagaaagagctaggagatgtccttgtccgtcttcataatccagttgtgctgactcccaccacggttcaggtcacatggacggttgatcgccaaccccagtttatccaaggctaccgagtgatgtatcgtcagacttcaggtctgcaggcgacatcttcgtggcagaatttagatgccaaagtcccgactgaacgaagtgctgtcttagtcaacctgaaaaagggggtgacttatgaaattaaagtacggccatattttaatgagttccaaggaatggatagtgaatctaaaacggttcgtactactgaagaagccccaagtgccccaccacagtctgtcactgtactgacagttggaagctacaatagcacaagtattagtgtttcctgggatcctcctcctccagatcaccagaatggaattatccaagaatacaagatctggtgtctaggaaatgaaacgcgattccatatcaacaaaactgtggatgcagccattcggtccgtaataattggtggattattcccaggtattcaataccgggtagaggttgcagctagtaccagtgcaggggttggagtaaagagtgagccacagccaataataatcgggagacgcaatgaagttgtcattactgaaaacaataacagcataactgagcaaatcactgatgtggtgaagcaaccagcctttatagctggtattggtggtgcctgctgggtaattctgatgggttttagcatatggttgtattggcgaagaaagaagaggaagggactcagtaattatgctgttacgtttcaaagaggagatggaggactaatgagcaatggaagccgtccaggtcttctcaatgctggtgatcccagctatccatggcttgctgattcttggccagccacgagcttgccagtaaataatagcaacagtggcccaaatgagattggaaattttggccgtggagatgtgctgccaccagttccaggccaaggggataaaacagcaacgatgctctcagatggagccatttatagtagcattgacttcactaccaaaaccagttacaacagttccagccaaataacacaggctaccccatatgccacgacacagatcttgcattccaacagcatacatgaattggctgtcgatctgcctgatccacaatggaaaagctcaattcagcaaaaaacagatctgatgggatttggttattctctacctgatcagaacaaaggtaacaatggtgagtcaggttct

SEQ ID NO: 5967 - DNA, 1538 bp, Homo sapiens
gggaactgggccgctgggccagcccctgcgtcggggggcaagatggcagcccaggctttggcgctgctgagagaggtagcgaggctggaagcgccgctggaggagctacgcgcgcttcactccgtgctgcaggcagtgccgctcaacgagcttcgccagcaagcggcggagctgcgcctcggcccgctcttctccctgcttaacgagaaccatagggaaaagactactttgtgtgtatccattctggagagattgctccaagctatggaaccggttcacgtggcccggaacctcagggttgacctgcagaggggactaattcaccctgatgattctgtaaaaatcctcactctttcccagattggaagaattgttgaaaattctgatgctgttactgagattctaaataatgctgaattactaaaacaaattgtttattgcattggtggagagaatctatctgtagcaaaagcgctaattatagagatttcttccgtgtcaccagaatctttaaactactgtaccacaagtggattggtaacccagctcctgagagagctgactggtgaggatgtgttggtcagagccacctgtatagaaatggtgacatcactggcatatactcatcatgggcgacaatatcttgctcaagaaggagtaattgaccaaatttctaatataattgttggggcagattcagaccctttctctagcttctatctgccaggattcgtgaagttttttggaaacctggctgtcatggatagtcctcaacagatctgtgagcgttatcctatctttgtggaaaaagtctttgaaatgatagaaagtcaggaccccactatgattggtgtagctgtagacacagttggaatcttgggatccaatgttgaaggaaaacaggttttacagaaaacaggaactcgctttgaacgcttgcttatgagaataggacatcaatcaaagaatgccccagtggagctaaaaattagatgtttggatgcaatttcatctcttctgtacttaccacctgagcagcagactgatgaccttctgaggatgacagaatcctggttttcttctttatctcgggatccactggagctcttccgtggcattagtagtcagcccttccctgaactacactgtgctgccttaaaagtgtttacggccattgcaaaccaaccctgggctcagaaacttatgtttaacagtccaggttttgtagaatatgtggtggaccggtctgtggagcatgacaaagcttcaaaggatgccaaatatgaactagtgaaagcacttgccaattccaagacaattgcagaaatctttgggaacccaaattatttgaggctcagaacttacctgagtgaagggccatactatgtgaaacctgtttccacgacagcagtagaaggagccgaatgatttcttctagagctcatgtagaggaccacgttttgaccaaaacttctcctaaggcatttgactccatctatatttcacaaaagagacttcctttccccaagaattatcat

SEQ ID NO: 5968 - DNA, 3535 bp, Homo sapiens
ggaggcttggggcagccgggtagctcggaggtcgtggcgctgggggctagcaccagcgctctgtcgggaggcgcagcggttaggtggaccggtcagcggactcaccggccagggcgctcggtgctggaatttgatattcattgatccgggttttatccctcttcttttttcttaaacatttttttttaaaactgtattgtttctcgttttaatttatttttgcttgccattccccacttgaatcgggccgacggcttggggagattgctctacttccccaaatcactgtggattttggaaaccagcagaaagaggaaagaggtagcaagagctccagagagaagtcgaggaagagagagacggggtcagagagagcgcgcgggcgtgcgagcagcgaaagcgacaggggcaaagtgagtgacctgcttttgggggtgaccgccggagcgcggcgtgagccctcccccttgggatcccgcagctgaccagtcgcgctgacggacagacagacagacaccgcccccagccccagctaccacctcctccccggccggcggcggacagtggacgcggcggcgagccgcgggcaggggccggagcccgcgcccggaggcggggtggagggggtcggggctcgcggcgtcgcactgaaacttttcgtccaacttctgggctgttctcgcttcggaggagccgtggtccgcgcgggggaagccgagccgagcggagccgcgagaagtgctagctcgggccgggaggagccgcagccggaggagggggaggaggaagaagagaaggaagaggagagggggccgcagtggcgactcggcgctcggaagccgggctcatggacgggtgaggcggcggtgtgcgcagacagtgctccagccgcgcgcgctccccaggccctggcccgggcctcgggccggggaggaagagtagctcgccgaggcgccgaggagagcgggccgccccacagcccgagccggagagggagcgcgagccgcgccggccccggtcgggcctccgaaaccatgaactttctgctgtcttgggtgcattggagccttgccttgctgctctacctccaccatgccaagtggtcccaggctgcacccatggcagaaggaggagggcagaatcatcacgaagtggtgaagttcatggatgtctatcagcgcagctactgccatccaatcgagaccctggtggacatcttccaggagtaccctgatgagatcgagtacatcttcaagccatcctgtgtgcccctgatgcgatgcgggggctgctgcaatgacgagggcctggagtgtgtgcccactgaggagtccaacatcaccatgcagattatgcggatcaaacctcaccaaggccagcacataggagagatgagcttcctacagcacaacaaatgtgaatgcagaccaaagaaagatagagcaagacaagaaaatccctgtgggccttgctcagagcggagaaagcatttgtttgtacaagatccgcagacgtgtaaatgttcctgcaaaaacacagactcgcgttgcaaggcgaggcagcttgagttaaacgaacgtacttgcagatgtgacaagccgaggcggtgagccgggcaggaggaaggagcctccctcagggtttcgggaaccagatctctcaccaggaaagactgatacagaacgatcgatacagaaaccacgctgccgccaccacaccatcaccatcgacagaacagtccttaatccagaaacctgaaatgaaggaagaggagactctgcgcagagcactttgggtccggagggcgagactccggcggaagcattcccgggcgggtgacccagcacggtccctcttggaattggattcgccattttatttttcttgctgctaaatcaccgagcccggaagattagagagttttatttctgggattcctgtagacacacccacccacatacatacatttatatatatatatattatatatatataaaaataaatatctctattttatatatataaaatatatatattctttttttaaattaacagtgctaatgttattggtgtcttcactggatgtatttgactgctgtggacttgagttgggaggggaatgttcccactcagatcctgacagggaagaggaggagatgagagactctggcatgatcttttttttgtcccacttggtggggccagggtcctctcccctgcccaggaatgtgcaaggccagggcatgggggcaaatatgacccagttttgggaacaccgacaaacccagccctggcgctgagcctctctaccccaggtcagacggacagaaagacagatcacaggtacagggatgaggacaccggctctgaccaggagtttggggagcttcaggacattgctgtgctttggggattccctccacatgctgcacgcgcatctcgcccccaggggcactgcctggaagattcaggagcctgggcggccttcgcttactctcacctgcttctgagttgcccaggagaccactggcagatgtcccggcgaagagaagagacacattgttggaagaagcagcccatgacagctccccttcctgggactcgccctcatcctcttcctgctccccttcctggggtgcagcctaaaaggacctatgtcctcacaccattgaaaccactagttctgtccccccaggagacctggttgtgtgtgtgtgagtggttgaccttcctccatcccctggtccttcccttcccttcccgaggcacagagagacagggcaggatccacgtgcccattgtggaggcagagaaaagagaaagtgttttatatacggtacttatttaatatccctttttaattagaaattaaaacagttaatttaattaaagagtagggttttttttcagtattcttggttaatatttaatttcaactatttatgagatgtatcttttgctctctcttgctctcttatttgtaccggtttttgtatataaaattcatgtttccaatctctctctccctgatcggtgacagtcactagcttatcttgaacagatatttaattttgctaacactcagctctgccctccccgatcccctggctccccagcacacattcctttgaaataaggtttcaatatacatctacatactatatatatatttggcaacttgtatttgtgtgtatatatatatatatatgtttatgtatatatgtgattctgataaaatagacattgctattctgttttttatatgtaaaaacaaaacaagaaaaaatagagaattctacatactaaatctctctccttttttaattttaatatttgttatcatttatttattggtgctactgtttatccgtaataattgtggggaaaagatattaacatcacgtctttgtctctagtgcagtttttcgagatattccgtagtacatatttatttttaaacaacgacaaagaaatacagatatatcttaaaaaaaaaaaagcattttgtattaaagaatttaattctgatctcaaa

SEQ ID NO: 5969 - DNA, 3109 bp, Homo sapiens
actcggtgtcaccacaggaggagactcaggcaggccgcgctccagcctcaccaggctccccggctcgccgtggctctctgagcccccttttcagggaccccagtcgctggaacatttgcccagactcgtaccaaacttttccgccctgggctcgggatcctggactccggggcctccccgtcctcccctttcccgggttccagctccggcctctggactaggaaccgacagcccccctccccgcgtccctccctctctctccagccgttttggggaggggctctccacgctccggatagttcccgagggtcatccgcgccgcactcgcctttccgtttcgccttcacctggatataatttccgagcgaagctgcccccaggatgaccacgctggccggcgctgtgcccaggatgatgcggccgggcccggggcagaactacccgcgtagcgggttcccgctggaagtgtccactcccctcggccagggccgcgtcaaccagctcggcggtgtttttatcaacggcaggccgctgcccaaccacatccgccacaagatcgtggagatggcccaccacggcatccggccctgcgtcatctcgcgccagctgcgcgtgtcccacggctgcgtctccaagatcctgtgcaggtaccaggagactggctccatacgtcctggtgccatcggcggcagcaagcccaagcaggtgacaacgcctgacgtggagaagaaaattgaggaatacaaaagagagaacccgggcatgttcagctgggaaatccgagacaaattactcaaggacgcggtctgtgatcgaaacaccgtgccgtcagtgagttccatcagccgcatcctgagaagtaaattcgggaaaggtgaagaggaggaggccgacttggagaggaaggaggcagaggaaagcgagaagaaggccaaacacagcatcgacggcatcctgagcgagcgagcctcagcaccccaatcagatgaaggctctgatattgactctgaaccagatttaccactaaagaggaaacagcgcagaagccgaaccaccttcacagcagaacagctggaggaactggagcgtgcttttgagagaactcattaccctgacatttatactagggaggaactggcccagagggcgaagctcaccgaggcccgagtacaggtctggtttagcaaccgccgtgcaagatggaggaagcaagctggggccaatcaactgatggctttcaaccatctcattcccggggggttccctcccactgccatgccgaccttgccaacgtaccagctgtcggagacctcttaccagcccacatctattccacaagctgtgtcagatcccagcagcaccgttcacagacctcaaccgcttcctccaagcactgtacaccaaagcacgattccttccaacccagacagcagctctgcctactgcctccccagcaccaggcatggattttccagctatacagacagctttgtgcctccgtcggggccctccaaccccatgaaccccaccattggcaatggcctctcacctcaggtgcctttcattatctcaagccagatatcgcgtaagtgaactgtccacttggagctaaaactggccctgtttctggtcttcgcagcctagatatgaagaatctgctctgaaaacaaaaaaaaattacccttttgttggggggggtggggcagtggtcccaataggagacaaaggagagtgattgattttcttcctccaatagttggtttcaaatccttttgaacacgttcgacaaaagcagtggagaagaggaagacctggagcaataaaagacaaatgcaacattttaaggcaatggtttcacatggttacatatcaaaacatcccaattctttagtgctgatcatcgaggagctagaacattccatttgcttgtgtgcgtgcgtgcgtgtgtgtgtgtgtgtgtgtattgagatttacccagactggtttgggcaagcagactgttctaaaatataatagaataccctaaagtataacatgtcgatgttcgatgctgatacttctacaactttaaaactgctcatttcatgaagcaagaatggaggaatccttgactcttacacactggaaattgaaataaagataaatgcaaccatttttaggaagctagactagctgtaaaggacctcctaaataaattatttgttactgtatcctcatttgtaatctagttgtcaataaatggcccggacatgtcttgctaacaggatatgggctaccaggaagaaggacttgtttccctttcctgtgtggggagaggtgtgtgacgtttttccagttcacatttatttggtagcccacctgggttggaggaagggcacggtggagagaaagtgacatgcattcacatatctgcttatcagtgtgcaatactgtgtacctcatggatgctttggcaatgcccaaggcgatataagcaaaatcagaagtatatttttgcaggtgcttttattttcacagcccataattcatagtgatagagtgcagtgatgtttgccatttgctggacaaccaacacccgggttgctcctttgattagagaccagatcagataattatgcttttaaactgattacgtttacattcttctcttttctatgaaaggcagggcaagaacagaagtgttcacatggctctcatgtacttttaaattatacaatgatatccaatattaaaagattataggaactgaggtttacatacgtttgtgtggtgacattttagaatgtcaataaatttgctttttgagatgttgagaggaacaagaaggtggaaggcagtgttatttatttctttctattcttggaaccacgaatgaggtaggcacaaatacattccttttagagttaagaactatgacgtagcgagttagtgagactagacatagtaccgaatttagttcatgcattggtcttagagggtgatggaacaagagaagtactatctttgtgttgcagcctcaaccaacaacaatgtgttgtaaaaatgtctttcatgtaaaaagtgcagtaaatatttactatttataatgaataaacagttatgaaaactt

SEQ ID NO: 5970 - DNA, 2457 bp, Homo sapiens
ctggagtctcccctggtcgggagcctcagccttctggagactgacaccaccctcttactcagagacgaatcgttttgtcgttgccttcacctccctgaccacaagtgctccggggctctttctgagggaggcagctgttctaggcgggaggctggagtctcctgggcctggacgcaccccggggtgtgagtgatgggtatgcctgaaaggaggggaagtggcgcggctttaatcatctgggctagtccccggcgggcctgggggaacagggaaactggaggcggccttaaagcgtcaggatgagacatcgcaagaggagctgcagatactgagcgtgcgccccgggttctcgccgccttctctccgccgagcagcccttcggccaccctttgcccttaaaaatctgcagactgcgcctcctctccgcgggagcgagacctagcaggcccggggctgggcgtgccctcgcctgccacgctgcgcgctgccctcagccgggccgctggggccgtgcagtgcaccgggcacgccgcgccaggctgggggcaggcaccgagcctccgtgggaggtcccgaggcagcttcgcctgctcgccctggctccagccctcacctgccgcagccttagctgagcagccgccgccactgggcgccccccgctccccacttcgccagcgcccgctcctcggctcggcccggggtagtttgtagggacgcagctctccacgtgcgcgactgcgaggctggacgctacgggctcctggaaaggagacaccagcatttgccacaatgctgtcatccactgactttacatttgcttcctgggagcttgtggtccgcgttgaccatcccaatgaagagcagcagaaagacgtcacactgagagtatctggagaccttcatgttggaggagtgatgctcaagttagtagaacagatcaatatatcccaagactggtcagactttgctctttggtgggaacagaagcattgctggcttctgaaaacccactggaccctggacaaatatggggtccaggcagatgcaaagcttctcttcacccctcagcataaaatgctgcgccttcgtctgccgaatttgaagatggtgaggttgcgagtcagcttctcagctgtggtttttaaagctgtcagtgatatctgcaaaatcctgaatattagaagatcagaagagctttccttgttaaagccgtctggtgactattttaagaagaagaagaaaaaagacaaaaataataaggaacccataattgaagatattctaaacctggagagttctccaacagcttcaggttcatcagtaagtcctggtttatacagtaaaaccatgacccctatatatgaccccatcaatggaacaccagcatcatccaccatgacttggttcagtgacagccctttgacggaacaaaactgcagcatcctcgcattcagccaacccccccagtccccagaagcacttgcggatatgtaccagcctcggtctctggttgataaagccaagctcaatgcaggttggctagactcctcacgctcccttatggaacaaggcatccaagaggatgagcagctgctcttacgatttaaatattattctttcttcgacttgaatcctaaatatgatgctgtccgaataaaccaactctatgagcaagccaggtgggccattctcttagaagaaattgattgcacagaggaagaaatgttgatctttgcagctctacagtaccacattagcaaactgtcgttgtctgctgaaacacaggattttgcaggcgagtccgaggttgatgaaatagaagcggcgctttctaatttggaagtaaccctagaaggtggaaaagcggacagccttttggaggacattactgatatccctaaacttgcagataatctcaaattatttaggcccaagaagttactaccaaaagctttcaaacaatattggtttatctttaaagacacatccatagcatactttaaaaataaggaacttgaacaaggagaaccactagaaaaactaaatcttagaggctgcgaagttgtgcccgatgtaaatgtagcaggaagaaaatttggaatcaagttactaatccctgttgccgatggtatgaatgaaatgtatttgagatgtgaccatgagaatcaatacgcccaatggatggctgcctgcatgttggcatcgaagggcaaaaccatggcagacagctcctaccagccagaggtcctcaacatcctttcatttctgaggatgaaaaacaggaactctgcatctcaggtggcttccagtctcgaaaacatggatatgaacccagaatgttttgtgtcaccacggtgtgcaaaaagacacaaatccaaacagctggccgcccggatcctggaggcgcaccacctgcaagccccattccattcctacagatctctcagccacctgtaa

SEQ ID NO: 5971 - DNA, 5398 bp, Homo sapiens
gaatgcaggtgagaaaaggcacggactctgcggctgcgaacccaaacttgggcaccgcacggtgcgcactgctcagccttcgcccccgtgggcgaaaggctgctgcggtttcaggcggctgcttcgtgactaatgaccttgcgcagagttgttaagaaaaaagagaaacccgcgctctccggggtgagaagggactgactctgggcgtctctgaagatggctcgggcttctctttggcgcgccggggggaccctgacactgaccgctctgtgacgcgagtagtctcccctgcaccgtgcccgaagcgacgtgccgggggatttttcattctcgatctgttgactggctcccccgctgcatgagcagagtcggagttgagactggcttgttgctggccccagcgcctggtgcaggaagcgactcacgtttgtctgggtggccggagccggagcagagcctgggtttggagtgagtgcctggaacgtgaattggactcaactcgagtagcagcaaagaccagcgggctggcaggcgggggaggctgcaggctcattccccacctcttcccagccccactgcccgtctgccggagcggttctggccccttccgacagagcggggactagagccggggattctccgcccgctgaggggatgactctgggttgggggagcgccgaacccgcggcgcgcagtgtcccgtgaactgtgagtactgcgactgaacggcggcaggcgagcgggcgattagcacccattgcatgaattatgaaacaataactttcggaagaagcaggaggaaaaaaagaagcatctatcgctgccctcccacccccattcccggccaactctccacgccgcttttgccccctccctcccctccctctcgctccttcctttccgggagaggggagaggactcgggggagggcaggcggccggccccggaggaggggggcgccgagggggctgtggttagaaggagcagtagcagcagcagcaggagaagatgctgaggatgcggaccgcgggatgggcgcgcggctggtgcttgggctgctgcctcctcctgccgctctcgctcagcctggcggccgccaagcagctcctccggtaccggctggccgaggagggccccgccgacgtccgcatcggcaacgtggcttcagacctgggcatcgtgaccggatcgggtgaggtgactttcagcctggagtccggttccgagtacctgaagatcgacaacctcactggcgagctgagcacgagcgagcggcgcatcgaccgcgagaagctgccccagtgtcagatgatcttcgacgagaacgagtgcttcctggacttcgaggtgtcggtgatcgggccctcgcagagctgggtggacctgtttgagggtcaggtcatcgtgcttgacatcaacgacaacacgcccaccttcccgtcgcccgtgctcacgctcacggtggaggagaatcggccggtgggcacactttacctgctgcccacagccaccgaccgcgacttcggccgcaacggcatcgagcgctacgagctgctccaggagcccggaggcggcggcagcggcggcgagagccggcgcgccggggcggccgacagcgccccctaccccgggggcggcgggaacggcgcgagcggcggcggctcgggaggctccaagcggcggctggacgcatcagagggcggcggcggcaccaaccccggcggccgcagcagcgtgttcgagctgcaggtggcggacaccccggacggcgagaagcagccgcagctgatcgtgaagggggcgctggaccgcgagcagcgcgactcctacgagctgaccctgcgagtgcgcgacggcggcgacccgcctcgctcctcgcaggccatcctacgggtcctcatcaccgacgtgaacgacaacagcccccgcttcgagaagagcgtgtacgaggccgacttggctgagaacagcgccccggggacccccatcctgcaactgcgcgcagccgacttggacgtgggggtcaacgggcagatcgaatacgtgttcggggcggccaccgagtcggtgaggcggctgctgcgccttgacgagacgtccggctggctcagcgtcctgcaccggatcgaccgcgaggaggtgaaccagctgcgcttcacggtcatggcccgcgaccgcgggcagccccccaagaccgacaaggccaccgtggtccttaacatcaaagacgagaacgacaacgtgccgtccattgaaatccgcaagattgggcgcatccccctcaaggacggggtggccaacgtggccgaggacgttctggtcgacacccccatcgctctggtgcaggtgtccgaccgagaccaaggcgagaacggggtggtcacctgcaccgtggtgggcgacgtgcccttccagctcaagccagccagcgacaccgagggcgaccagaacaagaaaaagtacttcttgcacacctcgacccctctggactatgaggccacccgggagttcaacgtggtcatcgtggcggtggactcaggcagccccagcctctcgagcaacaactccctgattgtcaaggtgggagacaccaacgacaacccgcccatgttcggccagtcggtggtggaggtttacttccctgagaacaacatcccgggcgagagggtggccacggtgctggcgacagacgcagacagcggtaagaacgccgagatcgcctactcgctggactcctctgtgatggggatctttgccatcgatcccgattctggggacatcctggtcaataccgtgctggaccgcgagcagactgacaggtatgagtttaaagttaacgccaaagacaaaggcatccccgtgctgcagggcagcactacggtgattgtgcaggtggctgataaaaatgacaatgaccctaagtttatgcaggacgtcttcaccttttatgtgaaagaaaacttgcagcccaacagccctgtggggatggtcaccgtgatggatgctgacaaggggcggaatgcagagatgagcctgtacatagaggagaacaataacattttttctattgaaaatgacacggggaccatttactccacaatgtcttttgaccgggaacatcagaccacatacactttcagagtcaaggctgtggatgggggagatcctcccagatctgccacagctacagtctcgctttttgtgatggatgaaaatgacaatgctcccacagttacccttcccaaaaacatttcctacactttactgccaccttcgagtaatgtcaggacagtagtagctacagtgttggcaacagacagtgatgatggcatcaatgcagacctgaactacagcattgtgggaggaaatcccttcaagctgtttgaaattgatcccactagtggtgtggtttccttagtgggaaaactcacccaaaagcattatggcttgcacaggttggtggtgcaagtgaatgacagtgggcagccttcccagtccaccacgactctggtgcacgtgtttgtcaatgaaagtgtttctaatgcaactgcgattgactcccagatagctagaagtttgcacatcccactcacccaggatatagctggtgacccaagctatgaaattagcaaacagagactcagtattgtcattggcgtggttgctggcattatgacggtgattctaatcatcttaattgtagtgatggcaaggtactgcaggtccaaaaataaaaatggctatgaagccggcaaaaaagatcacgaagacttttttacaccccaacagcatgacaaatctaaaaagcctaaaaaggacaagaaaaacaaaaaatctaagcagcctctctacagcagcattgtcactgtggaggcttctaagccaaatggacagaggtatgatagtgtcaatgagaagctgtcagacagcccaagcatggggcgatacaggtccgttaatggtgggcccggcagtcctgacctggcaaggcattacaaatctagttccccattgcctactgttcagcttcatccccagtcaccaactgcaggaaaaaaacaccaggccgtacaagatctaccaccagccaacacatttgtgggagcaggagacaacatttcaattggatcagatcactgctctgagtacagctgtcaaaccaataacaagtacagcaaacagatgcgtctacatccatacattactgtgtttggctgaattccactctaatatgatgctccattatgcaccatactgtgatgacctttctactccgaaacctgctggagcctgcccttggccgtggggtgtcagccaatcactgcttgttccacttgttgtacattttatttttgagtctttttctttctcatatacagaaaaatagtatgaaaataaaataaatgtatgaaacagtattaatgcagaaatgtgctactaatggatgtctgagtcaccagaaattccattcttaaagaggcggttagcacctattagacgtaacagtgatgtcttttaaaaaatccaaaagcatattgcaacaataagtttgagactttgtgtgaacaaagggaaattcagcctcttatgtctttgtctttaatacattaaatactgattttgaataaaaatctaaattgatcaatatttttaagtgccatgtaatcacaggcctgtcagatagttttgttagagtgaaggataatatcttttgctcattctgtgtgtgtatttttaaatgctgttttgtgtgtttgtgtgtgtttccatatatgtgtgtgtgtgtgtgtgtatatatatatatatgctggaactttgagcaatatttataaaaatattgtctgtaaaacaagtttgagaaattaattttttatatttataatgggcactgtaatggattgatttttttcttaatcttgaaatagtgaccaagatatttatatcatttttgaatttattttttaattctttaagaaaatttagaacttttcactttcatttgctaaagtcactgtagtcacattcggaaggaatatgtggctttctgttctttatggactacgtttatcagaagtccatatttattaaacatcctatttgatgtcagataacgtaaactcaagcagcttcaaagagttcagcatgttacatattattgagagagcaagtgactgaattttagttgtataagcaatattataggtaggtcagggagtcctctggatggcccctctacctctttatgtttgtatgtttatgtctttatttgttatgtcgtatgtgtttatgagcctagaaaatagcctagaaaataagtgttccatatgtaaagtttaataattttgtaatacatttaccacgctgtctgccctattaaaattttccacaaatttgggaa

SEQ ID NO: 5972 - DNA, 7179 bp, Homo sapiens
tgtataagaatttgcacatcccaagttgctatgtgaataggaatgcgtttccaggggaaggagaaagagacattacagagcagacagctctatgatgtttactatacttgctaaaatgtgaaattcagctaaattggaatacaaagtagtgccaaaacagcattaggtttgcggagttattttaaacataattgaaaaatcaaggttttttaatactttaaataaaacatctgtttttcaatgtggtaatttaagtcctacgatgagtttattaacatgtgctttttatttagggtatgagctacagttccgattaggcccaactttacagggaaaagcagttaccgtgtatacaaattacccatttcctggagaaacatttaatagagaaaaattccgttctctggattgggaaaatccaacagaaagagaagatgattctgataaatactgtaaacttaatctgcaacaatctggttcatttcagtattatttccttcaaggaaatgagaaaagtggtggaggttacatagttgtggaccccattttacgtgttggtgctgataatcatgtgctacccttggactgtgttactcttcagacatttttagctaagtgtttgggaccttttgatgaatgggaaagcagacttagggttgcaaaagaatcaggctacaacatgattcattttaccccattgcagactcttggactatctaggtcatgctactcccttgccaatcagttagaattaaatcctgacttttcaagacctaatagaaagtatacctggaatgatgttggacagctagtggaaaaattaaaaaaggaatggaatgttatttgtattactgatgttgtctacaatcatactgctgctaatagtaaatggatccaggaacatccagaatgtgcctataatcttgtgaattctccacacttaaaacctgcctgggtcttagacagagcactttggcgtttctcctgtgatgttgcagaagggaaatacaaagaaaagggaatacctgctttgattgaaaatgatcaccatatgaattccatccgaaaaataatttgggaggatatttttccaaagcttaaactctgggaatttttccaagtagatgtcaacaaagcggttgagcaatttagaagacttcttacacaagaaaataggcgagtaaccaagtctgatccaaaccaacaccttacgattattcaagatcctgaatacagacggtttggctgtactgtagatatgaacattgcactaacgactttcataccacatgacaaggggccagcagcaattgaagaatgctgtaattggtttcataaaagaatggaggaattaaattcagagaagcatcgactcattaactatcatcaggaacaggcagttaattgccttttgggaaatgtgttttatgaacgactggctggccatggtccaaaactaggacctgtcactagaaagcatcctttagttaccaggtattttactttcccatttgaagagatagacttctccatggaagaatctatgattcatctgccaaataaagcttgttttctgatggcacacaatggatgggtaatgggagatgatcctcttcgaaactttgctgaaccgggttcagaagtttacctaaggagagaacttatttgctggggagacagtgttaaattacgctatgggaataaaccagaggactgtccttatctctgggcacacatgaaaaaatacactgaaataactgcaacttatttccagggagtacgtcttgataactgccactcaacacctcttcacgtagctgagtacatgttggatgctgctaggaatttgcaacccaatttatatgtagtagctgaactgttcacaggaagtgaagatctggacaatgtctttgttactagactgggcattagttccttaataagagaggcaatgagtgcatataatagtcatgaagagggcagattagtttaccgatatggaggagaacctgttggatcctttgttcagccctgtttgaggcctttaatgccagctattgcacatgccctgtttatggatattacgcatgataatgagtgtcctattgtgcatagatcagcgtatgatgctcttccaagtactacaattgtttctatggcatgttgtgctagtggaagtacaagaggctatgatgaattagtgcctcatcagatttcagtggtttctgaagaacggttttacactaagtggaatcctgaagcattgccttcaaacacaggtgaagttaatttccaaagcggcattattgcagccaggtgtgctatcagtaaacttcatcaggagcttggagccaagggttttattcaggtgtatgtggatcaagttgatgaagacatagtggcagtaacaagacactcacctagcatccatcagtctgttgtggctgtatctagaactgctttcaggaatcccaagacttcattttacagcaaggaagtgcctcaaatgtgcatccctggcaaaattgaagaagtagttcttgaagctagaactattgagagaaacacgaaaccttataggaaggatgagaattcaatcaatggaacaccagatatcacagtagaaattagagaacatattcagcttaatgaaagtaaaattgttaaacaagctggagttgccacaaaagggcccaatgaatatattcaagaaatagaatttgaaaacttgtctccaggaagtgttattatattcagagttagtcttgatccacatgcacaagtcgctgttggaattcttcgaaatcatctgacacaattcagtcctcactttaaatctggcagcctagctgttgacaatgcagatcctatattaaaaattccttttgcttctcttgcctccagattaactttggctgagctaaatcagatcctttaccgatgtgaatcagaagaaaaggaagatggtggagggtgctatgacataccaaactggtcagcccttaaatatgcaggtcttcaaggtttaatgtctgtattggcagaaataagaccaaagaatgacttggggcatcctttttgtaataatttgagatctggagattggatgattgactatgtcagtaaccggcttatttcacgatcaggaactattgctgaagttggtaaatggttgcaggctatgttcttctacctgaagcagatcccacgttaccttatcccatgttactttgatgctatattaattggtgcatataccactcttctggatacagcatggaagcagatgtcaagctttgttcagaatggttcaacctttgtgaaacacctttcattgggttcagttcaactgtgtggagtaggaaaattcccttccctgccaattctttcacctgccctaatggatgtaccttataggttaaatgagatcacaaaagaaaaggagcaatgttgtgtttctctagctgcaggcttacctcatttttcttctggtattttccgctgctggggaagggatacttttattgcacttagaggtatactgctgattactggacgctatgtagaagccaggaatattattttagcatttgcgggtaccctgaggcatggtctcattcctaatctactgggtgaaggaatttatgccagatacaattgtcgggatgctgtgtggtggtggctgcagtgtatccaggattactgtaaaatggttccaaatggtctagacattctcaagtgcccagtttccagaatgtatcctacagatgattctgctcctttgcctgctggcacactggatcagccattgtttgaagtcatacaggaagcaatgcaaaaacacatgcagggcatacagttccgagaaaggaatgctggtccccagatagatcgaaacatgaaggacgaaggttttaatataactgcaggagttgatgaagaaacaggatttgtttatggaggaaatcgtttcaattgtggcacatggatggataaaatgggagaaagtgacagagctagaaacagaggaatcccagccacaccaagagatgggtctgctgtggaaattgtgggcctgagtaaatctgctgttcgctggttgctggaattatccaaaaaaaatattttcccttatcatgaagtcacagtaaaaagacatggaaaggctataaaggtctcatatgatgagtggaacagaaaaatacaagacaactttgaaaagctatttcatgtttccgaagacccttcagatttaaatgaaaagcatccaaatctggttcacaaacgtggcatatacaaagatagttatggagcttcaagtccttggtgtgactatcagctcaggcctaattttaccatagcaatggttgtggcccctgagctctttactacagaaaaagcatggaaagctttggagattgcagaaaaaaaattgcttggtccccttggcatgaaaactttagatccagatgatatggtttactgtggaatttatgacaatgcattagacaatgacaactacaatcttgctaaaggtttcaattatcaccaaggacctgagtggctgtggcctattgggtattttcttcgtgcaaaattatatttttccagattgatgggcccggagactactgcaaagactatagttttggttaaaaatgttctttcccgacattatgttcatcttgagagatccccttggaaaggacttccagaactgaccaatgagaatgcccagtactgtcctttcagctgtgaaacacaagcctggtcaattgctactattcttgagacactttatgatttatagtttattacagatattaagtatgcaattacttgtattataggatgcaaggtcatcatatgtaaatgccttatatgcacaggctcaagttgttttaaaaatctcatttattataatattgatgctcaattaggtaagattgtaaaagcattgattttttttaatgtacagaggtagatttcaatttgaatcagaaagaaatatcattaccaatgaaatgtgtttgagttcagtaagaattattcaaatgcctagaaatccatagtttggaaaagaaaaatcatgtcatcttctatttgtacagaaatgaaaataaaatatgaaaataatgaaagaaatgaaaagatagcttttaattgtggtatatataatcttcagtaacaatacatactgaatacgctgtggttcattaatattaacaccacgtactatagtattcttaatacagtgctcactgcatttaataaatatttaataaatgatgaatgatagaagtttccatctacaatatatgttcctaaatggagcacagatgttcaaactatgctttcattttttcactgatatattaatttttgtgtaatgaatgccaacagtatattttatatgatttacttatgtgaggaaacatgcaaagcattaggaaatttatttcctaaaaacagttttgtaaaattagtattgagttctattgagtattataagatagcttacattttcaaaatggaaattgtcggtcatatttctagaactttaaagaaaaaagaatgttatattagttttctaaaactcaactatctttagtcatgttcaaaaatctattgctagatcatagtagatactggttttctattaactcaaaacctacattgacaagtttaacattgagaagaatcttaacaaaaatatggatatgaattcagtagatatcttaaattcaataaaatcactggaagtttttcatgataacttattttaagatgccttaaaaatcttaaagtcacaaaaggaaaaaggtttttaacatttacatgagttaacattttttcatagaacttatttcctagatagaattttttactgttttttactgttttcttaagaaaacagttaaatcattatgcattcagttggaagaaagtagtggcaagaattctttcattgctatataatattcagtggctcatttatacctaataaaataatggtattttaaaataatgctactttcaaagtagcatttttttagttagtttacaggttacatacccaaaaccttaactatgactaagaaattaaagaagaaaaccagcaaactaaaacttctgggcagcaaaaatatataaatgcttcagatgtcaaatacccatgcttgaaagctcgtgtaatttactttaagattatctgcctgctcttcttcaaagctgaccttgctttagaaatagttttaactagcttagttttctggtttccaaaactaaaatagattaaatcctacaaatttaaggacagttgtgacagtaatctgaccactatctataaatacattggacattggtttccaaatctccctttcttcttcagttccttccttgttcaatatatacccttctctaaactgtgcgggtaaaaggaatgactgtccttgagagaaccattagtttatcaaaggtttatgtagttttgttgctgtaccctaactttgatattcagggaggtaggaaaggtaacagaaaaccagcatatttaatcaaagcaagaagtaatcgctgacagttaaatgtgaccaaaaaaattaaaagttcacaatttttttaatgtagccatttggggttatctctagtaaggcagatacccacgttggtaaatttttaggatattgtgttgcactagaaaactaagtggttcatatttctaatgaggaagattaatgaaagaacattgttatattctgcgtggtatattttaaagtttaagaaggcatgttaaacattatttcctctatggtagttaaaatacagaattagatttttaacaggtgtcatttgactaaacgtttcggtagaatgcttcatacttgagtgatgctggataaggtattgtatttcaacaatggactatgccttggtttttcactaatcaaaatcaaaattactctttaacatgataaatgaatttaccagtttagtatgctgtggtattttaataagttttcaaagataattgggaaaacatgagactggtcatattgatgaatattgtaacatgtgaattgtgatccatttctgatatgtcttgaactactgtgtctagtgggcaaatgtcattgttacctctgtgtgttaagaaaataaaaatattttctaaaggtc

SEQ ID NO: 5973 - DNA, 1794 bp, Homo sapiens
atgcgcgtcgggcacagcgcgtgcagcctcgtgcagctcttctggtctccggcgcccgcccctcagacgtaatgttgaattaaagaaaatactttatcagaagaagatggccactgcccagttgcagaggactcccatgagtgcactggtatttcccaataagatatcaactgaacaccagtctttggtgttagtgaagaggcttctagcagtttcagtatcctgtatcacgtatttgaggggaatattcccagaatgcgcttatggaacaagatatctagatggatgctaggatgttatgatgctttacagaaaaaatatctaaggatggttgttctagctacaatttcagaatgttaccaattcaaattcaaatacaccaataatggaccactcatggacttcataagtaaaaaccaaagcaacgaatctagcatgttgtctactgacaccaagaaagcaagcattctcctcattcgcaagatttatatcctaatgcaaaatctggggcctttacctaatgatgtttgtttgaccatgaaacttttttactatgatgaagttacacccccagattaccagcctcccggttttaaggatggtgattgtgaaggagttatatttgaaggggaacctatgtatttaaatgtgggagaagtctcaacaccttttcacatcttcaaagtaaaagtgaccactgagagagaacgaatggaaaatattgactcaactatactatcaccaaaacaaataaaaacaccatttcaaaaaatcctgagggacaaagatgtagaagatgaacaggagcattatacaagtgatgatttggacattgaaactaaaatggaagaacaggaaaaaaaccctgcatcttctgaacttgaagaaccaagtttagtttgtgaggaagatgaaattatgaggtctaaagaaagtccagatctttctatttctcattctcaggttgagcagttagtcaataaaacatctgaacttgatatgtctgaaagcaaaacaagaagtggaaaagtctttcagaataaaatggcaaatggaaatcaaccagtaaaatcttccaaagaaaatcggaagagaagtcaacatgaatctgggagaatagtcctccatcactttgattcttctagtcaagagtcagtgccaaaaaggagaaagtttagtgaaccaaaggaacatatataaaaattatttttgttctgcaggcttgcagagttcttctcaccatttaaactgaaggaccctatattatatttccctaactctgaagatgtatatgtagtttaaagcagtttgtacactaaaactaagtttttggctgactgtcatattgtggtccttaatcttgagataaatccaatagaacttttgaataaaagcaaaagtacaaatgtcataattgattcggtaataagtaaaatttcaaaattgattttgttcattacctacttaatatttcctttaaatatatactaactgttaaggccctctaatgccatttttctaaacagtaatgtttactttggtattaaaatttggtatggattcactttttacttatgttaaaattataccatttaactggctcttttgtcattgtgctgttattaaaacaatgttcttcaatattttgacataatgtattaacattttaatatataatgtacaatttaagaattggtgctttacctttactatgcttttttttacaggacaaaaagactgatttttaaagtatggcattttttgcagcataaataaaatattgttcagtacgta

SEQ ID NO: 5974 - DNA, 1536 bp, Homo sapiens
gggcggagcggctgcacggacaagagcggaggcctggaaggggaaactgaagcagaaagaggttacttaatgggctcaaggtcacctacctgacctaccagcagctcaatggccttcccaaagaagaaacttcagggtcttgtggctgcaaccatcacgccaatgactgagaatggagaaatcaacttttcagtaattggtcagtatgtggattatcttgtgaaagaacagggagtgaagaacatttttgtgaatggcacaacaggagaaggcctgtccctgagcgtctcagagcgtcgccaggttgcagaggagtgggtgacaaaagggaaggacaagctggatcaggtgataattcacgtaggagcactgagcttgaaggagtcacaggaactggcccaacatgcagcagaaataggagctgatggcatcgctgtcattgcaccgttcttcctcaagccatggaccaaagatatcctgattaatttcctaaaggaagtggctgctgccgcccctgccctgccattttattactatcacattcctgccttgacaggggtaaagattcgtgctgaggagttgttggatgggattctggataagatccccaccttccaagggctgaaattcagtgatacagatctcttagacttcgggcaatgtgttgatcagaatcgccagcaacagtttgctttcctttttggggtggatgagttttgtatccagagatttatcaactttgttgtcaaactagaaaactcaaaactcaaagtttcaaagaaccaaaggactcttcctctgggcaccacaaacttccccttcctccactgagaagactgtctctcccgcaggaccctgaattattgaaatcgaaggctgacttcctttctgcagtgagcccaggggctaatgttattatcctgtcacacttgcaactagtgacttttgtttagtgatagaagatttggggaggacccaaaggactcagaactttctctccatacctccttttactcttttctttctgtgtaatgtatcaacaactgtttaatctcccttctaacaaaccttgatataagctttctgatatcaaagtatattgacagttaacccttactgattttaaacttgactatccagtctgttaattacctaagattttgttttcatttcatctctaattgttttgatcattggcagagaaagagtatttgaaattcatatcagttttgctccttattttaatctctttgaattaaaaataaaactttttcaaaatggaaatttgaaattataagtagacttcaattatctttgctaatcctctctttaattagtcagctagttaaaagttgttatattcatatatcctcaaccctctttttgcctttgtagcttttaatttcctgaaagaagaaaatgagttgttcgtttttggttctgaggatgtgatatccgtacttactgatactaaagccaaatttaaattctaaaattaattcttgggtatccaataaacaaagaactatttttcta

SEQ ID NO: 5975 - DNA, 1743 bp, Homo sapiens; identical to SEQ ID NO: 3575

SEQ ID NO: 5976 - DNA, 1959 bp, Homo sapiens
gagcaatcccttctccctcctcctcctccccccgctactatccgcggcccagagaactgccgcttgccgccattgacacgcacagatagaacccaaagaaaggcaaagagtcctgcccggcaccggcgccgcgtgggccaaacctgcgcccgtggaggggcgcgcagagggcaccgggcgccgggagcaggcggcgcagcaccagcattgtgttagtgccgggaggccactgtgtcagcaagctgagagggaaactgaagcaagatgtcgggccggagtgggaagaagaaaatgtccaagctgtcccgttcagctagggcaggtgtcatctttccagtggggaggctgatgcgttatctgaagaaagggacgttcaagtaccggatcagcgtgggcgcccctgtctacatggcggcagtcattgagtacctggcagcggaaattctagaattggccggcaatgccgcgagggacaacaagaaggcccggatagccccgagacacatcttgctggcagttgccaatgacgaggagctcaaccagctgctaaaaggagtgaccatcgccagtggaggcgtcctgcccagaattcaccccgaactgctggccaaaaagcgagggaccaaaggcaagtcggaaacgatcctctccccacccccagagaaaagaggcaggaaggccacgtcaggcaagaagggggggaagaaatccaaggctgccaaaccacggacgtccaaaaagtccaaaccaaaggacagcgataaagaaggaacttcaaattccacctctgaagatgggccaggggatggattcaccattctgtcttctaagagccttgttctgggacagaagctgtccttaacccagagtgacatcagccatattggctccatgagagtggagggcattgtccacccaaccacagccgaaattgacctcaaagaagatataggtaaagccttggaaaaggctgggggaaaagagttcttggaaacggtaaaggagcttcgcaaatcccaaggccctttggaagtcgccgaagccgccgtcagccaatccagtggactcgcagccaaatttgtcatccactgtcacatccctcagtggggctccgacaaatgtgaagaacagcttgaagagaccatcaaaaactgcctgtcagcggcggaggacaagaagctaaagtccgtcgcgttcccgcctttccccagcggcagaaactgctttcccaaacagactgcggcccaggtgaccctcaaagccatctcagcccactttgatgactcgagcgcgtcctcgctgaagaacgtgtacttcctgctcttcgacagcgagagcatcggcatctacgtgcaggagatggccaagctcgacgccaagtagccgccgcactttccagcagggatcggaggacgacccgagtcccaagagtggggttttgctttttaaaaggagagaggaggggtgatggcaggggagtggagggtggccgggcaggtcctgccggcgcagggagccctctgcccttcacactctcctccaaaagagcctccatctgtaaggaagcaggtctccgcgaggggtttctttccatgtgttttcctcctgttgttttagaacttttttaaaaaaacagacctcgttttagatttatagcattgacttttacacacattcacacaagaaaaaaatcctttcaaaattcttaaatcttctgttcctcctttttccaagggaagagggcaaaaagtggcctgggctctgttggtgtgcgtgttccgtggcggagagaagaaaatgggaaagacatctcactggtgcttttctcttttgttttagtgccccccgcccccatccctataatatctgtaactactcctaaaaaggttttgattcaggcttttttttggtttcattttgtttttttaagaaaaagaaaatgaaaggaaaaaaataaaa

SEQ ID NO: 5977 - DNA, 6646 bp, Homo sapiens
aagcgcagggaaggcctccccgcacgggtgggggaaagcggccggtgcagcgcggggacaggcactcgggctggcactggctgctagggatgtcgtcctggataaggtggcatggacccgccatggcgcggctctggggcttctgctggctggttgtgggcttctggagggccgctttcgcctgtcccacgtcctgcaaatgcagtgcctctcggatctggtgcagcgacccttctcctggcatcgtggcatttccgagattggagcctaacagtgtagatcctgagaacatcaccgaaattttcatcgcaaaccagaaaaggttagaaatcatcaacgaagatgatgttgaagcttatgtgggactgagaaatctgacaattgtggattctggattaaaatttgtggctcataaagcatttctgaaaaacagcaacctgcagcacatcaattttacccgaaacaaactgacgagtttgtctaggaaacatttccgtcaccttgacttgtctgaactgatcctggtgggcaatccatttacatgctcctgtgacattatgtggatcaagactctccaagaggctaaatccagtccagacactcaggatttgtactgcctgaatgaaagcagcaagaatattcccctggcaaacctgcagatacccaattgtggtttgccatctgcaaatctggccgcacctaacctcactgtggaggaaggaaagtctatcacattatcctgtagtgtggcaggtgatccggttcctaatatgtattgggatgttggtaacctggtttccaaacatatgaatgaaacaagccacacacagggctccttaaggataactaacatttcatccgatgacagtgggaagcagatctcttgtgtggcggaaaatcttgtaggagaagatcaagattctgtcaacctcactgtgcattttgcaccaactatcacatttctcgaatctccaacctcagaccaccactggtgcattccattcactgtgaaaggcaaccccaaaccagcgcttcagtggttctataacggggcaatattgaatgagtccaaatacatctgtactaaaatacatgttaccaatcacacggagtaccacggctgcctccagctggataatcccactcacatgaacaatggggactacactctaatagccaagaatgagtatgggaaggatgagaaacagatttctgctcacttcatgggctggcctggaattgacgatggtgcaaacccaaattatcctgatgtaatttatgaagattatggaactgcagcgaatgacatcggggacaccacgaacagaagtaatgaaatcccttccacagacgtcactgataaaaccggtcgggaacatctctcggtctatgctgtggtggtgattgcgtctgtggtgggattttgccttttggtaatgctgtttctgcttaagttggcaagacactccaagtttggcatgaaaggttttgttttgtttcataagatcccactggatgggtagctgaaataaaggaaaagacagagaaaggggctgtggtgcttgttggttgatgctgccatgtaagctggactcctgggactgctgttggcttatcccgggaagtgctgcttatctggggttttctggtagatgtgggcggtgtttggaggctgtactatatgaagcctgcatatactgtgagctgtgattggggaacaccaatgcagaggtaactctcaggcagctaagcagcacctcaagaaaacatgttaaattaatgcttctcttcttacagtagttcaaatacaaaactgaaatgaaatcccattggattgtacttctcttctgaaaagtgtgctttttgaccctactggacatttattgacttaattgcttctgtttattaaaattgacctgcaaagttaaaaaaaaattaaagttgagaacaggtataagtgcacactgaatagtctaatctacatgtaacacatattttagtgtgattttctatactctaatcagcactgaattcagagggtttgactttttcatctataacacagtgactaaaagagttaagggtatatataccatcactttgggacttggtagtattattaaaaggttatttccttcactgtcaataaaagtccaaatgtttagcttaggtctgagagtcaaacaatgttaaggattgtcttaaagttccttagccagcaaaacaaaacaaaacaaaacaaacaaatgaaaaacgtttaaaaagaagaagaagaaaaaaaacaagaacaagcagcaacagctgttttgttggggctatagatttaagttaggcatagtcaatttcagaataactaagagtggaatatatgcatatggtgaaattataaccttgcccttttttatttgccctctgcgatccacctgctttttagaagtctgccgagtgagaaggccacagtatctcatgctgtttgcattacagaactgcagcttttctactctgaaaaggcctgggagcagaatggctggcctgctgtgagcaggagaggagattctaagaaggatagtcccccctacaacatactgtcatactgctgggttttcatgggtaggaaagcttgtcctgaccccagcagcaaagaggtggcaggtcgctaatgaatatatgctttataatgtccttcttcattgctgagagggcagccttagagctgtggatttctgcatcccccctgagtctgacccatggacacctgtttcattcactttagcatcacagtgacctttgtatgctctgttcagtctgtgtcaggcagtatgcttgtcctgaagagaggtttggctatccccaccccaccccaccccaccctgttccttttttatcaggaggacttcagagccaggcctgcagcattttgtttgaaaacacaatcagctctgacagttagacatgcacacagacgccatagctggattggaaacattgatgttttaaaaatttattttttttggaaatagttgcacaaatgctgcaatttagctttaaggttctatagatttttaactagtccaacacagtcagaaacattgttttgaatcctctgtaaaccaaggcattaatcttaataaaccaggatccatttaggtaccacttgatataaaaaggatatccataatgaatattttatactgcatcctttacattagccactaaatacgttattgcttgatgaagacctttcacagaatcctatggattgcagcatttcacttggctacttcatacccatgccttaaagaggggcagtttctcaaaagcagaaacatgccgccagttctcaagttttcctcctaactccatttgaatgtaagggcagctggcccccaatgtggggaggtccgaacattttctgaattcccattttcttgttcgcggctaaatgacagtttctgtcattacttagattccgatctttcccaaaggtgttgatttacaaagaggccagctaatagcagaaatcatgaccctgaaagagagatgaaattcaagctgtgagccaggcaggagctcagtatggcaaaggttcttgagaatcagccatttggtacaaaaaagatttttaaagcttttatgttataccatggagccatagaaaggctatggattgtttaagaactattttaaagtgttccagacccaaaaaggaaaaataaaaaaaaaggaatatttgtacccaacagctagaaggattgcaaggtagatttttgttttaaaatggagagaagtggacagataaggccatttaatatatcaaagatcagttgacatctcctagggaatgatgaaaacagcaggctattagaaaattatttcatatagttctcgtgttcttttcttttttttaatccctgaagggatgatcagtaacatagcttctcttttctgtactctagaccaccccttttcatcattttgctttttatgtctcccataagaaatgtgctttttagagcttcctaatgcatgtgttgcattattgcagcattagaaaaggagaggtagcatttttgctgaaatcgggcctgtcactctccaataaaggttctggcacttcaatgccaggcaggtctcctaaatgaacagaatgatctgtgtgagccgatgcctgcccttccagaggggccactgtccccagccgcagccaactgtgtcccacaggaatgggagcctaggtttccaaatcttgtgattctttaggagaaacatgaaacctggatttcgtgtgaaatgtcccgattgttaaaaagttggctcaattatttttaaaacattttgtaagccaacaaaagtctgtgggctgccagtttattacttttgtcttaaaacatgatcattgttctctcacggtatccttctgtcttcccgttgcaaattcacttttctttcttcctgacattgccattgagggctttgttaccacaagctaagaaactgagtttaacagcccagttatctgcaacatgtcaattacctttgctcctctcctgtgattcccaccatgctgtgaccctcagctgtctccctttgctgggaattctgcaccaatgtctcccctcaacccattccctggttggtcctactcccgtgtggccagagacatcctagcaaatccttcctcctattatatctgacactaatttcttttcaacagcgctcatgtctcttggcccagtcaggtgctgccaggtttagataggaaagtacatgtcccattttcatgggtgcccttaatgtggtccacgtcctatatcttattatatttactcatggctcaatgggggcctccagagaccctctcaggctgctgagctagactaaggaatgcatccaccgtcatcacatgagacactgactctgtgacgacaaaagtacaaacagtctgaggctaagaaaggttcatctcacaacaggaaaaacaaatctcaacacacattagagataattgattcaggggttttctctcccagtctcccagcagggactgatttcatttctgacccactaggttttctttccagaaataggtagcaaggacaagaactaaacaatcccagccccacccagcaacacagaacacaggagtttgcttttggcttctcactctccaagtaaccctgaattaggcccagaatggctgaggcttggagcatctcctcagacagagcagaggcgacacctcttcaggggtgtgtggagtaaatagctcgaagagctgaagacagaaaaccagtttcacgccaggtgcgagagagagcataatggagggaagcccgctttctctctcctcttcttttctctttatttctttagagcacttgacttttttttctctctctctctagtattctaaactgaccccatgaccaactgagaatttatttttgtttcattggttgtttcacagaattagaacacacacgactttttattcctccattgcaaaatggaatcaagatactacacaagacctgtgctttcttcctttgcatgatttacacctccgcctgttttggtgctagctgtctagaacttctctcttggtttgaatctgattccttcacactacactagaagtttatttcatcttgttttgtctagactccagatacagagggacagctggactgaggacaagcaattccatctagcatagggtctctcagggttggtgcatccagccacatgggcagggccagtcacatctagtctatgtccccagagcccttggagttgcgcagcttagctgacttgactccaaggaaattagtacagaagtaaccactctattaagtgtgttctgctatgttcacatgcctgtagtacctgcaaaccatgccaggttcatctaaagacataggggaagattaaggactcttttggacagaccatgaattgaatttgctgccaggtgctgccagactgaatttggctgacagaactcccagcccaggaaagttccatgacaatgactgtcgcagaaggaaatttcccactaaagtcagtccattttcaagttttggtcttcagagacaaaagaacgtcccagccacctgattttgatggtgaggtaactctaagttgaattcaggctagtgttgcagtatagctttggcatgttcatgagtgagcacccagaatgtgttgaaccaacccccacccctaactactgactatgactgcagtgggtttttatggggaaaaaaagtgtgaaaagcaaaaagaaaggaacagagattttttatcacctttattgtaagacagtccatttatgaattgagtataaacacatacaaagtaacaagagattcctaagaaacgcaaatccttgagtttcacgcacttcatgttcaaccatttgctgtaatccagaggcagcctgtgaatcattctcatgccctgttttttttttttttttcctataatgttctgggtttaaaagccatcttttccacattttctgtaaataatggataatcattttaaaaatttttatttttagtgctgttttaacaatgtagatagatcataaatgtacttgctgaattcaatcatttttaacaagccaataaagtttgataattca

SEQ ID NO: 5978 - DNA, 6878 bp, Homo sapiens
gggtcggaggagacgccagccaaagtaggcggagttgcggaaggagagtccgatctgcgcaatccagtccgggacttggctccgcccgggagcggcggcctctccggtgacagaggagtagtgagcggcacggggtgaggctgcagccaactccgctccccgcgcactcggctgcccaggcgctcggaacccagcagcggcgctcctccgcggtgccggtcgcccgcgatgcccgcttagcagcgtgtagcagcggccagcatcaccacacccgcggcaccgcgctgccggccgcagagccgggccagagccttgcacccctgccccagcccccaccccgccccccgccctgaaatgacttgttaatcggcgcagacaccaccaaggggactcaccgaagtggaatccaagtggaatttggatttggagaagagtttcttgaacatttaccctcttccttgttggttttctttttctttttcttctttttttttttggcttcttttttcctctccccttctccgctcgtcattggagatgaacacatcgcgtttgcatcccagaaagtagtcgccgcgactatttcccccaaagagacaagcacacatgtaggaatgacaaaggcttgcgaaggagagagcgcagcccgcggcccggagagatcccctcgataatggattactaaatgggatacacgctgtaccagttcgctccgagccccggccgcctgtccgtcgatgcaccgaaaagggtgaagtagagaaataaagtctccccgctgaactactatgaggtcagaagccttgctgctatatttcacactgctacactttgctggggctggtttcccagaagattctgagccaatcagtatttcgcatggcaactatacaaaacagtatccggtgtttgtgggccacaagccaggacggaacaccacacagaggcacaggctggacatccagatgattatgatcatgaacggaaccctctacattgctgctagggaccatatttatactgttgatatagacacatcacacacggaagaaatttattgtagcaaaaaactgacatggaaatctagacaggccgatgtagacacatgcagaatgaagggaaaacataaggatgagtgccacaactttattaaagttcttctaaagaaaaacgatgatgcattgtttgtctgtggaactaatgccttcaacccttcctgcagaaactataagatggatacattggaaccattcggggatgaattcagcggaatggccagatgcccatatgatgccaaacatgccaacgttgcactgtttgcagatggaaaactatactcagccacagtgactgacttccttgccattgacgcagtcatttaccggagtcttggagaaagccctaccctgcggaccgtcaagcacgattcaaaatggttgaaagaaccatactttgttcaagccgtggattacggagattatatctacttcttcttcagggaaatagcagtggagtataacaccatgggaaaggtagttttcccaagagtggctcaggtttgtaagaatgatatgggaggatctcaaagagtcctggagaaacagtggacgtcgttcctgaaggcgcgcttgaactgctcagttcctggagactctcatttttatttcaacattctccaggcagttacagatgtgattcgtatcaacgggcgtgatgttgtcctggcaacgttttctacaccttataacagcatccctgggtctgcagtctgtgcctatgacatgcttgacattgccagtgtttttactgggagattcaaggaacagaagtctcctgattccacctggacaccagttcctgatgaacgagttcctaagcccaggccaggttgctgtgctggctcatcctccttagaaagatatgcaacctccaatgagttccctgatgataccctgaacttcatcaagacgcacccgctcatggatgaggcagtgccctccatcttcaacaggccatggttcctgagaacaatggtcagataccgccttaccaaaattgcagtggacacagctgctgggccatatcagaatcacactgtggtttttctgggatcagagaagggaatcatcttgaagtttttggccagaataggaaatagtggttttctaaatgacagccttttcctggaggagatgagtgtttacaactctgaaaaatgcagctatgatggagtcgaagacaaaaggatcatgggcatgcagctggacagagcaagcagctctctgtatgttgcgttctctacctgtgtgataaaggttccccttggccggtgtgaacgatatgggaagtgtaaaaaaacctgtattgcctccagagacccatattgtggatggataaaggaaggtggtgcctgcagccatttatcacccaacagcagactgacttttgagcaggacatagagcgtggcaatacagatggtctgggggactgtcacaattcctttgtggcactgaatgggcattccagttccctcttgcccagcacaaccacatcagattcgacggctcaagaggggtatgagtctaggggaggaatgctggactggaagcatctgcttgactcacctgacagcacagaccctttgggggcagtgtcttcccataatcaccaagacaagaagggagtgattcgggaaagttacctcaaaggccacgaccagctggttcccgtcaccctcttggccattgcagtcatcctggctttcgtcatgggggccgtcttctcgggcatcaccgtctactgcgtctgtgatcatcggcgcaaagacgtggctgtggtgcagcgcaaggagaaggagctcacccactcgcgccggggctccatgagcagcgtcaccaagctcagcggcctctttggggacactcaatccaaagacccaaagccggaggccatcctcacgccactcatgcacaacggcaagctcgccactcccggcaacacggccaagatgctcattaaagcagaccagcaccacctggacctgacggccctccccaccccagagtcaaccccaacgctgcagcagaagcggaagcccagccgcggcagccgcgagtgggagaggaaccagaacctcatcaatgcctgcacaaaggacatgccccccatgggctcccctgtgattcccacggacctgcccctgcgggcctcccccagccacatccccagcgtggtggtcctgcccatcacgcagcagggctaccagcatgagtacgtggaccagcccaaaatgagcgaggtggcccagatggcgctggaggaccaggccgccacactggagtataagaccatcaaggaacatctcagcagcaagagtcccaaccatggggtgaaccttgtggagaacctggacagcctgccccccaaagttccacagcgggaggcctccctgggtcccccgggagcctccctgtctcagaccggtctaagcaagcggctggaaatgcaccactcctcttcctacggggttgactataagaggagctaccccacgaactcgctcacgagaagccaccaggccaccactctcaaaagaaacaacactaactcctccaattcctctcacctctccagaaaccagagctttggcaggggagacaacccgccgcccgccccgcagagggtggactccatccaggtgcacagctcccagccatctggccaggccgtgactgtctcgaggcagcccagcctcaacgcctacaactcactgacaaggtcggggctgaagcgtacgccctcgctaaagccggacgtaccccccaaaccatcctttgctcccctttccacatccatgaagcccaatgatgcgtgtacataatcccagggggagggggtcaggtgtcgaaccagcaggcaaggcgaggtgcccgctcagctcagcaaggttctcaactgcctcgagtacccaccagaccaagaaggcctgcggcagagccgaggacgctgggtcctcctctctgggacacaggggtactcacgaaaactgggccgcgtggtttggtgaaggtttgcaacggcggggactcaccttcattctcttccttcactttcccccacaccctacaacaggtcggacccacaaaagacttcagttatcatcacaaacatgagccaaaagcacatacctaccccatcccccacccccacacacacacacacacacacatgcacacaacacatacacacacacgcacagaggtgaacagaaactgaaacattttgtccacaacttcacgggacgtggccagactgggtttgcgttccaacctgcaaaacacaaatacattttttaaaatcaagaaaatttaaaaagacaaaaaaaaaagaattcattgataattctaactcagactttaacaatggcagaagtttactatgcgcaaatactgtgaaatgcccgccagtgttacagctttctgttgcagcagataaatgccatgttgggcaactatgtcatagatttctgctcctcctctcttttaatgaaataacgtgaccgttaacgcaagtaactctttatttattgttcaccctttttttccttaaggaaaggactcttccaaatatcatcctatgaacagctcttcagaaagcccattgaaagttaaactatttaacgtgaaatccattaactggaataattgagtttctttatttttacaataaattcactgagtaaataagttggagctggaattctgagctttgtgtttggactgtctggtctgtagctaaaggaaaaagttaggaggggaatatttatttaaatctatcagttcattgcctggtcaggtctctggcctataaacatgcaaaaaaactaattcatgttaaagtccttccagatcctaatttctaaagcaatcaggagagaaagcttttagaatggcacatcatatctcattgatgccaacatggttttgtccatggttctgactttctgtgaaggcaccagcttgcaatatgccatcccatttcaccttgcatgtgagacagcaaacaaaatccacaaatggtgtgaactaatatgctggctgctaccttgcataaattaatgatttgatcacacgggttcttcgtggggttacatctgtgaatagcctgttttccacatgtaaatttgtgccttacaccttgagttgtgtacacttgtaaactctttatgatcaactgttcccccttttgaaataagtgcagatatttatttaaccctcccttccccaccctctgccccacttccagccctctgaaagattggagtcaagcagatggaagaatgcagtggtgatagttgtcatgcgacagcctgagaacgctgggcagcaccacaccctccaattcacactgccttctagttgtgccaactggaaccaccctttggctgtgctgcgaagcatggaccccagtgttgttgtgggtgtgtcaaatcccctttcatcctcaagagctccctgcttcccttagattatttcaatacggtgatatccttatttgctagcagaaaagggactaacgtcccattcctcttttctgctgcgtccactggctagagagcaggcggtgcgcggttgggcagacacctgggaggagtctccaagccatgtgcacagcacacacgtgcagtgcacacaaagaaatgacatggaaatagatgcaggcaggctggtccctgctgtgattaacgagtaactccaagtacaaggccgaccacaatggatgctgcaaaaacgttgactggggcaaaggattttttattttattttttattttgttaattatgtttttaggggatgggaggtggtgtgtgtttttctcctcttggttttcatttgctcaagcacacaaaagggacttttgtttactctatcatgaacaaaggaactgtccacatactgtaaaccatgagcagtgttgttgttgtttttttaaacagtatatttggtggtctctttgtctgcttttatttccagttcgatcttctgggtttagttttgtctttaaaaagaattcaaaaaaagactgacaatgacagttttgagttggatagtgaaaaagtggagcctccataatcagtgtggttgccttcagacctgagtacttagctgagggtgggtgagagccctttgttccaaaagtccattagttttgctgttgtttaggagtaggtggttgttgttgtttttactttttttttttttggcttttgtaatggaatccatgttcacatcctgtgaactctgtctcctgaaaccctgaagtatttcctagaacctgaaatattgttttcttccttgaattttctctagaaatgcagaaattaggaaggtgatgggtctgtatccccctgcccccttctttcccatgcttgactcccgagagtactggcagtgcagcacccatcattgacgtaagcggctgtcttgtccagtgtttgtaggcatcactgcctcagctgttaaggagacctgtgtcaaaacttacatccacattcctacacccccacaacccatcacttctggtgttaaccctaaaatacccacatgtattgagctggtcttctgcatttaagtatttctccccagtttttttccccactgtgtgtggggggagggtccataaacccgagtgtgcctttgctttccacccttgctagacactggtagatgcaacaaactcagatttatatttgttgtaaagttgtaaaaatattgtgatgtcaccaattttccttccatctccacatcccctaacatctgattcacgacttaatgtatgttgtaagaaaagaaaaaagaaaagaaaaaaagggaaaaaa

SEQ ID NO: 5979 - DNA, 3127 bp, Homo sapiens
gaggccaggggagggtgcgaaggaggcgcctgcctccaacctgcgggcgggaggtgggtggctgcggggcaattgaaaaagagccggcgaggagttccccgaaacttgttggaactccgggctcgcgcggaggccaggagctgagcggcggcggctgccggacgatgggagcgtgagcaggacggtgataacctctccccgatcgggttgcgagggcgccgggcagaggccaggacgcgagccgccagcggtgggacccatcgacgacttcccggggcgacaggagcagccccgagagccagggcgagcgcccgttccaggtggccggaccgcccgccgcgtccgcgccgcgctccctgcaggcaacgggagacgcccccgcgcagcgcgagcgcctcagcgcggccgctcgctctccccctcgagggacaaacttttcccaaacccgatccgagcccttggaccaaactcgcctgcgccgagagccgtccgcgtagagcgctccgtctccggcgagatgtccgagcgcaaagaaggcagaggcaaagggaagggcaagaagaaggagcgaggctccggcaagaagccggagtccgcggcgggcagccagagcccagccttgcctccccgattgaaagagatgaaaagccaggaatcggctgcaggttccaaactagtccttcggtgtgaaaccagttctgaatactcctctctcagattcaagtggttcaagaatgggaatgaattgaatcgaaaaaacaaaccacaaaatatcaagatacaaaaaaagccagggaagtcagaacttcgcattaacaaagcatcactggctgattctggagagtatatgtgcaaagtgatcagcaaattaggaaatgacagtgcctctgccaatatcaccatcgtggaatcaaacgagatcatcactggtatgccagcctcaactgaaggagcatatgtgtcttcagagtctcccattagaatatcagtatccacagaaggagcaaatacttcttcatctacatctacatccaccactgggacaagccatcttgtaaaatgtgcggagaaggagaaaactttctgtgtgaatggaggggagtgcttcatggtgaaagacctttcaaacccctcgagatacttgtgcaagtgccaacctggattcactggagcaagatgtactgagaatgtgcccatgaaagtccaaaaccaagaaagtgcccaaatgagtttactggtgatcgctgccaaaactacgtaatggccagcttctacaaggcggaggagctgtaccagaagagagtgctgaccataaccggcatctgcatcgccctccttgtggtcggcatcatgtgtgtggtggcctactgcaaaaccaagaaacagcggaaaaagctgcatgaccgtcttcggcagagccttcggtctgaacgaaacaatatgatgaacattgccaatgggcctcaccatcctaacccaccccccgagaatgtccagctggtgaatcaatacgtatctaaaaacgtcatctccagtgagcatattgttgagagagaagcagagacatccttttccaccagtcactatacttccacagcccatcactccactactgtcacccagactcctagccacagctggagcaacggacacactgaaagcatcctttccgaaagccactctgtaatcgtgatgtcatccgtagaaaacagtaggcacagcagcccaactgggggcccaagaggacgtcttaatggcacaggaggccctcgtgaatgtaacagcttcctcaggcatgccagagaaacccctgattcctaccgagactctcctcatagtgaaaggtatgtgtcagccatgaccaccccggctcgtatgtcacctgtagatttccacacgccaagctcccccaaatcgcccccttcggaaatgtctccacccgtgtccagcatgacggtgtccatgccttccatggcggtcagccccttcatggaagaagagagacctctacttctcgtgacaccaccaaggctgcgggagaagaagtttgaccatcaccctcagcagttcagctccttccaccacaaccccgcgcatgacagtaacagcctccctgctagccccttgaggatagtggaggatgaggagtatgaaacgacccaagagtacgagccagcccaagagcctgttaagaaactcgccaatagccggcgggccaaaagaaccaagcccaatggccacattgctaacagattggaagtggacagcaacacaagctcccagagcagtaactcagagagtgaaacagaagatgaaagagtaggtgaagatacgcctttcctgggcatacagaaccccctggcagccagtcttgaggcaacacctgccttccgcctggctgacagcaggactaacccagcaggccgcttctcgacacaggaagaaatccaggccaggctgtctagtgtaattgctaaccaagaccctattgctgtataaaacctaaataaacacatagattcacctgtaaaactttattttatataataaagtattccaccttaaattaaacaatttattttattttagcagttctgcaaatagaaaacaggaaaaaaacttttataaattaaatatatgtatgtaaaaatgtgttatgtgccatatgtagcaattttttacagtatttcaaaacgagaaagatatcaatggtgcctttatgttatgttatgtcgagagcaagttttgtacagttacagtgattgcttttccacagtatttctgcaaaacctctcatagattcagtttttgctggcttcttgtgcattgcattatgatgttgactggatgtatgatttgcaagacttgcaactgtccctctgtttgcttgtagtagcacccgatcagtatgtcttgtaatggcacatccatccagatatgcctctcttgtgtatgaagttttctttgctttcagaatatgaaatgagttgtgtctactctgccagccaaaggtttgcctcattgggctctgagataatagtagatccaacagcatgctactattaaatacagcaagaaactgcattaagtaatgttaaatattaggaagaaagtaatactgtgattt

SEQ ID NO: 5980 - DNA, 1065 bp, Homo sapiens
agcagtctttgaaacagctgtaacggcatctgtgaaagaagataggttccaggaacggaactgccacttagattgtaaattcctgaaaaacaggacgtttttgcatctcctcccggcttccccatccctaaaccaacgtctgttgaattaaactaccaaacaaaataactgcagtacagcaatggcgatcagaaggtagaacagctgtatggctgcacattcccatcctccaaagccgatttattgcccctgctgcttccctgggcttctgctttcaccacgcagaatcggattcatcaacgttgactctgtggctgagagaagggcccagcagattaccaggatatgcttcacatcaagtaggagttgcaggagctgtatttgatgaaagtactagaaaaatactggttgtacaagatcgaaataaattgaaaaatatgtggaagtttccaggaggcctgtcagagcctgaagaagatattggagacacagcggttcgagaagtttttgaagagactggtataaaatcagaattcaggtccgtcctgagtattcggcaacagcacacaaatcctggagcttttgggaagtcagatatgtatatcatctgccgcctaaagccatattcattcaccataaatttttgccaggaagaatgcttaagatgtgagtggatggatctcaatgacctggcgaagactgaaaatacaactcccatcaccagcagagttgctaggctgctgctgtatgggtacagagaagggtttgacaaaattgacctgactgtggaagaacttccagcagtttacacaggactgttttataaactctatcataaggaactgccagagaattataaaactatgaaaggaattgattaaattcacatttatatgtttagaaacatgtagactaacgaatgacataagaaatagtggacattttggattgattaaacatctgactgtgattttctaatgtatatgatttccatgaagaaattttgtttctaaacatgcacattttaaaagcctcttttcgaataaagcaaatgcgtgaaaaaga

SEQ ID NO: 5981 - DNA, 5576 bp, Homo sapiens; identical to SEQ ID NO: 723

SEQ ID NO: 5982 - DNA, 1975 bp, Homo sapiens
gagccgctgctggtcccggccttgcggcctgcgggggaggctgcccggaggaggcagcggcggcggcagcgcgtcctcggtccccaggaccacggcttctttcctgccaggtcacaggctgtgcgtgtgcatgccgaacacccacatgcacacagttggtggctcagtctgatgtacctgacttctcacgccttcccccagtcctccagtaccgtgcctctacatgggctgggcagccccaaactgaaatgtgagtgccagagtgcatcctttaagcgaggtctgccccacggacacccgctccctctgtgtccctgctttgacagatctatccatctggccatccatccgtgggggtctgcaatggccacctttagccgccaggaatttttccagcagctactgcaaggctgtctcctgcctactgcccagcagggccttgaccagatctggctgctccttgccatctgcctcgcctgccgcctcctctggaggctcgctgcacatggtttgggtcgtgctgctcagcctcctgtgctacctcgtgctgttcctctgccgacattcctcccatcgaggcgtcttcctatccgtcaccatcctcatctacctactcatgggtgagatgcacatggtagacaccgtgacatggcacaagatgcgaggggcacagatgattgtggccatgaaggcagtgtctctgggcttcgacctggaccggggcgaggtgggtacggtgccctcgccagtggagttcatgggctacctctacttcgtgggcaccatcgtcttcgggccctggatatccttccacagctacctacaagctgtccaaggccgcccactgagctgccggtggctgcagaaggtggcccggagcctggcactggccctgctgtgccttgtgctgtccacttgcgtgggcccctacctcttcccgtacttcatccccctcaacggtgaccgcctccttcgcaagtggctgcgagcctacgagagtgctgtctccttccacttcagcaactattttgtgggctttctttccgaggccacggccacgttggcgggggctggctttaccgaggagaaggatcacctggaatgggacctgacggtgtccaagccactgaatgtggagctgcctcggtcaatggtggaagttgtcacaagctggaacctgcccatgtcttattggctaaataactatgttttcaagaatgctctccgcctggggaccttctcggctgtgctggtcacctatgcagccagcgccctcctacatggcttcagtttccacctggctgcggtcctgctgtccctggcttttatcacttacgtggagcatgtcctccggaagcgcctggctcggatcctcagtgcctgtgtcttgtcaaagcggtgcccgccagactgttcgcaccagcatcgcttgggcctgggggtgcgagccttaaacttgctctttggagctctggccatcttccacctggcctacctgggctccctgtttgatgtcgatgtggatgacaccacagaggagcagggctacggcatggcatacactgtccacaagtggtcagagctcagctgggccagtcactgggtcacttttggatgctggatcttctaccgtctcataggctgaggcacatctgtggaccctcataaccctcttaagacccctctcagggtgccactgatgggggatgagggaaggccctctctctactccttgaccccctccatccttgacccccaacacctcaacacacacacacacacacacacacaaaatcacaccattttcatgcctgtcaatccccaccccaccacaaggcaggaagggggtggtgcctgctggggcctagagggggatgcttggggaaacagagaaggggagatccagggcctccccgccttccttcttcctttttatatacaatttgttattgtcaaataaaagtaggaaatattc

SEQ ID NO: 5983 - DNA, 2819 bp, Homo sapiens
cggttctttccggaaattatgactgcagctgttttcactccgctgtgactcagagcgctccgggctgcaggagaggaagcccagcctgttctaccagagaacttgcccaggtcagaggtctgcgtagaagcccttttctgagcatcctctcctctcctcacacctgccactgtcctctgcgttgctgtcgaattaaatcttgcatcaccatggtgcacttctgtggcctactcaccctccaccgggagccagtgccgctgaagagtatctctgtgagcgtgaacatttacgagtttgtggctggtgtgtctgcaactttgaactacgagaatgaggagaaagttcctttggaggccttctttgtgttccccatggatgaagactctgctgtttacagctttgaggccttggtggatgggaagaaaattgtagcagaattacaagacaagatgaaggcccgcaccaactatgagaaagccatctcccagggccaccaggccttcttattggagggggacagcagctccagggatgtcttctcttgcaatgtgggtaacctccaacctgggtcgaaggcggcagtcaccctgaagtatgtgcaggagctgcctctggaagcagatggggctctgcgctttgtgctcccagctgtcctgaatcctagataccagttctctgggtcgtctaaggacagttgccttaatgtgaagactcctatagtccctgtggaggacctgccctacacactcagcatggtcgccaccatagattcccagcatggcattgagaaggtccaatccaactgccccttgagtcctaccgagtacctaggagaggacaagacttctgctcaggtttccctggctgctggacacaagtttgatcgggacgtggaactcctgatttactacaatgaggtgcatacccccagcgtggttttggagatggggatgcctaacatgaagccaggtcatttgatgggagatccatctgcaatggtgagtttctatccaaatatcccagaagatcaaccatcaaatacctgtggagagtttatctttctcatggaccgctcgggaagtatgcagagccccatgagtagccaggatacatctcagctgcgaatacaggcagccaaggaaacactgattttgctgctgaagagtttacctataggctgttatttcaacatctatggatttggctcttcctatgaggcatgctttccggagagtgtgaagtacactcagcaaacaatggaggaggctctggggagagtgaagcttatgcaggccgacctagggggcactgaaatcttggcaccactccagaacatttacaggggaccctccatcccaggccaccccctacaggttttcgaaaggccttacactctgaccgtcctccttctgcatctcagcccagaggggaacttatgtgttataaggccaagacattccagatggacgattacagtctctgtgggttgataagtcacaaggaccagcacagtccaggctttggagagaatcaccttgtgcagctgatttaccaccaaaatgcaaatggttcctgggatctgaatgaagatctagccaagatcctaggtatgagtttggaagaaataatggctgcacagcctgccgagcttgtggattcctcaggctgggccaccatcctggccgtgatctggctgcacagcaatggtaaggacttgaagtgtgaatgggagcttctggaaaggaaggccgtggcctggatgcgtgcccatgcaggctccaccatgccttcggttgtgaaagctgctattactttcctgaagtcatctgtggatcctgctatctttgccttttgaagataccatccagaaaaagaagtgcctttaatttgctactgtcatttcctctagtatcacttttgctgtgatgatgtgttcttgtgtattataactctttattttttgccataaaagtaaaggatgcttactccacttcgcttctctgctccaggttcactttggatatgatctttcttttcccaacatatgccctcagaaaagtgacagtggtcccagaacctattccctttcttgagggagttcaaaacattcataggcagtaatgttcctcccagggtttccagggaaacaacatgaaaaacaggtgacatgaactacagactaaagattgcagcatttatgttagagaatgcttgaattagagaattttctgcattatctttgtctgttcactttctatcttatatacttatcagggccatactggtaagcttgcgtaggaggagttagagggaagttgaaagccaacatctggatcaatgtaatgtcaagatcacaaagacagagactgcaggggtccactgtgagaggtgacactgttggggaccttcctgattcattcttcttgggctttgctagcctgtacaacctacatgtcttttcttccactgcctgaaagacttgggttgaactataactgttggagagagatgttcctctttaatcatgaaacaccttaagaagtctataatgcaatccttagtcctaccctgaacctatgtgtcctctaagtcaggccctgatctagtgcagtaaagggaagggtgggcttaatgggagctttgcctgggacctgaacctggagcacttaccgcattaggaagaaaggagctccccgtaatcgttcctgacccttgtgtctcatataccctatcctggtggaaatgaccctatttgatatgctgtcccttaaaataacttgtatcaatattaaaatgactatttctaccctttgatgagt

SEQ ID NO: 5984 - DNA, 3664 bp, Homo sapiens
cggcggcgcaggtgaggcgcggggccggggccggaccgggaggcggggaccccccgcccccccgcccgcacctgcggggcagccggcgctcaggcgccgcagccgctcagcacctgcggcgccctcagggagccgggcgcggggccctgcgcactcggagctcggctcctctccttccttttcttttttttcggggggaggtgggggctggtttggatgttttccgagagccggggacggtctcaagctattttcgcggagggaagtctttgaaatacgacatctagaagagtggccctcggcgacaatgccgggcgttcccggaccggggcaacgctgggattccggggaagtggaggcagagggagcgggcacggggccggcagccgctccacggagtccccggcaggggcgagcttagctgtccagccgggtcccctgcccaccccggcccgggccgcggtgacagctgagggtccagagagccggcaggaggggaccctgcgcattgtctgccgcgatggggacgtgggcgtgcccgcggaattcacctcctccggggaccagccgcccagggaggagccggcacagaacgctggctcggagcgccggcaccctgggcctttgcgttgtttgtcggctgagcagctggttcccggagcccgtgggcctcctggccaatgcgagtgacagcgaccttctgggtttataataaagggcttgacgcgccggaaagtcccctcgccgctggccaccagccttccagcccttacggcccacgccgtaatcctggtgaccgagaagagagcagagccactgccagaaggaaggggacaagacccagcaggacaccttctttccacgctttccagcctgtgggagcggcaggggcaacagagagaggatctggagccaggattaatgactcatttatgaagcatcttattctgcgaccgaggctcagtggtcagtggcgacgtaaatggctcgactccccgctggcattcgcttcatcatctcattctccagggatcagtggtacagagccttcatttttattttgacatttctgctgtatgcaagttttcacttatctcgaaagcctatcagcatagttaagggtgagctccacaagtactgcactgcttgggatgaagctgacgtcaggttcagcagccagaacaggaagtctgggtccgctgccccccaccagctccctgacaatgagaccgactgtggctgggcaccgtttgataagaacaactatcagcagctgcttggggccctggactactccttcctgtgcgcctatgccgtggggatgtacctcagtggcatcattggggagcgcctgccgattaggtattacctaactttcgggatgctcgccagcggagccttcaccgccctgttcggcttagggtatttctacaacatccacagtttcggattctacgtggtaactcaggtcatcaacgggctggtgcagaccaccggctggcccagcgtcgtcacctgcctcggcaactggtttggaaaaggaaggagaggtttgattatgggggtctggaactcccacacctccgtgggcaacatcttggggtcattgatcgctggctactgggtgtccacatgctggggcctgtccttcgtcgtgcctggagccatcgtggcagccatggggatagtgtgctttctcttcctcattgaacatccgaacgacgtcaggtgctcctccaccctggtgacgcactcaaaaggctatgagaatggtacaaacagattgagactccagaagcaaatcttgaagagcgaaaagaacaagcctctggacccagagatgcagtgcctgctgctctcagatgggaagggctccatccacccgaaccacgtcgtcattctccccggggacggtgggagtggcacggccgccatcagcttcacaggggccttgaaaattccaggcgtgatagagttctcactgtgtctgctgtttgccaagctggtcagctatactttcctcttctggctgcccctgtacatcacgaatgtggatcaccttgatgccaaaaaggcgggggagctctccaccctgtttgacgtgggcggaatctttggtgggatcctggcaggtgtgatctcagaccgactggagaaaagggcctccacctgcggcctgatgctgctgctcgcggcccccacgctctacatcttctccaccgtcagcaagatggggcttgaggccaccatcgccatgctgctgctcagcggagccctggtcagtgggccctacacactcatcaccaccgccgtctccgccgacctggggactcataaaagtctgaaaggcaacgcgcacgccctctccaccgtgacggccatcattgacgggacgggctctgtaggagcagccctgggccccctgctggctgggctcctctccccgtccggctggagcaatgtgttttacatgctgatgtttgcagatgcctgtgccttactgttcctgatccgcctcatacacaaggagctgagctgcccagggtcagctacgggggaccaagttccatttaaggaacagtgacaccccaccccagtcccgtggagggggtctgggcccacccttcacaactgcctttcaaggacagttcagacaaagggccctgcatggaaagagtgacctccctttgccttttgcacacgcacctggaaaagacacagaagccaacctgagaacccctggtgctattttaaaggagacatattgctgaacagcagtgagaaaagtctgcaggaactgctgcctgagccaagccagagaaccgaagacccggccggccctggcctcacaggcgtgtgcccatgcagccacccaaatgcacgcgtgacaacaaggccgggagggtggggggggtgcacaggtagccccgaccctctcaggcattccagccacagaacatcaaagtgagcgagtactgcgctggctgtggcttcagagaacctgtatgtgccacatggaaaaacaggacaccagagcccaccagacagtgccggccagcagagaagcagagagccagcgccacacaacatcaagaaggccgacaaccaggttggaaaccaagacggagctcagacccaccacatcgccccagaggcttttccagcacccatgatgtttcggactgacctaaaaactaattgtcgagaagccaagggtgaggaggcaggaagcacctccggttggaggcacccaggcttgccagccacagagcgccccaaagtcaccgtcatcccagcccctggccttcctgctgccctccggggccatggcactgctgttcagctcaggcacaggggcacagcagaggtttgggaagcggtctccccaccggcactgggattggcgggtccaagcccagcaaccggcttcgctccacaacacacaccacacctgggactgtttttaatacatagcaacagactgggttatttatttaagatgtgtattgtgtcatatgaagtttaagagacataaatggcattttgttatttattaagacaaactccaattgttctctggctgtttttttcagttgtgtctagcaaaatacttatctgccctttgaaataaaatgtttttgtttaaaaaatctcagaacactca

SEQ ID NO: 5985 - DNA, 1443 bp, Homo sapiens
agccggcatgggagtaggaatggccacaagtggccaacggaaagcaggtggcaggacaggaggctgtggtggggcctgaccgagcagcctttccttccaaatctgactgtggcttgctcaggcccctatggtggctgtgaccctgttttgtccatctcctttcaccaggacccgccgggtgagggtgactggagcacattcctgggcttgggggtgggaagggagtctgatttgcctggggttgatgtgggggggttttgggcatgggccgtgactcacagagtagatccagatccgcctgctcccctcatatcctgttattcagaaggctgtatccgcttagaaagtgtcttttgtcctggggtgagagggtgacgcatgtgccctctggcagtctgctgctgtgtccagagtccgactccagctgggctgtaactgggcttggcccccgccttaggccccgccagcaggcgaagcagggagatgtcagactgctacacggagctggagaaggcagtcattgtcctggtggaaaacttctacaaatatgtgtctaagtacagcctggtcaagaacaagatcagcaagagcagcttccgcgagatgctccagaaagagctgaaccacatgctgtcggacacagggaaccggaaggctgcggataagctcatccagaacctggatgccaatcatgatgggcgcatcagcttcgatgagtactggaccttgataggcggcatcaccggccccatcgccaaactcatccatgagcaggagcagcagagcagcagctagagacccctttggccacaccttccaggcactggcctgatgccccgccctggtgctctccccaggctccctcctcagcctcctgcccacccagggccctttactctcttctccctccagaccttcctctgacccttgctgaactggggtccctttgtgagtgtctcagtctagaggtacctccctccctggggggtctcagctcctggagtcgcaggcccttggggcccctctgtgagatctcaatgctgtctggggaccctaagagttttctcacctgttcagtctcatctaaccttccaatgtctgatgttcctgccaaattcctgcctgattctgggtccgtcctgacctccaaaggtcagcttggtgcttgaggtctccctgctcttggtggcagtggtagcagcaacagcagcagcagcagcagcagcagcagcagagacctctccactttcccttagcccctctgctgggtagagaggcactttcagggacttccctccagctgcctcttcatctgggaatgagctaagcaaggctgagcctcctcctgttgcttgaaataatgatgatataaaggctggatttggagtttgtatcccctggtccctctgggatgctcattaaaaccttcccactccttggaaa

SEQ ID NO: 5986 - DNA, 4652 bp, Homo sapiens
gcgcgaggtaggcgctctggtgcttgcggaggacgcttccttcctcagatgcaccgatcttcccgatactgcctttggagcggctagattgctagccttggctgctccattggcctgccttgccccttacctgccgattgcatatgaactcttcttctgtctgtacatcgttgtcgtcggagtcgtcgcgatcgtcgtggcgctcgtgtgatggccttcgtccgtttagagtagtgtagttagttaggggccaacgaagaagaaagaagacgcgattagtgcagagatgctggaggtggtcagttactaagctagagtaagatagcggagcgaaaagagccaaacctagccggggggcgcacggtcacccaaaggaggtcgactcgccggcgcttcctatcgcgccgagctccctccattcctctccctccgccgaggcgcgaggttgcggcgcgcagcgcagcgcagctcagcgcaccgactgccgcgggctccgctgggcgattgcagccgagtccgtttctcgtctagctgccgccgcggcgaccgctgcctggtcttcctcccggacgctagtgggttatcagctaacacccgcgagcatctataacataggccaactgacgccatccttcaaaaacaactaaaggatgatatgatgaacctagcctgttaatttcgtcttctcaattttaaactttggttgcttaagactgaagcaatcatggtgaacctgaggaatgcggtgcattcattccttgtgcacctaattggcctattggtttggcaatgtgatatttctgtgagcccagtagcagctatagtaactgacattttcaatacctccgatggtggacgcttcaaattcccagacggggtacaaaactggccagcactttcaatcgtcatcataataatcatgacaataggtggcaacatccttgtgatcatggcagtaagcatggaaaagaaactgcacaatgccaccaattacttcttaatgtccctagccattgctgatatgctagtgggactacttgtcatgcccctgtctctcctggcaatcctttatgattatgtctggccactacctagatatttgtgccccgtctggatttctttagatgttttattttcaacagcgtccatcatgcacctctgcgctatatcgctggatcggtgtatcagttcctatccctgtgattggactgagggacgaagaaaaggtgttcgtgaacaacacgacgtgcgtgctcaacgacccaaatttcgttcttattgggtccttcgtagctttcttcataccgctgacgattatggtgattacgtattgcctgaccatctacgttctgcgccgacaagctttgatgttactgcacggccacaccgaggaaccgcctggactaagtctggatttcctgaagtgctgcaagaggaatacggccgaggaagagaactctgcaaaccctaaccaagaccagaacgcacgccgaagaaagaagaaggagagacgtcctaggggcaccatgcaggctatcaacaatgaaagaaaagcttcgaaagtccttgggattgttttctttgtgtttctgatcatgtggtgcccatttttcattaccaatattctgtctgttctttgtgagaagtcctgtaaccaaaagctcatggaaaagcttctgaatgtgtttgtttggattggctatgtttgttcaggaatcaatcctctggtgtatactctgttcaacaaaatttaccgaagggcattctccaactatttgcgttgcaattataaggtagagaaaaagcctcctgtcaggcagattccaagagttgccgccactgctttgtctgggagggagcttaatgttaacatttatcggcataccaatgaaccggtgatcgagaaagccagtgacaatgagcccggtatagagatgcaagttgagaatttagagttaccagtaaatccctccagtgtggttagcgaaaggattagcagtgtgtgagaaagaacagcacagtcttttcctacggtacaagctacatatgtaggaaaattttcttctttaatttttctgttggtcttaactaatgtaaatattgctgtctgaaaaagtgtttttacatatagctttgcaaccttgtactttacaatcatgcctacattagtgagatttagggttctatatttactgtttataataggtggagactaacttattttgattgtttgatgaataaaatgtttatttttgctctccctcccttctttccttccttttttcctttcttccttcctttctctctttcttttgtgcatatggcaacgttcatgttcatctcaggtggcatttgcaggtgaccagaatgaggcacatgacagtggttatatttcaaccacacctaaattaacaaattcagtggacatttgttctgggttaacagtaaatatacactttacattcttgctctgctcatctacacatataaacacagtaagataggttctgctttctgatacatctgtcagtgagtcagaggcagaacctagtcttgttgttcatataggggcaaaaatttgacattgtcagaatgttgtgttggtatttactgcaatgtctgtccctaaacatagtggtattttaacatagcagctggttaaccgggactacagaagtggaaggataatgagatgtaatacaccaaatagcttttcacttcttaaggacagtgttcaaattctgattattacaacaagcaaactgaaattagtgttttcattctggtccttagtaaattcctaattctatgattaaactgggaaatgagatcccagagttatttcccaacccaggattcaacatcaattgggttttgatctcagcatcctggaaatttgtgtgcttcacacaaagtgaaattagtattttgagccttattaaaatattttcttaattatggtacctctgtctataggacttaatttagcagtccatttttgagtaaaacttgtattggaagtatagatggtagaaactttggaagttttacttgattaaggactacagaattgggcccttagaatgtgaaaaaaaaaagtaattaaaaagacacttttaccgaactcgggattacagaaacacggagtttccatttggattttaaacaaaatttatgtcattttcagatccttccaaactctctagtgcaggaaaaggctgcagctaatttgtgaaagtggcaagctcttcattgcactgcagttatttaccagaagtttaaatctttgttaaaatatagtgttgtgttacaataagtgttggccatcatttcattcgtgggcctgctgctctctaagaattcagtagcattttaatagtttctaaaccatgaaaagttttcaagcattgctaaagtcaggccattcagtctatgctgtgtgcagagtatacaagtgtttctagtaacagtatttccatacgtgcccatttcacacaactgtggataaattttggaagaattcatgatgctagttcttacgcttgacagttacttacacacctgagaatgtgcctctcagtatcttaaaattggttaatgaaaaatctgaatttctaaaacccttggtctgtgttctcaacacacagtatagataaatccaatagtctgccacaagggcagtggaagagctgctgtatttgaggaaactcatacagtctctatttgatttgcaacactgccaaacatcagtcaattgcttgagcatgcccaaatataacatgaaagtcaagtctacctgccttgcctgttaggtctgttgaagtgcatgttaaaataattatatgaagcagaatgagatgatttaattcttaccgaaatgaaaatggctgaagaaacacagcatgcatttagcatgagttctgcacatacagatggtgtcctgcatgtatgccatgtatgttgcatgaatccatcgatttgtattaatgtagggcagaatagctgatagaagaaggactgaagaaaatccttcagcaatccttaaaaagaccatgcattcagatctgaagtagtgtgagtgttagaaaaaactggaaacatctgatttctgaactatcagggcaagctcatagcacatgttttacaaagaaacaaaatataaatcacagatttccaaaagtactagcaataagttgaatgataatagctcacagcacatttgttaatgattcttgtgtcatcaagtagtagtacttaatagtacccaacctggtaattatcctcaagttgtgtgctattcgtaagttctgtgcagtttggtatgaaacaaatatactcatttggatataaatcttacccttcaatgttaaatctacaaacttttataaatgttttaaagaagtccatgtgataattgtaaaggtgatgaatttaccatcaaacaaatcattttgatgtattattatatatgtatatctgtgtaagacacgtgcaacagactgccttatattattttctgtaattcttctcctttgtcaaatggtattttttgtgaatggttgcaaagtgttgtcttattcctaattcctgtatgttatccactacaggttttatgagacttcctattaatttattaaatttattaaatgttg

SEQ ID NO: 5987 - DNA, 7106 bp, Homo sapiens
ctgtctacggcagctattccagaggcaacaactgcttccctctgttctcatctccccattggtggctggcgacccgaatttgggaatggggagattgcccacctgttatctttgagcagactaatctcttaagccaaaatgggacacagtaaacagattcgaattttacttctgaacgaaatggagaaactggaaaagaccctcttcagacttgaacaagggtatgagctacagttccgattaggcccaactttacagggaaaagcagttaccgtgtatacaaattacccatttcctggagaaacatttaatagagaaaaattccgttctctggattgggaaaatccaacagaaagagaagatgattctgataaatactgtaaacttaatctgcaacaatctggttcatttcagtattatttccttcaaggaaatgagaaaagtggtggaggttacatagttgtggaccccattttacgtgttggtgctgataatcatgtgctacccttggactgtgttactcttcagacatttttagctaagtgtttgggaccttttgatgaatgggaaagcagacttagggttgcaaaagaatcaggctacaacatgattcattttaccccattgcagactcttggactatctaggtcatgctactcccttgccaatcagttagaattaaatcctgacttttcaagacctaatagaaagtatacctggaatgatgttggacagctagtggaaaaattaaaaaaggaatggaatgttatttgtattactgatgttgtctacaatcatactgctgctaatagtaaatggatccaggaacatccagaatgtgcctataatcttgtgaattctccacacttaaaacctgcctgggtcttagacagagcactttggcgtttctcctgtgatgttgcagaagggaaatacaaagaaaagggaatacctgctttgattgaaaatgatcaccatatgaattccatccgaaaaataatttgggaggatatttttccaaagcttaaactctgggaatttttccaagtagatgtcaacaaagcggttgagcaatttagaagacttcttacacaagaaaataggcgagtaaccaagtctgatccaaaccaacaccttacgattattcaagatcctgaatacagacggtttggctgtactgtagatatgaacattgcactaacgactttcataccacatgacaaggggccagcagcaattgaagaatgctgtaattggtttcataaaagaatggaggaattaaattcagagaagcatcgactcattaactatcatcaggaacaggcagttaattgccttttgggaaatgtgttttatgaacgactggctggccatggtccaaaactaggacctgtcactagaaagcatcctttagttaccaggtattttactttcccatttgaagagatagacttctccatggaagaatctatgattcatctgccaaataaagcttgttttctgatggcacacaatggatgggtaatgggagatgatcctcttcgaaactttgctgaaccgggttcagaagtttacctaaggagagaacttatttgctggggagacagtgttaaattacgctatgggaataaaccagaggactgtccttatctctgggcacacatgaaaaaatacactgaaataactgcaacttatttccagggagtacgtcttgataactgccactcaacacctcttcacgtagctgagtacatgttggatgctgctaggaatttgcaacccaatttatatgtagtagctgaactgttcacaggaagtgaagatctggacaatgtctttgttactagactgggcattagttccttaataagagaggcaatgagtgcatataatagtcatgaagagggcagattagtttaccgatatggaggagaacctgttggatcctttgttcagccctgtttgaggcctttaatgccagctattgcacatgccctgtttatggatattacgcatgataatgagtgtcctattgtgcatagatcagcgtatgatgctcttccaagtactacaattgtttctatggcatgttgtgctagtggaagtacaagaggctatgatgaattagtgcctcatcagatttcagtggtttctgaagaacggttttacactaagtggaatcctgaagcattgccttcaaacacaggtgaagttaatttccaaagcggcattattgcagccaggtgtgctatcagtaaacttcatcaggagcttggagccaagggttttattcaggtgtatgtggatcaagttgatgaagacatagtggcagtaacaagacactcacctagcatccatcagtctgttgtggctgtatctagaactgctttcaggaatcccaagacttcattttacagcaaggaagtgcctcaaatgtgcatccctggcaaaattgaagaagtagttcttgaagctagaactattgagagaaacacgaaaccttataggaaggatgagaattcaatcaatggaacaccagatatcacagtagaaattagagaacatattcagcttaatgaaagtaaaattgttaaacaagctggagttgccacaaaagggcccaatgaatatattcaagaaatagaatttgaaaacttgtctccaggaagtgttattatattcagagttagtcttgatccacatgcacaagtcgctgttggaattcttcgaaatcatctgacacaattcagtcctcactttaaatctggcagcctagctgttgacaatgcagatcctatattaaaaattccttttgcttctcttgcctccagattaactttggctgagctaaatcagatcctttaccgatgtgaatcagaagaaaaggaagatggtggagggtgctatgacataccaaactggtcagcccttaaatatgcaggtcttcaaggtttaatgtctgtattggcagaaataagaccaaagaatgacttggggcatcctttttgtaataatttgagatctggagattggatgattgactatgtcagtaaccggcttatttcacgatcaggaactattgctgaagttggtaaatggttgcaggctatgttcttctacctgaagcagatcccacgttaccttatcccatgttactttgatgctatattaattggtgcatataccactcttctggatacagcatggaagcagatgtcaagctttgttcagaatggttcaacctttgtgaaacacctttcattgggttcagttcaactgtgtggagtaggaaaattcccttccctgccaattctttcacctgccctaatggatgtaccttataggttaaatgagatcacaaaagaaaaggagcaatgttgtgtttctctagctgcaggcttacctcatttttcttctggtattttccgctgctggggaagggatacttttattgcacttagaggtatactgctgattactggacgctatgtagaagccaggaatattattttagcatttgcgggtaccctgaggcatggtctcattcctaatctactgggtgaaggaatttatgccagatacaattgtcgggatgctgtgtggtggtggctgcagtgtatccaggattactgtaaaatggttccaaatggtctagacattctcaagtgcccagtttccagaatgtatcctacagatgattctgctcctttgcctgctggcacactggatcagccattgtttgaagtcatacaggaagcaatgcaaaaacacatgcagggcatacagttccgagaaaggaatgctggtccccagatagatcgaaacatgaaggacgaaggttttaatataactgcaggagttgatgaagaaacaggatttgtttatggaggaaatcgtttcaattgtggcacatggatggataaaatgggagaaagtgacagagctagaaacagaggaatcccagccacaccaagagatgggtctgctgtggaaattgtgggcctgagtaaatctgctgttcgctggttgctggaattatccaaaaaaaatattttcccttatcatgaagtcacagtaaaaagacatggaaaggctataaaggtctcatatgatgagtggaacagaaaaatacaagacaactttgaaaagctatttcatgtttccgaagacccttcagatttaaatgaaaagcatccaaatctggttcacaaacgtggcatatacaaagatagttatggagcttcaagtccttggtgtgactatcagctcaggcctaattttaccatagcaatggttgtggcccctgagctctttactacagaaaaagcatggaaagctttggagattgcagaaaaaaaattgcttggtccccttggcatgaaaactttagatccagatgatatggtttactgtggaatttatgacaatgcattagacaatgacaactacaatcttgctaaaggtttcaattatcaccaaggacctgagtggctgtggcctattgggtattttcttcgtgcaaaattatatttttccagattgatgggcccggagactactgcaaagactatagttttggttaaaaatgttctttcccgacattatgttcatcttgagagatccccttggaaaggacttccagaactgaccaatgagaatgcccagtactgtcctttcagctgtgaaacacaagcctggtcaattgctactattcttgagacactttatgatttatagtttattacagatattaagtatgcaattacttgtattataggatgcaaggtcatcatatgtaaatgccttatatgcacaggctcaagttgttttaaaaatctcatttattataatattgatgctcaattaggtaagattgtaaaagcattgattttttttaatgtacagaggtagatttcaatttgaatcagaaagaaatatcattaccaatgaaatgtgtttgagttcagtaagaattattcaaatgcctagaaatccatagtttggaaaagaaaaatcatgtcatcttctatttgtacagaaatgaaaataaaatatgaaaataatgaaagaaatgaaaagatagcttttaattgtggtatatataatcttcagtaacaatacatactgaatacgctgtggttcattaatattaacaccacgtactatagtattcttaatacagtgctcactgcatttaataaatatttaataaatgatgaatgatagaagtttccatctacaatatatgttcctaaatggagcacagatgttcaaactatgctttcattttttcactgatatattaatttttgtgtaatgaatgccaacagtatattttatatgatttacttatgtgaggaaacatgcaaagcattaggaaatttatttcctaaaaacagttttgtaaaattagtattgagttctattgagtattataagatagcttacattttcaaaatggaaattgtcggtcatatttctagaactttaaagaaaaaagaatgttatattagttttctaaaactcaactatctttagtcatgttcaaaaatctattgctagatcatagtagatactggttttctattaactcaaaacctacattgacaagtttaacattgagaagaatcttaacaaaaatatggatatgaattcagtagatatcttaaattcaataaaatcactggaagtttttcatgataacttattttaagatgccttaaaaatcttaaagtcacaaaaggaaaaaggtttttaacatttacatgagttaacattttttcatagaacttatttcctagatagaattttttactgttttttactgttttcttaagaaaacagttaaatcattatgcattcagttggaagaaagtagtggcaagaattctttcattgctatataatattcagtggctcatttatacctaataaaataatggtattttaaaataatgctactttcaaagtagcatttttttagttagtttacaggttacatacccaaaaccttaactatgactaagaaattaaagaagaaaaccagcaaactaaaacttctgggcagcaaaaatatataaatgcttcagatgtcaaatacccatgcttgaaagctcgtgtaatttactttaagattatctgcctgctcttcttcaaagctgaccttgctttagaaatagttttaactagcttagttttctggtttccaaaactaaaatagattaaatcctacaaatttaaggacagttgtgacagtaatctgaccactatctataaatacattggacattggtttccaaatctccctttcttcttcagttccttccttgttcaatatatacccttctctaaactgtgcgggtaaaaggaatgactgtccttgagagaaccattagtttatcaaaggtttatgtagttttgttgctgtaccctaactttgatattcagggaggtaggaaaggtaacagaaaaccagcatatttaatcaaagcaagaagtaatcgctgacagttaaatgtgaccaaaaaaattaaaagttcacaatttttttaatgtagccatttggggttatctctagtaaggcagatacccacgttggtaaatttttaggatattgtgttgcactagaaaactaagtggttcatatttctaatgaggaagattaatgaaagaacattgttatattctgcgtggtatattttaaagtttaagaaggcatgttaaacattatttcctctatggtagttaaaatacagaattagatttttaacaggtgtcatttgactaaacgtttcggtagaatgcttcatacttgagtgatgctggataaggtattgtatttcaacaatggactatgccttggtttttcactaatcaaaatcaaaattactctttaacatgataaatgaatttaccagtttagtatgctgtggtattttaataagttttcaaagataattgggaaaacatgagactggtcatattgatgaatattgtaacatgtgaattgtgatccatttctgatatgtcttgaactactgtgtctagtgggcaaatgtcattgttacctctgtgtgttaagaaaataaaaatattttctaaaggtc

SEQ ID NO: 5988 - DNA, 5703 bp, Homo sapiens; identical to SEQ ID NO: 798

SEQ ID NO: 5989 - DNA, 2461 bp, Homo sapiens
ggaaagttgtgacggtcgagcttgagcctggcgggccgcggagcgttcacctgcggccgggaggcaaagtactagctctgtgattagattgaattctccaacaacaacatctcagattatggcaagaaagaaaaggagagggattatagagaaaaggcgtcgggatcggataaataacagtttatctgagttgagaagacttgtgccaactgcttttgaaaaacaaggatctgcaaagttagaaaaagctgaaatattgcaaatgacagtggatcatttgaagatgcttcaggcaacagggggtaaaggctactttgacgcacacgctcttgccatggacttcatgagcataggattccgagagtgcctaacagaagttgcgcggtacctgagctccgtggaaggcctggactcctcggatccgctgcgggtgcggcttgtgtctcatctcagcacttgcgccacccagcgggaggcggcggccatgacatcctccatggcccaccaccatcatccgctccacccgcatcactgggccgccgccttccaccacctgcccgcagccctgctccagcccaacggcctccatgcctcagagtcaaccccttgtcgcctctccacaacttcagaagtgcctcctgcccacggctctgctctcctcacggccacgtttgcccatgcggattcagccctccgaatgccatccacgggcagcgtcgccccctgcgtgccacctctctccacctctctcttgtccctctctgccaccgtccacgccgcagccgcagcagccaccgcggctgcacacagcttccctctgtccttcgcgggggcattccccatgcttcccccaaacgcagcagcagcagtggccgcggccacagccatcagcccgcccttgtcagtatcagccacgtccagtcctcagcagaccagcagtggaacaaacaataaaccttaccgaccctgggggacagaagttggagctttttaaatttttcttgaacttcttgcaatagtaactgaatgtcctccatttcagagtcagcttaaaacctctgcaccctgaaggtagccatacagatgccgacagatccacaaaggaacaataaagctatttgagacacaaacctcacgagtggaaatgtggtattctcttttttttctctcccttttttgtttggttcaaggcagctcggtaactgacatcagcaacttttgaaaacttcacacttgttaccatttagaagtttcctggaaaatatatggaccgtaccatccagcagtgcatcagtatgtctgaattggggaagtaaaatgccctgactgaattctcttgagactagatgggacatacatatatagagagagagtgagagagtcgtgtttcgtaagtgcctgagcttaggaagttttcttctggatatataacattgcacaagggaagacgagtgtggaggataggttaagaaaggaaagggacagaagtcttgcaataggctgcagacattttaataccatgccagagaagagtattctgctgaaaccaacaggttttactggtcaaaatgactgctgaaaataattttcaagttgaaagatctagttttatcttagtttgccttctttgtacagacatgccaagaggtgacatttagcagtgcattggtataagcaattatttcatcagttctcagattaacaagcatttctgctctgcctgcaggcccccaggcacttttttttttggatggctcaaaatatggtgctgctttatataaaccttacatttatatagtgcacctatgagcagttgcctaccatgtgtccaccagaggctatttaattcatgccaacttgaaaactctccagtttgtaggagtttggtttaatttattcagtttcattaggactatttttatatatttatcctcttcattttctcctaatgatgcaacatctattcttgtcaccctttgggagaagttacatttctggaggtgatgaagcaaggagggagcactaggaagagaaaagctacaatttttaaagctctttgtcaagttagtgattgcatttgatcccaaaacaagatgaatgtatgcaatgggatgtacataagttatttttgcccatgcctaaactagtgctatgtaatggggttgtggttttgtttttttcgatttcgtttaatgacaaaataatctcttaatatgctgaaatcaagcacgtgagagtttttgtttaaaagataagagacacagcatgtattatgcacttcatttctctactgtgtggagaaagcaataaacattatgagaatgttaaacgttatgcaaaattatacttttaaatatttgttttgaaattactgtacctagtcttttttgcattactttgtaacctttttctatgcaagagtctttacataccactaattaaatgaagtcctttttgacta

SEQ ID NO: 5990 - DNA, 2731 bp, Homo sapiens
gtttcctactccattttctctggggcaatagcagaataggagcaagccagcactagtcagctaactaagtgactcaaccaaggccttttttccttgttatctttgcagatacttcattttcttagcgtttctggagattacaacatcctgcggttccgtttctgggaactttactgatttatctcccccctcacacaaataagcattgattcctgcatttctgaagatctcaagatctggactactgttgaaaaaatttccagtgaggctcacttatgtctgtaaagatgggaaaaaaatacaagaacattgttctactaaaaggattagaggtcatcaatgattatcattttagaatggttaagtccttactgagcaacgatttaaaacttaatttaaaaatgagagaagagtatgacaaaattcagattgctgacttgatggaagaaaagttccgaggtgatgctggtttgggcaaactaataaaaattttcgaagatataccaacgcttgaagacctggctgaaactcttaaaaaagaaaagttaaaagtaaaaggaccagccctatcaagaaagaggaagaaggaagtggatgctacttcacctgcaccctccacaagcagcactgtcaaaactgaaggagcagaggcaactcctggagctcagaaaagaaaaaaatcaaccaaagaaaaggctggacccaaagggagtaaggtgtccgaggaacagactcagcctccctctcctgcaggagccggcatgtccacagccatgggccgttccccatctcccaagacctcattgtcagctccacccaacagttcttcaactgagaacccgaaaacagtggccaaatgtcaggtaactcccagaagaaatgttctccaaaaacgcccagtgatagtgaaggtactgagtacaacaaagccatttgaatatgagaccccagaaatggagaaaaaaataatgtttcatgctacagtggctacacagacacagttcttccatgtgaaggttttaaacaccagcttgaaggagaaattcaatggaaagaaaatcatcatcatatcagattatttggaatatgatagtctcctagaggtcaatgaagaatctactgtatctgaagctggtcctaaccaaacgtttgaggttccaaataaaatcatcaacagagcaaaggaaactctgaagattgatattcttcacaaacaagcttcaggaaatattgtatatggggtatttatgctacataagaaaacagtaaatcagaagaccacaatctacgaaattcaggatgatagaggaaaaatggatgtagtggggacaggacaatgtcacaatatcccctgtgaagaaggagataagctccaacttttctgctttcgacttagaaaaaagaaccagatgtcaaaactgatttcagaaatgcatagttttatccagataaagaaaaaaacaaacccgagaaacaatgaccccaagagcatgaagctaccccaggaacagcgtcagcttccatatccttcagaggccagcacaaccttccctgagagccatcttcggactcctcagatgccaccaacaactccatccagcagtttcttcaccaagaaaagtgaagacacaatctccaaaatgaatgacttcatgaggatgcagatactgaaggaagggagtcattttccaggaccgttcatgaccagcataggcccagctgagagccatccccacactcctcagatgcctccatcaacaccaagcagcagtttcttaaccacgttgaaaccaagactgaagactgaacctgaagaagtttccatagaagacagtgcccagagtgacctcaaagaagtgatggtgctgaacgcaacagaatcatttgtatatgagcccaaagagcagaagaaaatgtttcatgccacagtggcaactgagaatgaagtcttccgagtgaaggtttttaatattgacctaaaggagaagttcaccccaaagaagatcattgccatagcaaattatgtttgccgcaatgggttcctggaggtatatcctttcacacttgtggctgatgtgaatgctgaccgaaacatggagatcccaaaaggattgattagaagtgccagcgtaactcctaaaatcaatcagctttgctcacaaactaaaggaagttttgtgaatggggtgtttgaggtacataagaaaaatgtaaggggtgaattcacttattatgaaatacaagataatacagggaagatggaagtggtggtgcatggacgactgaccacaatcaactgtgaggaaggagataaactgaaactcacctgctttgaattggcaccgaaaagtgggaataccggggagttgagatctgtaattcatagtcacatcaaggtcatcaagaccaggaaaaacaagaaagacatactcaatcctgattcaagtatggaaacttcaccagactttttcttctaaaatctggatgtcattgacgataatgtttatggagataaggtctaagtgcctaaaaaaatgtacatatacctggttgaaatacaacactatacatacacaccaccatatatactagctgttaatcctatggaatggggtattgggagtgcttttttaatttttcatagtttttttttaataaaatggcatattttgcatctacaacttctataatttgaaaaaataaataaacattatcttttttgtgaaaggaa

SEQ ID NO: 5991 - DNA, 4825 bp, Homo sapiens
cagccgaacaattcgatgacgaggcccaggaagcacgctgaaaccctgggcggcggcaagctgtgcgacctcttctgcggccggcctgggcaggtgtcttcctcgagaggcaggcaggggatcccggacgatgctgtgttctttgctcctttgtgaatgtctgttgctggtagctggttatgctcatgatgatgactggattgaccccacagacatgcttaactatgatgctgcttcaggaacaatgagaaaatctcaggcaaaatatggtatttcaggggaaaaggatgtcagtcctgacttgtcatgtgctgatgaaatatcagaatgttatcacaaacttgattctttaacttataagattgatgagtgtgaaaagaaaaagagggaagactatgaaagtcaaagcaatcctgtttttaggagatacttaaataagattttaattgaagctggaaagcttggacttcctgatgaaaacaaaggcgatatgcattatgatgctgagattatccttaaaagagaaactttgttagaaatacagaagtttctcaatggagaagactggaaaccaggtgccttggatgatgcactaagtgatattttaattaattttaagtttcatgattttgaaacatggaagtggcgattcgaagattcctttggagtggatccatataatgtgttaatggtacttctttgtctgctctgcatcgtggttttagtggctactgagctgtggacatatgtacgttggtacactcagttgagacgtgttttaatcatcagctttctgttcagtttgggatggaattggatgtatttatataagctagcttttgcacagcatcaggctgaagtcgccaagatggagccattaaacaatgtgtgtgccaaaaagatggactggactggaagtatctgggaatggtttagaagttcatggacctataaggatgacccatgccaaaaatactatgagctcttactagtcaaccctatttggttggtcccaccaacaaaggcacttgcagttacattcaccacatttgtaacggagccattgaagcatattggaaaaggaactggggaatttattaaagcactcatgaaggaaattccagcgctgcttcatcttccagtgctgataattatggcattagccatcctgagtttctgctatggtgctggaaaatcagttcatgtgctgagacatataggcggtcctgagagcgaacctccccaggcacttcggccacgggatagaagacggcaggaggaaattgattatagacctgatggtggagcaggtgatgccgatttccattataggggccaaatgggccccactgagcaaggcccttatgccaaaacgtatgagggtagaagagagattttgagagagagagatgttgacttgagatttcagactggcaacaagagccctgaagtgctccgggcatttgatgtaccagacgcagaggcacgagagcatcccacggtggtacccagtcataaatcacctgttttggatacaaagcccaaggagacaggtggaatcctgggggaaggcacaccgaaagaaagcagtactgaaagcagccagtcggccaagcctgtctctggccaagacacatcagggaatacagaaggttcacccgcagcggaaaaggcccagctcaagtctgaagccgcaggcagcccagaccaaggcagcacatacagccccgcaagaggtgtggctggaccacgtggacaggatccggtcagcagcccctgtggctagaggaacaccagcacaaacgacagcctcaagtctccttcgagctttatatccatttggggatgaagtctactttgacagctagcaaggcgacatgcaactgttgttgaatgatgacagcaattcaggaaagacttaaatatgaaagcaaattgaacacatcgggtgtttgttatcagaaaagagatgagatgagataagacttgtttattgactagccaatatgtcattaaaattaaggtttatattgtgaagcttttttgaaattttacttttttttgagagttttgctctgtcacccaggctggagtgaggtggtacaatctcggctcactgcaacctccacctcccaggttcaagagattctcctgcctcagtctcccgagtagctaggattacagatgtgcatcaccatgcctggctaatttttgtattttttagtagagatggggtttcaccatgttggtcaggctggtctcgaactcctgacctcaagtgacccgcccttgtcggcctcccaaagtgctgggattacaggcatgagccattgtgcccagcctatatagtgtgaagcttttaggaaaatcagaacagggtagacagctgttaaaaacaatgtttaaatggaataatgttgaatgtttacaggctgtaagaactattgtatacacaaaataatacacaaagtttgtactttgtgtacaaatacaaatttgtactttgtgtacaaataatacaaaaagtttgtatacacaaactttttacgttgtggtttggtatattgtcttaactgaattttcttataagaaccccatgaaacttacctgagtttttaaaatgctatccaggacatcataccttatagtatacatgaaacataatgtaatccaggttgtaatttagaactttttttttttttttagctgagcacttaatgtaattaattccaggttatgactcttaaaaaacattggccattagagaaatagttctatttgcccatccaaatcacctgaatgactttttgaaagaataggggtccacatccccagatcccatcccagctgtgcacagtctgaagcaagcagagtgaaacaagttggcaacttgttccaagcgtgggcctttgcagtctgtgatccagtgttactccaggtcccagtctgtcccatacttgtcttttgctacagttagttagttactttgttatcatccccttgtaaactgccttcaatatctgggataaggaagacaaagcttaatgacaactaaggttctagctgacatctttctttcatatttaatttttgtgagttttcatctgttttctgtttgtttatgtgtcctaggttcttgacctaaccacatgggttttgttttttgtttttatattagaacttagaaaagtttgttttacagcagtattatggaacagaagagaccattttaaataatttttttaaacagcccaaaacacacaaaagatacttgttttctagagacagggtcttgctctgtcacccaggctggagtgcagtggcacgatcatagctcagtgcagcctccacctcctgggctcaagtggtcctcctgcctcagcctcttaagcagttgggactacaggtgtgtgccagcatgcttgctgttttttttttttttgagacagagtcttgctctgtcactcaggctggagtccagtggcttggtctcagctcactgcaatctctgcctcccaggggttcaagtgattctcctgcctcagcctcccaagtagctgaaactacaggcgcatgccaccatgcccagctaatttttgtatttttagtagagacagggtttcactatgttggccaggctggtctcaaactcccgacctcaagtgatccgcccgcttcggcctcccaaagtgctgggattacaggtgtgagccactgcgcctggctgctgatttatttttcatagacacgggggtctatgttgcccaggttggtcttgaactcctagcctcaagcgatcctcctgcctcagcctcccaatgtgctgggattacaggaatgagccaccatgcccagcccaagaagtagagtttcttttatactgactttggcctaaaaaaacagattttcatggaggaaaaaaaaacctagatttttagtaagactattttatatacttttttacattgatcaagtacattatttttaccaaacaacattgtttcccactacatccatggttatgtataaaaaaacgccattgtcaattaagatgttaaaaaattatttccataagagtattaaattctaatctatgattcacttaacttcctactttataaacactaggtaaagtaatctcacaagctgccaaagaacacatcccaagcagtaatcacagacgatgaagcaccttacaggacccctccaccctcaaacgcgcatgtccagagaagtattaatgccttaatagactactgaaggttaactatttacatcattctaaaaatattttaagctgtattacagtgctataaattctccttttaaggaaaaaagtaatagattgtttccttaccgtgtttgaaaggaaaaaaaataaatccatagtaactaatggtctgccgattttttccctgaatttttaaactccaacaaagcattattttgcaaaaagtcctttagcccaaagtcagtgtctctgttttgatctctttgtaaaagaactctctgttcatccattctctttccctgggaccgtaaaataaggctgaaaaagtcttcatctggtactgtcggaccctttgtggtagcaggtggtggagcacatctttgatcatctaatctggatccctagaagtttatgagagagattaaaagacatactgtgggaaagaaagcaccaagctatgttaaatctctcagtcacaacaagaaaacgcagttgtaaacttttatttggggcttctcagaaattaatctttgtttttatattgttctctttagttcccagcctgatttctgaaagaaataatctttaaacctg

SEQ ID NO: 5992 - DNA, 5811 bp, Homo sapiens; identical to SEQ ID NO: 175

SEQ ID NO: 5993 - DNA, 8524 bp, Homo sapiens
gcccgcgccggctgtgctgcacagggggaggagagggaaccccaggcgcgagcgggaagaggggacctgcagccacaacttctctggtcctctgcatcccttctgtccctccacccgtccccttccccaccctctggcccccaccttcttggaggcgacaacccccgggaggcattagaagggatttttcccgcaggttgcgaagggaagcaaacttggtggcaacttgcctcccggtgcgggcgtctctcccccaccgtctcaacatgcttaggggtccggggcccgggctgctgctgctggccgtccagtgcctggggacagcggtgccctccacgggagcctcgaagagcaagaggcaggctcagcaaatggttcagccccagtccccggtggctgtcagtcaaagcaagcccggttgttatgacaatggaaaacactatcagataaatcaacagtgggagcggacctacctaggcaatgcgttggtttgtacttgttatggaggaagccgaggttttaactgcgagagtaaacctgaagctgaagagacttgctttgacaagtacactgggaacacttaccgagtgggtgacacttatgagcgtcctaaagactccatgatctgggactgtacctgcatcggggctgggcgagggagaataagctgtaccatcgcaaaccgctgccatgaagggggtcagtcctacaagattggtgacacctggaggagaccacatgagactggtggttacatgttagagtgtgtgtgtcttggtaatggaaaaggagaatggacctgcaagcccatagctgagaagtgttttgatcatgctgctgggacttcctatgtggtcggagaaacgtgggagaagccctaccaaggctggatgatggtagattgtacttgcctgggagaaggcagcggacgcatcacttgcacttctagaaatagatgcaacgatcaggacacaaggacatcctatagaattggagacacctggagcaagaaggataatcgaggaaacctgctccagtgcatctgcacaggcaacggccgaggagagtggaagtgtgagaggcacacctctgtgcagaccacatcgagcggatctggccccttcaccgatgttcgtgcagctgtttaccaaccgcagcctcacccccagcctcctccctatggccactgtgtcacagacagtggtgtggtctactctgtggggatgcagtggctgaagacacaaggaaataagcaaatgctttgcacgtgcctgggcaacggagtcagctgccaagagacagctgtaacccagacttacggtggcaactcaaatggagagccatgtgtcttaccattcacctacaatggcaggacgttctactcctgcaccacagaagggcgacaggacggacatctttggtgcagcacaacttcgaattatgagcaggaccagaaatactctttctgcacagaccacactgttttggttcagactcgaggaggaaattccaatggtgccttgtgccacttccccttcctatacaacaaccacaattacactgattgcacttctgagggcagaagagacaacatgaagtggtgtgggaccacacagaactatgatgccgaccagaagtttgggttctgccccatggctgcccacgaggaaatctgcacaaccaatgaaggggtcatgtaccgcattggagatcagtgggataagcagcatgacatgggtcacatgatgaggtgcacgtgtgttgggaatggtcgtggggaatggacatgcattgcctactcgcagcttcgagatcagtgcattgttgatgacatcacttacaatgtgaacgacacattccacaagcgtcatgaagaggggcacatgctgaactgtacatgcttcggtcagggtcggggcaggtggaagtgtgatcccgtcgaccaatgccaggattcagagactgggacgttttatcaaattggagattcatgggagaagtatgtgcatggtgtcagataccagtgctactgctatggccgtggcattggggagtggcattgccaacctttacagacctatccaagctcaagtggtcctgtcgaagtatttatcactgagactccgagtcagcccaactcccaccccatccagtggaatgcaccacagccatctcacatttccaagtacattctcaggtggagacctaaaaattctgtaggccgttggaaggaagctaccataccaggccacttaaactcctacaccatcaaaggcctgaagcctggtgtggtatacgagggccagctcatcagcatccagcagtacggccaccaagaagtgactcgctttgacttcaccaccaccagcaccagcacacctgtgaccagcaacaccgtgacaggagagacgactcccttttctcctcttgtggccacttctgaatctgtgaccgaaatcacagccagtagctttgtggtctcctgggtctcagcttccgacaccgtgtcgggattccgggtggaatatgagctgagtgaggagggagatgagccacagtacctggatcttccaagcacagccacttctgtgaacatccctgacctgcttcctggccgaaaatacattgtaaatgtctatcagatatctgaggatggggagcagagtttgatcctgtctacttcacaaacaacagcgcctgatgcccctcctgacacgactgtggaccaagttgatgacacctcaattgttgttcgctggagcagaccccaggctcccatcacagggtacagaatagtctattcgccatcagtagaaggtagcagcacagaactcaaccttcctgaaactgcaaactccgtcaccctcagtgacttgcaacctggtgttcagtataacatcactatctatgctgtggaagaaaatcaagaaagtacacctgttgtcattcaacaagaaaccactggcaccccacgctcagatacagtgccctctcccagggacctgcagtttgtggaagtgacagacgtgaaggtcaccatcatgtggacaccgcctgagagtgcagtgaccggctaccgtgtggatgtgatccccgtcaacctgcctggcgagcacgggcagaggctgcccatcagcaggaacacctttgcagaagtcaccgggctgtcccctggggtcacctattacttcaaagtctttgcagtgagccatgggagggagagcaagcctctgactgctcaacagacaaccaaactggatgctcccactaacctccagtttgtcaatgaaactgattctactgtcctggtgagatggactccacctcgggcccagataacaggataccgactgaccgtgggccttacccgaagaggacagcccaggcagtacaatgtgggtccctctgtctccaagtacccactgaggaatctgcagcctgcatctgagtacaccgtatccctcgtggccataaagggcaaccaagagagccccaaagccactggagtctttaccacactgcagcctgggagctctattccaccttacaacaccgaggtgactgagaccaccattgtgatcacatggacgcctgctccaagaattggttttaagctgggtgtacgaccaagccagggaggagaggcaccacgagaagtgacttcagactcaggaagcatcgttgtgtccggcttgactccaggagtagaatacgtctacaccatccaagtcctgagagatggacaggaaagagatgcgccaattgtaaacaaagtggtgacaccattgtctccaccaacaaacttgcatctggaggcaaaccctgacactggagtgctcacagtctcctgggagaggagcaccaccccagacattactggttatagaattaccacaacccctacaaacggccagcagggaaattctttggaagaagtggtccatgctgatcagagctcctgcacttttgataacctgagtcccggcctggagtacaatgtcagtgtttacactgtcaaggatgacaaggaaagtgtccctatctctgataccatcatcccagctgttcctcctcccactgacctgcgattcaccaacattggtccagacaccatgcgtgtcacctgggctccacccccatccattgatttaaccaacttcctggtgcgttactcacctgtgaaaaatgaggaagatgttgcagagttgtcaatttctccttcagacaatgcagtggtcttaacaaatctcctgcctggtacagaatatgtagtgagtgtctccagtgtctacgaacaacatgagagcacacctcttagaggaagacagaaaacaggtcttgattccccaactggcattgacttttctgatattactgccaactcttttactgtgcactggattgctcctcgagccaccatcactggctacaggatccgccatcatcccgagcacttcagtgggagacctcgagaagatcgggtgccccactctcggaattccatcaccctcaccaacctcactccaggcacagagtatgtggtcagcatcgttgctcttaatggcagagaggaaagtcccttattgattggccaacaatcaacagtttctgatgttccgagggacctggaagttgttgctgcgacccccaccagcctactgatcagctgggatgctcctgctgtcacagtgagatattacaggatcacttacggagagacaggaggaaatagccctgtccaggagttcactgtgcctgggagcaagtctacagctaccatcagcggccttaaacctggagttgattataccatcactgtgtatgctgtcactggccgtggagacagccccgcaagcagcaagccaatttccattaattaccgaacagaaattgacaaaccatcccagatgcaagtgaccgatgttcaggacaacagcattagtgtcaagtggctgccttcaagttcccctgttactggttacagagtaaccaccactcccaaaaatggaccaggaccaacaaaaactaaaactgcaggtccagatcaaacagaaatgactattgaaggcttgcagcccacagtggagtatgtggttagtgtctatgctcagaatccaagcggagagagtcagcctctggttcagactgcagtaaccaacattgatcgccctaaaggactggcattcactgatgtggatgtcgattccatcaaaattgcttgggaaagcccacaggggcaagtttccaggtacagggtgacctactcgagccctgaggatggaatccatgagctattccctgcacctgatggtgaagaagacactgcagagctgcaaggcctcagaccgggttctgagtacacagtcagtgtggttgccttgcacgatgatatggagagccagcccctgattggaacccagtccacagctattcctgcaccaactgacctgaagttcactcaggtcacacccacaagcctgagcgcccagtggacaccacccaatgttcagctcactggatatcgagtgcgggtgacccccaaggagaagaccggaccaatgaaagaaatcaaccttgctcctgacagctcatccgtggttgtatcaggacttatggtggccaccaaatatgaagtgagtgtctatgctcttaaggacactttgacaagcagaccagctcagggagttgtcaccactctggagaatgtcagcccaccaagaagggctcgtgtgacagatgctactgagaccaccatcaccattagctggagaaccaagactgagacgatcactggcttccaagttgatgccgttccagccaatggccagactccaatccagagaaccatcaagccagatgtcagaagctacaccatcacaggtttacaaccaggcactgactacaagatctacctgtacaccttgaatgacaatgctcggagctcccctgtggtcatcgacgcctccactgccattgatgcaccatccaacctgcgtttcctggccaccacacccaattccttgctggtatcatggcagccgccacgtgccaggattaccggctacatcatcaagtatgagaagcctgggtctcctcccagagaagtggtccctcggccccgccctggtgtcacagaggctactattactggcctggaaccgggaaccgaatatacaatttatgtcattgccctgaagaataatcagaagagcgagcccctgattggaaggaaaaagacagacgagcttccccaactggtaacccttccacaccccaatcttcatggaccagagatcttggatgttccttccacagttcaaaagacccctttcgtcacccaccctgggtatgacactggaaatggtattcagcttcctggcacttctggtcagcaacccagtgttgggcaacaaatgatctttgaggaacatggttttaggcggaccacaccgcccacaacggccacccccataaggcataggccaagaccatacccgccgaatgtaggtgaggaaatccaaattggtcacatccccagggaagatgtagactatcacctgtacccacacggtccgggactcaatccaaatgcctctacaggacaagaagctctctctcagacaaccatctcatgggccccattccaggacacttctgagtacatcatttcatgtcatcctgttggcactgatgaagaacccttacagttcagggttcctggaacttctaccagtgccactctgacaggcctcaccagaggtgccacctacaacgtcatagtggaggcactgaaagaccagcagaggcataaggttcgggaagaggttgttaccgtgggcaactctgtcaacgaaggcttgaaccaacctacggatgactcgtgctttgacccctacacagtttcccattatgccgttggagatgagtgggaacgaatgtctgaatcaggctttaaactgttgtgccagtgcttaggctttggaagtggtcatttcagatgtgattcatctagatggtgccatgacaatggtgtgaactacaagattggagagaagtgggaccgtcagggagaaaatggccagatgatgagctgcacatgtcttgggaacggaaaaggagaattcaagtgtgaccctcatgaggcaacgtgttatgatgatgggaagacataccacgtaggagaacagtggcagaaggaatatctcggtgccatttgctcctgcacatgctttggaggccagcggggctggcgctgtgacaactgccgcagacctgggggtgaacccagtcccgaaggcactactggccagtcctacaaccagtattctcagagataccatcagagaacaaacactaatgttaattgcccaattgagtgcttcatgcctttagatgtacaggctgacagagaagattcccgagagtaaatcatctttccaatccagaggaacaagcatgtctctctgccaagatccatctaaactggagtgatgttagcagacccagcttagagttcttctttctttcttaagccctttgctctggaggaagttctccagcttcagctcaactcacagcttctccaagcatcaccctgggagtttcctgagggttttctcataaatgagggctgcacattgcctgttctgcttcgaagtattcaataccgctcagtattttaaatgaagtgattctaagatttggtttgggatcaataggaaagcatatgcagccaaccaagatgcaaatgttttgaaatgatatgaccaaaattttaagtaggaaagtcacccaaacacttctgctttcacttaagtgtctggcccgcaatactgtaggaacaagcatgatcttgttactgtgatattttaaatatccacagtactcactttttccaaatgatcctagtaattgcctagaaatatctttctcttacctgttatttatcaatttttcccagtatttttatacggaaaaaattgtattgaaaacacttagtatgcagttgataagaggaatttggtataattatggtgggtgattattttttatactgtatgtgccaaagctttactactgtggaaagacaactgttttaataaaagatttacattccacaacttgaagttcatctatttgatataagacaccttcgggggaaataattcctgtgaatattctttttcaattcagcaaacatttgaaaatctatgatgtgcaagtctaattgttgatttcagtacaagattttctaaatcagttgctacaaaaactgattggtttttgtcacttcatctcttcactaatggagatagctttacactttctgctttaatagatttaagtggaccccaatatttattaaaattgctagtttaccgttcagaagtataatagaaataatctttagttgctcttttctaaccattgtaattcttcccttcttccctccacctttccttcattgaataaacctctgttcaaagagattgcctgcaagggaaataaaaatgactaagatatt

SEQ ID NO: 5994 - DNA, 5906 bp, Homo sapiens
gcggccgcttcccaccgtccctctccccttactggcagagcgcgctgcgggcggactcccgggcccggagcagcccaccggccaccccaccgcccacccggctcccggtgtctcctcccggccgctctacccagcaactttccgtgctttgttccccgactggaaatgctttacggaagcgtcttggacagggtctccgccaggcgacaagagctcggtgctgagatgtgttacgttctcatctccccatcaattatggatggaaacaaataaggaagagtcaattttgctgagccccttctccggcaacgagaggcgttctgcagccgggagggagccgccgctcgcgccggcagccgctggcaggggcatggtgaggaggaaggtagctcagtggcatttctgagcaggggccaccctgacttcaccttggcccaccatgagggtcttcctgctttgtgcctacatactgctgctgatggtttcccagttgagggcagtcagctttcctgaagatgatgaaccccttaatactgtcgactatcactattcaaggcaatatccggtttttagaggacgcccttcaggcaatgaatcgcagcacaggctggactttcagctgatgttgaaaattcgagacacactttatattgctggcagggatcaagtttatacagtaaacttaaatgaaatgcccaaaacagaagtaatacccaacaagaaactgacatggcgatcaagacaacaggatcgagaaaactgtgctatgaaaggcaagcataaagatgaatgccacaactttatcaaagtatttgttccaagaaacgatgagatggtttttgtttgtggtaccaatgcattcaatcccatgtgtagatactacaggttgagtaccttagaatatgatggggaagaaattagtggcctggcaagatgcccatttgatgccagacaaaccaatgttgccctctttgctgatgggaagctgtattctgccacagtggctgacttcttggccagcgatgccgttatttatcgaagcatgggtgatggatctgcccttcgcacaataaaatatgattccaaatggataaaagagccacactttcttcatgccatagaatatggaaactatgtctatttcttctttcgagaaatcgctgtcgaacataataatttaggcaaggctgtgtattcccgcgtggcccgcatatgtaaaaacgacatgggtggttcccagcgggtcctggagaaacactggacttcatttctaaaggctcggctgaactgttctgtccctggagattcgtttttctactttgatgttctgcagtctattacagacataatacaaatcaatggcatccccactgtggtcggggtgtttaccacgcagctcaatagcatccctggttctgctgtctgtgcatttagcatggatgacattgaaaaagtattcaaaggacggtttaaggaacagaaaactccagattctgtttggacagcagttcccgaagacaaagtgccaaagccaaggcctggctgttgtgcaaaacacggccttgccgaagcttataaaacctccatcgatttcccggatgaaactctgtcattcatcaaatctcatcccctgatggactctgccgttccacccattgccgatgagccctggttcacaaagactcgggtcaggtacagactgacggccatctcagtggaccattcagccggaccctaccagaactacacagtcatctttgttggctctgaagctggcatggtacttaaagttctggcaaagaccagtcctttctctttgaacgacagcgtattactggaagagattgaagcctacaaccatgcaaagtgcagtgctgagaatgaggaagacaaaaaggtcatctcattacagttggataaagatcaccacgctttatatgtggcgttctctagctgcattatccgcatccccctcagtcgctgtgagcgttatggatcatgtaaaaagtcttgtattgcatctcgtgacccgtattgtggctggttaagccagggatcctgtggtagagtgaccccagggatgcttgctgaaggatatgaacaagacacagaattcggcaacacagctcatctaggggactgccatgacatggaggtatcttcatcttctgttaccacaatggtgtacgatgggaagtccagtctggagagtccaaccagatggtccacatgaatgtcctcatcacctgtgtctttgctgcttttgttttgggggcattcattgcaggtgtggcagtatactgctatcgagacatgtttgttcggaaaaacagaaagatccataaagatgcagagtccgcccagtcatgcacagactccagtggaagttttgccaaactgaatggtctctttgacagccctgtcaaggaataccaacagaatattgattctcctaaactgtatagtaacctgctaaccagtcggaaagagctaccacccaatggagatactaaatccatggtaatggaccatcgagggcaacctccagagttggctgctcttcctactcctgagtctacacccgtgcttcaccagaagaccctgcaggccatgaagagccactcagaaaaggcccatggccatggagcttcaaggaaagaaacccctcagttttttccgtctagtccgccacctcattccccattaagtcatgggcatatccccagtgccattgttcttccaaatgctacccatgactacaacacgtctttctcaaactccaatgctcacaaagctgaaaagaagcttcaaaacattgatcaccctctcacaaagtcatccagtaagagagatcaccggcgttctgttgattccagaaataccctcaatgatctcctgaagcatctgaatgacccaaatagtaaccccaaagccatcatgggagacatccagatggcacaccagaacttaatgctggatcccatgggatcgatgtctgaggtcccacctaaagtccctaaccgggaggcatcgctatactcccctccttcaactctccccagaaatagcccaaccaagcgagtggatgtccccaccactcctggagtcccaatgacttctctggaaagacaaagaggttatcacaaaaattcctcccagaggcactctatatctgctatgcctaaaaacttaaactcaccaaatggtgttttgttatccagacagcctagtatgaaccgtggaggatatatgcccacccccactggggcgaaggtggactatattcagggaacaccagtgagtgttcatctgcagccttccctctccagacagagcagctacaccagtaatggcactcttcctaggacgggactaaagaggacgccgtccttaaaacctgacgtgccaccaaagccttcctttgttcctcaaaccccatctgtcagaccactgaacaaatacacatactaggcctcaagtgtgctattcccatgtggctttatcctgtccgtgttgttgagaggatgatgttgtaagggtaccttaaaacaagagactcgcttgtattttaagagaaccaagtggccaaagaaactctttctaactttggcaacatcagaacttgccacatgtagctactgcagcaaggcttctgtgtacttgcctgaaaacaaaggaaggtgctggtcattccatttcttttgtttgaagctaaagagatgtgtagctcacaggggctaccttaccagtataaagagctgataacagtactcagaagaatctgtgaacaaatacttgaaaatgggttcaatgtagactgccattatgtgtggtcttcccattaaatgtgaacattttaatatgtatgcattcaccttgcctcttgcacaaatgtcaaaaaaaagatggtaatatctcaaagaaatgaacttgtagattaccaagcagtttgctaaaaattcaatctttgacccaagctgtagcatttttttttcatgtgtggcatctttttcatgccaccaacaaacttgttgtgtgtgtgcgtgtgtgtgtgtgtgtgtgtgtgtgtgtgtgtgttctgtacccactaggatttgtttaggtgcccattgcatctttttgtgctatggagttgtttacattaagcatgaccgaacgagagacaatactatttcccacaggagtccattgggttcagctttgaaagaggaatagaatcgaggctcctttgaccatcaaaatgatgaactttacttatgtggtacccaatgccagaatgtaagagttgcaagtgattttgtgctgctattcattaaaacttgtattccagtcttgccagcttaaggagatcaagatattaagaggtatccttgatttattttccagtattcagtagtaaaattttcctgtccactgtgaatcaaagcctgagtcactctatttaaccttggacacactaataaggttttattttgattgtgttcgtttccccccccccaatagtaaaatttctcctcctttaactcctcctaccccccaaggtaagaaacaaaaaacaaacaaacaaacaaaaatagaagacaaaagaaagacatatgaaaggaattgtaattggcttaacagaaacagtctgtaaaaacctaacagtggtgcaatcatgttgtctgtgttgtgttatgtgagaattttctcctaagtcatgcaggtaatgacaatatactgtaaataccacatgtgagtttacctgaatctgtgcattttgtgccttattcatgagaatgatagaagtactaaaatctgtcaagtgttttcagtatagcacattatttactgagtgccagttgtaaatgtttttcaaccagcacctaaaaagactcttttcaaaaaatcacagaaacaacctaggacaattatttgttacataatccgacctcatagcagcattacattctttgccgtgataaacattccactcctgctttcctaaggatgaaacagtgataatgtgaactcaaatgaggtttcctgggtaatgtgacacctgcagaaactatagagcgtcatttatacgtagtttggcagaaaccacttacggctgatgatgcgcaaccctgctgactgtttcagttaatatgctgcacaccacacacttgtttagtgaaccaaatctagaaagtaccaaggcagaggtatgctcctgctgtaatcaggcaaatgagttcaactggatttcttttgacaatactgttggtacctattacttgggggaggacatgttgcagaagaccagatcatttttatacagaatgtgaaatactgatacagttattcttttttttaaagaacattgttttataaagaacgtgatttccagtgatctctggaagcgctaaagctaaaatttctgttcttgaaacacttcagctttgcaactaaaatattacagattaataataaattaaaccaaccaatgataaacactactcagtccaccaacaacaaacgtgtttgaattcaccttaccaatattaatcccagcgtgtgtaaaacagaacagtaactctatgtgaccccagataacattttgtaacattgtgcttccttgtagtttgtaatgtgagttcaatcagtatttatgttgaaatttctaacattaaatctagtctctatcctgttaatttaatttttaaatgctttatccatttgtgcaaaggtaaacgcagattgtatcttttttaatggtacggcataaaaagtaaccctcaagtgaagtgtctctatactgttttatagagtactttaacatgaatagataccttgtaaacttgtattgtggatgtgtaaataatatgtactttgggtttttaacaccgcatgtaaagtcaaaataaaatatacaaatcatt

SEQ ID NO: 5995 - DNA, 7179 bp, Homo sapiens
gggtaactcattcgactgtggagttcttttaattcttatgaaagatttcaaatcctctagaagccaaaatgggacacagtaaacagattcgaattttacttctgaacgaaatggagaaactggaaaagaccctcttcagacttgaacaagaaactgggtctcactatgttgcccaggttgatattgaactcctggactcaagcaaccctccctctttggcctctgaaagtactgggattacaagcataagccaccgggcatggccccaattctgagcattaatttatttattgggtatgagctacagttccgattaggcccaactttacagggaaaagcagttaccgtgtatacaaattacccatttcctggagaaacatttaatagagaaaaattccgttctctggattgggaaaatccaacagaaagagaagatgattctgataaatactgtaaacttaatctgcaacaatctggttcatttcagtattatttccttcaaggaaatgagaaaagtggtggaggttacatagttgtggaccccattttacgtgttggtgctgataatcatgtgctacccttggactgtgttactcttcagacatttttagctaagtgtttgggaccttttgatgaatgggaaagcagacttagggttgcaaaagaatcaggctacaacatgattcattttaccccattgcagactcttggactatctaggtcatgctactcccttgccaatcagttagaattaaatcctgacttttcaagacctaatagaaagtatacctggaatgatgttggacagctagtggaaaaattaaaaaaggaatggaatgttatttgtattactgatgttgtctacaatcatactgctgctaatagtaaatggatccaggaacatccagaatgtgcctataatcttgtgaattctccacacttaaaacctgcctgggtcttagacagagcactttggcgtttctcctgtgatgttgcagaagggaaatacaaagaaaagggaatacctgctttgattgaaaatgatcaccatatgaattccatccgaaaaataatttgggaggatatttttccaaagcttaaactctgggaatttttccaagtagatgtcaacaaagcggttgagcaatttagaagacttcttacacaagaaaataggcgagtaaccaagtctgatccaaaccaacaccttacgattattcaagatcctgaatacagacggtttggctgtactgtagatatgaacattgcactaacgactttcataccacatgacaaggggccagcagcaattgaagaatgctgtaattggtttcataaaagaatggaggaattaaattcagagaagcatcgactcattaactatcatcaggaacaggcagttaattgccttttgggaaatgtgttttatgaacgactggctggccatggtccaaaactaggacctgtcactagaaagcatcctttagttaccaggtattttactttcccatttgaagagatagacttctccatggaagaatctatgattcatctgccaaataaagcttgttttctgatggcacacaatggatgggtaatgggagatgatcctcttcgaaactttgctgaaccgggttcagaagtttacctaaggagagaacttatttgctggggagacagtgttaaattacgctatgggaataaaccagaggactgtccttatctctgggcacacatgaaaaaatacactgaaataactgcaacttatttccagggagtacgtcttgataactgccactcaacacctcttcacgtagctgagtacatgttggatgctgctaggaatttgcaacccaatttatatgtagtagctgaactgttcacaggaagtgaagatctggacaatgtctttgttactagactgggcattagttccttaataagagaggcaatgagtgcatataatagtcatgaagagggcagattagtttaccgatatggaggagaacctgttggatcctttgttcagccctgtttgaggcctttaatgccagctattgcacatgccctgtttatggatattacgcatgataatgagtgtcctattgtgcatagatcagcgtatgatgctcttccaagtactacaattgtttctatggcatgttgtgctagtggaagtacaagaggctatgatgaattagtgcctcatcagatttcagtggtttctgaagaacggttttacactaagtggaatcctgaagcattgccttcaaacacaggtgaagttaatttccaaagcggcattattgcagccaggtgtgctatcagtaaacttcatcaggagcttggagccaagggttttattcaggtgtatgtggatcaagttgatgaagacatagtggcagtaacaagacactcacctagcatccatcagtctgttgtggctgtatctagaactgctttcaggaatcccaagacttcattttacagcaaggaagtgcctcaaatgtgcatccctggcaaaattgaagaagtagttcttgaagctagaactattgagagaaacacgaaaccttataggaaggatgagaattcaatcaatggaacaccagatatcacagtagaaattagagaacatattcagcttaatgaaagtaaaattgttaaacaagctggagttgccacaaaagggcccaatgaatatattcaagaaatagaatttgaaaacttgtctccaggaagtgttattatattcagagttagtcttgatccacatgcacaagtcgctgttggaattcttcgaaatcatctgacacaattcagtcctcactttaaatctggcagcctagctgttgacaatgcagatcctatattaaaaattccttttgcttctcttgcctccagattaactttggctgagctaaatcagatcctttaccgatgtgaatcagaagaaaaggaagatggtggagggtgctatgacataccaaactggtcagcccttaaatatgcaggtcttcaaggtttaatgtctgtattggcagaaataagaccaaagaatgacttggggcatcctttttgtaataatttgagatctggagattggatgattgactatgtcagtaaccggcttatttcacgatcaggaactattgctgaagttggtaaatggttgcaggctatgttcttctacctgaagcagatcccacgttaccttatcccatgttactttgatgctatattaattggtgcatataccactcttctggatacagcatggaagcagatgtcaagctttgttcagaatggttcaacctttgtgaaacacctttcattgggttcagttcaactgtgtggagtaggaaaattcccttccctgccaattctttcacctgccctaatggatgtaccttataggttaaatgagatcacaaaagaaaaggagcaatgttgtgtttctctagctgcaggcttacctcatttttcttctggtattttccgctgctggggaagggatacttttattgcacttagaggtatactgctgattactggacgctatgtagaagccaggaatattattttagcatttgcgggtaccctgaggcatggtctcattcctaatctactgggtgaaggaatttatgccagatacaattgtcgggatgctgtgtggtggtggctgcagtgtatccaggattactgtaaaatggttccaaatggtctagacattctcaagtgcccagtttccagaatgtatcctacagatgattctgctcctttgcctgctggcacactggatcagccattgtttgaagtcatacaggaagcaatgcaaaaacacatgcagggcatacagttccgagaaaggaatgctggtccccagatagatcgaaacatgaaggacgaaggttttaatataactgcaggagttgatgaagaaacaggatttgtttatggaggaaatcgtttcaattgtggcacatggatggataaaatgggagaaagtgacagagctagaaacagaggaatcccagccacaccaagagatgggtctgctgtggaaattgtgggcctgagtaaatctgctgttcgctggttgctggaattatccaaaaaaaatattttcccttatcatgaagtcacagtaaaaagacatggaaaggctataaaggtctcatatgatgagtggaacagaaaaatacaagacaactttgaaaagctatttcatgtttccgaagacccttcagatttaaatgaaaagcatccaaatctggttcacaaacgtggcatatacaaagatagttatggagcttcaagtccttggtgtgactatcagctcaggcctaattttaccatagcaatggttgtggcccctgagctctttactacagaaaaagcatggaaagctttggagattgcagaaaaaaaattgcttggtccccttggcatgaaaactttagatccagatgatatggtttactgtggaatttatgacaatgcattagacaatgacaactacaatcttgctaaaggtttcaattatcaccaaggacctgagtggctgtggcctattgggtattttcttcgtgcaaaattatatttttccagattgatgggcccggagactactgcaaagactatagttttggttaaaaatgttctttcccgacattatgttcatcttgagagatccccttggaaaggacttccagaactgaccaatgagaatgcccagtactgtcctttcagctgtgaaacacaagcctggtcaattgctactattcttgagacactttatgatttatagtttattacagatattaagtatgcaattacttgtattataggatgcaaggtcatcatatgtaaatgccttatatgcacaggctcaagttgttttaaaaatctcatttattataatattgatgctcaattaggtaagattgtaaaagcattgattttttttaatgtacagaggtagatttcaatttgaatcagaaagaaatatcattaccaatgaaatgtgtttgagttcagtaagaattattcaaatgcctagaaatccatagtttggaaaagaaaaatcatgtcatcttctatttgtacagaaatgaaaataaaatatgaaaataatgaaagaaatgaaaagatagcttttaattgtggtatatataatcttcagtaacaatacatactgaatacgctgtggttcattaatattaacaccacgtactatagtattcttaatacagtgctcactgcatttaataaatatttaataaatgatgaatgatagaagtttccatctacaatatatgttcctaaatggagcacagatgttcaaactatgctttcattttttcactgatatattaatttttgtgtaatgaatgccaacagtatattttatatgatttacttatgtgaggaaacatgcaaagcattaggaaatttatttcctaaaaacagttttgtaaaattagtattgagttctattgagtattataagatagcttacattttcaaaatggaaattgtcggtcatatttctagaactttaaagaaaaaagaatgttatattagttttctaaaactcaactatctttagtcatgttcaaaaatctattgctagatcatagtagatactggttttctattaactcaaaacctacattgacaagtttaacattgagaagaatcttaacaaaaatatggatatgaattcagtagatatcttaaattcaataaaatcactggaagtttttcatgataacttattttaagatgccttaaaaatcttaaagtcacaaaaggaaaaaggtttttaacatttacatgagttaacattttttcatagaacttatttcctagatagaattttttactgttttttactgttttcttaagaaaacagttaaatcattatgcattcagttggaagaaagtagtggcaagaattctttcattgctatataatattcagtggctcatttatacctaataaaataatggtattttaaaataatgctactttcaaagtagcatttttttagttagtttacaggttacatacccaaaaccttaactatgactaagaaattaaagaagaaaaccagcaaactaaaacttctgggcagcaaaaatatataaatgcttcagatgtcaaatacccatgcttgaaagctcgtgtaatttactttaagattatctgcctgctcttcttcaaagctgaccttgctttagaaatagttttaactagcttagttttctggtttccaaaactaaaatagattaaatcctacaaatttaaggacagttgtgacagtaatctgaccactatctataaatacattggacattggtttccaaatctccctttcttcttcagttccttccttgttcaatatatacccttctctaaactgtgcgggtaaaaggaatgactgtccttgagagaaccattagtttatcaaaggtttatgtagttttgttgctgtaccctaactttgatattcagggaggtaggaaaggtaacagaaaaccagcatatttaatcaaagcaagaagtaatcgctgacagttaaatgtgaccaaaaaaattaaaagttcacaatttttttaatgtagccatttggggttatctctagtaaggcagatacccacgttggtaaatttttaggatattgtgttgcactagaaaactaagtggttcatatttctaatgaggaagattaatgaaagaacattgttatattctgcgtggtatattttaaagtttaagaaggcatgttaaacattatttcctctatggtagttaaaatacagaattagatttttaacaggtgtcatttgactaaacgtttcggtagaatgcttcatacttgagtgatgctggataaggtattgtatttcaacaatggactatgccttggtttttcactaatcaaaatcaaaattactctttaacatgataaatgaatttaccagtttagtatgctgtggtattttaataagttttcaaagataattgggaaaacatgagactggtcatattgatgaatattgtaacatgtgaattgtgatccatttctgatatgtcttgaactactgtgtctagtgggcaaatgtcattgttacctctgtgtgttaagaaaataaaaatattttctaaaggtc

SEQ ID NO: 5996 - DNA, 8025 bp, Homo sapiens
gcccgcgccggctgtgctgcacagggggaggagagggaaccccaggcgcgagcgggaagaggggacctgcagccacaacttctctggtcctctgcatcccttctgtccctccacccgtccccttccccaccctctggcccccaccttcttggaggcgacaacccccgggaggcattagaagggatttttcccgcaggttgcgaagggaagcaaacttggtggcaacttgcctcccggtgcgggcgtctctcccccaccgtctcaacatgcttaggggtccggggcccgggctgctgctgctggccgtccagtgcctggggacagcggtgccctccacgggagcctcgaagagcaagaggcaggctcagcaaatggttcagccccagtccccggtggctgtcagtcaaagcaagcccggttgttatgacaatggaaaacactatcagataaatcaacagtgggagcggacctacctaggcaatgcgttggtttgtacttgttatggaggaagccgaggttttaactgcgagagtaaacctgaagctgaagagacttgctttgacaagtacactgggaacacttaccgagtgggtgacacttatgagcgtcctaaagactccatgatctgggactgtacctgcatcggggctgggcgagggagaataagctgtaccatcgcaaaccgctgccatgaagggggtcagtcctacaagattggtgacacctggaggagaccacatgagactggtggttacatgttagagtgtgtgtgtcttggtaatggaaaaggagaatggacctgcaagcccatagctgagaagtgttttgatcatgctgctgggacttcctatgtggtcggagaaacgtgggagaagccctaccaaggctggatgatggtagattgtacttgcctgggagaaggcagcggacgcatcacttgcacttctagaaatagatgcaacgatcaggacacaaggacatcctatagaattggagacacctggagcaagaaggataatcgaggaaacctgctccagtgcatctgcacaggcaacggccgaggagagtggaagtgtgagaggcacacctctgtgcagaccacatcgagcggatctggccccttcaccgatgttcgtgcagctgtttaccaaccgcagcctcacccccagcctcctccctatggccactgtgtcacagacagtggtgtggtctactctgtggggatgcagtggctgaagacacaaggaaataagcaaatgctttgcacgtgcctgggcaacggagtcagctgccaagagacagctgtaacccagacttacggtggcaactcaaatggagagccatgtgtcttaccattcacctacaatggcaggacgttctactcctgcaccacagaagggcgacaggacggacatctttggtgcagcacaacttcgaattatgagcaggaccagaaatactctttctgcacagaccacactgttttggttcagactcgaggaggaaattccaatggtgccttgtgccacttccccttcctatacaacaaccacaattacactgattgcacttctgagggcagaagagacaacatgaagtggtgtgggaccacacagaactatgatgccgaccagaagtttgggttctgccccatggctgcccacgaggaaatctgcacaaccaatgaaggggtcatgtaccgcattggagatcagtgggataagcagcatgacatgggtcacatgatgaggtgcacgtgtgttgggaatggtcgtggggaatggacatgcattgcctactcgcagcttcgagatcagtgcattgttgatgacatcacttacaatgtgaacgacacattccacaagcgtcatgaagaggggcacatgctgaactgtacatgcttcggtcagggtcggggcaggtggaagtgtgatcccgtcgaccaatgccaggattcagagactgggacgttttatcaaattggagattcatgggagaagtatgtgcatggtgtcagataccagtgctactgctatggccgtggcattggggagtggcattgccaacctttacagacctatccaagctcaagtggtcctgtcgaagtatttatcactgagactccgagtcagcccaactcccaccccatccagtggaatgcaccacagccatctcacatttccaagtacattctcaggtggagacctaaaaattctgtaggccgttggaaggaagctaccataccaggccacttaaactcctacaccatcaaaggcctgaagcctggtgtggtatacgagggccagctcatcagcatccagcagtacggccaccaagaagtgactcgctttgacttcaccaccaccagcaccagcacacctgtgaccagcaacaccgtgacaggagagacgactcccttttctcctcttgtggccacttctgaatctgtgaccgaaatcacagccagtagctttgtggtctcctgggtctcagcttccgacaccgtgtcgggattccgggtggaatatgagctgagtgaggagggagatgagccacagtacctggatcttccaagcacagccacttctgtgaacatccctgacctgcttcctggccgaaaatacattgtaaatgtctatcagatatctgaggatggggagcagagtttgatcctgtctacttcacaaacaacagcgcctgatgcccctcctgacacgactgtggaccaagttgatgacacctcaattgttgttcgctggagcagaccccaggctcccatcacagggtacagaatagtctattcgccatcagtagaaggtagcagcacagaactcaaccttcctgaaactgcaaactccgtcaccctcagtgacttgcaacctggtgttcagtataacatcactatctatgctgtggaagaaaatcaagaaagtacacctgttgtcattcaacaagaaaccactggcaccccacgctcagatacagtgccctctcccagggacctgcagtttgtggaagtgacagacgtgaaggtcaccatcatgtggacaccgcctgagagtgcagtgaccggctaccgtgtggatgtgatccccgtcaacctgcctggcgagcacgggcagaggctgcccatcagcaggaacacctttgcagaagtcaccgggctgtcccctggggtcacctattacttcaaagtctttgcagtgagccatgggagggagagcaagcctctgactgctcaacagacaaccaaactggatgctcccactaacctccagtttgtcaatgaaactgattctactgtcctggtgagatggactccacctcgggcccagataacaggataccgactgaccgtgggccttacccgaagaggacagcccaggcagtacaatgtgggtccctctgtctccaagtacccactgaggaatctgcagcctgcatctgagtacaccgtatccctcgtggccataaagggcaaccaagagagccccaaagccactggagtctttaccacactgcagcctgggagctctattccaccttacaacaccgaggtgactgagaccaccattgtgatcacatggacgcctgctccaagaattggttttaagctgggtgtacgaccaagccagggaggagaggcaccacgagaagtgacttcagactcaggaagcatcgttgtgtccggcttgactccaggagtagaatacgtctacaccatccaagtcctgagagatggacaggaaagagatgcgccaattgtaaacaaagtggtgacaccattgtctccaccaacaaacttgcatctggaggcaaaccctgacactggagtgctcacagtctcctgggagaggagcaccaccccagacattactggttatagaattaccacaacccctacaaacggccagcagggaaattctttggaagaagtggtccatgctgatcagagctcctgcacttttgataacctgagtcccggcctggagtacaatgtcagtgtttacactgtcaaggatgacaaggaaagtgtccctatctctgataccatcatcccagctgttcctcctcccactgacctgcgattcaccaacattggtccagacaccatgcgtgtcacctgggctccacccccatccattgatttaaccaacttcctggtgcgttactcacctgtgaaaaatgaggaagatgttgcagagttgtcaatttctccttcagacaatgcagtggtcttaacaaatctcctgcctggtacagaatatgtagtgagtgtctccagtgtctacgaacaacatgagagcacacctcttagaggaagacagaaaacaggtcttgattccccaactggcattgacttttctgatattactgccaactcttttactgtgcactggattgctcctcgagccaccatcactggctacaggatccgccatcatcccgagcacttcagtgggagacctcgagaagatcgggtgccccactctcggaattccatcaccctcaccaacctcactccaggcacagagtatgtggtcagcatcgttgctcttaatggcagagaggaaagtcccttattgattggccaacaatcaacagtttctgatgttccgagggacctggaagttgttgctgcgacccccaccagcctactgatcagctgggatgctcctgctgtcacagtgagatattacaggatcacttacggagagacaggaggaaatagccctgtccaggagttcactgtgcctgggagcaagtctacagctaccatcagcggccttaaacctggagttgattataccatcactgtgtatgctgtcactggccgtggagacagccccgcaagcagcaagccaatttccattaattaccgaacagaaattgacaaaccatcccagatgcaagtgaccgatgttcaggacaacagcattagtgtcaagtggctgccttcaagttcccctgttactggttacagagtaaccaccactcccaaaaatggaccaggaccaacaaaaactaaaactgcaggtccagatcaaacagaaatgactattgaaggcttgcagcccacagtggagtatgtggttagtgtctatgctcagaatccaagcggagagagtcagcctctggttcagactgcagtaaccaacattgatcgccctaaaggactggcattcactgatgtggatgtcgattccatcaaaattgcttgggaaagcccacaggggcaagtttccaggtacagggtgacctactcgagccctgaggatggaatccatgagctattccctgcacctgatggtgaagaagacactgcagagctgcaaggcctcagaccgggttctgagtacacagtcagtgtggttgccttgcacgatgatatggagagccagcccctgattggaacccagtccacagctattcctgcaccaactgacctgaagttcactcaggtcacacccacaagcctgagcgcccagtggacaccacccaatgttcagctcactggatatcgagtgcgggtgacccccaaggagaagaccggaccaatgaaagaaatcaaccttgctcctgacagctcatccgtggttgtatcaggacttatggtggccaccaaatatgaagtgagtgtctatgctcttaaggacactttgacaagcagaccagctcagggagttgtcaccactctggagaatgtcagcccaccaagaagggctcgtgtgacagatgctactgagaccaccatcaccattagctggagaaccaagactgagacgatcactggcttccaagttgatgccgttccagccaatggccagactccaatccagagaaccatcaagccagatgtcagaagctacaccatcacaggtttacaaccaggcactgactacaagatctacctgtacaccttgaatgacaatgctcggagctcccctgtggtcatcgacgcctccactgccattgatgcaccatccaacctgcgtttcctggccaccacacccaattccttgctggtatcatggcagccgccacgtgccaggattaccggctacatcatcaagtatgagaagcctgggtctcctcccagagaagtggtccctcggccccgccctggtgtcacagaggctactattactggcctggaaccgggaaccgaatatacaatttatgtcattgccctgaagaataatcagaagagcgagcccctgattggaaggaaaaagacaggacaagaagctctctctcagacaaccatctcatgggccccattccaggacacttctgagtacatcatttcatgtcatcctgttggcactgatgaagaacccttacagtcaacgaaggcttgaaccaacctacggatgactcgtgctttgacccctacacagtttcccattatgccgttggagatgagtgggaacgaatgtctgaatcaggctttaaactgttgtgccagtgcttaggctttggaagtggtcatttcagatgtgattcatctagatggtgccatgacaatggtgtgaactacaagattggagagaagtgggaccgtcagggagaaaatggccagatgatgagctgcacatgtcttgggaacggaaaaggagaattcaagtgtgaccctcatgaggcaacgtgttatgatgatgggaagacataccacgtaggagaacagtggcagaaggaatatctcggtgccatttgctcctgcacatgctttggaggccagcggggctggcgctgtgacaactgccgcagacctgggggtgaacccagtcccgaaggcactactggccagtcctacaaccagtattctcagagataccatcagagaacaaacactaatgttaattgcccaattgagtgcttcatgcctttagatgtacaggctgacagagaagattcccgagagtaaatcatctttccaatccagaggaacaagcatgtctctctgccaagatccatctaaactggagtgatgttagcagacccagcttagagttcttctttctttcttaagccctttgctctggaggaagttctccagcttcagctcaactcacagcttctccaagcatcaccctgggagtttcctgagggttttctcataaatgagggctgcacattgcctgttctgcttcgaagtattcaataccgctcagtattttaaatgaagtgattctaagatttggtttgggatcaataggaaagcatatgcagccaaccaagatgcaaatgttttgaaatgatatgaccaaaattttaagtaggaaagtcacccaaacacttctgctttcacttaagtgtctggcccgcaatactgtaggaacaagcatgatcttgttactgtgatattttaaatatccacagtactcactttttccaaatgatcctagtaattgcctagaaatatctttctcttacctgttatttatcaatttttcccagtatttttatacggaaaaaattgtattgaaaacacttagtatgcagttgataagaggaatttggtataattatggtgggtgattattttttatactgtatgtgccaaagctttactactgtggaaagacaactgttttaataaaagatttacattccacaacttgaagttcatctatttgatataagacaccttcgggggaaataattcctgtgaatattctttttcaattcagcaaacatttgaaaatctatgatgtgcaagtctaattgttgatttcagtacaagattttctaaatcagttgctacaaaaactgattggtttttgtcacttcatctcttcactaatggagatagctttacactttctgctttaatagatttaagtggaccccaatatttattaaaattgctagtttaccgttcagaagtataatagaaataatctttagttgctcttttctaaccattgtaattcttcccttcttccctccacctttccttcattgaataaacctctgttcaaagagattgcctgcaagggaaataaaaatgactaagatatt

SEQ ID NO: 5997 - DNA, 3952 bp, Homo sapiens
ctggtatatttgtgcctgctggaggtggaattaacagtaagaaggagaaagggattgaatggacttacaggaaggatttcaagtaaattcagggaaacacatttacttgaatagtacaacctagagtattattttacactaagacgacacaaaagatgttaaagttatcaccaagctgccggacagatatatattccaacaccaaggtgcagatcagcatagatctgtgattcagaaatcaggatttgttttggaaagagctcaagggttgagaagaactcaaaagcaagtgaagattactttgggaactacagtttatcagaagatcaacttttgctaattcaaataccaaaggcctgattatcataaattcatataggaatgcataggtcatctgatcaaataatattagccgtcttctgctacatcaatgcagcaaaaactcttaacaactgtggataattggaaatctgagtttcagctttcttagaaataactactcttgacatattccaaaatatttaaaataggacaggaaaatcggtgaggatgttgtgctcagaaatgtcactgtcatgaaaaataggtaaatttgttttttcagctactgggaaactgtacctcctagaaccttaggttttttttttttttaagaggacaagaaggactaaaaatatcaacttttgcttttggacaaaaatgcatctgactgtatttttacttaagggtattgtgggtttcctctggagctgctgggttctagtgggttatgcaaaaggaggtttgggagacaatcatgttcactccagttttatttatagaagactacggaaccacgaaagacgggaaatacaaagggaaattctctctatcttgggtttgcctcacagacccagaccattttcacctggaaaacaagcgtcctctgcacctctctttatgctggatctctacaatgccatgaccaatgaagaaaatcctgaagagtcggagtactcagtaagggcatccttggcagaagagaccagaggggcaagaaagggatacccagcctctcccaatgggtatcctcgtcgcatacagttatctcggacgactcctctgaccacccagagtcctcctctagccagcctccatgataccaactttctgaatgatgctgacatggtcatgagctttgtcaacttagttgaaagagacaaggatttttctcaccagcgaaggcattacaaagaatttcgatttgatcttacccaaattcctcatggagaggcagtgacagcagctgaattccggatatacaaggaccggagcaacaaccgatttgaaaatgaaacaattaagattagcatatatcaaatcatcaaggaatacacaaatagggatgcagatctgttcttgttagacacaagaaaggcccaagctttagatgtgggttggcttgtctttgatatcactgtgaccagcaatcattgggtgattaatccccagaataatttgggcttacagctctgtgcagaaacaggggatggacgcagtatcaacgtaaaatctgctggtcttgtgggaagacagggacctcagtcaaaacaaccattcatggtggccttcttcaaggcgagtgaggtacttcttcgatccgtgagagcagccaacaaacgaaaaaatcaaaaccgcaataaatccagctctcatcaggactcctccagaatgtccagtgttggagattataacacaagtgagcaaaaacaagcctgtaagaagcacgaactctatgtgagcttccgggatctgggatggcaggactggattatagcaccagaaggatacgctgcattttattgtgatggagaatgttcttttccacttaacgcccatatgaatgccaccaaccacgctatagttcagactctggttcatctgatgtttcctgaccacgtaccaaagccttgttgtgctccaaccaaattaaatgccatctctgttctgtactttgatgacagctccaatgtcattttgaaaaaatatagaaatatggtagtacgctcatgtggctgccactaatattaaataatattgataataacaaaaagatctgtattaaggtttatggctgcaataaaaagcatactttcagacaaacggggaatttcctaaaattagtctggctcattttgactcttttcctatgtacaatatcatgtatatagtcatttttatttatttaaacgtatatattctcttctgtggaggctttatcaataaaatctatttcataggccactacattatacaatagatcatctagtataattttcaatgggttatgctgagtccattcaattccatttcaacatttttttctaatacaattttacataattttctgagattagacagaactcctttgactgtttaatattgtggaaggaaattgaataatttagttatattgtgccaatgaaaaccatgatagaatatttatttagaaataagacttaaaaaaataacaacccaaacaaaaattcttggataaacacaatttctcttttagagttcctgcttcattagataaagtgaaatgttgaactggatttgaataaataaacggtaggcagaacatagaagctgaaagattgcacagaattgttttaactgtttgctttaacagaagtggtgtaactgtaggagcatgttcctttttggcttgtggattgtagattttgcaaagagctcaaagcttcaggagacaggcttgagcctgtgtccatagctttccaagttaacactaattgtagtacaaccttcttacctcaaataaatcatgtctgcctattatctagaacactactgctgcagaatttttttttcagatttaaaaacctagtccaaaataaagaaacatttacatgtgctccactttcctccccacaggcaagagtcactgcatgcgtaaaatgtacaagagcagaagatgccgaaagaaccattttctttagctctcctttataactgagtttgctgattgatgtgatgcaagggattttatttagaagtaaaagcactgaaactaaactggaggaaattaccaaaagtcccagaatggctttgacagaattgccatttctaaagaacagctgaaattcatttttcatatctttgagagtgagctcaatgaaaaccttattttgtaaaggcattttgtaaaccttcttccaagcacaaataattccaaacaggaaggttctgttgtgtgtgtgtgtgtgtgtgtgtctgtgtgtgcatgtgtgttcttccctctaaaattaatttattttctctatctattagaatgccctctaaggcctttctttaacacacactgactttttgaagaatgatctttagattgataacttgctatttatggtgactctgtggttaggcttatttaccgttaatctaaagtattcataaagcaccatttattaatcatccttttggatctttcaaaccaaacgtataccaaaaatgtcttcaaaaatgttatggctttgtttgtaattcgggtatattaaaatgttgttttgaaatacagtttatcttaaagaaaatttgacagtaactatattaaggggtacattaagtaatatatttttaattaatggtgtaccattgagagaataagaaatggaagtctattgttttattctttaaatgtgctgtttaaatatatttccatattttaaaatatattaaacagatgctaatttctgctgttcttgatttggttctttatttaaaaggaatacaaaatgtaagtatatcataaattgagacaataagaatatttatcaaatgtaaactgtttgtggatcacatgattctttatgttgttcttaattgccaaaattgttttttgtgttgttaataattatctcactattaaatgtgcaaagcaacaatccatgaa

SEQ ID NO: 5998 - DNA, 1815 bp, Homo sapiens
atgcgcgtcgggcacagcgcgtgcagcctcgtgcagctcttctggtctccggcgcccgcccctcagacgtaatgttgaattaaagaaaatactttatcagaagaagatggccactgcccagttgcagaggactcccatgagtgcactggtatttcccaataagatatcaactgaacaccagtctttggtgttagtgaagaggcttctagcagtttcagtatcctgtatcacgtatttgaggggaatattcccagaatgcgcttatggaacaagatatctagatggatgctaggatgttatgatgctttacagaaaaaatatttaaagataatggaattaacagtatacacaaacccagaagatcctcagacaatttcagaatgttaccaattcaaattcaaatacaccaataatggaccactcatggacttcataagtaaaaaccaaagcaacgaatctagcatgttgtctactgacaccaagaaagcaagcattctcctcattcgcaagatttatatcctaatgcaaaatctggggcctttacctaatgatgtttgtttgaccatgaaacttttttactatgatgaagttacacccccagattaccagcctcccggttttaaggatggtgattgtgaaggagttatatttgaaggggaacctatgtatttaaatgtgggagaagtctcaacaccttttcacatcttcaaagtaaaagtgaccactgagagagaacgaatggaaaatattgactcaactatactatcaccaaaacaaataaaaacaccatttcaaaaaatcctgagggacaaagatgtagaagatgaacaggagcattatacaagtgatgatttggacattgaaactaaaatggaagaacaggaaaaaaaccctgcatcttctgaacttgaagaaccaagtttagtttgtgaggaagatgaaattatgaggtctaaagaaagtccagatctttctatttctcattctcaggttgagcagttagtcaataaaacatctgaacttgatatgtctgaaagcaaaacaagaagtggaaaagtctttcagaataaaatggcaaatggaaatcaaccagtaaaatcttccaaagaaaatcggaagagaagtcaacatgaatctgggagaatagtcctccatcactttgattcttctagtcaagagtcagtgccaaaaaggagaaagtttagtgaaccaaaggaacatatataaaaattatttttgttctgcaggcttgcagagttcttctcaccatttaaactgaaggaccctatattatatttccctaactctgaagatgtatatgtagtttaaagcagtttgtacactaaaactaagtttttggctgactgtcatattgtggtccttaatcttgagataaatccaatagaacttttgaataaaagcaaaagtacaaatgtcataattgattcggtaataagtaaaatttcaaaattgattttgttcattacctacttaatatttcctttaaatatatactaactgttaaggccctctaatgccatttttctaaacagtaatgtttactttggtattaaaatttggtatggattcactttttacttatgttaaaattataccatttaactggctcttttgtcattgtgctgttattaaaacaatgttcttcaatattttgacataatgtattaacattttaatatataatgtacaatttaagaattggtgctttacctttactatgcttttttttacaggacaaaaagactgatttttaaagtatggcattttttgcagcataaataaaatattgttcag

SEQ ID NO: 5999 - DNA, 2152 bp, Homo sapiens
gtctgtgtgatggagagagacatggaaaaggcgacgtcccagcggctggaactggggcggaggaacgggaacagggaaggcctgagttaggcaccacaaaggttttcaggagaaaagtggggcgagccgagaggcctggtgcactgtgcgtcctctgagaggtgaaggagcactgtgtggtcagagggctgcgagctctctgtttgggttccgaggaagacagaatgggctgaactggaactgacctaaatgtcagcaagaggagtcgtccagcatgctctgcccaccccacgccgaggtgcactgaccatgagcctcaactcctccctcagctgcaggaaggagctgagtaatctcactgaggaggagggtggcgaagggggcgtcatcatcacccagttcatcgccatcattgtcatcaccatttttgtctgcctgggaaacctggtcatcgtggtcaccttgtacaagaagtcctacctcctcaccctcagcaacaagttcgtcttcagcctgactctgtccaacttcctgctgtccgtgttggtgctgccttttgtggtgacgagctccatccgcagggaatggatctttggtgtagtgtggtgcaacttctctgccctcctctacctgctgatcagctctgccagcatgctaaccctcggggtcattgccatcgaccgctactatgctgtcctgtaccccatggtgtaccccatgaagatcacagggaaccgggctgtgatggcacttgtctacatctggcttcactcgctcatcggctgcctgccacccctgtttggttggtcatccgtggagtttgacgagttcaaatggatgtgtgtggctgcttggcaccgggagcctggctacacggccttctggcagatctggtgtgccctcttcccctttctggtcatgctggtgtgctatggcttcatcttccgcgtggccagggtcaaggcacgcaaggtgcactgtggcacagtcgtcatcgtggaggaggatgctcagaggaccgggaggaagaactccagcacctccacctcctcttcaggcagcaggaggaatgcctttcagggtgtggtctactcggccaaccagtgcaaagccctcatcaccatcctggtggtcctcggtgccttcatggtcacctggggcccctacatggttgtcatcgcctctgaggccctctgggggaaaagctccgtctccccgagcctggagacttgggccacatggctgtcctttgccagcgctgtctgccaccccctgatctatggactctggaacaagacagttcgcaaagaactactgggcatgtgctttggggaccggtattatcgggaaccatttgtgcaacgacagaggacttccaggctcttcagcatttccaacaggatcacagacctgggcctgtccccacacctcactgcgctcatggcaggtggacagcccctggggcacagcagcagcacgggggacactggcttcagctgctcccaggactcagggacagatatgatgctgcttgaggactacacgtctgatgacaaccctccctctcactgcacttgcccacccaagagaaggagctcggtgacatttgaggatgaagtggaacaaatcaaagaagctgccaagaactcgattcttcatgtgaaagctgaagtacacaagtccttggacagttacgcagcaagcttggccaaagccattgaggccgaagccaaaatcaacttatttggggaggaggctttgccaggggtcttggttacagcacggactgtcccggggggcggcttcgggggccgccgaggcagcagaactcttgtgagccagaggctgcagttgcagagcatcgaagaaggagatgttttagctgccgagcagagatgagggcctcagggtgccgtggggctgcagcctgagaggctggcccggggaggagttcccatcaccgcctgtgccgcggccttgggagcatgtcactgtgtacagctggccacacacagggaaggagcagcatctggtatgcagccaccaggacaaggactgaaaataatgtctacagtccacagcttcagcatttccagagaccacatgtgagcttcttttaggtcccagtgatgggaccagaagcatctaaagc

SEQ ID NO: 6000 - DNA, 1077 bp, Homo sapiens
actgctcttccagaggcaagaccaaccaagatgagtgacctgggagctgtcatttccctcctgctctggggacgacagctttttgcactgtactcaggcaatgatgtcacggatatttcagatgaccgcttcccgaagccccctgagattgcaaatggctatgtggagcacttgtttcgctaccagtgtaagaactactacagactgcgcacagaaggagatggagtatacaccttaaatgataagaagcagtggataaataaggctgttggagataaacttcctgaatgtgaagcagtatgtgggaagcccaagaatccggcaaacccagtgcagcggatcctgggtggacacctggatgccaaaggcagctttccctggcaggctaagatggtttcccaccataatctcaccacaggggccacgctgatcaatgaacaatggctgctgaccacggctaaaaatctcttcctgaaccattcagaaaatgcaacagcgaaagacattgcccctactttaacactctatgtggggaaaaagcagcttgtagagattgagaaggtggttctacaccctaactaccaccaggtagatattgggctcatcaaactcaaacagaaggtgcttgttaatgagagagtgatgcccatctgcctaccttcaaagaattatgcagaagtagggcgtgtgggttacgtgtctggctggggacaaagtgacaactttaaacttactgaccatctgaagtatgtcatgctgcctgtggctgaccaatacgattgcataacgcattatgaaggcagcacatgccccaaatggaaggcaccgaagagccctgtaggggtgcagcccatactgaacgaacacaccttctgtgtcggcatgtctaagtaccaggaagacacctgctatggcgatgcgggcagtgcctttgccgttcacgacctggaggaggacacctggtacgcggctgggatcctaagctttgataagagctgtgctgtggctgagtatggtgtgtatgtgaaggtgacttccatccagcactgggttcagaagaccatagctgagaactaa

SEQ ID NO: 6001 - DNA, 1429 bp, Homo sapiens
agatgccccacagcactgctcttccagaggcaagaccaaccaagatgagtgccctgggagctgtcattgccctcctgctctggggacagctttttgcagtggactcaggcaatgatgtcacggatatcgcagatgacggctgcccgaagccccccgagattgcacatggctatgtggagcactcggttcgctaccagtgtaagaactactacaaactgcgcacagaaggagatggagtatacaccttaaatgataagaagcagtggataaataaggctgttggagataaacttcctgaatgtgaagcagatgacggctgcccgaagccccccgagattgcacatggctatgtggagcactcggttcgctaccagtgtaagaactactacaaactgcgcacagaaggagatggagtgtacaccttaaacaatgagaagcagtggataaataaggctgttggagataaacttcctgaatgtgaagcagtatgtgggaagcccaagaatccggcaaacccagtgcagcggatcctgggtggacacctggatgccaaaggcagctttccctggcaggctaagatggtttcccaccataatctcaccacaggtgccacgctgatcaatgaacaatggctgctgaccacggctaaaaatctcttcctgaaccattcagaaaatgcaacagcgaaagacattgcccctactttaacactctatgtggggaaaaagcagcttgtagagattgagaaggttgttctacaccctaactactcccaggtagatattgggctcatcaaactcaaacagaaggtgtctgttaatgagagagtgatgcccatctgcctaccttcaaaggattatgcagaagtagggcgtgtgggttatgtttctggctgggggcgaaatgccaattttaaatttactgaccatctgaagtatgtcatgctgcctgtggctgaccaagaccaatgcataaggcattatgaaggcagcacagtccccgaaaagaagacaccgaagagccctgtaggggtgcagcccatactgaatgaacacaccttctgtgctggcatgtctaagtaccaagaagacacctgctatggcgatgcgggcagtgcctttgccgttcacgacctggaggaggacacctggtatgcgactgggatcttaagctttgataagagctgtgctgtggctgagtatggtgtgtatgtgaaggtgacttccatccaggactgggttcagaagaccatagctgagaactaatgcaaggctggccggaagcccttgcctgaaagcaagatttcagcctggaagagggcaaagtggacgggagtggacaggagtggatgcgataagatgtggtttgaagctgatgggtgccagccctgcattgctgagtcaatcaataaagagctttcttttgaccc

SEQ ID NO: 6002 - DNA, 7782 bp, Homo sapiens
ctccccgccagtccgggcgaacgcggccgggcccttggggaccgagtctcggcgccgccggggaacgggcgcgggccgcgccacagccggagcggggcagggccccgccaccgccttcttccgccggccccgccgccggccatgcattcttccggctcctctgactcccaaagccccggctggggcccggccagcccgagaaagacaggacggagtccagtgtgagaatggctataactttggaagaagctccgtggctgggctggctcttggtgaaagcactgatgaggtttgccttcatggtcgtcaacaacctggttgctattccatcctacatctgctatgtaattatacttcagccccttcgagtgctggacagtaagcggttctggtatatcgaaggaatcatgtataaatggcttttaggaatggtagcttcctggggatggtatgctggatatacagtgatggaatggggagaagatattaaagcagtttcaaaagatgaagcagtgatgttggtgaatcatcaggcaacaggagatgtgtgcacactgatgatgtgcctccaggacaaaggactggttgttgctcagatgatgtggttgatggatcatatttttaagtacacaaactttggaattgtttctctagttcatggagacttctttataagacagggaagatcttatcgtgaccaacagctgctgcttctcaagaagcacttagaaaataattacaggagcagagatcgaaaatggattgttttgtttccagaagggggcttcctcaggaagaggcgagaaacaagtcaggcatttgccaagaaaaataacttgccatttcttacaaatgttactctgccaaggtctggggcaacaaaaattattttgaatgcacttgtagcacaacagaaaaatggaagtccagcaggaggagatgctaaagaattagacagcaaatcaaaaggcctccagtggataatagatacaacgatagcttatcccaaagctgaacctatagatattcaaacctggatccttggatacaggaaaccaacagtcacacatgtacattacaggatctttccaattaaagatgtacccctggagactgatgaccttaccacttggctctatcagcggtttgttgaaaaagaagacctcttatcacatttttatgaaacaggagcttttccaccttccaagggccataaggaagctgtttccagggagatgaccctcagcaacttgtggatatttctcatacagtcttttgcatttttgtcaggctatatgtggtacaacatcattcagtatttttaccattgcctgttttaggaattgacgtggacttgtcaaggtcaccgtaggagttcagactttctttcataagtgtgcattattttacatgtgcaaatcagaatatatttaaaaaaaagcaaaagaaattcaatggatggattaatatttatccccctttgggatattttaaaatctactaaaatgaggattagtaatataatgacctgctaatatattttaagaacatgttttaaaaagatacactctatcacatatttaagcaaacatcacatttggagaagaggaaatcataaaatcatcctagaagactatctgagagaaattctgttgccaccagttatacttgacaatttagttgaagctcagaaagttatattcatccctcttagctgtagtctatattagggcagttctctagaacgcccacatttccaccaactcagtaaacttgaggggagctggttggcacctcgtgaagaactctttccctgtcgtttgcagtaacaaactccagtctgttgcagtaacaaactccagtctgttgcagtaacaaactctagaatattgacattctctgtgggggaaaagcagtgtccactggaccccttctggtactggatgtgttctttacaaaggctagctcagtccaacactgtgtttacatacactcgtgcttttccttatctgacttctcattttgtatcagaggcatatcataaattgataattttgcaaaatgcacttttttgagatgcagatatagcaaaggattagtaatatagcctgaaaacaaatgggagcatagcagtgtgtgaggttctcgagaactgtcttgtctctgtgtgtttatttgcctgccagtgctctccagcgccatcctgccctggacaccaccctgacgtgatgcctctattgcagctcagaggctttattttttccattttgacattggcactaaatgcatttggggatggttaaaacaaattactatagaacatttaaatgatcagtttaaggggaaataggctagtttatagaaaaataagagctagtggcttataatggtgacaggttctcatgtggcacccctaggacctgtgcagacagtagtctgttgaatcattacatcaaggagctgcccctgtcagggtgagtgtaattaggaacgataccagcacataaggctccccccaatctcttccagttgctttttcttttttcttttttttttagacaggtcttactctgtcacccaggctgtagtgcagtggcataatctcagctcactgcagtctctgcctcccgggttcgagcgattctcctgcctcagcctcccgagtagctgggactacaggcacccaccatcatgcttggctaatttttgtatttttagtagagatggggtttcaccatgttggccaggctggcctcgaactcctgacctcaggtgatctgcccacctcggcttcctaaagtgctgggattgcaggcgtgagccaccacgcccggcctccagttgcttttgaagagggtaaagtcaagtttctatttctagaaaacattttttagaaatttgttgcgatgtttgtacaatttacctcataagagaaccacacccttctccaaaagtgctggtactgcatcagtgagatgagtagggtttttgtttgggattgtaagactattaagatcctagtaagtcagtggtagtttactgtgatgtgagcattgtagattcccccgttgtcactaatcacacaacaattttgagaagtaggctataaaacaaaaaaaggttgctgttttctatttttaaataaaccaaaaaaaaacagaaaagatgtgaattttccccagttatgtgggaaaggtaaagcaacaccaaataaaagcccacagcagcttcatctttacgataactcagtgcatatgtgaaagagaatgatgcattaactgaaatacctcattgaatattatactactactggtaaaatgcagaagacagtgttaatgtgtttggtttggggactggttgttataaaatgcaatttttttttaaatctaagcatttcattatgtgttctacagtgtcggtgaataaatgaaaccaatctcaatttagaggtatggatgatgacagaaagcccaatagaagcttaatgatgcttctgtttgaggcccagcaagcaccactaaattactggatgaaatgaaattgttcacttgagggattagtcaaccatctgggggagaagttgctcactgtcaaatacagcatgcacggtcctagctgatagaccttttcctcattgctacagcaagccacagggtagagtgaccagttctcctatccaaaaataaatgcgaacatgcatacataaatgtggctgagggccacttttgccatcactgtgctccaaaggaacatgatattgttaaatatactgtacacattaaactattctataagatgctttacttttcaagtacggtgtcattttcacagtctccagggtgacaaatgccaatagatatgtgagttaatttttttaaatatctccgtgagttgtaaatagatgtgtatttgatctgccctatccttctttgattctttaacatgttctctctcttctgtttgcaaaatatgtttgaaagcattggtagtgctttccttatcagtaactggagttctcctgcttgcactagagaaggtaaagagagaatcagtattcttatatggcaatctggggaagcagcaatatgccactgtacaaaactgaagaaaagttcctaatttgtactttgtgaagggagatgaaaggacgtttaaagtatatatattttgtcaagaggaaagaagataaaactatgccagttttatatcaatagcttgtagaagctcagctcttcttggtcttggctagactgcctagattcccacagcagacaaggttgagaatccattgctggaatcttggtattgatgagttacagtgatggaacatgtgcttggccacaggcaggtccagtcactgcaaaagtgaccaagccagcaggtcacccttaacttcagaaacaattattggtggtgaactgtacttaaattgcagagaaacctgtaagtaatggaaggtaaagaaaaattacagaatggaaaataatattttgggcaagcaaacaaattcactgagaattccaaaagtatattaaaaaagaagatagctatgagttcagatctatcttattggtctttaatattacaaccaatccttaactttccactataaaggaaggattactagattgattactttctggatagataatctggtaataaatgataggtaaatcaaaaattacttttatttaggagtttgaattcttactctcatcagacattttttttctagggacgcttactaattaaatgatttaagttgtttcttaggggttttttgcctatatatttatgactgtgttaatgagtagtgaaatgatgcggaaagacagctatcaggaagaggaaatacagaagcctgaataatctatgggttagaaaagcatccctgaataatcaaaaattggcagtattggcattgttctcaagcctttttatgaaaatgaaatctgaaatcaccaaatgtaaacctgggaacattattctagtgttgctgtcttggattcatgttaagaagcgtcttcattctttgctcatgttgcccacttcttgtggatttgtctgagtgttttttgacaatcacttccttaaagactcttctgaactagttggacctggttaatcatagagagtagcctttaatcatggatagtcttcttggattatttttatatttgaaaagaaaatgttttatttgcactactgagtaggaagagttaattgttttctttgttctttttttgaagtcattacacaggacttcactccagagttaccattatgagtgtgttcagctctggtccacagaggatggataaaaatggtttgttatgtttttttgctctgcagtgctatgagccttatatctgttaatatgaaggacaaagtcaaaagcagcagtggatagcaggaagggtagagactaatatgtttgggaccaaaaccatctaagttagagatttccagatcacagaggggctgggcattctctggagcagtcattggttggtgctttattgtaatcattttgcgccaatccccaacaattaggaactggaccctgggaataagctgagggtgctgaactgttggggaagggtgactgtagccacatggaagataaaatatgggtttttctgcaaaatttccatctgagggtttttacatttaatatttttttaagacagtttaaagagcaaacgttttttaagtgtattctagttgcaaagtatgcacacatatcttgaatggctttatttttattgtgtaaaactgttgaacacatgactgtgatgcacaaattctttacgtgtaaggagtctatgcattttacagtaacttattttatgatcgggtgatgagacagttatactttcaactgccattatttttattaagtgctttcattttctttacagttattataaaattgtatttattttatacagatgggttttcattttcctgatgctgtaatgtttacttcagcttgttgacctttctttgtgttatctgcatgttgtaacgtgtgataagaatgaatgtaaaggctgtggcaactgtaattaatttttgtaaagggctggtcacacgtggatctggtttatgaatgcatttgggatgattttggtaaccagatcaccttttcagaaatttagatgtgaacaccaaaagaagcattttctcaacaaaaattaatagctggttctattttttttaaacctagaaaaaataaagttgatttttttcaattaaagtgcttttaattcttagcagtggggatggggcatgtgtgttttaccagagctatttgggcattaatatctgcaggcaagtacttaaagcacactgtggcagttggatgctgaaggcaaactgaaaaaccaaatgaaaaaacatcagacttccttctttggtttaaaaatatttccccctttctccccattctcccaatccagtggtgtgctggtaaatgtttagcagttcactcttctgggagaaaattatgtattcaactatacatgtttgttataaattttgctgatagcaagaacatataacacaattaacaaataataagatacaaatactttattgtaaatcccatatagccagttgattctcacagtatacttagttgctcaggaaagaactaaaatgcttttttaaaaggatacttaattgctttttgctcaactcctacagtcaacctatgattgattgtctttcaactgtgatttgaaaaatggcagactgtccaaatctaactcatttcccaataaatttattatcattcaatctgatacgtgatctactgttaaaactgtttcttaccatggtacatattagactcattaagccgaaaccacttttagctttaacattaattgtaaatttatatgattcaattttcataaccaatgcttaacaactgcaggcaaaattctaaaatgtgaccactgggtcttgggaatcagtaggggctgtatccagcacaccactgccccatcctttttttcttaactattagtgttgaataaacttctcatagttaatctacttgctgaactcaggaaattcctatcactgaccctggccagggctttaaagggtaggaaaagcattaatgtcagtcctacacagcgaacttttgatttagaagaatgtgacagaaagaaaacatttactgaaatacatgggaagcttgcatatttctaaagttgtctttatacttttcatttctcaaagctaagtaaactgtggtataggcatctctaagatgttagcatttaaaacatcaattgttttattgatgtttaaacaattgtttaaatcccactgaaaaatttaaatattaaaatatcttgcacagtctaccaaatgagttaaatcgttacagtcgtgtctacctcttatttttctatctgtatttaggctgctgttttggtgagattctaatttctttttcccctggaactactttctgtggaagacaaggaacagactggggacagaggcctgaaaacaaattggaagcactcagagatctattgctgaccagccctattcctcatgagttggcggggggaaagccattgtttttaatttccacttaatatgaaaatgcttgtttttaaaatgttttttcctgctgaacaaatgtatttttaaaaggaaaaaaattctcttttggctctaagaagtcagctgtatgagcaggcgtgaccatatcataacatgctgatatgatagaaatcaataaatttttacctctcagga

SEQ ID NO: 6003 - DNA, 784 bp, Homo sapiens
attgccaaaatgctttggagtttttaactgaatctaagaaaagtccaaaatagatttgagactgtaaaaacagaaactgcagcaagggggattcagtgccaatgcatcaacaaaaaagacaaccagagttagtggaaggaaatcttcctgttttcgtgttccccacggagctcatattttatgcagatgatcagtcaacacataagcaagtgttgacactgtacaatccctatgagtttgccttaaagttcaaagttttgtgtactactccaaataagtatgttgtcgttgatgctgcaggtgcagtaaagcctcagtgttgtgtggatattgtgattcgtcatcgagatgttcgatcctgtcactatggtgtaatagacaaattccgtctccaagtttccgagcaaagccaaaggaaggctttgggaagaaaagaggttgttgctactcttctcccatcagcaaaagaacaacaaaaggaagaagaggaaaaaagattaaaggaacatttaactgaaagtttattttttgagcagtcgtttcaaccaggtaaaaacagagctgtatcctcaggacctagtttactaactgtcttcctgggagtggtgtgcattgcagccctgatgctgcctacactgggggatgtggaatcgctggtgcctctctacctccacttaagtgtgaatcaaaaattagtggctgcttatatcttaggtcttatcacaatggccatacttagaacatgagcaaggatttcaattgacttctgaagtaaatctgtctt

SEQ ID NO: 6004 - DNA, 3705 bp, Homo sapiens
gctgaggccaggagggcgcactggggattggaggcgagggaagtgcagggcgcatcccaggcggcagggctcccagcatcggcagtcgccatcaccgccagaccgcagagacaggttcggatccgcggtcctcttgcctctttccaggcctcgatgagtgttaaatcgccatttaatgtgatgtcaagaaataatttggaagcacctccttgtaagatgacagagccatttaattttgagaaaaatgaaaacaagcttccaccacatgagtctttaagaagtcctggaacacttcctaaccaccctaatttcaggctgaaaagctcagagaatggaaataaaaagaacaattttttgctttgtgagcaaaccaaacaatatttggctagtcaggaagacaattcagtttcttcaaacccgaatggcatcaacggagaagtagttggctccaaaggagacaggaaaaaattgccagcaggaaactcagtgtcaccaccaagtgctgaaagtaattcaccacccaaagaagtgaatattaagcctggaaataatgtacgtcctgcaaaatcaaaaaaactaaacaagttggtcgagaattccttgtccataagtaatccagggctcttcacctccttaggacctcctcttcggtccacaacttgccatcgctgtggcctatttggatcgctgaggtgctctcagtgcaagcagacctactattgctccacagcatgtcaaagaagagactggtctgcacacagcatcgtgtgcaggcctgttcagccaaatttccacaaacttgaaaataaatcatctattgaaacaaaggatgtggaggtaaacaataagagtgactgtccacttggagttactaaggaaatagccatttgggctgagagaataatgttttctgatttgagaagtctacaactcaagaaaaccatggaaataaagggtacggttaccgaattcaaacacccaggggacttctacgtgcagttatattcttcagaagttttagaatacatgaaccaactctctgccagcttaaaagaaacatatgcaaatgtgcatgaaaaagactatattcctgttaagggggaagtttgtattgccaagtacactgttgatcagacctggaacagagcaatcatacaaaacgttgatgtgcagcaaaagaaggcacatgtcttatatattgattatggaaatgaagaaataattccattaaacagaatttaccacctcaacaggaacattgacttgtttcctccttgtgccataaagtgctttgtagccaatgttatcccagcagaagggaattggagcagtgattgtatcaaagctactaaaccactgttaatggagcagtactgctccataaagattgtcgacatcttggaagaggaagtggttacctttgctgtagaagttgagctgccaaattcaggaaaacttttagaccatgtgcttatagaaatgggatatggcttgaaacccagtggacaagattctaagaaggaaaatgcagatcaaagtgatcctgaagatgttggaaaaatgacaactgaaaacaacattgtcgtagacaaaagtgacctaatcccaaaagtgttaactttgaatgtaggtgatgagttttgtggtgtggttgcccacattcaaacaccagaagacttcttttgtcaacaactgcaaagtggccgaaagcttgctgaacttcaggcatcccttagcaagtactgtgatcagttgcctccacgctctgatttttatccagccattggtgatatatgttgtgctcagttctcagaggatgatcagtggtaccgtgcctctgttttggcttacgcttctgaagaatctgtactggtcggatatgtagattatggaaactttgaaatccttagtttgatgagactttgtcccataatcccaaagttgttggaattgccaatgcaagctataaagtgtgtactagcaggagtaaagccatcattaggaatttggactccagaagctatttgtctcatgaaaaaacttgtacagaacaaaataatcacagtgaaagtggtggacaagttggaaaacagttccctggtggagcttattgataaatccgagacgcctcatgtcagtgttagcaaagttctcctagatgcaggctttgctgtgggagaacagagtatggtgacagataaacccagtgacgtgaaagaaaccagtgttcccttgggtgtggaaggaaaagtaaatccattggagtggacatgggttgaacttggtgttgaccaaacagtagatgttgtggtctgtgtgatatatagtcctggagaattttattgccatgtgcttaaagaggatgctttaaagaaactcaatgatttgaacaagtcattagcagaacactgccagcagaagttacctaatggtttcaaggcagagataggacaaccttgttgtgctttttttgcaggtgatggtagttggtatcgtgctttagtcaaggaaatcttaccaaatggacatgttaaagtacattttgtggattatggaaacatcgaagaagttactgcagatgaactccgaatgatatcatcaacatttttaaaccttccctttcagggaatacggtgccagttagcagatatacagtctagaaacaaacattggtctgaagaagccataacaagattccagatgtgtgttgctgggataaaattgcaagccagagtggttgaagtcactgaaaatgggataggagttgaactcaccgatctctccacttgttatcccagaataattagtgatgttctgattgatgaacatctggttttaaaatctgcttcaccacataaagacttaccaaatgacagacttgttaataaacatgagcttcaagttcatgtacagggacttcaagctacctcttcagctgagcaatggaagacgatagaattgccagtggataaaactatacaagcaaatgtattagaaatcataagcccaaacttgttttatgctctaccaaaagggatgccagaaaatcaggaaaagctgtgcatgttgacagctgaattattagaatactgcaatgctccgaaaagtcgaccaccctatagaccaagaattggagacgcatgctgtgccaaatacacaagtgatgatttttggtatcgtgcagttgttctggggacatcagacactgatgtggaagtgctctatgcagactatggaaacattgaaaccctgcctctttgcagagtgcaaccaatcacctctagccacctggcgcttcctttccaaattattagatgttcacttgaagaaaagatgtataggatgaattgctgctgcacagagttacagaaacaagttgaaaaacatgaacatattcttctcttcctcttaaacaattcaaccaatcaaaataaatttattgaaatgaaaaaactgttaaaaaaaacagcatctcttggaggtaaacccttatgagacaggaaacagcaaaggctagctttaggagagaaagtacagcacctggtgtttttatttatgagaaccttttctttgtccactttctctgtaatgaccttctatccctccgtttttgcctgcctgccattctcctattaggttggtggtttttattttcctctaagttccttccaccaaataaatattacgtaaaaaattcataccaaa

SEQ ID NO: 6005 - DNA, 2188 bp, Homo sapiens
agaggcaggtgagcgcgatgcagccggcgccgggtctggggctcggggactcctccctgcaccgctacctggacggcgacttctggagcctcaagaacgagctgcgcggactcctcggcggcgcccgctcttccggcaaaggtatgatttaagcttggatgaaatgagagctttgacagttcagagagtgaagtttgccatggacctgcctctgttaaaacgtgcaggtcaggatctggcagagaaaacaaagaattttgtcagccgaagccttgtcataggagaagtcctctccatggcggacatggccacaggagtgaagtgcggaataatttattggctatttggtggtgctatcaggaatctcggaagccctgaacatgttactaagtggtttcagccactccaggagcagaaatacactgggatgtttgcaatgaccgagaggggccatgggagcaacgcgagagggatccagaccgaagccacctttgacctctctgcccaggagtttgtaattgacacgccgtgtgaaaatgcggagaagatgtatattggaaatgccatgtacgggaattatgcagctgtctttgcccagctcatcatagatggaagatctcaagggccccactgtttcatcgttcctgtccgggatgaaaacggaagcttgtacccaggagtcacagctattgatatgatgtacaaggagggtctgcatggtgtggacaatgggatattaatatttgacaaggttcggatacccagggagaacctgctggataagtttggttccgtggctccagatggacagtaccattcgcctattaggaacaagagtgcaagattcaatgccatgctggcagcactgaccccttcgagattagctgtggctttccaagctatgggtgccatgaagcttgggttgacgatagccattcgctatagccacaggtccagaatcatctcccagaactgctgttcagctccagctggtctttattgagcccctcttgtggaccaggctaatttcctgaaaactggtttttgctaacgtttcttacgcttgctcgtgaaatcagccacttaactgttctgggttttcccgtggcagatccctataggcttctcactgcactatcccaaactttttatctgagaatgttgtgtggcaagatgtctgcagagtgccgcttaggagatgctggcctggcgtccacgggtctgctgtgtatgtctctccaggcagatggcctgtctctgcctggcaaggacgatctggggtggaaaaactctgatctgaaagtgaaatcattgactccgttaccatgttctgaattcccagatctccctgatatggaaagtgaaaattggcttctattacacaatgcatcaaaattcttttgtataggaccagaccactgatatcaagggcagtgcactgactttcagttcctctgcatcccttggtcatgttcccacctttcaatgggaacagagaataaaaattccagctctagggcccagcctagtggccacctctcacggacaggcacccggctgctcagtgttatccaattactagaggccattcctagcatttcaacttggggaattaatttactattactttatttttatctttagagacagagtcttgctctgtcacccagactagagtgtagtggcatgatcatagctcactgcagccttgaactcctgagctcaggcaatcctcctgccacagccacctgagtagctggaactataggcatgtgccatcatgcccaactaattttatttttatttcagttgtagagatggagccttaccctgttgcccaggctggtctctgactcctggtctctagtgatcctcctgccttggcctcccaaagtgctaggattataggtgtgagccaacatgctgtccccattattgactgttaccctaaagtgtgtgttgcctttctagtttgagtagaaagtccagcattatctttttggataatatccaggttttgctgtttctttctttatttttcataatgagaacatttgctctcttgctgacattggagggcgtctgtttacctctcctgtaggcacacaaaattcccaacgtttatttgaagaaaaagacaattatttgagtaatttgaataaataaacattttaagtgattcccaaaa

SEQ ID NO: 6006 - DNA, 700 bp, Homo sapiens
acaatcacagctccgggcattgggggaacccgagccggctgcgccgggggaatccgtgcgggcgccttccgtcccggtcccatcctcgccgcgctccagcacctctgaagttttgcagcgcccagaaaggaggcgaggaaggagggagtgtgtgagaggagggagcaaaaagctcaccctaaaacatttatttcaaggagaaaagaaaaagggggggcgcaaaaatggctggggcaattatagaaaacatgagcaccaagaagctgtgcattgttggtgggattctgctcgtgttccaaatcatcgcctttctggtgggaggcttgattgctccagggcccacaacggcagtgtcctacatgtcggtgaaatgtgtggatgcccgtaagaaccatcacaagacaaaatggttcgtgccttggggacccaatcattgtgacaagatccgagacattgaagaggcaattccaagggaaattgaagccaatgacatcgtgttttctgttcacattcccctcccccacatggagatgagtccttggttccaattcatgctgtttatcctgcagctggacattgccttcaagctaaacaaccaaatcagttaagtgtactctcctctcatccctttcttccctttgagcattgccctctttgggttctttttgagccaattctaataaaagtaaaaatggtaata

SEQ ID NO: 6007 - DNA, 907 bp, Homo sapiens
ctctctggctgctccggcatatttgagaaggtctgtttccctggtccttctgggtttccaccaattggcaagaagggatcagcctgtcctagagatcactcctctgccaaagatcccaacaagacaacatggctcccaagaagcctgagcctaagaaggaggcagccaagccagctccagctccagctccagcccctgcaccagcccctgccccagctcctgaggctcccaaggaacctgcctttgaccccaagagtgtaaagatagacttcactgccgaccagattgaagagttcaaagaggccttttcattgtttgaccggaccccgactggagagatgaagatcacctacggccagtgcggggatgtactgcgggccctgggccagaaccctaccaatgccgaggtgctgcgtgtgctgggcaagcccaagcctgaagagatgaatgtcaagatgctggactttgagacgttcttgcccatcctgcagcacatttcccgcaacaaggagcagggcacctatgaggacttcgtggagggcctgcgtgtctttgacaaggagagcaatggcacggtcatgggtgctgagcttcggcacgtccttgccaccctgggagagaagatgactgaggctgaagtggagcagctgttagctgggcaagaggatgccaatggctgcatcaattatgaagcctttgtcaagcacatcatgtcagggtgaagcagagtcttccaggtgcctggcccttggctttagccataccagggtgagttaaagagaggccccggctgggtgagctgagatggagtcctcgacttatcaccacaccactgccccaaggaccttacaggccctccctgttaataaacagctctaacacggccaggctgggctctgggattctg

SEQ ID NO: 6008 - DNA, 6923 bp, Homo sapiens
atggccccaattctgagcattaatttatttattgggtatgagctacagttccgattaggcccaactttacagggaaaagcagttaccgtgtatacaaattacccatttcctggagaaacatttaatagagaaaaattccgttctctggattgggaaaatccaacagaaagagaagatgattctgataaatactgtaaacttaatctgcaacaatctggttcatttcagtattatttccttcaaggaaatgagaaaagtggtggaggttacatagttgtggaccccattttacgtgttggtgctgataatcatgtgctacccttggactgtgttactcttcagacatttttagctaagtgtttgggaccttttgatgaatgggaaagcagacttagggttgcaaaagaatcaggctacaacatgattcattttaccccattgcagactcttggactatctaggtcatgctactcccttgccaatcagttagaattaaatcctgacttttcaagacctaatagaaagtatacctggaatgatgttggacagctagtggaaaaattaaaaaaggaatggaatgttatttgtattactgatgttgtctacaatcatactgctgctaatagtaaatggatccaggaacatccagaatgtgcctataatcttgtgaattctccacacttaaaacctgcctgggtcttagacagagcactttggcgtttctcctgtgatgttgcagaagggaaatacaaagaaaagggaatacctgctttgattgaaaatgatcaccatatgaattccatccgaaaaataatttgggaggatatttttccaaagcttaaactctgggaatttttccaagtagatgtcaacaaagcggttgagcaatttagaagacttcttacacaagaaaataggcgagtaaccaagtctgatccaaaccaacaccttacgattattcaagatcctgaatacagacggtttggctgtactgtagatatgaacattgcactaacgactttcataccacatgacaaggggccagcagcaattgaagaatgctgtaattggtttcataaaagaatggaggaattaaattcagagaagcatcgactcattaactatcatcaggaacaggcagttaattgccttttgggaaatgtgttttatgaacgactggctggccatggtccaaaactaggacctgtcactagaaagcatcctttagttaccaggtattttactttcccatttgaagagatagacttctccatggaagaatctatgattcatctgccaaataaagcttgttttctgatggcacacaatggatgggtaatgggagatgatcctcttcgaaactttgctgaaccgggttcagaagtttacctaaggagagaacttatttgctggggagacagtgttaaattacgctatgggaataaaccagaggactgtccttatctctgggcacacatgaaaaaatacactgaaataactgcaacttatttccagggagtacgtcttgataactgccactcaacacctcttcacgtagctgagtacatgttggatgctgctaggaatttgcaacccaatttatatgtagtagctgaactgttcacaggaagtgaagatctggacaatgtctttgttactagactgggcattagttccttaataagagaggcaatgagtgcatataatagtcatgaagagggcagattagtttaccgatatggaggagaacctgttggatcctttgttcagccctgtttgaggcctttaatgccagctattgcacatgccctgtttatggatattacgcatgataatgagtgtcctattgtgcatagatcagcgtatgatgctcttccaagtactacaattgtttctatggcatgttgtgctagtggaagtacaagaggctatgatgaattagtgcctcatcagatttcagtggtttctgaagaacggttttacactaagtggaatcctgaagcattgccttcaaacacaggtgaagttaatttccaaagcggcattattgcagccaggtgtgctatcagtaaacttcatcaggagcttggagccaagggttttattcaggtgtatgtggatcaagttgatgaagacatagtggcagtaacaagacactcacctagcatccatcagtctgttgtggctgtatctagaactgctttcaggaatcccaagacttcattttacagcaaggaagtgcctcaaatgtgcatccctggcaaaattgaagaagtagttcttgaagctagaactattgagagaaacacgaaaccttataggaaggatgagaattcaatcaatggaacaccagatatcacagtagaaattagagaacatattcagcttaatgaaagtaaaattgttaaacaagctggagttgccacaaaagggcccaatgaatatattcaagaaatagaatttgaaaacttgtctccaggaagtgttattatattcagagttagtcttgatccacatgcacaagtcgctgttggaattcttcgaaatcatctgacacaattcagtcctcactttaaatctggcagcctagctgttgacaatgcagatcctatattaaaaattccttttgcttctcttgcctccagattaactttggctgagctaaatcagatcctttaccgatgtgaatcagaagaaaaggaagatggtggagggtgctatgacataccaaactggtcagcccttaaatatgcaggtcttcaaggtttaatgtctgtattggcagaaataagaccaaagaatgacttggggcatcctttttgtaataatttgagatctggagattggatgattgactatgtcagtaaccggcttatttcacgatcaggaactattgctgaagttggtaaatggttgcaggctatgttcttctacctgaagcagatcccacgttaccttatcccatgttactttgatgctatattaattggtgcatataccactcttctggatacagcatggaagcagatgtcaagctttgttcagaatggttcaacctttgtgaaacacctttcattgggttcagttcaactgtgtggagtaggaaaattcccttccctgccaattctttcacctgccctaatggatgtaccttataggttaaatgagatcacaaaagaaaaggagcaatgttgtgtttctctagctgcaggcttacctcatttttcttctggtattttccgctgctggggaagggatacttttattgcacttagaggtatactgctgattactggacgctatgtagaagccaggaatattattttagcatttgcgggtaccctgaggcatggtctcattcctaatctactgggtgaaggaatttatgccagatacaattgtcgggatgctgtgtggtggtggctgcagtgtatccaggattactgtaaaatggttccaaatggtctagacattctcaagtgcccagtttccagaatgtatcctacagatgattctgctcctttgcctgctggcacactggatcagccattgtttgaagtcatacaggaagcaatgcaaaaacacatgcagggcatacagttccgagaaaggaatgctggtccccagatagatcgaaacatgaaggacgaaggttttaatataactgcaggagttgatgaagaaacaggatttgtttatggaggaaatcgtttcaattgtggcacatggatggataaaatgggagaaagtgacagagctagaaacagaggaatcccagccacaccaagagatgggtctgctgtggaaattgtgggcctgagtaaatctgctgttcgctggttgctggaattatccaaaaaaaatattttcccttatcatgaagtcacagtaaaaagacatggaaaggctataaaggtctcatatgatgagtggaacagaaaaatacaagacaactttgaaaagctatttcatgtttccgaagacccttcagatttaaatgaaaagcatccaaatctggttcacaaacgtggcatatacaaagatagttatggagcttcaagtccttggtgtgactatcagctcaggcctaattttaccatagcaatggttgtggcccctgagctctttactacagaaaaagcatggaaagctttggagattgcagaaaaaaaattgcttggtccccttggcatgaaaactttagatccagatgatatggtttactgtggaatttatgacaatgcattagacaatgacaactacaatcttgctaaaggtttcaattatcaccaaggacctgagtggctgtggcctattgggtattttcttcgtgcaaaattatatttttccagattgatgggcccggagactactgcaaagactatagttttggttaaaaatgttctttcccgacattatgttcatcttgagagatccccttggaaaggacttccagaactgaccaatgagaatgcccagtactgtcctttcagctgtgaaacacaagcctggtcaattgctactattcttgagacactttatgatttatagtttattacagatattaagtatgcaattacttgtattataggatgcaaggtcatcatatgtaaatgccttatatgcacaggctcaagttgttttaaaaatctcatttattataatattgatgctcaattaggtaagattgtaaaagcattgattttttttaatgtacagaggtagatttcaatttgaatcagaaagaaatatcattaccaatgaaatgtgtttgagttcagtaagaattattcaaatgcctagaaatccatagtttggaaaagaaaaatcatgtcatcttctatttgtacagaaatgaaaataaaatatgaaaataatgaaagaaatgaaaagatagcttttaattgtggtatatataatcttcagtaacaatacatactgaatacgctgtggttcattaatattaacaccacgtactatagtattcttaatacagtgctcactgcatttaataaatatttaataaatgatgaatgatagaagtttccatctacaatatatgttcctaaatggagcacagatgttcaaactatgctttcattttttcactgatatattaatttttgtgtaatgaatgccaacagtatattttatatgatttacttatgtgaggaaacatgcaaagcattaggaaatttatttcctaaaaacagttttgtaaaattagtattgagttctattgagtattataagatagcttacattttcaaaatggaaattgtcggtcatatttctagaactttaaagaaaaaagaatgttatattagttttctaaaactcaactatctttagtcatgttcaaaaatctattgctagatcatagtagatactggttttctattaactcaaaacctacattgacaagtttaacattgagaagaatcttaacaaaaatatggatatgaattcagtagatatcttaaattcaataaaatcactggaagtttttcatgataacttattttaagatgccttaaaaatcttaaagtcacaaaaggaaaaaggtttttaacatttacatgagttaacattttttcatagaacttatttcctagatagaattttttactgttttttactgttttcttaagaaaacagttaaatcattatgcattcagttggaagaaagtagtggcaagaattctttcattgctatataatattcagtggctcatttatacctaataaaataatggtattttaaaataatgctactttcaaagtagcatttttttagttagtttacaggttacatacccaaaaccttaactatgactaagaaattaaagaagaaaaccagcaaactaaaacttctgggcagcaaaaatatataaatgcttcagatgtcaaatacccatgcttgaaagctcgtgtaatttactttaagattatctgcctgctcttcttcaaagctgaccttgctttagaaatagttttaactagcttagttttctggtttccaaaactaaaatagattaaatcctacaaatttaaggacagttgtgacagtaatctgaccactatctataaatacattggacattggtttccaaatctccctttcttcttcagttccttccttgttcaatatatacccttctctaaactgtgcgggtaaaaggaatgactgtccttgagagaaccattagtttatcaaaggtttatgtagttttgttgctgtaccctaactttgatattcagggaggtaggaaaggtaacagaaaaccagcatatttaatcaaagcaagaagtaatcgctgacagttaaatgtgaccaaaaaaattaaaagttcacaatttttttaatgtagccatttggggttatctctagtaaggcagatacccacgttggtaaatttttaggatattgtgttgcactagaaaactaagtggttcatatttctaatgaggaagattaatgaaagaacattgttatattctgcgtggtatattttaaagtttaagaaggcatgttaaacattatttcctctatggtagttaaaatacagaattagatttttaacaggtgtcatttgactaaacgtttcggtagaatgcttcatacttgagtgatgctggataaggtattgtatttcaacaatggactatgccttggtttttcactaatcaaaatcaaaattactctttaacatgataaatgaatttaccagtttagtatgctgtggtattttaataagttttcaaagataattgggaaaacatgagactggtcatattgatgaatattgtaacatgtgaattgtgatccatttctgatatgtcttgaactactgtgtctagtgggcaaatgtcattgttacctctgtgtgttaagaaaataaaaatattttctaaaggtctgt

SEQ ID NO: 6009 - DNA, 5886 bp, Homo sapiens
caccgagcaccagcttctccgacgccgggaagccgctgtcgccgccgctacctctccctgttgccgccgcctcagatctcttcatgccgctgtaagctcggaggccaaggatgcggagtaggcttcccccagcgcttgccgccctgggcgcggccctgctcctgtcttccattgaggcagaagggatggagtgtctcaccagagctgaggcagacattgtgttgctggtggatggatcatggagcatcggccgggcaaattttagaaccgtgaggagtttcatttctcgtattgtggaagtctttgacattggccccaaaagagtacaaattgctcttgctcagtatagtggggatcccagaacagagtggcagttaaatgcacacagagacaagaagagcttgttgcaagctgtggcaaacttgccgtacaaaggaggcaatactctcacaggcatggctttgaatttcattcgccaacagaacttcaggacccaagctggcatgagacctcgagctcgaaaaattggtgtgctcattactgatggaaaatcacaagacgatgttgaagcaccttcaaagaaactcaaggatgagggagtggagctgtttgctattggtattaaaaatgctgatgaagtcgaattaaagatgattgcaactgatcctgatgatacccatgcatacaatgtggcagattttgagtcactctccaggatagtggatgatctcaccattaatttgtgtaacagtgtcaaaggtccaggtgatttggaagcaccttctaacttagttatttctgagcgaacccatcgttcttttagagtgagctggacaccaccttctgacagtgtggatcgatataaggtggaatactatccagtttctggagggaaacgtcaagaattttatgtgagtcgaatggaaactagcacagtgctgaaagatctgaaacctgaaactgaatatgttgtcaatgtgtattctgtggtagaagatgaatatagtgagcctctgaaggggacagaaaaaaccttgccagtgcctgtagtcagcctgaatatttatgatgttggccctaccaccatgcatgtgcagtggcagcctgtgggaggagctactggctacatcttgtcatacaaacctgttaaggacacagagccaacaagacccaaagaggtgcgtttggggccaacagtgaatgacatgcagctgactgaccttgttcccaacacggagtatgcagtcacagtccaggctgtcctgcacgacctcactagtgaacctgtcactgttcgggaagtcaccttgcctttacccagacctcaggatctgaaactcagagatgtgactcacagcactatgaatgtcttttgggaacctgtgcctggaaaagtgcgtaaatatattgttcgatacaaaacaccagaagaggatgtcaaagaggtagaggtggacagatcagagaccagcacttccctcaaagacctcttctcacagaccttgtacacagtcagcgtttctgcagtacatgacgagggggagtctcctccagtgactgctcaagaaactacccgacccgtgccagccccaacaaacttaaagattactgaagtaacatcagagggtttcagagggacttgggatcatggagcttcagatgtgtctctctacagaataacttgggcaccttttggaagctcagataagatggagaccatcttaaatggagatgaaaacactttggtgttcgaaaacctgaaccccaacaccatctatgaagtttccattactgccatctatcctgatgagtcagaaagtgatgacctgattggcagtgagcgcacactgcctatcttaacaacacaagctcccaaaagtggcccacgaaaccttcaagtgtacaatgcaacatctaacagcctgactgttaagtgggatcctgctagtggtcgtgtgcagaaatataggatcacttatcagccttccacaggggaaggcaatgagcaaacgaccacaataggaggacggcagaacagtgtggtcctgcagaaactgaagccagacactccttacactatcaccgtatcctctctgtatcctgatggtgaaggaggtcggatgacgggaagaggcaagaccaaacctctaaacactgtaaggaacctgagagtgtatgacccttctaccagcaccttgaatgtccgctgggaccatgcagagggaaatcctcgtcagtacaagctcttctatgcaccagcagcaggtggtccagaggaactggtaccaatccccgggaataccaattatgccattcttaggaatctgcagccagatacctcatacactgtgactgtagttcccgtttatactgaaggtgatgggggacgcacatcagatactggaaggacattgatgagaggactggcaagaaatgtccaagtatacaatcctacacctaacagcctcgatgttcgctgggaccctgctccaggacctgtgctgcaatatcgcgttgtgtattctcctgtggatggcacaagaccctcagaatctatagtagtgccaggaaacacgcgcatggtgcatctggagcggctgattccggacacactctattccgtgaaccttgtggctctgtactcggatggagagggaaatcccagccctgcccagggccgaacgctaccacgcagtggaccaaggaacctgagagtctttggtgaaacaaccaatagcctctcggtagcctgggatcatgctgatgggccagttcagcagtacaggatcatctattctcccactgttggtgatccaattgatgaatataccacagtcccaggcagaagaaacaatgtaatactgcagcccctgcaacctgacactccatataaaattactgttattgctgtttatgaagatggagatggtggccatctaacaggaaatggaagaactgtgggactccttcctcctcagaacatacacatctctgacgaatggtatacaagattcagggtgtcctgggatccttcaccttctccagttcttggatataaaatagtatataagccagtgggttccaatgagcccatggaagcctttgttggagaaatgacatcatataccttacacaatctcaatcccagcaccacctacgatgtgaatgtttatgctcaatatgattctggactcagtgtccccttgacagatcaaggcactacattatatttaaatgtaacagatctgaaaacttaccagattgggtgggatacattctgtgtcaaatggtcacctcaccgggcagccacctcctacaggctaaaactaagccctgcagatggaacaaggggacaagaaattacagtgcgtggatcagaaaccagtcactgcttcactggcctttcaccagacactgattatggtgtcactgtttttgtgcagacaccaaatctcgagggaccaggagtctctgttaaagaacataccactgtgaaaccaacagaagcccctacagagccacccacacctcctccccctcccaccattccaccagcccgggatgtatgcaaaggggccaaggcagatattgtgttcttgactgatgcctcctggagcattggggacgataattttaacaaagttgtaaaattcatcttcaatactgtgggaggctttgatgaaatcagtcctgctgggattcaggtttcatttgtgcaatacagcgatgaggtcaagtctgagttcaagctgaacacgtacaatgacaaggccctagcccttggggccctccagaatattaggtacagaggaggaaacacaagaacaggcaaggccctcacgtttatcaaggagaaagtcttgacttgggagagcggcatgaggaagaatgtccctaaggtgttggttgtggtcacggacggtcggtcccaggatgaggtcaagaaggcggctttggtcatccagcagtcagggttcagtgtctttgtagttggtgtggctgatgtcgactacaatgagcttgccaacattgccagcaaaccaagtgaacggcacgtgttcattgtggacgactttgaatcttttgagaagatcgaagacaatcttattacatttgtttgtgaaactgccacttcaagttgtcctctcatttatttggatggctacacctcaccaggttttaaaatgcttgaagcatacaacctgacagaaaagaattttgcttctgtacaaggagtatctttggagtcagggtctttccccagctactcagcatacaggattcagaagaatgcgtttgtgaatcagcctacagcagacctacacccaaatggactccctccttcatacacgattatattattattcagacttctcccagaaactcccagtgacccttttgcaatttggcaaatcacagacagagactacaaaccacaagttggagtgattgcagatccttctagcaagacgttatcattctttaacaaggatacaagaggcgaggtgcaaactgttacatttgacacagaagaagtaaagacattattttatggaagttttcacaaggttcatattgtagtgacctcaaaaagtgttaagatttacattgactgctatgaaattatagaaaaagacatcaaggaagctggaaatataacaactgatggttatgaaattcttggaaaactccttaaaggggaaaggaaatcagccgcattccaaatccagagttttgacattgtctgcagtccagtgtggaccagtagagacagatgctgtgatattccctctaggagagatgagggaaaatgccctgcttttccaaattcttgcacatgtacacaggacagcgttggacctccaggacctccaggccctgcaggaggacctggtgctaaaggtcccagaggtgaaagaggtatcagtggggcaattgggccccctggtcctcgtggagacataggtcctccaggcccccagggtcctccaggccctcagggacccaatggactctctattccgggagagcaaggtcgccaagggatgaaaggtgatgctggagagccaggacttccaggccgaacaggaaccccaggattacctggcccaccaggaccaatgggacctccaggagacagaggcttcactggaaaagacggtgcaatgggacccaggggcccaccagggccgccgggaagcccaggctccccaggagtcacaggaccaagtgggaagccaggaaaacctggagatcatggcagaccaggtccatctgggttgaaaggagaaaaaggtgataggggagacattgcttcccagaacatgatgcgagcagttgcaagacaagtctgtgaacaattgataagtggtcagatgaacagattcaatcagatgctgaatcagattccaaatgattaccagtccagtcgcaaccagccaggcccgccgggtccaccgggacctcctggtagcgcaggagccagaggagaacctgggcctggggggcggccaggcttcccgggcacaccagggatgcagggaccccctggggaacgaggtttgccaggagagaaaggtgaaaggggtactggatcttcaggacctcgggggctgcctggccccccaggtccacaaggagaatccagaacaggtccaccagggtccacaggttcaagaggtccccctggcccccctggccgtcctggaaactcaggtatccgaggacccccaggtcctcctggatactgtgattcttctcagtgtgccagcatcccatacaacgggcaaggctatccaggttccggctaacacattttctaagtcgccagtgctgcttacagtttgaatacatgaaaatcctgtttctgagatgtttgcgcacgtg

SEQ ID NO: 6010 - DNA, 1212 bp, Homo sapiens
gcggatggtagggatgccgaccctaccgagaagcaggtggcagaaacagagagaaacgatgaggagcagttcgaatgccaggaacggctcaagtgccaggtgcaggtgggggcccccgaggaggaggaggaggaggaggacgcgggcctggtggccgaggccgaggccgtggctgccggctggatgctcgatttcctctgcctctctctttgccgagctttccgcgacgaccgctccaaggacttctgcaggacccgcaacagcgcagaggctactattcatggactatccagtctaacagcttaccagttgagaatgatatacgtatgtcagtttttgacaagaattgcagcaggaaaaacccttgatgcacagtttgaaaatgatgaacgaattacacccttggaatcagccctgatgatttggggttcaattgaaaaggaacatgacaaagttcaagaagaaatacagaatttaattaaaattcaggctatagctgtttgtatggaaaatggcaactttaaagaagcagaagaagtctttgaaagaatatttggtgatccaaattcttacatgcctctcaaaagcaaattgcttgtgataatctctcagaaagatacatttcattccttttttcaacacttcagctacaaccacatgatggagaaaattaagagttatgtgaattatgtgctaagtgaaaaatcatcaacctttctaatgaaggtagcagcaaaagtagtagaaagtaaaagaacaagaacaataacttctcaagataaacctaatggtaattatgttgaaatggaaactgaagctaatttggatacaagaaaaaggtctcacaagaatcttttcttatctaagttgcaacatggaacccagcaacaagaccttaataagaaagaaagaagagtaggaactcctcaaagtacaagaaagaaaaaagaaagcagaagagccactgaaagcagaataactgtttcaaagaggcaaccggtaactcctgaaaaacatcgagctagaaaaagacagtcatggctttgggaagaagacaggaatttgagatctggcgtgaggaaatatggagagggaaactggtctaaaatactactgcattataaattcaacaaccggacaagtgtcatgttaaaagacagatggaggaccatgaagaaactaaaactgatttgctcagacagcgaagactga

SEQ ID NO: 6011 - DNA, 1720 bp, Homo sapiens
aaactttcctttggctctggacgcgtcgcaggggtcgctggagaggaggcgctccgcccgcccgccgcgtcctccgctgcttctccgcgcccggctggagcccggcgcccggtcgccccgtcgcgctcgaccccgagggcatgcggcagccgcaggggcccccgctcccgggctcggcggcgcgggtgaacgtgagcggatgttcacttctccacaatgaatgagtgtcactatgacaagcacatggactttttttataataggagcaacactgatactgtcgatgactggacaggaacaaagcttgtgattgttttgtgtgttgggacgtttttctgcctgtttatttttttttctaattctctggtcatcgcggcagtgatcaaaaacagaaaatttcatttccccttctactacctgttggctaatttagctgctgccgatttcttcgctggaattgcctatgtattcctgatgtttaacacaggcccagtttcaaaaactttgactgtcaaccgctggtttctccgtcaggggcttctggacagtagcttgactgcttccctcaccaacttgctggttatcgccgtggagaggcacatgtcaatcatgaggatgcgggtccatagcaacctgaccaaaaagagggtgacactgctcattttgcttgtctgggccatcgccatttttatgggggcggtccccacactgggctggaattgcctctgcaacatctctgcctgctcttccctggcccccatttacagcaggagttaccttgttttctggacagtgtccaacctcatggccttcctcatcatggttgtggtgtacctgcggatctacgtgtacgtcaagaggaaaaccaacgtcttgtctccgcatacaagtgggtccatcagccgccggaggacacccatgaagctaatgaagacggtgatgactgtcttaggggcgtttgtggtatgctggaccccgggcctggtggttctgctcctcgacggcctgaactgcaggcagtgtggcgtgcagcatgtgaaaaggtggttcctgctgctggcgctgctcaactccgtcgtgaaccccatcatctactcctacaaggacgaggacatgtatggcaccatgaagaagatgatctgctgcttctctcaggagaacccagagaggcgtccctctcgcatcccctccacagtcctcagcaggagtgacacaggcagccagtacatagaggatagtattagccaaggtgcagtctgcaataaaagcacttcctaaactctggatgcctctcggcccacccaggcctcctctgggaaaagagctgttaagaatgattacctgtctctaacaaagcccatgtacagtgttatttgaggtctccattaatcactgctagatttctttaaaaaattttttttcatagtttaaaagcatgggcagtaaagagaggacctgctgcatttagagaaagcacagaaacgggagaggttcggcgggtccctgcttgtcctatgaactgctcagagctcctgtcagtccagctgggccttctgggttctggcaccatttcgtagccattctctttgtattttaaaaggacgttatgaaagggcttagaccaaaataaatcataatgttacttgagccaccttatatagctgcttggagagtctatgtagttctttctgcatgcattaaaaatgtttagaaatgcttc

SEQ ID NO: 6012 - DNA, 4261 bp, Homo sapiens; identical to SEQ ID NO: 1988

SEQ ID NO: 6013 - DNA, 4803 bp, Homo sapiens
gcgcccagcctcgccgccgccgagcgcccgacgcgccacgccgcgctgggcagctggagagctggcggcggagcgggccgggagcggcgggggcggcgccgaggccgcgggcggggggaggagggccgcagccccggagaggggaaaaggcgggccggacggcgccagcagccagccccgaggacgcgagcggcaggtgtgcacagaggttctccactttgttttctgaactcgcggtcaggatggttttctctgtcaggcagtgtggccatgttggcagaactgaagaagttttactgacgttcaagatattccttgtcatcatttgtcttcatgtcgttctggtaacatccctggaagaagatactgataattccagtttgtcaccaccacctgatgaggaaactggggcttgttcagatgttactttaagcttactcccttcaaacgaaacagaaaaaactaaaatcactatagtaaaaaccttcaatgcatcaggcgtcaaaccccagagaaatatctgcaatttgtcatctatttgcaatgactcagcattttttagaggtgagatcatgtttcaatatgataaagaaagcactgttccccagaatcaacatataacgaatggcaccttaactggagtcctgtctctaagtgaattaaaacgctcagagctcaacaaaaccctgcaaaccctaagtgagacttactttataatgtgtgctacagcagaggcccaaagcacattaaattgtacattcacaataaaactgaataatacaatgaatgcatgtgctgtaatagctgctttggaaagagtaaagattcgaccaatggaacactgctgctgttctgtcaggataccctgcccttcctccccagaagagttggaaaagcttcagtgtgacctgcaggatcccattgtctgtcttgctgaccatccacgtggcccaccattttcttccagccaatccatcccagtggtgcctcgggccactgtgctttcccaggtccccaaagctacctcttttgctgagcctccagattattcacctgtgacccacaatgttccctctccaataggggagattcaacccctttcaccccagccttcagctcccatagcttccagccctgccattgacatgcccccacagtctgaaacgatctcttcccctatgccccaaacccatgtctccggcaccccacctcctgtgaaagcctcattttcctctcccaccgtgtctgcccctgcgaatgtcaacactaccagcgcacctcctgtccagacagacatcgtcaacaccagcagtatttctgatcttgagaaccaagtgttgcagatggagaaggctctgtccttgggcagcctggagcctaacctcgcaggagaaatgatcaaccaagtcagcagactccttcattccccgcctgacatgctggcccctctggctcaaagattgctgaaagtagtggatgacattggcctacagctgaacttttcaaacacgactataagtctaacctccccttctttggctctggctgtgatcagagtgaatgccagtagtttcaacacaactacctttgtggcccaagaccctgcaaatcttcaggtttctctggaaacccaagctcctgagaacagtattggcacaattactcttccttcatcgctgatgaataatttaccagctcatgacatggagctagcttccagggttcagttcaatttttttgaaacacctgctttgtttcaggatccttccctggagaacctctctctgatcagctacgtcatatcatcgagtgttgcaaacctgaccgtcaggaacttgacaagaaacgtgacagtcacattaaagcacatcaacccgagccaggatgagttaacagtgagatgtgtattttgggacttgggcagaaatggtggcagaggaggctggtcagacaatggctgctctgtcaaagacaggagattgaatgaaaccatctgtacctgtagccatctaacaagcttcggcgttctgctggacctatctaggacatctgtgctgcctgctcaaatgatggctctgacgttcattacatatattggttgtgggctttcatcaatttttctgtcagtgactcttgtaacctacatagcttttgaaaagatccggagggattacccttccaaaatcctcatccagctgtgtgctgctctgcttctgctgaacctggtcttcctcctggactcgtggattgctctgtataagatgcaaggcctctgcatctcagtggctgtatttcttcattattttctcttggtctcattcacatggatgggcctagaagcattccatatgtacctggcccttgtcaaagtatttaatacttacatccgaaaatacatccttaaattctgcattgtcggttggggggtaccagctgtggttgtgaccatcatcctgactatatccccagataactatgggcttggatcctatgggaaattccccaatggttcaccggatgacttctgctggatcaacaacaatgcagtattctacattacggtggtgggatatttctgtgtgatatttttgctgaacgtcagcatgttcattgtggtcctggttcagctctgtcgaattaaaaagaagaagcaactgggagcccagcgaaaaaccagtattcaagacctcaggagtatcgctggccttacatttttactgggaataacttggggctttgccttctttgcctggggaccagttaacgtgaccttcatgtatctgtttgccatctttaataccttacaaggatttttcatattcatcttttactgtgtggccaaagaaaatgtcaggaagcaatggaggcggtatctttgttgtggaaagttacggctggctgaaaattctgactggagtaaaactgctactaatggtttaaagaagcagactgtaaaccaaggagtgtccagctcttcaaattccttacagtcaagcagtaactccactaactccaccacactgctagtgaataatgattgctcagtacacgcaagcgggaatggaaatgcttctacagagaggaatggggtctcttttagtgttcagaatggagatgtgtgccttcacgatttcactggaaaacagcacatgtttaacgagaaggaagattcctgcaatgggaaaggccgtatggctctcagaaggacttcaaagcggggaagcttacactttattgagcaaatgtgattcctttcttctaaaatcaaagcatgatgcttgacagtgtgaaatgtccaattttaccttttacacaatgtgagatgtatgaaaatcaactcattttattctcggcaacatctggagaagcataagctaattaagggcgatgattattattacaagaagaaaccaagacattacaccatggtttttagacatttctgatttggtttcttatctttcattttataagaaggttggttttaaacaatacactaagaatgactcctataaagaaaacaaaaaaaggtagtgaactttcagctaccttttaaagaggctaagttatctttgataacatcatataaagcaactgttgacttcagcctgttggtgagtttagttgtgcatgcctttgttgtatataagctaaattctagtgacccatgtgtcaaaaatcttacttctacatttttttgtatttattttctactgtgtaaatgtattcctttgtagaatcatggttgttttgtctcacgtgataattcagaaaatccttgctcgttccgcaaatcctaaagctccttttggagatgatataggatgtgaaatacagaaacctcagtgaaatcaagaaataatgatcccagccagactgagaaaatgtaagcagacagtgccacagttagctcatacagtgcctttgagcaagttaggaaaagatgcccccactgggcagacacagccctatgggctcatggtttgacaaacagagtggagagaccatattttagccccactcaccctcttgggtgcacgacctgtacagccaaacacagcatccaatatgaatacccatcccctgaccgcatccccagtagtcagattatagaatctgcaccaagatgtttagctttataccttggccacagagagggatgaactgtcatccagaccatgtgtcaggaaaattgtgaacgtagatgaggtacatacactgccgcttctcaaatccccagagcctttaggaacaggagagtagactaggattccttctcttaaaaaggtacatatatatggaaaaaaatcatattgccgttctttaaaaggcaactgcatggtacattgttgattgttatgactggtacactctggcccagccagagctataattgttttttaaatgtgtcttgaagaatgcacagtgacaaggggagtagctattgggaacagggaactgtcctacactgctattgttgctacatgtatcgagccttgattgctcctagttatatacagggtctatcttgcttcctacctacatctgcttgagcagtgcctcaagtacatccttattaggaacatttcaaaccccttttagttaagtctttcactaaggttctcttgcatatatttcaagtgaatgttggatctcagactaaccatagtaataatacacatttctgtgagtgctgacttgtctttgcaatatttcttttctgatttatttaattttcttgtatttatatgttaaaatcaaaaatgttaaaatcaatgaaataaatttgcagttaagatcttt

SEQ ID NO: 6014 - DNA, 7925 bp, Homo sapiens
caattcttgtttaccaaggtaagcctagctgatcctgctgcccttggcttcatcatttctccatggtctctgctgttgctgccatctggtagtgtgtcatttacagatgaaaatatttccaatcaggatcttcgagcattcactgcaccagaggttcttcaaaatcagtcactaacttctctctcagatgttgaaaagatccacatttattctcttggaatgacactgtattggggggctgattatgaagtgcctcagagccaacctattaagcttggagatcatctcaacagcatactgcttggaatgtgtgaggatgttatttacgctcgagtttctgttcggactgtgctggatgcttgcagtgcccacattaggaatagcaattgtgcaccctcattttcctacgtgaaacacttggtaaaactggttctgggaaatctttctgggacagatcagctttcctgtaacagtgaacaaaagcctgatcgaagccaggctattcgagatcgattgcgaggaaaaggattaccaacaggaagaagctctacttctgatgtactagacatacaaaagcctccactctctcatcagacctttcttaacaaagggcttagtaaatctatgggatttctgtccatcaaagatacacaagatgagaattatttcaaggacattttatcagataattctggacgtgaagattctgaaaatacattctccccttaccagttcaaaactagtggcccagaaaaaaaacccatccctggcattgatgtgctttctaagaagaagatctgggcttcatccatggacttgctttgtacagctgacagagacttctcttcaggagagactgccacatatcgtcgttgtcaccctgaggcagtaacagtgcggacttcaactactcctagaaaaaaggaggcaagatactcagatggaagtatagccttggatatctttggccctcagaaaatggatccaatatatcacactcgagaattgcccacctcctcagcaatatcaagtgctttggaccgaatccgagagagacaaaagaaacttcaggttctgagggaagccatgaatgtagaagaaccagttcgaagatacaaaacttatcatggtgatgtctttagtacctccagtgaaagtccatctattatttcctctgaatcagatttcagacaagtgagaagaagtgaagcctcaaagaggtttgaatccagcagtggtctcccaggggtagatgaaaccttaagtcaaggccagtcacagagaccgagcagacaatatgaaacaccctttgaaggcaacttaattaatcaagagatcatgctaaaacggcaagaggaagaactgatgcagctacaagccaaaatggcccttagacagtctcggttgagcctatatccaggagacacaatcaaagcgtccatgcttgacatcaccagggatccgttaagagaaattgccctagaaacagccatgactcaaagaaaactgaggaatttctttggccctgagtttgtgaaaatgacaattgaaccatttatatctttggatttgccacggtctattcttactaagaaagggaagaatgaggataaccgaaggaaagtaaacataatgcttctgaacgggcaaagactggaactgacctgtgataccaaaactatatgtaaagatgtgtttgatatggttgtggcacatattggcttagtagagcatcatttgtttgctttagctaccctcaaagataatgaatatttctttgttgatcctgacttaaaattaaccaaagtggccccagagggatggaaagaagaaccaaagaaaaagaccaaagccactgttaattttactttgtttttcagaattaaattttttatggatgatgttagtctaatacaacatactctgacgtgtcatcagtattaccttcagcttcgaaaagatattttggaggaaaggatgcactgtgatgatgagacttccttattgctggcatccttggctctccaggctgagtatggagattatcaaccagaggttcatggtgtgtcttactttagaatggagcactatttgcccgccagagtgatggagaaacttgatttatcctatatcaaagaagagttacccaaattgcataatacctatgtgggagcttctgaaaaagagacagagttagaatttttaaaggtctgccaaagactgacagaatatggagttcattttcaccgagtgcaccctgagaagaagtcacaaacaggaatattgcttggagtctgttctaaaggtgtccttgtgtttgaagttcacaatggagtgcgcacattggtccttcgctttccatggagggaaaccaagaaaatatctttttctaaaaagaaaatcacattgcaaaatacatcagatggaataaaacatggcttccagacagacaacagtaagatatgccagtacctgctgcacctctgctcttaccagcataagttccagctacagatgagagcaagacagagcaaccaagatgcccaagatattgagagagcttcgtttaggagcctgaatctccaagcagagtctgttagaggatttaatatgggacgagcaatcagcactggcagtctggccagcagcaccctcaacaaacttgctgttcgacctttatcagttcaagctgagattctgaagaggctatcctgctcagagctgtcgctttaccagccattgcaaaacagttcaaaagagaagaatgacaaagcttcatgggaggaaaagcctagagagatgagtaaatcataccatgatctcagtcaggcctctctctatccacatcggaaaaatgtcattgttaacatggaacccccaccacaaaccgttgcagagttggtgggaaaaccttctcaccagatgtcaagatctgatgcagaatctttggcaggagtgacaaaacttaataattcaaagtctgttgcgagtttaaatagaagtcctgaaaggaggaaacatgaatcagactcctcatccattgaagaccctgggcaagcatatgttctagatgtgctacacaaaagatggagcatagtatcttcaccagaaagggagatcaccttagtgaacctgaaaaaagatgcaaagtatggcttgggatttcaaattattggtggggagaagatgggaagactggacctaggcatatttatcagttcagttgcccctggaggaccagctgacttggatggatgcttgaagccaggagaccgtttgatatctgtgaatagtgtgagtctggagggagtcagccaccatgctgcaattgaaattttgcaaaatgcacctgaagatgtgacacttgttatctctcagccaaaagaaaagatatccaaagtgccttctactcctgtgcatctcaccaatgagatgaaaaactacatgaagaaatcttcctacatgcaagacagtgctatagattcttcttccaaggatcaccactggtcacgtggtaccctgaggcacatctcggagaactcctttgggccatctgggggcctgcgggaaggaagcctgagttctcaagattccaggactgagagtgccagcttgtctcaaagccaggtcaatggtttctttgccagccatttaggtgaccaaacctggcaggaatcacagcatggcagcccttccccatctgtaatatccaaagccaccgagaaagagactttcactgatagtaaccaaagcaaaactaaaaagccaggcatttctgatgtaactgattactcagaccgtggagattcagacatggatgaagccacttactccagcagtcaggatcatcaaacaccaaaacaggaatcttcctcttcagtgaatacatccaacaagatgaattttaaaactttttcttcatcacctcctaagcctggagatatctttgaggttgaactggctaaaaatgataacagcttggggataagtgtcacgggaggtgtgaatacgagtgtcagacatggtggcatttatgtgaaagctgttattccccagggagcagcagagtctgatggtagaattcacaaaggtgatcgcgtcctagctgtcaatggagttagtctagaaggagccacccataagcaagctgtggaaacactgagaaatacaggacaggtggttcatctgttattagaaaagggacaatctccaacatctaaagaacatgtcccggtaaccccacagtgtaccctttcagatcagaatgcccaaggtcaaggcccagaaaaagtgaagaaaacaactcaggtcaaagactacagctttgtcactgaagaaaatacatttgaggtaaaattatttaaaaatagctcaggtctaggattcagtttttctcgagaagataatcttataccggagcaaattaatgccagcatagtaagggttaaaaagctctttcctggacagccagcagcagaaagtggaaaaattgatgtaggagatgttatcttgaaagtgaatggagcctctttgaaaggactatctcagcaggaagtcatatctgctctcaggggaactgctccagaagtattcttgcttctctgcagacctccacctggtgtgctaccggaaattgatactgcgcttttgaccccacttcagtctccagcacaagtacttccaaacagcagtaaagactcttctcagccatcatgtgtggagcaaagcaccagctcagatgaaaatgaaatgtcagacaaaagcaaaaaacagtgcaagtccccatccagaagagacagttacagtgacagcagtgggagtggagaagatgacttagtgacagctccagcaaacatatcaaattcgacctggagttcagctttgcatcagactctaagcaacatggtatcacaggcacagagtcatcatgaagcacccaagagtcaagaagataccatttgtaccatgttttactatcctcagaaaattcccaataaaccagagtttgaggacagtaatccttcccctctaccaccggatatggctcctgggcagagttatcaaccccaatcagaatctgcttcctctagttcgatggataagtatcatatacatcacatttctgaaccaactagacaagaaaactggacacctttgaaaaatgacttggaaaatcaccttgaagactttgaactggaagtagaactcctcattaccctaattaaatcagaaaaaggaagcctgggttttacagtaaccaaaggcaatcagagaattggttgttatgttcatgatgtcatacaggatccagccaaaagtgatggaaggctaaaacctggggaccggctcataaaggttaatgatacagatgttactaatatgactcatacagatgcagttaatctgctccgggctgcatccaaaacagtcagattagttattggacgagttctagaattacccagaataccaatgttgcctcatttgctaccggacataacactaacgtgcaacaaagaggagttgggtttttccttatgtggaggtcatgacagcctttatcaagtggtatatattagtgatattaatccaaggtccgtcgcagccattgagggtaatctccagctattagatgtcatccattatgtgaacggagtcagcacacaaggaatgaccttggaggaagttaacagagcattagacatgtcacttccttcattggtattgaaagcaacaagaaatgatcttccagtggtccccagctcaaagaggtctgctgtttcagctccaaagtcaaccaaaggcaatggttcctacagtgtggggtcttgcagccagcctgccctcactcctaatgattcattctccacggttgctggggaagaaataaatgaaatatcgtaccccaaaggaaaatgttctacttatcagataaagggatcaccaaacttgactctgcccaaagaatcttatatacaagaagatgacatttatgatgattcccaagaagctgaagttatccagtctctgctggatgttgtggatgaggaagcccagaatcttttaaacgaaaataatgcagcaggatactcctgtggtccaggtacattaaagatgaatgggaagttatcagaagagagaacagaagatacagactgcgatggttcacctttacctgagtattttactgaggccaccaaaatgaatggctgtgaagaatattgtgaagaaaaagtaaaaagtgaaagcttaattcagaagccacaagaaaagaagactgatgatgatgaaataacatggggaaatgatgagttgccaatagagagaacaaaccatgaagattctgataaagatcattcctttctgacaaacgatgagctcgctgtactccctgtcgtcaaagtgcttccctctggtaaatacacgggtgccaacttaaaatcagtcattcgagtcctgcggggtttgctagatcaaggaattccttctaaggagctggagaatcttcaagaattaaaacctttggatcagtgtctaattgggcaaactaaggaaaacagaaggaagaacagatataaaaatatacttccctatgatgctacaagagtgcctcttggagatgaaggtggctatatcaatgccagcttcattaagataccagttgggaaagaagagttcgtttacattgcctgccaaggaccactgcctacaactgttggagacttctggcagatgatttgggagcaaaaatccacagtgatagccatgatgactcaagaagtagaaggagaaaaaatcaaatgccagcgctattggcccaacatcctaggcaaaacaacaatggtcagcaacagacttcgactggctcttgtgagaatgcagcagctgaagggctttgtggtgagggcaatgacccttgaagatattcagaccagagaggtgcgccatatttctcatctgaatttcactgcctggccagaccatgatacaccttctcaaccagatgatctgcttacttttatctcctacatgagacacatccacagatcaggcccaatcattacgcactgcagtgctggcattggacgttcagggaccctgatttgcatagatgtggttctgggattaatcagtcaggatcttgattttgacatctctgatttggtgcgctgcatgagactacaaagacacggaatggttcagacagaggatcaatatattttctgctatcaagtcatcctttatgtcctgacacgtcttcaagcagaagaagagcaaaaacagcagcctcagcttctgaagtgacatgaaaagagcctctggatgcatttccatttctctccttaacctccagcagactcctgctctctatccaaaataaagatcacagagcagcaagttcatacaacatgcatgttctcctctatcttagaggggtattcttcttgaaaataaaaaatattgaaatgctgtatttttacagctactttaacctatgataattatttacaaaattttaacactaaccaaacaatgcagatcttagggatgattaaaggcagcatttgatgatagcagacattgttacaaggacatggtgagtctatttttaatgcaccaatcttgtttatagcaaaaatgttttccaatattttaataaagtagttattttataggggatacttgaaaccagtatttaagctttaaatgacagtaatattggcatagaaaaaagtagcaaatgtttactgtatcaatttctaatgtttactatatagaatttcctgtaatatatttatatactttttcatgaaaatggagttatcagttatctgtttgttactgcatcatctgtttgtaatcattatctcactttgtaaataaaaacacaccttaaaacatgaacaagccaaaactgtgtgcag

SEQ ID NO: 6015 - DNA, 804 bp, Homo sapiens
cctcgccttcctccggctcagccgccgcgccgccgggctgctccttcttcctcctcgggcgcccgcggcgatgttcaaccgcgccgtgagccggctgagcaggaagcggccgccgtcagacatccacgacagcgatggcagttccagcagcagccaccagagcctcaagagcacagccaaatgggcggcatccctggagaatctgctggaagacccagaaggcgtgaaaagatttagggaatttttaaaaaaggaattcagtgaagaaaatgttttgttttggctagcatgtgaagattttaagaaaatgcaagataagacgcagatgcaggaaaaggcaaaggagatctacatgacctttctgtccagcaaggcctcatcacaggtcaacgtggaggggcagtctcggctcaacgagaagatcctggaagaaccgcaccctctgatgttccagaaactccaggaccagatctttaatctcatgaagtacgacagctacagccgcttcttaaagtctgacttgtttttaaaacacaagcgaaccgaggaagaggaagaagatttgcctgatgctcaaactgcagctaaaagagcttccagaatttataacacatgagcccccaaaaagccgggactggcagctttaagaagcaaaggaatttcctctcaggaccgtgccgggtttatcattgctttgttatttgtaaggactgaaatgtacaaaacccttcaatgggatgtgtgttttattaactgcttcaccagtaaattttgcatgatggctaagctaacataaaaaaagaa

SEQ ID NO: 6016 - DNA, 4897 bp, Homo sapiens
gagctgcagtcagatccggggatggagggagccggagaagaggagtgagaaggccggggaggcaggccctgctgtcttcctgcaggccggcagcctgctggcagtggaggaccaggccgtccaggaaaggaaggggtcaggaggtcgggcagggcctcagcaggttcagacaagtccccagaagggagctgcaggcgccctcgagtccaggccccaagcctggctccggttgtccaaagagggcctaggccaggcctctggtgcggaaactgagtcacagccagacctcagggcacggcctagacgcttacgagccaaagttaggggtagagagcagagacctccggggggtctcagggagtagggggcttcagggcctcccagtctagagccggattggcgagttagacgcttgtagatccaaggttggattggggtggggtctctgggacgttggatcgctacgcaaggattggggggattcaagtgcttagagatcgaagtctgccctgggtagggggagtcagacaattggaaagcctaggtagttatttggggaggggtctctacgccttggcgaagcgcacagctgcatctttttggcttgaggcctgaggccttgtcgagaagcttccgtgaaagggtgggccagccgggccacgagaaagaaagtgaataaatcaggaatataagtgggcggggggcccctgagaggggggtcgcaaagggtgagacatggccaccaggcgtttaaccgacgctttcttgttgttgcggaataattccatccaaaaccggcagctgttagccgagcaagagctggacgagcttgctgatgaccgtatggcactggtgtcaggcatcagcttagatccagaagcagcgattggtgtgacaaaacggccacctcctaagtgggtggatggagtggatgaaattcagtatgatgttggccggattaagcagaagatgaaagaattggccagccttcatgacaagcatttaaacagacccaccctggatgacagcagcgaagaggaacatgccattgagataactacccaagagatcactcagctcttccacaggtgccagcgtgccgtgcaggccctgccgagccgggcccgggcctgctccgagcaggaggggcggctgcttgggaacgtggtggcctcgctggcgcaggccctgcaggaactctccaccagcttccggcacgcacagtcaggctacctcaaacgcatgaagaatcgagaggaaagatcccagcattttttcgacacatcagtaccactaatggatgatggagacgataacactctttaccatcggggttttacagaggaccagttagttctggtggagcagaacacactgatggtggaagagcgggaacgagagattcgccagattgtacagtccatttctgacctgaatgaaatattcagggacttaggggcgatgattgtagaacagggtacagtccttgacagaattgactataacgttgaacagtcctgtatcaaaactgaagatggtttgaaacagcttcacaaggcagaacagtatcaaaagaagaatcggaagatgcttgtgattttaatattatttgtcatcatcattgtgctcattgttgtcctcgttggcgtgaagtctcgataagtggcattgggttttcgtgtgtgccgcgcgtgtggatctcccgggtgtgaggggcttggcctgcgccccgccagctgcccgcagaggtgcagcctcgaggaatctgagggcgtcggggcagcgaacctttgcatccacggactcctccttccctagtcctgctcaagcggtccggggaatgggtttttgtttttccttcattgttgagaatttaaggacctttgatactgctgcacaatagagattgagttctgggatcagttataatatatattttttttagaaagagaaaatgagctgagagtttacaggcactgcagaagctgttcagtattatatgtgtatatgctatttttttagcagccatgtctgagcagaatgttaacataatttttggaaaaattttctttaaaccatctggtttttaagaaatttggtaccaaaaattgatgagtagaggcaaaaatgccccttcatctttctctatatattttccagttgaaaacaaactaagaagtcctttaagaatttataatccgttccccattaacttaatttagcttttccatcactgttaatgatcagagtaacaaagtgtgaaaaataagaaaccatcattgatgttaattaacacatttagatgggccagttaaaacagcttcataagttttaaattaattgtaaatggaatattcctcatttaaaatttttgcactgcattttctactgtaaaccaaaagaggttactaagcaaaaccacctaaatttaagttggtgatttaaatgaatctcacattaaaagaaagcttgacagtgttatgaaagccaccagactcagccagtgtgtccccatgggtatccccagccatccttgctcaatccattacttatatactaactacataatgacctgttcaaaccagactctatttaatgaactgtgaatttacacagaggccattttaaatgggtcaccccatttaggattagtggatctcaaattattaaccaaacatcactccatttcaaagtaaaatattccaccagcgatttgatttattggctcttccattgccactgagcaatgcccaggaagcaggcacattgccaaggactgggggcatcttgactaggaagctcctcgtttgtgtgagcgtgggtcagaccgccaaagtaggacttcatcgtttacctacctattatcaatatggtgcttgaatatattcctataactgtagaacagtgtggaaagtgatggtaactttgaagttgttcatgttttattggctttgttttaattgacactagtagagttttaatggtctttgtgtaaattttaatggcttttccattgtttttgcttctcttaaaaagtttaagaagaatatgacctcattaaatgtgctgttttatttggaccagtcacacaaaatgtctctctagagttgactttaaagttgtttacagaaatttaaactcaattccagagattgaagttgtccaaacagctcatgggcttagtgtccaaacccctgcccagccttccctttccaagttggtgccacctccaggtagccattggtggttttcctattactgatgtggctgtggaatgataaggtcctagaggggccctggcatttcaggaagcggacctggtattccctgacaaacattgcttaggaaagagggccggagaataagaagccagcacctcatcagtcagccctgcaatgtgagacttccgtagctgttgagagtcactgcaggtgttctttcatcccatctgattttaacccatggttgagacgttccaagttagatctgctgctcttaggtgtggggctgtccacattagggaacttgcctcaaaaacagtccacagtggcaataccggacttctgttcaagctttttaaagtgctgagccttacaaacccctgaaggaaagtgaccctttaagagaggatcatctttttttatatttattttcaccaaatagggtgatgagggttggtttttgttccctcaacccatttgggtaaaataacggatctgattagaaactgttttaaggaggggctgggctcggtggctcacgcctgtaatcccagactttgagaggccaaggcggtcacgaggtcaggagttcgagaccagcctagccaacatggtgaaaccccgtctctacaaaaaatacaaaaattagccgggtgggacacgcctgtaatcccagctactcaagaggctgaggcaggagaatagcttgaacccgggaggcagaggttgcagtgagccgagatcacaccactgcactccagcctgggtgacagagcgaggctccgtctcaaaaaaaaaaaaaaaaaattgttttagcgctgggtttcccaaggtgggagagacagacccagcctggagctggcccctggcctgtgtgctgacttcttggggtcctcaaaccactgtatttttctgttgagcctgtacttggggagagatcagtagcatttgaggaagtaagagaaaagaatcatggtacctcagggtttctttccctttactcgctggcagccattgtctgtgggcacctcatgtttttccacactctactgggccgtggaggtaacgatcacccaggccagtctcctctgcctgggatgcgccctctgagaggaggcctagcagggcaggctccctctgggcatccctggatgcagcctctggacacatgcctcctttaaagtgtccgggtgcagctcaggttgagtggaggtagaaggagaaacagacatgtttaccacgcgttttccaaagctcctgatctttcccaagattgtaactgaaaactgctgtctcttgttttgttcgttttgggggtggtggtgctggctgggccatgcttgtgaagtgatgtgtgtctctgatttaacggattcactgttttctctgctaattgagagagcgttatttacattatttatttgttttgacacaagtgctttcagtgttttatcctagctaatggcttcttaaaggtaataaaacccttccaacgtaattggtcagataaaactttttttcttgtatgcttaaataaagcaattagtgaagcacttctatccaaaatgacttttttgtccttttttaaaaccaatttactgttactggaaactttttgtacaataaagcaatcacgcagattaaagaacatcctgcaatcctagtattaattttaa

SEQ ID NO: 6017 - DNA, 4131 bp, Homo sapiens; identical to SEQ ID NO: 436

SEQ ID NO: 6018 - DNA, 1292 bp, Homo sapiens
tggcagtcctcatttctgtggaatctgaagaagcccacgcagattttaattcccactctagattctgtatctagatcaccatggcgactggacagaagttgatgagagctgttagagtttttgaatttggtgggccagaagtcctgaaattgcgatcagatattgcagtaccgattccaaaagaccatcaggttctaatcaaggtccatgcatgtggtgtcaaccccgtggagacatacattcgctctggtacttatagtagaaaaccactcttaccctatactcctggctcagatgtggctggggtgatagaagctgttggagataatgcatctgctttcaagaaaggtgacagagttttcactagcagcacgatctctgggggttatgcagagtatgctcttgcagcagaccacactgtttacaaactacctgaaaaactggactttaaacaaggagctgccatcggcattccatattttactgcttatcgagctctgatccacagtgcctgtgtgaaagctggagagagtgttctggttcatggggcaagtggaggagttggattagcagcatgccaaattgctagagcttatggcttaaagattttgggcactgctggtactgaggaaggacaaaagattgttttgcaaaatggagcccatgaagtgttcaatcacagagaagtgaattacattgataaaattaaggttgttggcagcagaggtactattgaaataaacccacgagacaccatggcaaaggagtcgagtataattggagttactctcttttcctcaaccaaggaggaatttcagcaatatgcagcagcccttcaagctggaatggaaattggctggttgaaacctgtgataggttctcaatatccattggagaaggtggccgaggctcatgaaaatatcattcatggtagtggggctactggaaaaatgattcttctcttatgatgattaattctttcatggatttcctatgtaattagaggtactgtctttcccccagttgtacttaccctatcttttctttaattaacattcgattccatgagcttcttatgtgaaaaaataagatttttctttagagagcagaagcagaagagtaaaatttattgtatagctagcaatatttttttatgccatctgtctcaaatcaaagagtcatcatagtaggaaataacatgttagttgtcatttggcatgagtgtgcattccagtaattcttaattgatatttgattaattccatacctttgattaaaacatgctagttcaa

SEQ ID NO: 6019 - DNA, 2056 bp, Homo sapiens
cgagtctcaactaaaagggactcccggagctaggggtggggactcggcctcacacagtgagtgccggctattggacttttgtccagtgacagctgagacaacaaggaccacgggaggaggtgtaggagagaagcgccgcgaacagcgatcgcccagcaccaagtccgcttccaggctttcggtttctttgcctccatcttgggtgcgccttcccggcgtctaggggagcgaaggctgaggtggcagcggcaggagagtccggccgcgacaggacgaactcccccactggaaaggattctgaaagaaatgaagtcagccctcagaaatgaagttgactgcctgctggctttctgttgactggcccggagctgtactgcaagacccttgtgagcttccctagtctaagagtaggatgtctgctgaagtcatccatcaggttgaagaagcacttgatacagatgagaaggagatgctgctctttttgtgccgggatgttgctatagatgtggttccacctaatgtcagggaccttctggatattttacgggaaagaggtaagctgtctgtcggggacttggctgaactgctctacagagtgaggcgatttgacctgctcaaacgtatcttgaagatggacagaaaagctgtggagacccacctgctcaggaaccctcaccttgtttcggactatagagtgctgatggcagagattggtgaggatttggataaatctgatgtgtcctcattaattttcctcatgaaggattacatgggccgaggcaagataagcaaggagaagagtttcttggaccttgtggttgagttggagaaactaaatctggttgccccagatcaactggatttattagaaaaatgcctaaagaacatccacagaatagacctgaagacaaaaatccagaagtacaagcagtctgttcaaggagcagggacaagttacaggaatgttctccaagcagcaatccaaaagagtctcaaggatccttcaaataacttcaggagcatacctgaagagagatacaagatgaagagcaagcccctaggaatctgcctgataatcgattgcattggcaatgagacagagcttcttcgagacaccttcacttccctgggctatgaagtccagaaattcttgcatctcagtatgcatggtatatcccagattcttggccaatttgcctgtatgcccgagcaccgagactacgacagctttgtgtgtgtcctggtgagccgaggaggctcccagagtgtgtatggtgtggatcagactcactcagggctccccctgcatcacatcaggaggatgttcatgggagattcatgcccttatctagcagggaagccaaagatgttttttattcagaactatgtggtgtcagagggccagctggaggacagcagcctcttggaggtggatgggccagcgatgaagaatgtggaattcaaggctcagaagcgagggctgtgcacagttcaccgagaagctgacttcttctggagcctgtgtactgcggacatgtccctgctggagcagtctcacagctcaccatccctgtacctgcagtgcctctcccagaaactgagacaagaaagaaaacgcccactcctggatcttcacattgaactcaatggctacatgtatgattggaacagcagagtttctgccaaggagaaatattatgtctggctgcagcacactctgagaaagaaacttatcctctcctacacataagaaaccaaaaggctgggcgtagtggctcacacctgtaatcccagcactttgggaggccaaggagggcagatcacttcaggtcaggagttcgagaccagcctggccaacatggtaaacgctgtccctagtaaaaatacaaaaattagctgggtgtgggtgtgggtacctgtattcccagttacttgggaggctgaggtgggaggatcttttgaacccaggagttcagggtcatagcatgctgtgattgtgcctacgaatagccactgcataccaacctgggcaatatagcaagatcccatctcttta

SEQ ID NO: 6020 - DNA, 1908 bp, Homo sapiens
acgagaagacgagaacgcgtcgccctgcgctatgtcagaatggggcgggtgtgaggggaacagctctcttgcgatcagctcaggagtatgagcctcccggaggacggcatgagttctggacacttcaggagtcctcagctagtgacatggtcgatatggataaactcataaacaacttggaggtccaacttaattcagaaggtggctcaatgcaggtattcaagcaggtcactgcttctgttcggaacagagatccccctgagatagaatacagaagtaatatgacttctccaacactcctggatgccaaccccatggagaacccagcactgtttaatgacatcaagattgagcccccagaagaacttttggctagtgatttcagcctgccccaagtggaaccagttgacctctcctttcacaagcccaaggctcctctccagcctgctagcatgctacaagctccaatacgtccccccaagccacagtcttctccccagacccttgtggtgtccacgtcaacatctgacatgagcacttcagcaaacattcctactgttctgaccccaggctctgtcctgacctcctctcagagcactggtagccagcagatcttacatgtcattcacactatcccctcagtcagtctgccaaataagatgggtggcctgaagaccatcccagtggtagtgcagtctctgcccatggtgtatactactttgcctgcagatgggggccctgcagccattacagtcccactcattggaggagatggtaaaaatgctggatcaggagcacaaaggccaaggtggatgttctcacatctggactaatcctagaatttgattttaggacagccaggagctattcatgaaagttgaccccacctccatgtctccactggaaattccaagtgacagtgaggagagtacaattgagagtggatcctcagccttgcagagtctgcagggactacagcaagaaccagcagcaatggcccaaatgcagggagaagagtcgcttgacttgaagagaagacggattcaccaatgtgactttgcaggatgcagcaaagtgtacaccaaaagctctcacctgaaagctcaccgcagaatccatacaggagagaagccttataaatgcacctgggatggctgctcctggaaatttgctcgctcagatgagctcactcgccatttccgcaagcacacaggcatcaagccttttcggtgcacagactgcaaccgcagcttttctcgttctgaccacctgtccctgcatcgccgtcgccatgacaccatgtgagccgcacaggtcacactagagaagctgcgctggtatctttcctggtcgtgtgctgaggttgggacaattttttcctctttgacttcagcttgcatatggggttgaagcagcccactgagccaagttgaggagactggaggaaaagagagctggtctcccgtggggctcttcatattctaccttcacttctccactgtccagacccgtttttttcaacctccacatgggttgaattccagtgtggcacccatggctgccttcccatccccccctgctctgaaataggacatttttcctacagtaacaaaacaggaatcaaactcaaggctgtgaacaaacatacgctgctttattctttccaatttttctcttgttttctagaactcttatccatatgtttttaaaataagtacctaaaagtggtttgatagtgtcctaaacgacttttttaacttcctaaatggaaagagcataacaatgtagttgattggtaagatttacagggatttggtttctgagtttgaggcacattcccagtgaataagctgagtcccataccacactcaaaaggttttaataaatctaatcctatttcttcttaaa

SEQ ID NO: 6021 - DNA, 6970 bp, Homo sapiens
acagatgtgtatatctcatgattgatatggagaaactagtcatgggccaaaggtcaagatacttctctgggaaatgttgctgctgatgctgctttacaaagtcatacaatgagtgtttggtttaagaaagattttcatacttaaaagattttcatcttggaaatacatcaagtgaaaattaaattcttttgggaaacattttccttctgatatattatacttgtaatgggcgacatggcaaacaactcagttgcttacagtggtgtgaaaaactctttgaaggaagctaatcatgatggagactttggaattacgctcgcagagctgcgggctctcatggagctcaggtccacagatgcattacgaaaaatacaggaaagctatggagatgtctatggaatttgcaccaaattgaaaacatctcccaatgaaggtttaagtggaaaccctgcagatttagaaagaagagaagcagtgtttggaaagaattttatacctcctaaaaagccaaaaacctttcttcaattagtatgggaagcattacaagatgtcactttaattatattagaaattgcagccatagtatcattgggcctttctttttatcagcctccagaaggggataatgcactttgtggagaagtttctgttggggaggaagaaggtgaaggtgaaactggttggattgaaggagctgcaatcctcttgtctgtagtgtgtgtggtgttagtaacagctttcaatgactggagtaaggaaaaacagtttagaggtttgcagagccgaattgaacaagaacagaagttcactgtcatcaggggtggtcaggtcattcagatacctgtagctgacattactgttggagatattgctcaagtgaaatatggtgatcttcttccagctgacggcatacttattcaaggcaacgatcttaaaattgatgaaagctcattgactggtgaatcagatcatgttaaaaagtctttagataaggatcccttacttctatcaggtactcatgtaatggaaggctctggaagaatggtagttacagctgtaggtgtaaattctcaaactggaattatctttaccttacttggagctggaggtgaagaggaagagaagaaagatgagaagaaaaaggaaaagaaaaataagaaacaagatggagctattgagaatcgcaacaaagcaaaagcccaggatggtgcagccatggaaatgcagccattgaagagtgaagaaggtggagatggtgatgaaaaagataaaaagaaagcaaatttgccaaaaaaggaaaaatctgttttacaagggaaacttacaaaactggctgttcagattggcaaagcaggtctgttgatgtctgccatcacagttatcattctagtattatattttgtcattgacaccttctgggttcagaaaagaccatggcttgctgagtgcacaccaatttatatacaatactttgtgaagttcttcattattggagttacagttttagtggtcgcagtgccagaaggtcttccacttgcagtcacgatctcactggcttattcagtcaaaaaaatgatgaaagataataacttagtaaggcatctggatgcttgtgaaaccatgggaaatgctacagctatttgttcagataaaacaggaactttgacaatgaacagaatgacagtcgttcaagcttacataaatgaaaaacattataaaaaggttcctgaaccagaagctattccaccaaatattttgtcctatcttgtaacaggaatttctgtgaattgtgcttatacatcaaaaatattgccaccagagaaagagggtggattacctcgtcacgttggtaataaaactgaatgtgccttgttgggacttcttttggatttaaaacgggattatcaggatgttagaaatgaaataccagaagaagcactgtacaaagtctacaccttcaattctgttaggaagtccatgagtactgtcctgaaaaattcagatggaagttatcgaatattcagcaagggtgcatctgagataattctgaaaaagtgtttcaaaatcttgagtgctaatggtgaggcaaaagtattcagaccaagggaccgtgatgatattgtaaaaactgtgattgaaccgatggcatcagaaggcttgagaaccatatgtcttgcattcagagattttccagcaggagaaccagaaccagagtgggataatgaaaatgatattgtcaccggccttacatgcattgctgttgtggggattgaagatcctgtgagacctgaggtgccagatgcaattaaaaagtgtcagagggctggaattactgtgcggatggtcactggtgataatattaatactgctcgggccattgctaccaaatgtggtattttacatcctggggaagattttctgtgcctagaaggtaaagattttaacagaagaatacgaaatgaaaaaggagagattgagcaagagaggatagacaagatttggccaaaacttcgagtacttgcaagatcatctcctactgataagcatacactggttaaaggtataattgacagcactgtctcagaccaacgccaggttgtagctgtaactggtgatggtacaaatgatggcccagcactaaagaaagcagatgttggatttgcaatgggtattgctggaactgatgtagctaaagaagcatccgatattattctcacagatgacaactttacaagcattgttaaagcagttatgtggggacgaaatgtctatgacagcatctcaaaattccttcagttccaacttactgttaatgtagtagcagtgattgttgcttttacgggcgcctgcattactcaagactcaccgcttaaggctgtgcagatgctgtgggtaaacctcataatggatacactcgcttccctggctctggcaacggaaccacccactgagtctctcttgcttcggaaaccttatggtagaaataagcctctcatctcacgtacaatgatgaagaatattttgggtcatgcattctatcaacttgtagtagtctttacactcttatttgctggagaaaagttttttgacattgatagtggaagaaatgctcctttgcatgctcctccttcagaacattatactattgtttttaatacctttgtgctgatgcaacttttcaacgaaataaatgcccggaaaattcatggtgaaagaaatgtattcgaaggaatctttaacaatgccatcttctgcacaattgttttaggcacttttgtggtacagataataattgtgcagtttggtggaaaacctttcagttgttcagaactttcaatagaacagtggctatggtcaatattcctaggaatgggaacattactctggggccagcttatttcaacaattccaactagccgtttaaaattcctcaaagaagctggtcatggaacacaaaaggaagaaatacctgaggaggaattagcagaggatgttgaagagattgatcacgctgaaagggagttgcggcgtggccaaatcttgtggtttagaggtctgaacagaatccaaacacagatggatgtagtgaatgctttccagagtggaagttccattcagggggctctaaggcggcaaccctccatcgccagccagcatcatgatgtaacaaatatttctacccctacacatgtagtgttttcctcttctactgcttctactactgtggggtattcgagtggtgaatgcatttcgtagttctttatatgaagggttagaaaaaccggaatcaagaagttcgattcacaactttatgacacatcctgagtttaggatagaagattcagagcctcatatcccccttattgatgacactgatgccgaagatgatgctcctacaaaacgtaactccagtcctccaccctctcccaacaaaaataacaatgctgttgacagtggaattcaccttacaatagaaatgaacaagtctgctacctcttcatccccaggaagcccactacatagtttggaaacatcactctgattgtaagctgaatgttaacacactagctgcattgtaaagaaacaaattgaaactgggtcttttcacatattgtgatggacaagctagtattcttgtctttggacttcaacagaagacacacttgtacgaatgtagatttatttttttaaaaaaaaaaaagcaaagctttctgccagactgagggtgctttttggggggtgggagaaatgaactgacagataaacagtaactcagcgtaagtgacctgtggatcatcagtagtacccaagcatggtcctgaacagtgtattagcagagctttagtttatctcagtcctggatgggagagagagggaggagtaaaactgggcaagacaaagagccctggatcgttgaattgatagtttaatttctgctgttggctgttaataatttggattatttatgtttataaatgatacagatctgtttacaaggtttgtagatactttttttgttcctgttcatagatgggaagcttccttataactgatgcagagaaaaattagtccttcaaatactgctgtattttcaggaaaaaaaaaaaaaggggtgtttctattgaaactgtactaaatttttgcctacaatttaccttgttaaatattgtagataaattgctaatactaatagccaaatagataacactaatgctttgtttaaaaaaacgaaaaaaacaaaacaaaacaaaaaaacatgagcagtggtgttctaatgaagttatgacatctgtcctaattagtttcttaaatacatttactacttaatggttttgaagcaactgtttaatttttaaaatttttgaaaacttgctaataaccttttgttcagaatttagtagattgtttaatgcaggacatcaactacataatgaaagatgcttgaaatgcttttgttatttcaggcaaatcaaattaaatcagactatcaaactacaagagaaccttagtcttttttgtttttgtctaaacatgttagtttagtgatgtcttggtgaactgtgagtgaactgtattgatttttctaatctttagagaccttcacacagcatgagggctgttggcattttgaaaaaggttaataagtagaagcatacatgttttccttttgtttttgaaacttgtttgtaaacataaataaatatgcccttttattaaataaattcatggcaatgtttttttaaaagacatttcagcttctttactcagttctgcatatacagtgcatcagtctgttctctttgaccacaattggaatacatttcaagatggtaacagccccatgaagtaccgctttaattccttgctggtaatctaatagaatcagattaagaaaattaacacaattttaccatttgacatactcttcattgaatttagtttgtctaaaatagtctcacaggtaaaaaacataacaacaatgaccaccattgtctttgatacatttattttaattcttaagtggccaaataacagattaggtaaaatgagattacatgaaaaggttctaaaatgatatatttagatgcaataattaaccatatgctagaatgcccacctctaagccaattggattctttagctctctttttctttccttcatctaccttcttctcttttttgcctctgtctttaccctttagaaactggcatgtgttagggcccagatttcaccagatacacaatcctcaggctgacataaagtttacgaggactgctactataactgagagtgctgaccaagcaaagaaacatttagttgatggtgcttgatatttttggtgggtgggggaaatctttttctcaccatcaaatctttgcagtaatcctctgcaggtcttagaaacacattggctctgtcagcatttgtaattgtacatttattcatcaggtatttatagtgaatcatactgtaaaaaagaggtagcatgatatgctggaaagcatattagactaggagtcaagacctggtttctagtcttggttttgccattaatgtgctgcatgatcttgggaaaatcatttaccctaaataagggtggtggactatcttgaagaaccctttcaactctaaaaattgaccctatcaactggagagcccacaaggcatagggaatagagaaaagggaaatgttttcagttttcttttttattttggttatgcttaaatatgaatgtaattaccaaaagatttagaagtgcatgtgctttggaggatttgtattgagcttttacagtattcatttttcaactcaaggcaatggctttctacaccaactctaatccataaacgggtcttatgacatctatgaagtagtagcaagacatgcttagtgtgtatttctctctttgagacactgtaatttctaccagaaatttccagagcattatgtaggtagaaaaaaatgcaagcaagctgttaaagatcttggatcccattatatagtatgtatagctgaaatctgtaattcaatcactttttctcttttatcctctaaccaaaaaattgtttaattttgcatcccaaatgtttttaatctttgtatattttttaaaaatccttttctcctcatcattgccttttttgtggttgtaaatagacttacttgcactttgaagatgagttactccttgtcatcttacaaatatgtgatatggtaattttcataacagatgtcagttttgaaccaagaattggtgatttgtttataagaaaaaaactggcttcatttctgtgaaattgctctttgaaaatttctttttacacgtgtaagccaactgagataccgtgatggtgttgatttctttcaatgatgcttaccatctattttagccactgagccttttattatttgtctatttgtaaagtttatttgtcttaactcatttaataaatatactgtttatctgt

SEQ ID NO: 6022 - DNA, 2500 bp, Homo sapiens
gagagagaggaatcggggtttctgggtgacggtgatctcggggtgggcaggactccaaaggcccgtcgacccggtggtggactccttgcactgggattggacatatgcaagcgggagatttggggccggcgctcaaaatcggggggcgggggtggactcgggtttggaccccaggatccgatcagcggacccttgattcaacgtgaggtcccgaattgacgtccttccctcaaaacctccgggtctacaaaccaggaccctcaagacccttcagggctccagcgtgacatggctgaagcgcaccaggccgtgggcttccgaccctcgctgacctcggacggggctgaagtggaactcagtgcccctgtgctgcaggagatctacctctctggcctgcgctcctggaaaaggcatctctcacgtttctggaatgactttctcaccggtgtgtttcctgccagccccctcagttggcttttcctcttcagtgccatccagcttgcctggttcctccagctggatccttccttaggactgatggagaagatcaaagagttgctgcctgactggggtggacaacaccacgggctccggggggtcctggcagccgcgctgtttgcctcgtgtttgtggggagccctgatcttcacactgcacgtggccctgaggctgcttctgtcctaccacggctggcttcttgagccccacggagccatgtcctcccccaccaagacctggctggccctggtccgcatcttctctggccgccacccgatgctgttcagttaccagcgctccctgccacgccagcccgtgccctctgtgcaggacaccgtgcgcaagtacctggagtcggtccggcccatcctctccgacgaggacttcgactggaccgcggtcctggcgcaggaattcctgaggctgcaggcgtcgctgctgcagtggtacctgcggctcaagtcctggtgggcgtccaattatgtcagtgactggtgggaggaatttgtgtacctgcgctcccgaaatccgctgatggtgaacagcaactattacatgatggacttcctgtatgtcacacccacgcctctgcaggcagctcgcgctgggaatgccgtccatgccctcctcctgtaccgccaccgcctgaaccgccaggagatacccccgactttgctgatgggaatgcgccccttatgctctgcccagtacgagaagatcttcaacaccacgcggattccaggggtccaaaaagactacatccgccacctccatgacagccaacacgtggctgtcttccaccggggccgattcttccgcatggggacccactcccgaaacagcctgctttccccgagagccctggagcagcagtttcagagaatcctggatgatccctcaccggcctgcccccacgaggaacatctggcagctctgacagctgctcccaggggcacgtgggcccaggtgcggacatccctgaagacccaggcagcggaggccctggaggcggtggaaggggccgctttctttgtgtcactggatgctgagcccgcggggctcaccagggaggacccggcagcgtcgttggatgcctacgcccatgctctgctggccggccggggccatgatcgctggtttgacaaatccttcaccctaatcgtcttctctaacgggaagctgggcctcagcgtggagcactcctgggccgactgccccatctcaggacacatgtgggagttcactctggctacagaatgctttcagctgggctactcaacagacggccactgcaaggggcacccggaccccacactaccccagccccagcggctgcaatgggaccttccagaccagatccactcctccatctctctagccctgaggggagccaagatcttgtctgaaaatgtcgactgccatgtcgttccattctccctatttggcaagagcttcatccgacgctgccacctctcttcagacagcttcatccagatcgccttgcaactggcccacttccgggacaggggtcaattctgcctgacttatgagtcggccatgactcgcttattcctggaaggccggacggagacggtgcggtcttgcacgagggaggcctgcaactttgtcagggccatggaggacaaagagaagacggctgatgaccatggttatggtgtttcttatatcttcatgggggatggcatgatcaccttccacatctccagcaaaaaatcaagcacaaaaacggattcccacaggctggggcagcacattgaggacgcactgctggatgtggcctccctgttccaggcgggacagcattttaagcgccggttcagagggtcagggaaggagaactccaggcacaggtgtggatttctctcccgccagactggggcctccaaggcctcaatgacatccaccgacttctgactccttccagcaggcagctggcctctccaaggaataagggtgaaattgccacagctggctgacacag

SEQ ID NO: 6023 - DNA, 2678 bp, Homo sapiens
gggggggcgtggccggcgccggctcttgcggccgagcagagttgcggcgtgggaaagagccgctaggagcagaccgcgccgccgccggagccgcgcctgcccaggcccggggagggaggaggcgggcgtcagggtgctgcgccccgctcggcgtccgagcttccggccgggctgtgccccgcgcggtcttcgccgggatgaagcgcccctgcgaggagacgacctccgagagcgacatggacgagaccatcgacgtggggagcgagaacaattactcggggcaaagtactagctctgtgattagattgaattctccaacaacaacatctcagattatggcaagaaagaaaaggagagggattatagagaaaaggcgtcgggatcggataaataacagtttatctgagttgagaagacttgtgccaactgcttttgaaaaacaaggatctgcaaagttagaaaaagctgaaatattgcaaatgacagtggatcatttgaagatgcttcaggcaacagggggtaaaggctactttgacgcacacgctcttgccatggacttcatgagcataggattccgagagtgcctaacagaagttgcgcggtacctgagctccgtggaaggcctggactcctcggatccgctgcgggtgcggcttgtgtctcatctcagcacttgcgccacccagcgggaggcggcggccatgacatcctccatggcccaccaccatcatccgctccacccgcatcactgggccgccgccttccaccacctgcccgcagccctgctccagcccaacggcctccatgcctcagagtcaaccccttgtcgcctctccacaacttcagaagtgcctcctgcccacggctctgctctcctcacggccacgtttgcccatgcggattcagccctccgaatgccatccacgggcagcgtcgccccctgcgtgccacctctctccacctctctcttgtccctctctgccaccgtccacgccgcagccgcagcagccaccgcggctgcacacagcttccctctgtccttcgcgggggcattccccatgcttcccccaaacgcagcagcagcagtggccgcggccacagccatcagcccgcccttgtcagtatcagccacgtccagtcctcagcagaccagcagtggaacaaacaataaaccttaccgaccctgggggacagaagttggagctttttaaatttttcttgaacttcttgcaatagtaactgaatgtcctccatttcagagtcagcttaaaacctctgcaccctgaaggtagccatacagatgccgacagatccacaaaggaacaataaagctatttgagacacaaacctcacgagtggaaatgtggtattctcttttttttctctcccttttttgtttggttcaaggcagctcggtaactgacatcagcaacttttgaaaacttcacacttgttaccatttagaagtttcctggaaaatatatggaccgtaccatccagcagtgcatcagtatgtctgaattggggaagtaaaatgccctgactgaattctcttgagactagatgggacatacatatatagagagagagtgagagagtcgtgtttcgtaagtgcctgagcttaggaagttttcttctggatatataacattgcacaagggaagacgagtgtggaggataggttaagaaaggaaagggacagaagtcttgcaataggctgcagacattttaataccatgccagagaagagtattctgctgaaaccaacaggttttactggtcaaaatgactgctgaaaataattttcaagttgaaagatctagttttatcttagtttgccttctttgtacagacatgccaagaggtgacatttagcagtgcattggtataagcaattatttcatcagttctcagattaacaagcatttctgctctgcctgcaggcccccaggcacttttttttttggatggctcaaaatatggtgctgctttatataaaccttacatttatatagtgcacctatgagcagttgcctaccatgtgtccaccagaggctatttaattcatgccaacttgaaaactctccagtttgtaggagtttggtttaatttattcagtttcattaggactatttttatatatttatcctcttcattttctcctaatgatgcaacatctattcttgtcaccctttgggagaagttacatttctggaggtgatgaagcaaggagggagcactaggaagagaaaagctacaatttttaaagctctttgtcaagttagtgattgcatttgatcccaaaacaagatgaatgtatgcaatgggatgtacataagttatttttgcccatgcctaaactagtgctatgtaatggggttgtggttttgtttttttcgatttcgtttaatgacaaaataatctcttaatatgctgaaatcaagcacgtgagagtttttgtttaaaagataagagacacagcatgtattatgcacttcatttctctactgtgtggagaaagcaataaacattatgagaatgttaaacgttatgcaaaattatacttttaaatatttgttttgaaattactgtacctagtcttttttgcattactttgtaacctttttctatgcaagagtctttacataccactaattaaatgaagtcctttttgacta

SEQ ID NO: 6024 - DNA, 5629 bp, Homo sapiens
gcacatccctgcactagtggccgcaaccgaggcgccgcgctccagcagctgctgccgcccagcccggccccgccgccgccccccagccctgcagccccgcagccccggccgcgcccagcccggcgaggacagcaccaggaggcggcccccagcgcggccacaaagacccccggcggcgtctctccgcggaccggtcctacttgaagtccatcatgtccttcggcagagacatggagctggagcacttcgacgagcgggataaggcgcagagatacagccgagggtcgcgggtgaacggcctgccgagcccgacgcacagcgcccactgcagcttctaccgcacccgcacgctgcagacgctcagctccgagaagaaggccaagaaagttcgtttctatcgaaacggagatcgatacttcaaagggattgtgtatgccatctccccagaccggttccgatcttttgaggccctgctggctgatttgacccgaactctgtcggataacgtgaatttgccccagggagtgagaacaatctacaccattgatgggctcaagaagatttccagcctggaccaactggtggaaggagagagttatgtatgtggctccatagagcccttcaagaaactggagtacaccaagaatgtgaaccccaactggtcggtgaacgtcaagaccacctcggcttctcgggcagtgtcttcactggccactgccaaaggaagcccttcagaggtgcgagagaataaggatttcattcggcccaagctggtcaccatcatcagaagtggcgtgaagccacggaaagctgtcaggattctgctgaacaagaaaacggctcattcctttgagcaggtcctcaccgatatcaccgatgccatcaagctggactcgggagtggtgaaacgcctgtacacgttggatgggaaacaggtgatgtgccttcaggacttttttggtgatgatgacatttttattgcatgtggaccggagaagttccgttaccaggatgatttcttgctagatgaaagtgaatgtcgagtggtaaagtccacttcttacaccaaaatagcttcatcatcccgcaggagcaccaccaagagcccaggaccgtccaggcgtagcaagtcccctgcctccaccagctcagttaatggaacccctggtagtcagctctctactccgcgctcaggcaagtcgccaagcccatcacccaccagcccaggaagcctgcggaagcagaggagctctcagcatggcggctcctctacgtcacttgcgtccaccaaagtctgcagctcgatggatgagaacgatggccctggagaagaagtgtcggaggaaggcttccagattccagctacaataacagaacgatataaagtcggaagaacaataggagatggaaattttgctgttgtcaaggaatgtgtagaaagatcgactgctagagagtatgctctgaaaattatcaagaaaagcaaatgtcgaggcaaagagcacatgatccagaatgaagtgtctattttaagaagagtgaagcatcccaatatcgttcttctgattgaggagatggatgtgccaactgaactgtatcttgtcatggaattagtaaaggggggagacctttttgatgccattacttccactaacaaatacaccgagagagacgccagtgggatgctgtacaacctagccagcgccatcaaatacctgcatagcctgaacatcgtccaccgtgatatcaagccagagaacctgctggtgtatgagcaccaagatggcagcaaatcactgaagctgggtgactttggactggccaccattgtagacggccccctgtacacagtctgtggcaccccaacatacgtggctccagaaatcattgcagagactggatacggcctcaaggtggacatctgggcagcaggtgtaatcacttatatcctgctgtgtggtttccctccattccgtggaagtggtgatgaccaggaggtgctttttgatcagattttgatggggcaggtggactttccttctccatactgggataatgtttccgattctgcaaaggagctcattaccatgatgctgttggtcgatgtagatcagcgattttctgctgttcaagtacttgagcatccctgggttaatgatgatggcctcccagaaaatgaacatcagctgtcagtagctggaaagataaagaagcatttcaacacaggccccaagccgaatagcacagcagctggagtttctgtcatagcaaccaccgctcttgataaggagaggcaggttttccgacgaagacgcaaccaggatgtgaggagccggtacaaggcgcagccagctcctcccgaactcaactcggaatcggaagactactccccaagctcctccgagactgttcgctcccctaactcgcccttttaataagacccttttactcaaagtcctagcttaaccctttgagactctgagatttttttcccccaaatttgtgtaaaacagtttcatctgatctatctagcgctcaatgcttgaatggcagaactgaaagtgttttcaggtatctttgtagcggtttccctttactgaataagatgacacgtggtgattgtgaagatggtaatttgctgctaatagagtcctcaaagggttaaggccaatttgcaatttttttttaaacttagaagcaatgaatgttttcatcagtcaagctaggatctgcagtatgtaatatagcacttgttaaccctctgagtgcatagaattttattgagaattcttgtttgggaatttttcaggcctttggatgtatacacacatgtttcttgattttactgcagatcaaggggtgttgttagatgctgaaatgtccagaaaagaaggacatttagaatgatatcttgtttgtccttttctgtgggtttagaacgtggcaggtttataacttcgacacacgcacggttctttcttcttcacaatcctattcagaaacagattttttttttcattagagatatgactgtcagttgcagtgagttctgcatcccaagtggagggaattgggtttgtggcaaagagcttgacccaggaaatagatggtgccccccaaattgtctccacatgaagatgtactgatgacgccccagaaatgctgcttccatatcagctgctgctagcgccagcgcagactctcagggagtcaccacagcttgtcttgtgcttggtgagtgagggtctctctactcagtgtcagacatctacaggaaagaaacaactggtggaaaagagcaataaattgcccggtgctctgcagggctggaatttcaaacagaaagagggaataagatcctgtgatttttctcacctgcttttccacgcactgtggtcatcactgtgcaatctacatctagtatgaaatccacacataggagagctggggcacaaggggactggaggcagttgctttgcaagatggctgaggagaaagcacactgggaacacaatccagaatgttctaacaataagttttcagtgaataaaccactggcaagacaattccatgtgcacctttaggttacctatatagtctcctaggaagatcaggatgaaagacctagatgatacccctgaggataaaacctccatcccctaaaatgattttttttaaataccactgtctttagctgtccaggaggtcagagtgttttttctgtctttgggccaagtcctgtctgagacctgtattttcactcttgttaccaaatctatctccctagtgcagtgtctccaggcctgagtttcttctggaacagattccattttagaatggggattcacaggttctgtgcatcaccacagtgctcagagaggattctcctggggtgtcttagaggcaggtgcccaactcaaatgtattcccaaggtttgctgggctctgggatccacgagacaaccagagagggatatctcatgaaatttgcatctggtggctgaacagtacctatgttctctgttttgaatatactttaatacctgagagtcttaaaatttgtgaacaacgtttctatagtcctttattttcaaatgcacattgatcttcacttgctgcatttttactcttcaaccctgaaactatggtctacattaatatggatttttaaatcacatgtcattacttttgcaacaccatcaccaaaattttttgctcttttacatttaggttcatctctgtggtctgtgttgtcctgacatgtaaaaagcatatcgtttattgaggtttttttcccccccttttagagcatccggaagtgataacacgcaaaatcacaaagtagcataaatcagtaaattagttgagttgtttttgggggggaggtgggggtagggggcacagaacaccagaaagagtgttggtgtgtaggtagattccatattaatgaggaacactgaactagttggaaattactgctttctctagaaatataaagcaaagcactattccaaggctatggagtagctctacagcctggcctcaactctaaaagtgtgaagaatgcaatgggcagagacctacctgcagtggactgtcattttcctttctttctctgaattactgctttttctgtgggcattaactatattgctacagcatctagtgtactgagcctgcggtgcatggctcaggccttttcccatcgacgtctagggggactctggaccgtgtgaagctagggggtgtttctcagcacactgcagaagggcagctcagaagaatgcagggcccattcagcatggggatcccagcacatcactgtagaatttgagtgatctatgctgaataaacagtggaatgtgaccagtcaagtagaaatcttgagtaatcagatggaatgcaatctttctaacattaagctaccaagatcctgaatgtcagagatgtactcagagggttaacagacaagcacaaggcatgctgactacattggtgtatccagattgctttgcttttagccagtgctttctaatttttttctcgacattcttgggatagttcaagtttgaaataattaagtggtggtgttctttaaggaatttctataaccaaattgatcttatttttgatttcacttatcatagaacaaatatgtatcattatggcagtgtatctatgtaattatcaatttaatcatcaccaccggtgtttccatattttttcccaagtatttaatatagctctcttatggtggtggcctggtgatggggaccgtctttcttttactgacacatgaccaatcatatggtattttcaagggaattttaagattcatcttttcagtttgatagtagactagttaaggaagaactctttcattacttgcatcgtgtaaatcatctctgtagacatgtgttcatattaatgaacacattttttctcaacattgtagcagaaatcattttattcgtcatgatcaatgaatatgtgatttgctccagatcgttagaaggaaaagtaagatttcagtcatcaaaaatgtttttaccgtagccctcatctaacttacacgtggtgcatattaaaataagcagagaaaaaaaaatgtgaataaactactgaaaac

SEQ ID NO: 6025 - DNA, 258 bp, Homo sapiens
gctacactgaggaacaagcttatgtggaacataattagcatcatcattattctggctggagcaattgcactcatcattggctttggtatttcagaagtctctgtctggctttcagcaatgaagggttgtagaagttccaaggcttcccttagcattgatctttgcttcctgaactgcagggagacactccatcacagtcactactgtcgcctcagctgggaacattggggaggatggaatcctgagctgcacttttga

SEQ ID NO: 6026 - DNA, 1787 bp, Homo sapiens
caagccatagcaggaaacagcgagcttgcagcctcaccgacgagtctcaactaaaagggactcccggagctaggggtggggactcggcctcacacagtgagtgccggctattggacttttgtccagtgacagctgagacaacaaggaccacgggaggaggtgtaggagagaagcgccgcgaacagcgatcgcccagcaccaagtccgcttccaggctttcggtttctttgcctccatcttgggtgcgccttcccggcgtctaggggagcgaaggctgaggtggcagcggcaggagagtccggccgcgacaggacgaactcccccactggaaaggattctgaaagaaatgaagtcagccctcagaaatgaagttgactgcctgctggctttctgttgactggcccggagctgtactgcaagacccttgtgagcttccctagtctaagagtaggatgtctgctgaagtcatccatcaggttgaagaagcacttgatacagatgagaaggagatgctgctctttttgtgccgggatgttgctatagatgtggttccacctaatgtcagggaccttctggatattttacgggaaagaggtaagctgtctgtcggggacttggctgaactgctctacagagtgaggcgatttgacctgctcaaacgtatcttgaagatggacagaaaagctgtggagacccacctgctcaggaaccctcaccttgtttcggactatagagtgctgatggcagagattggtgaggatttggataaatctgatgtgtcctcattaattttcctcatgaaggattacatgggccgaggcaagataagcaaggagaagagtttcttggaccttgtggttgagttggagaaactaaatctggttgccccagatcaactggatttattagaaaaatgcctaaagaacatccacagaatagacctgaagacaaaaatccagaagtacaagcagtctgttcaaggagcagggacaagttacaggaatgttctccaagcagcaatccaaaagagtctcaaggatccttcaaataacttcagggaagaaccagtgaagaaatccattcaggaatcagaagcttttttgcctcagagcatacctgaagagagatacaagatgaagagcaagcccctaggaatctgcctgataatcgattgcattggcaatgagacagagcttcttcgagacaccttcacttccctgggctatgaagtccagaaattcttgcatctcagtatgcatggtatatcccagattcttggccaatttgcctgtatgcccgagcaccgagactacgacagctttgtgtgtgtcctggtgagccgaggaggctcccagagtgtgtatggtgtggatcagactcactcagggctccccctgcatcacatcaggaggatgttcatgggagattcatgcccttatctagcagggaagccaaagatgttttttattcagaactatgtggtgtcagagggccagctggaggacagcagcctcttggaggtggatgggccagcgatgaagaatgtggaattcaaggctcagaagcgagggctgtgcacagttcaccgagaagctgacttcttctggagcctgtgtactgcggacatgtccctgctggagcagtctcacagctcaccatccctgtacctgcagtgcctctcccagaaactgagacaagaaagggggacaattcccggaagtggaattacagagtcaaaggacatgcatttttcaagcctcggatgcatcttactagatgtcctatag

SEQ ID NO: 6027 - DNA, 793 bp, Homo sapiens
tccaactcccaccccgggccccggaccgcagctggtcgtagtggccgcggaggacggcagcttttgggggccgggcgggagaagcgtccgttcatccgcggaaccaagctgaggtcgccgccctggagaggcaggtgtttgacttcctgggctaccagtgggcgcccatcctggccaactttgtccacatcatcatcgtcatcctgggactcttcggcaccatccagtaccggctgcgctatgtcatggtgtacacgctgtgggcagccgtctgggtcacctggaacgtcttcatcatctgcttctacctggaagtcggtggcctcttaaaggacagcgagctactgaccttcagcctctcccggcatcgctcctggtggcgtgagcgctggccaggctgtctgcatgaggaggtgccagcagtgggcctcggggccccccatggccaggccctggtgtcaggtgctggctgtgccctggagcccagctatgtggaggccctacacagttgcctgcagatcctgatcgcgcttctgggctttgtctgtggctgccaggtggtcagcgtgtttacggaggaagaggacagctttgatttcattggtggatttgatccatttcctctctaccatgtcaatgaaaagccatccagtctcttgtccaagcaggtgtacttgcctgcgtaagtgaggaaacagctgatcctgctcctgtggcctccagcctcagcgaccgaccagtgacaatgacaggagctcccaggccttgggacgcgcccccacccagcaccccc

SEQ ID NO: 6028 - DNA, 2211 bp, Homo sapiens
cccgggccagggtccacctgtccccgcagcgccggctcgcgccctcctgccgcagccaccgagccgccgtctagcgccccgacctcgccaccatgagagccctgctggcgcgcctgcttctctgcgtcctggtcgtgagcgactccaaaggcagcaatgaacttcatcaagttccatataagtcaaaaacctgctatgaggggaatggtcacttttaccgaggaaaggccagcactgacaccatgggccggccctgcctgccctggaactctgccactgtccttcagcaaacgtaccatgcccacagatctgatgctcttcagctgggcctggggaaacataattactgcaggaacccagacaaccggaggcgaccctggtgctatgtgcaggtgggcctaaagctgcttgtccaagagtgcatggtgcatgactgcgcagatggaaaaaagccctcctctcctccagaagaattaaaatttcagtgtggccaaaagactctgaggccccgctttaagattattgggggagaattcaccaccatcgagaaccagccctggtttgcggccatctacaggaggcaccgggggggctctgtcacctacgtgtgtggaggcagcctcatcagcccttgctgggtgatcagcgccacacactgcttcattgattacccaaagaaggaggactacatcgtctacctgggtcgctcaaggcttaactccaacacgcaaggggagatgaagtttgaggtggaaaacctcatcctacacaaggactacagcgctgacacgcttgctcaccacaacgacattgccttgctgaagatccgttccaaggagggcaggtgtgcgcagccatcccggactatacagaccatctgcctgccctcgatgtataacgatccccagtttggcacaagctgtgagatcactggctttggaaaagagaattctaccgactatctctatccggagcagctgaaaatgactgttgtgaagctgatttcccaccgggagtgtcagcagccccactactacggctctgaagtcaccaccaaaatgctgtgtgctgctgacccacagtggaaaacagattcctgccagggagactcagggggacccctcgtctgttccctccaaggccgcatgactttgactggaattgtgagctggggccgtggatgtgccctgaaggacaagccaggcgtctacacgagagtctcacacttcttaccctggatccgcagtcacaccaaggaagagaatggcctggccctctgagggtccccagggaggaaacgggcaccacccgctttcttgctggttgtcatttttgcagtagagtcatctccatcagctgtaagaagagactgggaagataggctctgcacagatggatttgcctgtgccacccaccagggcgaacgacaatagctttaccctcaggcataggcctgggtgctggctgcccagacccctctggccaggatggaggggtggtcctgactcaacatgttactgaccagcaacttgtctttttctggactgaagcctgcaggagttaaaaagggcagggcatctcctgtgcatgggtgaagggagagccagctcccccgacggtgggcatttgtgaggcccatggttgagaaatgaataatttcccaattaggaagtgtaacagctgaggtctcttgagggagcttagccaatgtgggagcagcggtttggggagcagagacactaacgacttcagggcagggctctgatattccatgaatgtatcaggaaatatatatgtgtgtgtatgtttgcacacttgtgtgtgggctgtgagtgtaagtgtgagtaagagctggtgtctgattgttaagtctaaatatttccttaaactgtgtggactgtgatgccacacagagtggtctttctggagaggttataggtcactcctggggcctcttgggtcccccacgtgacagtgcctgggaatgtattattctgcagcatgacctgtgaccagcactgtctcagtttcactttcacatagatgtccctttcttggccagttatcccttccttttagcctagttcatccaatcctcactgggtggggtgaggaccactcctgtacactgaatatttatatttcactatttttatttatatttttgtaattttaaataaaagtgatcaataaaatgtgatttttctgatg

SEQ ID NO: 6029 - DNA, 791 bp, Homo sapiens
ctcttctggtctccggcgcccgcccctcagacgtaatgttgaattaaagaaaatactttatcagaagaagatggccactgcccagttgcagaggactcccatgagtgcactggtatttcccaataagatatcaactgaacaccagtctttggtgttagtgaagaggcttctagcagtttcagtatcctgtatcacgtatttgaggggaatattcccagaatgcgcttatggaacaagatatctagatggatgctaggatgttatgatgctttacagaaaaaatatctaaggatggttgttctagctgtatacacaaacccagaagatcctcagacaatttcagaatgttaccaattcaaattcaaatacaccaataatggaccactcatggacttcataagtaaaaaccaaagcaacgaatctagcatgttgtctactgacaccaagaaagcaagcattctcctcattcgcaagatttatatcctaatgcaaaatctggggcctttacctaatgatgtttgtttgaccatgaaacttttttactatgatgaagttacacccccagattaccagcctcccggttttaaggatggtgattgtgaaggagttatatttgaaggggaacctatgtatttaaatgtgggagaagtctcaacaccttttcacatcttcaaagtaaaagtgaccactgagagagaacgaatggaaaatattgactcaactatactatcaccaaaacaaataaaaacaccatttcaaaaaatcctgagggacaaagatgtagaagatga

SEQ ID NO: 6030 - DNA, 2482 bp, Homo sapiens; identical to SEQ ID NO: 389

SEQ ID NO: 6031 - DNA, 1460 bp, Homo sapiens
cctcattgcccagcggaccccagcctctgccaggttcggtccgccatcctcgtcccgtcctccgccggcccctgccccgcgcccagggatcctccagctcctttcgcccgcgccctccgttcgctccggacaccatggacaagttttggtggcacgcagcctggggactctgcctcgtgccgctgagcctggcgcagatcgatttgaatataacctgccgctttgcaggtgtattccacgtggagaaaaatggtcgctacagcatctctcggacggaggccgctgacctctgcaaggctttcaatagcaccttgcccacaatggcccagatggagaaagctctgagcatcggatttgagacctgcaggtatgggttcatagaagggcacgtggtgattccccggatccaccccaactccatctgtgcagcaaacaacacaggggtgtacatcctcacatccaacacctcccagtatgacacatattgcttcaatgcttcagctccacctgaagaagattgtacatcagtcacagacctgcccaatgcctttgatggaccaattaccataactattgttaaccgtgatggcacccgctatgtccagaaaggagaatacagaacgaatcctgaagacatctaccccagcaaccctactgatgatgacgtgagcagcggctcctccagtgaaaggagcagcacttcaggaggttacatcttttacaccttttctactgtacaccccatcccagacgaagacagtccctggatcaccgacagcacagacagaatccctgctaccaatatggactccagtcatagtataacgcttcagcctactgcaaatccaaacacaggtttggtggaagatttggacaggacaggacctctttcaatgacaacgcgtagagaccaagacacattccaccccagtggggggtcccataccactcatggatctgaatcagatggacactcacatgggagtcaagaaggtggagcaaacacaacctctggtcctataaggacaccccaaattccagaatggctgatcatcttggcatccctcttggccttggctttgattcttgcagtttgcattgcagtcaacagtcgaagaaggtgtgggcagaagaaaaagctagtgatcaacagtggcaatggagctgtggaggacagaaagccaagtggactcaacggagaggccagcaagtctcaggaaatggtgcatttggtgaacaaggagtcgtcagaaactccagaccagtttatgacagctgatgagacaaggaacctgcagaatgtggacatgaagattggggtgtaacacctacaccattatcttggaaagaaacaaccgttggaaacataaccattacagggagctgggacacttaacagatgcaatgtgctactgattgtttcattgcgaatcttttttagcataaaattttctactctt

SEQ ID NO: 6032 - DNA, 3665 bp, Homo sapiens
ccgacgacctcactcagctgcgttacgcgccgctccggctgccggccgcgcgccttgcccgccggctcccgcccgcaatcggcggctcagggcggacccgggtctctgcgttctcgcgagaagcgcggcgctgcggggccgtgggcgcctgagcccgcgcggccctcgagggccgaatatggggggatgcacggtgaagcctcagctgctgctcctggcgctcgtcctccacccctggaatccctgtctgggtgcggactcggagaagccctcgagcatccccacagataaattattagtcataactgtagcaacaaaagaaagtgatggattccatcgatttatgcagtcagccaaatatttcaattatactgtgaaggtccttggtcaaggagaagaatggagaggtggtgatggaattaatagtattggagggggccagaaagtgagattaatgaaagaagtcatggaacactatgctgatcaagatgatctggttgtcatgtttactgaatgctttgatgtcatatttgctggtggtccagaagaagttctaaaaaaattccaaaaggcaaaccacaaagtggtctttgcagcagatggaattttgtggccagataaaagactagcagacaagtatcctgttgtgcacattgggaaacgctatctgaattcaggaggatttattggctatgctccatatgtcaaccgtatagttcaacaatggaatctccaggataatgatgatgatcagctcttttacactaaagtttacattgatccactgaaaagggaagctattaacatcacattggatcacaaatgcaaaattttccagaccttaaatggagctgtagatgaagttgttttaaaatttgaaaatggcaaagccagagctaagaatacattttatgaaacattaccagtggcaattaatggaaatggacccaccaagattctcctgaattattttggaaactatgtacccaattcatggacacaggataatggctgcactctttgtgaattcgatacagtcgacttgtctgcagtagatgtccatccaaacgtatcaataggtgtttttattgagcaaccaaccccttttctacctcggtttctggacatattgttgacactggattacccaaaagaagcacttaaactttttattcataacaaagaagtttatcatgaaaaggacatcaaggtattttttgataaagctaagcatgaaatcaaaactataaaaatagtaggaccagaagaaaatctaagtcaagcggaagccagaaacatgggaatggacttttgccgtcaggatgaaaagtgtgattattactttagtgtggatgcagatgttgttttgacaaatccaaggactttaaaaattttgattgaacaaaacagaaagatcattgctcctcttgtaactcgtcatggaaagctgtggtccaatttctggggagcattgagtcctgatggatactatgcacgatctgaagattatgtggatattgttcaagggaatagagtaggagtatggaatgtcccatatatggctaatgtgtacttaattaaaggaaagacactccgatcagagatgaatgaaaggaactattttgttcgtgataaactggatcctgatatggctctttgccgaaatgctagagaaatgggtgtatttatgtacatttctaatagacatgaatttggaaggctattatccactgctaattacaatacttcccattataacaatgacctctggcagatttttgaaaatcctgtggactggaaggaaaagtatataaaccgtgattattcaaagattttcactgaaaatatagttgaacagccctgtccagatgtcttttggttccccatattttctgaaaaagcctgtgatgaattggtagaagaaatggaacattacggcaaatggtctgggggaaaacatcatgatagccgtatatctggtggttatgaaaatgtcccaactgatgatatccacatgaagcaagttgatctggagaatgtatggcttcattttatccgggagttcattgcaccagttacactgaaggtctttgcaggctattatacgaagggatttgcactactgaattttgtagtaaaatactcccctgaacgacagcgttctcttcgtcctcatcatgatgcttctacatttaccataaacattgcacttaataacgtgggagaagactttcagggaggtggttgcaaatttctaaggtacaattgctctattgagtcaccacgaaaaggctggagcttcatgcatcctgggagactcacacatttgcatgaaggacttcctgttaaaaatggaacaagatacattgcagtgtcatttatagatccctaagttatttacttttcattgaattgaaatttattttggatgaatgactggcatgaacacgtctttgaagttgtggctgagaagatgagaggaatatttaaataacatcaacagaacaacttcactttgggccaaacatttgaaaaactttttataaaaaattgtttgatatttcttaatgtctgctctgagccttaaaacacagattgaagaagaaaagaaagaaaaaacttaaatatttatttctatgctttgttgcctctgagaataatgacaatttatgaatttgtgtttcaaattgataaaatatttaggtacaaataacaagactaataatattttcttatttaaaaaaagcatgggaagatttttatttatcaaaatatagaggaaatgtagacaaaatggatataaatgaaaattaccatgttgtaaaaccttgaaaatcagattctaactggatttgtatgcaactaagtatttttctgaacacctatgcaggtcttatttacagtagttactaagggaacacacaaagaattacacaacgttttcctcaagaaaatggtacaaaacacaaccgaggagcgtatacagttgaaaacatttttgttttgattggaaggcagattattttatattagtattaaaaatcaaaccctatgtttctttcagatgaatcttccaaagtggattatattaagcaggtattagatttaggaaaacctttccatttcttaaagtattatcaagtgtcaagatcagcaagtgtccttaagtcaaacaggttttttttgttgttgtttttgctttgtttccttttttagaaagttctagaaaataggaaaacgaaaaatttcattgagatgagtagtgcatttaattattttttaaaaaactttttaagtacttgaattttatatcaggaaaacaaagttgttgagccttgcttcttccgttttgccctttgtctcgctccttattctttttttggggggagggttatttgcttttttatcttcctggcataatttccattttattcttctgagtgtctatgttaacttccctctatcccgcttataaaaaaattctccaacaaaaatacttgttgacttgatgttttatcacttctctaagtaaggttgaaatatccttattgtagctactgtttttaatgtaaaggttaaacttgaaaagaaattcttaatcacggtgccaaaattcattttctaacaccatgtgttagaaaattataaaaaataaaataatttta

SEQ ID NO: 6033 - DNA, 3936 bp, Homo sapiens
agaatgatcattagtcctaagcccattcagaggttcaagaatggggtcggctcaatttcagggccttattacccaagcccggctgcccttcggtgccaccagcaccactgctccgtcgctgcggaattccaaaggcaggtttggcgttagggccttggccccagagaggacgccgagcgctccacggaaagtctccgcccggctcccagggcgcacactcgcgcgcacgtggggccgaggccctgctcccggggcctcagggccagccggcgagggacccagccgagtgacagcaggaggcggagggaagctcagagctcccggagccgcccggccagcgtccggcctccctgatcgtctctggccggcgccctcgccctcgcccggcgcgcaccgagcagccgcgggcgccgagcagccaccgtcccgaccaagcgccggccctgcccgcagcggcaggatgaatgatttcggaatcaagaatatggaccaggtagcccctgtggctaacagttacagagggacactcaagcgccagccagcctttgacacctttgatgggtccctgtttgctgtttttccttctctaaatgaagagcaaacactgcaagaagtgccaacaggcttggattccatttctcatgactccgccaactgtgaattgcctttgttaaccccgtgcagcaaggctgtgatgagtcaagccttaaaagctaccttcagtggcttcaaaaaggaacagcggcgcctgggcattccaaagaacccctggctgtggagtgagcaacaggtatgccagtggcttctctgggccaccaatgagttcagtctggtgaacgtgaatctgcagaggttcggcatgaatggccagatgctgtgtaaccttggcaaggaacgctttctggagctggcacctgactttgtgggtgacattctctgggaacatctggagcaaatgatcaaagaaaaccaagaaaagacagaagatcaatatgaagaaaattcacacctcacctccgttcctcattggattaacagcaatacattaggttttggcacagagcaggcgccctatggaatgcagacacagaattaccccaaaggcggcctcctggacagcatgtgtccggcctccacacccagcgtactcagctctgagcaggagtttcagatgttccccaagtctcggctcagctccgtcagcgtcacctactgctctgtcagtcaggacttcccaggcagcaacttgaatttgctcaccaacaattctgggactcccaaagaccacgactcccctgagaacggtgcggacagcttcgagagctcagactccctcctccagtcctggaacagccagtcgtccttgctggatgtgcaacgggttccttccttcgagagcttcgaagatgactgcagccagtctctctgcctcaataagccaaccatgtctttcaaggattacatccaagagaggagtgacccagtggagcaaggcaaaccagttatacctgcagctgtgctggccggcttcacaggaagtggacctattcagctgtggcagtttctcctggagctgctatcagacaaatcctgccagtcattcatcagctggactggagacggatgggagtttaagctcgccgaccccgatgaggtggcccgccggtggggaaagaggaaaaataagcccaagatgaactacgagaagctgagccggggcttacgctactattacgacaagaacatcatccacaagacgtcggggaagcgctacgtgtaccgcttcgtgtgcgacctccagaacttgctggggttcacgcccgaggaactgcacgccatcctgggcgtccagcccgacacggaggactgaggtcgccgggaccaccctgagccggccccaggctcgtggactgagtgggaagcccatcctgaccagctgctccgaggacccaggaaaggcaggattgaaaatgtccaggaaagtggccaagaagcagtggccttattgcatcccaaaccacgcctcttgaccaggctgcctcccttgtggcagcaacggcacagctaattctactcacagtgcttttaagtgaaaatggtcgagaaagaggcaccaggaagccgtcctggcgcctggcagtccgtgggacgggatggttctggctgtttgagattctcaaaggagcgagcatgtcgtggacacacacagactatttttagattttcttttgccttttgcaaccaggaacagcaaatgcaaaaactctttgagagggtaggagggtgggaaggaaacaaccatgtcatttcagaagttagtttgtatatattattataatcttataattgttctcagaatcccttaacagttgtatttaacagaaattgtatattgtaatttaaaataattatataactgtatttgaaataagaattcagacatctgaggttttatttcatttttcaatagcacatatggaattttgcaaagatttaatctgccaagggccgactaagagaagttgtaaagtatgtattatttacatttaatagacttacagggataaggcctgtggggggtaatccctgctttttgtgtttttttgtttgtttgtttgtttgtttttggggggttttcttgccttggttgtctggcaaggactttgtacatttgggagtttttatgagaaacttaaatgttattatctgggcttatatctggcctctgctttctcctttaattgtaaagtaaaagctataaagcagtatttttcttgacaaatggcatatgttttccacttctttgcatgcgtttaagtcagtttatacacaaaatggattttattttttagtttaactgtgtttctccgacagctcacctctctctgaccacccagccatttccttcctgtgctccacgttcttctgtgtgattaaaataagaatattatttttggaaatatgcaactccttttcagagatcaggagggatttatgtagcagctatttttactgcaaaagtaattcactggaaaaaaaatgtaatttgtaagaaagctttatttttatctcagctctatgtaaagttaaagttactgtacagagctgaaggacggggggcggtaggggtcttgatgaaacctcttgaacgaagcacagtttgtcccatctttgttcactcgtgtgtctcaaccatcttaatagcatgctgctcctttttgctcagtgtccacagcaagatgacgtgattcttattttcttggacacagactattctgaggcacagagcggggacttaagatgggaaagagaaagcatcggagccattcattcggagaaaacgttttgatcaaaatggagacttttgtagtcgtttcaaaagagcacctgagtcatgtgtattcccggcctttataaatgacccggtcaagttggtttcaaagtccgacaggcttgtctgtttactagctgcgtggccttggacgggtggctgacatctgtaaagaatcctcctgtgatgaaactgaggaatcgggtggccgggcaagctgggaagagcaaagccagagctgcgctgcctcaatacccacaaaagaccattcccagtatacataagcacaggatgtttttctcaagagggatgtatttatcacttggacatctgtttataatataaacagacatgtgactgggaacatcttgctgccaaaagaatcctaggcagtggctcattgtatgtgaggttgaaccacgtgaaattgccaatattaggctggcttttatctacaaagaaggagtttcatggggttcagcctaacagttatggaaactacagtccttataaaccattggcatggtaataaacagatcttaagtataaaaattttgtaattgggcctttactctctcaataataaagtattttgtttatataaa

SEQ ID NO: 6034 - DNA, 4630 bp, Homo sapiens
agccccgaggacgcgagcggcaggtgtgcacagaggttctccactttgttttctgaactcgcggtcaggatggttttctctgtcaggcagtgtggccatgttggcagaactgaagaagttttactgacgttcaagatattccttgtcatcatttgtcttcatgtcgttctggtaacatccctggaagaagatactgataattccagtttgtcaccaccacctgctaaattatctgttgtcagttttgccccctcctccaatggtactccagaggttgaaacaacaagcctcaatgatgttactttaagcttactcccttcaaacgaaacaggcgtcaaaccccagagaaatatctgcaatttgtcatctatttgcaatgactcagcattttttagaggtgagatcatgtttcaatatgataaagaaagcactgttccccagaatcaacatataacgaatggcaccttaactggagtcctgtctctaagtgaattaaaacgctcagagctcaacaaaaccctgcaaaccctaagtgagacttactttataatgtgtgctacagcagaggcccaaagcacattaaattgtacattcacaataaaactgaataatacaatgaatgcatgtgctgtaatagctgctttggaaagagtaaagattcgaccaatggaacactgctgctgttctgtcaggataccctgcccttcctccccagaagagttggaaaagcttcagtgtgacctgcaggatcccattgtctgtcttgctgaccatccacgtggcccaccattttcttccagccaatccatcccagtggtgcctcgggccactgtgctttcccaggtccccaaagctacctcttttgctgagcctccagattattcacctgtgacccacaatgttccctctccaataggggagattcaacccctttcaccccagccttcagctcccatagcttccagccctgccattgacatgcccccacagtctgaaacgatctcttcccctatgccccaaacccatgtctccggcaccccacctcctgtgaaagcctcattttcctctcccaccgtgtctgcccctgcgaatgtcaacactaccagcgcacctcctgtccagacagacatcgtcaacaccagcagtatttctgatcttgagaaccaagtgttgcagatggagaaggctctgtccttgggcagcctggagcctaacctcgcaggagaaatgatcaaccaagtcagcagactccttcattccccgcctgacatgctggcccctctggctcaaagattgctgaaagtagtggatgacattggcctacagctgaacttttcaaacacgactataagtctaacctccccttctttggctctggctgtgatcagagtgaatgccagtagtttcaacacaactacctttgtggcccaagaccctgcaaatcttcaggtttctctggaaacccaagctcctgagaacagtattggcacaattactcttccttcatcgctgatgaataatttaccagctcatgacatggagctagcttccagggttcagttcaatttttttgaaacacctgctttgtttcaggatccttccctggagaacctctctctgatcagctacgtcatatcatcgagtgttgcaaacctgaccgtcaggaacttgacaagaaacgtgacagtcacattaaagcacatcaacccgagccaggatgagttaacagtgagatgtgtattttgggacttgggcagaaatggtggcagaggaggctggtcagacaatggctgctctgtcaaagacaggagattgaatgaaaccatctgtacctgtagccatctaacaagcttcggcgttctgctggacctatctaggacatctgtgctgcctgctcaaatgatggctctgacgttcattacatatattggttgtgggctttcatcaatttttctgtcagtgactcttgtaacctacatagcttttgaaaagatccggagggattacccttccaaaatcctcatccagctgtgtgctgctctgcttctgctgaacctggtcttcctcctggactcgtggattgctctgtataagatgcaaggcctctgcatctcagtggctgtatttcttcattattttctcttggtctcattcacatggatgggcctagaagcattccatatgtacctggcccttgtcaaagtatttaatacttacatccgaaaatacatccttaaattctgcattgtcggttggggggtaccagctgtggttgtgaccatcatcctgactatatccccagataactatgggcttggatcctatgggaaattccccaatggttcaccggatgacttctgctggatcaacaacaatgcagtattctacattacggtggtgggatatttctgtgtgatatttttgctgaacgtcagcatgttcattgtggtcctggttcagctctgtcgaattaaaaagaagaagcaactgggagcccagcgaaaaaccagtattcaagacctcaggagtatcgctggccttacatttttactgggaataacttggggctttgccttctttgcctggggaccagttaacgtgaccttcatgtatctgtttgccatctttaataccttacaaggatttttcatattcatcttttactgtgtggccaaagaaaatgtcaggaagcaatggaggcggtatctttgttgtggaaagttacggctggctgaaaattctgactggagtaaaactgctactaatggtttaaagaagcagactgtaaaccaaggagtgtccagctcttcaaattccttacagtcaagcagtaactccactaactccaccacactgctagtgaataatgattgctcagtacacgcaagcgggaatggaaatgcttctacagagaggaatggggtctcttttagtgttcagaatggagatgtgtgccttcacgatttcactggaaaacagcacatgtttaacgagaaggaagattcctgcaatgggaaaggccgtatggctctcagaaggacttcaaagcggggaagcttacactttattgagcaaatgtgattcctttcttctaaaatcaaagcatgatgcttgacagtgtgaaatgtccaattttaccttttacacaatgtgagatgtatgaaaatcaactcattttattctcggcaacatctggagaagcataagctaattaagggcgatgattattattacaagaagaaaccaagacattacaccatggtttttagacatttctgatttggtttcttatctttcattttataagaaggttggttttaaacaatacactaagaatgactcctataaagaaaacaaaaaaaggtagtgaactttcagctaccttttaaagaggctaagttatctttgataacatcatataaagcaactgttgacttcagcctgttggtgagtttagttgtgcatgcctttgttgtatataagctaaattctagtgacccatgtgtcaaaaatcttacttctacatttttttgtatttattttctactgtgtaaatgtattcctttgtagaatcatggttgttttgtctcacgtgataattcagaaaatccttgctcgttccgcaaatcctaaagctccttttggagatgatataggatgtgaaatacagaaacctcagtgaaatcaagaaataatgatcccagccagactgagaaaatgtaagcagacagtgccacagttagctcatacagtgcctttgagcaagttaggaaaagatgcccccactgggcagacacagccctatgggctcatggtttgacaaacagagtggagagaccatattttagccccactcaccctcttgggtgcacgacctgtacagccaaacacagcatccaatatgaatacccatcccctgaccgcatccccagtagtcagattatagaatctgcaccaagatgtttagctttataccttggccacagagagggatgaactgtcatccagaccatgtgtcaggaaaattgtgaacgtagatgaggtacatacactgccgcttctcaaatccccagagcctttaggaacaggagagtagactaggattccttctcttaaaaaggtacatatatatggaaaaaaatcatattgccgttctttaaaaggcaactgcatggtacattgttgattgttatgactggtacactctggcccagccagagctataattgttttttaaatgtgtcttgaagaatgcacagtgacaaggggagtagctattgggaacagggaactgtcctacactgctattgttgctacatgtatcgagccttgattgctcctagttatatacagggtctatcttgcttcctacctacatctgcttgagcagtgcctcaagtacatccttattaggaacatttcaaaccccttttagttaagtctttcactaaggttctcttgcatatatttcaagtgaatgttggatctcagactaaccatagtaataatacacatttctgtgagtgctgacttgtctttgcaatatttcttttctgatttatttaattttcttgtatttatatgttaaaatcaaaaatgttaaaatcaatgaaataaatttgcagttaag

SEQ ID NO: 6035 - DNA, 9687 bp, Homo sapiens
ttccccagcagctgctgctcgctcagctcacaagccaaggccaggggacagggcggcagcgactcctctggctcccgagaagtggatccggtcgcggccactacgatgccgggagccgccggggtcctcctccttctgctgctctccggaggcctcgggggcgtacaggcgcagcggccgcagcagcagcggcagtcacaggcacatcagcaaagaggtttattccctgctgtcctgaatcttgcttctaatgctcttatcacgaccaatgcaacatgtggagaaaaaggacctgaaatgtactgcaaattggtagaacatgtccctgggcagcctgtgaggaacccgcagtgtcgaatctgcaatcaaaacagcagcaatccaaaccagagacacccgattacaaatgctattgatggaaagaacacttggtggcagagtcccagtattaagaatggaatcgaataccattatgtgacaattaccctggatttacagcaggtgttccagatcgcgtatgtgattgtgaaggcagctaactccccccggcctggaaactggattttggaacgctctcttgatgatgttgaatacaagccctggcagtatcatgctgtgacagacacggagtgcctaacgctttacaatatttatccccgcactgggccaccgtcatatgccaaagatgatgaggtcatctgcacttcattttactccaagatacaccccttagaaaatggagagattcacatctctttaatcaatgggagaccaagtgccgatgatccttctccagaactgctagaatttacctccgctcgctatattcgcctgagatttcagaggatccgcacactgaatgctgacttgatgatgtttgctcacaaagacccaagagaaattgaccccattgtcaccagaagatattactactcggtcaaggatatttcagttggagggatgtgcatctgctatggtcatgccagggcttgtccacttgatccagcgacaaataaatctcgctgtgagtgtgagcataacacatgtggcgatagctgtgatcagtgctgtccaggattccatcagaaaccctggagagctggaacttttctaactaaaactgaatgtgaagcatgcaattgtcatggaaaagctgaagaatgctattatgatgaaaatgttgccagaagaaatctgagtttgaatatacgtggaaagtacattggagggggtgtctgcattaattgtacccaaaacactgctggtataaactgcgagacatgtactgatggcttcttcagacccaaaggggtatctccaaattatccaaggccatgccagccatgtcattgcgatccaattggttccttaaatgaagtctgtgtcaaggatgagaaacatgctcgacgaggtttggcacctggatcctgtcattgcaaaactggttttggaggtgtgagctgtgatcggtgtgccaggggctacactggctacccggactgcaaagcctgtaactgcagtgggttagggagcaaaaatgaggatccttgttttggcccctgtatctgcaaggaaaatgttgaaggaggagactgtagtcgttgcaaatccggcttcttcaatttgcaagaggataattggaaaggctgcgatgagtgtttctgttcaggggtttcaaacagatgtcagagttcctactggacctatggcaaaatacaagatatgagtggctggtatctgactgaccttcctggccgcattcgagtggctccccagcaggacgacttggactcacctcagcagatcagcatcagtaacgcggaggcccggcaagccctgccgcacagctactactggagcgcgccggctccctatctgggaaacaaactcccagcagtaggaggacagttgacatttaccatatcatatgaccttgaagaagaggaagaagatacagaacgtgttctccagcttatgattatcttagagggtaatgacttgagcatcagcacagcccaagatgaggtgtacctgcacccatctgaagaacatactaatgtattgttacttaaagaagaatcatttaccatacatggcacacattttccagtccgtagaaaggaatttatgacagtgcttgcgaatttgaagagagtcctcctacaaatcacatacagctttgggatggatgccatcttcaggttgagctctgttaaccttgaatccgctgtctcctatcctactgatggaagcattgcagcagctgtagaagtgtgtcagtgcccaccagggtatactggctcctcttgtgaatcttgttggcctaggcacaggcgagttaacggcactatttttggtggcatctgtgagccatgtcagtgctttggtcatgcggagtcctgtgatgacgtcactggagaatgcctgaactgtaaggatcacacaggtggcccatattgtgataaatgtcttcctggtttctatggcgagcctactaaaggaacctctgaagactgtcaaccctgtgcctgtccactcaatatcccatccaataactttagcccaacgtgccatttagaccggagtcttggattgatctgtgatggatgccctgtcgggtacacaggaccacgctgtgagaggtgtgcagaaggctattttggacaaccctctgtacctggaggatcatgtcagccatgccaatgcaatgacaaccttgacttctccatccctggcagctgtgacagcttgtctggctcctgtctgatatgtaaaccaggtacaacaggccggtactgtgagctctgtgctgatggatattttggagatgcagttgatgcgaagaactgtcagccctgtcgctgtaatgccggtggctctttctctgaggtttgccacagtcaaactggacagtgtgagtgcagagccaacgttcagggtcagagatgtgacaaatgcaaggctgggacctttggcctacaatcagcaaggggctgtgttccctgcaactgcaattcttttgggtctaagtcattcgactgtgaagagagtggacaatgttggtgccaacctggagtcacagggaagaaatgtgaccgctgtgcccacggctatttcaacttccaagaaggaggctgcacagcttgtgaatgttctcatctgggtaataattgtgacccaaagactgggcgatgcatttgccctcccaataccattggagagaaatgttctaaatgtgcacccaatacctggggccacagcattaccactggttgtaaggcttgtaactgcagcacagtgggatccttggatttccaatgcaatgtaaatacaggccaatgcaactgtcatccaaaattctctggtgcaaaatgtacagagtgcagtcgaggtcactggaactaccctcgctgcaatctctgtgactgcttcctccctgggacagatgccacaacctgtgattcagagactaaaaaatgctcctgtagtgatcaaactgggcagtgcacttgtaaggtgaatgtggaaggcatccactgtgacagatgccggcctggcaaattcggactcgatgccaagaatccacttggctgcagcagctgctattgcttcggcactactacccagtgctctgaagcaaaaggactgatccggacgtgggtgactctgaaggctgagcagaccattctacccctggtagatgaggctctgcagcacacgaccaccaagggcattgtttttcaacatccagagattgttgcccacatggacctgatgagagaagatctccatttggaacctttttattggaaacttccagaacaatttgaaggaaagaagttgatggcctatgggggcaaactcaagtatgcaatctatttcgaggctcgggaagaaacaggtttctctacatataatcctcaagtgatcattcgaggtgggacacctactcatgctagaattatcgtcaggcatatggctgctcctctgattggccaattgacaaggcatgaaattgaaatgacagagaaagaatggaaatattatggggatgatcctcgagtccatagaactgtgacccgagaagacttcttggatatactatatgatattcattacattcttatcaaagctacttatggaaatttcatgcgacaaagcaggatttctgaaatctcaatggaggtagctgaacaaggacgtggaacaacaatgactcctccagctgacttgattgaaaaatgtgattgtcccctgggctattctggcctgtcctgtgaggcatgcttgccgggattttatcgactgcgttctcaaccaggtggccgcacccctggaccaaccctgggcacctgtgttccatgtcaatgtaatggacacagcagcctgtgtgaccctgaaacatcgatatgccagaattgtcaacatcacactgctggtgacttctgtgaacgatgtgctcttggatactatggaattgtcaagggattgccaaatgactgtcagcaatgtgcctgccctctgatttcttccagtaacaatttcagcccctcttgtgtcgcagaaggacttgacgactaccgctgcacggcttgtccacggggatatgaaggccagtactgtgaaaggtgtgcccctggctatactggcagtccaggcaaccctggaggctcctgccaagaatgtgagtgtgatccctatggctcactgcctgtgccctgtgaccctgtcacaggattctgcacgtgccgacctggagccacgggaaggaagtgtgacggctgcaagcactggcatgcacgcgagggctgggagtgtgttttttgtggagatgagtgcactggccttcttctcggtgacttggctcgcctggagcagatggtcatgagcatcaacctcactggtccgctgcctgcgccatataaaatgctgtatggtcttgaaaatatgactcaggagctaaagcacttgctgtcacctcagcgggccccagagaggcttattcagctggcagagggcaatctgaatacactcgtgaccgaaatgaacgagctgctgaccagggctaccaaagtgacagcagatggcgagcagaccggacaggatgctgagaggaccaacacaagagcaaagtccctgggagaattcattaaggagcttgcccgggatgcagaagctgtaaatgaaaaagctataaaactaaatgaaactctaggaactcgagacgaggcctttgagagaaatttggaagggcttcagaaagagattgaccagatgattaaagaactgaggaggaaaaatctagagacacaaaaggaaattgctgaagatgagttggtagctgcagaagcccttctgaaaaaagtgaagaagctgtttggagagtcccggggggaaaatgaagaaatggagaaggatctccgggaaaaactggctgactacaaaaacaaagttgatgatgcttgggaccttttgagagaagccacagataaaatcagagaagctaatcgcctatttgcagtaaatcagaaaaacatgactgcattggagaaaaagaaggaggctgttgaaagcggcaaacgacaaattgagaacactttaaaagagggcaatgacatactcgatgaagccaaccgtcttgcagatgaaatcaactccatcatagactatgttgaagacatccaaactaaattgccacctatgtctgaggagcttaatgataaaatagatgacctctcccaagaaataaaggacaggaagcttgctgagaaggtgtcccaggctgagagccacgcagctcagttgaatgactcatctgctgtccttgatggaatccttgatgaggctaaaaacatctccttcaatgccactgcagccttcaaagcttacagcaatattaaggactatattgatgaagctgagaaagttgccaaagaagccaaagatcttgcacatgaagctacaaaactggcaacaggtcctcggggtttattaaaggaagatgccaaaggctgtcttcagaaaagcttcaggattcttaacgaagccaagaagttagcaaatgatgtaaaagaaaatgaagaccatctaaatggcttaaaaaccaggatagaaaatgctgatgctagaaatggggatctcttgagaactttgaatgacactttgggaaagttatcagctattccaaatgatacagctgctaaactgcaagctgttaaggacaaagccagacaagccaacgacacagctaaagatgtactggcacagattacagagctccaccagaacctcgatggcctgaagaagaattacaataaactagcagacagcgtcgccaaaacgaatgctgtggttaaagatccttccaagaacacagttgccgatgcagatgccactgtcaaaaatttagaacaggaagctgaccggctaatagataaactcaaacccatcaaggaacttgaggataacctaaagaaaaacatctctgagataaaggaattgataaaccaagctcggaaacaagccaattctatcaaagtatctgtgtcttcaggaggtgactgcattcgaacatacaaaccagaaatcaagaaaggaagttacaataatattgttgtcaacgtaaagacagctgttgctgataacctcctcttttatcttggaagtgccaaatttattgactttctggctatagaaatgcgtaaaggcaaagtcagcttcctctgggatgttggatctggagttggacgtgtagagtacccagatttgactattgatgactcatattggtaccgtatcgtagcatcaagaactgggagaaatggaactatttctgtgagagccctggatggacccaaagccagcattgtgcccagcacacaccattcgacgtctcctccagggtacacgattctagatgtggatgcaaatgcaatgctgtttgttggtggcctgactgggaaattaaagaaggctgatgctgtacgtgtgattacattcactggctgcatgggagaaacatactttgacaacaaacctataggtttgtggaatttccgagaaaaagaaggtgactgcaaaggatgcactgtcagtcctcaggtggaagatagtgaggggactattcaatttgatggagaaggttatgcattggtcagccgtcccattcgctggtaccccaacatctccactgtcatgttcaagttcagaacattttcttcgagtgctcttctgatgtatcttgccacacgagacctgagagatttcatgagtgtggagctcactgatgggcacataaaagtcagttacgatctgggctcaggaatggcttccgttgtcagcaatcaaaaccataatgatgggaaatggaaatcattcactctgtcaagaattcaaaaacaagccaatatatcaattgtagatatagatactaatcaggaggagaatatagcaacttcgtcttctggaaacaactttggtcttgacttgaaagcagatgacaaaatatattttggtggcctgccaacgctgagaaacttgagtatgaaagcaaggccagaagtaaatctgaagaaatattccggctgcctcaaagatattgaaatttcaagaactccgtacaatatactcagtagtcccgattatgttggtgttaccaaaggatgttccctggagaatgtttacacagttagctttcctaagcctggttttgtggagctctcccctgtgccaattgatgtaggaacagaaatcaacctgtcattcagcaccaagaatgagtccggcatcattcttttgggaagtggagggacaccagcaccacctaggagaaaacgaaggcagactggacaggcctattatgcaatactcctcaacaggggccgtctggaagtgcatctctccacaggggcacgaacaatgaggaaaattgtgatcagaccagagccgaatctgtttcatgatggaagagaacattccgttcatgtagagcgaactagaggcatctttacagttcaagtggatgaaaacagaagatacatgcaaaacctgacagttgaacagcctatcgaagttaaaaagcttttcgttgggggtgctccacctgaatttcaaccttccccactcagaaatattcctccttttgaaggctgcatatggaatcttgttattaactctgtccccatggactttgcaaggcctgtgtccttcaaaaatgctgacattggtcgctgtgcccatcagaaactccgtgaagatgaagatggagcagctccagctgaaatagttatccagcctgagccagttcccaccccagcctttcctacgcccaccccagttctgacacatggtccttgtgctgcagaatcagaaccagctcttttgatagggagcaagcagttcgggctttcaagaaacagtcacattgcaattgcatttgatgacaccaaagttaaaaaccgtctcacaattgagttggaagtaagaaccgaagctgaatccggcttgcttttttacatggctcgcatcaatcatgctgattttgcaacagttcagctgagaaatggattgccctacttcagctatgacttggggagtggggacacccacaccatgatccccaccaaaatcaatgatggccagtggcacaagattaagataatgagaagtaagcaagaaggaattctttatgtagatggggcttccaacagaaccatcagtcccaaaaaagccgacatcctggatgtcgtgggaatgctgtatgttggtgggttacccatcaactacactacccgaagaattggtccagtgacctatagcattgatggctgcgtcaggaatctccacatggcagaggcccctgccgatctggaacaacccacctccagcttccatgttgggacatgttttgcaaatgctcagaggggaacatattttgacggaaccggttttgccaaagcagttggtggattcaaagtgggattggaccttcttgtagaatttgaattccgcacaactacaacgactggagttcttctggggatcagtagtcaaaaaatggatggaatgggtattgaaatgattgatgaaaagttgatgtttcatgtggacaatggtgcgggcagattcactgctgtctatgatgctggggttccagggcatttgtgtgatggacaatggcataaagtcactgccaacaagatcaaacaccgcattgagctcacagtcgatgggaaccaggtggaagcccaaagcccaaacccagcatctacatcagctgacacaaatgaccctgtgtttgttggaggcttcccagatgacctcaagcagtttggcctaacaaccagtattccgttccgaggttgcatcagatccctgaagctcaccaaaggcacaggcaagccactggaggttaattttgccaaggccctggaactgaggggcgttcaacctgtatcatgcccagccaactaataaaaataagtgtaaccccaggaagagtctgtcaaaacaagtatatcaagtaaaacaaacaaatatattttacctatatatgttaattaaactaatttgtgcatgtacatagaattctttctgtattcagatggtgctaattcagactccagactgaattttaattcaagttctttctcaagtctataaataatattaaactgattatttcattct

SEQ ID NO: 6036 - DNA, 1017 bp, Homo sapiens
gtctcagcggctgccaacagatcatgagccatcagctcctctggggccagctataggacaacagaactctcaccaaaggaccagacacagtgggcaccatgggacagtgtcggtcagccaacgcagaggatgctcaggaattcagtgatgtggagagggccattgagaccctcatcaagaactttcaccagtactccgtggagggtgggaaggagacgctgaccccttctgagctacgggacctggtcacccagcagctgccccatctcatgccgagcaactgtggcctggaagagaaaattgccaacctgggcagctgcaatgactctaaactggagttcaggagtttctgggagctgattggagaagcggccaagagtgtgaagctggagaggcctgtccgggggcactgagaactccctctggaattcttggggggtgttggggagagactgtgggcctggagataaaacttgtctcctctaccaccaccctgtaccctagcctgcacctgtcctcatctctgcaaagttcagcttccttccccaggtctctgtgcactctgtcttggatgctctggggagctcatgggtggaggagtctccaccagagggaggctcaggggactggttgggccagggatgaatatttgagggataaaaattgtgtaagagccaaagaattggtagtagggggagaacagagaggagctgggctatgggaaatgatttgaataatggagctgggaatatggctggatatctggtactaaaaaagggtctttaagaacctacttcctaatctcttccccaatccaaaccatagctgtctgtccagtgctctcttcctgcctccagctctgccccaggctcctcctagactctgtccctgggctagggcaggggaggagggagagcagggttgggggagaggctgaggagagtgtgacatgtggggagaggaccagctgggtgcttgggcattgacagaatgatggttgttttgtatcatttgatt

SEQ ID NO: 6037 - DNA, 6174 bp, Homo sapiens; identical to SEQ ID NO: 970

SEQ ID NO: 6038 - DNA, 870 bp, Homo sapiens
agggcattcccggcggctccgggtttggcaacgaggacgggggagtgcgactgcgtctcgggcagcatggccgagaagcggcacacacgggactccgaagcccagcggctccccgactccttcaaggacagccccagtaagggccttggaccttgcggatggattttggtggcgttctcattcttattcaccgttataactttcccaatctcaatatggatgtgcataaaggttattgcagccgaaggagaaatgaatgcatccagggctctgaaagaagcctccatggtcatcactgaatctcctgcagcccttcagctccgatacctgcagacactgaccaccattgctgctgagaaaaactcaacaattgtcttccctctgcccatagatatgctgcaaggaatcataggggcaaaacacagccatctaggctagtgtagagatgagcgctagccttccaagcatgaagtcggggaccaaattagcctttaactcataaagagagggtagggcttttctttttccatatgtcaattgtggtgttcccagaatgtatagcagttataaaaataggtgaaagaattgttagcttgtaaatactgagagattggtgatttatataaggtaatctgttagtcttaaaatagttaaaagtttgtatttttagattattatgtagtaggttagatccctcttgttttgacttccactgactcattctgaaccccctaagcacccaggccagaggcaagaacctgggctgtaactgccacctgacaccgctgactggctaaatgctttgcagaaagtgatgaccttacaccacaaccagcttctccaggtcatatgtgccttacctccagagag

SEQ ID NO: 6039 - DNA, 3092 bp, Homo sapiens
gaggccaggggagggtgcgaaggaggcgcctgcctccaacctgcgggcgggaggtgggtggctgcggggcaattgaaaaagagccggcgaggagttccccgaaacttgttggaactccgggctcgcgcggaggccaggagctgagcggcggcggctgccggacgatgggagcgtgagcaggacggtgataacctctccccgatcgggttgcgagggcgccgggcagaggccaggacgcgagccgccagcggtgggacccatcgacgacttcccggggcgacaggagcagccccgagagccagggcgagcgcccgttccaggtggccggaccgcccgccgcgtccgcgccgcgctccctgcaggcaacgggagacgcccccgcgcagcgcgagcgcctcagcgcggccgctcgctctccccctcgagggacaaacttttcccaaacccgatccgagcccttggaccaaactcgcctgcgccgagagccgtccgcgtagagcgctccgtctccggcgagatgtccgagcgcaaagaaggcagaggcaaagggaagggcaagaagaaggagcgaggctccggcaagaagccggagtccgcggcgggcagccagagcccagccttgcctccccgattgaaagagatgaaaagccaggaatcggctgcaggttccaaactagtccttcggtgtgaaaccagttctgaatactcctctctcagattcaagtggttcaagaatgggaatgaattgaatcgaaaaaacaaaccacaaaatatcaagatacaaaaaaagccagggaagtcagaacttcgcattaacaaagcatcactggctgattctggagagtatatgtgcaaagtgatcagcaaattaggaaatgacagtgcctctgccaatatcaccatcgtggaatcaaacgagatcatcactggtatgccagcctcaactgaaggagcatatgtgtcttcagagtctcccattagaatatcagtatccacagaaggagcaaatacttcttcatctacatctacatccaccactgggacaagccatcttgtaaaatgtgcggagaaggagaaaactttctgtgtgaatggaggggagtgcttcatggtgaaagacctttcaaacccctcgagatacttgtgcaagtgccaacctggattcactggagcaagatgtactgagaatgtgcccatgaaagtccaaaaccaagaaaagcattctggagaaccctttccagaggcggaggagctgtaccagaagagagtgctgaccataaccggcatctgcatcgccctccttgtggtcggcatcatgtgtgtggtggcctactgcaaaaccaagaaacagcggaaaaagctgcatgaccgtcttcggcagagccttcggtctgaacgaaacaatatgatgaacattgccaatgggcctcaccatcctaacccaccccccgagaatgtccagctggtgaatcaatacgtatctaaaaacgtcatctccagtgagcatattgttgagagagaagcagagacatccttttccaccagtcactatacttccacagcccatcactccactactgtcacccagactcctagccacagctggagcaacggacacactgaaagcatcctttccgaaagccactctgtaatcgtgatgtcatccgtagaaaacagtaggcacagcagcccaactgggggcccaagaggacgtcttaatggcacaggaggccctcgtgaatgtaacagcttcctcaggcatgccagagaaacccctgattcctaccgagactctcctcatagtgaaaggtatgtgtcagccatgaccaccccggctcgtatgtcacctgtagatttccacacgccaagctcccccaaatcgcccccttcggaaatgtctccacccgtgtccagcatgacggtgtccatgccttccatggcggtcagccccttcatggaagaagagagacctctacttctcgtgacaccaccaaggctgcgggagaagaagtttgaccatcaccctcagcagttcagctccttccaccacaaccccgcgcatgacagtaacagcctccctgctagccccttgaggatagtggaggatgaggagtatgaaacgacccaagagtacgagccagcccaagagcctgttaagaaactcgccaatagccggcgggccaaaagaaccaagcccaatggccacattgctaacagattggaagtggacagcaacacaagctcccagagcagtaactcagagagtgaaacagaagatgaaagagtaggtgaagatacgcctttcctgggcatacagaaccccctggcagccagtcttgaggcaacacctgccttccgcctggctgacagcaggactaacccagcaggccgcttctcgacacaggaagaaatccaggccaggctgtctagtgtaattgctaaccaagaccctattgctgtataaaacctaaataaacacatagattcacctgtaaaactttattttatataataaagtattccaccttaaattaaacaatttattttattttagcagttctgcaaatagaaaacaggaaaaaaacttttataaattaaatatatgtatgtaaaaatgtgttatgtgccatatgtagcaattttttacagtatttcaaaacgagaaagatatcaatggtgcctttatgttatgttatgtcgagagcaagttttgtacagttacagtgattgcttttccacagtatttctgcaaaacctctcatagattcagtttttgctggcttcttgtgcattgcattatgatgttgactggatgtatgatttgcaagacttgcaactgtccctctgtttgcttgtagtagcacccgatcagtatgtcttgtaatggcacatccatccagatatgcctctcttgtgtatgaagttttctttgctttcagaatatgaaatgagttgtgtctactctgccagccaaaggtttgcctcattgggctctgagataatagtagatccaacagcatgctactattaaatacagcaagaaactgcattaagtaatgttaaatattaggaagaaagtaatactgtgattt

SEQ ID NO: 6040 - DNA, 5910 bp, Homo sapiens
gcggccgcttcccaccgtccctctccccttactggcagagcgcgctgcgggcggactcccgggcccggagcagcccaccggccaccccaccgcccacccggctcccggtgtctcctcccggccgctctacccagcaactttccgtgctttgttccccgactggaaatgctttacggaagcgtcttggacagggtctccgccaggcgacaagagctcggtgctgagatgtgttacgttctcatctccccatcaattatggatggaaacaaataaggaagagtcaattttgctgagccccttctccggcaacgagaggcgttctgcagccgggagggagccgccgctcgcgccggcagccgctggcaggggcatggtgaggaggaaggtagctcagtggcatttctgagcaggggccaccctgacttcaccttggcccaccatgagggtcttcctgctttgtgcctacatactgctgctgatggtttcccagttgagggcagtcagctttcctgaagatgatgaaccccttaatactgtcgactatcactattcaaggcaatatccggtttttagaggacgcccttcaggcaatgaatcgcagcacaggctggactttcagctgatgttgaaaattcgagacacactttatattgctggcagggatcaagtttatacagtaaacttaaatgaaatgcccaaaacagaagtaatacccaacaagaaactgacatggcgatcaagacaacaggatcgagaaaactgtgctatgaaaggcaagcataaagatgaatgccacaactttatcaaagtatttgttccaagaaacgatgagatggtttttgtttgtggtaccaatgcattcaatcccatgtgtagatactacaggttgagtaccttagaatatgatggggaagaaattagtggcctggcaagatgcccatttgatgccagacaaaccaatgttgccctctttgctgatgggaagctgtattctgccacagtggctgacttcttggccagcgatgccgttatttatcgaagcatgggtgatggatctgcccttcgcacaataaaatatgattccaaatggataaaagagccacactttcttcatgccatagaatatggaaactatgtctatttcttctttcgagaaatcgctgtcgaacataataatttaggcaaggctgtgtattcccgcgtggcccgcatatgtaaaaacgacatgggtggttcccagcgggtcctggagaaacactggacttcatttctaaaggctcggctgaactgttctgtccctggagattcgtttttctactttgatgttctgcagtctattacagacataatacaaatcaatggcatccccactgtggtcggggtgtttaccacgcagctcaatagcatccctggttctgctgtctgtgcatttagcatggatgacattgaaaaagtattcaaaggacggtttaaggaacagaaaactccagattctgtttggacagcagttcccgaagacaaagtgccaaagccaaggcctggctgttgtgcaaaacacggccttgccgaagcttataaaacctccatcgatttcccggatgaaactctgtcattcatcaaatctcatcccctgatggactctgccgttccacccattgccgatgagccctggttcacaaagactcgggtcaggtacagactgacggccatctcagtggaccattcagccggaccctaccagaactacacagtcatctttgttggctctgaagctggcatggtacttaaagttctggcaaagaccagtcctttctctttgaacgacagcgtattactggaagagattgaagcctacaaccatgcaaagtgcagtgctgagaatgaggaagacaaaaaggtcatctcattacagttggataaagatcaccacgctttatatgtggcgttctctagctgcattatccgcatccccctcagtcgctgtgagcgttatggatcatgtaaaaagtcttgtattgcatctcgtgacccgtattgtggctggttaagccagggatcctgtggtagagtgaccccagggatgctgctgttaaccgaagacttctttgctttccataaccacagtgctgaaggatatgaacaagacacagaattcggcaacacagctcatctaggggactgccatggtgtacgatgggaagtccagtctggagagtccaaccagatggtccacatgaatgtcctcatcacctgtgtctttgctgcttttgttttgggggcattcattgcaggtgtggcagtatactgctatcgagacatgtttgttcggaaaaacagaaagatccataaagatgcagagtccgcccagtcatgcacagactccagtggaagttttgccaaactgaatggtctctttgacagccctgtcaaggaataccaacagaatattgattctcctaaactgtatagtaacctgctaaccagtcggaaagagctaccacccaatggagatactaaatccatggtaatggaccatcgagggcaacctccagagttggctgctcttcctactcctgagtctacacccgtgcttcaccagaagaccctgcaggccatgaagagccactcagaaaaggcccatggccatggagcttcaaggaaagaaacccctcagttttttccgtctagtccgccacctcattccccattaagtcatgggcatatccccagtgccattgttcttccaaatgctacccatgactacaacacgtctttctcaaactccaatgctcacaaagctgaaaagaagcttcaaaacattgatcaccctctcacaaagtcatccagtaagagagatcaccggcgttctgttgattccagaaataccctcaatgatctcctgaagcatctgaatgacccaaatagtaaccccaaagccatcatgggagacatccagatggcacaccagaacttaatgctggatcccatgggatcgatgtctgaggtcccacctaaagtccctaaccgggaggcatcgctatactcccctccttcaactctccccagaaatagcccaaccaagcgagtggatgtccccaccactcctggagtcccaatgacttctctggaaagacaaagaggttatcacaaaaattcctcccagaggcactctatatctgctatgcctaaaaacttaaactcaccaaatggtgttttgttatccagacagcctagtatgaaccgtggaggatatatgcccacccccactggggcgaaggtggactatattcagggaacaccagtgagtgttcatctgcagccttccctctccagacagagcagctacaccagtaatggcactcttcctaggacgggactaaagaggacgccgtccttaaaacctgacgtgccaccaaagccttcctttgttcctcaaaccccatctgtcagaccactgaacaaatacacatactaggcctcaagtgtgctattcccatgtggctttatcctgtccgtgttgttgagaggatgatgttgtaagggtaccttaaaacaagagactcgcttgtattttaagagaaccaagtggccaaagaaactctttctaactttggcaacatcagaacttgccacatgtagctactgcagcaaggcttctgtgtacttgcctgaaaacaaaggaaggtgctggtcattccatttcttttgtttgaagctaaagagatgtgtagctcacaggggctaccttaccagtataaagagctgataacagtactcagaagaatctgtgaacaaatacttgaaaatgggttcaatgtagactgccattatgtgtggtcttcccattaaatgtgaacattttaatatgtatgcattcaccttgcctcttgcacaaatgtcaaaaaaaagatggtaatatctcaaagaaatgaacttgtagattaccaagcagtttgctaaaaattcaatctttgacccaagctgtagcatttttttttcatgtgtggcatctttttcatgccaccaacaaacttgttgtgtgtgtgcgtgtgtgtgtgtgtgtgtgtgtgtgtgtgtgtgttctgtacccactaggatttgtttaggtgcccattgcatctttttgtgctatggagttgtttacattaagcatgaccgaacgagagacaatactatttcccacaggagtccattgggttcagctttgaaagaggaatagaatcgaggctcctttgaccatcaaaatgatgaactttacttatgtggtacccaatgccagaatgtaagagttgcaagtgattttgtgctgctattcattaaaacttgtattccagtcttgccagcttaaggagatcaagatattaagaggtatccttgatttattttccagtattcagtagtaaaattttcctgtccactgtgaatcaaagcctgagtcactctatttaaccttggacacactaataaggttttattttgattgtgttcgtttccccccccccaatagtaaaatttctcctcctttaactcctcctaccccccaaggtaagaaacaaaaaacaaacaaacaaacaaaaatagaagacaaaagaaagacatatgaaaggaattgtaattggcttaacagaaacagtctgtaaaaacctaacagtggtgcaatcatgttgtctgtgttgtgttatgtgagaattttctcctaagtcatgcaggtaatgacaatatactgtaaataccacatgtgagtttacctgaatctgtgcattttgtgccttattcatgagaatgatagaagtactaaaatctgtcaagtgttttcagtatagcacattatttactgagtgccagttgtaaatgtttttcaaccagcacctaaaaagactcttttcaaaaaatcacagaaacaacctaggacaattatttgttacataatccgacctcatagcagcattacattctttgccgtgataaacattccactcctgctttcctaaggatgaaacagtgataatgtgaactcaaatgaggtttcctgggtaatgtgacacctgcagaaactatagagcgtcatttatacgtagtttggcagaaaccacttacggctgatgatgcgcaaccctgctgactgtttcagttaatatgctgcacaccacacacttgtttagtgaaccaaatctagaaagtaccaaggcagaggtatgctcctgctgtaatcaggcaaatgagttcaactggatttcttttgacaatactgttggtacctattacttgggggaggacatgttgcagaagaccagatcatttttatacagaatgtgaaatactgatacagttattcttttttttaaagaacattgttttataaagaacgtgatttccagtgatctctggaagcgctaaagctaaaatttctgttcttgaaacacttcagctttgcaactaaaatattacagattaataataaattaaaccaaccaatgataaacactactcagtccaccaacaacaaacgtgtttgaattcaccttaccaatattaatcccagcgtgtgtaaaacagaacagtaactctatgtgaccccagataacattttgtaacattgtgcttccttgtagtttgtaatgtgagttcaatcagtatttatgttgaaatttctaacattaaatctagtctctatcctgttaatttaatttttaaatgctttatccatttgtgcaaaggtaaacgcagattgtatcttttttaatggtacggcataaaaagtaaccctcaagtgaagtgtctctatactgttttatagagtactttaacatgaatagataccttgtaaacttgtattgtggatgtgtaaataatatgtactttgggtttttaacaccgcatgtaaagtcaaaataaaatatacaaatcatt

SEQ ID NO: 6041 - DNA, 1810 bp, Homo sapiens
ggtgattgatcttttcatccagcacaatggacagaagtctaaggaacgtccttgtggtttcctttgggttcctgcttctctttacagcctatggaggtctgcagagcctgcagagcagcctgtacagcgaggagggcctgggtgtcacagcgctcagcaccctctatggaggcatgctcctgtcctccatgttcctcccaccgctcctcatcgagaggctgggctgcaaggggaccatcatcctctccatgtgtggctacgtggccttctccgtgggcaacttcttcgccagctggtacactttgatccccacctccatactgctgggactcggggccgccccgctgtggtctgcacagtgcacatacctcacgatcacgggaaacacacatgcagagaaggcgggaaagcgtggcaaagacatggtgaaccagtattttggcatcttcttcctcatattccagtcatccggtgtgtggggcaacttgatctcatcgctggtatttggccagactcccagccaagggagtggtgtcctggctgtcctgatgatagctgcgttcctccaacccatacgagatgttcagcgggaaagtgaaggagagaagaaatcagtacctttctggtccactttactgtcgactttcaagctatatagagataaacgtctgtgcctcttaattctgctgccgctgtacagtggattgcagcaaggattcctctccagcgaatacacaaggtcctatgtcacctgcaccctgggcatccagttcgtcggctacgtgatgatctgcttctcggccactgacgcgctgtgctccgtgttgtatggaaaggtctcgcagtacacgggcagggctgtgctgtacgtgctgggcgcggtgacccacgtgtcctgcatgattgccctactgctgtggagacctcgtgctgaccatctggcagtgttcttcgtattctctggcctgtggggcgtggcagatgccgtctggcagacacaaaacaatgctctctacggcgttctgtttgagaagagcaaggaagctgccttcgccaattaccgcctgtgggaggccctgggcttcgtcattgccttcgggtacagcatgtttttgtgcgtgcacgtcaagctctacattctgctgggggtcctgagcctgaccatggtggcgtatgggcttgtggagtgcgtggagtccaagaacccgatcagaccccacgctccaggacaggtcaaccaggcagaggatgaagaaatacaaacaaaaatgtgagagcagtgaggtccgaggaggatgaactcagaaagcaccagccagagaattttcttagaagatgcctcaggacatagagcggctcctcatcaccatctcagcacaatttggccattctgaagagatcatgttatttcactcttcatgtattttttttctattctaacaaatttttcgtccaccatcttaacagagatcaagtgtatacatgaaggtatcagttcatttaattttagatgcaaaagaaaaaggtctaacgtacaatcagccaattagaatttgcctgaaatcatagactcaccctagttttattgctgtagttgtttttaagaattggaagcctgcttaaaaaatgtagttgagccccataattttacaaatgggcgaacttttaaacttctaactctacttggatcaaaacctcatacattttacaaaggggtcctgacaagtcagctgactcaacctcacagagtcagggggtgacaaagccagactggggctcaggattcctgaaacgtgtggggtctgcgttt

SEQ ID NO: 6042 - DNA, 859 bp, Homo sapiens; identical to SEQ ID NO: 3879

SEQ ID NO: 6043 - DNA, 1830 bp, Homo sapiens
ggctagaagaaatgaggtggggagaaagagagagagagagagagatcgagattgagatcttaagaaagagagcaaggaggaagagcccggtggggagcaggtccttctcccccacccccctacccccaactcccactggagccgcattgagactgtaggcaccaccgggcgccgaatggctgttttctaactgggatcctcggtgacgtatggctgcctgccccttggcagctgtctttatggaccagtaggcagagcgaaattgacgctgacaagacttttgcatcttggaagggactgtaatctactgtagtgaagaacagagcctctcaatcagacgggtgtaaataagagacggaggggagtccaaaagaaaaggaagaggaggaaaaacaagtgtgtgttggggggaacagggggaaaagcatttttggtggatggtatgaagccagccatggaaactgcagccgaggaaaatactgaacaaagccaagagagaaaaggctgctttgaatgctgcatcaagtgtctgggaggagtcccctacgcctccctggtggccaccatcctctgcttctccggggtggccttattctgcggctgtgggcatgtggctctcgcaggcaccgtggcgattcttgagcaacacttctccaccaacgccagtgaccatgccttgctgagcgaggtgatacaactgatgcagtatgtcatctatggaattgcgtcctttttcttcttgtatgggatcattctgttggcagaaggcttttacaccacaagtgcagtgaaagaactgcacggtgagtttaaaacaaccgcttgtggccgatgcatcagtggaatgttcgttttcctcacctatgtgcttggagtggcctggctgggtgtgtttggtttctcagcggtgcccgtgtttatgttctacaacatatggtcaacttgtgaagtcatcaagtcaccgcagaccaacgggaccacgggtgtggagcagatctgtgtggatatccgacaatacggtatcattccttggaatgctttccccggaaaaatatgtggctctgccctggagaacatctgcaacacaaacgagttctacatgtcctatcacctgttcattgtggcctgtgcaggagctggtgccaccgtcattgccctgctgatctacatgatggctactacatataactatgcggttttgaagtttaagagtcgggaagattgctgcactaaattctaaattgcataaggagttttagagagctatgctctgtagcatgaaatatcactgacactccagactaaagcagagtctaggtttctgcaattttgttacagtaatttgtaaatagctttagtaaactcaccttgcatggtagattaataagatgacttactgtacatgaattacacaataatgagatctggtggctatttccacattttgaaaaggattcagttatttactgacagtggtgagcatcctttttaaaataatgttctcatacttaaacattagagagcagtatctttaaatgaattattaacactttggaatacttacattttctgttatttttgattgcctgataaccagtttcaatgatgaaaatgaaaacaagtgctgaagatgaaatggaagagaaccgttttaatctggattttgttttgtcacacctggaaaatactttgcaaatatgttctaaattgaaaacaatttttttatgatcacatggttcactaccaaatgaccctcaaataagccagatgaaaatttgaagaaaaaggtcacccagttctctggaaaaaaaaaaaaaaaaaaaaaaaaaa

SEQ ID NO: 6044 - DNA, 1079 bp, Homo sapiens; identical to SEQ ID NO: 1372

SEQ ID NO: 6045 - DNA, 6456 bp, Homo sapiens; identical to SEQ ID NO: 4918

SEQ ID NO: 6046 - DNA, 2676 bp, Homo sapiens
gagatggagtctcgctgtgtcacccaggctggagtgcaatgacgtgatcttggctcactgcaacctccgcctcccaggttcaagtgattcccctgcctcagcctcccgagtagctgggattacaggtgcctgccaccacgcctggctaattttttgtatttttagtagagaaggggtttcaccatattagccacaatggtctcaatctcctgacctcgtgatccatctgccccgccctcccagagtgctgggattacaggcgtcagccaccgtgaccggctcagactgtactcttatagccatctgaaatacgttttctaggtagagatagattgtgtaagggtacagttgtgaggataacagaaacatggcagattatttaaaatcatcctgaaagtggtgctttatctgatgaaagtgattgtaatccataggaaaatgtttcaacgtgcgcaagagttgcggcggcgggcagaggactaccacaaatgcaaaatccccccttctgcaagaaaggctctttgcaactgggtcagaatggcggcagcggagcatcgtcattcttcaggattgccctactggccctacctcacagctgaaactttaaaaaacaggatgggccaccagccacctcctccaactcaacaacattctataactgataactccctgagcctcaagacacctcccgagtgtgtgctcactccccttccaccctcagcggatgataatctcaagacacctcccgagtgtgtgctcactccccttccaccctcagcggatgataatctcaagacacctcctgagtgtctgctcactccccttccaccctcagcggatgataatctcaagacacctcccgagtgtctgctcactccccttccaccctcagcggatgataatctcaagacacctcccgagtgtctgctcactccccttccaccctcagctccaccctcagctccaccctcagcggatgataatctcaagacacgtgccgagtgtctgctccatccccttccaccctcagcggatgataatctcaagacaccttccgagcgtcagctcactccccttccaccctcagctccaccctcagcagatgataatatcaagacacctgccgagcgtctgcgggggccgcttccaccctcagcggatgataatctcaagacaccttccgagcgtcagctcactccccttccaccctcagctccaccctcagcagatgataatatcaagacacctgccttccaccctcagcggatgataatctcaagacaccttccgagcgtcagctcactccccttccaccctcagctccactctcagcagatgataatatcaagatacctgctgagcgtctgcggattccgcttccaccatcagccgatgataatctcaagacaccttccgagcgtcagctcactccccttccaccctcagctccaccctcagcagatgataatatcaagacacctgccgagcgtctgcgggggccgcttccaccctcagcggatgataatctcaagacaccttccgagcgtcagctcactccccttccaccctcagctccaccctcagcagatgataatatcaagacacctgccgagcgtctgcgggggccgcttccaccctcagcggatgataatctcaagacaccttccgagcgtcagctcactccccttccaccctcagctccaccctcagcagatgataatatcaagacacctgccgagcgtctgcgggggccgcttccaccctcagcggatgataatctcaagacaccttccgagcgtcagctcactccccttccaccctcagctccaccctcagcagatgataatatcaagacacctgccgagcgtctgcggggagcgtctgcgggggccgcttccaccctcagcggatgataatctcaagacaccttccgagcgtcagctcactccccttccaccctcagctccaccctcagcagatgataatatcaagacacctgccgagcgtctgcgggggccgcttccaccctcagcggatgataatctcaagacaccttccgagcgtcagctcactccccttccaccctcagctccaccctcagcagatgataatatcaagacacctgccgagcgtctgcgggggccgcttccaccctcagcggatgataatctcaagacaccttctgagcgtcagctcactccccttccaccctcagctccaccctcagcagatgataatatcaagacacctgccgagcgtctgcgggggccgcttccaccctcagccgatgataatctcaagacacctcccttagctactcaggaggctgaggcagaaaaaccacgcaaacccaagaggcagagggcggctgagatggaaccacctcccgaacccaagaggcggagggtcggtgacgtggaaccgtcacgcaaacccaagaggcggagggccgctgacgtggaaccatcatcacccgaacccaagaggcggagggtcggtgatgtggaaccgtcacgcaaacccaagaggcggagggccgctgacgtggaaccatcatcacccgaacccaagaggcggagggtcggtgacgtggaaccgtcacgcaaacccaagaggcggagggccgctgacgtggaaccatcattacccgaacccaagaggcggaggttgagctga

SEQ ID NO: 6047 - DNA, 6669 bp, Homo sapiens
ggccaaaggtcaagatacttctctgggaaatgttgctgctgatgctgctttacaaagtcatacaatgagtgtttggtttaagaaagattttcatacttaaaagattttcatcttggaaatacatcaagtgaaaattaaattcttttgggaaacattttccttctgatatattatacttgtaatgggcgacatggcaaacaactcagttgcttacagtggtgtgaaaaactctttgaaggaagctaatcatgatggagactttggaattacgctcgcagagctgcgggctctcatggagctcaggtccacagatgcattacgaaaaatacaggaaagctatggagatgtctatggaatttgcaccaaattgaaaacatctcccaatgaaggtttaagtggaaaccctgcagatttagaaagaagagaagcagtgtttggaaagaattttatacctcctaaaaagccaaaaacctttcttcaattagtatgggaagcattacaagatgtcactttaattatattagaaattgcagccatagtatcattgggcctttctttttatcagcctccagaaggggataatgcactttgtggagaagtttctgttggggaggaagaaggtgaaggtgaaactggttggattgaaggagctgcaatcctcttgtctgtagtgtgtgtggtgttagtaacagctttcaatgactggagtaaggaaaaacagtttagaggtttgcagagccgaattgaacaagaacagaagttcactgtcatcaggggtggtcaggtcattcagatacctgtagctgacattactgttggagatattgctcaagtgaaatatggtgatcttcttccagctgacggcatacttattcaaggcaacgatcttaaaattgatgaaagctcattgactggtgaatcagatcatgttaaaaagtctttagataaggatcccttacttctatcaggtactcatgtaatggaaggctctggaagaatggtagttacagctgtaggtgtaaattctcaaactggaattatctttaccttacttggagctggaggtgaagaggaagagaagaaagatgagaagaaaaaggaaaagaaaaataagaaacaagatggagctattgagaatcgcaacaaagcaaaagcccaggatggtgcagccatggaaatgcagccattgaagagtgaagaaggtggagatggtgatgaaaaagataaaaagaaagcaaatttgccaaaaaaggaaaaatctgttttacaagggaaacttacaaaactggctgttcagattggcaaagcaggtctgttgatgtctgccatcacagttatcattctagtattatattttgtcattgacaccttctgggttcagaaaagaccatggcttgctgagtgcacaccaatttatatacaatactttgtgaagttcttcattattggagttacagttttagtggtcgcagtgccagaaggtcttccacttgcagtcacgatctcactggcttattcagtcaaaaaaatgatgaaagataataacttagtaaggcatctggatgcttgtgaaaccatgggaaatgctacagctatttgttcagataaaacaggaactttgacaatgaacagaatgacagtcgttcaagcttacataaatgaaaaacattataaaaaggttcctgaaccagaagctattccaccaaatattttgtcctatcttgtaacaggaatttctgtgaattgtgcttatacatcaaaaatattgccaccagagaaagagggtggattacctcgtcacgttggtaataaaactgaatgtgccttgttgggacttcttttggatttaaaacgggattatcaggatgttagaaatgaaataccagaagaagcactgtacaaagtctacaccttcaattctgttaggaagtccatgagtactgtcctgaaaaattcagatggaagttatcgaatattcagcaagggtgcatctgagataattctgaaaaagtgtttcaaaatcttgagtgctaatggtgaggcaaaagtattcagaccaagggaccgtgatgatattgtaaaaactgtgattgaaccgatggcatcagaaggcttgagaaccatatgtcttgcattcagagattttccagcaggagaaccagaaccagagtgggataatgaaaatgatattgtcaccggccttacatgcattgctgttgtggggattgaagatcctgtgagacctgaggtgccagatgcaattaaaaagtgtcagagggctggaattactgtgcggatggtcactggtgataatattaatactgctcgggccattgctaccaaatgtggtattttacatcctggggaagattttctgtgcctagaaggtaaagattttaacagaagaatacgaaatgaaaaaggagagattgagcaagagaggatagacaagatttggccaaaacttcgagtacttgcaagatcatctcctactgataagcatacactggttaaaggtataattgacagcactgtctcagaccaacgccaggttgtagctgtaactggtgatggtacaaatgatggcccagcactaaagaaagcagatgttggatttgcaatgggtattgctggaactgatgtagctaaagaagcatccgatattattctcacagatgacaactttacaagcattgttaaagcagttatgtggggacgaaatgtctatgacagcatctcaaaattccttcagttccaacttactgttaatgtagtagcagtgattgttgcttttacgggcgcctgcattactcaagactcaccgcttaaggctgtgcagatgctgtgggtaaacctcataatggatacactcgcttccctggctctggcaacggaaccacccactgagtctctcttgcttcggaaaccttatggtagaaataagcctctcatctcacgtacaatgatgaagaatattttgggtcatgcattctatcaacttgtagtagtctttacactcttatttgctggagaaaagttttttgacattgatagtggaagaaatgctcctttgcatgctcctccttcagaacattatactattgtttttaatacctttgtgctgatgcaacttttcaacgaaataaatgcccggaaaattcatggtgaaagaaatgtattcgaaggaatctttaacaatgccatcttctgcacaattgttttaggcacttttgtggtacagcttatttcaacaattccaactagccgtttaaaattcctcaaagaagctggtcatggaacacaaaaggaagaaatacctgaggaggaattagcagaggatgttgaagagattgatcacgctgaaagggagttgcggcgtggccaaatcttgtggtttagaggtctgaacagaatccaaacacagattcgagtggtgaatgcatttcgtagttctttatatgaagggttagaaaaaccggaatcaagaagttcgattcacaactttatgacacatcctgagtttaggatagaagattcagagcctcatatcccccttattgatgacactgatgccgaagatgatgctcctacaaaacgtaactccagtcctccaccctctcccaacaaaaataacaatgctgttgacagtggaattcaccttacaatagaaatgaacaagtctgctacctcttcatccccaggaagcccactacatagtttggaaacatcactctgattgtaagctgaatgttaacacactagctgcattgtaaagaaacaaattgaaactgggtcttttcacatattgtgatggacaagctagtattcttgtctttggacttcaacagaagacacacttgtacgaatgtagatttatttttttaaaaaaaaaaaagcaaagctttctgccagactgagggtgctttttggggggtgggagaaatgaactgacagataaacagtaactcagcgtaagtgacctgtggatcatcagtagtacccaagcatggtcctgaacagtgtattagcagagctttagtttatctcagtcctggatgggagagagagggaggagtaaaactgggcaagacaaagagccctggatcgttgaattgatagtttaatttctgctgttggctgttaataatttggattatttatgtttataaatgatacagatctgtttacaaggtttgtagatactttttttgttcctgttcatagatgggaagcttccttataactgatgcagagaaaaattagtccttcaaatactgctgtattttcaggaaaaaaaaaaaaaggggtgtttctattgaaactgtactaaatttttgcctacaatttaccttgttaaatattgtagataaattgctaatactaatagccaaatagataacactaatgctttgtttaaaaaaacgaaaaaaacaaaacaaaacaaaaaaacatgagcagtggtgttctaatgaagttatgacatctgtcctaattagtttcttaaatacatttactacttaatggttttgaagcaactgtttaatttttaaaatttttgaaaacttgctaataaccttttgttcagaatttagtagattgtttaatgcaggacatcaactacataatgaaagatgcttgaaatgcttttgttatttcaggcaaatcaaattaaatcagactatcaaactacaagagaaccttagtcttttttgtttttgtctaaacatgttagtttagtgatgtcttggtgaactgtgagtgaactgtattgatttttctaatctttagagaccttcacacagcatgagggctgttggcattttgaaaaaggttaataagtagaagcatacatgttttccttttgtttttgaaacttgtttgtaaacataaataaatatgcccttttattaaataaattcatggcaatgtttttttaaaagacatttcagcttctttactcagttctgcatatacagtgcatcagtctgttctctttgaccacaattggaatacatttcaagatggtaacagccccatgaagtaccgctttaattccttgctggtaatctaatagaatcagattaagaaaattaacacaattttaccatttgacatactcttcattgaatttagtttgtctaaaatagtctcacaggtaaaaaacataacaacaatgaccaccattgtctttgatacatttattttaattcttaagtggccaaataacagattaggtaaaatgagattacatgaaaaggttctaaaatgatatatttagatgcaataattaaccatatgctagaatgcccacctctaagccaattggattctttagctctctttttctttccttcatctaccttcttctcttttttgcctctgtctttaccctttagaaactggcatgtgttagggcccagatttcaccagatacacaatcctcaggctgacataaagtttacgaggactgctactataactgagagtgctgaccaagcaaagaaacatttagttgatggtgcttgatatttttggtgggtgggggaaatctttttctcaccatcaaatctttgcagtaatcctctgcaggtcttagaaacacattggctctgtcagcatttgtaattgtacatttattcatcaggtatttatagtgaatcatactgtaaaaaagaggtagcatgatatgctggaaagcatattagactaggagtcaagacctggtttctagtcttggttttgccattaatgtgctgcatgatcttgggaaaatcatttaccctaaataagggtggtggactatcttgaagaaccctttcaactctaaaaattgaccctatcaactggagagcccacaaggcatagggaatagagaaaagggaaatgttttcagttttcttttttattttggttatgcttaaatatgaatgtaattaccaaaagatttagaagtgcatgtgctttggaggatttgtattgagcttttacagtattcatttttcaactcaaggcaatggctttctacaccaactctaatccataaacgggtcttatgacatctatgaagtagtagcaagacatgcttagtgtgtatttctctctttgagacactgtaatttctaccagaaatttccagagcattatgtaggtagaaaaaaatgcaagcaagctgttaaagatcttggatcccattatatagtatgtatagctgaaatctgtaattcaatcactttttctcttttatcctctaaccaaaaaattgtttaattttgcatcccaaatgtttttaatctttgtatattttttaaaaatccttttctcctcatcattgccttttttgtggttgtaaatagacttacttgcactttgaagatgagttactccttgtcatcttacaaatatgtgatatggtaattttcataacagatgtcagttttgaaccaagaattggtgatttgtttataagaaaaaaactggcttcatttctgtgaaattgctctttgaaaatttctttttacacgtgtaagccaactgagataccgtgatggtgttgatttctttcaatgatgcttaccatctattttagccactgagccttttattatttgtctatttgtaaagtttatttgtcttaactcatttaataaatatactgtttatctgtttctg

SEQ ID NO: 6048 - DNA, 4678 bp, Homo sapiens
cgggagcggcgggggcggcgccgaggccgcgggcggggggaggagggccgcagccccggagaggggaaaaggcgggccggacggcgccagcagccagccccgaggacgcgagcggcaggtgtgcacagaggttctccactttgttttctgaactcgcggtcaggatggttttctctgtcaggcagtgtggccatgttggcagaactgaagaagttttactgacgttcaagatattccttgtcatcatttgtcttcatgtcgttctggtaacatccctggaagaagatactgataattccagtttgtcaccaccacctgaggttgaaacaacaagcctcaatgatgttactttaagcttactcccttcaaacgaaacaggcgtcaaaccccagagaaatatctgcaatttgtcatctatttgcaatgactcagcattttttagaggtgagatcatgtttcaatatgataaagaaagcactgttccccagaatcaacatataacgaatggcaccttaactggagtcctgtctctaagtgaattaaaacgctcagagctcaacaaaaccctgcaaaccctaagtgagacttactttataatgtgtgctacagcagaggcccaaagcacattaaattgtacattcacaataaaactgaataatacaatgaatgcatgtgctgtaatagctgctttggaaagagtaaagattcgaccaatggaacactgctgctgttctgtcaggataccctgcccttcctccccagaagagttggaaaagcttcagtgtgacctgcaggatcccattgtctgtcttgctgaccatccacgtggcccaccattttcttccagccaatccatcccagtggtgcctcgggccactgtgctttcccaggtccccaaagctacctcttttgctgagcctccagattattcacctgtgacccacaatgttccctctccaataggggagattcaacccctttcaccccagccttcagctcccatagcttccagccctgccattgacatgcccccacagtctgaaacgatctcttcccctatgccccaaacccatgtctccggcaccccacctcctgtgaaagcctcattttcctctcccaccgtgtctgcccctgcgaatgtcaacactaccagcgcacctcctgtccagacagacatcgtcaacaccagcagtatttctgatcttgagaaccaagtgttgcagatggagaaggctctgtccttgggcagcctggagcctaacctcgcaggagaaatgatcaaccaagtcagcagactccttcattccccgcctgacatgctggcccctctggctcaaagattgctgaaagtagtggatgacattggcctacagctgaacttttcaaacacgactataagtctaacctccccttctttggctctggctgtgatcagagtgaatgccagtagtttcaacacaactacctttgtggcccaagaccctgcaaatcttcaggtttctctggaaacccaagctcctgagaacagtattggcacaattactcttccttcatcgctgatgaataatttaccagctcatgacatggagctagcttccagggttcagttcaatttttttgaaacacctgctttgtttcaggatccttccctggagaacctctctctgatcagctacgtcatatcatcgagtgttgcaaacctgaccgtcaggaacttgacaagaaacgtgacagtcacattaaagcacatcaacccgagccaggatgagttaacagtgagatgtgtattttgggacttgggcagaaatggtggcagaggaggctggtcagacaatggctgctctgtcaaagacaggagattgaatgaaaccatctgtacctgtagccatctaacaagcttcggcgttctgctggacctatctaggacatctgtgctgcctgctcaaatgatggctctgacgttcattacatatattggttgtgggctttcatcaatttttctgtcagtgactcttgtaacctacatagcttttgaaaagatccggagggattacccttccaaaatcctcatccagctgtgtgctgctctgcttctgctgaacctggtcttcctcctggactcgtggattgctctgtataagatgcaaggcctctgcatctcagtggctgtatttcttcattattttctcttggtctcattcacatggatgggcctagaagcattccatatgtacctggcccttgtcaaagtatttaatacttacatccgaaaatacatccttaaattctgcattgtcggttggggggtaccagctgtggttgtgaccatcatcctgactatatccccagataactatgggcttggatcctatgggaaattccccaatggttcaccggatgacttctgctggatcaacaacaatgcagtattctacattacggtggtgggatatttctgtgtgatatttttgctgaacgtcagcatgttcattgtggtcctggttcagctctgtcgaattaaaaagaagaagcaactgggagcccagcgaaaaaccagtattcaagacctcaggagtatcgctggccttacatttttactgggaataacttggggctttgccttctttgcctggggaccagttaacgtgaccttcatgtatctgtttgccatctttaataccttacaaggatttttcatattcatcttttactgtgtggccaaagaaaatgtcaggaagcaatggaggcggtatctttgttgtggaaagttacggctggctgaaaattctgactggagtaaaactgctactaatggtttaaagaagcagactgtaaaccaaggagtgtccagctcttcaaattccttacagtcaagcagtaactccactaactccaccacactgctagtgaataatgattgctcagtacacgcaagcgggaatggaaatgcttctacagagaggaatggggtctcttttagtgttcagaatggagatgtgtgccttcacgatttcactggaaaacagcacatgtttaacgagaaggaagattcctgcaatgggaaaggccgtatggctctcagaaggacttcaaagcggggaagcttacactttattgagcaaatgtgattcctttcttctaaaatcaaagcatgatgcttgacagtgtgaaatgtccaattttaccttttacacaatgtgagatgtatgaaaatcaactcattttattctcggcaacatctggagaagcataagctaattaagggcgatgattattattacaagaagaaaccaagacattacaccatggtttttagacatttctgatttggtttcttatctttcattttataagaaggttggttttaaacaatacactaagaatgactcctataaagaaaacaaaaaaaggtagtgaactttcagctaccttttaaagaggctaagttatctttgataacatcatataaagcaactgttgacttcagcctgttggtgagtttagttgtgcatgcctttgttgtatataagctaaattctagtgacccatgtgtcaaaaatcttacttctacatttttttgtatttattttctactgtgtaaatgtattcctttgtagaatcatggttgttttgtctcacgtgataattcagaaaatccttgctcgttccgcaaatcctaaagctccttttggagatgatataggatgtgaaatacagaaacctcagtgaaatcaagaaataatgatcccagccagactgagaaaatgtaagcagacagtgccacagttagctcatacagtgcctttgagcaagttaggaaaagatgcccccactgggcagacacagccctatgggctcatggtttgacaaacagagtggagagaccatattttagccccactcaccctcttgggtgcacgacctgtacagccaaacacagcatccaatatgaatacccatcccctgaccgcatccccagtagtcagattatagaatctgcaccaagatgtttagctttataccttggccacagagagggatgaactgtcatccagaccatgtgtcaggaaaattgtgaacgtagatgaggtacatacactgccgcttctcaaatccccagagcctttaggaacaggagagtagactaggattccttctcttaaaaaggtacatatatatggaaaaaaatcatattgccgttctttaaaaggcaactgcatggtacattgttgattgttatgactggtacactctggcccagccagagctataattgttttttaaatgtgtcttgaagaatgcacagtgacaaggggagtagctattgggaacagggaactgtcctacactgctattgttgctacatgtatcgagccttgattgctcctagttatatacagggtctatcttgcttcctacctacatctgcttgagcagtgcctcaagtacatccttattaggaacatttcaaaccccttttagttaagtctttcactaaggttctcttgcatatatttcaagtgaatgttggatctcagactaaccatagtaataatacacatttctgtgagtgctgacttgtctttgcaatatttcttttctgatttatttaattttcttgtatttatatgttaaaatcaaaaatgttaaaatcaatgaaataaatttgcagttaaga

SEQ ID NO: 6049 - DNA, 2654 bp, Homo sapiens
gagagcgagacagagcgagcaacgcaatctgaccgagcaggtcgtacgccgccgcctcctcctcctctctgctcttcgctacccaggtgacccgaggagggactccgcctccgagcggctgaggaccccggtgcagaggagcctggctcgcagaattgcagagtcgtcgcccctttttacaacctggtcccgttttattctgccgtacccagtttttggatttttgtcttccccttcttctctttgctaaacgacccctccaagataatttttaaaaaaccttctcctttgctcacctttgcttcccagccttcccatccccccaccgaaagcaaatcattcaacgacccccgaccctccgacggcaggagccccccgacctcccaggcggaccgccctccctccccgcgcgcgggttccgggcccggcgagagggcgcgagcacagccgaggccatggaggtgacggcggaccagccgcgctgggtgagccaccaccaccccgccgtgctcaacgggcagcacccggacacgcaccacccgggcctcagccactcctacatggacgcggcgcagtacccgctgccggaggaggtggatgtgctttttaacatcgacggtcaaggcaaccacgtcccgccctactacggaaactcggtcagggccacggtgcagaggtaccctccgacccaccacgggagccaggtgtgccgcccgcctctgcttcatggatccctaccctggctggacggcggcaaagccctgggcagccaccacaccgcctccccctggaatctcagccccttctccaagacgtccatccaccacggctccccggggcccctctccgtctaccccccggcctcgtcctcctccttgtcggggggccacgccagcccgcacctcttcaccttcccgcccaccccgccgaaggacgtctccccggacccatcgctgtccaccccaggctcggccggctcggcccggcaggacgagaaagagtgcctcaagtaccaggtgcccctgcccgacagcatgaagctggagtcgtcccactcccgtggcagcatgaccgccctgggtggagcctcctcgtcgacccaccaccccatcaccacctacccgccctacgtgcccgagtacagctccggactcttcccccccagcagcctgctgggcggctcccccaccggcttcggatgcaagtccaggcccaaggcccggtccagcacaggcagggagtgtgtgaactgtggggcaacctcgaccccactgtggcggcgagatggcacgggacactacctgtgcaacgcctgcgggctctatcacaaaatgaacggacagaaccggcccctcattaagcccaagcgaaggctgtctgcagccaggagagcagggacgtcctgtgcgaactgtcagaccaccacaaccacactctggaggaggaatgccaatggggaccctgtctgcaatgcctgtgggctctactacaagcttcacaatattaacagacccctgactatgaagaaggaaggcatccagaccagaaaccgaaaaatgtctagcaaatccaaaaagtgcaaaaaagtgcatgactcactggaggacttccccaagaacagctcgtttaacccggccgccctctccagacacatgtcctccctgagccacatctcgcccttcagccactccagccacatgctgaccacgcccacgccgatgcacccgccatccagcctgtcctttggaccacaccacccctccagcatggtcaccgccatgggttagagccctgctcgatgctcacagggcccccagcgagagtccctgcagtccctttcgacttgcatttttgcaggagcagtatcatgaagcctaaacgcgatggatatatgtttttgaaggcagaaagcaaaattatgtttgccactttgcaaaggagctcactgtggtgtctgtgttccaaccactgaatctggaccccatctgtgaataagccattctgactcatatcccctatttaacagggtctctagtgctgtgaaaaaaaaaatgctgaacattgcatataacttatattgtaagaaatactgtacaatgactttattgcatctgggtagctgtaaggcatgaaggatgccaagaagtttaaggaatatgggagaaatagtgtggaaattaagaagaaactaggtctgatattcaaatggacaaactgccagttttgtttcctttcactggccacagttgtttgatgcattaaaagaaaataaaaaaaagaaaaaagagaaaagaaaaaaaaagaaaaaagttgtaggcgaatcatttgttcaaagctgttggcctctgcaaaggaaataccagttctgggcaatcagtgttaccgttcaccagttgccgttgagggtttcagagagcctttttctaggcctacatgctttgtgaacaagtccctgtaattgttgtttgtatgtataattcaaagcaccaaaataagaaaagatgtagatttatttcatcatattatacagaccgaactgttgtataaatttatttactgctagtcttaagaactgctttctttcgtttgtttgtttcaatattttccttctctctcaatttttggttgaataaactagattacattcagttggc

SEQ ID NO: 6050 - DNA, 3974 bp, Homo sapiens
aattacgcccctgtcggaggctgaaacacttaaggcttccgggcatgcgcacagcgttgtgcaaatgaatgccttccactgaaccgaggcactgttatagaagaatggaagaagatacagattatagaatcaggtttagttctttgtgtttctttaatgatcacgttggatttcatggcactataaaaagctcaccaagtgactttattgttattgaaattgatgaacagggacagttagttaataagaccatcgatgagcctattttcaagattagtgaaatacaacttgagccaaataattttcccaaaaaaccaaaactagatcttcaaaatctgtccttagaagatggaagaaaccaagaagttcatactttgattaagtacactgatggtgaccaaaatcatcagtctggttcagaaaaggaagatactatcgttgatggaacttccaaatgtgaagaaaaagctgatgttttaagctcctttttggatgaaaaaactcatgagttactgaataattttgcctgtgatgtaagagagaagtggctttctaaaacagagctaattggactacctcctgaattctcaataggcagaatccttgacaaaaaccagagggctagtttacacagtgccattaggcagaaatttccatttttagtaactgtaggaaaaaacagtgaaattgttgtaaaaccaaatcttgaatataaagaactttgtcatttggtatctgaagaggaagcatttgacttttttaaatatttggatgcaaagaaagaaaattccaaatttacctttaaacctgatacaaacaaagaccacagaaaagctgtccaccattttgtcaacaaaaagtttggaaaccttgtggaaaccaaatctttttctaaaatgaattgcagtgctggtaatccgaatgtggtggtaacagtaagatttcgggaaaaagcacacaaacgtgggaaaaggcctctttctgaatgccaagaaggaaaagttatatatacagcttttaccctacgaaaggaaaacctggaaatgtttgaagcgattggttttttagctatcaaacttggtgttattccttcggattttagttatgcaggccttaaagacaagaaagccatcacctatcaagcaatggttgttagaaaagtgactccagagaggttgaaaaatattgaaaaagaaattgaaaagaaaagaatgaatgtctttaatattcggtctgtagatgattccctgagacttggtcagctcaaaggaaatcactttgatattgtcattagaaatttaaaaaaacaaataaatgattctgcaaacctgagggagagaattatggaagcaatagaaaatgttaagaaaaaaggctttgtgaattactatggaccacagagatttgggaagggaaggaaagttcacacagaccaaattggactagctttgctgaagaatgaaatgatgaaagccataaaattgtttcttacaccagaagacttggatgatcctgtaaatagagcaaagaagtattttcttcaaactgaggatgctaaaggcacactttcattgatgcctgaattcaaagtgcgtgagagagcattgttggaggcattgcaccgctttggcatgaccgaggaaggttgtatccaggcatggttctctttaccccattccatgcgcatattctatgttcacgcatataccagcaaaatttggaatgaggcagtatcttacagacttgaaacctatggagcaagagtagtgcagggtgatttggtctgtttggatgaagacattgatgacgagaatttcccaaatagtaaaattcacctggtaactgaagaggagggatcagctaatatgtatgcaatacatcaggtggttcttccagtacttggatacaatattcagtacccgaagaacaaagtagggcagtggtaccatgacatacttagcagagatggactacagacatgtaggtttaaagtacctactctgaaactgaatataccaggttgctatagacagattttgaaacatccctgtaatctctcataccaactaatggaagatcatgacattgatgtcaaaacgaaaggttcccacattgatgaaacagctttgtctcttttgatctcttttgatcttgatgcttcatgctatgctaccgtttgtctgaaggaaataatgaagcatgacgtttaaaactgatacccttggtataaccatatatatgtcactctttgaaggaaagggggctaaaatgtcttaagcaccttccatgtgttaggaacttcataattgttatctcttttaattttcacagcatcctgagaagttaggatttgatactgtaattttatagaggatatgtaagtgtcagggtccaaatttaaggtccatgtgaccccaaagcctgtgttttttttctattatatgtttcagtgacctttattctgtgtcataaagttacaatcttttaaaaccattaggaatatatataatactgcaagataacatttaagaaaaaaagttgtgaatattcatatcctccagctccttgcttagaacactagtaaaattaggtcgcagtgaagcaaatgttggagagaaagatagatgaagcattttgctaattattattgtccccctttcctgtttttgaaattattgatcagaacaatatacaagggaaatgccatacctctgtttgtgatagataccccagagtagttattacctctttgtgagataagtaatctttgatgaagattgaaatacaatttctcatccaatttttatatcttggcatacgctgaccctcttgaccatttgtaattttttcatattatctaaaacaggtgttagagtcagacagattcattcttagattctagctctgacacttactagtgattttgagtatgttgttgatttttttgtgtgtggttactgatagaatcaagacaattacaacttcataaatgacaaataataggattatctccacattttctgttgctggaggaacaaaacattgtgcccatttgaaaattttaatttttgttggtttaactatcccacattataaatcatccttcaccattttatatcagttaaatatgggtgtgttggggaggaatgactggcatgtagacatgtattgatttaggaagatctgagcatttctttcattgttggtaagatataatgatgaaatttaaaaagcagtatggagcattatatatcagtaatgtgatatatatacttaagccagtttaaccattttgggaaatgttagcattaggaaataaaatccaaaagaaggaagagaagctatatgcaatgcaaaatttgcttattgcaatattttcatatacagacactaaaaacagttttcaaagtccagcattacgtaactaaagtaagtaaaatgatgtgtatcaacttgatggtaaaatatgtagttatttaaaaaagcaatgaacaatttagtttcatgagaaaatgttgccccctaaaagtagaacacatatgttacaactgcaataatactctgaattcatctttcacaaataagagacatgttagcatagtgattaaaagcacagatattggagacaaactaacccagtttgaaccctggcactgccacgtatagcactgcagccttgggaaagttatttaaactcatgggcttcagtttcaacatctgtaaaatgggcatgttaacattgcctacctcataggattactgtgagaattttctaagttaatatatgtaaagcaactttaaaaagtgcctggcacttagttattgttaagtaagtgtctgcagatgcaagtttggaagagaaaagcaaataaatgaaaatcccttcctgttaagatgatggggtatttggattttttttaatactaaaaagttttttttgttatatgttttggcaataaataattctcaataca

SEQ ID NO: 6051 - DNA, 1857 bp, Homo sapiens
actttcactctccgtcagccgcattgcccgctcggcgtccggcccccgacccgcgctcgtccgcccgcccgcccgcccgcccgcgccatgaacgccaaggtcgtggtcgtgctggtcctcgtgctgaccgcgctctgcctcagcgacgggaagcccgtcagcctgagctacagatgcccatgccgattcttcgaaagccatgttgccagagccaacgtcaagcatctcaaaattctcaacactccaaactgtgcccttcagattgtagcccggctgaagaacaacaacagacaagtgtgcattgacccgaagctaaagtggattcaggagtacctggagaaagctttaaacaagtaagcacaacagccaaaaaggactttccgctagacccactcgaggaaaactaaaaccttgtgagagatgaaagggcaaagacgtgggggagggggccttaaccatgaggaccaggtgtgtgtgtggggtgggcacattgatctgggatcgggcctgaggtttgccagcatttagaccctgcatttatagcatacggtatgatattgcagcttatattcatccatgccctgtacctgtgcacgttggaacttttattactggggtttttctaagaaagaaattgtattatcaacagcattttcaagcagttagttccttcatgatcatcacaatcatcatcattctcattctcattttttaaatcaacgagtacttcaagatctgaatttggcttgtttggagcatctcctctgctcccctggggagtctgggcacagtcaggtggtggcttaacagggagctggaaaaagtgtcctttcttcagacactgaggctcccgcagcagcgcccctcccaagaggaaggcctctgtggcactcagataccgactggggctgggcgccgccactgccttcacctcctctttcaacctcagtgattggctctgtgggctccatgtagaagccactattactgggactgtgctcagagacccctctcccagctattcctactctctccccgactccgagagcatgcttaatcttgcttctgcttctcatttctgtagcctgatcagcgccgcaccagccgggaagagggtgattgctggggctcgtgccctgcatccctctcctcccagggcctgccccacagctcgggccctctgtgagatccgtctttggcctcctccagaatggagctggccctctcctggggatgtgtaatggtccccctgcttacccgcaaaagacaagtctttacagaatcaaatgcaattttaaatctgagagctcgctttgagtgactgggttttgtgattgcctctgaagcctatgtatgccatggaggcactaacaaactctgaggtttccgaaatcagaagcgaaaaaatcagtgaataaaccatcatcttgccactaccccctcctgaagccacagcagggtttcaggttccaatcagaactgttggcaaggtgacatttccatgcataaatgcgatccacagaaggtcctggtggtatttgtaactttttgcaaggcatttttttatatatatttttgtgcacatttttttttacgtttctttagaaaacaaatgtatttcaaaatatatttatagtcgaacaattcatatatttgaagtggagccatatgaatgtcagtagtttatacttctctattatctcaaactactggcaatttgtaaagaaatatatatgatatataaatgtgattgcagcttttcaatgttagccacagtgtattttttcacttgtactaaaattgtatcaaatgtgacattatatgcactagcaataaaatgctaattgtttcatggta

SEQ ID NO: 6052 - DNA, 1588 bp, Homo sapiens
agtcctcatttctgtggaatctgaagaagcccacgcagattttaattcccactctagattctggttctaatcaaggtccatgcatgtggtgtcaaccccgtggagacatacattcgctctggtacttatagtagaaaaccactcttaccctatactcctggctcagatgtggctggggtgatagaagctgttggagataatgcatctgctttcaagtgcctgtgtgaaagctggagagagtgttctggttcatggggcaagtggaggagttggattagcagcatgccaaattgctagagcttatggcttaaagattttgggcactgctggtactgaggaaggacaaaagattgttttgcaaaatggagcccatgaagtgttcaatcacagagaagtgaattacattgataaaattaagaagtatgttggtgagaaaggaattgatataattattgaaatgttagctaatgtaaatcttagtaaagacttgagtcttctgtcacatggaggacgagtgatagttgttggcagcagaggtactattgaaataaacccacgagacaccatggcaaaggagtcgagtataattggagttactctcttttcctcaaccaaggaggaatttcagcaatatgcagcagcccttcaagctggaatggaaattggctggttgaaacctgtgataggttctcaatatccattggagaaggtggccgaggctcatgaaaatatcattcatggtagtggggctactggaaaaatgattcttctcttatgatgattaattctttcatggatttcctatgtaattagaggtactgtctttcccccagttgtacttaccctatcttttctttaattaacattcgattccatgagcttcttatgtgaaaaaataagatttttctttagagagcagaagcagaagagtaaaatttattgtatagctagcaatatttttttatgccatctgtctcaaatcaaagagtcatcatagtaggaaataacatgttagttgtcatttggcatgagtgtgcattccagtaattcttaattgatatttgattaattccatacctttgattaaaacatgctagttcaaaataagactgctcagtttccaagggttttcaagcctacttacctttataaaggttctctagtctctgattagccatgactgtattggactttgaacattttctgaactaaaaacctctattctaaactaatctcatttggatgtgtaagtcttttgtaaaggcaagaataaataatatccaggacaatttattagttttctcagtattttcccaaatattagaatatttacttcattattggttggctgccaatgaccccatatgttctgtgagaatagtagctttatctttgatataatacatagtctccaaataggtaatacttcgcaattgattagattttcagagtagatttagagttatctgtttttctggtgagggtcaaatatttttgttaattaagctcacaaatttgataaattaagaattatctgcatttgtctcgtaacataataatgtgtaataaagtctatagaaaattaaaa

SEQ ID NO: 6053 - DNA, 1848 bp, Homo sapiens
gctggtcccggccttgcggcctgcgggggaggctgcccggaggaggcagcggcggcggcagcgcgtcctcggtccccaggaccacggcttctttcctgccagatctatccatctggccatccatccgtgggggtctgcaatggccacctttagccgccaggaatttttccagcagctactgcaaggctgtctcctgcctactgcccagcagggccttgaccagatctggctgctccttgccatctgcctcgcctgccgcctcctctggaggctcgggttgccatcctacctgaagcatgcaagcaccgtggcaggcgggttcttcagcctctaccacttcttccagctgcacatggtttgggtcgtgctgctcagcctcctgtgctacctcgtgctgttcctctgccgacattcctcccatcgaggcgtcttcctatccgtcaccatcctcatctacctactcatgggtgagatgcacatggtagacaccgtgacatggcacaagatgcgaggggcacagatgattgtggccatgaaggcagtgtctctgggcttcgacctggaccggggcgaggtgggtacggtgccctcgccagtggagttcatgggctacctctacttcgtgggcaccatcgtcttcgggccctggatatccttccacagctacctacaagctgtccaaggccgcccactgagctgccggtggctgcagaaggtggcccggagcctggcactggccctgctgtgccttgtgctgtccacttgcgtgggcccctacctcttcccgtacttcatccccctcaacggtgaccgcctccttcgcaacaagaaacgcaaagccaggtggctgcgagcctacgagagtgctgtctccttccacttcagcaactattttgtgggctttctttccgaggccacggccacgttggcgggggctggctttaccgaggagaaggatcacctggaatgggacctgacggtgtccaagccactgaatgtggagctgcctcggtcaatggtggaagttgtcacaagctggaacctgcccatgtcttattggctaaataactatgttttcaagaatgctctccgcctggggaccttctcggctgtgctggtcacctatgcagccagcgccctcctacatggcttcagtttccacctggctgcggtcctgctgtccctggcttttatcacttacgtggagcatgtcctccggaagcgcctggctcggatcctcagtgcctgtgtcttgtcaaagcggtgcccgccagactgttcgcaccagcatcgcttgggcctgggggtgcgagccttaaacttgctctttggagctctggccatcttccacctggcctacctgggctccctgtttgatgtcgatgtggatgacaccacagaggagcagggctacggcatggcatacactgtccacaagtggtcagagctcagctgggccagtcactgggtcacttttggatgctggatcttctaccgtctcataggctgaggcacatctgtggaccctcataaccctcttaagacccctctcagggtgccactgatgggggatgagggaaggccctctctctactccttgaccccctccatccttgacccccaacacctcaacacacacacacacacacacacacaaaatcacaccattttcatgcctgtcaatccccaccccaccacaaggcaggaagggggtggtgcctgctggggcctagagggggatgcttggggaaacagagaaggggagatccagggcctccccgccttccttcttcctttttatatacaatttgttattgtcaaataaaagtaggaaatattcaataggct

SEQ ID NO: 6054 - DNA, 5820 bp, Homo sapiens
atggcagcgcggctgcttgcaccaccaggccctgatagtttcaagcctttcacccctgagtcactggcaaacattgagaggcgcattgctgagagcaagctcaagaaaccaccaaaggccgatggcagtcatcgggaggacgatgaggacagcaagcccaagccaaacagcgacctggaagcagggaagagtttgcctttcatctacggggacatcccccaaggcctggttgcagttcccctggaggactttgacccatactatttgacgcagaaaacctttgtagtattaaacagagggaaaactctcttcagatttagtgccacgcctgccttgtacattttaagtccttttaacctgataagaagaatagctattaaaattttgatacattcagtatttagcatgatcattatgtgcactattttgaccaactgtgtattcatgacttttagtaaccctcctgactggtcgaagaatgtggagtacacgttcacagggatttatacatttgaatcactagtgaaaatcattgcaagaggtttctgcatagatggctttacctttttacgggacccatggaactggttagatttcagtgtcatcatgatggcgtatataacagagtttgtaaacctaggcaatgtttcagctctacgcactttcagggtactgagggctttgaaaactatttcggtaatcccaggcctgaagacaattgtgggtgccctgattcagtctgtgaagaaactgtcagatgtgatgatcctgacagtgttctgcctgagtgtttttgccttgatcggactgcagctgttcatggggaaccttcgaaacaagtgtgttgtgtggcccataaacttcaacgagagctatcttgaaaatggcaccaaaggctttgattgggaagagtatatcaacaataaaacaaatttctacacagttcctggcatgctggaacctttactctgtgggaacagttctgatgctgggcaatgcccagagggataccagtgtatgaaagcaggaaggaaccccaactatggttacacaagttttgacacttttagctgggccttcttggcattatttcgccttatgacccaggactattgggaaaacttgtatcaattgactttacgagcagccgggaaaacatacatgatcttcttcgtcttggtcatctttgtgggttctttctatctggtgaacttgatcttggctgtggtggccatggcttatgaagaacagaatcaggcaacactggaggaggcagaacaaaaagaggctgaatttaaagcaatgttggagcaacttaagaagcaacaggaagaggcacaggctgctgcgatggccacttcagcaggaactgtctcagaagatgccatagaggaagaaggtgaagaaggagggggctcccctcggagctcttctgaaatctctaaactcagctcaaagagtgcaaaggaaagacgtaacaggagaaagaagaggaagcaaaaggaactctctgaaggagaggagaaaggggatcccgagaaggtgtttaagtcagagtcagaagatggcatgagaaggaaggcctttcggctgccagacaacagaatagggaggaaattttccatcatgaatcagtcactgctcagcatcccaggctcgcccttcctctcccgccacaacagcaagagcagcatcttcagtttcaggggacctgggcggttccgagacccgggctccgagaatgagttcgcggatgacgagcacagcacggtggaggagagcgagggccgccgggactccctcttcatccccatccgggcccgcgagcgccggagcagctacagcggctacagcggctacagccagggcagccgctcctcgcgcatcttccccagcctgcggcgcagcgtgaagcgcaacagcacggtggactgcaacggcgtggtgtccctcatcggcggccccggctcccacatcggcgggcgtctcctgccagaggctacaactgaggtggaaattaagaagaaaggccctggatctcttttagtttccatggaccaattagcctcctacgggcggaaggacagaatcaacagtataatgagtgttgttacaaatacactagtagaagaactggaagagtctcagagaaagtgcccgccatgctggtataaatttgccaacactttcctcatctgggagtgccacccctactggataaaactgaaagagattgtgaacttgatagttatggacccttttgtggatttagccatcaccatctgcatcgtcctgaatacactgtttatggcaatggagcaccatcctatgacaccacaatttgaacatgtcttggctgtaggaaatctggttttcactggaattttcacagcggaaatgttcctgaagctcatagccatggatccctactattatttccaagaaggttggaacatttttgacggatttattgtctccctcagtttaatggaactgagtctagcagacgtggaggggctttcagtgctgcgatctttccgattgctccgagtcttcaaattggccaaatcctggcccaccctgaacatgctaatcaagattattggaaattcagtgggtgccctgggcaacctgacactggtgctggccattattgtcttcatctttgccgtggtggggatgcaactctttggaaaaagctacaaagagtgtgtctgcaagatcaaccaggactgtgaactccctcgctggcatatgcatgactttttccattccttcctcattgtctttcgagtgttgtgcggggagtggattgagaccatgtgggactgcatggaagtggcaggccaggccatgtgcctcattgtctttatgatggtcatggtgattggcaacttggtggtgctgaacctgtttctggccttgctcctgagctccttcagtgcagacaacctggctgccacagatgacgatggggaaatgaacaacctccagatctcagtgatccgtatcaagaagggtgtggcctggaccaaactaaaggtgcacgccttcatgcaggcccactttaagcagcgtgaggctgatgaggtgaagcctctggatgagttgtatgaaaagaaggccaactgtatcgccaatcacaccggtgcagacatccaccggaatggtgacttccagaagaatggcaatggcacaaccagcggcattggcagcagcgtggagaagtacatcattgatgaggaccacatgtccttcatcaacaaccccaacttgactgtacgggtacccattgctgtgggcgagtctgactttgagaacctcaacacagaggatgttagcagcgagtcggatcctgaaggcagcaaagataaactagatgacaccagctcctctgaaggaagcaccattgatatcaaaccagaagtagaagaggtccctgtggaacagcctgaggaatacttggatccagatgcctgcttcacagaaggttgtgtccagcggttcaagtgctgccaggtcaacatcgaggaagggctaggcaagtcttggtggatcctgcggaaaacctgcttcctcatcgtggagcacaactggtttgagaccttcatcatcttcatgattctgctgagcagtggcgccctggccttcgaggacatctacattgagcagagaaagaccatccgcaccatcctggaatatgctgacaaagtcttcacctatatcttcatcctggagatgttgctcaagtggacagcctatggcttcgtcaagttcttcaccaatgcctggtgttggctggacttcctcattgtggctgtggtggtgaatgccttggtgggcgccatcccctccatcatgaatgtgctgctggtgtgtctcatcttctggctgattttcagcatcatgggagttaacttgtttgcgggaaagtaccactactgctttaatgagacttctgaaatccgatttgaaattgaagatgtcaacaataaaactgaatgtgaaaagcttatggaggggaacaatacagagatcagatggaagaacgtgaagatcaactttgacaatgttggggcaggatacctggcccttcttcaagtagcaaccttcaaaggctggatggacatcatgtatgcagctgtagattcccggaagcctgatgagcagcctaagtatgaggacaatatctacatgtacatctattttgtcatcttcatcatcttcggctccttcttcaccctgaacctgttcattggtgtcatcattgataacttcaatcaacaaaagaaaaagttcggaggtcaggacatcttcatgaccgaagaacagaagaagtactacaatgccatgaaaaagctgggctcaaagaagccacagaaacctattccccgccccttgaacaaaatccaaggaatcgtctttgattttgtcactcagcaagcctttgacattgttatcatgatgctcatctgccttaacatggtgacaatgatggtggagacagacactcaaagcaagcagatggagaacatcctctactggattaacctggtgtttgttatcttcttcacctgtgagtgtgtgctcaaaatgtttgcgttgaggcactactacttcaccattggctggaacatcttcgacttcgtggtagtcatcctctccattgtgggaatgttcctggcagatataattgagaaatactttgtttccccaaccctattccgagtcatccgattggcccgtattgggcgcatcttgcgtctgatcaaaggcgccaaagggattcgtaccctgctctttgccttaatgatgtccttgcctgccctgttcaacatcggccttctgctcttcctggtcatgttcatcttctccatttttgggatgtccaattttgcatatgtgaagcacgaggctggtatcgatgacatgttcaactttgagacatttggcaacagcatgatctgcctgtttcaaatcacaacctcagctggttgggatggcctgctgctgcccatcctaaaccgcccccctgactgcagcctagataaggaacacccagggagtggctttaagggagattgtgggaacccctcagtgggcatcttcttctttgtaagctacatcatcatctctttcctaattgtcgtgaacatgtacattgccatcatcctggagaacttcagtgtagccacagaggaaagtgcagaccctctgagtgaggatgactttgagaccttctatgagatctgggagaagttcgaccccgatgccacccagttcattgagtactgtaagctggcagactttgcagatgccttggagcatcctctccgagtgcccaagcccaataccattgagctcatcgctatggatctgccaatggtgagcggggatcgcatccactgcttggacatcctttttgccttcaccaagcgggtcctgggagatagcggggagttggacatcctgcggcagcagatggaagagcggttcgtggcatccaatccttccaaagtgtcttacgagccaatcacaaccacactgcgtcgcaagcaggaggaggtatctgcagtggtcctgcagcgtgcctaccggggacatttggcaaggcggggcttcatctgcaaaaagacaacttctaataagctggagaatggaggcacacaccgggagaaaaaagagagcaccccatctacagcctccctcccgtcctatgacagtgtaactaaacctgaaaaggagaaacagcagcgggcagaggaaggaagaagggaaagagccaaaagacaaaaagaggtcagagaatccaagtgttag

SEQ ID NO: 6055 - DNA, 7308 bp, Homo sapiens
cctctgccgctcctccgccccacggctcaggattcgcccaaaatgaggacttccctgcaggcagtggcactctggggacagaaggcccctccccacagcatcactgccatcatgatcactgatgaccagcgaacgattgtgactggaagtcaagagggtcagctctgtctctggaatctctcacatgaactaaagatttcagcgaaagaactcctatttggtcattcagcttcggtaacatgtttggcaagagcaagggacttctctaaacagccctacattgttagtgctgctgaaaatggggagatgtgtgtttggaatgtcaccaatggacagtgcatggagaaggctacacttccttacaggcacactgcaatctgttattaccactgctcattccggatgacaggagaaggctggcttctttgttgtggagaatatcaagatgtccttataattgatgccaaaactttggctgttgttcacagttttagatcatctcagtttcctgactggatcaactgcatgtgcattgttcactccatgagaattcaagaagattctctcttggtggtatcagtagctggtgagctcaaagtatgggatctttcctcatctatcaacagcattcaggaaaagcaagatgtctatgaaaaagaatccaagtttcttgagtccttgaactgccagacaattcgattttgcacatatactgagagacttctattggtggtattttctaaatgttggaaggtttatgattattgtgatttttcccttctgctgactgaagttagtagaaatgggcagttctttgctggtggagaagtgattgctgctcacagaatcctcatctggacagaagatggtcacagttacatctatcagctgctgaacagtgggctttcaaaaagcatataccctgctgatggaagagtgcttaaagagaccatttatcctcatttactgtgctctacttctgtgcaggaaaataaggaacagagccgtccctttgttatgggctacatgaatgaaaggaaagagcctttttacaaggtacttttctctggagaagtctcaggaagaattactttgtggcacatccctgatgttcctgtatccaagtttgatggttctcctagagagataccagtaactgccacctggactcttcaagataattttgataagcatgatactatgtcacaaagtattattgactatttctctgggcttaaagatggggcaggaactgctgtagtcacttcatcagagtatattccaagtcttgataaactaatatgtggctgtgaagatgggacaattatcattacccaggctttgaatgctgccaaagcaagacttctggaaggtggttctttagtaaaagattctccccctcataaagttcttaaaggccaccaccaaagtgtcacttcattactctatccacatggtctctcttcgaaattagaccaaagttggatgttgtctggggacctggactcatgtgtgatcttgtgggatatctttactgaagaaattttgcataaattctttttggaagctggtccagtaacaagtcttttgatgtcaccagagaagtttaaactaaggggtgagcagataatttgctgtgtgtgcggtgaccattccgtggctctccttcaccttgagggaaagagttgcctcctgcatgcccggaagcacctttttcctgtgaggatgataaaatggcacccggttgagaattttttaattgttggatgtgcagatgactcagtttatatctgggaaattgaaacaggcactttggaaagacatgagacaggagaaagagcacgaattattcttaattgttgtgatgattcacagcttgtgaagtctgtacttcccattgcctcagagacacttaagcacaaaagtatagaacagagatcctccagcccctaccagcttgggccattaccttgccctggtctgcaggtggagtcttcatgtaaggttactgatgccaaattttgcccaagaccttttaatgtcttgcctgtgaagacaaaatggagtaacgttggctttcatattcttctatttgatctggaaaaccttgttgaacttttgctaccaactccactcagtgatgttgactcttccagttcattctatggtggtgaggtcctgagaagagccaagagcacagtggagaagaagacactgacactgagaaaaagtaaaactgcctgtggtcctctttcagcagaggcactagccaagcctattactgaaagcctggcccaaggagataataccatcaaattctcagaagaaaatgatggcattaaaaggcagaagaaaatgaagatctccaaaaaaatgcagcctaagccatcaagaaaagtagatgccagtctcacaatagacacagcaaaattgtttctgtcttgccttttgccatggggagtggataaagatttagattatctttgcattaagcacctcaatattttaaagcttcagggtcctatttctttgggaatttctttgaatgaagataatttctcactgatgttgccaggttgggatttatgcaatagtggaatgataaaagactattcaggagtaaatttattttccaggaaagttttggacttgtcagataaatacacagccactcttccaaatcaggttggaattccaagaggattggaaaataattgtgattctttgcgagagtcagatactatagtttatttgttgagcagactatttttagttaataaattagttaacatgcctttagaattggcatgtagagttggcagttctttcagaatggaaagtatacataataagatgagaggtgctgggaatgacattttaaatatgtcaagcttctacagttgcttacgaaatggtaagaatgaatcccatgtacctgaggctgacctttcacttttgaagctaatttcctgttggagagaccagtctgtgcaggtaactgaagcaatacaagctgttctcttggcggaagttcaacaacacatgaagagtttgggaaagatacccgtcaatagtcaaccagtgtccatggcagagaatggtaactgtgagatgaagcagatgctgccaaagctggaatggacagaagaactagagttacagtgtgttagaaacactttgcctctgcaaactccagtcagcccggtcaagcatgacagcaactcaaactcggcaaacttccaagacgtggaggacatgcctgacagatgtgccttggaagagtctgagagtccaggtgagccaaggcatcattcatggatagcaaaggtctgcccctgcaaggtgtcttaaatggaatctcatcagtaggagctgaatttggacaaattaagaaatccaaaagatgccatttgtttattactgtataaaagcattgttgttattggtcaagttattaggctgtagtggatttgctaatactttagccaacatgtattaaagtgattttaatacatgctgattacaatgcaatacatactgattgaaaatattcatattcatctaattttagaaaaatattgcctagatcattctctattcctgtttcttactttttctgttaatatttccaacagggaatgccagtccacagacacaaatttaatactgctttaaattttctcctatccttttagtccctgaattatataataaacaatgttaaaaccaatgtagtacacaatacttacttacaaatttaatactgcttcaaggtatttaatctaaaattttaccaactttgatttgtctggttaggatattttgttttagtggatatgctttaattcggatcaattactgcagtaaatctcatccctaagcatgaaatgttgtcaacaaatacccagttccatttagttatcaattagcccaaataagagatacaaagtataacagtgaccaaccttgtactgttgagttaatttgaacttctaatgacattgaggctaatgtctttagctcaaggttgatcttgttggccatatagatgtgaactagggaaggggaatcaacttacagcatatcacaattgatccttattaagtataaactcttgtaggtcttttcccagaaagaagcttgactagcaggaattctaaaactgaaatatatcaaacagcataaataggaatagacataaagtgctcttctattaaagcctttggtgatctatttactatgatttatattgtacagttcctcgatttacagaaaatcatcaaaattattaatctacatatcttatgtatataaatattgcctaatccatagaaaaaaggatataaagtattaaatatgtgatatatagctatatctatctatctatgtatctaatagggaagtccaagtcacttcaattgaagaaacatatctctgagcataggagcagcctcaggtcctatggtgggatgcagtggacaggagagggggaaattagaaaagagaactatataattgaaaaagggatataaagcattaaatatatgatatatagctatatctatgtatgtatctaacagagaagttcaagtcacttcaattaaagaaacatttttgagcatgggaccagcctcaggtcttatgctgggatgcagtagacaggagatggggaaattagaaaagagaactgtgtaattgaaatgacgtgggctgcacccttaaggaacttataattaatgatgatctgaataaacataccaggataaagatgtcaaatgagtgtgactcccttaaagtagattaaagtgtgcattctttgtttcctaaaatatgattttactgcttgaaattacatttgagttgaagtttagaaactaacatagcattaatatgaataatcatggaaaattattatcctttgaaaactgattgataaatatattccccctcctttagaaacagtcaaaagccacttcaaacaagtttcaaaataaaggaaggtagcaagttaggcgatggattatattttcttgcttgttgtataccagttgtcaaggacattataaggactcccaaaagcattttgaaggatggcaatatcaaataagtgtatgtcctctcaaatgaggcatttttaattgttaaaatctatttggacgctcaggttatgatatgtttatgaaaaataagcttcattatttttatagctacatcctattattcccttttagaaacaagaataacaataggttttaatagttgccatacttagcatttatcagttctaatgaaaccaatattgaatctctgataaatattttctgatgttactagctatgggaaattagaactggcacaaccctgacattactaagtggaaatgttaggatttttcggcatcgcatgttagaatctctaaaatttaaacattcctgttaaatgactaaggtttgcttttatcaatatgaattctgaaggccaatatcataccattaactatgaaagcttttaattcctaaaaatagttttagagatattcaagcaatgctctcctaatatccatacgcaagtgtgtttatgacacaaattcactagtctgtttaaaaatgaattctttatattgactggtgttccacatatttcagtaatttctgttatgagaggacttgaaatagcaaattgccacacagttaactggatagaccacgtacgtggtgatcataaccacttggtactacacccagaaactcaaaattgtctttctcctgatgagatatgggtgtccttttgtacgtctaggcctaggtaaccagtggagtgattatattagcaaatgtgtttgtatccggagtcttcctgtcattgtaataaaaaatttatttaaaaattttgtcttgtgtttcttttttggtaatcatcttggtgatatttatgaatgtatttgtgtgtgtgtgtgtgtgtgtatacatacatatatatgtgtgtatatatatacacacatatatatacacatatatatgtgtgtatatatatatatatatggcatatcccccaaaggaatatcatattttcatttgcaagccttgattctttgacttgctgttgagtttcacattggctccattgtatattgcaggaaaaagtacctggaaagcctggagggttaaaagcagaggctcctcggcagcgtgtccaggccgtgtgtgcttgctgtgcttgtcagagcctcattccctcccctgtgttggagagctttctcacagggctcatccagaggtgctagaaagcaatgtgagcactattaaacacttcaaatataaggaaaaatgtataatgttagaaacacacagttaaaaagtagccccaggtatcaaacattctgttactattttagaaactaaattaaggctgctttgaacatgatggtattagaaaaatggtagaatacagtttgttaaatattaatattctatctttagatgatagcatttggtgacttttatttcttttctcatacattttttccagtgttctgtatttttaaaatcctttcataattattataatgaacactttagaaaagatactatttctcttccatccttagagggcacattataataattgagtattttaaaattaaattttatgccatgtatttaaaatgaaagttcaggttacattaattccaactgattttaaagccttattttcacagagtggactcattcaattttttaaattttatattcatacattttgattgctcagttatataaaagcggtgttatagactcctttattctccacaaaatgttgtcttatatgtaaagtgccaaaagttgtgtttaatttcctaagaaagtcattgctttgtaaacatttgcataatacttagtgttttttgtaattttaaaaaattagcttaaccaaaagagttgcaaaattaaaacttacttgagtaggtatctttcagacaaagctgcatggcttcatgtacaatagtccccagatcacctcgcactgtagtttgctcaagaaggagcctacagatggcaggtaggagaaggtaaactggaaattaacaggtctgtctgtaagagcatgccactggaaacacccatccaatttgggacccctggaagacagcatgtgtctaatgggaggcctgtcctagtacaactcctttactcttttcaccttcatcttgaccttctcagataccatctttatgtaaaatgttgatgttgtggagtttttgcagtaatttaatttttataaatattgtattaaaatatatttatcttg

SEQ ID NO: 6056 - DNA, 3152 bp, Homo sapiens
ggagaaggacgggacggagccggggcagccagaagaggtgggactgagtggagtagctggagtgagttcccgctgtgaaaaagcctgcaaccctcggatgggaaatttggctttggggcgaaaactctgggcagacaccacctgcggtcagaatgctaccgaactgtactgcttctacagtgagaacacggatctgacttgtcggcagcccaaatgtgacaagtgcaatgctgcctatcctcacctggctcacctgccatctgccatggcagactcatccttccggtttcctcgcacatggtggcagtctgcggaggatgtgcacagagaaaagatccagttagacctggaagctgaattctacttcactcacctaattgtgatgttcaagtcccccaggccggctgccatggtgctggaccgctcccaggactttgggaaaacatggaagccttataagtactttgcgactaactgctccgctacatttggcctggaagatgatgttgtcaagaagggcgctatttgtacttctaaatactccagtccttttccatgcactggaggagaggttattttcaaagctttgtcaccaccatacgatacagagaacccttacagtgccaaagttcaggagcagctgaagatcaccaaccttcgcgtgcagctgctgaaacgacagtcttgtccctgtcagagaaatgacctgaacgaagagcctcaacattttacacactatgcaatctatgatttcattgtcaagggcagctgcttctgcaatggccacgctgatcaatgcatacctgttcatggcttcagacctgtcaaggccccaggaacattccacatggtccatgggaagtgtatgtgtaagcacaacacagcaggcagccactgccagcactgtgccccgttatacaatgaccggccatgggaggcagctgatggcaaaacgggggctcccaacgagtgcagaacctgcaagtgtaatgggcatgctgatacctgtcacttcgacgttaatgtgtgggaggcatcagggaatcgtagtggtggtgtctgtgatgactgtcagcacaacacagaaggacagtattgccagaggtgcaagccaggcttctatcgtgacctgcggagacccttctcagctccagatgcttgcaaaccgtgttcctgccatccagtaggatcagctgtccttcctgccaactcagtgaccttctgcgaccccagcaatggtgactgcccttgcaagcctggggtggcagggcgacgttgtgacaggtgcatggtgggatactggggcttcggagactatggctgtcgaccatgtgactgtgcggggagctgtgaccctatcaccggagactgcatcagcagccacacagacatagactggtatcatgaagttcctgacttccgtcccgtgcacaataagagcgaaccagcctgggagtgggaggatgcgcaggggttttctgcacttctacactcaggtaaatgcgaatgtaaggaacagacattaggaaatgccaaggcattctgtggaatgaaatattcatatgtgctaaaaataaagattttatcagctcatgataaaggtactcatgttgaggtcaatgtgaagattaaaaaggtcttaaaatctaccaaactgaagattttccgaggaaagcgaacattatatccagaatcatggacggacagaggatgcacttgtccaatcctcaatcctggtttggaataccttgtagcaggacatgaggatataagaacaggcaaactaattgtgaatatgaaaagctttgtccagcactggaaaccttctcttggaagaaaagtcatggatattttaaaaagagagtgcaagtagcattaagatggatagcacataatggcacttgtctatgtacaaaacacaaactttagagcaagaagacctcagacaggaaactggaattttttaaagtgccaaaacatatagaaatgtttgaatgcatgggtcttatctaacttatctcttctggacccatgtttaaatacagttttatttcatgaagagaaatgaaaacccctacactgatatctgttttctatgggactgattctgaaattcttaactattaagaatattttaatagcagcatgacatttagcagtaatccattaagggcagtacctctaacaaggacgccttccagcttcagcgatgttacttacgtttgatgctacttaaagtaatgaatgacgttttaaggaatccctaaccctactatcagaaaaggtgtttgttaaagagccttctcttgtgtgttacgcatgaactttggtctgtaggtgttaaatggaacctctccatgtgtatatagtatttccttgtataaagcactttactacctaccacttgtgttgtgaacgtttggtgactgctgttgaaagaaggaaaagggtgtgtgagaaagcctactgaagcagcagcactgccactacatgtggacaaaagtgaccatataaaagaagttgtgctatttaactctgaatacttggagaaactaggtgaagatgcaaccagaaaggagaatatgtatgcgtgaagtctcagctttgagctggaggctagattccaagatgacagccatgatgaaactttttaaaaaactaaaccagaagagactttaaaataagagaaagaaatcataaatgtagacatatgcttggctaaaggggaaatggactttaaattttaaagagctcatttgcaatgcacttgtatacacttcaaaaattattgtagacacagaatttgttatatttttgtgcttagtatttaaacctgaacattgaaacagttttcctccttgtctttcttaacagtaatagtcattatatttacctgttttttaacacaatgtatgtgatagtcaaaaaatcacagtttttcattattattcatcttctgtacccacgcataaccactatacatagtttcttttgtacttgaatatacaaaacatgaacacagtgccatatgaataatttcacatacagaacctttttttctctgaagtcctgtggacttgcaaatatatatatatattgctttgttaatttgtttttatatttcatatatgtaataaaggaatatgatctga

SEQ ID NO: 6057 - DNA, 934 bp, Homo sapiens
agaagtgtctgacaaaacaaagaaacaaaacctcagtgaaaaatgtgcgcaagaaacatttcacaggatattctcatcttacagatgcacagtgctcattggcatatcaatggcaaatatgaggaaaagagtaacctgatgttctgggccaaggagattaagatcaagttgggaattctcctccagaagccagactcagttggtgaccttgtcattccgtacaatgagaagccagagaaaccagccaagacccagaaaacctcgctggacgaggccctgcagtggcgtgattccctggacaaactcctgcagaacaactatggacttgccagtttcaaaagtttcctgaagtctgaattcagtgaggaaaaccttgagttctggattgcctgtgaggattacaagaagatcaagtcccctgccaagatggctgagaaggcaaagcaaatttatgaagaattcattcaaacggaggctcctaaagaggtgaatattgaccacttcactaaggacatcacaatgaagaacctggtggaaccttccctgagcagctttgacatggcccagaaaagaatccatgccctgatggaaaaggattctctgcctcgctttgtgcgctctgagttttatcaggagttaatcaagtagtaatttagccaggctatgaaatcatcctgtgagttatttcctccataataaccctgcatttcccattaatctacatatcttcccacagcagctttgctcagtgatacccacatgggaaaaatcccaggggatgttgcttactctttttgcccacactgctttggatacttatctactgtccgaaggccttctttccccactcaattcttcctgccctgttattaattaagatatcttcagcttgtagtcagacacaatcagaatcacagaaaaatcctgcctaagg

SEQ ID NO: 6058 - DNA, 5086 bp, Homo sapiens
gaaactggatacatggtttacagcaggtcactaatgttggaaaaagtacagagtccagggaaagacttgcttgtaactttatgaattctggatttttttttttcctttgctttttcttaactttcactaagggttactgtagtctgatgtgtccttcccaaggccacgaaatttgacaagctgcacttttcttttgctcaatgatttctgctttaagccaaagaactgcctataatttcactaagaatgtcttctaattcagatactggggatttacaagagtctttaaagcacggacttacacctattggtgctgggcttccggaccgacacggatcccccatccccgcccgcggtcgccttgtcatgctgcccaaagtggagacggaagccctgggactggctcgatcgcatggggaacagggccagatgccggaaaacatgcaagtgtctcaatttaaaatggtgaattactcctatgatgaagatctggaagagctttgtcccgtgtgtggagataaagtgtctgggtaccattatgggctcctcacctgtgaaagctgcaagggattttttaagcgaacagtccaaaataataaaaggtacacatgtatagaaaaccagaactgccaaattgacaaaacacagagaaagcgttgtccttactgtcgttttcaaaaatgtctaagtgttggaatgaagctagaagctgtaagggccgaccgaatgcgtggaggaaggaataagtttgggccaatgtacaagagagacagggccctgaagcaacagaaaaaagccctcatccgagccaatggacttaagctagaagccatgtctcaggtgatccaagctatgccctctgacctgaccatttcctctgcaattcaaaacatccactctgcctccaaaggcctacctctgaaccatgctgccttgcctcctacagactatgacagaagtccctttgtaacatcccccattagcatgacaatgccccctcacggcagcctgcaaggttaccaaacatatggccactttcctagccgggccatcaagtctgagtacccagacccctataccagctcacccgagtccataatgggctattcatatatggatagttaccagacgagctctccagcaagcatcccacatctgatactggaacttttgaagtgtgagccagatgagcctcaagtccaggctaaaatcatggcctatttgcagcaagagcaggctaaccgaagcaagcacgaaaagctgagcacctttgggcttatgtgcaaaatggcagatcaaactctcttctccattgtcgagtgggccaggagtagtatcttcttcagagaacttaaggttgatgaccaaatgaagctgcttcagaactgctggagtgagctcttaatcctcgaccacatttaccgacaagtggtacatggaaaggaaggatccatcttcctggttactgggcaacaagtggactattccataatagcatcacaagccggagccaccctcaacaacctcatgagtcatgcacaggagttagtggcaaaacttcgttctctccagtttgatcaacgagagttcgtatgtctgaaattcttggtgctctttagtttagatgtcaaaaaccttgaaaacttccagctggtagaaggtgtccaggaacaagtcaatgccgccctgctggactacacaatgtgtaactacccgcagcagacagagaaatttggacagctacttcttcgactacccgaaatccgggccatcagtatgcaggctgaagaatacctctactacaagcacctgaacggggatgtgccctataataaccttctcattgaaatgttgcatgccaaaagagcataagttacaacccctaggagctctgctttcaaaacaaaaagagattgggggagtggggagggggaagaagaacaggaagaaaaaaagtactctgaactgctccaagtaacgctaattaaaaacttgctttaaagatattgaatttaaaaaggcataataatcaaatacttaatagcaaataaatgatgtatcagggtatttgtattgcaaactgtgaatcaaaggcttcacagccccagaggattccatataaaagacattgtaatggagtggattgaactcacagatggataccaacacggtcagaagaaaaacggacagaacggttcttgtatatttaaactgatctccactatgaagaaatttaggaactaatcttattaattaggcttatacagcgggggatttgagcttacaggattcctccatggtaaagctgaactgaaacaattctcaagaatgcatcagctgtacctacaatagcccctccctcttcctttgaaggccccagcacctctgccctgtggtcaccgaatctgtactaaggacctgtgttcagccacacccagtggtagctccaccaaatcatgaacagcctaattttgagtgtctgtgtcttagacctgcaaacagctaataggaaattctattaatatgttagcttgccattttaaatatgttctgagggttgttttgtctcgtgttcatgatgttaagaaaatgcaggcagtatccctcatcttatgtaagtgttaattaatattaagggaaatgactacaaactttcaaagcaaatgctccatagctaaagcaacttagaccttatttctgctactgttgctgaaatgtggctttggcattgttggatttcataaaaaatttctggcaggaagtcttgttagtatacatcagtctttttcatcatccaagtttgtagttcatttaaaaatacaacattaaacacattttgctaggatgtcaaatagtcacagttctaagtagttggaaacaaaattgacgcatgttaatctatgcaaagagaaaggaaaggatgaggtgatgtattgactcaaggttcattcttgctgcaattgaacatcctcaagagttgggatggaaatggtgatttttacatgtgtcctggaaagatattaaagtaattcaaatcttccccaaaggggaaaggaagagagtgatactgacctttttaagtcatagaccaaagtctgctgtagaacaaatatgggaggacaaagaatcgcaaattcttcaaatgactattatcagtattattaacatgcgatgccacaggtatgaaagtcttgccttatttcacaattttaaaaggtagctgtgcagatgtggatcaacatttgtttaaaataaagtattaatactttaaagtcaaataagatatagtgtttacattctttaggtcctgaggggcagggggatctgtgatataacaaaatagcaaaagcggtaatttccttaatgttatttttctgattggtaattatttttaacagtacttaattattctatgtcgtgagacactaaaatcaaaaacgggaatctcatttagactttaatttttttgagattatcggcggcacaatcactttgtagaaactgtaaaaaataaaagtatctcctagtcccttaattttttcataaatatttctggcttttgagtagtgtatttatattgtatatcatactttcaactgtagacaattatgatgctaatttattgtttcttggtttcacctttgtataagatatagccaagactgaagaaaccaaatatatgtgtttactgtagcatgtcttcaaattagtggaacttagttcagggacatagaagagtcttaatgaattaaaatcattcacttgattaaatgtctgtaaatcttcatcattcctactgtagtttatttaatatctattgtaaattatgtgacttgtagcttcctctggttttcaagtaaactcaacaaggtggagtcttacctggttttcctttccaagcattgtaaattgtataccaaagatattagttattacttctgtgtgtacaaagaggattattttattatgtttattaatcacctctaatactcatccacatgaagggtacacattaggtaagctgggcgttgactcatgcgcagtctcagtcacccgtgttatcttcgtggctcaaaggacaatgcaaaatcgccgatcagagctcatacccaaagcattacagagaacagcagcatcattgccctccccagctgaaaaacaagttggctagaagatacatggagaggaatggtgtggtcaacagttaatgaaacggttctatcatgcatgtgtaatgtggatggagacaattataagatttgactataactatttggagggtctttaacattgccaaaaaaacaaatatgttgatttttattttattttattttttattttaagaggcgggatcttgatctcacatgttgcccaggctggccttgaactcctgggctcaagcattcctcctgcctcagcctcccccatagctgggactaggggtgcatgccagcatacctggctacgttgactcttaaaatctatgttctcttattttaaagatacagtgctccccactgaaaattaaacctaaaaaatgtcacatattggtatgttgttaacctggtagattaaatcatgagaatgattagaaagacgggcaacacagcgggttacatccacactgctgatcacaccaacgacaggagctgataagcaagaaagcgtcacagccagcgtctgttcacccaaggttgacaagtgaagtttctctaatgttgattgttagccgatttgtaacctggcatttacttagcaactgccttatcaattacaggatttgccggtaaaagcagactcaaatataaaggtttttggcttaacttggtttattatagttgctctatgtttgtaaacagacaatctctaatgtctgattatttgtatcacagatctgcagctgccttggacttgaatccatgcaatgtttagagtgtgaagtcagttacttgttgatgttttcttactgtatcaatgaaatacatattgtcatgtcagttcttgccaggaacttctcaacaaaatggaattttttttttcagtatttcaataaatattgatatgcccagcctgataatttttaaaa

SEQ ID NO: 6059 - DNA, 1307 bp, Homo sapiens
aagcaagaatcccccacccctctcccgggcggagggggcgggaagagcgcgtcctggccaagccgagtagtgtcttccactcggtgcgtctctctaggagccgcgcgggaaggatgctggtccgcaggaccgcgctttgcttgctgagtttgctgccttctgggttcatgagtcttgacaacaacggtactgctaccccagagttacctacccagggaacattttcaaatgtttctacaaatgtatcctaccaagaaactacaacacctagtacccttggaagtaccagcctgcaccctgtgtctcaacatggcaatgaggccacaacaaacatcacagaaacgacagtcaaattcacatctacctctgtgataacctcagtttatggaaacacaaactcttctgtccagtcacagacctctgtaatcagcacagtgttcaccaccccagccaacgtttcaactccagagacaaccttgaagcctagcctgtcacctggaaatgtttcagacctttcaaccactagcactagccttgcaacatctcccactaaaccctatacatcatcttctcctatcctaagtgacatcaaggcagaaatcaaatgttcaggcatcagagaagtgaaattgactcagggcatctgcctggagcaaaataagacctccagctgtgcggagtttaagaaggacaggggagagggcctggcccgagtgctgtgtggggaggagcaggctgatgctgatgctggggcccaggtatgctccctgctccttgcccagtctgaggtgaggcctcagtgtctactgctggtcttggccaacagaacagaaatttccagcaaactccaacttatgaaaaagcaccaatctgacctgaaaaagctggggatcctagatttcactgagcaagatgttgcaagccaccagagctattcccaaaagaccctgattgcactggtcacctcgggagccctgctggctgtcttgggcatcactggctatttcctgatgaatcgccgcagctggagccccacaggagaaaggctgggcgaagacccttattacacggaaaacggtggaggccagggctatagctcaggacctgggacctcccctgaggctcagggaaaggccagtgtgaaccgaggggctcaggaaaacgggaccggccaggccacctccagaaacggccattcagcaagacaacacgtggtggctgataccgaattgtgactcggctaggtggggcaaggctgggcagtgtccgagagagcacccctctctgcatctgaccacgtgctaccc

SEQ ID NO: 6060 - DNA, 2252 bp, Homo sapiens
agaaatgcacagcggtattgatgagtagatccttggattcagaggttggctgaaacgcaccatgcctgcttccatcttttgctctgtaaagttgtgaattgctcatgcctatagggaggaaggatggcacatgggattccttctcaaggcaaagttaccataacggtggatgagtacagctcaaaccccacccaggcattcacgcactacaacatcaaccagagcagattccagcctccacatgtacatatggtcgaccccatcccatatgacactccaaaaccagcgggccacacgcggtttgtctgcatctcagacacacactccagaacagatggtatccagatgccttatggggacatccttctccacacaggcgatttcaccgagctgggactgccctcagaggttaagaagtttaatgactggttaggaaacctgccatatgaatataaaatagtgattgctgggaatcatgaactgacatttgataaggaattcatggcagaccttgttaaacaggactactaccgtttcccctctgtgtccaaattgaaaccagaggactttgacaatgttcagtccctcctgacaaacagtatttacttacaagattcggaggtaacagtgaagggattcaggatatacggtgcaccttggaccccgtggtttaatggatggggctttaacctacccagaggtcagtctctgctggacaagtggaacctcatccctgagggcattgacatactcatgacacatggacctcctctaggttttcgagactgggttccaaaggagcttcaaagagtgggctgtgtggagctgttaaacacggttcagaggcgagtccggcccaagctccatgtgtttggtggaatccatgaaggttatggcatcatgaccgacggttacacaacgtacatcaatgcctcgacgtgtacagtcagctttcaaccgaccaaccctccaattatatttgaccttccaaacccacagggttcctgaagctctaaatgccctattggaatgtgagggaaggtctataaactgccatttttctaattataaacttacattctcttacttatttacaaaccctgtgagttctttttgtaaattgttggaacacaaatgatgctagaggttgtgcttcttattttattttattttaaatggggcatccatttgaaatcagaggaacattgtgaatttgtaaaatgacttctgttttctcaaaggccatgccattgtaaattgttagtgttcgccaaaggacagccaagctttcttttaaaaagtgataaaagtcttattttaatatgctttaagctgaaagaaaaaaaaataagaaacaggcagtgttttaaaaaccaacacagatttgcacaactgtttaagagtattgtttgaaatattttaattttcaatgttttgttgttgttgttttcttggtaatgcttcttttttgcagatgtggtcccaatttatagcaatcttctcaacagaagtaggcatggaaaagacttcttttcatactctcactataaagaaagctgcattgagaagaaaatggctgtcatttaaaggatggtttaactagtgagattcctattgtggttatacaaggtctcattgtttgtttgtttcttttaaattatttcagctttaaaaatacagaaatggaatctgtcaagagcaggtatttcatacggttaaaaaaatgaacatgcagactccttttcaatatgggtttatatatataagtattttttgtgtattatgactacgttaggagtttattattgtcaaggacagtacaactgcaaagggatgctgtatagcaacacatcagaagtcggaaggaactgacacattctctcagagctcaaggtcttaaagagcttgagttaaatctaggtacagttacaggcatgtatagacttaaatggatgcaatggaagctaactaaaataaggcttagttgtcctttctatttaaataccccaagttgtcttcttacttcctctcccctctcccattttgcactgtgtgtcgatgcaatcttcgctagcacaaaatattgtcgctaatagtcatttctgttttcccattgtaaatgctgttgagctttattctattttatgttactttgttaatgaaatttaggaaagcagttgtttctttaaatttattgtgatattctatatctagcggcctttatatgcaaataaaattgcaagatttttaaa

SEQ ID NO: 6061 - DNA, 7641 bp, Homo sapiens
aattcgccaactgaaaaagtgggaaaggatgtctggaggcgaggcgtcccattacagaggaaggagctcgctatataagccagccaaagttggctgcaccggccacagcctgcctactgtcacccgcctctcccgcgcgcagatacacgcccccgcctccgtgggcacaaaggcagcgctgctggggaactcgggggaacgcgcacgtgggaaccgccgcagctccacactccaggtacttcttccaaggacctaggtctctcgcccatcggaaagaaaataattctttcaagaagatcagggacaactgatttgaagtctactctgtgcttctaaatccccaattctgctgaaagtgagataccctagagccctagagccccagcagcacccagccaaacccacctccaccatgggggccatgactcagctgttggcaggtgtctttcttgctttccttgccctcgctaccgaaggtggggtcctcaagaaagtcatccggcacaagcgacagagtggggtgaacgccaccctgccagaagagaaccagccagtggtgtttaaccacgtttacaacatcaagctgccagtgggatcccagtgttcggtggatctggagtcagccagtggggagaaagacctggcaccgccttcagagcccagcgaaagctttcaggagcacacagtggatggggaaaaccagattgtcttcacacatcgcatcaacatcccccgccgggcctgtggctgtgccgcagcccctgatgttaaggagctgctgagcagactggaggagctggagaacctggtgtcttccctgagggagcaatgtactgcaggagcaggctgctgtctccagcctgccacaggccgcttggacaccaggcccttctgtagcggtcggggcaacttcagcactgaaggatgtggctgtgtctgcgaacctggctggaaaggccccaactgctctgagcccgaatgtccaggcaactgtcaccttcgaggccggtgcattgatgggcagtgcatctgtgacgacggcttcacgggcgaggactgcagccagctggcttgccccagcgactgcaatgaccagggcaagtgcgtaaatggagtctgcatctgtttcgaaggctacgccggggctgactgcagccgtgaaatctgcccagtgccctgcagtgaggagcacggcacatgtgtagatggcttgtgtgtgtgccacgatggctttgcaggcgatgactgcaacaagcctctgtgtctcaacaattgctacaaccgtggacgatgcgtggagaatgagtgcgtgtgtgatgagggtttcacgggcgaagactgcagtgagctcatctgccccaatgactgcttcgaccggggccgctgcatcaatggcacctgctactgcgaagaaggcttcacaggtgaagactgcgggaaacccacctgcccacatgcctgccacacccagggccggtgtgaggaggggcagtgtgtatgtgatgagggctttgccggtgtggactgcagcgagaagaggtgtcctgctgactgtcacaatcgtggccgctgtgtagacgggcggtgtgagtgtgatgatggtttcactggagctgactgtggggagctcaagtgtcccaatggctgcagtggccatggccgctgtgtcaatgggcagtgtgtgtgtgatgagggctatactggggaggactgcagccagctacggtgccccaatgactgtcacagtcggggccgctgtgtcgagggcaaatgtgtatgtgagcaaggcttcaagggctatgactgcagtgacatgagctgccctaatgactgtcaccagcacggccgctgtgtgaatggcatgtgtgtttgtgatgacggctacacaggggaagactgccgggatcgccaatgccccagggactgcagcaacaggggcctctgtgtggacggacagtgcgtctgtgaggacggcttcaccggccctgactgtgcagaactctcctgtccaaatgactgccatggccagggtcgctgtgtgaatgggcagtgcgtgtgccatgaaggatttatgggcaaagactgcaaggagcaaagatgtcccagtgactgtcatggccagggccgctgcgtggacggccagtgcatctgccacgagggcttcacaggcctggactgtggccagcactcctgccccagtgactgcaacaacttaggacaatgcgtctcgggccgctgcatctgcaacgagggctacagcggagaagactgctcagaggtgtctcctcccaaagacctcgttgtgacagaagtgacggaagagacggtcaacctggcctgggacaatgagatgcgggtcacagagtaccttgtcgtgtacacgcccacccacgagggtggtctggaaatgcagttccgtgtgcctggggaccagacgtccaccatcatccaggagctggagcctggtgtggagtactttatccgtgtatttgccatcctggagaacaagaagagcattcctgtcagcgccagggtggccacgtacttacctgcacctgaaggcctgaaattcaagtccatcaaggagacatctgtggaagtggagtgggatcctctagacattgcttttgaaacctgggagatcatcttccggaatatgaataaagaagatgagggagagatcaccaaaagcctgaggaggccagagacctcttaccggcaaactggtctagctcctgggcaagagtatgagatatctctgcacatagtgaaaaacaatacccggggccctggcctgaagagggtgaccaccacacgcttggatgcccccagccagatcgaggtgaaagatgtcacagacaccactgccttgatcacctggttcaagcccctggctgagatcgatggcattgagctgacctacggcatcaaagacgtgccaggagaccgtaccaccatcgatctcacagaggacgagaaccagtactccatcgggaacctgaagcctgacactgagtacgaggtgtccctcatctcccgcagaggtgacatgtcaagcaacccagccaaagagaccttcacaacaggcctcgatgctcccaggaatcttcgacgtgtttcccagacagataacagcatcaccctggaatggaggaatggcaaggcagctattgacagttacagaattaagtatgcccccatctctggaggggaccacgctgaggttgatgttccaaagagccaacaagccacaaccaaaaccacactcacaggtctgaggccgggaactgaatatgggattggagtttctgctgtgaaggaagacaaggagagcaatccagcgaccatcaacgcagccacagagttggacacgcccaaggaccttcaggtttctgaaactgcagagaccagcctgaccctgctctggaagacaccgttggccaaatttgaccgctaccgcctcaattacagtctccccacaggccagtgggtgggagtgcagcttccaagaaacaccacttcctatgtcctgagaggcctggaaccaggacaggagtacaatgtcctcctgacagccgagaaaggcagacacaagagcaagcccgcacgtgtgaaggcatccactgaacaagcccctgagctggaaaacctcaccgtgactgaggttggctgggatggcctcagactcaactggaccgcagctgaccaggcctatgagcactttatcattcaggtgcaggaggccaacaaggtggaggcagctcggaacctcaccgtgcctggcagccttcgggctgtggacataccgggcctcaaggctgctacgccttatacagtctccatctatggggtgatccagggctatagaacaccagtgctctctgctgaggcctccacaggggaaactcccaatttgggagaggtcgtggtggccgaggtgggctgggatgccctcaaactcaactggactgctccagaaggggcctatgagtactttttcattcaggtgcaggaggctgacacagtagaggcagcccagaacctcaccgtcccaggaggactgaggtccacagacctgcctgggctcaaagcagccactcattataccatcaccatccgcggggtcactcaggacttcagcacaacccctctctctgttgaagtcttgacagaggaggttccagatatgggaaacctcacagtgaccgaggttagctgggatgctctcagactgaactggaccacgccagatggaacctatgaccagtttactattcaggtccaggaggctgaccaggtggaagaggctcacaatctcacggttcctggcagcctgcgttccatggaaatcccaggcctcagggctggcactccttacacagtcaccctgcacggcgaggtcaggggccacagcactcgaccccttgctgtagaggtcgtcacagaggatctcccacagctgggagatttagccgtgtctgaggttggctgggatggcctcagactcaactggaccgcagctgacaatgcctatgagcactttgtcattcaggtgcaggaggtcaacaaagtggaggcagcccagaacctcacgttgcctggcagcctcagggctgtggacatcccgggcctcgaggctgccacgccttatagagtctccatctatggggtgatccggggctatagaacaccagtactctctgctgaggcctccacagccaaagaacctgaaattggaaacttaaatgtttctgacataactcccgagagcttcaatctctcctggatggctaccgatgggatcttcgagacctttaccattgaaattattgattccaataggttgctggagactgtggaatataatatctctggtgctgaacgaactgcccatatctcagggctaccccctagtactgattttattgtctacctctctggacttgctcccagcatccggaccaaaaccatcagtgccacagccacgacagaggccctgccccttctggaaaacctaaccatttccgacattaatccctacgggttcacagtttcctggatggcatcggagaatgcctttgacagctttctagtaacggtggtggattctgggaagctgctggacccccaggaattcacactttcaggaacccagaggaagctggagcttagaggcctcataactggcattggctatgaggttatggtctctggcttcacccaagggcatcaaaccaagcccttgagggctgagattgttacagaagccgaaccggaagttgacaaccttctggtttcagatgccaccccagacggtttccgtctgtcctggacagctgatgaaggggtcttcgacaattttgttctcaaaatcagagataccaaaaagcagtctgagccactggaaataaccctacttgcccccgaacgtaccagggacataacaggtctcagagaggctactgaatacgaaattgaactctatggaataagcaaaggaaggcgatcccagacagtcagtgctatagcaacaacagccatgggctccccaaaggaagtcattttctcagacatcactgaaaattcggctactgtcagctggagggcacccacagcccaagtggagagcttccggattacctatgtgcccattacaggaggtacaccctccatggtaactgtggacggaaccaagactcagaccaggctggtgaaactcatacctggcgtggagtaccttgtcagcatcatcgccatgaagggctttgaggaaagtgaacctgtctcagggtcattcaccacagctctggatggcccatctggcctggtgacagccaacatcactgactcagaagccttggccaggtggcagccagccattgccactgtggacagttatgtcatctcctacacaggcgagaaagtgccagaaattacacgcacggtgtccgggaacacagtggagtatgctctgaccgacctcgagcctgccacggaatacacactgagaatctttgcagagaaagggccccagaagagctcaaccatcactgccaagttcacaacagacctcgattctccaagagacttgactgctactgaggttcagtcggaaactgccctccttacctggcgacccccccgggcatcagtcaccggttacctgctggtctatgaatcagtggatggcacagtcaaggaagtcattgtgggtccagataccacctcctacagcctggcagacctgagcccatccacccactacacagccaagatccaggcactcaatgggcccctgaggagcaatatgatccagaccatcttcaccacaattggactcctgtaccccttccccaaggactgctcccaagcaatgctgaatggagacacgacctctggcctctacaccatttatctgaatggtgataaggctgaggcgctggaagtcttctgtgacatgacctctgatgggggtggatggattgtgttcctgagacgcaaaaacggacgcgagaacttctaccaaaactggaaggcatatgctgctggatttggggaccgcagagaagaattctggcttgggctggacaacctgaacaaaatcacagcccaggggcagtacgagctccgggtggacctgcgggaccatggggagacagcctttgctgtctatgacaagttcagcgtgggagatgccaagactcgctacaagctgaaggtggaggggtacagtgggacagcaggtgactccatggcctaccacaatggcagatccttctccacctttgacaaggacacagattcagccatcaccaactgtgctctgtcctacaaaggggctttctggtacaggaactgtcaccgtgtcaacctgatggggagatatggggacaataaccacagtcagggcgttaactggttccactggaagggccacgaacactcaatccagtttgctgagatgaagctgagaccaagcaacttcagaaatcttgaaggcaggcgcaaacgggcataaattccagggaccactgggtgagagaggaataaggcccagagcgaggaaaggattttaccaaagcatcaatacaaccagcccaaccatcggtccacacctgggcatttggtgagagtcaaagctgaccatggatccctggggccaacggcaacagcatgggcctcacctcctctgtgatttctttctttgcaccaaagacatcagtctccaacatgtttctgttttgttgtttgattcagcaaaaatctcccagtgacaacatcgcaatagttttttacttctcttaggtggctctgggaatgggagaggggtaggatgtacaggggtagtttgttttagaaccagccgtattttacatgaagctgtataattaattgtcattatttttgttagcaaagattaaatgtgtcattggaagccatccctttttttacatttcatacaacagaaaccagaaaagcaatactgtttccattttaaggatatgattaatattattaatataataatgatgatgatgatgatgaaaactaaggatttttcaagagatctttctttccaaaacatttctggacagtacctgattgtattttttttttaaataaaagcacaagtacttttga

SEQ ID NO: 6062 - DNA, 4224 bp, Homo sapiens
attcgagaatgggacatggaatgaggcgacggccccagcaagccccagcagccccagccccagccccaggcccagcagcagcagcagcagcccctgctctcccgccgcccggagaggctctgcagccatgaagccaaccgtcccgaggcaccgccggtaagcagggagcctccgcggagctcccgccgccgctcccccttggcgccaaaggcacccggtcccggagcagccacgcgcggcccgtgagcctcgccaccagcgggggctcagaggaggaggacaaagacggcggggtgctgttccacgtcaacaagagcggcttccccatcgacagccacacctgggagcgcatgtggatgcacgtggccaaggtgcaccctaaggggggagaaatggtgggcgccatcaggaacgccgccttcttggcaaagccttcaataccccaggtcccaaactacaggctgtcgatgacgatcccagactggctccaggcgatccagaattacatgaagaccctacaatataatcacacagggacccagttctttgaaattaggaaaatgagaccgctgagtgggttaatggaaacagcaaaagaaatgacccgagagtccttgcctatcaaatgccttgaagctgtcatcctgggcatctacttaaccaatgggcagccttccattgagcggttccccatcagctttaaaacctacttctcaggaaactactttcaccacgttgtgctggggatttactgcaatggccgctatggctcattgggcatgagccgcagggctgagctgatggacaagccattgacttttcggactctgagtgacctcatctttgactttgaggactcttacaagaaatacctgcacacagtcaagaaggtcaagattgggctgtacgtcccccatgagcctcatagcttccagcccattgagtggaagcagctggtcctcaacgtctcaaagatgctgagggctgacataaggaaggagctggagaaatatgccagggacatgagaatgaagatcctgaaacctgcaagtgcccactctccgacccaagtgagaagccggggaaaatccctgtcccccagaaggagacaggcaagccccccgaggaggctcggccggcgagagaagtcgcctgcactgcctgaaaagaaggtggctgatctgagcactctgaatgaagtgggctatcaaatccgaatttagccaagccataccggccagcaagagggtttctgtggtgcttctctctgcactttacccagcatcttcaggaggaactgcaactatttattaagaacttgtgaattttatttttaaggattcacctggaaatagaatctgagtgggtggtaaccattagctttaaaaaattcactaaaaggcaccatgaaaaggctgaagtaataagccccactggggttggactatgtccctcactcaagatcttaaggataaccgtaactgaagttttatatttttccatttacctactttcttttacttgctttgaacattatgcctcaccaatagtaaatgttcatgaaataatctcttgaacttttggtatagtaaggtaactctaacagtattactgtctttttcagcaataacagaaagcaaaaatgggtgggttttttttaagcagttattacctcagcattttgacatcagatatgcaaacttaatggcgttttgtttttttatattctatttgtattctttccccagtatttcccatggggatctccacaagtttggagttttttcctggtgcacacacgtgaggagatttaaggtactatatgcaagtgttttactaaaaagcactgaaattcttctggcaatacaagaaccattttcaggatcttggagttacttccttcttaatctttcttaaagcattcactgatgtttttgttttttcaaaatgaaacaaaaatatcacattgagaagctagtctatgttctgtcactaacatttaaactttgcagactctaacaaaaagcacaagaggtcacgtactattatacaaatttagcggtactggatttacctctgacattaacacactcaggcagagaccaggagtgatcagcaggtcttcagaaccaaaaaacctttctgttcacatttcatctgatttttaaactgaggcaggctttgattcttctgaaggatgccaagaatcaaactaagggaggactcactgttaaagatgtgttctgatgtcttatattaagaccaaatgtgacatgatgtgattatcttccagtactttgcttttaggtaccatttcatgacattttaggaatgagtattggaaaatataaagaattagaaaagcagcactttttttttaatggaaaagtcttcggtccagtgttacaccttatagtgtaattcagtccctaagcacagaatgaatgtctggcctgcatatggtagttacagtgtaacctctggctgcagaccacacaggacaaccctaacagcctagtcttgtatggtgtaaatatcaagagtacagcttcaatttcatttgctttatcttagcaacaatgccaactcaggagagcagacggccgatttcagtgaagtctggtagtcaacagatgttatttcagtctcagtgcatctcctctggctttctttgactgaaggtgtttataggaaggaagttaaaaaaaaaaaaagctcattgagattctttaccaattctttacaagatttctgggggtgacagggaaagcaaaaggacttcaaagcaaaagggtgcacaagagcttacttcaccctgaaaatcagtattattaatgaaaagtactgttttcttaaagaagtcgaatgtcctttagatgaacaagaccaagtatacatctccattagattaaaatgtagcacagggttaaaaattatcagtttaatctctttaagaacagtattatcagagtttaaaatgagttagctctgtttatctacacacagcaaacccattcgcagcctcttggccacatgtattcagatgtttgaaatagtgaatcatttcattttcattctaaaacaatactgacttagccatataccttctgtttgtcaatctgaaacttgcttacatctaataagtagacctcttataacactgcaaccattctaagagttggaatttatttttgccaagtattaagtactgttacatctaaaatacagaatgtcaaatggttgcatagcttgtttcccacaacaaggaggaaaagaacaggaatacaaactctgtaatatgctgataaagaagccttagaactgccaactggcttgatggttcaattagtaagctaatttctcccacacccgctccttgatttttagactaattttcccaaagcaaggtttagtcacacaaacttgaaagtacatttaaaatgttcttagttgtcatcctacttttattgcctatggaatatgctaatttctaaaaaaaatacgggagaggcaccaaacccctaaattctagtgcaataatttaaaaaacaaaaaacaaaacaaaacaaaaaacatgttatatgcacccccctcccaaagctgattttaagactggctagaattcaaaatataaaaaataaaactatgaagtgatttgaaatcggttttaaaaagttgttagtgcaagagaaattttatgtttaagccatcatggcaatatatgcaaagtttaaatgaatgacagaaatcttgattttagactgtatgttgtgctgttttgagtacactttatttcggagatatttagtattttctatacactctgaaatcatgagcatttcactttttctaagtcaattatttcataaggattttattaatagatattggtaaatagaactttggaaatcttaattcagaattcttactatacctgagtcttttgtaagctatagttttatgtacaaccttgtacagtttttttgacatacaattcagaactttgtttattctcttggactttgttctggccaatacattttttttaaatctttaagaagaactgtgattgttttagtgggtatttttctaattaaatgaaaacttgtataatggtattttagagaatgccagtaagtgcatgtttcaagttaatgtttttctcatcacttgtatgtttctaacacagcatgggactttaataaaaccatcctggaaacttaa

SEQ ID NO: 6063 - DNA, 2037 bp, Homo sapiens
gtccacaggcggcggagcggccacaatcacagctccgggcattgggggaacccgagccggctgcgccgggggaatccgtgcgggcgccttccgtcccggtcccatcctcgccgcgctccagcacctctgaagttttgcagcgcccagaaaggaggcgaggaaggagggagtgtgtgagaggagggagcaaaaagctcaccctaaaacatttatttcaaggagaaaagaaaaagggggggcgcaaaaatggctggggcaattatagaaaacatgagcaccaagaagctgtgcattgttggtgggattctgctcgtgttccaaatcatcgcctttctggtgggaggcttgattgggcccacaacggcagtgtcctacatgtcggtgaaatgtgtggatgcccgtaagaaccatcacaagacaaaatggttcgtgccttggggacccaatcattgtgacaagatccgagacattgaagaggcaattccaagggaaattgaagccaatgacatcgtgttttctgttcacattcccctcccccacatggagatgagtccttggttccaattcatgctgtttatcctgcagctggacattgccttcaagctaaacaaccaaatcagagaaaatgcagaagtctccatggacgtttccctggcttaccgtgatgacgcgtttgctgagtggactgaaatggcccatgaaagagtaccacggaaactcaaatgcaccttcacatctcccaagactccagagcatgagggccgttactatgaatgtgatgtccttcctttcatggaaattgggtctgtggcccataagttttaccttttaaacatccggctgcctgtgaatgagaagaagaaaatcaatgtgggaattggggagataaaggatatccggttggtggggatccaccaaaatggaggcttcaccaaggtgtggtttgccatgaagaccttccttacgcccagcatcttcatcattatggtgtggtattggaggaggatcaccatgatgtcccgacccccagtgcttctggaaaaagtcatctttgcccttgggatttccatgacctttatcaatatcccagtggaatggttttccatcgggtttgactggacctggatgctgctgtttggtgacatccgacagggcatcttctatgcgatgcttctgtccttctggatcatcttctgtggcgagcacatgatggatcagcacgagcggaaccacatcgcagggtattggaagcaagtcggacccattgccgttggctccttctgcctcttcatatttgacatgtgtgagagaggggtacaactcacgaatcccttctacagtatctggactacagacattggaacagagctggccatggccttcatcatcgtggctggaatctgcctctgcctctacttcctgtttctatgcttcatggtatttcaggtgtttcggaacatcagtgggaagcagtccagcctgccagctatgagcaaagtccggcggctacactatgaggggctaatttttaggttcaagttcctcatgcttatcaccttggcctgcgctgccatgactgtcatcttcttcatcgttagtcaggtaacggaaggccattggaaatggggcggcgtcacagtccaagtgaacagtgcctttttcacaggcatctatgggatgtggaatctgtatgtctttgctctgatgttcttgtatgcaccatcccataaaaactatggagaagaccagtccaatggaatgcaactcccatgtaaatcgagggaagattgtgctttgtttgtttcggaactttatcaagaattgttcagcgcttcgaaatattccttcatcaatgacaacgcagcttctggtatttgagtcaacaaggcaacacatgtttatcagctttgcatttgcagttgtcacagtcacattgattgtacttgtatacgcacacaaatacactcatttagcctttatctcaaaatgttaaatataaggaaaaaagcgtcaacaataaatattctttgagtattg

SEQ ID NO: 6064 - DNA, 7544 bp, Homo sapiens
agatgccaccaccactgccaagcagctgcattcctcgccgggaaattcctccaggcaagagaacgcagagacgcccgcccgcagtccgggggaggacgcttcaccaggtgctggccacgaacaggaggctttcctgggtgtgaggggtgcgccagggtcgcccacccaggagcggcccgcgggaggactaggcgaggcccctaacggagcccccagtgtgtgtgccgaagaaggctccctggggccccgcaacgcccgcagccagccccccaagggcgcgtctgatttgccaggtgagcctccggccgagggcgcagcgcacacggccagctccgcgcaggcagactgcacagcccgccccaagggtcacgcccaccctgctaaggtgctaactttggacatctacttgagtaagactgagggggcacaagtggacgagccggtcgtgattactcccagagcggaagattgcggtgactgggacgacatggagaagaggtccagcggccgtaggtcggggaggcggagggggtcgcagaaatccaccgactcccccggcgcggacgccgagctccctgagagcgctgccagggacgacgcggtgttcgacgacgaggtggcgccaaacgcggccagcgataacgcctcggcggaaaagaaagtgaaatctccgcgggcagccctcgacgggggcgttgcctccgctgcgagcccagagtccaagcccagccccggtaccaaagggcagctccgaggggagtcggaccggagcaaacagccacccccggcttcgtcccccacgaagaggaagggcaggagccgtgccctcgaggccgtgcccgccccgcccgccagcggcccccgggctcccgccaaggagtccccacccaagagggtgcccgatcccagcccagtcaccaagggcactgcggccgagagcggggaggaggcggcgcgggccatcccccgcgagctcccggtcaagagcagctcgctgctgccggagatcaagcccgagcacaagaggggcccgctccccaaccacttcaacggccgggcagagggaggtcgaagcagagagctgggcagagcggccggagcgcctggagcttctgacgccgacggcttgaagcccaggaaccatttcggcgtgggcaggtcgacagtgaccactaaagtgaccctccctgccaagcccaaacatgtggaactaaatcttaaaacccctaagaatcttgacagtttgggaaatgagcacaatccatttagccagccagttcacaaaggcaacactgccaccaaaatctccttatttgaaaacaaacggacaaacagtagcccaagacacactgacattcgaggccaaaggaatactcctgcctctagtaaaacgtttgttgggagggcaaagctgaatttagccaaaaaagccaaagaaatggagcaacctgaaaagaaagtaatgccaaacagtccccagaatggtgtgctggttaaggaaactgctatagaaaccaaagttaccgtctcggaagaagagattctgccagcaaccagaggaatgaatggagactcttctgagaatcaagctcttggtcctcagcctaaccaagatgataaagcagatgtacaaacagatgctggctgcctttcagaaccagtggcttctgctctgattcctgtcaaggatcataagctcttagagaaggaggactcagaggctgcagacagcaaaagccttgtacttgaaaatgtaaccgatacagcacaagacatccccaccactgtggataccaaagatttacctccaacggccatgccaaagccacagcatacattttctgactcacagtcccctgctgagtcatctcctgggccttctctttcactgtctgcacccgctcctggggatgttcccaaagacacatgtgttcaatcacccataagcagtttcccatgcactgatctaaaagtgtcagaaaaccataaaggatgtgttttgcctgtgtctcgtcagaacaatgagaaaatgccacttttagaacttggaggagaaacaacccctcctttgtccacagagcgtagtccagaagctgtgggaagtgagtgtccatccagagtcctcgtccaggtcaggtccttcgtgctccccgtggagagcacccaggatgtgagctcccaggtcatcccagagagctctgaagttagagaagtgcagttgccaacttgtcacagtaatgaacctgaagtggtttccgttgcaagttgtgctcccccacaagaggaagtactgggcaatgaacactctcattgcacagcagagctcgcggcaaaatctggcccacaagtcataccgccagcatcagagaaaactctgcctattcaggctcaaagtcagggcagcagaacacccctgatggctgaatccagtcccaccaactctcccagcagcggaaatcacttagccactcctcaaaggccagatcagactgttacaaatggccaggatagccctgccagccttttgaacatttctgctggtagtgatgatagtgtatttgattcttcttctgatatggaaaaattcactgaaattataaaacagatggatagcgcagtttgtatgcccatgaaaagaaagaaggccaggatgccaaactctcctgctcctcactttgccatgcctcctattcacgaagaccatttagaaaaggtgtttgatcccaaagtgtttacctttggtttggggaagaagaaggaaagtcagccagaaatgtcaccggctttacatttgatgcagaaccttgacacaaaatccaaactgagacccaaacgtgcatctgctgaacagagcgtcctcttcaagtccctgcacaccaacactaatgggaacagtgagcctctggtgatgccggaaatcaatgacaaagagaacagggacgtcacaaatggtggcattaagagatcgagactagaaaaaagtgcacttttctcaagcttgttatcttctttaccacaagacaaaatcttttctccttctgtgacatcagtcaacactatgaccacggctttcagtacttctcagaacggttccctatctcagtcttcagtgtcacagcccacgactgagggtgccccgccctgtggtttgaacaaagaacagtcaaatcttctgcccgacaactccttaaaggtcttcaatttcaactcgtcaagtacatcacactccagtttgaaaagtccaagccacatggaaaaatacccgcaaaaagagaaaaccaaagaagatctggattcacgaagcaacctacacttgccagaaactaaattttctgaattgtcaaaactgaagaatgatgatatggaaaaggctaatcatattgaaagtgttattaaatcaaacttgccaaactgtgcaaacagtgacaccgacttcatgggtcttttcaaatcaagccggtatgacccaagcatttctttttctggaatgtcattatcagacacaatgacacttagaggaagtgtccaaaataaactcaatccccgacctggaaaggtagtgatatatagtgaacccgacgtctctgagaagtgcattgaagttttcagtgacattcaggattgcagttcttggagcctctctccagtgatactcataaaagttgttagaggatgttggattttgtatgagcaaccaaattttgaagggcactccatccccttagaagaaggagaattggaactctctggtctctggggtatagaagacattttggaaaggcacgaagaagcagagtctgataagccagtggtgattggttccatcagacatgtggttcaggattacagagttagtcacattgacttatttactgaaccagaagggttaggaatcctaagttcctactttgatgatactgaagaaatgcagggatttggtgtaatgcagaagacttgttccatgaaagtacattggggcacgtggctgatttatgaagaacctggatttcagggtgttcctttcatcctggaacctggtgaataccctgacttgtccttctgggatacagaagaagcgtacattggatccatgcggcctctgaaaatgggtggccgtaaagttgaattccctacagatccaaaggtagttgtttatgaaaagcctttctttgaaggaaaatgtgtggaactagaaacaggaatgtgtagttttgtcatggagggaggtgaaacagaagaggcgactggagacgatcatttgccgtttacgtcagtggggtctatgaaagttctaagaggcatttgggttgcatatgagaaacctggatttaccggtcatcagtatttgctagaagaaggagaatacagggactggaaagcctggggaggttacaatggagagcttcagtctttacgacctatattaggtgatttttcaaatgctcacatgataatgtacagtgaaaaaaactttggatccaaaggttccagtattgatgtattgggaattgttgctaatttaaaggagactggatatggagtgaagacacagtctattaatgtactgagtggagtatgggtagcctatgaaaatcctgacttcacaggagaacagtatatactggataaaggattttataccagttttgaggactggggaggcaaaaattgtaagatctcttctgttcaacctatatgtttggattctttcactggcccaaggagacgaaatcagattcacttgttttcagaaccacagtttcaaggtcacagtcaaagttttgaagaaacaacaagtcaaattgatgattcattttctaccaagtcttgcagagtttcaggaggcagctgggttgtatatgatggagaaaatttcactggtaatcaatacgtgttggaagaaggccattatccttgtctgtctgcaatgggatgcccgcctggagcaactttcaagtctcttcgttttatagatgttgaattttctgaaccaacaattattctctttgaaagagaagacttcaaaggaaaaaagattgaacttaatgcagaaactgtcaatctccgatccctgggattcaacacacaaatacgctctgttcaggttattggtggcatatgggttacttatgaatatggcagttacagagggcgacagttcctattgtcacctgcagaagtacctaattggtatgaattcagtggctgtcgccaaataggttctctacgaccttttgttcagaagcgaatttatttcagacttcgaaacaaagcaacagggttattcatgtcaaccaatggaaacttagaggatctgaagcttctgaggatacaggtcatggaggatgtcggggccgatgatcagatttggatctatcaagaaggatgtatcaaatgcaggatagcagaagactgctgcctgacgattgtgggcagcctggtaacatctggctccaagctaggcctggccctggaccagaatgctgacagccagttctggagcttgaagtccgatggcaggatttacagcaagttgaagccaaatttagttttagacattaaagggggcacacagtatgatcaaaatcacattatcctcaacactgtcagcaaagagaagtttacacaagtgtgggaagccatggtcctatatacctgaacaaagaaggaagaagaatcttctggaggtccttccagccaccttatttcttaaaaaggacaatgctgatggaagaccagactggaaagtggatcgactcctccttcattgattctaaattcaaccttaaatcatgctgccatgactcagagaacttactcatcgtttcaaaagactatcatagctttaaaccaataatttgtcctcctttcatttcttgcctttcatttttggtagctgcttaaacaggttgcctaattagcagcttttgggtgattttgtaaaatgttatatcaagatttcaagactgtgtacattttaaattatttccaaagatagtgacaggagagaactggaacaaatttaccaactttgtggacctacaaagcccttacactttaaagggtaagacaaaggcttaagtttgaaaggtagagaactgtttagcatctgagaagaaatactttattaggcctgtaattttggttcttggccttaaacactttctggaacctttaaatatgctgcatagcacaatgggaaagccttaggtattcacacatttaaggaactctaaacaaaatactattttcctttagttcatattaaaaattaatacattttaaaaatttaatgtcaaagtctggtaacatttgttagtaggatttgagttattattttttgagacaggatctcaggctggagtgcagtggcacaatcacggctcactgcagcctctacctccccaggctcaggtgatcctcccacctcagcctcccaagtagctgggactataggcacacatcaccaagcccagccaaattttgttttttttttgtagagatggggtttcatcacgttgcccaggctgatctcgaacctctgggctcaagcaattcactcgcctcggcctcccaaaatgctgggattacaggcctgagccactgcgcccagccaggatttgaattattttaactcatccatgggctgccctagaatgtcacaaatgagggttgtttaatgcctttcttatagctgctactggaacactattatgacctaatttatgagccatccttactcatctacaagtgctgaagcaatgttacatacttttttgctaaactcagattttttagcctaatttcttgtcctcctatccacctgcatccacacatggcctgcatggggctgccttccctgcagtgttctgcagccatgcttcagggtatagctgttggtggacagcctcaggtcttgggggcactatagccactaaacgaggtgtgaaaggctcaagaggatgaccagcaattaattatccccagaaagtgaaggaaaagagacctttagggatgttgctggtcaagtcttgatttgaccggagtcaaatcaatcttcaagcaatcttggaatcctcaactgcagtaagcatttcaaaatgcaaacaaactgcttaacaactgacaagacaccagcccatacgctgctcttccaacagtgggttctagctttgaacaaaagtgctaaacatttccttgaatatattcttcctctttttgtcctcatcactcaatactggtgctcttgtcacaggtagaacagcttgtttcttttccatctattcaagtgtgtttctaattctaaaatgctgatcttctctggagtctatggtaggcaattatggtcactggaatagtttgtcttgttttaaaatattattggtgcatgtacaacagcatccaacatatctgtcttgttcctagatatatagctctgattttaggccttttgtgcataccattacaatatggtggggtaagacattctacagtagcctgtgctgaactgatctcttaaataaacttgcttctggttaactatg

SEQ ID NO: 6065 - DNA, 4333 bp, Homo sapiens
gatgctgtgttctttgctcctttgtgaatgtctgttgctggtagctggttatgctcatgatgatgactggattgaccccacagacatgcttaactatgatgctgcttcaggaacaatgagaaaatctcaggcaaaatatggtatttcaggggaaaaggatgtcagtcctgacttgtcatgtgctgatgaaatatcagaatgttatcacaaacttgattctttaacttataagattgatgagtgtgaaaagaaaaagagggaagactatgaaagtcaaagcaatcctgtttttaggagatacttaaataagattttaattgaagctggaaagcttggacttctagcttttgcacagcatcaggctgaagtcgccaagatggagccattaaacaatgtgtgtgccaaaaagatggactggactggaagtatctgggaatggtttagaagttcatggacctataaggatgacccatgccaaaaatactatgagctcttactagtcaaccctatttggttggtcccaccaacaaaggcacttgcagttacattcaccacatttgtaacggagccattgaagcatattggaaaaggaactggggaatttattaaagcactcatgaaggaaattccagcgctgcttcatcttccagtgctgataattatggcattagccatcctgagtttctgctatggtgctggaaaatcagttcatgtgctgagacatataggcggtcctgagagcgaacctccccaggcacttcggccacgggatagaagacggcaggaggaaattgattatagacctgatggtggagcaggtgatgccgatttccattataggggccaaatgggccccactgagcaaggcccttatgccaaaacgtatgagggtagaagagagattttgagagagagagatgttgacttgagatttcagactggcaacaagagccctgaagtgctccgggcatttgatgtaccagacgcagaggcacgagagcatcccacggtggtacccagtcataaatcacctgttttggatacaaagcccaaggagacaggtggaatcctgggggaaggcacaccgaaagaaagcagtactgaaagcagccagtcggccaagcctgtctctggccaagacacatcagggaatacagaaggttcacccgcagcggaaaaggcccagctcaagtctgaagccgcaggcagcccagaccaaggcagcacatacagccccgcaagaggtgtggctggaccacgtggacaggatccggtcagcagcccctgtggctagaggaacaccagcacaaacgacagcctcaagtctccttcgagctttatatccatttggggatgaagtctactttgacagctagcaaggcgacatgcaactgttgttgaatgatgacagcaattcaggaaagacttaaatatgaaagcaaattgaacacatcgggtgtttgttatcagaaaagagatgagatgagataagacttgtttattgactagccaatatgtcattaaaattaaggtttatattgtgaagcttttttgaaattttacttttttttgagagttttgctctgtcacccaggctggagtgaggtggtacaatctcggctcactgcaacctccacctcccaggttcaagagattctcctgcctcagtctcccgagtagctaggattacagatgtgcatcaccatgcctggctaatttttgtattttttagtagagatggggtttcaccatgttggtcaggctggtctcgaactcctgacctcaagtgacccgcccttgtcggcctcccaaagtgctgggattacaggcatgagccattgtgcccagcctatatagtgtgaagcttttaggaaaatcagaacagggtagacagctgttaaaaacaatgtttaaatggaataatgttgaatgtttacaggctgtaagaactattgtatacacaaaataatacacaaagtttgtactttgtgtacaaatacaaatttgtactttgtgtacaaataatacaaaaagtttgtatacacaaactttttacgttgtggtttggtatattgtcttaactgaattttcttataagaaccccatgaaacttacctgagtttttaaaatgctatccaggacatcataccttatagtatacatgaaacataatgtaatccaggttgtaatttagaactttttttttttttttagctgagcacttaatgtaattaattccaggttatgactcttaaaaaacattggccattagagaaatagttctatttgcccatccaaatcacctgaatgactttttgaaagaataggggtccacatccccagatcccatcccagctgtgcacagtctgaagcaagcagagtgaaacaagttggcaacttgttccaagcgtgggcctttgcagtctgtgatccagtgttactccaggtcccagtctgtcccatacttgtcttttgctacagttagttagttactttgttatcatccccttgtaaactgccttcaatatctgggataaggaagacaaagcttaatgacaactaaggttctagctgacatctttctttcatatttaatttttgtgagttttcatctgttttctgtttgtttatgtgtcctaggttcttgacctaaccacatgggttttgttttttgtttttatattagaacttagaaaagtttgttttacagcagtattatggaacagaagagaccattttaaataatttttttaaacagcccaaaacacacaaaagatacttgttttctagagacagggtcttgctctgtcacccaggctggagtgcagtggcacgatcatagctcagtgcagcctccacctcctgggctcaagtggtcctcctgcctcagcctcttaagcagttgggactacaggtgtgtgccagcatgcttgctgttttttttttttttgagacagagtcttgctctgtcactcaggctggagtccagtggcttggtctcagctcactgcaatctctgcctcccaggggttcaagtgattctcctgcctcagcctcccaagtagctgaaactacaggcgcatgccaccatgcccagctaatttttgtatttttagtagagacagggtttcactatgttggccaggctggtctcaaactcccgacctcaagtgatccgcccgcttcggcctcccaaagtgctgggattacaggtgtgagccactgcgcctggctgctgatttatttttcatagacacgggggtctatgttgcccaggttggtcttgaactcctagcctcaagcgatcctcctgcctcagcctcccaatgtgctgggattacaggaatgagccaccatgcccagcccaagaagtagagtttcttttatactgactttggcctaaaaaaacagattttcatggaggaaaaaaaaacctagatttttagtaagactattttatatacttttttacattgatcaagtacattatttttaccaaacaacattgtttcccactacatccatggttatgtataaaaaaacgccattgtcaattaagatgttaaaaaattatttccataagagtattaaattctaatctatgattcacttaacttcctactttataaacactaggtaaagtaatctcacaagctgccaaagaacacatcccaagcagtaatcacagacgatgaagcaccttacaggacccctccaccctcaaacgcgcatgtccagagaagtattaatgccttaatagactactgaaggttaactatttacatcattctaaaaatattttaagctgtattacagtgctataaattctccttttaaggaaaaaagtaatagattgtttccttaccgtgtttgaaaggaaaaaaaataaatccatagtaactaatggtctgccgattttttccctgaatttttaaactccaacaaagcattattttgcaaaaagtcctttagcccaaagtcagtgtctctgttttgatctctttgtaaaagaactctctgttcatccattctctttccctgggaccgtaaaataaggctgaaaaagtcttcatctggtactgtcggaccctttgtggtagcaggtggtggagcacatctttgatcatctaatctggatccctagaagtttatgagagagattaaaagacatactgtgggaaagaaagcaccaagctatgttaaatctctcagtcacaacaagaaaacgcagttgtaaacttttatttggggcttctcagaaattaatctttgtttttatattgttctctttagttcccagcctgatttctgaaagaaataatctttaaacctg

SEQ ID NO: 6066 - DNA, 1146 bp, Homo sapiens
aatggccacaagtggccaacggaaagcaggtggcaggacaggaggctgtggtggggcctgaccgagcagcctttccttccaaatctgactgtggcttgctcaggcccctatggtggctgtgaccctgttttgtccatctcctttcaccaggacccgccgggccccgccagcaggcgaagcagggagatgtcagactgctacacggagctggagaaggcagtcattgtcctggtggaaaacttctacaaatatgtgtctaagtacagcctggtcaagaacaagatcagcaagagcagcttccgcgagatgctccagaaagagctgaaccacatgctgtcggacacagggaaccggaaggctgcggataagctcatccagaacctggatgccaatcatgatgggcgcatcagcttcgatgagtactggaccttgataggcggcatcaccggccccatcgccaaactcatccatgagcaggagcagcagagcagcagctagagacccctttggccacaccttccaggcactggcctgatgccccgccctggtgctctccccaggctccctcctcagcctcctgcccacccagggccctttactctcttctccctccagaccttcctctgacccttgctgaactggggtccctttgtgagtgtctcagtctagaggtacctccctccctggggggtctcagctcctggagtcgcaggcccttggggcccctctgtgagatctcaatgctgtctggggaccctaagagttttctcacctgttcagtctcatctaaccttccaatgtctgatgttcctgccaaattcctgcctgattctgggtccgtcctgacctccaaaggtcagcttggtgcttgaggtctccctgctcttggtggcagtggtagcagcaacagcagcagcagcagcagcagcagcagcagagacctctccactttcccttagcccctctgctgggtagagaggcactttcagggacttccctccagctgcctcttcatctgggaatgagctaagcaaggctgagcctcctcctgttgcttgaaataatgatgatataaaggctggatttggagtttgtatcccctggtccctctgggatgctcattaaaaccttcccactccttggaaa

SEQ ID NO: 6067 - DNA, 1449 bp, Homo sapiens
gggagcccccccgccccacatcctgccccgcaaaaggcagcttcaccaaagtggggtatttccagcctttgtagctttcacttccacatctaccaagtgggcggagtggccttctgtggacgaatcagattcctctccagcaccgactttaagaggcgagccggggggtcagggtcccagatgcacaggaggagaagcaggagctgtcgggaagatcagaagccagtcatggatgaccagcgcgaccttatctccaacaatgagcaactgcccatgctgggccggcgccctggggccccggagagcaagtgcagccgcggagccctgtacacaggcttttccatcctggtgactctgctcctcgctggccaggccaccaccgcctacttcctgtaccagcagcagggccggctggacaaactgacagtcacctcccagaacctgcagctggagaacctgcgcatgaagcttcccaagcctcccaagcctgtgagcaagatgcgcatggccaccccgctgctgatgcaggcgctgcccatgggagccctgccccaggggcccatgcagaatgccaccaagtatggcaacatgacagaggaccatgtgatgcacctgctccagaatgctgaccccctgaaggtgtacccgccactgaaggggagcttcccggagaacctgagacaccttaagaacaccatggagaccatagactggaaggtctttgagagctggatgcaccattggctcctgtttgaaatgagcaggcactccttggagcaaaagcccactgacgctccaccgaaagagtcactggaactggaggacccgtcttctgggctgggtgtgaccaagcaggatctgggcccagtccccatgtgagagcagcagaggcggtcttcaacatcctgccagccccacacagctacagctttcttgctcccttcagcccccagcccctcccccatctcccaccctgtacctcatcccatgagaccctggtgcctggctctttcgtcacccttggacaagacaaaccaagtcggaacagcagataacaatgcagcaaggccctgctgcccaatctccatctgtcaacaggggcgtgaggtcccaggaagtggccaaaagctagacagatccccgttcctgacatcacagcagcctccaacacaaggctccaagacctaggctcatggacgagatgggaaggcacagggagaagggataaccctacacccagaccccaggctggacatgctgactgtcctctcccctccagcctttggccttggcttttctagcctatttacctgcaggctgagccactctcttccctttccccagcatcactccccaaggaagagccaatgttttccacccataatcctttctgccgacccctagttccctctgctcagccaagcttgttatcagctttcagggccatgg

SEQ ID NO: 6068 - DNA, 3545 bp, Homo sapiens
aaacagaaggcagatagagagggagtgagaggcaggagctgagacacagatcctggaggaagaagaccaaaggaagggggcagagacagaaagggaggtgctaggacaaaactcgaaaggtggccctatcagggaagcagaggagaggccgttctagggaagcccagctccggcacttttggccccaactcccgcaggtctgctggctccaggaaaggtggaggagggagggaggagtgggagaatgtgggcgcagggtgggacatgggcatggccaggggcagcctcactcgggttccaggggtgatgggagagggcactcagggcccagagctcagccttgaccctgacccttgctctccccaatccactccggggctcatgaaggggaacaagctggaggagcaggaccctagacctctgcagcccataccaggtctcatggaggggaacaagctggaggagcaggactctagccctccacagtccactccagggctcatgaaggggaacaagcgtgaggagcaggggctgggccccgaacctgcggcgccccagcagcccacggcggaggaggaggccctgatcgagttccaccgctcctaccgagagctcttcgagttcttctgcaacaacaccaccatccacggcgccatccgcctggtgtgctcccagcacaaccgcatgaagacggccttctgggcagtgctgtggctctgcacctttggcatgatgtactggcaattcggcctgcttttcggagagtacttcagctaccccgtcagcctcaacatcaacctcaactcggacaagctcgtcttccccgcagtgaccatctgcaccctcaatccctacaggtacccggaaattaaagaggagctggaggagctggaccgcatcacagagcagacgctctttgacctgtacaaatacagctccttcaccactctcgtggccggctcccgcagccgtcgcgacctgcgggggactctgccgcaccccttgcagcgcctgagggtcccgcccccgcctcacggggcccgtcgagcccgtagcgtggcctccagcttgcgggacaacaacccccaggtggactggaaggactggaagatcggcttccagctgtgcaaccagaacaaatcggactgcttctaccagacatactcatcaggggtggatgcggtgagggagtggtaccgcttccactacatcaacatcctgtcgaggctgccagagactctgccatccctggaggaggacacgctgggcaacttcatcttcgcctgccgcttcaaccaggtctcctgcaaccaggcgaattactctcacttccaccacccgatgtatggaaactgctatactttcaatgacaagaacaactccaacctctggatgtcttccatgcctggaatcaacaacggtctgtccctgatgctgcgcgcagagcagaatgacttcattcccctgctgtccacagtgactggggcccgggtaatggtgcacgggcaggatgaacctgcctttatggatgatggtggctttaacttgcggcctggcgtggagacctccatcagcatgaggaaggaaaccctggacagacttgggggcgattatggcgactgcaccaagaatggcagtgatgttcctgttgagaacctttacccttcaaagtacacacagcaggtgtgtattcactcctgcttccaggagagcatgatcaaggagtgtggctgtgcctacatcttctatccgcggccccagaacgtggagtactgtgactacagaaagcacagttcctggggccaggtgcggtcgctcacacctgtaatcccagcactttgggaggccgaggcgggcagatcacgagggtactgctactataagctccaggttgacttctcctcagaccacctgggctgtttcaccaagtgccggaagccatgcagcgtgaccagctaccagctctctgctggttactcacgatggccctcggtgacatcccaggaatgggtcttccagatgctatcgcgacagaacaattacaccgtcaacaacaagagaaatggagtggccaaagtcaacatcttcttcaaggagctgaactacaaaaccaattctgagtctccctctgtcacgatggtcaccctcctgtccaacctgggcagccagtggagcctgtggttcggctcctcggtgttgtctgtggtggagatggctgagctcgtctttgacctgctggtcatcatgttcctcatgctgctccgaaggttccgaagccgatactggtctccaggccgagggggcaggggtgctcaggaggtagcctccaccctggcatcctcccctccttcccacttctgcccccaccccatgtctctgtccttgtcccagccaggccctgctccctctccagccttgacagcccctccccctgcctatgccaccctgggcccccgcccatctccagggggctctgcaggggccagttcctccacctgtcctctgggggggccctgagagggaaggagaggtttctcacaccaaggcagatgctcctctggtgggagggtgctggccctggcaagattgaaggatgtgcagggcttcctctcagagccgcccaaactgccgttgatgtgtggaggggaagcaagatgggtaagggctcaggaagttgctccaagaacagtagctgatgaagctgcccagaagtgccttggctccagccctgtaccccttggtactgcctctgaacactctggtttccccacccaactgcggctaagtctctttttcccttggatcagccaagcgaaacttggagctttgacaaggaactttcctaagaaaccgctgataaccaggacaaaacacaaccaagggtacacgcaggcatgcacgggtttcctgcccagcgacggcttaagccagcccccgactggcctggccacactgctctccagtagcacagatgtctgctcctcctcttgaacttgggtgggaaaccccacccaaaagccccctttgttacttaggcaattccccttccctgactcccgagggctagggctagagcagacccgggtaagtaaaggcagacccagggctcctctagcctcatacccgtgccctcacagagccatgccccggcacctctgccctgtgtctttcatacctctacatgtctgcttgagatatttcctcagcctgaaagtttccccaaccatctgccagagaactcctatgcatcccttagaaccctgctcagacaccattacttttgtgaacgcttctgccacatcttgtcttccccaaaattgatcactccgccttctcctgggctcccgtagcacactataacatctgctggagtgttgctgttgcaccatactttcttgtacatttgtgtctcccttcccaactagactgtaagtgccttgcggtcagggactgaatcttgcccgtttatgtatgctccatgtctagcccatcatcctgcttggagcaagtaggcaggagctcaataaatgtttgttgcatgaagg

SEQ ID NO: 6069 - DNA, 2784 bp, Homo sapiens
cttcgctttcagagcatcctcactccgcccagttcggtgccagctgcgtgggctccagcttcgatcgttttccttggaatgctccaaaactcagcagcgactaagggaattccattggaatttgccgggcgtgctctcaccccgcacggcacccgcgccgtcagtcctcggatcccatcacttcagcccgaagattgcaactttgcagagacgaagaaatagcatggcatgaaacatggctcagttctattacaaaagaaatgttaatgctccctatagagaccgcatccctctaaggatagtaagagcagaatcagaactctcgccatcagaaaaagcctacttgaatgctgtggaaaagggagattatgccagtgtcaagaaatccctagaggaagctgaaatttattttaaaatcaatattaattgcattgatcctctcggaagaactgctctcctcattgcaattgaaaatgagaacttggagctcatcgaactactcttaagctttaatgtctatgttggagatgctctattacatgctatcagaaaagaagtcgtcggagctgttgagctgttattgaaccacaaaaaacctagtggagaaaaacaggtgcctcctatactccttgataagcagttctctgaattcactccagacattacaccaatcattttggcagcccatacaaataattatgagataataaaactcttggttcagaaaggagtctcagtgcctcgaccccacgaggtccgctgtaactgtgtggaatgcgtgtccagttcagatgtggacagcctccgtcactcacgctccagactcaacatctacaaggccttggccagtccctctctcattgcactgtcaagcgaagatccttttctcacagcctttcagttaagttgggaacttcaggaactgagcaaggtggaaaatgaattcaagtcggagtatgaagagctgtcacggcagtgcaaacaatttgctaaggacctactggatcagacgagaagttccagagaactggaaatcattcttaattaccgagatgacaatagtctcatagaagaacaaagtggaaatgatcttgcaagactaaaattggccattaagtaccgtcaaaaagagtttgttgcccagcccaattgtcaacagctgctggcatctcgctggtacgatgagtttccaggctggaggagaagacactgggcagtgaagatggtgacatgtttcataataggacttctttttcctgtcttctctgtgtgctacctgatagctcccaaaagcccacttggactgttcatcaggaagccatttatcaagtttatctgccacacagcctcctatttgacttttttgttcctgctgctgcttgcctctcagcacatcgacaggtcagacttgaacaggcaaggtccaccaccaaccatcgtcgagtggatgatattaccgtgggtcctgggcttcatatggggagaaattaaacagatgtgggatggcggacttcaggactacatccatgattggtggaatctaatggactttgtaatgaactccttatatttagcaacaatctccttgaaaattgttgcatttgtaaagtacagtgcccttaatccacgagaatcatgggacatgtggcatcccactctggtggcagaggctttatttgctattgcaaacatcttcagttctctgcgtctgatctcactgtttactgcaaattctcacctgggacctctgcaaatatctctgggaagaatgctcctggacattttgaagtttctattcatatactgccttgtgttgctagcatttgcaaatggcctaaatcaattgtacttctattatgaagaaacgaaagggttaacctgcaaaggcataagatgtgaaaagcagaataatgcattttcaacgttatttgagacactgcagtccctgttttggtcaatatttgggctcatcaatttatatgtgaccaatgtcaaagcacagcatgaatttactgagtttgttggtgccaccatgtttgggacatacaatgtcatctctctggttgttctactcaacatgttaatagctatgatgaataattcttaccaactgattgctgaccatgcagatatagaatggaaatttgcacgaacaaagctttggatgagttattttgaagaaggaggtactctgcctactcccttcaatgtcatcccgagccccaagtctctctggtacctgatcaaatggatctggacacacttgtgcaagaaaaagatgagaagaaagccagaaagttttggaacaatagggaggcgagctgctgataacttgagaagacatcaccaataccaagaagttatgaggaacctggtgaagcgatacgttgctgcaatgattagagatgctaaaactgaagaagttgctcgtcaacaggctgcaggaccacttgagagaaatattcaactggaatctcgaggattagcttcacggggtgacctgagcattcccggtctcagtgaacaatgtgtgttagtagaccatagagaaaggaatacggacacactggggttacaggtaggaaagagagtgtgtccattcaagtcagagaaggtggtggtggaggacacggttcctataataccaaaggagaaacatgcaaaagaagaggactctagtatagactatgatctaaacctcccagacacagtcacccacgaagattacgtgaccacaagattgtgatacttgaaggaggaagcgtttaccatacacatacgtat

SEQ ID NO: 6070 - DNA, 3145 bp, Homo sapiens
gtagtgagccggctgagaggcatggagacgcaggaacttcggggggccctggctcttctcctcctttgctttttcacatctgccagtcaggatctgcaggtaattgacctgctgactgtgggcgagtctcggcagatggtagctgtggcagagaagatccggacagccttgctcactgctggggacatctacctcttatccaccttccgcctgccccccaagcagggtggtgtcctctttggcctctattctcgccaagacaacactcgatggctggaggcctctgttgtaggcaagatcaacaaagtactggtgcgataccagcgggaggatggcaaagtccacgccgtgaacctacagcaagcgggcctggctgatgggcgcacacacacagttctcctgcgactccgaggtccctccagacccagccctgccctacatctctacgtggactgcaaactgggtgaccaacatgcaggccttccagcactggcccccattcctccagcggaggtcgatgggctggagattaggactggacagaaggcgtatttgaggatgcagggctttgtggaatctatgaaaattattctgggtgggtccatggcccgggtaggagccctgagtgagtgtccattccaaggggacgagtccatccacagtgcagtgaccaatgcactgcactccattctaggggagcagaccaaggcgctggtcacccaactcaccctcttcaaccagatcctggtggagctgcgggatgatatacgagaccaggtgaaggaaatgtccctgatccgaaacaccattatggagtgtcaggtgtgcggcttccatgagcagcgttcccactgcagccccaatccctgcttccgaggtgtggactgcatggaagtgtacgagtacccaggctaccgctgtgggccctgcccccctggcctgcagggcaacggcacccactgcagtgacatcaatgagtgtgctcacgctgacccctgtttcccgggctccagctgcatcaacaccatgcccggcttccactgtgaggcctgtcctcgagggtacaagggcacacaggtgtctggtgtgggcattgactatgcccgggccagcaaacaggtctgcaatgacatcgatgaatgcaacgatggcaacaatggtggctgtgacccaaactccatctgcaccaacactgtgggctctttcaagtgtggtccctgccgcctgggtttcctgggcaaccagagccagggctgcctcccagcccggacctgccacagcccagcccacagcccctgccacatccatgctcactgtctctttgaacgcaatggtgcagtgtcctgccagtgtaacgtgggctgggctgggaatgggaacgtgtgtgggactgacacagacatcgatggctacccagaccaagcactgccctgcatggacaacaacaaacactgcaaacaggacaactgccttttgacacccaactctgggcaggaagatgctgataatgatggtgtgggggaccagtgtgatgatgatgctgatggggatgggatcaagaatgttgaggacaactgccggctgttccccaacaaagaccagcagaactcagatacagattcatttggtgatgcctgtgacaattgccccaacgttcccaacaatgaccagaaggacacagatggcaatggggaaggagatgcctgtgacaacgacgtggatggggatggcatccccaatggattggacaattgccctaaagtccccaacccactacagacagacagggatgaggacggggtgggagatgcttgcgacagctgccctgaaatgagcaatcctacccagacagatgcagacagcgacctggtgggggatgtctgtgatactaatgaagacagcgatggggatgggcatcaggacaccaaggacaactgcccacagctgccaaatagctcccagctggactctgataacgatggacttggagatgagtgtgatggggatgatgacaatgatggcatcccagattatgtgcctcctggtcccgataactgccgcctggtacccaatcccaatcagaaggactcagatggcaatggcgttggtgatgtgtgtgaggatgactttgacaatgatgctgtggtcgaccccctggatgtgtgtcctgaaagtgcagaggtaacgcttacggattttcgggcctatcagaccgtcgtcctggatcctgagggtgatgctcagattgacccaaactgggttgtgctcaaccagggcatggaaatcgttcagaccatgaacagtgaccctggcttggcagttggatacacggccttcaatggtgtggactttgaaggcaccttccatgtgaacacagtgactgatgatgactacgcaggctttctcttcagttatcaagacagtggccgcttctacgtagtcatgtggaagcagaccgagcagacctactggcaggctacacccttccgggcggttgcccagcccgggctgcagctcaaggcagtgacatcagtgtctggcccaggtgagcacctccgaaatgccctgtggcatactggccacacccctgatcaggtacgactgctgtggacagacccacgaaatgtgggctggcgggacaagacctcctatcgctggcagcttctgcaccggcctcaagttggctacattcgggtgaagctctatgagggaccccagcttgtggcggattctggggtgatcattgacacatccatgcgaggggggcgtcttggtgtattctgcttctcccaagaaaacataatttggtccaatctccagtatcgatgcaatgacacagtgcctgaggactttgagccattccggaggcagctgctccagggaagggtgtgaggaggaggccaccagattcagaattcagaattttagaccctttggccttggggtccatcctggagaccctgaggtctaagctacagcccctcagccaaccacagacccttctctggctcccaaaaggagttcagtcccagaggggtggtcaccccacccttcaggggatgagaagttttcaaggggtattactcaggcactaaccccaggaaagatgacagcacattgccataaagttttggttgttttctaa

SEQ ID NO: 6071 - DNA, 3429 bp, Homo sapiens
aaaacacaggacacatggctccattcaaggctaactgattgcacaacggctctgagcaggagagagcaaaaggtgaaccacagttgtacagcttgctggtggttggggtcacattggactatcaatatccaggagatgttgagaaaaagaggggatcctttccaacaagtcatccagcaactctgggacagaaggaaagctgtgggaagaaaagcagggtgctggtttctaggacactaaacctcatggtatcacatcggtatcctcgaattcaaagtatcaaagtacaatttaccgaatataagaaggagaaaggtttcatcctcacttcccaaaaggaggatgaaatcatgaaggtgcagaacaactcagtcatcatcaactgtgatgggttttatctcatctccctgaagggctacttctcccaggaagtcaacattagccttcattaccagaaggatgaggagcccctcttccaactgaagaaggtcaggtctgtcaactccttgatggtggcctctctgacttacaaagacaaagtctacttgaatgtgaccactgacaatacctccctggatgacttccatgtgaatggcggagaactgattcttatccatcaaaatcctggtgaattctgtgtcctttgaggggctgatggcaatatctaaaaccaggcaccagcatgaacaccaagctgggggtggacagggcatggattcttcattgcaagtgaaggagcctcccagctcagccacgtgggatgtgacaagaagcagatcctggccctcccgcccccacccctcagggatatttaaaacttattttatataccagttaatcttatttatccttatattttctaaattgcctagccgtcacaccccaagattgccttgagcctactaggcacctttgtgagaaagaaaaaatagatgcctcttcttcaagatgcattgtttctattggtcaggcaattgtcataataaacttatgtcattgaaaacggtacctgactaccatttgctggaaatttgacatgtgtgtggcattatcaaaatgaagaggagcaaggagtgaaggagtggggttatgaatctgccaaaggtggtatgaaccaacccctggaagccaaagcggcctctccaaggttaaattgattgcagtttgcatattgcctaaatttaaactttctcatttggtgggggttcaaaagaagaatcagcttgtgaaaaatcaggacttgaagagagccgtctaagaaataccacgtgctttttttctttaccattttgctttcccagcctccaaacatagttaatagaaatttcccttcaaagaactgtctggggatgtgatgctttgaaaaatctaatcagtgacttaagagagattttcttgtatacagggagagtgagataacttattgtgaagggttagctttactgtacaggatagcagggaactggacatctcagggtaaaagtcagtacggattttaatagcctggggaggaaaacacattctttgccacagacaggcaaagcaacacatgctcatcctcctgcctatgctgagatacgcactcagctccatgtcttgtacacacagaaacattgctggtttcaagaaatgaggtgatcctattatcaaattcaatctgatgtcaaatagcactaagaagttattgtgccttatgaaaaataatgatctctgtctagaaataccatagaccatatatagtctcacattgataattgaaactagaagggtctataatcagcctatgccagggcttcaatggaatagtatccccttatgtttagttgaaatgtccccttaacttgatataatgtgttatgcttatggcgctgtggacaatctgatttttcatgtcaactttccagatgatttgtaacttctctgtgccaaaccttttataaacataaatttttgagatatgtattttaaaattgtagcacatgtttccctgacattttcaatagaggatacaacatcacagaatctttctggatgattctgtgttatcaaggaattgtactgtgctacaattatctctagaatctccagaaaggtggagggctgttcgcccttacactaaatggtctcagttggatttttttttcctgttttctatttcctcttaagtacaccttcaactatattcccatccctctattttaatctgttatgaaggaaggtaaataaaaatgctaaatagaagaaattgtaggtaaggtaagaggaatcaagttctgagtggctgccaaggcactcacagaatcataatcatggctaaatatttatggagggcctactgtggaccaggcactgggctaaatacttacatttacaagaatcattctgagacagatattcaatgatatctggcttcactactcagaagattgtgtgtgtgtttgtgtgtgtgtgtgtgtgtgtatttcactttttgttattgaccatgttctgcaaaattgcagttactcagtgagtgatatccgaaaaagtaaacgtttatgactataggtaatatttaagaaaatgcatggttcatttttaagtttggaatttttatctatatttctcacagatgtgcagtgcacatgcaggcctaagtatatgttgtgtgtgttgtttgtctttgatgtcatggtcccctctcttaggtgctcactcgctttgggtgcacctggcctgctcttcccatgttggcctctgcaaccacacagggatatttctgctatgcaccagcctcactccaccttccttccatcaaaaatatgtgtgtgtgtctcagtccctgtaagtcatgtccttcacagggagaattaacccttcgatatacatggcagagttttgtgggaaaagaattgaatgaaaagtcaggagatcagaattttaaatttgacttagccactaactagccatgtaaccttgggaaagtcatttcccatttctgggtcttgcttttctttctgttaaatgagaggaatgttaaatatctaacagtttagaatcttatgcttacagtgttatctgtgaatgcacatattaaatgtctatgttcttgttgctatgagtcaaggagtgtaaccttctcctttactatgttgaatgtatttttttctggacaagcttacatcttcctcagccatctttgtgagtccttcaagagcagttatcaattgttagttagatattttctatttagagaatgcttaagggattccaatcccgatccaaatcataatttgttcttaagtatactgggcaggtcccctattttaagtcataattttgtatttagtgctttcctggctctcagagagtattaatattgatattaataatatagttaatagtaatattgctatttacatggaaacaaataaaagatctcagaattca

SEQ ID NO: 6072 - DNA, 2767 bp, Homo sapiens
gaattctagaggcggcggagggtggcgaggagctctcgctttctctcgctccctccctctccgactccgtctctctctctctctctctctctcccctccctctctttccctctgttccattttttccccctctaaatcctccctgccctgcgcgcctggacacagatttaggaagcgaattcgctcacgttttaggacaaggaagagagagaggcacgggagaagagcccagcaagatttggattgaaaccgagacaccctccggaggctcggagcagaggaaggaggaggagggcggcgaacggaagccagtttgcaattcaagttttgatagcgctggtagaagggggtttaaatcagatttttttttttttaaaggagagagactttttccgctctctcgctccctgttaaagccgggtctagcacagctgcagacgccaccagcgagaaagagggagaggaagacagatagggggcgggggaagaagaaaaagaaaggtaaaaagtcttctaggagaacctttcacatttgcaacaaaagacctaggggctggagagagattcctgggacgcagggctggagtgtctatttcgagctcagcggcagggctcgggcgcgagtcgagaccctgctcgctcctctcgcttctgaaaccgacgttcaggagcggctttttaaaaacgcaaggcacaaggacggtcacccgcgcgactatgtttgctgatttttcgccttgccctctttaaaagcggcctcccattctccaaaagacacttcccctcctccctttgaagtgcattagttgtgatttctgcctccttttcttttttctttcttttttgttttgctttttccccccttttgaattatgtgctgctgttaaacaacaacaaaaaaacaacaaaacacagcagctgcggacttgtccccggctggagcccagcgccccgcctggagtggatgagcctctccatgagagatccggtcattcctgggacaagcatggcctaccatccgttcctacctcaccgggcgccggacttcgccatgagcgcggtgctgggtcaccagccgccgttcttccccgcgctgacgctgcctcccaacggcgcggcggcgctctcgctgccgggcgccctggccaagccgatcatggatcaattggtgggggcggccgagaccggcatcccgttctcctccctggggccccaggcgcatctgaggcctttgaagaccatggagcccgaagaagaggtggaggacgaccccaaggtgcacctggaggctaaagaactttgggatcagtttcacaagcggggcaccgagatggtcattaccaagtcgggaaggcgaatgtttcctccatttaaagtgagatgttctgggctggataaaaaagccaaatacattttattgatggacattatagctgctgatgactgtcgttataaatttcacaattctcggtggatggtggctggtaaggccgaccccgaaatgccaaagaggatgtacattcacccggacagccccgctactggggaacagtggatgtccaaagtcgtcactttccacaaactgaaactcaccaacaacatttcagacaaacatggatttactttggccttcccaagtgatcacgctacgtggcaggggaattatagttttggtactcagactatattgaactccatgcacaaataccagccccggttccacattgtaagagccaatgacatcttgaaactcccttatagtacatttcggacatacttgttccccgaaactgaattcatcgctgtgactgcataccagaatgataagataacccagttaaaaatagacaacaacccttttgcaaaaggtttccgggacactggaaatggccgaagagaaaaaagaaaacagctcaccctgcagtccatgagggtgtttgatgaaagacacaaaaaggagaatgggacctctgatgagtcctccagtgaacaagcagctttcaactgcttcgcccaggcttcttctccagccgcctccactgtagggacatcgaacctcaaagatttatgtcccagcgagggtgagagcgacgccgaggccgagagcaaagaggagcatggccccgaggcctgcgacgcggccaagatctccaccaccacgtcggaggagccctgccgtgacaagggcagccccgcggtcaaggctcaccttttcgctgctgagcggccccgggacagcgggcggctggacaaagcgtcgcccgactcacgccatagccccgccaccatctcgtccagcactcgcggcctgggcgcggaggagcgcaggagcccggttcgcgagggcacagcgccggccaaggtggaagaggcgcgcgcgctcccgggcaaggaggccttcgcgccgctcacggtgcagacggacgcggccgccgcggcagcctccagctcggtgcaccgccaccccttcctcaatctgaacaccatgcgcccgcggctgcgctacagcccctactccatcccggtgccggtcccggacggcagcagtctgctcaccaccgccctggccgccagcccggcctcggtggcagtggactcgggctctgaactcaacagccgctcctccacgctctcctccagctccatgtccttgtcgcccaaactctgcgcggagaaagaggcggccaccagcgaactgcagagcatccagcggttggttagcggcttggaagccaagccggacaggtcccgcagcgcgtccccgtag

SEQ ID NO: 6073 - DNA, 3625 bp, Homo sapiens
agcttcacagctgggagagcgcaggaaggcgccgggaaggaaagccagcccaccagcgtctgggtgggctgcgccgcgcggctggcggaccttcccgggttggagaagtgcgcacgtccgcacctcaccctgcggctgacatctcctgcccaggagatgggcgctgaagcttgagcgcctgagtccctggagccacacctgcgaacaccctttgcttctattgagctgtgcccagccgcccagtgacagaattccaggacaaagagatcttcaaaaatcaaaaatgaggttcacatttacaagccggtgcttggcactgtttcttcttctaaatcacccaaccccaattcttcctgccttttcaaatcaaacctatccaacaatagagcccaagccatttctttacgtcgtaggacgaaagaagatgatggatgcacagtacaaatgctatgaccgaatgcagcagttacccgcataccaaggagaaggtccatattgcaatcgcacctgggatggatggctgtgctgggatgacacaccggctggagtattgtcctatcagttctgcccagattattttccggattttgatccatcagaaaaggttacaaaatactgtgatgaaaaaggtgtttggtttaaacatcctgaaaacaatcgaacctggtccaactatactatgtgcaatgctttcactcctgagaaactgaagaatgcatatgttctgtactatttggctattgtgggtcattctttgtcaattttcaccctagtgatttccctggggattttcgtgtttttcagaaaattgacaactatttttcctttgaattggaaatataggaaggcattgagccttggctgccaaagggtaaccctgcacaagaacatgtttcttacttacattctgaattctatgattatcatcatccacctggttgaagtagtacccaatggagagctcgtgcgaagggacccggtgagctgcaagattttgcattttttccaccagtacatgatggcctgcaactatttctggatgctctgtgaagggatctatcttcatacactcattgtcgtggctgtgtttactgagaagcaacgcttgcggtggtattatctcttgggctgggggttcccgctggtgccaaccactatccatgctattaccagggccgtgtacttcaatgacaactgctggctgagtgtggaaacccatttgctttacataatccatggacctgtcatggcggcacttgtggtcaatttcttctttttgctcaacattgtccgggtgcttgtgaccaaaatgagggaaacccatgaggcggaatcccacatgtacctgaaggctgtgaaggccaccatgatccttgtgcccctgctgggaatccagtttgtcgtctttccctggagaccttccaacaagatgcttgggaagatatatgattacgtgatgcactctctgattcatttccagggcttctttgttgcgaccatctactgcttctgcaacaatgaggtccaaaccaccgtgaagcgccaatgggcccaattcaaaattcagtggaaccagcgttgggggaggcgcccctccaaccgctctgctcgcgctgcagccgctgctgcggaggctggcgacatcccaatttacatctgccatcaggagctgaggaatgaaccagccaacaaccaaggcgaggagagtgctgagatcatccctttgaatatcatagagcaagagtcatctgcttgaatgtgaagcaaacacagcatcgtgatcactgagccatcatttcctgggagaaagaccatgcatttaaagtattctccatcctcccaggaaccgaacatatcatttgtgaagaattattcagtgaatttgtccattgtaaatctgaagaaagttattcttggtactgttgctttgggagacagtctaggaatggagtctcccactgcaacttgtgaactccatcattcatccaggactgagatgcaaatgtcacagtaatgcaagcaaagtatcaaagaaaaacaatgaaattgacctagttcagatacagggtgctccttgtcaatactgagccatttatacctttgaaatattaaaatcactgtcaatatttttatttttaactctggattttgaattagattatttctgtatttggctatggatctgatttttaatttttttaaatttcagtcaattctgatgttactgagatgttttaccatccttacaatgtaaaccacatgaactacgtgacctctgcaagacaaagcggctttctaatagagagattagtaaatatgtgaagaaaaagacctgcatttggcaggaagatgtatgctttgaatgcaaaagaaatttagagtcaatttgctgaaaacattacatgctcagcttggttttggacaagcctgtccattgggcaggacctagctgttgtaaagaattggtcttaatgttgaatgtattttggttgctgatgtttataaactgagaggtcacaaagaatctatcactaaaaatttttacaaaactgccaaaaatataattcttagtggaagacaatactccctttaaagagagtttgccactcccctaaactccaggatttataaagcaaattactccaaggtttataaagcagattacctcttgcccttgggtgctatctagcagtaaaagataaatttgttgaatattggtaattaaaagactccacataagtccattaactgctttccacccagcttcaaagcttaaaaagagctcaggcttttccaggaagatccaggagggctaattagaaatcaacttgtggttgaccgcttgtttcttgttattaccaaaacaggaggggaaaaaattaactgctccaaatttaaccataaatcaattcatgtttaacgtttctcattaaaatccagtattatattatcatatctctctttacttcccagtataagatttttgaaaatcctgaataaaccagtatcgttactggcacctgaaattaatttgtgaatttgcaacagtaatcagagttaccattatttaatttgtatgctaaatgaggaggtacattgaaaccctccaaatctccagtctcatctatgtcatattttgccactgcctttcagaagtgatttagttgtggaaagataataaattgatttgttatggttacatatttagcgcacccagagaaaattaattatatttctacagagaaaatgaatttgggatactaaagtagtttaagtctcctttactgaatgtaagggggggatcgaaaagaaggtatttttccaatcacagtgttatgtagtattgttctatttttgtttacaaacatggaaaacagagtatttctggcagctgtggtacaaatgtgataatatattgctaaaatattttagatgttattatgctaatatagtaggggttgaagaaaacaaaatagcttattatagaattgcacatagttctgcccaaattatgtgaaatgcttatgcttgtgtatatgtataaattaatacagagtacgttaaaagcaaaaagatgtatatttgcatatttttctaaagaaatatattattcatcttttcattc

SEQ ID NO: 6074 - DNA, 1672 bp, Homo sapiens
ggaggaggcagcggcggcggcagcgcgtcctcggtccccaggaccacggcttctttcctgccagatctatccatctggccatccatccgtgggggtctgcaatggccacctttagccgccaggaatttttccagcagctactgcaaggctgtctcctgcctactgcccagcagggccttgaccagatctggctgctccttgccatctgcctcgcctgccgcctcctctggaggctcgggttgccatcctacctgaagcatgcaagcaccgtggcaggcgggttcttcagcctctaccacttcttccagctgcacatggtttgggtcgtgctgctcagcctcctgtgctacctcgtgctgttcctctgccgacattcctcccatcgaggcgtcttcctatccgtcaccatcctcatctacctactcatgggtgagatgcacatggtagacaccgtgacatggcacaagatgcgaggggcacagatgattgtggccatgaaggcagtgtctctgggcttcgacctggaccggggcgaggtgggtacggtgccctcgccagtggagttcatgggctacctctacttcgtgggcaccatcgtcttcgggccctggatatccttccacagctacctacaagctgtccaaggccgcccactgagctgccggtggctgcagaaggtggcccggagcctggcactggccctgctgtgccttgtgctgtccacttgcgtgggcccctacctcttcccgtacttcatccccctcaacggtgaccgcctccttcgcaagtggctgcgagcctacgagagtgctgtctccttccacttcagcaactattttgtgggctttctttccgaggccacggccacgttggcgggggctggctttaccgaggagaaggatcacctggaatgggacctgacggtgtccaagccactgaatgtggagctgcctcggtcaatggtggaagttgtcacaagctggaacctgcccatgtcttattggctaaataactatgttttcaagaatgctctccgcctggggaccttctcggctgtgctggtcacctatgcagccagcgccctcctacatggcttcagtttccacctggctgcggtcctgctgtccctggcttttatcacttacgtggagcatgtcctccggaagcgcctggctcggatcctcagtgcctgtgtcttgtcaaagcggtgcccgccagactgttcgcaccagcatcgcttgggcctgggggtgcgagccttaaacttgctctttggagctctggccatcttccacctggcctacctgggctccctgtttgatgtcgatgtggatgacaccacagaggagcagggctacggcatggcatacactgtccacaagtggtcagagctcagctgggccagtcactgggtcacttttggatgctggatcttctaccgtctcataggctgaggcacatctgtggaccctcataaccctcttaagacccctctcagggtgccactgatgggggatgagggaaggccctctctctactccttgaccccctccatccttgacccccaacacctcaacacacacacacacacacacacacaaaatcacaccattttcatgcctgtcaatccccaccccaccacaaggcaggaagggggtggtgcctgctgggg

SEQ ID NO: 6075 - DNA, 1558 bp, Homo sapiens
ctccctgtgttggtggaggatgtctgcagcagcatttaaattctgggagggcttggttgtcagcagcagcaggaggaggcagagcacagcatcgtcgggaccagactcgtctcaggccagttgcagccttctcagccaaacgccgaccaaggaaaactcactaccatgagaattgcagtgatttgcttttgcctcctaggcatcacctgtgccataccagttaaacaggctgattctggaagttctgaggaaaagcagctttacaacaaatacccagatgctgtggccacatggctaaaccctgacccatctcagaagcagaatctcctagccccacagaatgctgtgtcctctgaagaaaccaatgactttaaacaagagacccttccaagtaagtccaacgaaagccatgaccacatggatgatatggatgatgaagatgatgatgaccatcagtctgatgagtctcaccattctgatgaatctgatgaactggtcactgattttcccacggacctgccagcaaccgaagttttcactccagttgtccccacagtagacacatatgatggccgaggtgatagtgtggtttatggactgaggtcaaaatctaagaagtttcgcagacctgacatccagtaccctgatgctacagacgaggacatcacctcacacatggaaagcgaggagttgaatggtgcatacaaggccatccccgttgcccaggacctgaacgcgccttctgattgggacagccgtgggaaggacagttatgaaacgagtcagctggatgaccagagtgctgaaacccacagccacaagcagtccagattatataagcggaaagccaatgatgagagcaatgagcattccgatgtgattgatagtcaggaactttccaaagtcagccgtgaattccacagccatgaatttcacagccatgaagatatgctggttgtagaccccaaaagtaaggaagaagataaacacctgaaatttcgtatttctcatgaattagatagtgcatcttctgaggtcaattaaaaggagaaaaaatacaatttctcactttgcatttagtcaaaagaaaaaatgctttatagcaaaatgaaagagaacatgaaatgcttctttctcagtttattggttgaatgtgtatctatttgagtctggaaataactaatgtgtttgataattagtttagtttgtggcttcatggaaactccctgtaaactaaaagcttcagggttatgtctatgttcattctatagaagaaatgcaaactatcactgtattttaatatttgttattctctcatgaatagaaatttatgtagaagcaaacaaaatacttttacccacttaaaaagagaatataacattttatgtcactataatcttttgttttttaagttagtgtatattttgttgtgattatctttttgtggtgtgaataaatcttttatcttgaatgtaataagaatttggtggtgtcaattgcttatttgttttcccacggttgtccagcaattaataaaacataaccttttttactgcct

SEQ ID NO: 6076 - DNA, 1917 bp, Homo sapiens
aacagctgctgctggctcttcctcttgcggccttttcctgaaacggattcttctttcggggaacagaaagcgccagccatgcagccttggcacggaaaggccatgcagagagcttccgaggccggagccactgcccccaaggcttccgcacggaatgccaggggcgccccgatggatcccaccgagtctccggctgcccccgaggccgccctgcctaaggcgggaaagttcggccccgccaggaagtcgggatcccggcagaaaaagagcgccccggacacccaggagaggccgcccgtccgcgcaactggggcccgcgccaaaaaggcccctcagcgcgcccaggacacgcagccgtctgacgccaccagcgcccctggggcagaggggctggagcctcctgcggctcgggagccggctctttccagggctggttcttgccgccagaggggcgcgcgctgctccacgaagccaagacctccgcccgggccctgggacgtgcccagccccggcctgccggtctcggcccccattctcgtacggagggatgcggcgcctggggcctcgaagctccgggcggttttggagaagttgaagctcagccgcgatgatatctccacggcggcggggatggtgaaaggggttgtggaccacctgctgctcagactgaagtgcgactccgcgttcagaggcgtcgggctgctgaacaccgggagctactatgagcacgtgaagatttctgcacctaatgaatttgatgtcatgtttaaactggaagtccccagaattcaactagaagaatattccaacactcgtgcatattactttgtgaaatttaaaagaaatccgaaagaaaatcctctgagtcagtttttagaaggtgaaatattatcagcttctaagatgctgtcaaagtttaggaaaatcattaaggaagaaattaacgacattaaagatacagatgtcatcatgaagaggaaaagaggagggagccctgctgtaacacttcttattagtgaaaaaatatctgtggatataaccctggctttggaatcaaaaagtagctggcctgctagcacccaagaaggcctgcgcattcaaaactggctttcagcaaaagttaggaagcaactacgactaaagccattttaccttgtacccaagcatgcaaaggaaggaaatggtttccaagaagaaacatggcggctatccttctctcacatcgaaaaggaaattttgaacaatcatggaaaatctaaaacgtgctgtgaaaacaaagaagagaaatgttgcaggaaagattgtttaaaactaatgaaataccttttagaacagctgaaagaaaggtttaaagacaaaaaacatctggataaattctcttcttatcatgtgaaaactgccttctttcacagactctactgatatatttccaagtattaggtcacttgataagtgatccgcactgaagcaaaagataaactcagcattcttaggtgcttattctaatgccaccagttttacttctgttagcaaaaatctaaagtaacataacagacttatcacccccatttggaattagtatacaaatagaaatgatcctaatcaatttaattaattataatggacacacaagaaaaaatacctacacagcttttcgagaaacgaagacaatgactttgtctgtggatgacatactctgtagaaaagtttgcatgtgactccatttctcttcctcggtggttacaattatattttgcttcactgaacttacagcctaaaggattcaaagaacatagttcatcaaggtcatcatgattgagggtgagaccgcatacatcagctcaaaatgcatcttctctctcattggttaatgtttttaataaactgctaagcaaaatggcagacgtcctaaaaaaa

SEQ ID NO: 6077 - DNA, 3083 bp, Homo sapiens
gaggccaggggagggtgcgaaggaggcgcctgcctccaacctgcgggcgggaggtgggtggctgcggggcaattgaaaaagagccggcgaggagttccccgaaacttgttggaactccgggctcgcgcggaggccaggagctgagcggcggcggctgccggacgatgggagcgtgagcaggacggtgataacctctccccgatcgggttgcgagggcgccgggcagaggccaggacgcgagccgccagcggtgggacccatcgacgacttcccggggcgacaggagcagccccgagagccagggcgagcgcccgttccaggtggccggaccgcccgccgcgtccgcgccgcgctccctgcaggcaacgggagacgcccccgcgcagcgcgagcgcctcagcgcggccgctcgctctccccctcgagggacaaacttttcccaaacccgatccgagcccttggaccaaactcgcctgcgccgagagccgtccgcgtagagcgctccgtctccggcgagatgtccgagcgcaaagaaggcagaggcaaagggaagggcaagaagaaggagcgaggctccggcaagaagccggagtccgcggcgggcagccagagcccagccttgcctccccgattgaaagagatgaaaagccaggaatcggctgcaggttccaaactagtccttcggtgtgaaaccagttctgaatactcctctctcagattcaagtggttcaagaatgggaatgaattgaatcgaaaaaacaaaccacaaaatatcaagatacaaaaaaagccagggaagtcagaacttcgcattaacaaagcatcactggctgattctggagagtatatgtgcaaagtgatcagcaaattaggaaatgacagtgcctctgccaatatcaccatcgtggaatcaaacgagatcatcactggtatgccagcctcaactgaaggagcatatgtgtcttcagagtctcccattagaatatcagtatccacagaaggagcaaatacttcttcatctacatctacatccaccactgggacaagccatcttgtaaaatgtgcggagaaggagaaaactttctgtgtgaatggaggggagtgcttcatggtgaaagacctttcaaacccctcgagatacttgtgcaagtgcccaaatgagtttactggtgatcgctgccaaaactacgtaatggccagcttctacaagcatcttgggattgaatttatggaggcggaggagctgtaccagaagagagtgctgaccataaccggcatctgcatcgccctccttgtggtcggcatcatgtgtgtggtggcctactgcaaaaccaagaaacagcggaaaaagctgcatgaccgtcttcggcagagccttcggtctgaacgaaacaatatgatgaacattgccaatgggcctcaccatcctaacccaccccccgagaatgtccagctggtgaatcaatacgtatctaaaaacgtcatctccagtgagcatattgttgagagagaagcagagacatccttttccaccagtcactatacttccacagcccatcactccactactgtcacccagactcctagccacagctggagcaacggacacactgaaagcatcctttccgaaagccactctgtaatcgtgatgtcatccgtagaaaacagtaggcacagcagcccaactgggggcccaagaggacgtcttaatggcacaggaggccctcgtgaatgtaacagcttcctcaggcatgccagagaaacccctgattcctaccgagactctcctcatagtgaaaggtatgtgtcagccatgaccaccccggctcgtatgtcacctgtagatttccacacgccaagctcccccaaatcgcccccttcggaaatgtctccacccgtgtccagcatgacggtgtccatgccttccatggcggtcagccccttcatggaagaagagagacctctacttctcgtgacaccaccaaggctgcgggagaagaagtttgaccatcaccctcagcagttcagctccttccaccacaaccccgcgcatgacagtaacagcctccctgctagccccttgaggatagtggaggatgaggagtatgaaacgacccaagagtacgagccagcccaagagcctgttaagaaactcgccaatagccggcgggccaaaagaaccaagcccaatggccacattgctaacagattggaagtggacagcaacacaagctcccagagcagtaactcagagagtgaaacagaagatgaaagagtaggtgaagatacgcctttcctgggcatacagaaccccctggcagccagtcttgaggcaacacctgccttccgcctggctgacagcaggactaacccagcaggccgcttctcgacacaggaagaaatccaggccaggctgtctagtgtaattgctaaccaagaccctattgctgtataaaacctaaataaacacatagattcacctgtaaaactttattttatataataaagtattccaccttaaattaaacaatttattttattttagcagttctgcaaatagaaaacaggaaaaaaacttttataaattaaatatatgtatgtaaaaatgtgttatgtgccatatgtagcaattttttacagtatttcaaaacgagaaagatatcaatggtgcctttatgttatgttatgtcgagagcaagttttgtacagttacagtgattgcttttccacagtatttctgcaaaacctctcatagattcagtttttgctggcttcttgtgcattgcattatgatgttgactggatgtatgatttgcaagacttgcaactgtccctctgtttgcttgtagtagcacccgatcagtatgtcttgtaatggcacatccatccagatatgcctctcttgtgtatgaagttttctttgctttcagaatatgaaatgagttgtgtctactctgccagccaaaggtttgcctcattgggctctgagataatagtagatccaacagcatgctactattaaatacagcaagaaactgcattaagtaatgttaaatattaggaagaaagtaatactgtgattt

SEQ ID NO: 6078 - DNA, 686 bp, Homo sapiens
gaaatggtgacatcactggcatatactcatcatgggcgacaatatcttgctcaagaaggagtaattgaccaaatttctaatataattgttggggcagattcagaccctttctctagcttctatctgccaggattcgtgaagttttttggaaacctggctgtcatggatagtcctcaacagatctgtgagcgttatcctatctttgtggaaaaagtctttgaaatgatagaaagtcaggaccccactatgattggtgtagctgtagacacagttggaatcttgggatccaatgttgaaggaaaacaggttttacagaaaacaggttggtatgacttggccctgttcagggatatcttaatctttgacaggggttcaatatgtaagttcatttgctggtgggttaactacattgtagaaactattttatgggtggcagtcttgttaaccatgaccttgtactcatgtctgaaaatctaataattattacggaaaacctttttttttttttttttgacttttcactggtttaggttttcattggtttaggtttctaccaatcgatttcaaccaaacattgtttcctgtttcccctctatgatgtcttctttgactagatttcatggtacaaagaccacgggctagagtcagaaaggtctggattcatgtccttgggttttctattcttt

SEQ ID NO: 6079 - DNA, 2418 bp, Homo sapiens
gcggctgcacggacaagagcggaggcctggagaaatcaacttttcagtaattggtcagtatgtggattatcttgtgaaagaacagggagtgaagaacatttttgtgaatggcacaacaggagaaggcctgtccctgagcgtctcagagcgtcgccaggttgcagaggagtgggtgacaaaagggaaggacaagtgagtggctgcatgaggataaaaatgccctttggcaacagctgtattcagtgagcctcttccccagaggatacgccctccctgcttcctggtcagagccggggcttgaggtcagctggtgggaagatgagcagggcccccgggatcctggcttcttggagaagagccccctccctttctgtgcagaagggcagccaaactgctagacacacctgccacccagaggttccgctgggaaactgcttcttacctgtctacaaggccagtcccctcacagttacccgtctttgggctgaaaggctggatcaggtgataattcacgtaggagcactgagcttgaaggagtcacaggaactggcccaacatgcagcagaaataggagctgatggcatcgctgtcattgcaccgttcttcctcaagccatggaccaaagatatcctgattaatttcctaaaggaagtggctgctgccgcccctgccctgccattttattactatcacattcctgccttgacaggggtaaagattcgtgctgaggagttgttggatgggattctggataagatccccaccttccaagggctgaaattcagtgatacagatctcttagacttcgggcaatgtgttgatcagaatcgccagcaacagtttgctttcctttttggggtggatgagcaactgttgagtgctctggtgatgggagcaactggagcagtgggcagtacctataactacctgggaaaaaagacaaaccagatgttggaggcttttgaacaaaaggacttctctttagccctgaactatcagttttgtatccagagatttatcaactttgttgtcaaactaggttttggagtgtcacagaccaaagccatcatgactctggtctctgggattccaatgggcccaccccggcttccactgcagaaagcctccagggagtttactgatagtgctgaagctaaactgaagagcctggatttcctttctttcactgatttaaaggatggaaacttggaagctggtagctagtgcctctctatcaaatcagggtttgcaccttgagacataatctaccttaaatagtgcatttttttctcagggaattttagatgaacttgaataaactctcctagcaaatgaaatctcacaataagcattgaggtaccttttgtgagccttaaaaagtcttattttgtgaaggggcaaaaactctaggagtcacaactctcagtcattcatttcacagatttttttgtggagaaatttctgtttatatggatgaaatggaatcaagaggaaaattgtaattgattaattccatctgtctttaggagctctcattatctcggtctctggttcctaatcctattttaaagttgtctaattttaaaccactataatatgtcttcattttaataaatattcatttggaatctaggaaaactctgagctactgcatttaggcaggcactttaataccaaactgtaacatgtctcaactgtatacaactcaaaatacaccagctcatttggctgctcagtctaactctagaatggatgcttttgaattcatttcgatgtcaccacttttcgctctttaaaaacactgggtcaggtgaggacttgtttcagttcctataactaagtaaagggcggctttctcataacaaaggaaaaagtcttccccaaagatgaatttaagtctccacttttttctatacagaaaactcaaaactcaaagtttcaaagaaccaaaggactcttcctctgggcaccacaaacttccccttcctccactgagaagactgtctctcccgcaggaccctgaattattgaaatcgaaggctgacttcctttctgcagtgagcccaggggctaatgttattatcctgtcacacttgcaactagtgacttttgtttagtgatagaagatttggggaggacccaaaggactcagaactttctctccatacctccttttactcttttctttctgtgtaatgtatcaacaactgtttaatctcccttctaacaaaccttgatataagctttctgatatcaaagtatattgacagttaacccttactgattttaaacttgactatccagtctgttaattacctaagattttgttttcatttcatctctaattgttttgatcattggcagagaaagagtatttgaaattcatatcagttttgctccttattttaatctctttga

SEQ ID NO: 6080 - DNA, 4990 bp, Homo sapiens
gcggcagccgccgccgagccggccggggcgcacggagagcgcgcgggactcgctgcagcggcggccgggtcgcggcgcacccgggccgggaccggagccgagcctagcgcggcgcccgcgacccgtcagccgcggctcctgctccctcgatcccgcgcggggaaagggccggcggctgttggcgtcggcggggcgcggaggaaccgcggcggcggcggcggcggccgcatccttgccgcccgccccggcccagccgcgtcccggagccgtcgggcatggagccgtggaagcagtgcgcgcagtggctcatccattgcaaggtgctgcccaccaaccaccgggtgacctgggactcggctcaggtgttcgaccttgcgcagaccctccgcgatggagtcctgctctgccagctgcttaacaacctccgggcgcactccatcaacctgaaggagatcaacctgaggccgcagatgtcccagtttctctgtttgaagaacataaggacatttctcacggcctgttgtgagacgtttggaatgaggaaaagtgaacttttcgaggcatttgacttgtttgatgttcgtgactttggaaaggttatagaaacattatcacgactttctcgaacacctatagcattggccacaggaatcaggcccttcccaacagaagaaagcattaatgatgaagacatctacaaaggccttcctgatttaatagatgaaacccttgtggaagatgaagaagatctctatgactgtgtttatggggaagatgaaggtggagaagtctatgaggacttaatgaaggcagaggaagcacatcagcccaaatgtccagaaaatgatatacgaagttgttgtctagcagaaattaagcagacagaagaaaaatatacagaaactttggagtcaatagaaaagtatttcatggcaccactaaaaagatttctgacagcagcagaatttgattcagtattcatcaacattcctgaacttgtaaaacttcatcggaacctaatgcaagagattcatgattccattgtaaataaaaatgaccagaacttgtaccaagtttttattaactacaaggaaagattggttatttacgggcagtactgcagtggagtggagtcagccatctctagtttagactacatttctaagacaaaagaagatgtcaaactgaaattagaggaatgttccaaaagagcaaataatgggaaatttactcttcgagacttgcttgtggttcctatgcaacgtgttttaaagtaccaccttctcctccaggaactggtcaaacataccactgatccgactgagaaggcaaatctgaaactggctcttgatgccatgaaggacttggcacaatatgtgaatgaagtgaaaagagataatgagacccttcgtgaaattaaacagtttcagctatctatagagaatttgaaccaaccagttttgctttttggacgacctcagggagatggtgaaattcgaataaccactctagacaagcataccaaacaagaaaggcatatcttcttatttgatttggcagtgatcgtatgtaagagaaaaggtgataactatgaaatgaaggaaataatagatcttcagcagtacaagatagccaataatcctacaaccgataaagaaaacaaaaagtggtcttatggcttctacctcatccatacccaaggacaaaatgggttagaattttattgcaaaacaaaagatttaaagaagaaatggctagaacagtttgaaatggctttgtctaacataagaccagactatgcagactccaatttccacgacttcaagatgcataccttcactcgagtcacatcctgcaaagtctgccagatgctcctgaggggaacattttatcaaggctatttatgttttaagtgtggagcgagagcacacaaagaatgtttgggaagagtagacaattgtggcagagttaattctggtgaacaagggacactcaaactaccagagaaacggaccaatggactgcgaagaactcctaaacaggtggatccaggtttaccaaagatgcaggtcattaggaactattctggaacaccacccccagctctgcatgaaggaccccctttacagctccaggccggggataccgttgaacttctgaaaggagatgcacacagtctgttttggcagggcagaaatttagcatctggagaggttggattttttccaagtgatgcagtcaagccttgcccatgtgtgcccaaaccagtagattattcttgccaaccctggtatgctggagcaatggaaagattgcaagcagagaccgaacttattaatagggtaaatagtacttaccttgtgaggcacaggaccaaagagtcaggagaatatgcaattagcattaagtacaataatgaagcaaagcacatcaagattttaacaagagatggcttttttcacattgcagaaaatagaaaatttaaaagtttaatggaacttgtggagtactacaagcatcattctctcaaggaagggttcagaaccttagatacaactctgcagtttccatacaaggagccagaacattcagctggacagaggggtaatagagcaggcaacagcttgttaagtccaaaagtgctgggcattgccatcgctcggtatgacttctgtgcaagagatatgagagagttgtccttgttgaaaggagatgtggtgaagatttacacaaagatgagtgcaaatggctggtggagaggagaagtaaatggcagggtgggctggtttccatccacatatgtggaagaggatgaataaattcaaatcccgtgttgcaccctgcaccaaaaatttcagagaagggataaatagaagcctgcacagcatcgtgaattaactgaagtgtttaaaaagctgcatttctggctgttcaacatcctccctccttagcccctcctaagtcttaatgctgagatttctaaagatgctggtactgacagattaatggcttgcctagagctgtgcaagaaacagcctgccagtctgtcattgtcagggaccagggcaaaaccaagagctgttcttcccagaagagccctgcaaacacattggttcgtgcttccctttacttcttctggtcagataccatgaatgccagtcatcagtaaatcttaatacacttttgctttattctcacatgccattcaccagattatttgatggtacaaagaagcagaagtgtaattttccttttcccagcatgacgaaaaattggagttctgccatttgagcagcttactggaaagatccagccttacttgtcttaaattgtccaacaaggtgactcattgcccggcaaacacttttaccctcagatgttactcatgatattataaaatatgaggccagtgctcaggtttgcatcataagtgagctatccctgaagggttttaattacttatttggtgtcctgattatatttgcaaacttctttataaaaggtgaaaaaagcacacaaaagagagggtgtcttcatattaaaccttcacaaccttcatgatttcataggattattttggaaatatagcacttgactttatgaaaggatctgggctaggtatattaagggtagttgccaataacctgaagaagctggcattgtttacagaaacagatcaagggctataatttatgtcattttatagcagcagtatctattaatacatgccttttcctcccatccacctcccccgcacacacacaaagatgacctgggacatgatttttttattcccacattttcttggagcacaaacaactttgttgaggattttggaaggaaagcacaactgggtcctttattcatttctgggacagaaagagggtcagtggacttttgtgggcctccagcttctctcagagtctccccctctgcagcccatcctgggagtgtattaactggagggaagatgggtcttgcagtacatttgttttgcccagccatcactcttttttgtgaggagcctaaatacattcttcctggggtccagagtccccattcaaggcagtcaagttaagacactaacttggccctttcctgatggaaatatttcctccatagcagaagttgtgttctgacaagactgagagagttacatgttgggaaaaaaaagaagcattaacttagtagaactgaaccaggagcattaagttctgaaattttgaatcatctctgaaatgaagcaggtgtagcctgccctctcatcaatccgtctgggtgccagaactcaaggttcagtggacacatccccctgttagagaccctcatgggctaggacttttcatctaggatagattcaagacctttacctcagaattatgtaaactgtgattgtgttttagaaaaattattatttgctaaaaccatttaagtctttgtatatgtgtaaatgatcacaaaaatgtattttataaaatgttctgtacaataaagttacacctcaaagtgtactcttggaatggattctttcctgtaaagtcttatctgcgactctgtctcgggaatgttttgtctgttgccgtcagccgaactttgttatggagggagcagcctcacacaagcagaaacactcctgtggatggtattgtagcatgtattgtttattttagtcaatagaccctctccttataaatggtgtttagtcttcctgttgcatttcatgggcctgggggtttcctagcagaggatattggagcccctttttgtgacattaccaattacatctttgtccacgtttaatactttgttttggaaaatttaaatgctgcagatttgtgtagagttctaataccaaagacagaagtaaatgttttccatatactttgtcttgcctgtatgcagccctcgtgtaatacggtgaattagagtggtatttcactttgtattattttgtaaatatgtcaatataataaatagtgactaaattgat

SEQ ID NO: 6081 - DNA, 3340 bp, Homo sapiens
gcagagagggcactgggaggaggcagtgggagggcggagggcgggggccttcggggtgggcgcccagggtagggcaggtggccgcggcgtggaggcagggagaatgcgactctccaaaaccctcgtcgacatggacatggccgactacagtgctgcactggacccagcctacaccaccctggaatttgagaatgtgcaggtgttgacgatgggcaatgattttgttgccgctgcgtctcgccagattgaggcatcccctccgacatcactggagcatatctggaggggtggacagttctccacagggagacacgtccccatcagaaggcaccaacctcaacgcgcccaacagcctgggtgtcagcgccctgtgtgccatctgcggggaccgggccacgggcaaacactacggtgcctcgagctgtgacggctgcaagggcttcttccggaggagcgtgcggaagaaccacatgtactcctgcagatttagccggcagtgcgtggtggacaaagacaagaggaaccagtgccgctactgcaggctcaagaaatgcttccgggctggcatgaagaaggaagccgtccagaatgagcgggaccggatcagcactcgaaggtcaagctatgaggacagcagcctgccctccatcaatgcgctcctgcaggcggaggtcctgtcccgacagatcacctcccccgtctccgggatcaacggcgacattcgggcgaagaagattgccagcatcgcagatgtgtgtgagtccatgaaggagcagctgctggttctcgttgagtgggccaagtacatcccagctttctgcgagctccccctggacgaccaggtggccctgctcagagcccatgctggcgagcacctgctgctcggagccaccaagagatccatggtgttcaaggacgtgctgctcctaggcaatgactacattgtccctcggcactgcccggagctggcggagatgagccgggtgtccatacgcatccttgacgagctggtgctgcccttccaggagctgcagatcgatgacaatgagtatgcctacctcaaagccatcatcttctttgacccagatgccaaggggctgagcgatccagggaagatcaagcggctgcgttcccaggtgcaggtgagcttggaggactacatcaacgaccgccagtatgactcgcgtggccgctttggagagctgctgctgctgctgcccaccttgcagagcatcacctggcagatgatcgagcagatccagttcatcaagctcttcggcatggccaagattgacaacctgttgcaggagatgctgctgggagggtcccccagcgatgcaccccatgcccaccaccccctgcaccctcacctgatgcaggaacatatgggaaccaacgtcatcgttgccaacacaatgcccactcacctcagcaacggacagatgtgtgagtggccccgacccaggggacaggcagccacccctgagaccccacagccctcaccgccaggtggctcagggtctgagccctataagctcctgccgggagccgtcgccacaatcgtcaagcccctctctgccatcccccagccgaccatcaccaagcaggaagttatctagcaagccgctggggcttgggggctccactggctccccccagccccctaagagagcacctggtgatcacgtggtcacggcaaaggaagacgtgatgccaggaccagtcccagagcaggaatgggaaggatgaagggcccgagaacatggcctaagggccacatcccactgccacccttgacgccctgctctggataacaagactttgacttggggagacctctactgccttggacaacttttctcatgttgaagccactgccttcaccttcaccttcatccatgtccaacccccgacttcatcccaaaggacagccgcctggagatgacttgaggccttacttaaacccagctcccttcttccctagcctggtgcttctcctctcctagcccctgtcatggtgtccagacagagccctgtgaggctgggtccaattgtggcacttggggcaccttgctcctccttctgctgctgcccccacctctgctgcctccctctgctgtcaccttgctcagccatcccgtcttctccaacaccacctctccagaggccaaggaggccttggaaacgattcccccagtcattctgggaacatgttgtaagcactgactgggaccaggcaccaggcagggtctagaaggctgtggtgagggaagacgcctttctcctccaacccaacctcatcctccttcttcagggacttgggtgggtacttgggtgaggatccctgaaggccttcaacccgagaaaacaaacccaggttggcgactgcaacaggaacttggagtggagaggaaaagcatcagaaagaggcagaccatccaccaggcctttgagaaagggtagaattctggctggtagagcaggtgagatgggacattccaaagaacagcctgagccaaggcctagtggtagtaagaatctagcaagaattgaggaagaatggtgtgggagagggatgatgaagagagagagggcctgctggagagcatagggtctggaacaccaggctgaggtcctgatcagcttcaaggagtatgcagggagctgggcttccagaaaatgaacacagcagttctgcagaggacgggaggctggaagctgggaggtcaggtggggtggatgatataatgcgggtgagagtaatgaggcttggggctggagaggacaagatgggtaaaccctcacatcagagtgacatccaggaggaataagctcccagggcctgtctcaagctcttccttactcccaggcactgtcttaaggcatctgacatgcatcatctcatttaatcctcccttcctccctattaacctagagattgtttttgttttttattctcctcctccctccccgccctcacccgccccactccctcctaacctagagattgttacagaagctgaaattgcgttctaagaggtgaagtgattttttttctgaaactcacacaactaggaagtggctgagtcaggacttgaacccaggtctccctggatcagaacaggagctcttaactacagtggctgaatagcttctccaaaggctccctgtgttctcaccgtgatcaagttgaggggcttccggctcccttctacagcctcagaaaccagactcgttcttctgggaaccctgcccactcccaggaccaagattggcctgaggctgcactaaaattcacttagggtcgagcatcctgtttgctgataaatattaaggagaa

SEQ ID NO: 6082 - DNA, 1206 bp, Homo sapiens; identical to SEQ ID NO: 4510

SEQ ID NO: 6083 - DNA, 1310 bp, Homo sapiens
agataatcatgctttttaataccttttcacctaatggacttcttctctacctgggttcatacggcacaaaagactttttatccatcgagctgtttcgtggcagagtgaaggttatgactgacctgggttcaggacccattacccttttgacagacagacgttataacaatggaacctggtacaaaattgccttccagcgaaaccggaagcaaggagtgctagcagttatcgatgcctataacaccagtaataaagaaaccaagcagggcgagactccgggagcatcttctgacctcaaccgcctagacaaggacccgatttatgtgggtggattaccaaggtcaagagttgtaaggagaggtgtcaccaccaaaagctttgtgggctgcatcaagaacctggaaatatccagatcaacctttgacttactcagaaattcctatggagtgagaaaaggctgtttactggagcccatccggagtgttagcttcctgaaaggcggctacattgaattgccacccaaatctttgtcaccagaatcagaatggctggtaacatttgccaccacgaacagcagtggcatcatcctggctgccctcggcggggatgtggagaagcggggtgatcgtgaggaagcacacgtgcccttcttttccgtcatgctgatcggaggcaacattgaggtacatgtcaatcctggggatgggacaggcctgagaaaagctctcctgcacgctcccacgggtacctgcagtgatggacaagcgcattccatctccttggtcaggaatcggagaattatcactgtccaattggatgagaacaatcctgtggaaatgaagttgggcacattagtagaaagcaggacgataaatgtgtccaatctgtacgtcgggggaattccagagggagaggggacgtcactgctcacaatgagaagatcgttccatggctgtatcaaaaacctgatcttcaatttggaacttttggatttcaacagtgcagttatgagcaagtcgacctggacacctgctggctgtcagaaaggcctaagctggctcccgatgcagaggacaaagctcttgccagagccccgggcttttccagtaggagcggcttcctttactatcagtcaggtccagtcagcaaaggagggcctaggacagagggagttaaaatggggccttgctgtaaaggtgcctgcgaaagctggagctggagctggagctggagctgtgctaaaaatcagagcggggacagggagggaaagggtgcctcaagcaactcagatgacacggcccaatccatag

SEQ ID NO: 6084 - DNA, 2400 bp, Homo sapiens
gttttgtgatgactgctccctggccttttggttccgagggagtgcagggcagcagtgtgaagacctgtttacgtccactccccactccccggggctggcttcgggacgaattcactgtggtattaacagagcccgggacagagcctggcagaaggcagatggatgctcgtgcccgtcggctggatgaatgaaaggtgagcagcaaaggcgataccaggatcgtccacggcgggactggaggaggagaatgggactgtgcggagcctgcgggaagaatctgaaagtgtctgtgtgatggagagagacatggaaaaggcgacgtcccagcggctggaactggggcggaggaacgggaacagggaaggcctgagttaggcaccacaaaggttttcaggagaaaagtggggcgagccgagaggagtctcaccctgttgcttaggcagatggcgcgatctcggctcctgggttcaagcaattctcctgcctcagcctcctgaatagccgggattacagtcgtccagcatgctctgcccaccccacgccgaggtgcactgaccatgagcctcaactcctccctcagctgcaggaaggagctgagtaatctcactgaggaggagggtggcgaagggggcgtcatcatcacccagttcatcgccatcattgtcatcaccatttttgtctgcctgggaaacctggtcatcgtggtcaccttgtacaagaagtcctacctcctcaccctcagcaacaagttcgtcttcagcctgactctgtccaacttcctgctgtccgtgttggtgctgccttttgtggtgacgagctccatccgcagggaatggatctttggtgtagtgtggtgcaacttctctgccctcctctacctgctgatcagctctgccagcatgctaaccctcggggtcattgccatcgaccgctactatgctgtcctgtaccccatggtgtaccccatgaagatcacagggaaccgggctgtgatggcacttgtctacatctggcttcactcgctcatcggctgcctgccacccctgtttggttggtcatccgtggagtttgacgagttcaaatggatgtgtgtggctgcttggcaccgggagcctggctacacggccttctggcagatctggtgtgccctcttcccctttctggtcatgctggtgtgctatggcttcatcttccgcgtggccagggtcaaggcacgcaaggtgcactgtggcacagtcgtcatcgtggaggaggatgctcagaggaccgggaggaagaactccagcacctccacctcctcttcaggcagcaggaggaatgcctttcagggtgtggtctactcggccaaccagtgcaaagccctcatcaccatcctggtggtcctcggtgccttcatggtcacctggggcccctacatggttgtcatcgcctctgaggccctctgggggaaaagctccgtctccccgagcctggagacttgggccacatggctgtcctttgccagcgctgtctgccaccccctgatctatggactctggaacaagacagttcgcaaagaactactgggcatgtgctttggggaccggtattatcgggaaccatttgtgcaacgacagaggacttccaggctcttcagcatttccaacaggatcacagacctgggcctgtccccacacctcactgcgctcatggcaggtggacagcccctggggcacagcagcagcacgggggacactggcttcagctgctcccaggactcagggacagatatgatgctgcttgaggactacacgtctgatgacaaccctccctctcactgcacttgcccacccaagagaaggagctcggtgacatttgaggatgaagtggaacaaatcaaagaagctgccaagaactcgattcttcatgtgaaagctgaagtacacaagtccttggacagttacgcagcaagcttggccaaagccattgaggccgaagccaaaatcaacttatttggggaggaggctttgccaggggtcttggttacagcacggactgtcccggggggcggcttcgggggccgccgaggcagcagaactcttgtgagccagaggctgcagttgcagagcatcgaagaaggagatgttttagctgccgagcagagatgagggcctcagggtgccgtggggctgcagcctgagaggctggcccggggaggagttcccatcaccgcctgtgccgcggccttgggagcatgtcactgtgtacagctggccacacacagggaaggagcagcatctggtatgcagccaccaggacaaggactgaaaataatgtctacagtccacagcttcagcatttccagagaccacatgtgagcttcttttaggtcccagtgatgggaccagaagcatctaaagc

SEQ ID NO: 6085 - DNA, 2704 bp, Homo sapiens; identical to SEQ ID NO: 431

SEQ ID NO: 6086 - DNA, 2874 bp, Homo sapiens
aagaagtgggatggggcctctccagaaagctgaacgaggcatctggagcccgaacaaacctccaccttttttggcctcgacggcggcaacccagcctccctcctaacgccctccgcctttgggaccaaccaggggagctcaagttagtagcagccaaggagaggcgctgccttgccaagactaaaaagggaggggagaagagaggaaaaaagcaagaatcccccacccctctcccgggcggagggggcgggaagagcgcgtcctggccaagccgagtagtgtcttccactcggtgcgtctctctaggagccgcgcgggaaggatgctggtccgcaggggcgcgcgcgcagggcccaggatgccgcggggctggaccgcgctttgcttgctgagtttgctgccttctgggttcatgagtcttgacaacaacggtactgctaccccagagttacctacccagggaacattttcaaatgtttctacaaatgtatcctaccaagaaactacaacacctagtacccttggaagtaccagcctgcaccctgtgtctcaacatggcaatgaggccacaacaaacatcacagaaacgacagtcaaattcacatctacctctgtgataacctcagtttatggaaacacaaactcttctgtccagtcacagacctctgtaatcagcacagtgttcaccaccccagccaacgtttcaactccagagacaaccttgaagcctagcctgtcacctggaaatgtttcagacctttcaaccactagcactagccttgcaacatctcccactaaaccctatacatcatcttctcctatcctaagtgacatcaaggcagaaatcaaatgttcaggcatcagagaagtgaaattgactcagggcatctgcctggagcaaaataagacctccagctgtgcggagtttaagaaggacaggggagagggcctggcccgagtgctgtgtggggaggagcaggctgatgctgatgctggggcccaggtatgctccctgctccttgcccagtctgaggtgaggcctcagtgtctactgctggtcttggccaacagaacagaaatttccagcaaactccaacttatgaaaaagcaccaatctgacctgaaaaagctggggatcctagatttcactgagcaagatgttgcaagccaccagagctattcccaaaagaccctgattgcactggtcacctcgggagccctgctggctgtcttgggcatcactggctatttcctgatgaatcgccgcagctggagccccacaggagaaaggctggagctggaaccctgaccactcttcaggaagaaaggagtctgcacatgcagctgcaccctccctccgatccttcctcccacctccccctcccccttctcccacccctgcccccacttcctgtttgggcccctctcccatccagtgtctcacagccctgcttaccagataatgctactttatttatacactgtctagggcgaagacccttattacacggaaaacggtggaggccagggctatagctcaggacctgggacctcccctgaggctcagggaaaggccagtgtgaaccgaggggctcaggaaaacgggaccggccaggccacctccagaaacggccattcagcaagacaacacgtggtggctgataccgaattgtgactcggctaggtggggcaaggctgggcagtgtccgagagagcacccctctctgcatctgaccacgtgctacccccatgctggaggtgacatctcttacgcccaacccttccccactgcacacacctcagaggctgttcttggggccctacaccttgaggaggggcaggtaaactcctgtcctttacacattcggctccctggagccagactctggtcttctttgggtaaacgtgtgacgggggaaagccaaggtctggagaagctcccaggaacaatcgatggccttgcagcactcacacaggacccccttcccctaccccctcctctctgccgcaatacaggaacccccaggggaaagatgagcttttctaggctacaattttctcccaggaagctttgatttttaccgtttcttccctgtattttctttctctactttgaggaaaccaaagtaaccttttgcacctgctctcttgtaatgatatagccagaaaaacgtgttgccttgaaccacttccctcatctctcctccaagacactgtggacttggtcaccagctcctcccttgttctctaagttccactgagctccatgtgccccctctaccatttgcagagtcctgcacagttttctggctggagcctagaacaggcctcccaagttttaggacaaacagctcagttctagtctctctggggccacacagaaactctttttgggctcctttttctccctctggatcaaagtaggcaggaccatgggaccaggtcttggagctgagcctctcacctgtactcttccgaaaaatcctcttcctctgaggctggatcctagccttatcctctgatctccatggcttcctcctccctcctgccgactcctgggttgagctgttgcctcagtcccccaacagatgcttttctgtctctgcctccctcaccctgagccccttccttgctctgcacccccatatggtcatagcccagatcagctcctaacccttatcaccagctgcctcttctgtgggtgacccaggtccttgtttgctgttgatttctttccagaggggttgagcagggatcctggtttcaatgacggttggaaatagaaatttccagagaagagagtattgggtagatattttttctgaatacaaagtgatgtgtttaaatactgcaattaaagtgatactgaaacac

SEQ ID NO: 6087 - DNA, 4406 bp, Homo sapiens
aggttcagtgttgatggagttattgaagaaatgatggagtaagagactcttttctaagcaactcaagtttgcagtgattcaggcctacttctgaagagacagccttttatctcaatgaatgacacagaaaaaccagcagatactccctctgaggaagaggactttggtgatccaaggacatatgacccagatttcaaggggcctgttgccaacaggagttgtacagatgttctgtgctgtatgatcttcctactgtgtattattggctacattgttttaggacttgtggcctgggtacatggggaccccagaagagcagcctatcctacagacagccagggccacttttgtggccagaagggcactcccaatgagaacaagaccattttgttttactttaacctgttacgctgtaccagtccctccgtgttgctaaacctacagtgccctaccacacagatctgtgtctccaagtgcccagaaaaatttttaacctatgtggaaatgcaacttttgtacacaaaagacaaaagctactgggaagactaccgtcagttctgtaagaccactgctaagcctgtgaagtctctcacacagcttttactggatgatgattgtccaacagcgatttttcccagcaaaccttttctccagagatgtttccctgacttctctaccaaaaatggcactttaacaataggaagtaagatgatgtttcaagatggaaatggagggacaagaagtgttgtagaactcgggattgctgcaaatggtatcaataaacttcttgatgcaaagtcacttggattgaaagtgtttgaagactatgcaagaacttggtattggattctcattggcctgacgattgccatggtccttagttggatatttttgatacttctgaggttcatagctggatgcctcttctgggtcttcatgattggtgtgattggaattataggttatggaatatggcactgttaccagcagtacaccaatcttcaggaacgcccaagttctgtattaactatctatgacatcgggattcagactaacataagcatgtactttgaactgcaacaaacatggttcacatttatgataatactctgcatcattgaagtgattgtcatcctcatgctgatcttcctcaggaatcgaatccgagtcgccattatcctgctgaaggaaggaagcaaagccattggatatgttcctagtacattagtctatccagctttaactttcattttgctctcaatctgcatttgctactgggtcgtgacagcagttttcttggcgacatcgggggtacctgtatacaaagtcatagctccaggggggcattgtatacatgaaaatcaaacctgtgacccagagatttttaatacaactgaaattgccaaagcttgccctggggctctgtgtaactttgctttctatggtggaaagagcttgtaccatcagtacatccctaccttccatgtatacaacttatttgtctttctctggcttataaacttcgtcattgcattaggtcagtgcgcccttgctggtgcattcgctacttattactgggccatgaaaaaacctgatgacatcccacgatatccactttttactgcatttggacgagccatacgatatcacacaggatccctagcatttggatctttaattattgcattaattcaaatgtttaaaattgtactagaatacttggaccaccgtcttaaacgtacccagaacacattgtctaaattcctacaatgctgcctgagatgctgcttctggtgtttggaaaatgcaataaagtttttaaacagaaatgcctatattatgattgcaatatatggcagaaacttctgcaggtcagcaaaagatgctttcaatctgctgatgagaaatgttttgaaagttgcagttacagatgaagttacatactttgtattattcctggggaaacttctagttgctggaagtataggtgttctggccttcctattcttcacacaaagactgccagtgattgcacaaggaccagcatctttaaattactactgggtacctttgctgacagtcatttttgggtcttacctgattgcacatgggttcttcagcgtctatgcaatgtgtgttgaaacaattttcatctgcttctgtgaagatctggaaagaaatgatggatctacagaaaaaccctacttcgtaacccctaacctgcatggaattctgatcaagaagcaactagttccccagaagcagaaagagtagaaaagctccaaacagtgtcactcatttttaagtagaagttgtgtaaattaggttgattgtaatttggaaatgttgcttttgagtaatgtgaaatttctgtgcttaattctaagaagtcagcacctggtactacctgaggtgtcaggtatttgatgacattagctgctgtctactttatagacagtggtcccagctaaagatcaaaatgttaatgtcaaacgttttttaaaatctgtagccgagagtgttttaataacttttataactcagcgtgctgtttccattgcagcactttaatagcctttctttttataagtgtatatttgtaaaggatattcaggcaatttttgaaaacactataaatgtgtaattaattagccataaaatattgatttatagttaaccagcatatggtactaaatttgtaaatatggtgctatggttatatttatactgttcaagctggtggacaactctctaaactgtgattaaacttgtattaatggttccctaggaagtatatttcagtgagtcatgtccataacaaacatagatgttaatgttatataggttctacggagagcattactgggtaaaaaatactatggaaccttcagagcccattctgttttagtgaaatcatgtttatattgaagtcgaatctgagttctggagtgtcatttccaacaacatgaacctctgtccatggtgaaaatattctgaacaaaactgaaattgttacataactcatgccttttgtctttaacccaaatttcttattcccactatatagaaaatcaatatgaatttgtttcagaagagtgattatatcttttcatgagtatacctgtatttctagattaaagagattgtgtggctttgttctacagaaggtttgattttgtctcacctttcagtgaggaaagagaaaagaaagacacttcagattttaccctaaggaaatatactgttggcgctccatcatctaatacctttatgaggggcatactgtgggttaggaactctctctctgcagggcttaggaggaaagttgttgccacctgccaccgctggccgcctgaggtttctgatagtcatgtgtaagttttgaatggcagaacaaagcatgaatcagacacacatcttgcctagccatcccctgtgtgcaaatgtgtatgatgtggttaaccatgtaaaaatgcaccccaaaaggagcattgaatcaatttgtattttcttggcttttaccttaaacttgtatataaggattatttatatattgacagaaaggaacatgttgatctgaatatcactcatatatccaagaaaagagtcagaaatgtattgttgtgttatagattgatctaaatacgtattaattatcttcaagtgtagacacctagatttaaactgactctgtggcagattaattaatagcaataagccaatgaatagggaagatttttaatatataatgactaccagcttgttcttggcttacattcttgagattattgtattcaaaagtgtcagttggcttcacattttggcaaagagccttctgcattcttattctccttgaagcataatgcagataatgacaacttatctttctagattagtcttttattattcaacaagacaaaggccacaacaaaggactagtagaatagtgacctctacctgagaatttgttataactatagatgtttgtgctctgcccaagagattctgatatactgtgatttgatgtgagccacgatgtgaattattataaagttctctagttgattctgatacacataaaagttgaaaaattggccatgtgtggtgtctcacgcctgtaatcccagcactttgggagtccaagatggacagatcactggagcctaggagttccagaccagtctaggcaacatggtgaaaccccatctatctttataaaaaatataaaagttagccaagtgtggtggtgcacacctgtagtctcagctacttgggaggctgaaatgtgagggtcacttgagcccaagagatcgaggctgcagtgagccatgatcacaccactgcactccagcctgggtgacagagcaaaaccctgtttaaaaaaaaaaagttgaaaaaatcacttg

SEQ ID NO: 6088 - DNA, 2102 bp, Homo sapiens; identical to SEQ ID NO: 298

SEQ ID NO: 6089 - DNA, 9758 bp, Homo sapiens
gggcgaggtccgctgcggtcccggcggctccgtggctgctccgctctgagcgcctggcgcgccccgcgccctccctgccggggccgctgggccggggatgcacgcggggcccgggagccatggtccgcttcggggacgagctgggcggccgctatgggggccccggcggcggagagcgggcccggggcggcggggccggcggggcggggggcccgggtcccggggggctgcagcccggccagcgggtcctctacaagcaatcgatcgcgcagcgcgcgcggaccatggcgctgtacaaccccatcccggtcaagcagaactgcttcaccgtcaaccgctcgctcttcgtcttcagcgaggacaacgtcgtccgcaaatacgcgaagcgcatcaccgagtggcctccattcgagtatatgatcctggccaccatcatcgccaactgcatcgtgctggccctggagcagcacctccctgatggggacaaaacgcccatgtccgagcggctggacgacacggagccctatttcatcgggatcttttgcttcgaggcagggatcaaaatcatcgctctgggctttgtcttccacaagggctcttacctgcggaacggctggaacgtcatggacttcgtggtcgtcctcacagggatccttgccacggctggaactgacttcgacctgcgaacactgagggctgtgcgtgtgctgaggcccctgaagctggtgtctgggattccaagtttgcaggtggtgctcaagtccatcatgaaggccatggttccactcctgcagattgggctgcttctcttctttgccatcctcatgtttgccatcattggcctggagttctacatgggcaagttccacaaggcctgtttccccaacagcacagatgcggagcccgtgggtgacttcccctgtggcaaggaggccccagcccggctgtgcgagggcgacactgagtgccgggagtactggccaggacccaactttggcatcaccaactttgacaatatcctgtttgccatcttgacggtgttccagtgcatcaccatggagggctggactgacatcctctataatacaaacgatgcggccggcaacacctggaactggctctacttcatccctctcatcatcatcggctccttcttcatgctcaacctggtgctgggcgtgctctcgggggagtttgccaaggagcgagagagggtggagaaccgccgcgccttcctgaagctgcgccggcagcagcagatcgagcgagagctcaacgggtacctggagtggatcttcaaggcggaggaagtcatgctggccgaggaggacaggaatgcagaggagaagtcccctttggacgtgctgaagagagcggccaccaagaagagcagaaatgacctgatccacgcagaggagggagaggaccggtttgcagatctctgtgctgttggatcccccttcgcccgcgccagcctcaagagcgggaagacagagagctcgtcatacttccggaggaaggagaagatgttccggttttttatccggcgcatggtgaaggctcagagcttctactgggtggtgctgtgcgtggtggccctgaacacactgtgtgtggccatggtgcattacaaccagccgcggcggcttaccacgaccctgtattttgcagagtttgttttcctgggtctcttcctcacagagatgtccctgaagatgtatggcctggggcccagaagctacttccggtcctccttcaactgcttcgactttggggtcatcgtggggagcgtctttgaagtggtctgggcggccatcaagccgggaagctcctttgggatcagtgtgctgcgggccctccgcctgctgaggatcttcaaagtcacgaagtactggagctccctgcggaacctggtggtgtccctgctgaactccatgaagtccatcatcagcctgctcttcttgctcttcctgttcattgtggtcttcgccctgctggggatgcagctgtttgggggacagttcaacttccaggatgagactcccacaaccaacttcgacaccttccctgccgccatcctcactgtcttccagatcctgacgggagaggactggaatgcagtgatgtatcacgggatcgaatcgcaaggcggcgtcagcaaaggcatgttctcgtccttttacttcattgtcctgacactgttcggaaactacactctgctgaatgtctttctggccatcgctgtggacaacctggccaacgcccaagagctgaccaaggatgaagaggagatggaagaagcagccaatcagaagcttgctctgcaaaaggccaaagaagtggctgaagtcagccccatgtctgccgcgaacatctccatcgccgccaggcagcagaactcggccaaggcgcgctcggtgtgggagcagcgggccagccagctacggctgcagaacctgcgggccagctgcgaggcgctgtacagcgagatggaccccgaggagcggctgcgcttcgccactacgcgccacctgcggcccgacatgaagacgcacctggaccggccgctggtggtggagctgggccgcgacggcgcgcgggggcccgtgggaggcaaagcccgacctgaggctgcggaggcccccgagggcgtcgaccctccgcgcaggcaccaccggcaccgcgacaaggacaagacccccgcggcgggggaccaggaccgagcagaggccccgaaggcggagagcggggagcccggtgcccgggaggagcggccgcggccgcaccgcagccacagcaaggaggccgcggggcccccggaggcgcggagcgagcgcggccgaggcccaggccccgagggcggccggcggcaccaccggcgcggctccccggaggaggcggccgagcgggagccccgacgccaccgcgcgcaccggcaccaggatccgagcaaggagtgcgccggcgccaagggcgagcggcgcgcgcggcaccgcggcggcccccgagcggggccccgggaggcggagagcggggaggagccggcgcggcggcaccgggcccggcacaaggcgcagcctgctcacgaggctgtggagaaggagaccacggagaaggaggccacggagaaggaggctgagatagtggaagccgacaaggaaaaggagctccggaaccaccagccccgggagccacactgtgacctggagaccagtgggactgtgactgtgggtcccatgcacacactgcccagcacctgtctccagaaggtggaggaacagccagaggatgcagacaatcagcggaacgtcactcgcatgggcagtcagcccccagacccgaacactattgtacatatcccagtgatgctgacgggccctcttggggaagccacggtcgttcccagtggtaacgtggacctggaaagccaagcagaggggaagaaggaggtggaagcggatgacgtgatgaggagcggcccccggcctatcgtcccatacagctccatgttctgtttaagccccaccaacctgctccgccgcttctgccactacatcgtgaccatgaggtacttcgaggtggtcattctcgtggtcatcgccttgagcagcatcgccctggctgctgaggacccagtgcgcacagactcgcccaggaacaacgctctgaaatacctggattacattttcactggtgtctttacctttgagatggtgataaagatgatcgacttgggactgctgcttcaccctggagcctatttccgggacttgtggaacattctggacttcattgtggtcagtggcgccctggtggcgtttgctttctcaggatccaaagggaaagacatcaataccatcaagtctctgagagtccttcgtgtcctgcggcccctcaagaccatcaaacggctgcccaagctcaaggctgtgtttgactgtgtggtgaactccctgaagaatgtcctcaacatcttgattgtctacatgctcttcatgttcatatttgccgtcattgcggtgcagctcttcaaagggaagtttttctactgcacagatgaatccaaggagctggagagggactgcaggggtcagtatttggattatgagaaggaggaagtggaagctcagcccaggcagtggaagaaatacgactttcactacgacaatgtgctctgggctctgctgacgctgttcacagtgtccacgggagaaggctggcccatggtgctgaaacactccgtggatgccacctatgaggagcagggtccaagccctgggtaccgcatggagctgtccatcttctacgtggtctactttgtggtctttcccttcttcttcgtcaacatctttgtggctttgatcatcatcaccttccaggagcagggggacaaggtgatgtctgaatgcagcctggagaagaacgagagggcttgcattgacttcgccatcagcgccaaacccctgacacggtacatgccccaaaaccggcagtcgttccagtataagacgtggacatttgtggtctccccgccctttgaatacttcatcatggccatgatagccctcaacactgtggtgctgatgatgaagttctatgatgcaccctatgagtacgagctgatgctgaaatgcctgaacatcgtgttcacatccatgttctccatggaatgcgtgctgaagatcatcgcctttggggtgctgaactatttcagagatgcctggaatgtctttgactttgtcactgtgttgggaagtattactgatattttagtaacagagattgcgaacaatttcatcaacctcagcttcctccgcctctttcgagctgcgcggctgatcaagctgctccgccagggctacaccatccgcatcctgctgtggacctttgtccagtccttcaaggccctgccctacgtgtgtctgctcattgccatgctgttcttcatctacgccatcatcggcatgcaggtgtttgggaatattgccctggatgatgacaccagcatcaaccgccacaacaacttccggacgtttttgcaagccctgatgctgctgttcaggagcgccacgggggaggcctggcacgagatcatgctgtcctgcctgagcaaccaggcctgtgatgagcaggccaatgccaccgagtgtggaagtgactttgcctacttctacttcgtctccttcatcttcctgtgctcctttctgatgttgaacctctttgtggctgtgatcatggacaattttgagtacctcacgcgggactcttccatcctaggtcctcaccacttggatgagttcatccgggtctgggctgaatacgacccggctgcgtgtgggcgcatcagttacaatgacatgtttgagatgctgaaacacatgtccccgcctctggggctggggaagaaatgccctgctcgagttgcttacaagcgcctggttcgcatgaacatgcccatctccaacgaggacatgactgttcacttcacgtccacgctgatggccctcatccggacggcactggagatcaagctggccccagctgggacaaagcagcatcagtgtgacgcggagttgaggaaggagatttccgttgtgtgggccaatctgccccagaagactttggacttgctggtaccaccccataagcctgatgagatgacagtggggaaggtttatgcagctctgatgatattcgacttctacaagcagaacaaaaccaccagagaccagatgcagcaggctcctggaggcctctcccagatgggtcctgtgtccctgttccaccctctgaaggccaccctggagcagacacagccggctgtgctccgaggagcccgggttttccttcgacagaagagttccacctccctcagcaatggcggggccatacaaaaccaagagagtggcatcaaagagtctgtctcctggggcactcaaaggacccaggatgcaccccatgaggccaggccacccctggagcgtggccactccacagagatccctgtggggcggtcaggagcactggctgtggacgttcagatgcagagcataacccggaggggccctgatggggagccccagcctgggctggagagccagggtcgagcggcctccatgccccgccttgcggccgagactcagcccgtcacagatgccagccccatgaagcgctccatctccacgctggcccagcggccccgtgggactcatctttgcagcaccaccccggaccgcccaccccctagccaggcgtcgtcgcaccaccaccaccaccgctgccaccgccgcagggacaggaagcagaggtccctggagaaggggcccagcctgtctgccgatatggatggcgcaccaagcagtgctgtggggccggggctgcccccgggagaggggcctacaggctgccggcgggaacgagagcgccggcaggagcggggccggtcccaggagcggaggcagccctcatcctcctcctcggagaagcagcgcttctactcctgcgaccgctttgggggccgtgagcccccgaagcccaagccctccctcagcagccacccaacgtcgccaacagctggccaggagccgggaccccacccacagggcagtggttccgtgaatgggagccccttgctgtcaacatctggtgctagcacccccggccgcggtgggcggaggcagctcccccagacgcccctgactccccgccccagcatcacctacaagacggccaactcctcacccatccacttcgccggggctcagaccagcctccctgccttctccccaggccggctcagccgtgggctttccgaacacaacgccctgctgcagagagaccccctcagccagcccctggcccctggctctcgaattggctctgacccttacctggggcagcgtctggacagtgaggcctctgtccacgccctgcctgaggacactctcactttcgaggaggctgtggccaccaactcgggccgctcctccaggacttcctacgtgtcctccctgacctcccagtctcaccctctccgccgcgtgcccaacggttaccactgcaccctgggactcagctcgggtggccgagcacggcacagctaccaccaccctgaccaagaccactggtgctagctgcaccgtgaccgctcagacgcctgcatgcagcaggcgtgtgttccagtggatgagttttatcatccacacggggcagccggccctcgggggaggccttgcccaccttggtgaggctcctgtggcccctccctccccctcctcccctcttttactctagacgacgaataaagccctgttagaggatgcggctctctctgtccccttcctgtcctgccttcctgggtctcgtaccacacaccagaccctaaaccgcaggctgctgtgtgtggctgagaaggacccaggagtccaaatcccgtgtcctgggactcagcatccagcatgggtgcttggagccgttgtgaggagctctgcgtcctgtggggagcacccttcacgtggccgtgcggcacagagaagcagggcccacctgaaagtgcgccgagacctcgggacggaggggatggggagggggacacagtcgtggcttgtgcagcccgccagtgtcagcgaatgctcactcaggcaagctctgtcctccctggacaccgtcagccccacaggaaccgagctgggaagtgttcttgctgtggttgtgatttttaattgcaacacctctcattcttgtcacttctatatacgtgatgtagaaaaaatggaaaaccagaaaaatggggaaggaaatgttcacataactttaaaaaatcaaacctgtgaaagaaagatgtcagctttttgccacgtgtctttgtggcttatgcgaggagactccctgtgcagccctgtccggtccaggtggacgtagacggcccctggctctgctgctcttgaccaagtgcctgaccgccaggccctcacacccaggctcctgggcactgtggtgtgaggcgaggcctcgggatccatcaccgcaggatgctgtgaaaagtactcgcgatggcagccaggtagcaagcccttgccagtggagagcactggatgtcatggtggcaaacaaggcagccatttgctgtcctcctcccacgagtggaaggggtttccaaggaagccacagggcagctgaccacgtgcttgtgtgaggcattttcagtctgttctgcatatgattctcagggcacactctgtggtatgtgaaataggtttccttccacatacagcagaagagaggcaaaggctggtaggaaggaggaagacattggctgggggcttggatgtggggccgtcagggcaggagggaggaagccccagctggaatgaaactcagagcaagtgaccgagggaggacacggctcctgccactgaggccgggcacctgatgcccagcactgtcctggcgccagacacagggagcaggcagtcaagtgaggtctgacccccatggccacgctcaggagagaaagaccatgctcaggacactgtccaaggtgcacaagatgctgggaggtcccttgtttggtgaagaaagggagcatttagagcagttgatggtggtgtgtcctccgtgttctgaaattccagatgatctgtgttggattcttggcttctaccccatgattctcctcaaagaaattgtgtgtgatgtgtgtgtgtgtgtgtgtgtgtgtgtgtctgtgtcacaggagatgcagtgcctgtacaggtgtgttcagtgtgtggatgtcattaacccatagggctatgcaacaaaagacacatttaatagaagtaaaacacacaagaccgctgcctggtctcggggttcagcatgattgtgaccaaacctttttatagaatttccttacctgaaggcacaacactctgaaactttaaagataacagagtattttattccaatagaataaaccaggaatctcggactgtgcatgtgatcactgtgctcctgttgcaaagtagaaggatgtgtattttgacactgacgttttgtctcttgttccccagcccccagcccatgttatcttgggtgtcgaatgtgtccattccatgcagaaccacagccatttccccaggcagtgttgggtcgagaatccacttttctaaacccacacagcctagctggcttgtctagactcttctaggcattggaattgatgaaaactacagggagcggggaaaggagacattatgtcttgttttcctgactttgggttttgtttctcactgtgtcttctccggctatcatatatgtcccctgaatctcatagtgagctgccaaatttgaagtgcatcacccagttgtctgcatctggaaccagtcaagcagtggctgtagtttgaacaagttatgtgtgcatgtaacatatatacatatatacatatatacaagtatgtgcatgataatgtatatcttcgtactttttgatacaatgtattcatttgttaatttttaattatatttgatataaatcaaaggtttgttgcaaaactttatatttaagaagtgttaaaaaaaaaaaaaagtcccaaccatgcaacacaactgggacctacttaaaaagaaattctgtgattgactagtttgctgcctgagtcatatttatcagccaaactttggattctgctgttgtttctacaatgacattttgtatgaagcaaagtccttgaattaaaataaaaacttagcaaaaaatcaaaaacaaaacccca

SEQ ID NO: 6090 - DNA, 4552 bp, Homo sapiens
gcagagacctccggggggtctcagggagtagggggcttcagggcctcccagtctagagccggattggcgagttagacgcttgtagatccaaggttggattggggtggggtctctgggacgttggatcgctacgcaaggattggggggattcaagtgcttagagatcgaagtctgccctgggtagggggagtcagacaattggaaagcctaggtagttatttggggaggggtctctacgccttggcgaagcgcacagctgcatctttttggcttgaggcctgaggccttgtcgagaagcttccgtgaaagggtgggccagccgggccacgagaaagaaagtgaataaatcaggaatataagtgggcggggggcccctgagaggggggtcgcaaagggtgagacatggccaccaggcgtttaaccgacgctttcttgttgttgcggaataattccatccaaaaccggcagctgttagccgagcaacttgctgatgaccgtatggcactggtgtcaggcatcagcttagatccagaagcagcgattggtgtgacaaaacggccacctcctaagtgggtggatggagtggatgaaattcagtatgatgttggccggattaagcagaagatgaaagaattggccagccttcatgacaagcatttaaacagacccaccctggatgacagcagcgaagaggaacatgccattgagataactacccaagagatcactcagctcttccacaggtgccagcgtgccgtgcaggccctgccgagccgggcccgggcctgctccgagcaggaggggcggctgcttgggaacgtggtggcctcgctggcgcaggccctgcaggaactctccaccagcttccggcacgcacagtcaggctacctcaaacgcatgaagaatcgagaggaaagatcccagcattttttcgacacatcagtaccactaatggatgatggagacgataacactctttaccatcggggttttacagaggaccagttagttctggtggagcagaacacactgatggtggaagagcgggaacgagagattcgccagattgtacagtccatttctgacctgaatgaaatattcagggacttaggggcgatgattgtagaacagggtacagtccttgacagaattgactataacgttgaacagtcctgtatcaaaactgaagatggtttgaaacagcttcacaaggcagaacagtatcaaaagaagaatcggaagatgcttgtgattttaatattatttgtcatcatcattgtgctcattgttgtcctcgttggcgtgaagtctcgataagtggcattgggttttcgtgtgtgccgcgcgtgtggatctcccgggtgtgaggggcttggcctgcgccccgccagctgcccgcagaggtgcagcctcgaggaatctgagggcgtcggggcagcgaacctttgcatccacggactcctccttccctagtcctgctcaagcggtccggggaatgggtttttgtttttccttcattgttgagaatttaaggacctttgatactgctgcacaatagagattgagttctgggatcagttataatatatattttttttagaaagagaaaatgagctgagagtttacaggcactgcagaagctgttcagtattatatgtgtatatgctatttttttagcagccatgtctgagcagaatgttaacataatttttggaaaaattttctttaaaccatctggtttttaagaaatttggtaccaaaaattgatgagtagaggcaaaaatgccccttcatctttctctatatattttccagttgaaaacaaactaagaagtcctttaagaatttataatccgttccccattaacttaatttagcttttccatcactgttaatgatcagagtaacaaagtgtgaaaaataagaaaccatcattgatgttaattaacacatttagatgggccagttaaaacagcttcataagttttaaattaattgtaaatggaatattcctcatttaaaatttttgcactgcattttctactgtaaaccaaaagaggttactaagcaaaaccacctaaatttaagttggtgatttaaatgaatctcacattaaaagaaagcttgacagtgttatgaaagccaccagactcagccagtgtgtccccatgggtatccccagccatccttgctcaatccattacttatatactaactacataatgacctgttcaaaccagactctatttaatgaactgtgaatttacacagaggccattttaaatgggtcaccccatttaggattagtggatctcaaattattaaccaaacatcactccatttcaaagtaaaatattccaccagcgatttgatttattggctcttccattgccactgagcaatgcccaggaagcaggcacattgccaaggactgggggcatcttgactaggaagctcctcgtttgtgtgagcgtgggtcagaccgccaaagtaggacttcatcgtttacctacctattatcaatatggtgcttgaatatattcctataactgtagaacagtgtggaaagtgatggtaactttgaagttgttcatgttttattggctttgttttaattgacactagtagagttttaatggtctttgtgtaaattttaatggcttttccattgtttttgcttctcttaaaaagtttaagaagaatatgacctcattaaatgtgctgttttatttggaccagtcacacaaaatgtctctctagagttgactttaaagttgtttacagaaatttaaactcaattccagagattgaagttgtccaaacagctcatgggcttagtgtccaaacccctgcccagccttccctttccaagttggtgccacctccaggtagccattggtggttttcctattactgatgtggctgtggaatgataaggtcctagaggggccctggcatttcaggaagcggacctggtattccctgacaaacattgcttaggaaagagggccggagaataagaagccagcacctcatcagtcagccctgcaatgtgagacttccgtagctgttgagagtcactgcaggtgttctttcatcccatctgattttaacccatggttgagacgttccaagttagatctgctgctcttaggtgtggggctgtccacattagggaacttgcctcaaaaacagtccacagtggcaataccggacttctgttcaagctttttaaagtgctgagccttacaaacccctgaaggaaagtgaccctttaagagaggatcatctttttttatatttattttcaccaaatagggtgatgagggttggtttttgttccctcaacccatttgggtaaaataacggatctgattagaaactgttttaaggaggggctgggctcggtggctcacgcctgtaatcccagactttgagaggccaaggcggtcacgaggtcaggagttcgagaccagcctagccaacatggtgaaaccccgtctctacaaaaaatacaaaaattagccgggtgggacacgcctgtaatcccagctactcaagaggctgaggcaggagaatagcttgaacccgggaggcagaggttgcagtgagccgagatcacaccactgcactccagcctgggtgacagagcgaggctccgtctcaaaaaaaaaaaaaaaaaattgttttagcgctgggtttcccaaggtgggagagacagacccagcctggagctggcccctggcctgtgtgctgacttcttggggtcctcaaaccactgtatttttctgttgagcctgtacttggggagagatcagtagcatttgaggaagtaagagaaaagaatcatggtacctcagggtttctttccctttactcgctggcagccattgtctgtgggcacctcatgtttttccacactctactgggccgtggaggtaacgatcacccaggccagtctcctctgcctgggatgcgccctctgagaggaggcctagcagggcaggctccctctgggcatccctggatgcagcctctggacacatgcctcctttaaagtgtccgggtgcagctcaggttgagtggaggtagaaggagaaacagacatgtttaccacgcgttttccaaagctcctgatctttcccaagattgtaactgaaaactgctgtctcttgttttgttcgttttgggggtggtggtgctggctgggccatgcttgtgaagtgatgtgtgtctctgatttaacggattcactgttttctctgctaattgagagagcgttatttacattatttatttgttttgacacaagtgctttcagtgttttatcctagctaatggcttcttaaaggtaataaaacccttccaacgtaattggtcagataaaactttttttcttgtatgcttaaataaagcaattagtgaagcacttctatccaaaatgacttttttgtccttttttaaaaccaatttactgttactggaaactttttgtacaataaagcaatcacgcagattaaagaacatcctgcaatcctagtattaattttaa

SEQ ID NO: 6091 - DNA, 9455 bp, Homo sapiens; identical to SEQ ID NO: 4891

SEQ ID NO: 6092 - DNA, 2927 bp, Homo sapiens; identical to SEQ ID NO: 841

SEQ ID NO: 6093 - DNA, 6945 bp, Homo sapiens; identical to SEQ ID NO: 127

SEQ ID NO: 6094 - DNA, 2068 bp, Homo sapiens
gcgggtccccagaagcctacaggtgagtatcggttctccccttcccggctttcggtccggaggaggcgggagcagcttccctgttctgatcctatcgcgggcggcgcagggccggcttggccttccgtgggacggggaggggggcgggatgtgtcacccaaataccagtggggacggtcggtggtggaaccagccgggcaggtcgggtagagtataagagccggagggagcggccgggcggcagacgcctgcagaccatcccagacgccggagcccgagccccgacgagtccccgcgcctcatccgcccgcgtccggtccgcgttcctccgccccaccatggctcggggccccggcctcgcgccgccaccgctgcggctgccgctgctgctgctggtgctggcggcggtgaccggccacacggccgcgcaggacaactgcacgtgtcccaccaacaagatgaccgtgtgcagccccgacggccccggcggccgctgccagtgccgcgcgctgggctcgggcatggcggtcgactgctccacgctgacctccaagtgtctgctgctcaaggcgcgcatgagcgcccccaagaacgcccgcacgctggtgcggccgagtgagcacgcgctcgtggacaacgatggcctctacgaccccgactgcgaccccgagggccgcttcaaggcgcgccagtgcaaccagacgtcggtgtgctggtgcgtgaactcggtgggcgtgcgccgcacggacaagggcgacctgagcctacgctgcgatgagctggtgcgcacccaccacatcctcattgacctgcgccaccgccccaccgccggcgccttcaaccactcagacctggacgccgagctgaggcggctcttccgcgagcgctatcggctgcaccccaagttcgtggcggccgtgcactacgagcagcccaccatccagatcgagctgcggcagaacacgtctcagaaggccgccggtgacgtggatatcggcgatgccgcctactacttcgagagggacatcaagggcgagtctctattccagggccgcggcggcctggacttgcgcgtgcgcggagaacccctgcaggtggagcgcacgctcatctattacctggacgagattcccccgaagttctccatgaagcgcctcaccgccggcctcatcgccgtcatcgtggtggtcgtggtggccctcgtcgccggcatggccgtcctggtgatcaccaaccggagaaagtcggggaagtacaagaaggtggagatcaaggaactgggggagttgagaaaggaaccgagcttgtaggtacccggcggggcaggggatggggtggggtaccggatttcggtatcgtcccagacccaagtgagtcacgcttcctgattcctcggcgcaaaggagacgtttatcctttcaaattcctgccttccccctcccttttgcgcacacaccaggtttaatagatcctggcctcagggtctcctttctttctcacttctgtcttgaaggaagcatttctaaaatgtatcccctttcggtccaacaacaggaaacctgactggggcagtgaaggaagggatggcatagcgttatgtgtaaaaaacaagtatctgtatgacaacccgggatcgtttgcaagtaactgaatccattgcgacattgtgaaggcttaaatgagtttagatgggaaatagcgttgttatcgccttgggtttaaattatttgatgagttccacttgtatcatggcctacccgaggagaagaggagtttgttaactgggcctatgtagtagcctcatttaccatcgtttgtattactgaccacatatgcttgtcactgggaaagaagcctgtttcagctgcctgaacgcagtttggatgtctttgaggacagacattgcccggaaactcagtctatttattcttcagcttgcccttactgccactgatattggtaatgttcttttttgtaaaatgtttgtacatatgttgtctttgataatgttgctgtaattttttaaaataaaacacgaatttaataaaatatgggaaaggcacaaacc

SEQ ID NO: 6095 - DNA, 6506 bp, Homo sapiens
gagagctgcctgctcagacaacagacacgcgaggtcaggaagaagccgcttataaattaccgcttccttcgcgccgccgccaacgccgagccccgaggaccgcaagcccagaggacaagctgcgccaagagggagtgctggagctgttcacccagcgggtcagagagcgagccgggcaggccagcccccggccggcggaaccctggcacagcctgagcagatgctgcgggcggcgccgcagccaccccagatccagaaccagaaccacagcccttctgaggagctcccaaacaaagcaaggagatggccaccaaggagaagctgcagtgtctgaaagatttccacaaggacatcctgaagccctcaccagggaagagcccaggcacgcggcctgaggacgaggctgagggaaaacctccgcagagggagaagtggtctagcaagatcgactttgtgctctctgtggctggcggcttcgtgggcttgggcaacgtctggcgcttcccgtacctctgctacaagaatggtggaggtgcgtttctcataccgtattttattttcctgtttgggagcggcctgcctgtgtttttcttggagatcatcataggccagtacacctctgaagggggcatcacctgctgggaaaagatctgccccttgttctctggtatcggctatgcctccgttgtaattgtgtccctcctgaatgtctactacatcgtcatcctggcctgggccacatactacctgttccagtccttccagaaggagctgccctgggcacactgcaaccacagctggaacacacctcactgcatggaggacaccatgcgcaagaacaagagtgtctggatcaccatcagctccaccaacttcacctcccctgtcatcgagttctgggagcgcaacgtgctgagcttgtcccctggaatcgaccacccaggctctctgaaatgggacctcgctctctgccttcttttagtctggctagtgtgtttcttctgcatctggaagggcgtcaggtccactgggaaggtcgtctacttcacagccacttttccattcgccatgctcctggtgctgctggtccgagggctgacgctgccgggcgcgggcgcaggcatcaagttctatctgtatcctgacatcacccgccttgaggacccacaggtgtggattgacgctgggactcagatattcttctcttatgccatctgcctgggggctatgacctcgctggggagctacaacaagtacaagtataactcgtacagggactgtatgctgctgggatgcctgaacagtggtaccagttttgtgtctggcttcgcaattttttccatcctgggcttcatggcacaagagcaaggggtggacattgctgatgtggctgagtcaggtcctggcctggccttcattgcctacccaaaagctgtgacaatgatgccgctgcccacattttggtccattcttttttttattatgcttctcttgcttggactggatagccagtttgttgaagttgaaggacagatcacatccttggttgatctttacccatccttcctaaggaagggttatcgtcgggaaatcttcatcgccttcgtgtgtagcatcagctacctgctggggctgacgatggtgacggagggtggcatgtatgtgtttcagctctttgactactatgcagctagcggtgtatgccttttgtgggttgcattctttgaatgttttgttattgcctggatatatggaggtgataacctttatgatggtattgaggacatgattggctatcggcccgggccctggatgaagtacagctgggctgtgatcactccagttctctgtgttggatgtttcatcttctcgctcgtcaagtacgtacccctgacctacaacaaaacatacgtgtaccccaactgggccattgggctgggctggagcctggccctttcctccatgctctgcgttcccttggtcatcgtcatccgcctctgccagactgaggggccgttccttgtgagagtcaagtacctgctgaccccaagggaacccaaccgctgggctgtggagcgcgagggagccacaccttacaactctcgcaccgtcatgaacggcgctctcgtgaaaccgacccacatcattgtggagaccatgatgtgagctctctcgggtcgacggggccggcggctttcctgctgtttactaacattagattctcataggaccaggtttacagagctttatatttgcactaggatttttttttttttgtaattgtcacagaaaatgtaattgtgggtatgtgtgcgtgcgtgtgtgtgtgtgtgtgtatcgtgtgtgtgtgttttgttttgatttgggggatattttgtacaaaaagaaaacccacgggaagatgtccgtggagaggcagagctttcatactgaattagatgtattttatgggaatttggtaaatttttctttgtatttttttttttacatataagtatatatacacttagagattgtcatatacttttaccacttgaattgatcttcttgccagcaatagatctcattttcaaaagcaattcttcggtgctgtgtagctggcagaaagttctgtccagtaaacgcaggatggaattttcctgggactctacacccatcttaaggtggtataccttccaaatcctggttcagatggaagaaatagcaggagagaggacccattagctggcagacccagggggaagaaaggagggctgtgaggagatacctcattaaacttggcttagtgaagaagagagatgccaaaggaatgaaccaacccttcacataaaggagactggctgaagctgaatgaggaggccctatagcagaagtctgattctaagagcagtagaaacttgtaccagaagcaaaatcccacttttaattttgagatggtgagtggatagtcagtagaccgtcagaaccactggccagagagggagctgctagagatccaagaaggctggcaggagtgaggctcacaactcagcctcgcaagaggtggcagaggcacaggaggccacagtccttcctggggcattccaggcagagaaggagcagaggctctcccggcaggagctggggtctcagggctcagatgagtctgttgcatttgaatggggtcatagcaggttctggtcattccccaagcaacatctcagcatctcttaaagttgcctgcaggaatgaagcatgacatacctgttgagggactaggggagtggtggggaggtgagtggaccaaaggatataggccccaggcatgcagatgggcccggtgtcggggaggggtgctttctttcctcatctccccactccccactctcagcctgggagactcctgccaagccctcattaaagatgccaccctgggctgccctggcacctagcaaggcacaccaagaacagcttttgagtctgtatcctccactgggggaagtgctcccagttcagaacaagggcagcccgtggtgctgacctaggatataacaaagctcttcacttcaaaacccctgcaatagctgggtttacagacatttaccacctgcggacccaaaagagaaggcctaggagagttttctagaaggttgggattgtcagggtcctggcccctcagaactggcttgatcaagggccttatgtggagcagaggttgtctctgaaccaggagagaaggtactatacctttcaaatccccagggcagacacacccccacccagcccctatttggacctaaactgtgccatttgaacagtcacttccaagctcagtctaaatgaaaccgaaacgtgaccacgcacaaaggcagtcactgcctcgaggggtgcagaccgcagaattttcacagcaggggctcttggaaccctggaaacccccttcttaaatttgggaggaggagtatgcctttggtgtccccctcccaaggggcaattctgaaccccatctttggcaggcatacatatttcactgtttccaaagctatctactctgccaaacaacacccagtcctattccaaactctcaacgattctatcttgttcctgtttttctatgtatttatggttgccgtttgtgtctgatttgattttactgttttttccctgattttatggagtagcattgtgacctgttttcctttgtcttatataactttagtaaactaaccactgtcaatgattgagggcaggtggcacgtggggaagaggggacttggcacgcagtggctacctgggcatttgtggtcatttcagtttccatctccccagcgggggctccctgggtgaaaggccacagtattttgggttggtaggcaaattgcaacattctggacatggcctgaggaaggcctcttcttataagattctcagaccaaattctagaccaaagacacaggcagaccaagtccccaggccccgcctggaaggaagtcgttcctcaactctccccaaggcacctgtctccaatcagagccctctcgcccagccagccctggctctgtgtgcagagcatagctctgcgagtacctgtgtaataatgctcaaccttcatgtctccgtataaacgaaactttccatgagagctcatgactctggtccacctgtctatagagaatgggcaaagtccttcacctgctttctgcttgggatgggtcagaaatgctgatgcccgcacatagcccagccagccagatctggaaaggaagcgagggggttgtttaaatcaattttttaagatgaagaagtgggagacactgcgttgagatgggccatgctagggccacagagatttcctgacggtcagggagagaagggcctccagggtcccctaacccaacgcccttgttgtaaatgaggtaactgaggctcagggaggcactgtgagccaggaatggattttcttgaaacagctctagctgcaggttctccgaggtaggtgcagggaatggtgagtgtctaaccagggctacatccagcaacatcctcaaggtcttcctgacaaccaaagacaagcctttatggaaaaggaaatgcgctcccctccatgttcagggatgaggggagcagcagcagccacactcccaccatcctcacagaattcctggacccatgcggtggctccgtgagctgggtgactccagcctcacctgcacaccccagccctgcacggggccctccttcctcccagcagcccttggtgagctaggaattgagatccctgtttgtgaaagagggaactgaggtgcagagaagccagaggtgtgccagatccttaggcaggatttagatgaagtcgccctggctccagactgaccccgaggctctgcggggagtttccaggcagcaggaagtggccttggatgctctccttccaggacagcataacccctgggccatgtgcagctccttcactgccccctggatccccagcatacccccaaagacagtggggaaacacaaggggagagcacagcatggcccctccagcccacttcagggcactcttgtatcacccgggtaccgccacactggtcccccacccagccagcatctcccagcacagcccctctccctggggaaatgctctgggtagccagtctaaaggcagaggcacctaactgctccccgcagcccaccccacccaagattcagacacaagccaggaaaggacccaagagaaaatccttcaaggtggcctgaggtcccatccctccctcagacccatgtggtcccaggccaggctgcctgggacacggtaaataccactgtgtgcaaaaatcgaagtacaaaaccacaagactaaacaaaacaaacccagagagccaaacttgtagaggtgggcagtccagaaagcagggggcagccctccccctttccttctctccctgatcctcagaatatatattgttgtaataggaagcatttttgcattgttctcttgtgggtgtcactacagacatgttctggcgtgttctccgagggatggagcatcctgttatatatttgacttcaaattgagatgttggcttcattttttttttttacccaattaatctcccaatccctagcaactgtgactctgtatttagcacaagagaaagctgagaatgtgggtcttgcctccttccagaaatatgtctggctcatcaggacatttttttaaaacttcaaaatatttttaagatattttaaacttttataaaaaaaaaatcaaccaacaagagacttttctgaggaggaacatttgtatttgaacaagatccttggtgtgtagttcagtcttgcagtatacaagcttttgtgtataaatgttttatgatatgattccctgtattttgcaggggtttttttctcttttgctttttagataaatatgtatatcaatattttaaattcatctttgctttttttagaggagtttgtaatcaccttataacatgaaaataaacatttcctttttaacatcc

SEQ ID NO: 6096 - DNA, 6506 bp, Homo sapiens
attacagaggaaggagctcgctatataagccagccaaagttggctgcaccggccacagcctgcctactgtcacccgcctctcccgcgcgcagatacacgcccccgcctccgtgggcacaaaggcagcgctgctggggaactcgggggaacgcgcacgtgggaaccgccgcagctccacactccaggtacttcttccaaggacctaggtctctcgcccatcggaaagaaaataattctttcaagaagatcagggacaactgatttgaagtctactctgtgcttctaaatccccaattctgctgaaagtgagataccctagagccctagagccccagcagcacccagccaaacccacctccaccatgggggccatgactcagctgttggcaggtgtctttcttgctttccttgccctcgctaccgaaggtggggtcctcaagaaagtcatccggcacaagcgacagagtggggtgaacgccaccctgccagaagagaaccagccagtggtgtttaaccacgtttacaacatcaagctgccagtgggatcccagtgttcggtggatctggagtcagccagtggggagaaagacctggcaccgccttcagagcccagcgaaagctttcaggagcacacagtggatggggaaaaccagattgtcttcacacatcgcatcaacatcccccgccgggcctgtggctgtgccgcagcccctgatgttaaggagctgctgagcagactggaggagctggagaacctggtgtcttccctgagggagcaatgtactgcaggagcaggctgctgtctccagcctgccacaggccgcttggacaccaggcccttctgtagcggtcggggcaacttcagcactgaaggatgtggctgtgtctgcgaacctggctggaaaggccccaactgctctgagcccgaatgtccaggcaactgtcaccttcgaggccggtgcattgatgggcagtgcatctgtgacgacggcttcacgggcgaggactgcagccagctggcttgccccagcgactgcaatgaccagggcaagtgcgtaaatggagtctgcatctgtttcgaaggctacgccggggctgactgcagccgtgaaatctgcccagtgccctgcagtgaggagcacggcacatgtgtagatggcttgtgtgtgtgccacgatggctttgcaggcgatgactgcaacaagcctctgtgtctcaacaattgctacaaccgtggacgatgcgtggagaatgagtgcgtgtgtgatgagggtttcacgggcgaagactgcagtgagctcatctgccccaatgactgcttcgaccggggccgctgcatcaatggcacctgctactgcgaagaaggcttcacaggtgaagactgcgggaaacccacctgcccacatgcctgccacacccagggccggtgtgaggaggggcagtgtgtatgtgatgagggctttgccggtgtggactgcagcgagaagaggtgtcctgctgactgtcacaatcgtggccgctgtgtagacgggcggtgtgagtgtgatgatggtttcactggagctgactgtggggagctcaagtgtcccaatggctgcagtggccatggccgctgtgtcaatgggcagtgtgtgtgtgatgagggctatactggggaggactgcagccagctacggtgccccaatgactgtcacagtcggggccgctgtgtcgagggcaaatgtgtatgtgagcaaggcttcaagggctatgactgcagtgacatgagctgccctaatgactgtcaccagcacggccgctgtgtgaatggcatgtgtgtttgtgatgacggctacacaggggaagactgccgggatcgccaatgccccagggactgcagcaacaggggcctctgtgtggacggacagtgcgtctgtgaggacggcttcaccggccctgactgtgcagaactctcctgtccaaatgactgccatggccagggtcgctgtgtgaatgggcagtgcgtgtgccatgaaggatttatgggcaaagactgcaaggagcaaagatgtcccagtgactgtcatggccagggccgctgcgtggacggccagtgcatctgccacgagggcttcacaggcctggactgtggccagcactcctgccccagtgactgcaacaacttaggacaatgcgtctcgggccgctgcatctgcaacgagggctacagcggagaagactgctcagaggtgtctcctcccaaagacctcgttgtgacagaagtgacggaagagacggtcaacctggcctgggacaatgagatgcgggtcacagagtaccttgtcgtgtacacgcccacccacgagggtggtctggaaatgcagttccgtgtgcctggggaccagacgtccaccatcatccaggagctggagcctggtgtggagtactttatccgtgtatttgccatcctggagaacaagaagagcattcctgtcagcgccagggtggccacgtacttacctgcacctgaaggcctgaaattcaagtccatcaaggagacatctgtggaagtggagtgggatcctctagacattgcttttgaaacctgggagatcatcttccggaatatgaataaagaagatgagggagagatcaccaaaagcctgaggaggccagagacctcttaccggcaaactggtctagctcctgggcaagagtatgagatatctctgcacatagtgaaaaacaatacccggggccctggcctgaagagggtgaccaccacacgcttggatgcccccagccagatcgaggtgaaagatgtcacagacaccactgccttgatcacctggttcaagcccctggctgagatcgatggcattgagctgacctacggcatcaaagacgtgccaggagaccgtaccaccatcgatctcacagaggacgagaaccagtactccatcgggaacctgaagcctgacactgagtacgaggtgtccctcatctcccgcagaggtgacatgtcaagcaacccagccaaagagaccttcacaacaggcctcgatgctcccaggaatcttcgacgtgtttcccagacagataacagcatcaccctggaatggaggaatggcaaggcagctattgacagttacagaattaagtatgcccccatctctggaggggaccacgctgaggttgatgttccaaagagccaacaagccacaaccaaaaccacactcacaggtctgaggccgggaactgaatatgggattggagtttctgctgtgaaggaagacaaggagagcaatccagcgaccatcaacgcagccacagagttggacacgcccaaggaccttcaggtttctgaaactgcagagaccagcctgaccctgctctggaagacaccgttggccaaatttgaccgctaccgcctcaattacagtctccccacaggccagtgggtgggagtgcagcttccaagaaacaccacttcctatgtcctgagaggcctggaaccaggacaggagtacaatgtcctcctgacagccgagaaaggcagacacaagagcaagcccgcacgtgtgaaggcatccactgccaaagaacctgaaattggaaacttaaatgtttctgacataactcccgagagcttcaatctctcctggatggctaccgatgggatcttcgagacctttaccattgaaattattgattccaataggttgctggagactgtggaatataatatctctggtgctgaacgaactgcccatatctcagggctaccccctagtactgattttattgtctacctctctggacttgctcccagcatccggaccaaaaccatcagtgccacagccacgacagaggccctgccccttctggaaaacctaaccatttccgacattaatccctacgggttcacagtttcctggatggcatcggagaatgcctttgacagctttctagtaacggtggtggattctgggaagctgctggacccccaggaattcacactttcaggaacccagaggaagctggagcttagaggcctcataactggcattggctatgaggttatggtctctggcttcacccaagggcatcaaaccaagcccttgagggctgagattgttacagaagccgaaccggaagttgacaaccttctggtttcagatgccaccccagacggtttccgtctgtcctggacagctgatgaaggggtcttcgacaattttgttctcaaaatcagagataccaaaaagcagtctgagccactggaaataaccctacttgcccccgaacgtaccagggacataacaggtctcagagaggctactgaatacgaaattgaactctatggaataagcaaaggaaggcgatcccagacagtcagtgctatagcaacaacagccatgggctccccaaaggaagtcattttctcagacatcactgaaaattcggctactgtcagctggagggcacccacagcccaagtggagagcttccggattacctatgtgcccattacaggaggtacaccctccatggtaactgtggacggaaccaagactcagaccaggctggtgaaactcatacctggcgtggagtaccttgtcagcatcatcgccatgaagggctttgaggaaagtgaacctgtctcagggtcattcaccacagctctggatggcccatctggcctggtgacagccaacatcactgactcagaagccttggccaggtggcagccagccattgccactgtggacagttatgtcatctcctacacaggcgagaaagtgccagaaattacacgcacggtgtccgggaacacagtggagtatgctctgaccgacctcgagcctgccacggaatacacactgagaatctttgcagagaaagggccccagaagagctcaaccatcactgccaagttcacaacagacctcgattctccaagagacttgactgctactgaggttcagtcggaaactgccctccttacctggcgacccccccgggcatcagtcaccggttacctgctggtctatgaatcagtggatggcacagtcaaggaagtcattgtgggtccagataccacctcctacagcctggcagacctgagcccatccacccactacacagccaagatccaggcactcaatgggcccctgaggagcaatatgatccagaccatcttcaccacaattggactcctgtaccccttccccaaggactgctcccaagcaatgctgaatggagacacgacctctggcctctacaccatttatctgaatggtgataaggctgaggcgctggaagtcttctgtgacatgacctctgatgggggtggatggattgtgttcctgagacgcaaaaacggacgcgagaacttctaccaaaactggaaggcatatgctgctggatttggggaccgcagagaagaattctggcttgggctggacaacctgaacaaaatcacagcccaggggcagtacgagctccgggtggacctgcgggaccatggggagacagcctttgctgtctatgacaagttcagcgtgggagatgccaagactcgctacaagctgaaggtggaggggtacagtgggacagcaggtgactccatggcctaccacaatggcagatccttctccacctttgacaaggacacagattcagccatcaccaactgtgctctgtcctacaaaggggctttctggtacaggaactgtcaccgtgtcaacctgatggggagatatggggacaataaccacagtcagggcgttaactggttccactggaagggccacgaacactcaatccagtttgctgagatgaagctgagaccaagcaacttcagaaatcttgaaggcaggcgcaaacgggcataaattccagggaccactgggtgagagaggaataaggcccagagcgaggaaaggattttaccaaagcatcaatacaaccagcccaaccatcggtccacacctgggcatttggtgagagtcaaagctgaccatggatccctggggccaacggcaacagcatgggcctcacctcctctgtgatttctttctttgcaccaaagacatcagtctccaacatgtttctgttttgttgtttgattcagcaaaaatctcccagtgacaacatcgcaatagttttttacttctcttaggtggctctgggaatgggagaggggtaggatgtacaggggtagtttgttttagaaccagccgtattttacatgaagctgtataattaattgtcattatttttgttagcaaagattaaatgtgtcattggaagccatccctttttttacatttcatacaacagaaaccagaaaagcaatactgtttccattttaaggatatgattaatattattaatataataatgatgatgatgatgatgaaaactaaggatttttcaagagatctttctttccaaaacatttctggacagtacctgattgtattttttttttaaataaaagcacaagtacttttgagtttgtt

SEQ ID NO: 6097 - DNA, 1910 bp, Homo sapiens
gcggcggcagcggaggcggcggctccagccggcgcggcgcgaggctcggcggtgggatccggcgggcggtgctagctccgcgctccctgcctcgctcgctgccgggggcggtcggaaggcgcggcgcgaagcccgggtggcccgagggcgcgatggctgctcctgtcccgtgggcctgctgtgctgtgcttgccgccgccgccgcagttgtctacgcccagagacacagtccacaggaggcaccccatgtgcagtacgagcgcctgggctctgacgtgacactgccatgtgggacagcaaactgggatgctgcggtgacgtggcgggtaaatgggacagacctggcccctgacctgctcaacggctctcagctggtgctccatggcctggaactgggccacagtggcctctacgcctgcttccaccgtgactcctggcacctgcgccaccaagtcctgctgcatgtgggcttgccgccgcgggagcctgtgctcagctgccgctccaacacttaccccaagggcttctactgcagctggcatctgcccacccccacctacattcccaacaccttcaatgtgactgtgctgcatggctccaaaattatggtctgtgagaaggacccagccctcaagaaccgctgccacattcgctacatgcacctgttctccaccatcaagtacaaggtctccataagtgtcagcaatgccctgggccacaatgccacagctatcacctttgacgagttcaccattgtgaagcctgatcctccagaaaatgtggtagcccggccagtgcccagcaaccctcgccggctggaggtgacgtggcagaccccctcgacctggcctgaccctgagtcttttcctctcaagttctttctgcgctaccgacccctcatcctggaccagtggcagcatgtggagctgtccgacggcacagcacacaccatcacagatgcctacgccgggaaggagtacattatccaggtggcagccaaggacaatgagattgggacatggagtgactggagcgtagccgcccacgctacgccctggactgaggaaccgcgacacctcaccacggaggcccaggctgcggagaccacgaccagcaccaccagctccctggcacccccacctaccacgaagatctgtgaccctggggagctgggcagcggcgggggaccctcggcacccttcttggtcagcgtccccatcactctggccctggctgccgctgccgccactgccagcagtctcttgatctgagcccggcaccccatgaggacatgcagagcacctgcagaggagcaggaggccggagctgagcctgcagaccccggtttctattttgcacacgggcaggaggaccttttgcattctcttcagacacaatttgtggagaccccggcgggcccgggcctgccgccccccagccctgccgcaccaagctggccctccttcctccctcaggggaggtgggccatgcagctaacccacccaccaaagaccccctcaccctggccccttgggctggaccctccaatgccagcgactcccaggagcccttgggggacgtgaggggagcctctcacatccgatttctcctcctgccccagcctcctgtctatcccagggtctctgttgccaccatcagattataagctcctgatgctgggggggcccagccatccccctccccccagcacccacaattttcagtcccctcccctctgccctgttttgtatacccctcccctgaccctgctcctatcccacagtatttaatgccctgtcagtcccttctagtctgactcaatggtaacttgctgtatttgaattttttatagatgtatatacagggtggggggagtgggcggttctcattaaacgtcaccatttcatgag

SEQ ID NO: 6098 - DNA, 822 bp, Homo sapiens
gtgcccatctatcagcaggctccgggctgaagattgcttctcttctctcctccaaggtctagtgacggagcccgcgcgcggcgccaccatgcggcagaaggcggtatcgcttttcttgtgctacctgctgctcttcacttgcagtggggtggaggcaggtgagaatgcgggtaaggatgcaggtaagaaaaagtgctcggagagctcggacagcggctccgggttctggaaggccctgaccttcatggccgtcggaggaggactcgcagtcgccgggctgcccgcgctgggcttcaccggcgccggcatcgcggccaactcggtggctgcctcgctgatgagctggtctgcgatcctgaatgggggcggcgtgcccgccggggggctagtggccacgctgcagagcctcggggctggtggcagcagcgtcgtcataggtaatattggtgccctgatgggctacgccacccacaagtatctcgatagtgaggaggatgaggagtagccagcagctcccagaacctcttcttccttcttggcctaactcttccagttaggatctagaactttgcctttttttttttttttttttttttgagatgggttctcactatattgtccaggctagagtgcagtggctattcacagatgcgaacatagtacactgcagcctccaactcctagcctcaagtgatcctcctgtctcaacctcccaagtaggattacaagcatgcgccgacgatgcccagaatccagaactttgtctatcactctccccaacaacctagatgtgaaaacagaataaacttcacccagaaaaca

SEQ ID NO: 6099 - DNA, 4702 bp, Homo sapiens
cgggagcggcgggggcggcgccgaggccgcgggcggggggaggagggccgcagccccggagaggggaaaaggcgggccggacggcgccagcagccagccccgaggacgcgagcggcaggtgtgcacagaggttctccactttgttttctgaactcgcggtcaggatggttttctctgtcaggcagtgtggccatgttggcagaactgaagaagttttactgacgttcaagatattccttgtcatcatttgtcttcatgtcgttctggtaacatccctggaagaagatactgataattccagtttgtcaccaccacctgctaaattatctgttgtcagttttgccccctcctccaatggtactccagatgttactttaagcttactcccttcaaacgaaacaggcgtcaaaccccagagaaatatctgcaatttgtcatctatttgcaatgactcagcattttttagaggtgagatcatgtttcaatatgataaagaaagcactgttccccagaatcaacatataacgaatggcaccttaactggagtcctgtctctaagtgaattaaaacgctcagagctcaacaaaaccctgcaaaccctaagtgagacttactttataatgtgtgctacagcagaggcccaaagcacattaaattgtacattcacaataaaactgaataatacaatgaatgcatgtgctgtaatagctgctttggaaagagtaaagattcgaccaatggaacactgctgctgttctgtcaggataccctgcccttcctccccagaagagttggaaaagcttcagtgtgacctgcaggatcccattgtctgtcttgctgaccatccacgtggcccaccattttcttccagccaatccatcccagtggtgcctcgggccactgtgctttcccaggtccccaaagctacctcttttgctgagcctccagattattcacctgtgacccacaatgttccctctccaataggggagattcaacccctttcaccccagccttcagctcccatagcttccagccctgccattgacatgcccccacagtctgaaacgatctcttcccctatgccccaaacccatgtctccggcaccccacctcctgtgaaagcctcattttcctctcccaccgtgtctgcccctgcgaatgtcaacactaccagcgcacctcctgtccagacagacatcgtcaacaccagcagtatttctgatcttgagaaccaagtgttgcagatggagaaggctctgtccttgggcagcctggagcctaacctcgcaggagaaatgatcaaccaagtcagcagactccttcattccccgcctgacatgctggcccctctggctcaaagattgctgaaagtagtggatgacattggcctacagctgaacttttcaaacacgactataagtctaacctccccttctttggctctggctgtgatcagagtgaatgccagtagtttcaacacaactacctttgtggcccaagaccctgcaaatcttcaggtttctctggaaacccaagctcctgagaacagtattggcacaattactcttccttcatcgctgatgaataatttaccagctcatgacatggagctagcttccagggttcagttcaatttttttgaaacacctgctttgtttcaggatccttccctggagaacctctctctgatcagctacgtcatatcatcgagtgttgcaaacctgaccgtcaggaacttgacaagaaacgtgacagtcacattaaagcacatcaacccgagccaggatgagttaacagtgagatgtgtattttgggacttgggcagaaatggtggcagaggaggctggtcagacaatggctgctctgtcaaagacaggagattgaatgaaaccatctgtacctgtagccatctaacaagcttcggcgttctgctggacctatctaggacatctgtgctgcctgctcaaatgatggctctgacgttcattacatatattggttgtgggctttcatcaatttttctgtcagtgactcttgtaacctacatagcttttgaaaagatccggagggattacccttccaaaatcctcatccagctgtgtgctgctctgcttctgctgaacctggtcttcctcctggactcgtggattgctctgtataagatgcaaggcctctgcatctcagtggctgtatttcttcattattttctcttggtctcattcacatggatgggcctagaagcattccatatgtacctggcccttgtcaaagtatttaatacttacatccgaaaatacatccttaaattctgcattgtcggttggggggtaccagctgtggttgtgaccatcatcctgactatatccccagataactatgggcttggatcctatgggaaattccccaatggttcaccggatgacttctgctggatcaacaacaatgcagtattctacattacggtggtgggatatttctgtgtgatatttttgctgaacgtcagcatgttcattgtggtcctggttcagctctgtcgaattaaaaagaagaagcaactgggagcccagcgaaaaaccagtattcaagacctcaggagtatcgctggccttacatttttactgggaataacttggggctttgccttctttgcctggggaccagttaacgtgaccttcatgtatctgtttgccatctttaataccttacaaggatttttcatattcatcttttactgtgtggccaaagaaaatgtcaggaagcaatggaggcggtatctttgttgtggaaagttacggctggctgaaaattctgactggagtaaaactgctactaatggtttaaagaagcagactgtaaaccaaggagtgtccagctcttcaaattccttacagtcaagcagtaactccactaactccaccacactgctagtgaataatgattgctcagtacacgcaagcgggaatggaaatgcttctacagagaggaatggggtctcttttagtgttcagaatggagatgtgtgccttcacgatttcactggaaaacagcacatgtttaacgagaaggaagattcctgcaatgggaaaggccgtatggctctcagaaggacttcaaagcggggaagcttacactttattgagcaaatgtgattcctttcttctaaaatcaaagcatgatgcttgacagtgtgaaatgtccaattttaccttttacacaatgtgagatgtatgaaaatcaactcattttattctcggcaacatctggagaagcataagctaattaagggcgatgattattattacaagaagaaaccaagacattacaccatggtttttagacatttctgatttggtttcttatctttcattttataagaaggttggttttaaacaatacactaagaatgactcctataaagaaaacaaaaaaaggtagtgaactttcagctaccttttaaagaggctaagttatctttgataacatcatataaagcaactgttgacttcagcctgttggtgagtttagttgtgcatgcctttgttgtatataagctaaattctagtgacccatgtgtcaaaaatcttacttctacatttttttgtatttattttctactgtgtaaatgtattcctttgtagaatcatggttgttttgtctcacgtgataattcagaaaatccttgctcgttccgcaaatcctaaagctccttttggagatgatataggatgtgaaatacagaaacctcagtgaaatcaagaaataatgatcccagccagactgagaaaatgtaagcagacagtgccacagttagctcatacagtgcctttgagcaagttaggaaaagatgcccccactgggcagacacagccctatgggctcatggtttgacaaacagagtggagagaccatattttagccccactcaccctcttgggtgcacgacctgtacagccaaacacagcatccaatatgaatacccatcccctgaccgcatccccagtagtcagattatagaatctgcaccaagatgtttagctttataccttggccacagagagggatgaactgtcatccagaccatgtgtcaggaaaattgtgaacgtagatgaggtacatacactgccgcttctcaaatccccagagcctttaggaacaggagagtagactaggattccttctcttaaaaaggtacatatatatggaaaaaaatcatattgccgttctttaaaaggcaactgcatggtacattgttgattgttatgactggtacactctggcccagccagagctataattgttttttaaatgtgtcttgaagaatgcacagtgacaaggggagtagctattgggaacagggaactgtcctacactgctattgttgctacatgtatcgagccttgattgctcctagttatatacagggtctatcttgcttcctacctacatctgcttgagcagtgcctcaagtacatccttattaggaacatttcaaaccccttttagttaagtctttcactaaggttctcttgcatatatttcaagtgaatgttggatctcagactaaccatagtaataatacacatttctgtgagtgctgacttgtctttgcaatatttcttttctgatttatttaattttcttgtatttatatgttaaaatcaaaaatgttaaaatcaatgaaataaatttgcagttaaga

SEQ ID NO: 6100 - DNA, 1395 bp, Homo sapiens
agtgcgcctgcgcgcgggtccggcgccgaggttcttgactgctgtgccggacgccaggtgtagccatgcagcgagccgattccgagcagccctccaagcgtccccgttgcgatgacagcccgagaaccccctcaaacaccccttccgcagaggcagactggtccccgggcctggaactccatcccgactacaagacatggggtccggagcaggtgtgctccttcctcaggcgcggtggctttgaagagccggtgctgctgaagaacatccgagaaaatgaaatcacaggcgcattactgccttgtcttgatgagtctcgttttgaaaatcttggagtaagttccttgggggagaggaagaagctgcttagttatatccagcgattggttcaaatccacgttgatacaatgaaggaagaagtaaaatatactcaaatccaatatacttgatctgtctggtagtgatacctaaataaggtaattaatgatcctatccatggccacattgagctccaccctctcctcgtccgaatcattgatacacctcaatttcaacgtcttcgatacatcaaacagctgggaggtggttactatgtttttccaggagcttcacacaatcgatttgagcatagtctaggggtggggtatctagcaggatgtctagttcacgcactgggtgaaaaacaaccagagctgcagataagtgaacgagatgttctctgtgttcagattgctggactttgtcatgatctcggtcatgggccattttctcacatgtttgatggacgatttattccacttgctcgcccggaggtgaaatggacgcatgaacaaggctcagttatgatgtttgagcaccttattaattctaatggaattaagcctgtcatggaacaatatggtctcatccctgaagaagatatttgctttataaaggaacaaattgtaggaccacttgaatcacctgtcgaagattcattgtggccatataaagggcgtcctgaaaacaaaagcttcctttatgagatagtatctaataaaagaaatggcattgatgtggacaaatgggattattttgccagggactgccatcatcttggaatccaaaataattttgattacaagcgctttattaagtttgcccgtgtctgtgaagtagacaatgagttgcgtatttgtgctagagataaggaagttggaaatctgtatgacatgttccacactcgcaactctttacaccgtagagcttatcaacacaaagttggcaacattattgatacaatgtaagaaacttgattgtcatttccctataaaattttccttgatacttggctagagtatcatactaggctcaactagacatttctagatgagttcaagtgaatattaagtgatt

SEQ ID NO: 6101 - DNA, 2709 bp, Homo sapiens
gctggaggctgtgctgagtgcccggtgcaggtgagccggtcctgcggagttgtgccgagtgcctgctgcagaccgaggctgggccaagatggtgtctgtgtttcgaagcgaggagatgtgtttgtcacaactgtttctccaggtggaagctgcatattgctgtgtggctgagctcggagagctcggattggttcagttcaaagatttaaatatgaatgtgaacagctttcaaaggaaatttgtgaatgaagtcagaaggtgtgaatcactggagagaatcctccgttttctggaagacgagatgcaaaatgagattgtagttcagttgctcgagaaaagcccactgaccccgctcccacgggaaatgattaccctggagactgttctagaaaaactggaaggagagttacaggaagccaaccagaaccagcaggccttgaaacaaagcttcctagaactgacagaactgaaatacctcctgaagaaaacccaagacttctttgagacggaaaccaatttagctgatgatttctttactgaggacacttctggcctcctggagttgaaagcagtgcctgcatatatgaccggaaagttggggttcatagccggtgtgatcaacagggagaggatggcttcctttgagcggttactgtggcgaatctgccgaggaaacgtgtacttgaagttcagtgagatggacgcccctctggaggatcctgtgacgaaagaagaaattcagaagaacatattcatcatattttaccaaggagagcagctcaggcagaaaatcaagaagatctgtgatgggtttcgagccactgtctacccttgcccagagcctgcggtggagcgcagagagatgttggagagcgtcaatgtgaggctggaagatttaatcaccgtcataacacaaacagagtctcaccgccagcgcctgctgcaggaagccgctgccaactggcactcctggctcatcaaggtgcagaagatgaaagctgtctaccacatcctgaacatgtgcaacatcgacgtcacccagcagtgtgtcatcgccgagatctggttcccggtggcagatgccacacgtatcaagagggcactggagcaaggcatggaactaagtggctcctccatggcccccatcatgaccacagtgcaatctaaaacagcccctcccacatttaacaggaccaataaattcacagctggcttccagaatattgttgatgcctatggtgtcggcagctaccgggagataaacccagccccctacaccatcatcactttccccttcctgttcgctgtgatgtttggagactgtggtcatggaaccgtgatgctcctggctgcactttggatgattctgaatgagagacgcttgctctcccagaagacagacaatgagatttggaacaccttcttccacgggcgctatctgatcctacttatgggcatcttctccatctacacgggtttgatctacaatgactgcttctccaagtccttgaacatctttggctcttcttggagtgtccaacccatgttcagaaacggcacatggaatactcatgtaatggaggaaagtctatatctgcagctggacccagccataccaggagtgtattttggaaatccatacccgtttgggattgatccgatttggaacttggcttcaaacaaactcacatttctgaactcgtataaaatgaagatgtcggtgatcctgggaattgtccagatggttttcggtgtcatcctcagccttttcaatcacatatacttcagaagaactctcaacatcattctgcaatttatccctgagatgatttttatcctgtgtctgtttggatacctggttttcatgatcattttcaaatggtgctgctttgacgtccatgtatctcagcacgcccccagcatcctcatccacttcatcaacatgtttctgtttaactacagtgactcttccaacgcacccctctacaaacatcagcaagaagtccaaagtttctttgtggttatggctttgatttctgtgccgtggatgcttctgattaagccgtttattcttagagccagtcatcggaaatcccagctgcaggcatccaggatccaagaagatgccactgagaacattgaaggtgatagctccagcccttctagccgttctggccagaggacttctgcagatacccacggggctctggacgaccatggagaagagttcaactttggagacgtctttgtccaccaagccatccacaccatcgagtactgcctgggctgcatttcaaacacagcctcctacctgcggctctgggccctcagcctggctcatgcacaactgtctgaagtgctctggactatggtgatgaacagcggccttcagacgcgaggctggggaggaatcgtcggggtttttattatttttgccgtatttgctgtcctgacagtagccatccttctgatcatggagggcctctctgctttcctgcacgccctgcgactgcactgggttgagttccagaacaagttctatgtcggggatggttacaagttttctccattctcctttaaacacatcctggatggcacagccgaggagtaggctgagggctgcacctcccacggtggtcaccatgccaatgaaggaagttcagtcttgtctttgatatcagcccctgcaaggcgctcaatgggaaggtt

SEQ ID NO: 6102 - DNA, 2697 bp, Homo sapiens
tccctcccccctccctgccctcctcctcctcctcccctatgtggtgctcccgggagcccagcccaacactggagcgtctcctgctcgcgcacgccagaagcagctcggggtctctccgccgccccttggccatggccgctgtgccgacggcgcccgctcccctgcgctccaggggcccccgccgctgcagccgcagccgccgcagcttctgagcccaaggggccgccgctgcagccgccgccgccgccgctcgcccgcccggatcccgcctgcggcagttgccgcacaacatgctacctgcggccgccccggcggctcctggaaccccggttcgcggcgatgccagccaccccagcgaagccgccgcagttcagtgcttggataatttgaaagtacaatagttggtttccctgtccacccgccccacttcgcttgccatcacagcacgcctatcggatgtgagaggagaagtcccgctgctcgggcactgtctatatacgcctaacacctacatatattttaaaaacattaaatataattaacaatcaaaagaaagaggagaaaggaagggaagcattactgggttactatgcacttgcgactgatttcttggctttttatcattttgaactttatggaatacatcggcagccaaaacgcctcccggggaaggcgccagcgaagaatgcatcctaacgttagtcaaggctgccaaggaggctgtgcaacatgctcagattacaatggatgtttgtcatgtaagcccagactattttttgctctggaaagaattggcatgaagcagattggagtatgtctctcttcatgtccaagtggatattatggaactcgatatccagatataaataagtgtacaaaatgcaaagctgactgtgatacctgtttcaacaaaaatttctgcacaaaatgtaaaagtggattttacttacaccttggaaagtgccttgacaattgcccagaagggttggaagccaacaaccatactatggagtgtgtcagtattgtgcactgtgaggtcagtgaatggaatccttggagtccatgcacgaagaagggaaaaacatgtggcttcaaaagagggactgaaacacgggtccgagaaataatacagcatccttcagcaaagggtaacctgtgtcccccaacaaatgagacaagaaagtgtacagtgcaaaggaagaagtgtcagaagggagaacgaggaaaaaaaggaagggagaggaaaagaaaaaaacctaataaaggagaaagtaaagaagcaatacctgacagcaaaagtctggaatccagcaaagaaatcccagagcaacgagaaaacaaacagcagcagaagaagcgaaaagtccaagataaacagaaatcggtatcagtcagcactgtacactagagggttccatgagattattgtagactcatgatgctgctatctcaaccagatgcccaggacaggtgctctagccattaggaccacaaatggacatgtcagttattgctctgtctaaacaacattcccagtagttgctatattcttcatacaagcatagttaacaacaaagagccaaaagatcaaagaagggatactttcagatggttgtcttgtgtgcttctctgcatttttaaaagacaagacattcttgtacatattatcaataggctataagatgtaacaacgaaatgatgacatctggagaagaaacatcttttccttataaaaatgtgttttcaagctgttgttttaagaagcaaaagatagttctgcaaattcaaagatacagtatcccttcaaaacaaataggagttcagggaagagaaacatccttcaaaggacagtgttgttttgaccgggagatctagagagtgctcagaattagggcctggcatttggaatcacaggatttatcatcacagaaacaactgttttaagattagttccatcactctcatcctgtatttttataagaaacacaagagtgcataccagaattgaatataccatatgggattggagaaagacaaatgtggaagaaatcatagagctggagactacttttgtgctttacaaaactgtgaaggattgtggtcacctggaacaggtctccaatctatgttagcactatgtggctcagcctctgttaccccttggattatatatcaacctgtaaacatgtgcctgtaacttacttccaaaaacaaaatcatacttattagaagaaaattctgattttatagaaaaaaaatagagcaaggagaatataacatgtttgcaaagtcatgtgttttctttctcaatgagggaaaaacaattttattacctgcttaatggtccacctggaactaaaagggatactattttctaacaaggtatatctagtaggggagaaagccaccacaataaatatatttgttaatagtttttcaagttttgttcactctgttttattgtttgttttattgagaaattcttactcttagagactcatgaattaagaaagagaattctgctaactcagagaacctggttcctatgtaattcagaatatattacatttctcagtaatatttgttttttgaatccacctttatctgagccaatggagatttacttatagcgtattaggagatatttattccattttcttattttaatcaacattctaattatagacacatgggcct

SEQ ID NO: 6103 - DNA, 2153 bp, Homo sapiens
ccattttcaaacagtccctcctgggagaacacagacaggcagaggattacaacacaaggcagcaagcactgggagacgaaagttttggcatctgttccctggctgtgccaagatgggcgattggagcttcctgggaaatttcctggaggaagtacacaagcactcgaccgtggtaggcaaggtctggctcactgtcctcttcatattccgtatgctcgtgctgggcacagctgctgagtcttcctggggggatgagcaggctgatttccggtgtgatacgattcagcctggctgccagaatgtctgctacgaccaggctttccccatctcccacattcgctactgggtgctgcagatcatcttcgtctccacgccctctctggtgtacatgggccacgccatgcacactgtgcgcatgcaggagaagcgcaagctacgggaggccgagagggccaaagaggtccggggctctggctcttacgagtacccggtggcagagaaggcagaactgtcctgctgggaggaagggaatggaaggattgccctccagggcactctgctcaacacctatgtgtgcagcatcctgatccgcaccaccatggaggtgggcttcattgtgggccagtacttcatctacggaatcttcctgaccaccctgcatgtctgccgcaggagtccctgtccccacccggtcaactgttacgtatcccggcccacagagaagaatgtcttcattgtctttatgctggctgtggctgcactgtccctcctccttagcctggctgaactctaccacctgggctggaagaagatcagacagcgatttgtcaaaccgcggcagcacatggctaagtgccagctttctggcccctctgtgggcatagtccagagctgcacaccaccccccgactttaatcagtgcctggagaatggccctgggggaaaattcttcaatcccttcagcaataatatggcctcccaacaaaacacagacaacctggtcaccgagcaagtacgaggtcaggagcagactcctggggaaggtttcatccaggttcgttatggccagaagcctgaggtgcccaatggagtctcaccaggtcaccgccttccccatggctatcatagtgacaagcgacgtcttagtaaggccagcagcaaggcaaggtcagatgacctatcagtgtgaccctcctttatgggaggatcaggaccaggtgggaacaaaggaggctcagagaagaaagacgtgtcccttctgaactgatgctttctcactgtcatcactgcttggctcctttgagccccgggtctcaatgacgttgctcattaattctagaaactataaccagggctctgggatagtaagagaggtgacaacccacccagactgcagttccctccccaccctctacccagtatacgaagcctttcagattactcatgaaacagggtagagggaaagaagggaagcatggcaaaagctggcctggaagggatagccagagggatagaatgactctctctctacataccagcagcataccaaatgcgttctctaagttcctacctccttgacctgatcaccctccctcctccaaggaagagctcaaagttcccagccaatagacagcatgaatcaaggaacttgcattatatgtgctcttgaatctgttgtctccatggaccattcctcggagtagtggtgagatggccttgggttgcccttggcttctcctccctctactcagccttaaaaagggcttcttggaactttaccagcagcctcagctttacaaatgccttggtatgtacctctggcaaatgccccaccttggtgatgttgcaacctttccttctgctagggtgtacacctagcctgtgcaggtgtcagccctgctagggagtcactgtacacacaaactctactggaattcctgccaacatctgtcaccctgcagctcctttacagttcaatccaatgatagaaaccatcccttccctttctcccttggctgttcacccagccattccctgaaggccttaccaacaggaatatccaagaagctgttgtcccctctcgaaccctgaccagatcatcagccactgaggccagtggaatttccccaggccttgttaaaacaaagaaagca

SEQ ID NO: 6104 - DNA, 2287 bp, Homo sapiens
cagggctggggtaaggccaggaaaattcaacaggcactaaaaatattgtcaagctgctgacagcacagccagaggccccaggcctgggtggcatccagacagccctgtcctttctagacagccccctcctccaggctcagggacctgtctggctgtgagctcccaggaggtcccaggggtgtgacctccctccctccctccctccctcttcccttcaccccaggccagcccagggccagctataaagctggcccagcctggctctcagcacacccagctgcctgagaccctccttcaacctccctagaggacagccccactctgcctcctgctcccccagggcagcaccatgtggcccctgtggctctgctgggcactctgggtgctgcccctggctggccccggggcggccctgaccgaggagcagctcctgggcagcctgctgcggcagctgcagctcagcgaggtgcccgtactggacagggccgacatggagaagctggtcatccccgcccacgtgagggcccagtatgtagtcctgctgcggcgcagccacggggaccgctcccgcggaaagaggttcagccagagcttccgagaggtggccggcaggttcctggcgtcggaggccagcacacacctgctggtgttcggcatggagcagcggctgccgcccaacagcgagctggtgcaggccgtgctgcggctcttccaggagccggtccccaaggccgcgctgcacaggcacgggcggctgtccccgcgcagcgcccaggcccgggtgaccgtcgagtggctgcgcgtccgcgacgacggctccaaccgcacctccctcatcgactccaggctggtgtccgtccacgagagcggctggaaggccttcgacgtgaccgaggccgtgaacttctggcagcagctgagccggccccggcagccgctgctgctacaggtgtcggtgcagagggagcatctgggcccgctggcgtccggcgcccacaagctggtccgctttgcctcgcagggggcgccagccgggcttggggagccccagctggagctgcacaccctggacctcagggactatggagctcagggcgactgtgaccctgaagcaccaatgaccgagggcacccgctgctgccgccaggagatgtacattgacctgcaggggatgaagtgggccaagaactgggtgctggagcccccgggcttcctggcttacgagtgtgtgggcacctgccagcagcccccggaggccctggccttcaattggccatttctggggccgcgacagtgtatcgcctcggagactgcctcgctgcccatgatcgtcagcatcaaggagggaggcaggaccaggccccaggtggtcagcctgcccaacatgagggtgcagaagtgcagctgtgcctcggatggggcgctcgtgccaaggaggctccagccataggcgcctggtgtatccattgagccctctaactgaacgtgtgcatagaggtggtcttaatgtaggtcttaactttatacttagcaagttactccatcccaatttagtgctcctgtgtgaccttcgccctgtgtccttccatttcctgtctttcccgtccatcacccatcctaagcacttacgtgagtaaataatgcagctcagatgctgagctctagtaggaaatgctggcatgctgattacaagatacagctgagcaatgcacacattttcagctgggagtttctgttctctggcaaattcttcactgagtctggaacaataataccctatgattagaactggggaaacagaactgaattgctgtgttatatgaggaattaaaaccttcaaatctctatttcccccaaatactgacccattctggacttttgtaaacatacctaggcccctgttcccctgagagggtgctaagaggaaggatgaagggcttcaggctgggggcagtggacagggaattgggatacctggattctggttctgacagggccacaagctaggatctctaacaaacgcagaaggctttggctcgtcatttcctcttaaaaaggaggagctgggcttcagctctaagaacttcattgccctggggatcagacagcccctacctacccctgcccactcctctggagactgagccttgcccgtgcatatttaggtcatttcccacactgtcttagagaacttgtcaccagaaaccacatgtatttgcatgttttttgttaatttagctaaagcaattgaatgtagatactcagaagaaataaaaaatgatgtttc

SEQ ID NO: 6105 - DNA, 725 bp, Homo sapiens
gacagccagggttagatgttctgaggaggcgggagcaaccgagagagcacgtgagcatctgtcctttctacccgttcctctttatctttagtgttcagtagcagcggggatagcccggggcccggtgtatggccacggagttacagtgtccggactccatgccctgtcacaaccagcaagtaaactctgcctcaaccccaagtcccgagcagctgcgacctggcgatctgatcctggaccacgcagggggaaacagagcctccagggccaaggtgattctcctcacggggtacgcccattctagcctgccggccgagctggactctggggcctgcggcggctccagcctcaactcagagggcaacagtggtagtggtgacagtagcagctatgacgcaccagctggcaactccttcctagaggactgcgaactctcccggcagatcggggcgcagcttaagctgctgcctatgaatgatcagatacgggagctacagaccatcatccgtgacaactttttttccagtaggagagattacggttatgatttaaaatgaagtgtgtggaatgaagaagatctggagtctggttcatattaaaacatccctgttaacaaataattcagcctagcgttgtgtctaaaatagagcctcagagaatacatgcagcttcattgatacaagacagccagtagaggtgacttcatgttttctgcggatcgtttg

SEQ ID NO: 6106 - DNA, 9176 bp, Homo sapiens
ctggtggtccagtacctccaaagatatggaatacactcctgaaatatcctgaaaacttttttttttcagaatcctttaataagcagttatgtcaatctgaaagttgcttacttgtactttatattaatagctattcttgtttttcttatccaaagaaaaatcctctaatccccttttcacatgatagttgttaccatgtttaggcattagtcacatcaacccctctcctctcccaaacttctcttcttcaaatcaaactttattagtccctcctttataatgattccttgcctcgttttatccagatcaattttttttcactttgatgcccagagctgaagaaatggactactgtataaattattcattgccaagagaataattgcattttaaacccatattataacaaagaataatgattatattttgtgatttgtaacaaataccctttattttcccttaactattgaattaaatattttaattatttgtattctctttaactatcttggtatattaaagtattatcttttatatatttatcaatggtggacacttttataggtactctgtgtcatttttgatactgtaggtatcttatttcatttatctttattcttaatgtacgaattcataatatttgattcagaacaaatttatcactaattaacagagtgtcaattatgctaacatctcatttactgattttaatttaaaacagtttttgttaacatgcatgtttagggttggcttcttaataatttcttcttcctcttctctctctcctcttcttttggtcagtgttgtgcgggttaatacaacaaactgtaacaagtgtacctggtatggacttgttgtccgggacgtacattttcgcggtcctgctagcatgcgtggtgttccactctggcgcccaggagaaaaactacaccatccgagaagaaatgccagaaaacgtcctgataggcgacttgttgaaagaccttaacttgtcgctgattccaaacaagtccttgacaactgctatgcagttcaagctagtgtacaagaccggagatgtgccactgattcgaattgaagaggatactggtgagatcttcactactggcgctcgcattgatcgtgagaaattatgtgctggtatcccaagggatgagcattgcttttatgaagtggaggttgccattttgccggatgaaatatttagactggttaagatacgttttctgatagaagatataaatgataatgcaccattgttcccagcaacagttatcaacatatcaattccagagaactcggctataaactctaaatatactctcccagcggctgttgatcctgacgtaggaataaacggagttcaaaactacgaactaattaagagtcaaaacatttttggcctcgatgtcattgaaacaccagaaggagacaagatgccacaactgattgttcaaaaggagttagatagggaagagaaggatacctacgtgatgaaagtaaaggttgaagatggtggctttcctcaaagatccagtactgctattttgcaagtgagtgttactgatacaaatgacaaccacccagtctttaaggagacagagattgaagtcagtataccagaaaatgctcctgtaggcacttcagtgacacagctccatgccacagatgctgacataggtgaaaatgccaagatccacttctctttcagcaatctagtctccaacattgccaggagattatttcacctcaatgccaccactggacttatcacaatcaaagaaccactggatagggaagaaacaccaaaccacaagttactggttttggcaagtgatggtggattgatgccagcaagagcaatggtgctggtaaatgttacagatgtcaatgataatgtcccatccattgacataagatacatcgtcaatcctgtcaatgacacagttgttctttcagaaaatattccactcaacaccaaaattgctctcataactgtgacggataaggatgcggaccataatggcagggtgacatgcttcacagatcatgaaatccctttcagattaaggccagtattcagtaatcagttcctcctggagactgcagcatatcttgactatgagtccacaaaagaatatgccattaaattactggctgcagatgctggcaaacctcctttgaatcagtcagcaatgctcttcatcaaagtgaaagatgaaaatgacaatgctccagttttcacccagtctttcgtaactgtttctattcctgagaataactctcctggcatccagttgacgaaagtaagtgcaatggatgcagacagtgggcctaatgctaagatcaattacctgctaggccctgatgctccacctgaattcagcctggattgtcgtacaggcatgctgactgtagtgaagaaactagatagagaaaaagaggataaatatttattcacaattctggcaaaagataacggggtaccacccttaaccagcaatgtcacagtctttgtaagcattattgatcagaatgacaatagcccagttttcactcacaatgaatacaacttctatgtcccagaaaaccttccaaggcatggtacagtaggactaatcactgtaactgatcctgattatggagacaattctgcagttacgctctccattttagatgagaatgatgacttcaccattgattcacaaactggtgtcatccgaccaaatatttcatttgatagagaaaaacaagaatcttacactttctatgtaaaggctgaggatggtggtagagtatcacgttcttcaagtgccaaagtaaccataaatgtggttgatgtcaatgacaacaaaccagttttcattgtccctccttccaactgttcttatgaattggttctaccgtccactaatccaggcacagtggtctttcaggtaattgctgttgacaatgacactggcatgaatgcagaggttcgttacagcattgtaggaggaaacacaagagatctgtttgcaatcgaccaagaaacaggcaacataacattgatggagaaatgtgatgttacagaccttggtttacacagagtgttggtcaaagctaatgacttaggacagcctgattctctcttcagtgttgtaattgtcaatctgttcgtgaatgagtcggtgaccaatgctacactgattaatgaactggtgcgcaaaagcactgaagcaccagtgaccccaaatactgagatagctgatgtatcctcaccaactagtgactatgtcaagatcctggttgcagctgttgctggcaccataactgtcgttgtagttattttcatcactgctgtagtaagatgtcgccaggcaccacaccttaaggctgctcagaaaaacaagcagaattctgaatgggctaccccaaacccagaaaacaggcagatgataatgatgaagaaaaagaaaaagaagaagaagcattcccctaagaacttgctgcttaattttgtcactattgaagaaactaaggcagatgatgttgacagtgatggaaacagagtcacactagaccttcctattgatctagaagagcaaacaatgggaaagtacaattgggtaactacacctactactttcaagcccgacagccctgatttggcccgacactacaaatctgcctctccacagcctgccttccaaattcagcctgaaactcccctgaattcgaagcaccacatcatccaagaactgcctctcgataacacctttgtggcctgtgactctatctccaagtgttcctcaagcagttcagatccctacagcgtttctgactgtggctatccagtgacgaccttcgaggtacctgtgtccgtacacaccagaccgccaatgaaggaggttgtgcgatcttgcacccccatgaaagagtctacaactatggagatctggattcatccccaaccacagcggaaatctgaagggaaagtggcaggaaagtcccagcggcgtgtcacatttcacctgccagaaggctctcaggaaagcagcagtgatggtggactgggagaccatgatgcaggcagccttaccagcacatctcatggcctgccccttggctatcctcaggaggagtactttgatcgtgctacacccagcaatcgcactgaaggggatggcaactccgatcctgaatctactttcatacctggactaaagaaagctgcagaaataactgttcaaccaactgtggaagaggcctctgacaactgcactcaagaatgtctcatctatggccattctgatgcctgctggatgccggcatctctggatcattccagctcttcgcaagcacaggcctctgctctatgccacagcccaccactgtcacaggcctctactcagcaccacagcccacgagtgacacagaccattgctctctgccacagccctccagtgacacagaccatcgcattgtgccacagcccaccaccgatacaggtgtctgctctccaccacagtcctcctctagtgcaggctactgcacttcaccacagcccaccatcagcacaggcctcagccctctgctacagccctcctttagcacaggctgctgcaatcagccacagctctcctctgccacaggttattgccctccatcgtagtcaggcccaatcatcagtcagtttgcagcaaggttgggtgcaaggtgctgatgggctatgctctgttgatcagggagtgcaaggtagtgcaacatctcagttttacaccatgtctgaaagacttcatcccagtgatgattcaattaaagtcattcctttgacaaccttcactccacgccaacaggccagaccgtccagaggtgattcccccattatggaagaacatcccttgtaaagctaaaatagttacttcaaattttcagaaaagatgtatatagtcaaaatttaagatacaattccaatgagtattctgattatcagatttgtaaataactatgtaaatagaaacagataccagaataaatctacagctagacccttagtcaatagttaaccaaaaaattgcaatttgtttaattcagaatgtgtatttaaaaagaaaaggaatttaacaatttgcatccccttgtacagtaaggcttatcatgacagagcgcactatttctgatgtacagtattttttgttgtttttatcatcatgtgcaatattactgatttgtttccatgctgattgtgtggaaccagtatgtagcaaatggaaagcctagaaatatcttattttctaagtttacctttagtttacctaaacttttgttcagataacgttaaaaggtatacgtactctagcctttttttgggctttctttttgatttttgtttgttgttttcagtttttttgttgttgttagtgagtctcccttcaaaatacgcagtaggtagtgtaaatactgcttgtttgtgtctctctgctgtcatgttttctaccttattccaatactatattgttgataaaatttgtatatacattttcaataaagaatatgtataaactgtacagatctagatctacaacctatttctctactctttagtagagttcgagacacagaagtgcaataactgccctaattaagcaactatttgttaaaaagggcctctttttactttaatagtttagtgtaaagtacatcagaaataaagctgtatctgccattttaagcctgtagtccattattacttgggtctttacttctgggaatttgtatgtaacagcctagaaaattaaaaggaggtggatgcatccaaagcacgagtcacttaaaatatcgacggtaaactactattttgtagagaaactcaggaagatttaaatgttgatttgacagctcaataggctgttaccaaagggtgttcagtaaaaataacaaatacatgtaactgtagataaaaccatatactaaatctataagactaagggatttttgttattctagctcaacttactgaagaaaaccactaataacaacaagaatatcaggaaggaacttttcaagaaatgtaattataaatctacatcaaacagaattttaaggaaaaatgcagagggagaaataaggcacatgactgcttcttgcagtcaacaagaaataccaataacacacacagaacaaaaaccatcaaaatctcatatatgaaataaaatatattcttctaagcaaagaaacagtactattcatagaaaacattagttttcttctgttgtctgttatttccttcttgtatcctcttaactggccattatcttgtatgtgcacattttataaatgtacagaaacatcaccaacttaattttcttccatagcaaaactgagaaaataccttgtttcagtataacactaaaccaagagacaattgatgtttaatgggggcggttggggtgggggggggagtcaatatctcctattgattaacttagacatagattttgtaatgtataacttgatatttaatttatgattaaactgtgtgtaaattttgtaacataaactgtggtaattgcataatttcattggtgaggatttccactgaatattgagaaagtttcttttcatgtgcccagcaggttaagtagcgttttcagaatatacattattcccatccattgtaaagttccttaagtcatatttgactgggcgtgcagaataacttcttaacttttaactatcagagtttgattaataaaattaattaatgttttttctccttcgtgttgttaatgttccaagggatttggagcatactggttttccaggtgcatgtgaatcccgaaggactgatgatatttgaatgtttattaaattattatcatacaaatgtgttgatattgtggctattgttgatgttgaaaattttaaacttggggaagattaagaaaagaaccaatagtgacaaaaatcagtgcttccagtagattttagaacattctttgcctcaaaaaacctgcaaagatgatgtgagattttttcttgtgttttaattattttcacattttctctctgcaaaactttagttttctgatgatctacacacacacacacacacacacgtgcacacacacacacatttaaatgatataaaaagaagaggttgaaagattattaaataacttatcaggcatctcaatggttactatctatgttagtgaaaatcaaataggactcaaagttggatatttgggatttttcttctgacagtataatttattgagttactagggaggttcttaaatcctcatatctggaaacttgtgacgttttgacacctttcctatagatgatataggaatgaaccaatacgcttttattaccctttctaactctgattttataatcagacttagattgtgtttagaatattaaatgactgggcaccctcttcttggtttttaccagagaggctttgaatggaagcaggctgagagtagccaaagaggcaaggggtattagcccagttattctcccctatgccttccttctctttctaagcgtccactaggtctggccttggaaacctgttacttctagggcttcagatctgatgatatctttttcatcacattacaagttatttctctgactgaatagacagtggtataggttgacacagcacacaagtggctattgtgatgtatgatgtatgtagtcctacaactgcaaaacgtcttactgaaccaacaatcaaaaaatggttctgttttaaaaaggattttgtttgatttgaaattaaaacttcaagctgaatgacttatatgagaataatacgttcaatcaaagtagttattctattttgtgtccatattccattagattgtgattattaattttctagctatggtattactatatcacacttgtgagtatgtattcaaatactaagtatcttatatgctacgtgcatacacattcttttcttaaactttacctgtgttttaactaatattgtgtcagtgtattaaaaattagcttttacatatgatatctacaatgtaataaatttagagagtaattttgtgtattcttatttacttaacattttacttttaattatgtaaatttggttagaaaataataataaatggttagtgctattgtgtaatggtagcagttacaaagagcctctgccttcccaaactaatatttatcacacatggtcattaaatgggaaaaaaatagactaaacaaatcacaaattgttcagttcttaaaatgtaattatgtcacacacacaaaaaatccttttcaatcctgagaaaattaaaggcgttttactcacatggctatttcaacattagttttttttgtttgtttctttttcatggtattactgaaggtgtgtatactccctaatacacatttatgaaaatctacttgtttaggcttttatttatactcttctgatttatattttttattataattattatttcttatctttcttcttttatattttttggaaaccaaatttatagttagtttaggtaaactttttattatgaccattagaaactattttgaatgcttccaactggctcaattggccgggaaaacatgggagcaagagaagctgaaatatatttctgcaagaacctttctatattatgtgccaattaccacaccagatcaattttatgcagaggccttaaaatattctttcacagtagctttcttacactaaccgtcatgtgcttttagtaaatatgatttttaaaagcagttcaagttgacaacagcagaaacagtaacaaaaaaatctgctcagaaaaatgtatgtgcacaaataaaaaaaattaatggcaattgtttagtgattgtaagtgatactttttaaagagtaaactgtgtgaaatttatactatccctgcttaaaatattaagatttttatgaaatatgtatttatgtttgtattgtgggaagattcctcctctgtgatatcatacagcatctgaaagtgaacagtatcccaaagcagttccaaccatgctttggaagtaagaaggttgactattgtatggccaaggatggcagtatgtaatccagaagcaaacttgtattaattgttctatttcaggttctgtattgcatgttttcttattaatatatattaataaaagttatgagaaat

SEQ ID NO: 6107 - DNA, 1047 bp, Homo sapiens; identical to SEQ ID NO: 73

SEQ ID NO: 6108 - DNA, 4622 bp, Homo sapiens
tcctgctgggccacaggcgagcgctttatttctggagctgagggctaaaacttttttgacttttcttctcctcaacatctgaatcatgccatgtgcccagaggagctggcttgcaaacctttccgtggtggctcagctccttaactttggggcgctttgctatgggagacagcctcagccaggcccggttcgcttcccggacaggaggcaagagcattttatcaagggcctgccagaataccacgtggtgggtccagtccgagtagatgccagtgggcattttttgtcatatggcttgcactatcccatcacgagcagcaggaggaagagagatttggatggctcagaggactgggtgtactacagaatttctcacgaggagaaggacctgttttttaacttgacggtcaatcaaggatttctttccaatagctacatcatggagaagagatatgggaacctctcccatgttaagatgatggcttcctctgcccccctctgccatctcagtggcacggttctacagcagggcaccagagttgggacggcagccctcagtgcctgccatggactgactggatttttccaactaccacatggagactttttcattgaacccgtgaagaagcatccactggttgagggagggtaccacccgcacatcgtttacaggaggcagaaagttccagaaaccaaggagccaacctgtggattaaaggacagtgttaacatctcccagaagcaagagctatggcgggagaagtgggagaggcacaacttgccaagcagaagcctctctcggcgttccatcagcaaggagagatgggtggagacactggtggtggccgacacaaagatgattgaataccatgggagtgagaatgtggagtcctacatcctcaccatcatgaacatggtcactgggttgttccataacccaagcattggcaatgcaattcacattgttgtggttcggctcattctactcgaagaagaagagcaaggactgaaaatagttcaccatgcagaaaagacactgtctagcttctgcaagtggcagaagagtatcaatcccaagagtgacctcaatcctgttcatcacgacgtggctgtccttctcaccagaaaggacatctgtgctggtttcaatcgcccctgcgagaccctgggcctgtctcacctttcaggaatgtgtcagcctcaccgcagttgtaacatcaatgaagattcgggactccctctggctttcacaattgcccatgagctaggacacagcttcggcatccagcatgatgggaaagaaaatgactgtgagcctgtgggcagacatccgtacatcatgtcccgccagctccagtacgatcccactccgctgacatggtccaagtgcagcgaggagtacatcacccgcttcttggaccgaggctgggggttctgtcttgatgacatacctaaaaagaaaggcttgaagtccaaggtcattgcccccggagtgatctatgatgttcaccaccagtgccagctacaatatggacccaatgctaccttctgccaggaagtagaaaacgtctgccagacactgtggtgctccgtgaagggcttttgtcgctctaagctggacgctgctgcagatggaactcaatgtggtgagaagaagtggtgtatggcaggcaagtgcatcacagtggggaagaaaccagagagcattcctggaggctggggccgctggtcaccctggtcccactgttccaggacctgtggggctggagtccagagcgcagagaggctctgcaacaaccccgagccaaagtttggagggaaatattgcactggagaaagaaaacgctatcgcttgtgcaacgtccacccctgtcgctcagaggcaccaacatttcggcagatgcagtgcagtgaatttgacactgttccctacaagaatgaactctaccactggtttcccatttttaacccaggttatgttgacattgggctcattccaaaaggagcaagggacataagagtgatggaaattgagggagctggaaacttcctggccatcaggagtgaagatcctgaaaaatattacctgaatggagggtttattatccagtggaacgggaactataagctggcagggactgtctttcagtatgacaggaaaggagacctggaaaagctgatggccacaggtcccaccaatgagtctgtgtggatccagcttctattccaggtgactaaccctggcatcaagtatgagtacacaatccagaaagatggccttgacaatgatgttgagcagcagatgtacttctggcagtacggccactggacagagtgcagtgtgacctgcgggacaggtatccgccgccaaactgcccattgcataaagaagggccgcgggatggtgaaagctacattctgtgacccagaaacacagcccaatgggagacagaagaagtgccatgaaaaggcttgtccacccaggtggtgggcaggggagtgggaagcatgctcggcgacatgcgggccccacggggagaagaagcgaaccgtgctgtgcatccagaccatggtctctgacgagcaggctctcccgcccacagactgccagcacctgctgaagcccaagaccctcctttcctgcaacagagacatcctgtgcccctcggactggacagtgggcaactggagtgagtgttctgtttcctgtggtggtggagtgcggattcgcagtgtcacatgtgccaagaaccatgatgaaccttgcgatgtgacaaggaaacccaacagccgagctctgtgtggcctccagcaatgcccttctagccggagagttctgaaaccaaacaaaggcactatttccaatggaaaaaacccaccaacactaaagcccgtccctccacctacatccaggcccagaatgctgaccacacccacagggcctgagtctatgagcacaagcactccagcaatcagcagccctagtcctaccacagcctccaaagaaggagacctgggtgggaaacagtggcaagatagctcaacccaacctgagctgagctctcgctatctcatttccactggaagcacttcccagcccatcctcacttcccaatccttgagcattcagccaagtgaggaaaatgtttccagttcagatactggtcctacctcggagggaggccttgtagctacaacaacaagtggttctggcttgtcatcttcccgcaaccctatcacttggcctgtgactccattttacaataccttgaccaaaggtccagaaatggagattcacagtggctcaggggaagaaagagaacagcctgaggacaaagatgaaagcaatcctgtaatatggaccaagatcagagtacctggaaatgacgctccagtggaaagtacagaaatgccacttgcacctccactaacaccagatctcagcagggagtcctggtggccacccttcagcacagtaatggaaggactgctccccagccaaaggcccactacttccgaaactgggacacccagagttgaggggatggttactgaaaagccagccaacactctgctccctctgggaggagaccaccagccagaaccctcaggaaagacggcaaaccgtaaccacctgaaacttccaaacaacatgaaccaaacaaaaagttctgaaccagtcctgactgaggaggatgcaacaagtctgattactgagggctttttgctaaatgcctccaattacaagcagctcacaaacggccacggctctgcacactggatcgtcggaaactggagcgagtgctccaccacatgtggcctgggggcctactggagaagggtggagtgcagcacccagatggattctgactgtgcggccatccagagacctgaccctgcaaaaagatgccacctccgtccctgtgctggctggaaagtgggaaactggagcaagtgctccagaaactgcagtgggggcttcaagatacgcgagattcagtgcgtggacagccgggaccaccggaacctgaggccatttcactgccagttcctggccggcattcctcccccattgagcatgagctgtaacccggagccctgtgaggcgtggcaggtggagccttggagccagtgctccaggtcctgtggaggtggagttcaggagagaggagtgttctgtccaggaggcctctgtgattggacaaaaagacccacatccaccatgtcttgcaatgagcacctgtgctgtcactgggccactgggaactgggacctgtgttccacttcctgtggaggtggctttcagaagaggactgtccaatgtgtgccctcagagggcaataaaactgaagaccaagaccaatgtctatgtgatcacaaacccagacctccagaattcaaaaaatgcaaccagcaggcctgcaagaaaagtgccgatttactttgcactaaggacaaactgtcagccagtttctgccagacactgaaagccatgaagaaatgttctgtgcccaccgtgagggctgagtgctgcttctcgtgtccccagacacacatcacacacacccaaaggcaaagaaggcaacggttgctccaaaagtcaaaagaactctaagcccaaa

SEQ ID NO: 6109 - DNA, 1196 bp, Homo sapiens
agcagcaggaggaggcagagcacagcatcgtcgggaccagactcgtctcaggccagttgcagccttctcagccaaacgccgaccaaggaaaactcactaccatgagaattgcagtgatttgcttttgcctcctaggcatcacctgtgccataccagttaaacaggctgattctggaagttctgaggaaaagcagaatgctgtgtcctctgaagaaaccaatgactttaaacaagagacccttccaagtaagtccaacgaaagccatgaccacatggatgatatggatgatgaagatgatgatgaccatgtggacagccaggactccattgactcgaacgactctgatgatgtagatgacactgatgattctcaccagtctgatgagtctcaccattctgatgaatctgatgaactggtcactgattttcccacggacctgccagcaaccgaagttttcactccagttgtccccacagtagacacatatgatggccgaggtgatagtgtggtttatggactgaggtcaaaatctaagaagtttcgcagacctgacatccagtaccctgatgctacagacgaggacatcacctcacacatggaaagcgaggagttgaatggtgcatacaaggccatccccgttgcccaggacctgaacgcgccttctgattgggacagccgtgggaaggacagttatgaaacgagtcagctggatgaccagagtgctgaaacccacagccacaagcagtccagattatataagcggaaagccaatgatgagagcaatgagcattccgatgtgattgatagtcaggaactttccaaagtcagccgtgaattccacagccatgaatttcacagccatgaagatatgctggttgtagaccccaaaagtaaggaagaagataaacacctgaaatttcgtatttctcatgaattagatagtgcatcttctgaggtcaattaaaaggagaaaaaatacaatttctcactttgcatttagtcaaaagaaaaaatgctttatagcaaaatgaaagagaacatgaaatgcttctttctcagtttattggttgaatgtgtatctatttgagtctggaaataactaatgtgtttgataattagtttagtttgtggcttcatggaaactccctgtaaactaaaagcttcagggttatgtctatgttcattctatagaaga

SEQ ID NO: 6110 - DNA, 2310 bp, Homo sapiens; identical to SEQ ID NO: 2787

SEQ ID NO: 6111 - DNA, 2568 bp, Homo sapiens
cgccctgtgtagagcggctgcgagcgggcagctgggctcggctgccgggagccaccgcgcgggctccgcaccctcctctcgcactgccttcgcccggtccccgcgccgcggtgccccagtggcccccgccgcgctccacgccgcgcccccgcaccccgccggctaccggccgcacaaccgccaccgccccctggccgcgcggctcgcctcgccccgccccgtccctcctcgccccgccccaccccagtcagccccgccctgccccgcgccgccaagcggttcccgccctcgcccagcgcccaggtagctgcgaggaaacttttgcagcggctgggtagcagcacgtctcttgctcctcagggccactgccaggcttgccgagtcctgggactgctctcgctccggctgccactctcccgcgctctcctagctccctgcgaagcaggatggccgggaccgtgcgcaccgcgtgcttggtggtggcgatgctgctcagcttggacttcccgggacaggcgcagcccccgccgccgccgccggacgccacctgtcaccaagtccgctccttcttccagagactgcagcccggactcaagtgggtgccagaaactcccgtgccaggatcagatttgcaagtatgtctccctaagggcccaacatgctgctcaagaaagatggaagaaaaataccaactaacagcacgattgaacatggaacagctgcttcagtctgcaagtatggagctcaagttcttaattattcagaatgctgcggttttccaagaggcctttgaaattgttgttcgccatgccaagaactacaccaatgccatgttcaagaacaactacccaagcctgactccacaagcttttgagtttgtgggtgaatttttcacagatgtgtctctctacatcttgggttctgacatcaatgtagatgacatggtcaatgaattgtttgacagcctgtttccagtcatctatacccagctaatgaacccaggcctgcctgattcagccttggacatcaatgagtgcctccgaggagcaagacgtgacctgaaagtatttgggaatttccccaagcttattatgacccaggtttccaagtcactgcaagtcactaggatcttccttcaggctctgaatcttggaattgaagtgatcaacacaactgatcacctgaagttcagtaaggactgtggccgaatgctcaccagaatgtggtactgctcttactgccagggactgatgatggttaaaccctgtggcggttactgcaatgtggtcatgcaaggctgtatggcaggtgtggtggagattgacaagtactggagagaatacattctgtcccttgaagaacttgtgaatggcatgtacagaatctatgacatggagaacgtactgcttggtctcttttcaacaatccatgattctatccagtatgtccagaagaatgcaggaaagctgaccaccactattggcaagttatgtgcccattctcaacaacgccaatatagatctgcttattatcctgaagatctctttattgacaagaaagtattaaaagttgctcatgtagaacatgaagaaaccttatccagccgaagaagggaactaattcagaagttgaagtctttcatcagcttctatagtgctttgcctggctacatctgcagccatagccctgtggcggaaaacgacaccctttgctggaatggacaagaactcgtggagagatacagccaaaaggcagcaaggaatggaatgaaaaaccagttcaatctccatgagctgaaaatgaagggccctgagccagtggtcagtcaaattattgacaaactgaagcacattaaccagctcctgagaaccatgtctatgcccaaaggtagagttctggataaaaacctggatgaggaagggtttgaaagtggagactgcggtgatgatgaagatgagtgcattggaggctctggtgatggaatgataaaagtgaagaatcagctccgcttccttgcagaactggcctatgatctggatgtggatgatgcgcctggaaacagtcagcaggcaactccgaaggacaacgagataagcacctttcacaacctcgggaacgttcattccccgctgaagcttctcaccagcatggccatctcggtggtgtgcttcttcttcctggtgcactgactgcctggtgcccagcacatgtgctgccctacagcaccctgtggtcttcctcgataaagggaaccactttcttatttttttctatttttttttttttgttatcctgtatacctcctccagccatgaagtagaggactaaccatgtgttatgttttcgaaaatcaaatggtatcttttggaggaagatacattttagtggtagcatatagattgtccttttgcaaagaaagaaaaaaaaccatcaagttgtgccaaattattctcctatgtttggctgctagaacatggttaccatgtctttctctctcactccctccctttctatcgttctctctttgcatggatttctttgaaaaaaaataaattgctcaaataaaaa

SEQ ID NO: 6112 - DNA, 2552 bp, Homo sapiens
tcagaaaccaggatgcaacatctgtgccttgagcctctgctgctagatagcaacctaatgttgtaggggtgtgatgccgtggaccccttcttgaacccccaagctcgtcttgcatttggggctctagcatgcagctgcctgattgcccttgcagagcccacctccctgttatagaaacattatcacgactttctcgaacacctatagcattggccacaggaatcaggcccttcccaacagaagaaagcattaatgatgaagacatctacaaaggccttcctgatttaatagatgaaacccttgtggaagatgaagaagatctctatgactgtgtttatggggaagatgaaggtggagaagtctatgaggacttaatgaaggcagaggaagcacatcagcccaaatgtccagaaaatgatatacgaagttgttgtctagcagaaattaagcagacagaagaaaaatatacagaaactttggagtcaatagaaaagtatttcatggcaccactaaaaagatttctgacagcagcagaatttgattcagtattcatcaacattcctgaacttgtaaaacttcatcggaacctaatgcaagagattcatgattccattgtaaataaaaatgaccagaacttgtaccaagtttttattaactacaaggaaagattggttatttacgggcagtactgcagtggagtggagtcagccatctctagtttagactacatttctaagacaaaagaagatgtcaaactgaaattagaggaatgttccaaaagagcaaataatgggaaatttactcttcgagacttgcttgtggttcctatgcaacgtgttttaaagtaccaccttctcctccaggaactggtcaaacataccactgatccgactgagaaggcaaatctgaaactggctcttgatgccatgaaggacttggcacaatatgtgaatgaagtgaaaagagataatgagacccttcgtgaaattaaacagtttcagctatctatagagaatttgaaccaaccagttttgctttttggacgacctcagggagatggtgaaattcgaataaccactctagacaagcataccaaacaagaaaggcatatcttcttatttgatttggcagtgatcgtatgtaagagaaaaggtgataactatgaaatgaaggaaataatagatcttcagcagtacaagatagccaataatcctacaaccgataaagaaaacaaaaagtggtcttatggcttctacctcatccatacccaaggacaaaatgggttagaattttattgcaaaacaaaagatttaaagaagaaatggctagaacagtttgaaatggctttgtctaacataagaccagactatgcagactccaatttccacgacttcaagatgcataccttcactcgagtcacatcctgcaaagtctgccagatgctcctgaggggaacattttatcaaggctatttatgttttaagtgtggagcgagagcacacaaagaatgtttgggaagagtagacaattgtggcagagttaattctggtgaacaagggacactcaaactaccagagaaacggaccaatggactgcgaagaactcctaaacaggtggatccaggtttaccaaagatgcaggtcattaggaactattctggaacaccacccccagctctgcatgaaggaccccctttacagctccaggccggggataccgttgaacttctgaaaggagatgcacacagtctgttttggcagggcagaaatttagcatctggagaggttggattttttccaagtgatgcagtcaagccttgcccatgtgtgcccaaaccagtagattattcttgccaaccctggtatgctggagcaatggaaagattgcaagcagagaccgaacttattaatagggtaaatagtacttaccttgtgaggcacaggaccaaagagtcaggagaatatgcaattagcattaagtacaataatgaagcaaagcacatcaagattttaacaagagatggcttttttcacattgcagaaaatagaaaatttaaaagtttaatggaacttgtggagtactacaagcatcattctctcaaggaagggttcagaaccttagatacaactctgcagtttccatacaaggagccagaacattcagctggacagaggggtaatagagcaggcaacagcttgttaagtccaaaagtgctgggcattgccatcgctcggtatgacttctgtgcaagagatatgagagagttgtccttgttgaaaggagatgtggtgaagatttacacaaagatgagtgcaaatggctggtggagaggagaagtaaatggcagggtgggctggtttccatccacatatgtggaagaggatgaataaattcaaatcccgtgttgcaccctgcaccaaaaatttcagagaagggataaatagaagcctgcacagcatcgtgaattaactgaagtgtttaaaaagctgcatttctggctgttcaacatcctccctccttagcccctcctaagtcttaatgctgagatttct

SEQ ID NO: 6113 - DNA, 1879 bp, Homo sapiens
atgcgcgtcgggcacagcgcgtgcagcctcgtgcagctcttctggtctccggcgcccgcccctcagacgtaatgttgaattaaagaaaatactttatcagaagaagatggccactgcccagttgcagaggactcccatgagtgcactggtatttcccaataagatatcaactgaacaccagtctttggtgttagtgaagaggcttctagcagtttcagtatcctgtatcacgtatttgaggggaatattcccagaatgcgcttatggaacaagatatctagatgatctttgtgtcaaaatactgagagaagataaaaattgcccaggatctacacagttagtgaaatggatgctaggatgttatgatgctttacagaaaaaatatttaaagataatggaattaacagtatacacaaacccagaagatcctcagacaatttcagaatgttaccaattcaaattcaaatacaccaataatggaccactcatggacttcataagtaaaaaccaaagcaacgaatctagcatgttgtctactgacaccaagaaagcaagcattctcctcattcgcaagatttatatcctaatgcaaaatctggggcctttacctaatgatgtttgtttgaccatgaaacttttttactatgatgaagttacacccccagattaccagcctcccggttttaaggatggtgattgtgaaggagttatatttgaaggggaacctatgtatttaaatgtgggagaagtctcaacaccttttcacatcttcaaagtaaaagtgaccactgagagagaacgaatggaaaatattgactcaactatactatcaccaaaacaaataaaaacaccatttcaaaaaatcctgagggacaaagatgtagaagatgaacaggagcattatacaagtgatgatttggacattgaaactaaaatggaagaacaggaaaaaaaccctgcatcttctgaacttgaagaaccaagtttagtttgtgaggaagatgaaattatgaggtctaaagaaagtccagatctttctatttctcattctcaggttgagcagttagtcaataaaacatctgaacttgatatgtctgaaagcaaaacaagaagtggaaaagtctttcagaataaaatggcaaatggaaatcaaccagtaaaatcttccaaagaaaatcggaagagaagtcaacatgaatctgggagaatagtcctccatcactttgattcttctagtcaagagtcagtgccaaaaaggagaaagtttagtgaaccaaaggaacatatataaaaattatttttgttctgcaggcttgcagagttcttctcaccatttaaactgaaggaccctatattatatttccctaactctgaagatgtatatgtagtttaaagcagtttgtacactaaaactaagtttttggctgactgtcatattgtggtccttaatcttgagataaatccaatagaacttttgaataaaagcaaaagtacaaatgtcataattgattcggtaataagtaaaatttcaaaattgattttgttcattacctacttaatatttcctttaaatatatactaactgttaaggccctctaatgccatttttctaaacagtaatgtttactttggtattaaaatttggtatggattcactttttacttatgttaaaattataccatttaactggctcttttgtcattgtgctgttattaaaacaatgttcttcaatattttgacataatgtattaacattttaatatataatgtacaatttaagaattggtgctttacctttactatgcttttttttacaggacaaaaagactgatttttaaagtatggcattttttgcagcataaataaaatattgttcag

SEQ ID NO: 6114 - DNA, 1888 bp, Homo sapiens
agaaggtgtggcagtcctcatttctgtggaatctgaagaagcccacgcagattttaattcccactctagattctgtatctagatcaccatggcgactggacagaagttgatgagagctgttagagtttttgaatttggtgggccagaagtcctgaaattgcgatcagatattgcagtaccgattccaaaagaccatcaggttctaatcaaggtccatgcatgtggtgtcaaccccgtggagacatacattcgctctggtacttatagtagaaaaccactcttaccctatactcctggctcagatgtggctggggtgatagaagctgttggagataatgcatctgctttcaagaaaggtgacagagttttcactagcagcacgatctctgggggttatgcagagtatgctcttgcagcagaccacactgtttacaaactacctgaaaaactggactttaaacaaggagctgccatcggcattccatattttactgcttatcgagctctgatccacagtgcctgtgtgaaagctggagagagtgttctggttcatggggcaagtggaggagttggattagcagcatgccaaattgctagagcttatggcttaaagattttgggcactgctggtactgaggaaggacaaaagattgttttgcaaaatggagcccatgaagtgttcaatcacagagaagtgaattacattgataaaattaagaagtatgttggtgagaaaggaattgatataattattgaaatgttagctaatgtaaatcttagtaaagacttgagtcttctgtcacatggaggacgagtgatagttgttggcagcagaggtactattgaaataaacccacgagacaccatggcaaaggagtcgagtataattggagttactctcttttcctcaaccaaggaggaatttcagcaatatgcagcagcccttcaagctggaatggaaattggctggttgaaacctgtgataggttctcaatatccattggagaaggtggccgaggctcatgaaaatatcattcatggtagtggggctactggaaaaatgattcttctcttatgatgattaattctttcatggatttcctatgtaattagaggtactgtctttcccccagttgtacttaccctatcttttctttaattaacattcgattccatgagcttcttatgtgaaaaaataagatttttctttagagagcagaagcagaagagtaaaatttattgtatagctagcaatatttttttatgccatctgtctcaaatcaaagagtcatcatagtaggaaataacatgttagttgtcatttggcatgagtgtgcattccagtaattcttaattgatatttgattaattccatacctttgattaaaacatgctagttcaaaataagactgctcagtttccaagggttttcaagcctacttacctttataaaggttctctagtctctgattagccatgactgtattggactttgaacattttctgaactaaaaacctctattctaaactaatctcatttggatgtgtaagtcttttgtaaaggcaagaataaataatatccaggacaatttattagttttctcagtattttcccaaatattagaatatttacttcattattggttggctgccaatgaccccatatgttctgtgagaatagtagctttatctttgatataatacatagtctccaaataggtaatacttcgcaattgattagattttcagagtagatttagagttatctgtttttctggtgagggtcaaatatttttgttaattaagctcacaaatttgataaattaagaattatctgcatttgtctcgtaacataataatgtgtaataaagtctatagaaaattaaaa

SEQ ID NO: 6115 - DNA, 4661 bp, Homo sapiens
cccgaggacgcgagcggcaggtgtgcacagaggttctccactttgttttctgaactcgcggtcaggatggttttctctgtcaggcagtgtggccatgttggcagaactgaagaagttttactgacgttcaagatattccttgtcatcatttgtcttcatgtcgttctggtaacatccctggaagaagatactgataattccagtttgtcaccaccacctgctaaattatctgttgtcagttttgccccctcctccaatgaggttgaaacaacaagcctcaatgatgttactttaagcttactcccttcaaacgaaacagaaaaaactaaaatcactatagtaaaaaccttcaatgcatcaggcgtcaaaccccagagaaatatctgcaatttgtcatctatttgcaatgactcagcattttttagaggtgagatcatgtttcaatatgataaagaaagcactgttccccagaatcaacatataacgaatggcaccttaactggagtcctgtctctaagtgaattaaaacgctcagagctcaacaaaaccctgcaaaccctaagtgagacttactttataatgtgtgctacagcagaggcccaaagcacattaaattgtacattcacaataaaactgaataatacaatgaatgcatgtgctgtaatagctgctttggaaagagtaaagattcgaccaatggaacactgctgctgttctgtcaggataccctgcccttcctccccagaagagttggaaaagcttcagtgtgacctgcaggatcccattgtctgtcttgctgaccatccacgtggcccaccattttcttccagccaatccatcccagtggtgcctcgggccactgtgctttcccaggtccccaaagctacctcttttgctgagcctccagattattcacctgtgacccacaatgttccctctccaataggggagattcaacccctttcaccccagccttcagctcccatagcttccagccctgccattgacatgcccccacagtctgaaacgatctcttcccctatgccccaaacccatgtctccggcaccccacctcctgtgaaagcctcattttcctctcccaccgtgtctgcccctgcgaatgtcaacactaccagcgcacctcctgtccagacagacatcgtcaacaccagcagtatttctgatcttgagaaccaagtgttgcagatggagaaggctctgtccttgggcagcctggagcctaacctcgcaggagaaatgatcaaccaagtcagcagactccttcattccccgcctgacatgctggcccctctggctcaaagattgctgaaagtagtggatgacattggcctacagctgaacttttcaaacacgactataagtctaacctccccttctttggctctggctgtgatcagagtgaatgccagtagtttcaacacaactacctttgtggcccaagaccctgcaaatcttcaggtttctctggaaacccaagctcctgagaacagtattggcacaattactcttccttcatcgctgatgaataatttaccagctcatgacatggagctagcttccagggttcagttcaatttttttgaaacacctgctttgtttcaggatccttccctggagaacctctctctgatcagctacgtcatatcatcgagtgttgcaaacctgaccgtcaggaacttgacaagaaacgtgacagtcacattaaagcacatcaacccgagccaggatgagttaacagtgagatgtgtattttgggacttgggcagaaatggtggcagaggaggctggtcagacaatggctgctctgtcaaagacaggagattgaatgaaaccatctgtacctgtagccatctaacaagcttcggcgttctgctggacctatctaggacatctgtgctgcctgctcaaatgatggctctgacgttcattacatatattggttgtgggctttcatcaatttttctgtcagtgactcttgtaacctacatagcttttgaaaagatccggagggattacccttccaaaatcctcatccagctgtgtgctgctctgcttctgctgaacctggtcttcctcctggactcgtggattgctctgtataagatgcaaggcctctgcatctcagtggctgtatttcttcattattttctcttggtctcattcacatggatgggcctagaagcattccatatgtacctggcccttgtcaaagtatttaatacttacatccgaaaatacatccttaaattctgcattgtcggttggggggtaccagctgtggttgtgaccatcatcctgactatatccccagataactatgggcttggatcctatgggaaattccccaatggttcaccggatgacttctgctggatcaacaacaatgcagtattctacattacggtggtgggatatttctgtgtgatatttttgctgaacgtcagcatgttcattgtggtcctggttcagctctgtcgaattaaaaagaagaagcaactgggagcccagcgaaaaaccagtattcaagacctcaggagtatcgctggccttacatttttactgggaataacttggggctttgccttctttgcctggggaccagttaacgtgaccttcatgtatctgtttgccatctttaataccttacaaggatttttcatattcatcttttactgtgtggccaaagaaaatgtcaggaagcaatggaggcggtatctttgttgtggaaagttacggctggctgaaaattctgactggagtaaaactgctactaatggtttaaagaagcagactgtaaaccaaggagtgtccagctcttcaaattccttacagtcaagcagtaactccactaactccaccacactgctagtgaataatgattgctcagtacacgcaagcgggaatggaaatgcttctacagagaggaatggggtctcttttagtgttcagaatggagatgtgtgccttcacgatttcactggaaaacagcacatgtttaacgagaaggaagattcctgcaatgggaaaggccgtatggctctcagaaggacttcaaagcggggaagcttacactttattgagcaaatgtgattcctttcttctaaaatcaaagcatgatgcttgacagtgtgaaatgtccaattttaccttttacacaatgtgagatgtatgaaaatcaactcattttattctcggcaacatctggagaagcataagctaattaagggcgatgattattattacaagaagaaaccaagacattacaccatggtttttagacatttctgatttggtttcttatctttcattttataagaaggttggttttaaacaatacactaagaatgactcctataaagaaaacaaaaaaaggtagtgaactttcagctaccttttaaagaggctaagttatctttgataacatcatataaagcaactgttgacttcagcctgttggtgagtttagttgtgcatgcctttgttgtatataagctaaattctagtgacccatgtgtcaaaaatcttacttctacatttttttgtatttattttctactgtgtaaatgtattcctttgtagaatcatggttgttttgtctcacgtgataattcagaaaatccttgctcgttccgcaaatcctaaagctccttttggagatgatataggatgtgaaatacagaaacctcagtgaaatcaagaaataatgatcccagccagactgagaaaatgtaagcagacagtgccacagttagctcatacagtgcctttgagcaagttaggaaaagatgcccccactgggcagacacagccctatgggctcatggtttgacaaacagagtggagagaccatattttagccccactcaccctcttgggtgcacgacctgtacagccaaacacagcatccaatatgaatacccatcccctgaccgcatccccagtagtcagattatagaatctgcaccaagatgtttagctttataccttggccacagagagggatgaactgtcatccagaccatgtgtcaggaaaattgtgaacgtagatgaggtacatacactgccgcttctcaaatccccagagcctttaggaacaggagagtagactaggattccttctcttaaaaaggtacatatatatggaaaaaaatcatattgccgttctttaaaaggcaactgcatggtacattgttgattgttatgactggtacactctggcccagccagagctataattgttttttaaatgtgtcttgaagaatgcacagtgacaaggggagtagctattgggaacagggaactgtcctacactgctattgttgctacatgtatcgagccttgattgctcctagttatatacagggtctatcttgcttcctacctacatctgcttgagcagtgcctcaagtacatccttattaggaacatttcaaaccccttttagttaagtctttcactaaggttctcttgcatatatttcaagtgaatgttggatctcagactaaccatagtaataatacacatttctgtgagtgctgacttgtctttgcaatatttcttttctgatttatttaattttcttgtatttatatgttaaaatcaaaaatgttaaaatcaatgaaataaatttgcagttaaga

SEQ ID NO: 6116 - DNA, 2915 bp, Homo sapiens
ggtgcgccgggccgtggtgagtccgggctcccgtggccgcgtgctgggaggagactggagcccggttaggaagaatggagttggcgactcgctaccagagcacttcgcaggcatagtttggaagtcatcagggctggttcttttccttccagatccctaaagaagtggctgacatctttaacgcccccagtgatgatgaagagtttgttggcttccgagatgatgttcccatggaaaccctctcgtcagaggagagctgcgatagttttgactcactagagtcagggaaacagcaggatgtgcgctttcattccaaatacttcacagaagagctaagaagaatttttatagaggacactgactcagagactgaggattttgcaggatttacgcagagtgatctgaatggaaagactaacccagaagtaatggtcgtggagtcagatttgagtgatgatggcaaagcatctttggtgagcgaggaagaggaagatgaagaagaagataaggctacccctagaagaagcaggtctagaagaagtagtattggtcttcgagtagcctttcagttccccaccaagaagctggccaacaaaccagataaaaacagttcttccgagcagttgttttctagcgcacgcttacagaatgagaaaaaaacaattcttgaaagaaagaaagactgtagacaggtgatacaaagggaagattctacctctgagtctgaggatgactctcgggatgagagccaggagagttcagatgctttgctgaaaaggaccatgaacatcaaggagaacaaagccatgcttgcccagttattggcggaattgaactcgatgccagatttcttcccagtacgaaccccaacctcagcttctaggaagaagacagtgaggcgggccttctcggagggacagatcacgcggcgtatgaacccaacccggagtgcgcggcctcctgagaagtttgctctagagaacttcactgtctcagccgctaaatttgcggaagagttttacagcttccgaagaaggaagacaattggggggaaatgccgggagtacagacgacgtcaccgtatatcttcttttcggccagtggaggatatcaccgaagaggacttagaaaatgttgccataactgttcgagataaaatctatgataaagttctgggtaacacgtgccatcagtgtcgacaaaagaccatcgacaccaagacagtgtgtcggaaccagggttgctgtggtgtgcgaggacagttctgtggaccatgcctgcggaaccgctatggggaggatgtcagatcggcattgctggacccggattgggtgtgtcccccctgtcgtgggatctgcaattgcagctactgtcggaagcgtgacggccgctgtgccacaggaatcctcattcatctggccaagttttatggttatgacaatgttaaggaatatctggagagcttacaaaaggagctggtagaagacaattaagaggaaaacaaacagaaccagccacctcaccatagagtactccaacaagacatgcataccattggtgcctaagaaagatttttttacagttgtgtttttatacagaaattctttgtagaaattactattttttgttaaagattgtttatatgcttacaaagatttctcaggaagacagcagagcagaggaatctatatagatgtatgcacagacctgtctgtatgctgaactttgttaaaaatatctgccagttattaaaaagcacagtttaaatggggtggggttaaagttcaggtaagtaagttagagagaaaacattgtatgatcagctcctgcacttgatctatctatctttggcttcccaaacagtaactcactccaggccaagtgtgccttagcacgagtgaccacagtttaatagaccacacacatcgtttaacctgctcttggtcattggaaatttacactgaacaaagtgcaattaactgtagaacagttttatttttattaaaacttgactgaacaaaaggggaccatcaacattgtagacactggacactggaggccttacagagtgctagcctcttccttcaggactcacctggggcctgctgcttttatattttgaaagagtttaagggctaataatttaatttgttgtttgttaaaaattaaaatctccgttctttccggctgcattgcttttgcatgttcacatatgatgtacttttatgatgtacttttttttttttgagatggagtcttgttctgttgcccaggagggagtgcagtggtgcaacctcggctcactgcaacctttgcctcctaggttcaagtgattctcctacctcctgagtaactgggattacagtcgtgtgccaccacgctcagccctgagttagtttctagtatttttttctgactttcactctaaggatagcgttgaaaaaagaatgcacgtgtgagttactaaaaagttagaataatgtgcatgggaacagtgcagcaacatgctagaaaatcctcactgcactccagcagaggctagaggaatgccagtgttaccttacgcttctagaagcagagccactccagccagaacccattttgcagtcttctcttcgctcttcagcctgaaggtccagatgtagctggggcctctcagtttggttctatacacagggcactcgtaggtctgtttggtttcttgtctgtccacgggggtggcttttgcaaagatgaccggcatagggcatgccagctccttgagacgggcttcaacaatggttcctgcttgggtgtcccagcgggcgcctatggcaaaaacacagcggttgcaattgtgtggcagcttgctactaatgataatgatcaagtaagttgtttgatgcaataaacattcaacattctggttttgtcat

SEQ ID NO: 6117 - DNA, 2217 bp, Homo sapiens
gatgttggcaaagggggttttcttaatcagactgttttttggtcccagggaaaggaggaagaaggagattgtgatggagaaagggggtctgtgaaacgtcaggcacagcacaaaggctttgccacgtaattacaggctcctattaagtcgagatctgccctcccaggggtctccaattttcttgtattccctacaaagcctcctctgcatgccagtttgtgccttttgaagtgccagagagcttcttgatccaactgagaaggaaaaaggagcccagcaagaagagggggagagagagaaggggaaaggggggaacccaccagcaccctccgtcggactcttgaagccttttttttttaattcttaatttttttttttactctttacaaaaagtaaagtgagaatcctgctctctaatacatctgcaagacatcaccctctcctcctgaaactttagtcactcctgagaatccacaggagtgcagagaggggggaacacgttttcttgaagatgttttaaagctggaacaagccttcttctgttggtgcttgaactcttgcctgggaataacttttttaacctttaaaaaaaccattcactttgattcttctctcccaccccttcttctctcttcttctgtttgcctaactcccccgccctgctggcctccgctttcctctctcccccttgttattatttttagtctgtgcgtgtggacacttttggagagttggaagggatttttttctcctgacttgaacatagggtgactttttaatattgtattttactgtggattatctctttggaccgcgccggacttggcctcaggaaatcaaccaatgctgcggaaggcggctggtgcacaacgctctgctctacagaagggggtcccccaccctcttttccaattttttttttttggccttcctctccttccctccctcttcctccctctctctctctctctctccactacccccctctttcttccccactcggctcctctcccccctcgcgcccacagcgtttggtgttgattcgagcgggaagaggggggtgggtgggatcggtgggggagaccatgacctccagctacgggcacgttctggagcggcaaccggcgctgggcggccgcttggacagcccgggcaacctcgacaccctgcaggcgaaaaagaacttctccgtcagtcacctgctagacctggaggaagccggggacatggtggcggcacaggcggatgagaacgtgggcgaggctggccggagcctgctggagtcgccgggactcaccagcggcagcgacaccccgcagcaggacaatgaccagctgaactcagaagaaaaaaagaagagaaagcagcgaaggaataggacaaccttcaatagcagccagctgcaggctttggagcgtgtctttgagcggacacactatcctgatgcttttgtgcgagaagaccttgcccgccgggtgaacctcaccgaggcgagagtgcaggtgtggtttcagaaccgaagagccaagttccgcaggaatgagagagccatgctagccaataaaaacgcttccctcctcaaatcctactcaggagacgtgactgctgtggagcagcccatcgtacctcgtcctgctccgagacccaccgattatctctcctgggggacagcgtctccgtacagatcctcgtccctcccaagatgttgtttacacgaggggcttcataacggattctaacggaagacactgaaaagcgccatggctacttattctgccacatgtgccaacaatagccctgcacagggcatcaacatggccaacagcattgccaacctgagactgaaggccaaggaatatagtttacagaggaaccaggtgccaacagtcaactgaggaaaaaaaataattaaacaggcctaagaagaaatcaaaaaccataagacacctatcctgctctgttatttcttcatctgctggggggaaaaagtaaattacaaacaaacaaacaaagcagaactaaaatattgggaccatggcagagaaaagcaggagaggagcaaaatgaaaattagttaacaaatgttcctcctccctctgggataccaccaccacttgtttctgtgtgtgtttattttgtttttctttcattcatgctttgcttaatgtactccaggcttcttcagataggttcagcccacccacccccatgattgta

SEQ ID NO: 6118 - DNA, 828 bp, Homo sapiens
agaaccgtttactcgctgctgtgcccatctatcagcaggctccgggctgaagattgcttctcttctctcctccaaggtctagtgacggagcccgcgcgcggcgccaccatgcggcagaaggcggtatcgcttttcttgtgctacctgctgctcttcacttgcagtggggtggaggcaggtgagaatgcgggtaagaaaaagtgctcggagagctcggacagcggctccgggttctggaaggccctgaccttcatggccgtcggaggaggactcgcagtcgccgggctgcccgcgctgggcttcaccggcgccggcatcgcggccaactcggtggctgcctcgctgatgagctggtctgcgatcctgaatgggggcggcgtgcccgccggggggctagtggccacgctgcagagcctcggggctggtggcagcagcgtcgtcataggtaatattggtgccctgatgggctacgccacccacaagtatctcgatagtgaggaggatgaggagtagccagcagctcccagaacctcttcttccttcttggcctaactcttccagttaggatctagaactttgcctttttttttttttttttttttttgagatgggttctcactatattgtccaggctagagtgcagtggctattcacagatgcgaacatagtacactgcagcctccaactcctagcctcaagtgatcctcctgtctcaacctcccaagtaggattacaagcatgcgccgacgatgcccagaatccagaactttgtctatcactctccccaacaacctagatgtgaaaacagaataaacttcacccagaaaa

SEQ ID NO: 6119 - DNA, 3963 bp, Homo sapiens
agggcctgtccctctcacttccactcgattgtaatttcatccccgggccggtcgagcctccctccctcccgcggccagcccttccctcccagtcggcctccttcgtcgcccccgcccccgcgaaaagccctgcagcttgcagccggcttcactcgcgcacgccgacctcccggctgcagtcctacctcttggaactacccgtgtttccgggcccagccctcgcagccccccacctcctcgccccggcccggggatccgttggggccgcgtcccccacgcgcccccggagacgccctttccgtgtgcgcccgggacttggtgaaactttgcaggcgccggctgcgaaatggatttaatccgaggcgtcttgctccggctcctgctcctggcttccagcctcggacccggcgcggtgtcgctccgagcggccatccgaaaaccaggcaaggtagggcctcctcttgacatcaagctgggcgcattgaactgtacggctttcagcatccagtggaaaatgccaaggcatcctggaagtcccatccttgggtacactgtcttttactctgaggttggcgcagataaatccctgcaggagcagttgcacagcgtgcctctcagccgggacatcccgaccacggaggaagtgattggagatttgaaaccaggcactgaatatcgtgtgagcatagcagcttacagccaggctggcaaagggcggctgagctctcctcggcatgtcaccactttgtcccaagattcctgcctgcctcctgcagctccccagcagccacatgtcattgtggtttcggattctgaggtggccctgtcttggaaacctggagcgagtgaaggaagcgcccctattcagtactattctgtggaattcatcaggccagatttcgacaagaagtggacctcaatccatgagcggatccagatggactccatggttatcaagggcctcgatccagataccaactaccagtttgccgtgagggcaatgaattcccatggccccagcccccgcagctggcccagtgacatcatccggaccctctgccctgaggaggcgggaagtggccgctatggaccccgttatatcaccgacatgggagctggtgaggatgatgaaggatttgaagacgacttagatttggatatttcctttgaggaggttaaaccacttcctgctaccaaaggagggaataagaaatttttggtggaaagcaagaagatgtctatatctaacccaaagaccatttctaggctcatcccccctacctcagcatctctccctgtgaccacggtggctccccagcccattcccatacagagaaaggggaagaatggtgtggccataatgtcaaggctctttgacatgccttgtgatgaaactctctgctctgctgacagcttctgtgtcaatgactacacctgggggggctcgcgatgccagtgcaccctgggcaaaggtggtgagagctgctcagaagatattgttatccagtatcctcagttctttggccactcctatgtaacgtttgaacctctgaagaattcttatcaggcatttcaaattactcttgaatttagggcggaggcagaggatggcttactgctctactgtggggagaacgaacacgggaggggggatttcatgtccctggctatcatccgacgctccctgcagttcaggtttaattgtggaactggggttgccatcatcgtaagtgagaccaaaatcaaactagggggttggcacacggttatgctctacagagatgggctgaacgggctgctgcagctgaacaatggcaccccagtgacaggccagtctcagggccaatacagtaaaattactttccggacacctctctatcttggtggcgctcccagcgcttactggttggttagagcaacagggacaaaccgaggctttcaaggctgtgtgcagtcgctcgctgtgaatgggaggagaattgacatgaggccctggcccctgggaaaagcactcagtggggctgatgtgggggaatgcagcagtggaatctgtgatgaggcctcgtgcatccatggtggcacctgcacagcaatcaaagccgactcctacatttgcctctgtccccttgggtttaaaggtcgacactgtgaagatgctttcaccttgaccattcctcagttcagagagtctctgagatcttacgctgcaactccctggccactggagccccagcattacctttccttcatggaatttgagatcacatttcggccagactcaggagatggtgtcctcctgtacagctatgacacaggcagcaaagacttcctgtccatcaacttggcagggggccacgtggagttccgctttgactgtggctctgggaccggtgtcctcaggagtgaagatcccctcaccctgggcaactggcacgagcttcgtgtatctcgcacagcaaagaatggaatcttacaggtggataagcagaagatagtggagggaatggcagagggaggcttcacacagattaagtgcaacacagacattttcattggcggagtccccaattatgatgatgtgaagaagaactcgggtgtcctgaagcctttcagcgggagcatccagaagatcatcctgaatgaccgaaccatccatgtgaagcatgacttcacctccggagtgaatgtggagaatgcggcccacccctgtgtgagagccccttgtgcccatgggggcagctgccggcccaggaaggagggctatgactgtgactgccccttgggctttgaggggcttcactgccagaaagagtgtgggaactactgcctcaatacgatcatagaagccattgagatcccgcagtttatcggccgcagttacctgacgtatgacaacccagatatcttgaagagggtgtcaggatcaagatcaaatgtgttcatgaggtttaaaacaactgccaaggatggccttttgctgtggaggggagacagccccatgagacccaacagcgacttcatttccttgggccttcgggatggagccctcgtgttcagctataacctgggcagtggtgtggcatccatcatggtgaatggctccttcaacgatggtcggtggcaccgagttaaggccgttagggatggccagtcaggaaagataaccgtggatgactatggagccagaacaggcaaatccccaggcatgatgcggcagcttaacatcaatggagctctgtatgtgggtggaatgaaggaaattgctctgcacactaacaggcaatatatgagagggctcgtgggctgtatctctcacttcaccctgtccaccgattaccacatttccctcgtggaagatgccgtggatgggaaaaacatcaacacttgtggagccaagtaacaccagctggccttgtccaagggacagagccttctattctgagaatcccaggggccctcagaccctgcctgatgctatatgcagaggcccagggaccaggtgtgtttcctctcaccaagaagaaagtacacactgatgagaaactgagaaccaagacaggcatccctgggtggcctttcctgctgacactccacgagctgacccagcagaattctctgtgtaggaagcatcggactttgtccattgaatatgtagcggctgccagagatcacacatcaatgcaaattccagagcctgtctgctatagctcagtgactgtgttgtgattcatagtacattaaaaagagagagagagagaaagaatcccacagggcactattaaaatacttctctccttccctgactcatgacactcttcctgacagcagaatgactgtgtgaccttgaacttcacatttcccacattggcccttggattgttcggattaaccccttccactcctcactggctggttcactgtgttctgactagtccataaaaataaagatggaaggagatcaaa

SEQ ID NO: 6120 - DNA, 2057 bp, Homo sapiens
cttactggggaaaggagagaccaagggctgcttcatgaaggctgtttctgagctgagctttgaacaatagcatgacgagggtaggtggaggtgggagtcagggaagaggactcacctctgctggagctgacagctgaggagtcatgggaagaaagggaggatagaacagaaggccatgaagtagtggcggatgagactggaaagctgagctggtgagagtgaggaagagccttcaagggagggtgtgactttattttctatggcgcaattcaggtaatgggagtctctccagatgcaacacatgttacagcacaactttaatatgattcgtttggcaatagtataaagattccctctctgccctgcaccagtggacagaaatttcaatgataaaaaaggatgaaaacctcaatatgtgacccatgggaaagatagagatggaatcatactcaggagagatgtgttaagctcaatgcacaacacagaaattaaaagcagtctctattttgatgttcattcttgaccaccttcacatccatttcagctattccaaactgtggcggttacctggataccttggaaggatccttcaccagccccaattacccaaagccgcatcctgagctggcttattgtgtgtggcacatacaagtggagaaagattacaagataaaactaaacttcaaagagattttaggccctcattctctagcctagaaatagacaaacagtgcaaatttgattttcttgccatctatgatggcccctccaccaactctggcctgattggacaagtctgtggccgtgtgactcccaccttcgaatcgtcatcaaactctctgactgtcgtgttgtctacagattatgccaattcttaccggggattttctgcttcctacacctcaatttatgcagaaaacatcaacactacatctttaacttgctcttctgacaggatgagagttattataagcaaatcctacctagaggcttttaactctaatgggaataacttgcaactaaaagacccaacttgcagaccaaaattatcaaatgttgtggaattttctgtccctcttaatggatgtggtacaatcagaaaggtagaagatcagtcaattacttacaccaatataatcaccttttctgcatcctcaacttctgaagtgatcacccgtcagaaacaactccagattattgtgaagtgtgaaatgggacataattctacagtggagataatatacataacagaagatgatgtaatacaaagtcaaaatgcactgggcaaatataacaccagcatggctctttttgaatccaattcatttgaaaagactatacttgaatcaccatattatgtggatttgaaccaaactctttttgttcaagttagtctgcacacctcagatccaaatttggtggtgtttcttgatacctgtagagcctctcccacctctgactttgcatctccaacctacgacctaatcaagagtggatgtagtcgagatgaaacttgtaaggtgtatcccttatttggacactatgggagattccagtttaatgcctttaaattcttgagaagtatgagctctgtgtatctgcagtgtaaagttttgatatgtgatagcagtgaccaccagtctcgctgcaatcaaggttgtgtctccagaagcaaacgagacatttcttcatataaatggaaaacagattccatcataggacccattcgtctgaaaagggatcgaagtgcaagtggcaattcaggatttcagcatgaaacacatgcggaagaaactccaaaccagcctttcaacagtgtgcatctgttttccttcatggttctagctctgaatgtggtgactgtagcgacaatcacagtgaggcattttgtaaatcaacgggcagactacaaataccagaagctgcagaactattaactaacaggtccaaccctaagtgagacatgtttctccaggatgccaaaggaaatgctacctcgtggctacacatattatgaataaatgaggaagggcctgaaagtgacacacaggcctgca

SEQ ID NO: 6121 - DNA, 7999 bp, Homo sapiens
gcccgcgccggctgtgctgcacagggggaggagagggaaccccaggcgcgagcgggaagaggggacctgcagccacaacttctctggtcctctgcatcccttctgtccctccacccgtccccttccccaccctctggcccccaccttcttggaggcgacaacccccgggaggcattagaagggatttttcccgcaggttgcgaagggaagcaaacttggtggcaacttgcctcccggtgcgggcgtctctcccccaccgtctcaacatgcttaggggtccggggcccgggctgctgctgctggccgtccagtgcctggggacagcggtgccctccacgggagcctcgaagagcaagaggcaggctcagcaaatggttcagccccagtccccggtggctgtcagtcaaagcaagcccggttgttatgacaatggaaaacactatcagataaatcaacagtgggagcggacctacctaggcaatgcgttggtttgtacttgttatggaggaagccgaggttttaactgcgagagtaaacctgaagctgaagagacttgctttgacaagtacactgggaacacttaccgagtgggtgacacttatgagcgtcctaaagactccatgatctgggactgtacctgcatcggggctgggcgagggagaataagctgtaccatcgcaaaccgctgccatgaagggggtcagtcctacaagattggtgacacctggaggagaccacatgagactggtggttacatgttagagtgtgtgtgtcttggtaatggaaaaggagaatggacctgcaagcccatagctgagaagtgttttgatcatgctgctgggacttcctatgtggtcggagaaacgtgggagaagccctaccaaggctggatgatggtagattgtacttgcctgggagaaggcagcggacgcatcacttgcacttctagaaatagatgcaacgatcaggacacaaggacatcctatagaattggagacacctggagcaagaaggataatcgaggaaacctgctccagtgcatctgcacaggcaacggccgaggagagtggaagtgtgagaggcacacctctgtgcagaccacatcgagcggatctggccccttcaccgatgttcgtgcagctgtttaccaaccgcagcctcacccccagcctcctccctatggccactgtgtcacagacagtggtgtggtctactctgtggggatgcagtggctgaagacacaaggaaataagcaaatgctttgcacgtgcctgggcaacggagtcagctgccaagagacagctgtaacccagacttacggtggcaactcaaatggagagccatgtgtcttaccattcacctacaatggcaggacgttctactcctgcaccacagaagggcgacaggacggacatctttggtgcagcacaacttcgaattatgagcaggaccagaaatactctttctgcacagaccacactgttttggttcagactcgaggaggaaattccaatggtgccttgtgccacttccccttcctatacaacaaccacaattacactgattgcacttctgagggcagaagagacaacatgaagtggtgtgggaccacacagaactatgatgccgaccagaagtttgggttctgccccatggctgcccacgaggaaatctgcacaaccaatgaaggggtcatgtaccgcattggagatcagtgggataagcagcatgacatgggtcacatgatgaggtgcacgtgtgttgggaatggtcgtggggaatggacatgcattgcctactcgcagcttcgagatcagtgcattgttgatgacatcacttacaatgtgaacgacacattccacaagcgtcatgaagaggggcacatgctgaactgtacatgcttcggtcagggtcggggcaggtggaagtgtgatcccgtcgaccaatgccaggattcagagactgggacgttttatcaaattggagattcatgggagaagtatgtgcatggtgtcagataccagtgctactgctatggccgtggcattggggagtggcattgccaacctttacagacctatccaagctcaagtggtcctgtcgaagtatttatcactgagactccgagtcagcccaactcccaccccatccagtggaatgcaccacagccatctcacatttccaagtacattctcaggtggagacctaaaaattctgtaggccgttggaaggaagctaccataccaggccacttaaactcctacaccatcaaaggcctgaagcctggtgtggtatacgagggccagctcatcagcatccagcagtacggccaccaagaagtgactcgctttgacttcaccaccaccagcaccagcacacctgtgaccagcaacaccgtgacaggagagacgactcccttttctcctcttgtggccacttctgaatctgtgaccgaaatcacagccagtagctttgtggtctcctgggtctcagcttccgacaccgtgtcgggattccgggtggaatatgagctgagtgaggagggagatgagccacagtacctggatcttccaagcacagccacttctgtgaacatccctgacctgcttcctggccgaaaatacattgtaaatgtctatcagatatctgaggatggggagcagagtttgatcctgtctacttcacaaacaacagcgcctgatgcccctcctgacacgactgtggaccaagttgatgacacctcaattgttgttcgctggagcagaccccaggctcccatcacagggtacagaatagtctattcgccatcagtagaaggtagcagcacagaactcaaccttcctgaaactgcaaactccgtcaccctcagtgacttgcaacctggtgttcagtataacatcactatctatgctgtggaagaaaatcaagaaagtacacctgttgtcattcaacaagaaaccactggcaccccacgctcagatacagtgccctctcccagggacctgcagtttgtggaagtgacagacgtgaaggtcaccatcatgtggacaccgcctgagagtgcagtgaccggctaccgtgtggatgtgatccccgtcaacctgcctggcgagcacgggcagaggctgcccatcagcaggaacacctttgcagaagtcaccgggctgtcccctggggtcacctattacttcaaagtctttgcagtgagccatgggagggagagcaagcctctgactgctcaacagacaaccaaactggatgctcccactaacctccagtttgtcaatgaaactgattctactgtcctggtgagatggactccacctcgggcccagataacaggataccgactgaccgtgggccttacccgaagaggacagcccaggcagtacaatgtgggtccctctgtctccaagtacccactgaggaatctgcagcctgcatctgagtacaccgtatccctcgtggccataaagggcaaccaagagagccccaaagccactggagtctttaccacactgcagcctgggagctctattccaccttacaacaccgaggtgactgagaccaccattgtgatcacatggacgcctgctccaagaattggttttaagctgggtgtacgaccaagccagggaggagaggcaccacgagaagtgacttcagactcaggaagcatcgttgtgtccggcttgactccaggagtagaatacgtctacaccatccaagtcctgagagatggacaggaaagagatgcgccaattgtaaacaaagtggtgacaccattgtctccaccaacaaacttgcatctggaggcaaaccctgacactggagtgctcacagtctcctgggagaggagcaccaccccagacattactggttatagaattaccacaacccctacaaacggccagcagggaaattctttggaagaagtggtccatgctgatcagagctcctgcacttttgataacctgagtcccggcctggagtacaatgtcagtgtttacactgtcaaggatgacaaggaaagtgtccctatctctgataccatcatcccagctgttcctcctcccactgacctgcgattcaccaacattggtccagacaccatgcgtgtcacctgggctccacccccatccattgatttaaccaacttcctggtgcgttactcacctgtgaaaaatgaggaagatgttgcagagttgtcaatttctccttcagacaatgcagtggtcttaacaaatctcctgcctggtacagaatatgtagtgagtgtctccagtgtctacgaacaacatgagagcacacctcttagaggaagacagaaaacaggtcttgattccccaactggcattgacttttctgatattactgccaactcttttactgtgcactggattgctcctcgagccaccatcactggctacaggatccgccatcatcccgagcacttcagtgggagacctcgagaagatcgggtgccccactctcggaattccatcaccctcaccaacctcactccaggcacagagtatgtggtcagcatcgttgctcttaatggcagagaggaaagtcccttattgattggccaacaatcaacagtttctgatgttccgagggacctggaagttgttgctgcgacccccaccagcctactgatcagctgggatgctcctgctgtcacagtgagatattacaggatcacttacggagagacaggaggaaatagccctgtccaggagttcactgtgcctgggagcaagtctacagctaccatcagcggccttaaacctggagttgattataccatcactgtgtatgctgtcactggccgtggagacagccccgcaagcagcaagccaatttccattaattaccgaacagaaattgacaaaccatcccagatgcaagtgaccgatgttcaggacaacagcattagtgtcaagtggctgccttcaagttcccctgttactggttacagagtaaccaccactcccaaaaatggaccaggaccaacaaaaactaaaactgcaggtccagatcaaacagaaatgactattgaaggcttgcagcccacagtggagtatgtggttagtgtctatgctcagaatccaagcggagagagtcagcctctggttcagactgcagtaaccaacattgatcgccctaaaggactggcattcactgatgtggatgtcgattccatcaaaattgcttgggaaagcccacaggggcaagtttccaggtacagggtgacctactcgagccctgaggatggaatccatgagctattccctgcacctgatggtgaagaagacactgcagagctgcaaggcctcagaccgggttctgagtacacagtcagtgtggttgccttgcacgatgatatggagagccagcccctgattggaacccagtccacagctattcctgcaccaactgacctgaagttcactcaggtcacacccacaagcctgagcgcccagtggacaccacccaatgttcagctcactggatatcgagtgcgggtgacccccaaggagaagaccggaccaatgaaagaaatcaaccttgctcctgacagctcatccgtggttgtatcaggacttatggtggccaccaaatatgaagtgagtgtctatgctcttaaggacactttgacaagcagaccagctcagggagttgtcaccactctggagaatgtcagcccaccaagaagggctcgtgtgacagatgctactgagaccaccatcaccattagctggagaaccaagactgagacgatcactggcttccaagttgatgccgttccagccaatggccagactccaatccagagaaccatcaagccagatgtcagaagctacaccatcacaggtttacaaccaggcactgactacaagatctacctgtacaccttgaatgacaatgctcggagctcccctgtggtcatcgacgcctccactgccattgatgcaccatccaacctgcgtttcctggccaccacacccaattccttgctggtatcatggcagccgccacgtgccaggattaccggctacatcatcaagtatgagaagcctgggtctcctcccagagaagtggtccctcggccccgccctggtgtcacagaggctactattactggcctggaaccgggaaccgaatatacaatttatgtcattgccctgaagaataatcagaagagcgagcccctgattggaaggaaaaagacaggacaagaagctctctctcagacaaccatctcatgggccccattccaggacacttctgagtacatcatttcatgtcatcctgttggcactgatgaagaacccttacagttcagggttcctggaacttctaccagtgccactctgacaggcctcaccagaggtgccacctacaacgtcatagtggaggcactgaaagaccagcagaggcataaggttcgggaagaggttgttaccgtgggcaactctggatggtgccatgacaatggtgtgaactacaagattggagagaagtgggaccgtcagggagaaaatggccagatgatgagctgcacatgtcttgggaacggaaaaggagaattcaagtgtgaccctcatgaggcaacgtgttatgatgatgggaagacataccacgtaggagaacagtggcagaaggaatatctcggtgccatttgctcctgcacatgctttggaggccagcggggctggcgctgtgacaactgccgcagacctgggggtgaacccagtcccgaaggcactactggccagtcctacaaccagtattctcagagataccatcagagaacaaacactaatgttaattgcccaattgagtgcttcatgcctttagatgtacaggctgacagagaagattcccgagagtaaatcatctttccaatccagaggaacaagcatgtctctctgccaagatccatctaaactggagtgatgttagcagacccagcttagagttcttctttctttcttaagccctttgctctggaggaagttctccagcttcagctcaactcacagcttctccaagcatcaccctgggagtttcctgagggttttctcataaatgagggctgcacattgcctgttctgcttcgaagtattcaataccgctcagtattttaaatgaagtgattctaagatttggtttgggatcaataggaaagcatatgcagccaaccaagatgcaaatgttttgaaatgatatgaccaaaattttaagtaggaaagtcacccaaacacttctgctttcacttaagtgtctggcccgcaatactgtaggaacaagcatgatcttgttactgtgatattttaaatatccacagtactcactttttccaaatgatcctagtaattgcctagaaatatctttctcttacctgttatttatcaatttttcccagtatttttatacggaaaaaattgtattgaaaacacttagtatgcagttgataagaggaatttggtataattatggtgggtgattattttttatactgtatgtgccaaagctttactactgtggaaagacaactgttttaataaaagatttacattccacaacttgaagttcatctatttgatataagacaccttcgggggaaataattcctgtgaatattctttttcaattcagcaaacatttgaaaatctatgatgtgcaagtctaattgttgatttcagtacaagattttctaaatcagttgctacaaaaactgattggtttttgtcacttcatctcttcactaatggagatagctttacactttctgctttaatagatttaagtggaccccaatatttattaaaattgctagtttaccgttcagaagtataatagaaataatctttagttgctcttttctaaccattgtaattcttcccttcttccctccacctttccttcattgaataaacctctgttcaaagagattgcctgcaagggaaataaaaatgactaagatatt

SEQ ID NO: 6122 - DNA, 4581 bp, Homo sapiens
agctggacggccccgggaggccgcagaccgccgggctccccgaggacacctcgcaccggaggaggagaggaggcagcgcccggccaggctgggagcacctacggccgcgcgggggcgggagccaggtggcctcggcgcgcccgcctcgcccgggcaccgagcaggaagtggctgcggcgcggcctcctcgcggtgcaacagggcggggaggcggccgcagcccgagccggagcccgagcgccgggagcgagacctcatggcagcggtggcgcccgcgggccccggggactccgcctcggccgccctggacgagctgtcactgaatttcacgtacggggcaccaggcgccggcaacggctccctctcgggcgactggtaccgcaggaaccagattcacctttttggagttttgctggctattttaggaaacttggtgatcagtatttctctaaatattcagaaatattctcaccttcagctggcacaacaagagcacccaaggccatacttcaagagtgtgctgtggtggggtggtgtcctgctgatggccgtgggagagacggggaactttgcagcctatggatttgctcccattactctgatcgctccgttaggctgtgtgtctgttacaggtagtgccattatttctgttacatttctgaaagacaatttgagagcctcagacttactcggtacgacactggcatttgcaggaacatatttactggtgaactttgctccaaatataactcaggcaatctcagcaagaacagtacagtattaccttgtcggatggcagttcctgatctatgtgattttagaaatattaattttctgcattctcctgtatttctataaaagaaaaggaatgaagcatatggtgattctgctaaccctggtggcaattctagcctcattgactgttatttcagtaaaggccgtctcaggcatgatcactttttctgtgatggataaaatgcaactaacttaccccattttctatatcatgtttatcatcatgatagcatcttgtgttttccaagtcaagttcctgaatcaagccacgaaactctacaatacgacaacagtggtgccagttaatcatattttctttacaatcagtgccatcattgcaggtatcatattttatcaggaattccttggtgctccttttctcactgtatttatatatctttttgggtgttttctgtcattccttggtgtatttttggtcacaagaaatcgagaaaaggaacatctgcaacagtcttatattgattttggaaatattcctgacacaaccccagagagaaaggcttggagggaaacaaatgttggacaaaatacaaccagattcacatagcttatcctatggaactttgcctgatggaagtgactcaacaaagagccaaagtggagagaagaaagaggtctaaatgctgagaaggatggctgttggcctgttattcgataccacctttttaaaaaattgcacatgttcaatttgtgtcagcagctcttttataagctaacatgtgctagcattcatttcagtcctttcccccacctcagcgtctatggacaatcggggacttcctaagctctgacagtctaatatttccatggaatgtgatttggagtgttccccacaccctggacctctccctagtgattatctagccagctacaccttactcagagcccggctgctctagcaggaatgttgcacagaaacatacatttgcggtttggccacaggtcgcataggtggcttctcccacgggtagtgtcagttgcttcactttaaaaagtcacttcagccccacaacctcactcccaaaagaaaggtttgagagcgctcattttttttctaagacaccttttataagcctccctataaaaatctcacctttcaagtactaagttagaattgcaagtcatcttttctgaaaactaatgctatcaaagtcctcctttgaaaattaagggtctctttaaaattagaatttataaatggcattcagtgatagtgtacaccaaaattaaaagaccttgactggtgggctttttacgtgtaaggaagaggaagtttaagaagtaggactctgcttgtttcagtagcccatgtactaaaataggaacaatgcagagattagcacagcccctgcacaaggctgacacataaattcatgaagcgttagagacaaaaagtaggactaatgtttgtttattttttaataaaaatctagaatggtgatgttttcttcagctgtatgattctatcatacttgaaactgaagaaaaatttaatatcctatgtcttttttatagatcttataatttatcaagtggatttatatgtcttattctccatataagtctaaaaaatcacatttaaattcttagtgatagtttcactacacatcatttcttcccaaagtcattacctcaagctttgtaaattcttctagataaaaggagagttgtgattagagaactgaatttcagccatttaaacctgtagacatagaaaacaacccagtggtcaaacctgagcttcaagaggaagcccaagtcctcctgtttcctgaatggcttttccactccaattcatcacatatctgctaagacacatttgcaggtagaatccataataatatctgttatttatgatctacctaatatttaaaggagaagaaaagaagtagccttcgttgcagccaacatccaacaataagtcccacccttaatgacatttcaaagccttcagatcacttctgacatgtctgtccaatatcattccaatcaatagtcttgcatttaaataggttgtttaactcggtggtattgagactgtaaccttaatggctcaggtcttttagctttgttctttgtcataatctgcactcctggccagactgaccaaacctggctgcaaaggaaagagatttgaattgatcaccaatgtatgaaaaatacagaacccatgtctggctcctaaactcctggtaataattcccgccatcgtagcaagtgtcccatgcattcagataaagcagtcataatttatggtgtattttaccgaattggtccagcatattggtcctacaaggctcagccaagaaatgtatctggtgccttaaactacagatttctggtgactcttaaaactggtttacaaagattgagaaaacaattagattgaagagttttgcttcaagtagacctgcattcatagctagagtgcatgagattttcagcactgtagaatttcacacaggcacaagcataacaccagtactttagcagccgccaacagttgcatctattaaacgttttgagaaatgacattgacttatgcacatttaagcaatcaacaatgttttagaagtccaggtaacatataaaatatattcagacctagttttactttccatattgttgctccaaagtaaggtaaataggagttttagttgtactggcctgtaagattttttaaattacacagtgcatgacaacaactaaagccaactcagtccttctcttggcattgtgagttgaggacctttagccaactgttagctcatctgactatctgtctagaccaagggtcggcaaagttttcagtaaagacccacagagtacatattttggagtttgtgttgtctgtaccaacagacagacatggtgtctgtcccaactacccaactctgccattgtagcactaaagcagccatagacaagatgtaaacagaagagcatggctgtgttccagtaaaactttatttacaggccaggcatggtggctcatgcctgtaatcccagcactctgggaggctgaggctgacagatcatctgaggttaggagtttgggaccagcctggtcaacatagtgaaaccccatctctactaaaagtacaaaaattagccaggcatgacggtgggtgcctggagtcccagctacctgggaggctgaggcaggagaatcacttgaacccgggaggtggaggttgcagtgagccgagatcatgccattgcactccagcctgggcgacagagtaagactgtctcaaaaacaaacaaacaaacaaacaaacaaaaacaagtggccagtctgtgagctatagttcccaacacctggtctagactcttctgcccttgctctgcagcttctttcctgttgattgggcattcagggaaggagtttaaaaagtgacactcatggctcatgacaaatgagatactttgggagtgtggaaacatggcttgatatttgccttcagatatttttgcttatataagttctaaatggaagtgataagttcattcttagggtccaagttgaaaggcagtggttcttttgtgaacaccactaactacattcgaaaagcctctccaattccacattccaagtctataacagctttggaaatgagtaacaatgacctctcatgtagtagattaaagcagaggcctttgccatatgattgttttttggcttaaatgtttgcttgccctgtaactgtaatactttggttaccagaatcacttgaaaacaaatacaataaaaaaatttctcaa

SEQ ID NO: 6123 - DNA, 1101 bp, Homo sapiens
ggaacatcggcggctgcccgggtgacttggttatatgtcacagaataacattcgagaatgggacatggaatgaggcgacggccccagcaagccccagcagccccagccccagccccaggcccagcagcagcagcagcagcccctgctctcccgccgcccggagaggctctgcagccatgaagccaaccgtcccgaggcaccgccggtaagcagggagcctccgcggagctcccgccgccgctcccccttggcgccaaaggcacccggtcccggagcagccacgcgcggcccgtgagcctcgccaccagcgggggctcagaggaggaggacaaagacggcggggtgctgttccacgtcaacaagagcggcttccccatcgacagccacacctgggagcgcatgtggatgcacgtggccaaggtgcaccctaaggggggagaaatggtgggcgccatcaggaacgccgccttcttggcaaagccttcaataccccaggtcccaaactacaggctgtcgatgacgatcccagactggctccaggcgatccagaattacatgaagaccctacaatataatcacacagggacccagttctttgaaattaggaaaatgagaccgctgagtgggttaatggaaacagcaaaagaaatgacccgagagtccttgcctatcaaatgccttgaagctgtcatcctgggcatctacttaaccaatgggcagccttccattgagcggttccccatcagctttaaaacctacttctcaggaaactactttcaccacgttgtgctggggatttactgcaatggccgctatggctcattgggcatgagccgcagggctgagctgatggacaagccattgacttttcggactctgagtgacctcatctttgactttgaggactcttacaagaaatacctgcacacagtcaagaaggtcaagattgggctgtacgtcccccatgagcctcatagcttccagcccattgagtggaagcagctggtcctcaacgtctcaaagatgctgagggctgacataaggaaggagctggagaaatatgccagggacatgagaatgaagggcttgtgcagtcactaa

SEQ ID NO: 6124 - DNA, 1822 bp, Homo sapiens
aaaagtgcctttgttggcctgggctcaggaatccagagaaactggtcaggaggaggccccagtgacaaaaacccctccctctgcccccgcccctctgccagagccatataactgctcaacctgtccccgagagagagtgccctggcagctgtcggctggaaggaactggtctgctcacacttgctggcttgcgcatcaggactggctttatctcctgactcacggtgcaaaggtgcactctgcgaacgttaagtccgtccccagcgcttggaatcctacggcccccacagccggatcccctcagccttccaggtcctcaactcccgtggacgctgaacaatggcctccatggggctacaggtaatgggcatcgcgctggccgtcctgggctggctggccgtcatgctgtgctgcgcgctgcccatgtggcgcgtgacggccttcatcggcagcaacattgtcacctcgcagaccatctgggagggcctatggatgaactgcgtggtgcagagcaccggccagatgcagtgcaaggtgtacgactcgctgctggcactgccgcaggacctgcaggcggcccgcgccctcgtcatcatcagcatcatcgtggctgctctgggcgtgctgctgtccgtggtggggggcaagtgtaccaactgcctggaggatgaaagcgccaaggccaagaccatgatcgtggcgggcgtggtgttcctgttggccggccttatggtgatagtgccggtgtcctggacggcccacaacatcatccaagacttctacaatccgctggtggcctccgggcagaagcgggagatgggtgcctcgctctacgtcggctgggccgcctccggcctgctgctccttggcggggggctgctttgctgcaactgtccaccccgcacagacaagccttactccgccaagtattctgctgcccgctctgctgctgccagcaactacgtgtaaggtgccacggctccactctgttcctctctgctttgttcttccctggactgagctcagcgcaggctgtgaccccaggagggccctgccacgggccactggctgctggggactggggactgggcagagactgagccaggcaggaaggcagcagccttcagcctctctggcccactcggacaacttcccaaggccgcctcctgctagcaagaacagagtccaccctcctctggatattggggagggacggaagtgacagggtgtggtggtggagtggggagctggcttctgctggccaggatagcttaaccctgactttgggatctgcctgcatcggcgttggccactgtccccatttacattttccccactctgtctgcctgcatctcctctgttccgggtaggccttgatatcacctctgggactgtgccttgctcaccgaaacccgcgcccaggagtatggctgaggccttgcccacccacctgcctgggaagtgcagagtggatggacgggtttagaggggaggggcgaaggtgctgtaaacaggtttgggcagtggtgggggagggggccagagaggcggctcaggttgcccagctctgtggcctcaggactctctgcctcacccgcttcagcccagggcccctggagactgatcccctctgagtcctctgccccttccaaggacactaatgagcctgggagggtggcagggaggaggggacagcttcacccttggaagtcctggggtttttcctcttccttctttgtggtttctgttttgtaatttaagaagagctattcatcactgtaattattattattttctacaataaatgggacctgtgcacagg

SEQ ID NO: 6125 - DNA, 2513 bp, Homo sapiens; identical to SEQ ID NO: 847

SEQ ID NO: 6126 - DNA, 3527 bp, Homo sapiens
cgggtccacagccgcactcactccgccgcgctctccgccaccgccaccactgcggccaccgccaatgaaacgcctcccgctcctagtggttttttccactttgttgaattgttcctatactcaaaattgcaccaagacaccttgtctcccaaatgcaaaatgtgaaatacgcaatggaattgaagcctgctattgcaacatgggattttcaggaaatggtgtcacaatttgtgaagatgataatgaatgtggaaatttaactcagtcctgtggcgaaaatgctaattgcactaacacagaaggaagttattattgtatgtgtgtacctggcttcagatccagcagtaaccaagacaggtttatcactaatgatggaaccgtctgtatagaaaatgtgaatgcaaactgccatttagataatgtctgtatagctgcaaatattaataaaactttaacaaaaatcagatccataaaagaacctgtggctttgctacaagaagtctatagaaattctgtgacagatctttcaccaacagatataattacatatatagaaatattagctgaatcatcttcattactaggttacaagaacaacactatctcagccaaggacaccctttctaactcaactcttactgaatttgtaaaaaccgtgaataattttgttcaaagggatacatttgtagtttgggacaagttatctgtgaatcataggagaacacatcttacaaaactcatgcacactgttgaacaagctactttaaggatatcccagagcttccaaaagaccacagagtttgatacaaattcaacggatatagctctcaaagttttcttttttgattcatataacatgaaacatattcatcctcatatgaatatggatggagactacataaatatatttccaaagagaaaagctgcatatgattcaaatggcaatgttgcagttgcatttgtatattataagagtattggtcctttgctttcatcatctgacaacttcttattgaaacctcaaaattatgataattctgaagaggaggaaagagtcatatcttcagtaatttcagtctcaatgagctcaaacccacccacattatatgaacttgaaaaaataacatttacattaagtcatcgaaaggtcacagataggtataggagtctatgtgcattttggaattactcacctgataccatgaatggcagctggtcttcagagggctgtgagctgacatactcaaatgagacccacacctcatgccgctgtaatcacctgacacattttgcaattttgatgtcctctggtccttccattggtattaaagattataatattcttacaaggatcactcaactaggaataattatttcactgatttgtcttgccatatgcatttttaccttctggttcttcagtgaaattcaaagcaccaggacaacaattcacaaaaatctttgctgtagcctatttcttgctgaacttgtttttcttgttgggatcaatacaaatactaataagctcttctgttcaatcattgccggactgctacactacttctttttagctgcttttgcatggatgtgcattgaaggcatacatctctatctcattgttgtgggtgtcatctacaacaagggatttttgcacaagaatttttatatctttggctatctaagcccagccgtggtagttggattttcggcagcactaggatacagatattatggcacaaccaaagtatgttggcttagcaccgaaaacaactttatttggagttttataggaccagcatgcctaatcattcttgttaatctcttggcttttggagtcatcatatacaaagtttttcgtcacactgcagggttgaaaccagaagttagttgctttgagaacataaggtcttgtgcaagaggagccctcgctcttctgttccttctcggcaccacctggatctttggggttctccatgttgtgcacgcatcagtggttacagcttacctcttcacagtcagcaatgctttccaggggatgttcatttttttattcctgtgtgttttatctagaaagattcaagaagaatattacagattgttcaaaaatgtcccctgttgttttggatgtttaaggtaaacatagagaatggtggataattacaactgcacaaaaataaaaattccaagctgtggatgaccaatgtataaaaatgactcatcaaattatccaattattaactactagacaaaaagtattttaaatcagtttttctgtttatgctataggaactgtagataataaggtaaaattatgtatcatatagatatactatgtttttctatgtgaaatagttctgtcaaaaatagtattgcagatatttggaaagtaattggtttctcaggagtgatatcactgcacccaaggaaagattttctttctaacacgagaagtatatgaatgtcctgaaggaaaccactggcttgatatttctgtgactcgtgttgcctttgaaactagtcccctaccacctcggtaatgagctccattacagaaagtggaacataagagaatgaaggggcagaatatcaaacagtgaaaagggaatgataagatgtattttgaatgaactgttttttctgtagactagctgagaaattgttgacataaaataaagaattgaagaaacacattttaccattttgtgaattgttctgaacttaaatgtccactaaaacaacttagacttctgtttgctaaatctgtttctttttctaatattctaaaaaaaaaaaaaaggtttacctccacaaattgaaaaaaaaaaagtgaaaaaaatctgtttctaaggttagactgagatatatactatttccttacttatttcacagattgtgactttggatagttaatcagtaaaatataaatgtgtcaagatataatattgtttatacctatcaatgtaaaaacagtgtaataaagctgaagtattctattacctttcagtgaagtgaaagttatactatctcattagtatatttgaatcctttattatttttaattttataaatatcacagttcacattgcaatattccctttaatttactatttttaaaggggtattgtaaatatgaaagtatttataaagtgaattgctattttttctgttcagaaaagtacacacttaaaattgttattgttaacaatgtgtaaacacatttaaaattgttattgttaacaaagaaatcatggagaactgtagaggttttcacagtggatccattttctgacagttttctactatctattaaatcatatctgcttaaatatatagcttctatctgtctttaaatcttctcattaaaatgtataagcagtgattttgatctcaaaaataggtaatttttctttgccgacctgtaaaagtgtgccaatacactaaatttgtgattttaaattaattcctccagctgttgaaatgaagtctgccaaatcttgctctaacaaataaaatgttatctaaatgaa

SEQ ID NO: 6127 - DNA, 7166 bp, Homo sapiens
ctgtctacggcagctattccagaggcaacaactgcttccctctgttctcatctccccattggtggctggcgacccgaatttgggaatggggagattgcccacctgttatctttgagcagactaatctcttgggtaactcattcgactgtggagttcttttaattcttatgaaagatttcaaatcctctagaagccaaaatgggacacagtaaacagattcgaattttacttctgaacgaaatggagaaactggaaaagaccctcttcagacttgaacaagggtatgagctacagttccgattaggcccaactttacagggaaaagcagttaccgtgtatacaaattacccatttcctggagaaacatttaatagagaaaaattccgttctctggattgggaaaatccaacagaaagagaagatgattctgataaatactgtaaacttaatctgcaacaatctggttcatttcagtattatttccttcaaggaaatgagaaaagtggtggaggttacatagttgtggaccccattttacgtgttggtgctgataatcatgtgctacccttggactgtgttactcttcagacatttttagctaagtgtttgggaccttttgatgaatgggaaagcagacttagggttgcaaaagaatcaggctacaacatgattcattttaccccattgcagactcttggactatctaggtcatgctactcccttgccaatcagttagaattaaatcctgacttttcaagacctaatagaaagtatacctggaatgatgttggacagctagtggaaaaattaaaaaaggaatggaatgttatttgtattactgatgttgtctacaatcatactgctgctaatagtaaatggatccaggaacatccagaatgtgcctataatcttgtgaattctccacacttaaaacctgcctgggtcttagacagagcactttggcgtttctcctgtgatgttgcagaagggaaatacaaagaaaagggaatacctgctttgattgaaaatgatcaccatatgaattccatccgaaaaataatttgggaggatatttttccaaagcttaaactctgggaatttttccaagtagatgtcaacaaagcggttgagcaatttagaagacttcttacacaagaaaataggcgagtaaccaagtctgatccaaaccaacaccttacgattattcaagatcctgaatacagacggtttggctgtactgtagatatgaacattgcactaacgactttcataccacatgacaaggggccagcagcaattgaagaatgctgtaattggtttcataaaagaatggaggaattaaattcagagaagcatcgactcattaactatcatcaggaacaggcagttaattgccttttgggaaatgtgttttatgaacgactggctggccatggtccaaaactaggacctgtcactagaaagcatcctttagttaccaggtattttactttcccatttgaagagatagacttctccatggaagaatctatgattcatctgccaaataaagcttgttttctgatggcacacaatggatgggtaatgggagatgatcctcttcgaaactttgctgaaccgggttcagaagtttacctaaggagagaacttatttgctggggagacagtgttaaattacgctatgggaataaaccagaggactgtccttatctctgggcacacatgaaaaaatacactgaaataactgcaacttatttccagggagtacgtcttgataactgccactcaacacctcttcacgtagctgagtacatgttggatgctgctaggaatttgcaacccaatttatatgtagtagctgaactgttcacaggaagtgaagatctggacaatgtctttgttactagactgggcattagttccttaataagagaggcaatgagtgcatataatagtcatgaagagggcagattagtttaccgatatggaggagaacctgttggatcctttgttcagccctgtttgaggcctttaatgccagctattgcacatgccctgtttatggatattacgcatgataatgagtgtcctattgtgcatagatcagcgtatgatgctcttccaagtactacaattgtttctatggcatgttgtgctagtggaagtacaagaggctatgatgaattagtgcctcatcagatttcagtggtttctgaagaacggttttacactaagtggaatcctgaagcattgccttcaaacacaggtgaagttaatttccaaagcggcattattgcagccaggtgtgctatcagtaaacttcatcaggagcttggagccaagggttttattcaggtgtatgtggatcaagttgatgaagacatagtggcagtaacaagacactcacctagcatccatcagtctgttgtggctgtatctagaactgctttcaggaatcccaagacttcattttacagcaaggaagtgcctcaaatgtgcatccctggcaaaattgaagaagtagttcttgaagctagaactattgagagaaacacgaaaccttataggaaggatgagaattcaatcaatggaacaccagatatcacagtagaaattagagaacatattcagcttaatgaaagtaaaattgttaaacaagctggagttgccacaaaagggcccaatgaatatattcaagaaatagaatttgaaaacttgtctccaggaagtgttattatattcagagttagtcttgatccacatgcacaagtcgctgttggaattcttcgaaatcatctgacacaattcagtcctcactttaaatctggcagcctagctgttgacaatgcagatcctatattaaaaattccttttgcttctcttgcctccagattaactttggctgagctaaatcagatcctttaccgatgtgaatcagaagaaaaggaagatggtggagggtgctatgacataccaaactggtcagcccttaaatatgcaggtcttcaaggtttaatgtctgtattggcagaaataagaccaaagaatgacttggggcatcctttttgtaataatttgagatctggagattggatgattgactatgtcagtaaccggcttatttcacgatcaggaactattgctgaagttggtaaatggttgcaggctatgttcttctacctgaagcagatcccacgttaccttatcccatgttactttgatgctatattaattggtgcatataccactcttctggatacagcatggaagcagatgtcaagctttgttcagaatggttcaacctttgtgaaacacctttcattgggttcagttcaactgtgtggagtaggaaaattcccttccctgccaattctttcacctgccctaatggatgtaccttataggttaaatgagatcacaaaagaaaaggagcaatgttgtgtttctctagctgcaggcttacctcatttttcttctggtattttccgctgctggggaagggatacttttattgcacttagaggtatactgctgattactggacgctatgtagaagccaggaatattattttagcatttgcgggtaccctgaggcatggtctcattcctaatctactgggtgaaggaatttatgccagatacaattgtcgggatgctgtgtggtggtggctgcagtgtatccaggattactgtaaaatggttccaaatggtctagacattctcaagtgcccagtttccagaatgtatcctacagatgattctgctcctttgcctgctggcacactggatcagccattgtttgaagtcatacaggaagcaatgcaaaaacacatgcagggcatacagttccgagaaaggaatgctggtccccagatagatcgaaacatgaaggacgaaggttttaatataactgcaggagttgatgaagaaacaggatttgtttatggaggaaatcgtttcaattgtggcacatggatggataaaatgggagaaagtgacagagctagaaacagaggaatcccagccacaccaagagatgggtctgctgtggaaattgtgggcctgagtaaatctgctgttcgctggttgctggaattatccaaaaaaaatattttcccttatcatgaagtcacagtaaaaagacatggaaaggctataaaggtctcatatgatgagtggaacagaaaaatacaagacaactttgaaaagctatttcatgtttccgaagacccttcagatttaaatgaaaagcatccaaatctggttcacaaacgtggcatatacaaagatagttatggagcttcaagtccttggtgtgactatcagctcaggcctaattttaccatagcaatggttgtggcccctgagctctttactacagaaaaagcatggaaagctttggagattgcagaaaaaaaattgcttggtccccttggcatgaaaactttagatccagatgatatggtttactgtggaatttatgacaatgcattagacaatgacaactacaatcttgctaaaggtttcaattatcaccaaggacctgagtggctgtggcctattgggtattttcttcgtgcaaaattatatttttccagattgatgggcccggagactactgcaaagactatagttttggttaaaaatgttctttcccgacattatgttcatcttgagagatccccttggaaaggacttccagaactgaccaatgagaatgcccagtactgtcctttcagctgtgaaacacaagcctggtcaattgctactattcttgagacactttatgatttatagtttattacagatattaagtatgcaattacttgtattataggatgcaaggtcatcatatgtaaatgccttatatgcacaggctcaagttgttttaaaaatctcatttattataatattgatgctcaattaggtaagattgtaaaagcattgattttttttaatgtacagaggtagatttcaatttgaatcagaaagaaatatcattaccaatgaaatgtgtttgagttcagtaagaattattcaaatgcctagaaatccatagtttggaaaagaaaaatcatgtcatcttctatttgtacagaaatgaaaataaaatatgaaaataatgaaagaaatgaaaagatagcttttaattgtggtatatataatcttcagtaacaatacatactgaatacgctgtggttcattaatattaacaccacgtactatagtattcttaatacagtgctcactgcatttaataaatatttaataaatgatgaatgatagaagtttccatctacaatatatgttcctaaatggagcacagatgttcaaactatgctttcattttttcactgatatattaatttttgtgtaatgaatgccaacagtatattttatatgatttacttatgtgaggaaacatgcaaagcattaggaaatttatttcctaaaaacagttttgtaaaattagtattgagttctattgagtattataagatagcttacattttcaaaatggaaattgtcggtcatatttctagaactttaaagaaaaaagaatgttatattagttttctaaaactcaactatctttagtcatgttcaaaaatctattgctagatcatagtagatactggttttctattaactcaaaacctacattgacaagtttaacattgagaagaatcttaacaaaaatatggatatgaattcagtagatatcttaaattcaataaaatcactggaagtttttcatgataacttattttaagatgccttaaaaatcttaaagtcacaaaaggaaaaaggtttttaacatttacatgagttaacattttttcatagaacttatttcctagatagaattttttactgttttttactgttttcttaagaaaacagttaaatcattatgcattcagttggaagaaagtagtggcaagaattctttcattgctatataatattcagtggctcatttatacctaataaaataatggtattttaaaataatgctactttcaaagtagcatttttttagttagtttacaggttacatacccaaaaccttaactatgactaagaaattaaagaagaaaaccagcaaactaaaacttctgggcagcaaaaatatataaatgcttcagatgtcaaatacccatgcttgaaagctcgtgtaatttactttaagattatctgcctgctcttcttcaaagctgaccttgctttagaaatagttttaactagcttagttttctggtttccaaaactaaaatagattaaatcctacaaatttaaggacagttgtgacagtaatctgaccactatctataaatacattggacattggtttccaaatctccctttcttcttcagttccttccttgttcaatatatacccttctctaaactgtgcgggtaaaaggaatgactgtccttgagagaaccattagtttatcaaaggtttatgtagttttgttgctgtaccctaactttgatattcagggaggtaggaaaggtaacagaaaaccagcatatttaatcaaagcaagaagtaatcgctgacagttaaatgtgaccaaaaaaattaaaagttcacaatttttttaatgtagccatttggggttatctctagtaaggcagatacccacgttggtaaatttttaggatattgtgttgcactagaaaactaagtggttcatatttctaatgaggaagattaatgaaagaacattgttatattctgcgtggtatattttaaagtttaagaaggcatgttaaacattatttcctctatggtagttaaaatacagaattagatttttaacaggtgtcatttgactaaacgtttcggtagaatgcttcatacttgagtgatgctggataaggtattgtatttcaacaatggactatgccttggtttttcactaatcaaaatcaaaattactctttaacatgataaatgaatttaccagtttagtatgctgtggtattttaataagttttcaaagataattgggaaaacatgagactggtcatattgatgaatattgtaacatgtgaattgtgatccatttctgatatgtcttgaactactgtgtctagtgggcaaatgtcattgttacctctgtgtgttaagaaaataaaaatattttctaaaggtc

SEQ ID NO: 6128 - DNA, 837 bp, Homo sapiens
cgaggccgcgggctgcgggagtgccctgctctggcctcgcttgttgctcttcggggactccatcacccagttttccttccagcagggtggatggggagcatcgctggctgacaggctggtcaggttacaataccaggtgggccaaaattatccttccaagattaatcaggaaaggaaacagtttggacatcccagtagcagttacaattttctttggggccaatgacagtgcactaaaagatgagaatcccaagcagcacattcccctggaggagtacgctgcgaacctaaagagcatggtgcagtacctgaagtccgtggacatccctgagaatcgagtcattctcatcacgccgaccccactttgtgaaacagcctgggaagaacagtgcatcatacaaggttgcaaactaaatcgcctgaactctgttgttggtgaatatgccaatgcgtgtttacaagtggcccaagactgtgggactgacgtacttgacctgtggaccctgatgcaggacagccaggacttctcatcttatttatcagatggactacatttgtctccaaaggggaatgaatttttgttctcgcatctctggcctttgatagagaaaaaggtctcttctctacctttgctgcttccttactggcgggatgtagcagaagcaaaacctgaattaagtctgctgggagatggagaccattagccaatcacaggagacccaaatctgcttgttatctacagaactcaaagttgtcaatacgtagaggtacgcttttttcctcaggcttaaacctttgccactgatattaataataaaagtattagatgatttttca

SEQ ID NO: 6129 - DNA, 2769 bp, Homo sapiens
aaggctactcaaggagagtaggaggaggctaggtcaggaagggcaagcactggtggcctacccaggacttggcccaaccctctgggtcaggtcaccctcgtcggagtgagcggaccccgctggaattggagcccagtaaggtctatgagtttggtgttttgatcctggctacccatcccttccatcccaggggtggttcaccaggctgagtggagccttatactagggagagaggaagctgaagaactgggctccagcatgtctcagtggaatcaagtccaacagttagaaatcaagtttttggagcaggtggatcaattctatgatgacaactttcccatggaaattcggcatctgttggcccaatggattgaaaatcaagactgggaggcagcttctaacaatgaaaccatggcaacgattcttcttcaaaacttgttaatacaactggatgaacagttaggtcgtgtttccaaagagaaaaacctactcttgatacacaatctaaaaagaattaggaaggtccttcagggaaaatttcatggaaatccaatgcatgtagctgtggttatttcaaactgtttaagggaagagaggagaatattggctgcagccaacatgcctgtccaggggcctctagagaaatccttacaaagttcttcagtttcagaaagacagaggaatgtggagcacaaagtggctgccattaaaaacagtgtgcagatgacagaacaagataccaaatacttagaagatctgcaagacgaatttgactacaggtataaaacaattcagacaatggatcagagtgacaagaatagtgccatggtgaatcaggaagttttgacactgcaggaaatgcttaacagcctcgatttcaagagaaaggaggctctcagtaaaatgacccaaatcatccatgagacagacctgttaatgaacaccatgctcatagaagagctgcaagactggaagcggcggcagcaaatcgcctgcatcgggggtccactccacaatgggctcgaccagcttcagaactgctttacactattggcagaaagtcttttccaactgagaaggcaattggagaaactagaggagcaatctaccaaaatgacatatgaaggtgatcccattccaatgcaaagaactcacatgctagaaagagtcaccttcttgatctacaaccttttcaagaactcatttgtggttgagcgacagccatgtatgccaacccaccctcagaggccgttggtacttaaaaccctaattcagttcactgtaaaactaaggctactaataaaattgccagaactaaactatcaggtaaaggttaaggcatcaattgacaagaatgtttcaactctaagcaaccgaagatttgtactttgtggaactaatgtcaaagccatgtctattgaagaatcttccaatgggagtctctcagtagaatttcgacatttgcaaccaaaggaaatgaagtccagtgctggaggtaaaggaaatgagggctgtcacatggtgactgaagaacttcattccataacgtttgaaacacagatctgcctctatggcctgaccatagatttggagaccagctcattgcctgtggtgatgatttccaatgtcagtcagttacctaatgcttgggcatccatcatttggtacaacgtgtcaaccaacgattcccagaacttggttttctttaataatcctccacctgccacattgagtcaactactggaggtgatgagctggcagttttcatcgtacgttggtcgtggtcttaactcagatcaactccatatgctggcagagaagcttacagtccaatctagctacagtgatggtcacctcacctgggccaagttctgcaaggaacatttacctggtaaatcatttaccttttggacatggcttgaagcaatattggatctaattaagaaacacattcttcccctttggattgatgggtatgtcatgggctttgttagcaaagagaaggaacggctgttgctaaaggataaaatgcctggcacctttttattaagattcagtgaaagccatctcggaggaataactttcacctgggtggaccattctgaaagtggggaagtgagattccactctgtagaaccctacaataaaggccggttgtctgctctgccattcgctgacatcctgcgagactacaaagttattatggctgaaaacattcctgaaaaccctctgaagtacctatatcctgacattcccaaagacaaagccttcggtaaacactacagctctcagccttgcgaagtttcaagaccaacagaaaggggtgacaaaggttatgttccttctgtttttatccccatctcaacaatccgaagtgattcaacagagccacattctccatcagaccttcttcccatgtctccaagtgtgtatgcggtgttgagagaaaacctgagtcccacaacaattgaaactgcaatgaagtctccttattctgctgaatgacaggataaactctgacgcaccaagaaaggaagcaaatgaaaaagtttaaagactgttctttgcccaataaccacattttatttcttcagctttgtaaataccaggttctaggaaatgtttgacatctgaagctctcttcacactcccgtggcactcctcaattgggagtgttgtgactgaaatgcttgaaaccaaagcttcagataaacttgcaagataagacaactttaagaaaccagtgttaataacaatattaacagaaga

SEQ ID NO: 6130 - DNA, 1915 bp, Homo sapiens
ctcggcctcgcgttataaaaagcggtggggcagggccggcgagacaatctgggaggcgggtaccgggcctcacggatccgcgccgcgccccccacctgtggctgcgcgcggggtgggctgcgctcccctgggcggcgccgggcgcccggggctggtggcgagatgggccgctactctggcaagacgtgccggctgctcttcatgctggtgctcaccgtcgccttcttcgtggcggagctggtctccggctacctgggcaactccatcgcgctgctctccgactccttcaacatgctctccgacctgatctcgctgtgcgtgggcctgagcgccggctacatcgcccggcgccccacccggggcttcagcgccacctacggctacgcccgcgccgaggtggtgggcgcgctgagcaacgcggtcttcctcaccgcgctctgcttcaccatcttcgtggaggccgtgctgcgcctggcccggcccgagcgcatcgatgaccccgagctggtgctcatcgtcggcgtcctggggctgttggtcaacgtggtggggctgctcatcttccaggactgcgccgcctggttcgcgtgctgcctccggggacgcagtcgccgcctgcagcagcggcagcagctggcggagggctgtgtccccggcgctttcggggggcctcagggcgcggaggacccgcggcgcgcggcggacccgacagccccaggctcggactcggccgtaaccctccgggggacctcggtggaaaggaagcgggagaagggggcgaccgtgttcgcaaacgtagcaggtgattccttcaacacccagaatgagccagaagacatgatgaaaaaagagaaaaagtctgaagctctgaatatcagaggtgtacttttgcatgtgatgggagatgccctggggtccgtggttgtggtcatcacggccatcatattctatgtgcttcccctgaagagtgaggacccgtgtaactggcagtgttacattgaccccagcctgactgtcctcatggtcatcatcattttgtcatctgccttcccgcttatcaaggagaccgctgccattctgctacagatggtcccaaaaggagtcaacatggaagagctgatgagtaaactctctgctgtgcctggaattagcagtgtacatgaagtgcacatctgggaacttgtaagtggaaagattattgccaccctgcacatcaagtatcctaaggacaggggatatcaagatgccagcacaaaaattcgagaaatcttccaccatgcgggaatccacaatgtgaccatccagtttgaaaatgtggacttgaaggaacccctggagcagaaggacttactgttgctctgcaactcaccctgcatctccaagggctgtgctaagcagctgtgttgtccccccggggcactgcctctggctcacgtcaatggctgtgctgagcacaatggtgggccctctctagacacatacggaagtgatggcctcagtagaagagacgcaagagaagtggctattgaagtgtctttggatagctgtctgagtgaccacggacaaagtcttaacaaaactcaggaggaccaatgttatgtcaacagaacgcatttttaatctggtactcacataatcagaccatatagacgaggcactttggaaccacaagcttggctcacaaaaagagctttctgggttgtaggcccagactagacttgcagcatgcatgctctgtgttcactaggggttggctgtttgggattttagttaaacgtgtctgtgaatttttatgtaactaactcctttccattcccctgggtgtctcatgctgctctttgactgtttcagcttgaacatgcattttctaaagcaaactgcactagtgtatatatcagggacattaaagtctggg

SEQ ID NO: 6131 - DNA, 82603 bp, Homo sapiens; identical to SEQ ID NO: 5011

SEQ ID NO: 6132 - DNA, 2290 bp, Homo sapiens; identical to SEQ ID NO: 2019

SEQ ID NO: 6133 - DNA, 4062 bp, Homo sapiens
ggtgtgggaggattctctgagtttggaaatagcgcttccaggcatcactccttcaaatgcaaacgttcaccttctctctaagagaaacttgcatgtggattcagtgccttcgtttgactaaaaattacgatacaaacaatattaacatttactagacttttttttccctactttcctcctataggaaaggaagatgtgctagggcatttacttagatgtgggtcagctggcgctagtttgtttaaggagttcctgctgtgtgccagtagcttttccgggccctagggtccttgctataaatacgttagccctgctgggcttctgaactaagggagctaaatgcttccagcttccttagtgaggcagcacggtgctgtatgcttaaatccaaggccgtggagtctgacctgcgtttttatctaaactgtgtaaggtgctggccctgggtggtttggcctcgatgagtgttaaatcgccatttaatgtgatgtcaagaaataatttggaagcacctccttgtaagatgacagagccatttaattttgagaaaaatgaaaacaagcttccaccacatgagtctttaagaagtcctggaacacttcctaaccaccctaatttcaggctgaaaagctcagagaatggaaataaaaagaacaattttttgctttgtgagcaaaccaaacaatatttggctagtcaggaagacaattcagtttcttcaaacccgaatggcatcaacggagaagtagttggctccaaaggagacaggaaaaaattgccagcaggaaactcagtgtcaccaccaagtgctgaaagtaattcaccacccaaagaagtgaatattaagcctggaaataatgtacgtcctgcaaaatcaaaaaaactaaacaagttggtcgagaattccttgtccataagtaatccagggctcttcacctccttaggacctcctcttcggtccacaacttgccatcgctgtggcctatttggatcgctgaggtgctctcagtgcaagcagacctactattgctccacagcatgtcaaagaagagactggtctgcacacagcatcgtgtgcaggcctgttcagccaaatttccacaaacttgaaaataaatcatctattgaaacaaaggatgtggaggtaaacaataagagtgactgtccacttggagttactaaggaaatagccatttgggctgagagaataatgttttctgatttgagaagtctacaactcaagaaaaccatggaaataaagggtacggttaccgaattcaaacacccaggggacttctacgtgcagttatattcttcagaagttttagaatacatgaaccaactctctgccagcttaaaagaaacatatgcaaatgtgcatgaaaaagactatattcctgttaagggggaagtttgtattgccaagtacactgttgatcagacctggaacagagcaatcatacaaaacgttgatgtgcagcaaaagaaggcacatgtcttatatattgattatggaaatgaagaaataattccattaaacagaatttaccacctcaacaggaacattgacttgtttcctccttgtgccataaagtgctttgtagccaatgttatcccagcagaagggaattggagcagtgattgtatcaaagctactaaaccactgttaatggagcagtactgctccataaagattgtcgacatcttggaagaggaagtggttacctttgctgtagaagttgagctgccaaattcaggaaaacttttagaccatgtgcttatagaaatgggatatggcttgaaacccagtggacaagattctaagaaggaaaatgcagatcaaagtgatcctgaagatgttggaaaaatgacaactgaaaacaacattgtcgtagacaaaagtgacctaatcccaaaagtgttaactttgaatgtaggtgatgagttttgtggtgtggttgcccacattcaaacaccagaagacttcttttgtcaacaactgcaaagtggccgaaagcttgctgaacttcaggcatcccttagcaagtactgtgatcagttgcctccacgctctgatttttatccagccattggtgatatatgttgtgctcagttctcagaggatgatcagtggtaccgtgcctctgttttggcttacgcttctgaagaatctgtactggtcggatatgtagattatggaaactttgaaatccttagtttgatgagactttgtcccataatcccaaagttgttggaattgccaatgcaagctataaagtgtgtactagcaggagtaaagccatcattaggaatttggactccagaagctatttgtctcatgaaaaaacttgtacagaacaaaataatcacagtgaaagtggtggacaagttggaaaacagttccctggtggagcttattgataaatccgagacgcctcatgtcagtgttagcaaagttctcctagatgcaggctttgctgtgggagaacagagtatggtgacagataaacccagtgacgtgaaagaaaccagtgttcccttgggtgtggaaggaaaagtaaatccattggagtggacatgggttgaacttggtgttgaccaaacagtagatgttgtggtctgtgtgatatatagtcctggagaattttattgccatgtgcttaaagaggatgctttaaagaaactcaatgatttgaacaagtcattagcagaacactgccagcagaagttacctaatggtttcaaggcagagataggacaaccttgttgtgctttttttgcaggtgatggtagttggtatcgtgctttagtcaaggaaatcttaccaaatggacatgttaaagtacattttgtggattatggaaacatcgaagaagttactgcagatgaactccgaatgatatcatcaacatttttaaaccttccctttcagggaatacggtgccagttagcagatatacagtctagaaacaaacattggtctgaagaagccataacaagattccagatgtgtgttgctgggataaaattgcaagccagagtggttgaagtcactgaaaatgggataggagttgaactcaccgatctctccacttgttatcccagaataattagtgatgttctgattgatgaacatctggttttaaaatctgcttcaccacataaagacttaccaaatgacagacttgttaataaacatgagcttcaagttcatgtacagggacttcaagctacctcttcagctgagcaatggaagacgatagaattgccagtggataaaactatacaagcaaatgtattagaaatcataagcccaaacttgttttatgctctaccaaaagggatgccagaaaatcaggaaaagctgtgcatgttgacagctgaattattagaatactgcaatgctccgaaaagtcgaccaccctatagaccaagaattggagacgcatgctgtgccaaatacacaagtgatgatttttggtatcgtgcagttgttctggggacatcagacactgatgtggaagtgctctatgcagactatggaaacattgaaaccctgcctctttgcagagtgcaaccaatcacctctagccacctggcgcttcctttccaaattattagatgttcacttgaagaaaagatgtataggatgaattgctgctgcacagagttacagaaacaagttgaaaaacatgaacatattcttctcttcctcttaaacaattcaaccaatcaaaataaatttattgaaatgaaaaaactgttaaaaagttaagtaagttaaatcgtatgttttcgcctcttctgtgatcaccaataggacatcttcaggcatattggcaggatagagctaatggagtgaaacctattgtaaggctgtactttcgtgatttaatgacctgaggtttggtcataatgcttctgctgtttttgtaggtttatctgatcgttttcctttgctactgctaatggaactgaacccccaggggtattccagttgtaatagcctttccttactgttgtttggttctgtgaatgcctatgttattgatatgtggaggg

SEQ ID NO: 6134 - DNA, 1368 bp, Homo sapiens
gaggccacctgtttgtgatgtgcaggcacagaagaaaggcacagctccccatcagtttcatggaaaataactcagtgcctgctgggaaccagctgctggagatccctacagagagcttccactgggggcaacccttccaggaaggagttggggagagagaaccctcactgtggggaatgctgataaaccagtcacacagctgctctattctcacacaaatctaccccttgcgtggctggaactgacgtttccctggaggtgtccagaaagctgatgtaacacagagcctataaaagctgtcggtccttaaggctgcccagcgccttgccaaaatggagcttgtaagaaggctcatgccattgaccctcttaattctctcctgtttggcggagctgacaatggcggaggctgaaggtagaagatcagtcaattacttacaccaatataatcaccttttctgcatcctcaacttctgaagtgatcacccgtcagaaacaactccagattattgtgaagtgtgaaatgggacataattctacagtggagataatatacataacagaagatgatgtaatacaaagtcaaaatgcactgggcaaatataacaccagcatggctctttttgaatccaattcatttgaaaagactatacttgaatcaccatattatgtggatttgaaccaaactctttttgttcaagttagtctgcacacctcagatccaaatttggtggtgtttcttgatacctgtagagcctctcccacctctgactttgcatctccaacctacgacctaatcaagagtggatgtagtcgagatgaaacttgtaaggtgtatcccttatttggacactatgggagattccagtttaatgcctttaaattcttgagaagtatgagctctgtgtatctgcagtgtaaagttttgatatgtgatagcagtgaccaccagtctcgctgcaatcaaggttgtgtctccagaagcaaacgagacatttcttcatataaatggaaaacagattccatcataggacccattcgtctgaaaagggatcgaagtgcaagtggcaattcaggatttcagcatgaaacacatgcggaagaaactccaaaccagcctttcaacagtgtgcatctgttttccttcatggttctagctctgaatgtggtgactgtagcgacaatcacagtgaggcattttgtaaatcaacgggcagactacaaataccagaagctgcagaactattaactaacaggtccaaccctaagtgagacatgtttctccaggatgccaaaggaaatgctacctcgtggctacacatattatgaataaatgaggaagggcctgaaagtgacacacaggcctgca

SEQ ID NO: 6135 - DNA, 1368 bp, Homo sapiens
ggcgggacccaactgattgtcaaaggcggcagattgtagtttttgttttggccggaaaggcttaccatgagttgccagggctgagagagatggagaaggattcgcggcggtgacagattaaattccccagttacattatagacttggaggtgggggatcttctcatcgttagaggccccgatcatgggagataggcggttcggagccagttctgcctaactttgtgttcactgatgttagggctgctagggctgcaaaggtgggcacccctactcgcctaagagctttctcctctcttctctttttcccctttgcctctctccttacatcacctgcccactaagtagacttgtccttgtgtggacgggagccggaaagccttgagaacttattcctcgacccggacatggcacaggagaaaatgaaactaggtttcaagtcgctgccgagttccactaccgcagacggcaacattctgagaagagtcaacagtgcccctttgatcaatggacttggttttaattcacaggtgttgcaagctgacatgttaagaattaggacaaacagaacaacatttaggaatcgacgctctctgttgttgccacctcctccctttcatggttccatcagccgccttcatcaaatcaaacaggaagaagccatggatttaataaatagagaaacaatgtctgaatggaagctacaaagtgagatacagataagtcactcttgggaagaaggcttgaaactggtgaaatggcatttcaatatcaaccaaaaaagattttccaaggcacaaccaacatgctttcttctgatacttcccaactgtcagaaaataatgtgtatctacttccagctacttttgatggaaacgacagcaatgctggatcttctggtaattcgtcagctgaaatcggcactgtcacaaactctcctgtgtcaccttctgatactggttctcatttgttctagtagacaaactttcaactaaatgattcacccatcccaagactttctcaccagtggagaaacacacacatcaagcaaaccaagtcagagcaatgagaattgtactgtataatttaaactatctcctatttatcttttttcctcaatttcctaaaattctatttatctacagaacttgcgtgtataattcttgtgtacatccttaaatttaatgtaataacatgttaaagatgttttccaaatcagaaccatgttgaagatacaagcgtaaattgttaggctgctattttctagaaaatgctgtaccttgactttttaaaataatcttatgaaacataattctgataaaatataattgttcaattaacaaagtaaaatgatgtttgacaattatgt

SEQ ID NO: 6136 - DNA, 2834 bp, Homo sapiens
gcggcggcgagccgcgggcaggggccggagcccgcgcccggaggcggggtggagggggtcggggctcgcggcgtcgcactgaaacttttcgtccaacttctgggctgttctcgcttcggaggagccgtggtccgcgcgggggaagccgagccgagcggagccgcgagaagtgctagctcgggccgggaggagccgcagccggaggagggggaggaggaagaagagaaggaagaggagagggggccgcagtggcgactcggcgctcggaagccgggctcatggacgggtgaggcggcggtgtgcgcagacagtgctccagccgcgcgcgctccccaggccctggcccgggcctcgggccggggaggaagagtagctcgccgaggcgccgaggagagcgggccgccccacagcccgagccggagagggagcgcgagccgcgccggccccggtcgggcctccgaaaccatgaactttctgctgtcttgggtgcattggagccttgccttgctgctctacctccaccatgccaagtggtcccaggctgcacccatggcagaaggaggagggcagaatcatcacgaagtggtgaagttcatggatgtctatcagcgcagctactgccatccaatcgagaccctggtggacatcttccaggagtaccctgatgagatcgagtacatcttcaagccatcctgtgtgcccctgatgcgatgcgggggctgctgcaatgacgagggcctggagtgtgtgcccactgaggagtccaacatcaccatgcagattatgcggatcaaacctcaccaaggccagcacataggagagatgagcttcctacagcacaacaaatgtgaatgcagaccaaagaaagatagagcaagacaagaaaaatgtgacaagccgaggcggtgagccgggcaggaggaaggagcctccctcagggtttcgggaaccagatctctcaccaggaaagactgatacagaacgatcgatacagaaaccacgctgccgccaccacaccatcaccatcgacagaacagtccttaatccagaaacctgaaatgaaggaagaggagactctgcgcagagcactttgggtccggagggcgagactccggcggaagcattcccgggcgggtgacccagcacggtccctcttggaattggattcgccattttatttttcttgctgctaaatcaccgagcccggaagattagagagttttatttctgggattcctgtagacacacccacccacatacatacatttatatatatatatattatatatatataaaaataaatatctctattttatatatataaaatatatatattctttttttaaattaacagtgctaatgttattggtgtcttcactggatgtatttgactgctgtggacttgagttgggaggggaatgttcccactcagatcctgacagggaagaggaggagatgagagactctggcatgatcttttttttgtcccacttggtggggccagggtcctctcccctgcccaggaatgtgcaaggccagggcatgggggcaaatatgacccagttttgggaacaccgacaaacccagccctggcgctgagcctctctaccccaggtcagacggacagaaagacagatcacaggtacagggatgaggacaccggctctgaccaggagtttggggagcttcaggacattgctgtgctttggggattccctccacatgctgcacgcgcatctcgcccccaggggcactgcctggaagattcaggagcctgggcggccttcgcttactctcacctgcttctgagttgcccaggagaccactggcagatgtcccggcgaagagaagagacacattgttggaagaagcagcccatgacagctccccttcctgggactcgccctcatcctcttcctgctccccttcctggggtgcagcctaaaaggacctatgtcctcacaccattgaaaccactagttctgtccccccaggagacctggttgtgtgtgtgtgagtggttgaccttcctccatcccctggtccttcccttcccttcccgaggcacagagagacagggcaggatccacgtgcccattgtggaggcagagaaaagagaaagtgttttatatacggtacttatttaatatccctttttaattagaaattaaaacagttaatttaattaaagagtagggttttttttcagtattcttggttaatatttaatttcaactatttatgagatgtatcttttgctctctcttgctctcttatttgtaccggtttttgtatataaaattcatgtttccaatctctctctccctgatcggtgacagtcactagcttatcttgaacagatatttaattttgctaacactcagctctgccctccccgatcccctggctccccagcacacattcctttgaaataaggtttcaatatacatctacatactatatatatatttggcaacttgtatttgtgtgtatatatatatatatatgtttatgtatatatgtgattctgataaaatagacattgctattctgttttttatatgtaaaaacaaaacaagaaaaaatagagaattctacatactaaatctctctccttttttaattttaatatttgttatcatttatttattggtgctactgtttatccgtaataattgtggggaaaagatattaacatcacgtctttgtctctagtgcagtttttcgagatattccgtagtacatatttatttttaaacaacgacaaagaaatacagatatatcttaaaaaaaaaaaagcattttgtattaaagaatttaattctgatctcaaa

SEQ ID NO: 6137 - DNA, 2025 bp, Homo sapiens
gctccaggcgagtccttccctggactccagtcccttgtgggaaacaatccctcgcctccggaggcggcgaggagcggcggaacctaaattggtaataaatcaataagaaatatttacattcactcagtgaaaagtgtcatgtctgagctcagcatatatcggagccacacatggacacctctccttcctccactaagagcggaaaatgaacaaatcccaggaacaagtgtcattcaaggatgtatgtgtggacttcactcaggaagagtggtatctgctggaccctgctcagaagattctatacagagatgtgatcctggaaaattatagcaatcttgtctcagtagggtattgcattactaaaccagaagtgatctttaagatcgagcaaggagaagagccctggatattagaaaaaggattcccaagccagtgccacccagaaaggaaatggaaagttgatgacgtgttagagagcagccaggaaaatgaagatgaccatttttgggagcttctattccacaacaacaaaacagtaagtgtagaaaatggagatagaggaagcaaaactttcaatttgggcacagaccctgtttctttaagaaattatccctataaaatatgtgactcatgtgaaatgaatttgaaaaatatttcgggcttaattattagtaaaaagaactgttccagaaagaagcctgatgagtttaatgtatgtgagaaattgctccttgatattaggcatgagaaaatccctattggagagaagtcttataaatatgatcaaaaaaggaatgccattaattatcaccaggatctcagtcagccaagttttggccaatcttttgagtatagtaaaaatggacaaggcttccatgatgaggcagcattttttacaaataagagatctcagataggagagacagtctgtaaatataacgaatgtggaagaaccttcattgaaagtttaaagctgaatatatctcaaagacctcatttggaaatggagccgtatggatgcagtatttgcgggaagtccttctgcatgaatttaaggtttggacatcagagagctcttacaaaggacaatccttatgaatataatgaatatggggaaatcttctgtgacaattcagctttcattatccatcagggagcttacacaagaaagattctccgtgaatataaagtgagtgacaaaacctgggaaaagtcagctctcttaaaacatcaaatagtacacatggggggaaagtcttatgattacaatgaaaatgggagtaatttcagcaagaagtcacatcttacccagcttcggagagctcacacaggagaaaaaacctttgaatgtggtgaatgtgggaaaaccttctgggagaagtcaaacctcactcaacatcagagaacacacacaggagagaagccctatgaatgtactgaatgtgggaaagccttttgccagaaaccacacctgaccaaccatcagcgaacacatacaggagaaaaaccctatgaatgtaagcaatgtggaaaaacattctgtgtgaagtcaaacctcactgaacatcagagaacacacacaggggagaagccctatgaatgtaatgcatgtgggaaatccttctgccacagatcagccctcactgtgcatcagagaacacacacaggggagaaaccgtttatatgtaatgaatgtggaaaatccttctgtgtgaagtcaaacctcattgtacatcaaagaactcacactggggagaaaccatataagtgtaatgaatgtgggaaaaccttctgtgaaaaatcagctctcactaaacatcagaggactcacacaggggagaagccgtatgagtgtaatgcatgtgggaagacctttagtcagaggtcagtgctcaccaaacatcagagaattcacacaagggtgaaagctctttcaacatcctgaatgttagaagccttcatacacttgtgaaattggttatacagtttcaaaaaaggagatcagagaaagccaaagaatgtcag

SEQ ID NO: 6138 - DNA, 7563 bp, Homo sapiens
atctaccaccttaaaaccctgatctagaaaaaatatatattcatgataggaagttataactaagaaaatttatttgcctcttaatgctcctgaatgaaaggaattatccctttgttctttgggaggacttgtgtatctgagattgttgtaataatcagtcattttattaaaaccttgacatgatcaccagggaggaaaaatagagcaatagtcaaaacctgtgtgttagtccaagatgacttctgaagaaatgacagcttctgttctcatacctgtgactcagagaaaagtggtttctgcccagtcggctgcagatgaaagtagtgaaaaggtctcagacatcaatatttcaaaagcacatactgtcagacgaagtggggagacttctcataccatctcacaactgaacaaacttaaagaagaaccttctggaagcaacttgccaaagattctctcaatagcgagggagaaaatagtgagtgatgagaacagtaatgaaaaatgttgggagaaaatcatgccagattctgcgaaaaaccttaacattaactgcaacaacatattgagaaaccatcagcatggccttcctcagagacaattttatgaaatgtacaactctgttgctgaggaagacttgtgtttagaaactggaattccttctccactggaaagaaaggtgttccctggaattcaactggaactagacagaccttccatgggcattagtcctttaggaaatcagtcagtgatcatagagacaggcagagcacaccctgacagcagaagggcagtatttcattttcattatgaagttgacagaagaatgtcagacactttctgtaccctatcagaaaacttaattttagacgattgtggaaattgtgtaccactacctgggggtgaggagaagcaaaagaaaaactatgtggcatatacctgtaaactgatggaattggccaaaaattgtgataataagaatgagcagctgcagtgtgatcattgtgacaccttgaatgataaatacttttgctttgaaggctcttgtgagaaggttgacatggtatattcaggtgatagcttttgtaggaaagactttactgacagtcaagctgccaagacctttttgagccattttgaggacttccctgataattgtgatgatgtagaagaagacgcttttaaaagcaaaaaggagcgatccactttgttagtcaggagattctgtaaaaatgacagagaagttaagaaatctgtgtatactggaacaagagcaattgtgagaactctgccttctggccacattgggctgactgcatggagttacatagatcagaagagaaatggtcccttactgccttgtgggagagtaatggaacccccgtcaacagtggagataaggcaagatgggagccaacgtctgtcagaagcccagtggtatcctatctacaatgcagtgagaagagaagaaacagaaaatacagttggatctctactccatttcctcaccaagctcccagcctccgagacagcccatggaaggataagcgttggtccatgcttaaagcaatgtgtccgagacactgtatgtgagtatcgcgccaccctccaaaggacttcaatatcgcagtacatcaccggttctctcctagaagcaaccacgtctttgggagcaagaagtggccttctcagtacttttggaggatccactggacgaatgatgctgaaagaacgccagccaggcccctctgtggccaattccaatgccctcccttcaagttcagctgggatcagcaaggagctgatcgatctgcagcctctcatccagttcccagaggaagtcgccagcatcctgatggagcaagagcagactatttaccgcagggtcttgccagtcgactacctttgcttcttaacacgggacttgggcactcctgaatgccagagctccttgccctgcctcaaagcatccatctcagcgtcgattcttaccactcagaatggagagcacaatgcccttgaagatctggtgatgaggtttaatgaggtgagctcctgggtgacatggctgatcctcacggcaggctccatggaggagaagcgagaagtcttttcatatttggtgcatgtggccaaatgctgctggaacatgggcaactacaacgctgtcatggagttcttggctggcctcaggtcaagaaaagttttaaaaatgtggcagttcatggaccagtctgatattgagaccatgaggagcctgaaggatgctatggcccagcatgagtcctcttgtgagtacagaaaggtggtgacacgtgccctgcacatccctggctgtaaggtggttccattctgtggggtgtttctgaaggagctctgtgaagtgcttgacggcgcctccggtctcatgaagctttgcccgcggtacaattcccaagaagaaactttagagtttgtagcagattacagtggacaagataatttcttacaacgagtgggacaaaatggcttaaagaattcggagaaggagtccactgtcaacagcatctttcaggtcatccggagctgcaatcgaagtctggagacagacgaggaggacagccccagtgaaggaaacagctccaggaaaagctccttgaaggataaaagccgatggcagtttataattggagatttgttggattcagacaatgacatctttgagcaatccaaagaatacgactctcatggttcagaggactcacagaaggccttcgaccatgggacggagctcatcccttggtacgtgctgtccatccaagccgatgtgcaccagttcctgctgcagggggccacggtcatccactacgaccaggacacacacctctctgcccgctgcttcctccagcttcagcccgacaatagcaccttgacctgggtaaagcccacaactgcctccccagccagcagtaaagcaaaacttggtgtacttaataacacagctgagcctggaaaattcccactactgggtaatgctggattaagtagcctgacggaaggggtcttggatctttttgcagtgaaggctgtatacatgggccaccctggcattgatatacacactgtgtgtgttcagaacaaactgggtagcatgttcctgtcagagactggtgtgacattgctctatgggcttcagaccacagacaacagattattgcacttcgtggcaccaaagcacacagctaaaatgctcttcagcggattattggaactcactagagctgtgagaaagatgaggaaattccctgaccaaagacagcagtggctgcggaaacagtacgtcagcctttatcaggaggatggacggtatgaaggcccaactttggctcacgctgtggagttgtttggtggcagacggtggagtgctcgaaaccccagccccggaacatcagcaaagaatgctgagaagcccaatatgcagagaaacaataccctgggcataagcactaccaagaaaaagaagaaaatcctcatgaggggtgagagtggagaggtaactgacgatgagatggcaacccgaaaggccaagatgcacaaagagtgtcgaagccggagtggttctgatcctcaagacattaatgaacaagaagaatcagaggtgaatgccatcgctaaccctccaaaccccctcccttccagaagagcccactctttgaccacagctgggtcccccaacttggctgccgggacgtcatctcccatcaggccagtgtcctcccctgtgctgtcttcttcaaacaagagcccatccagtgcttggagcagtagtagctggcacgggcggatcaaaggcggcatgaagggatttcagagcttcatggtttcagatagcaacatgagttttgttgaatttgttgagctgttcaaatcattcagtgtcaggagccgcaaggacctgaaggatctgtttgatgtctatgcagtgccctgcaaccgatctggctccgagtcagccccactctacaccaacctgacaattgatgaaaacaccagcgatcttcagcctgacctagatctgttgaccagaaatgtctcggatttggggttgttcattaagagtaaacagcagctatcggacaaccagaggcagatatctgatgccattgctgctgcaagcattgtgacaaatggcactgggattgagagcacatctctgggcatttttggggtgggcatacttcagctcaacgatttcctcgtgaattgccaaggagaacactgcacttatgatgaaatcctcagcatcatccagaagttcgagcctagcatcagtatgtgtcatcagggactaatgtcatttgaagggtttgccaggtttctgatggataaagaaaattttgcctcaaaaaatgatgagtcacaggagaacattaaagaactgcagctacccctctcatactattacatcgaatcttcgcacaatacctacctcacgggccatcagctcaaaggagaatcctcggtagaactctacagccaggtccttttgcaaggctgtcgaagtgtagaattggactgctgggacggagacgatgggatgcccatcatttatcatggacatacgctgacaaccaagatccccttcaaggaagtggttgaagccattgatcgcagtgccttcatcaactctgacctgccaatcatcatatcgattgagaaccactgttcattgcctcagcaacgaaaaatggcagaaattttcaagactgtgtttggagaaaagctggtgactaaattcttatttgagactgatttctcagatgatccaatgcttccttcacctgaccaactcagaaagaaagttcttcttaaaaacaagaagctaaaagcccatcagacgccagtggatatcttaaagcaaaaggctcatcagttagcatctatgcaagtgcaggcttataatggtgggaatgccaacccccgacctgccaataatgaggaagaggaagatgaggaggacgaatatgattatgactatgaatccctttctgatgacaacattctggaagacagacctgaaaataaatcatgtaatgacaagcttcagtttgaatataatgaagaaatcccaaagaggataaagaaagcagataactctgcttgcaacaaaggaaaggtttatgatatggaactgggagaagaattttatcttgatcagaataaaaaggaaagcagacagattgcaccagagctttctgaccttgtaatctattgtcaagcagtaaaatttccaggactgtcaactctaaatgcatctggctctagcagaggaaaagaaaggaaaagcaggaagtccatttttggcaacaatccgggcagaatgagcccaggggagacagcatcatttaacaaaacatctggaaaaagttcctgtgaaggcattcgacagacctgggaggaatcttcttcccctctcaacccaaccacgtccctcagtgctatcattagaactcccaaatgttatcatatctcgtcgctgaatgaaaatgccgccaaacgtctgtgtcgcaggtattctcagaaactgacccagcacaccgcctgtcagctgctgagaacttaccctgctgccacccgcatcgactcttccaacccgaaccccctcatgttctggctccatgggatacagcttgtggcactcaactaccagactgatgatctccctttacatttaaatgctgcaatgtttgaggcaaatggtggttgtggttatgtattgaaacctccagttctgtgggacaagaactgccccatgtatcagaagttttctccactagaaagagatctggacagcatggatcctgcagtctattctttaactattgtctctggtcagaatgtgtgccccagtaatagcatgggaagcccgtgcattgaagtcgacgtcctgggcatgcctctggacagctgccatttccgcacaaagcccatccatcgaaacaccctgaaccccatgtggaacgagcagtttctgttccacgttcacttcgaagatcttgtatttcttcgttttgcagttgtggaaaacaatagttcagcggtaactgctcagagaatcattccactgaaagctttaaaacgaggatatcgacatcttcagctgcgaaaccttcacaatgaagtcttggagatttctagtttattcattaacagcagaaggatggaagaaaattcctctggcaataccatgtcagcctcttcgatgtttaatacagaagaaagaaaatgtttgcagactcacagagtcacggtgcatggggtcccagggccagagccctttaccgttttcactattaatggaggcaccaaggcaaagcagcttctgcagcaaattctgacaaatgaacaagacatcaaacctgttaccacagactattttttgatggaagaaaaatattttatatctaaagaaaagaatgaatgtaggaaacaaccattccagagagccattggtccagaagaggagatcatgcaaattttaagcagctggtttccagaagagggatacatgggcaggattgtcttaaaaacccagcaggaaaacctagaagagaaaaacattgttcaagatgacaaagaggtgatcttgagctcagaggaggagagtttctttgtccaagtgcatgatgtttctccagagcaacctcgaacagtcatcaaagcaccccgcgtcagcactgcacaggatgtcattcagcagaccttatgcaaagccaaatattcctacagcatcctgagcaaccccaatccaagcgactatgtgcttttggaagaggtggtgaaagacactaccaacaagaagactaccacaccaaagtcctctcagcgggtccttctggatcaggagtgtgtgtttcaagcccaaagcaagtggaaaggtgcaggaaaattcatccttaagctaaaggagcaggtgcaggcatctcgagaagataaaaagaaaggcatttctttcgcaagtgaactcaagaagctcaccaagtcaactaaacagccccgaggacttacatcaccttctcagctcttgacctcagaaagtatccaaaccaaggaggagaaacctgtgggtggcttgtcctccagtgacacaatggattaccgacaggtgaagatctttaagcaagaagttaaagagtgaacatggtggaaaaaatataattattttcatcagacttaaactggaaattgatgatttctgaactgaagccttcacacatgtgagatccatgctgaggagaagcaaaatggcacagggctagttgccaccaaccaatttactgatgaatgaagcccaggggactgccattttataaatgtcagcagttggaaaaatcgtcacgaattgacttagagcaagggtcagcaagcttgtctgtaaagggccaaacagtaaatattttagggctgggggccataaaatatgttgcaaccacccaattctgccattgtagtgcaaaagcagccatagacaacacatacatgaacgaacgtggctgtattccaataaaactttatttatggacactg

SEQ ID NO: 6139 - DNA, 5536 bp, Homo sapiens
aggtcaatgcacaaactggcccagttggaaagacttgacctaggcaataatgaattcggtgagctgcctgaagttctggatcaaatacaaaatttgagggagttatggatggataataatgcattacaagtgttacctgggtctatagggaagttaaagatgttggtatacctggatatgtcaaaaaacagaatagaaacagttgacatggacatttctggatgtgaagcccttgaggacctcttattgtcatccaatatgttgcaacaattgcctgattctataggacttttgaaaaaactaacaactctaaaagtagatgacaatcaacttacaatgctacccaatacaattggaaatttatctttattagaagaatttgactgtagctgtaatgaactggagtcactaccttctactattggctaccttcatagtcttcggacattagcagttgatgagaatttccttccagaattacccagagaaattggaagttgtaagaatgtaacagtcatgtctctacgctccaacaaattagaatttcttcctgaagagattggacagatgcagaaactaagagtcctaaatttgagtgacaacagattgaagaatttaccattctcatttaccaaacttaaagagcttgcagctttgtggctttctgacaatcagtccaaagcccttatccctttacaaacagaagcccatccagaaacaaagcaaagagtattgactaactacatgtttccccagcagcctcgtggtgatgaagatttccagtcagacagtgacagctttaaccctacactgtgggaagagcagagacaacaacgcatgactgttgcctttgaatttgaagacaaaaaagaagatgacgaaaatgctgggaaagttaaggatctctcctgccaagccccctgggaaaggggccagcgtgggattactctccaacctgccagactgtctggcgattgctgcacaccatgggccaggtgtgatcagcagatccaagatatgcccgtcccccagaatgacccacagctggcatggggttgtataagtggcctccagcaggaaaggagcatgtgtactccattgccagttgcagcacaatccaccactcttccctctctaagtggcagacaggttgaaataaacctaaaacgatatccaactccttacccagaggatttaaagaatatggtaaaatctgttcaaaatttggtgggtaagccaagccatggagtgcgtgttgagaattcaaatccaactgctaacacggagcaaactgtgaaagaaaaatatgaacacaagtggccggtagccccaaaggagattacagtggaggattcttttgttcatccagctaatgaaatgaggattggggaacttcacccttcattagctgagacccctctgtacccacccaaacttgttctgctagggaaggacaaaaaagaatcaactgatgagtctgaagttgacaaaactcactgtctgaataacagtgtttcctcaggcacttactcagactactcgccttcccaggcttcctcaggatcctctaatacccgggttaaagtggggtccttgcagacaacagctaaagatgcagtacataattctttgtggggtaacaggattgcaccatctttcccacagcctcttgattcaaagccattactcagccagcgggaggctgttcccccaggcaatataccacagcgtcctgaccggctgcccatgagtgatactttcactgacaactggactgatggctcgcattatgacaacacagggtttgttgctgaggaaaccacagccgagaatgccaacagtaatcctctcttaagttcgaaatctagaagcacatcttcgcatggacgcaggcctttgatcaggcaagacaggattgttggtgttcccctggaactcgagcagtctacacacagacacacaccagaaacagaagtgcctccttccaatccttggcagaattggaccagaacccctagtccgtttgaagacaggaccgcttttccttccaaattagagacaacccccactaccagcccattgcctgaaaggaaagaacatataaaggaatctactgaaatacctagtcctttttctccaggcgtaccatgggagtatcatgattccaatcccaacaggagtcttagtaatgtcttttctcaaatccactgccgcccggaatcttctaaaggtgttatttcaattagcaaaagcacagagaggctttcccccctaatgaaagatatcaagtctaataaattcaaaaagtcacagagtatcgatgagattgacattggtacatataaggtgtataacataccattagaaaactatgcttctgggagtgatcacttaggaagccacgaacgaccggataagatgctgggaccagagcatggtatgtccagtatgtctcgaagccagtcagtcccaatgctggatgatgagatgctcacctacggaagtagtaaggggccacaacaacaaaaagcttctatgacaaaaaaagtctatcagtttgaccaaagcttcaatcctcaaggatcagtggaagtgaaagccgaaaagaggataccacccccttttcaacacaatcccgagtacgtgcaacaggccagcaaaaacatcgccaaggatttgattagtcctagagcttacagaggatacccaccgatggagcaaatgttttcattttctcagccatctgtgaatgaggatgctgtggtgaatgcccagttcgcaagccaaggggccagggcgggcttcctgagaagggccgactccctggtgagcgccacagaaatggccatgtttagaagggtcaatgagcctcatgagctgcccccaactgataggtacggcagacccccatataggggagggctggatcgccaaagcagcgttacagtgactgagtcccagttcctgaaaaggaatggcaggtatgaagatgaacacccttcatatcaagaagtgaaagctcaggcgggaagttttccggttaaaaaccttacccaaaggaggccattgtctgcgagaagctacagtacagagagttacggtgcctcccaaaccaggccagtttcagctaggcctactatggcagctcttttggaaaaaataccatctgactataacttgggtaactatggtgacaagccatcagataacagtgatttaaagacgaggcctactcctgtgaagggagaggagagctgtggtaaaatgcctgcagactggagacaacagctgcttagacatatagaagctagacggttagacaggaccccgtcccagcaaagcaacattttagacaatggacaagaagatgtatctcctagtggccaatggaatccttatccacttgggaggcgggatgtacctccggacaccattactaagaaggcaggcagccacatccagacgttgatggggtcccaaagccttcagcatcgcagccgggagcagcagccgtatgaaggaaatataaacaaagtgaccatccagcaatttcagtcaccattgcctattcagatcccctcttcacaggccacccggggacctcagcctggacggtgcttaattcaaactaaagggcaaaggagtatggatggatatccagagcagttttgtgtgagaatagaaaagaatcctggccttggatttagtatcagtggtggaattagtggacaaggaaatccattcaaaccttctgacaagggtatctttgttactagggttcagcctgatgggccagcatcaaacctactgcagcctggtgataagatccttcaggcaaatggacacagttttgtacatatggaacatgaaaaagctgtattactactgaagagtttccagaacacagtagacctagttattcaacgtgagcttactgtctaaatattttttataaatagtgaagatacgtctagccagacctaatgttcaaaaataaatttatacatagaaacaaattttgccaattgctggaccaatggcaaacattagtgccaaatgtataatactatatgttagcactgaccatccttaaaaaatgttaactctataaatatgatgttcatgtggttatgtattagttttaattgtcagcctctggctgtgcattggtgcagttttgtttctgtttttgtttttgtttttaatcaaataagtttcttctcaaaatggatttcatataatttcggagcacggaagcacacacaagctctttatgaattctgctctccatcagaaacactgcctcaaagttgtatatgcctttatatagaaaatacaaatataaagaattgtaattcccataaaatatttctagcacaaggtatatgttggcatatatacaaaaagaatatagagaaaaacaatattttcataaactaaacatctcagatagagaaaaaatatatcttaaaataagactttactatattgaatctttttcaataaaaattacatgataatgccttatgaaagtaactgtacatatggtataaagtgtttatatttggttccatattcatttgctaaattctcatgacacagagtgaaatatttcataaattagccatttatctctgggacccaaataaaaataggatgaactaatttgttcaatgcctttagctaattacaatacatgcagagtttagaaacagactaaaggtcattgtagttaagtctttttcaccacaaatttaagcagtggatgatgggtggcaggaaaggtattgctttatttctttcaagttcatgttgattataaactgtagcccctgtgatttctttacttgtaaatgtggaatttatttgtgtgttgcttaatctaatttgctgctttttaaattatttaaaacgaattttggaaattgataaaatttatcattacgaaagactgctgttagaaagttatggtaggtgattttaaatccttggtatttaaatatgaaacttcaaatataatttctcagagctgtggtctacctgtatcattaatttcaatggctgtttttctgggcagaaatagataaaatactttttttccaaaaacagtttcaaggtatgtaaaatcctgaatgctttttcactgaagagaaagacaagcatggttaatgtagaattatttacttttccattgaaactattttcctgcataaatgatcaaaatttattttataatcctttaaaatacttatctttcatattagtcattaatttaattacaatattaatttgaatttccaggataatttcccggagttggttgcatgcattatctttcataattttacatagttcttttgttatataatgaatttactttacatgctagtgtttcaagtattgtatgaggattttcacaatagtatcactgaatgatgtcaccagagctctgagaataatatttgtaagttaactgttttatggggacattgaaaatattgtatttttgtagggtctattaaaatgagtgtcactt

SEQ ID NO: 6140 - DNA, 1555 bp, Homo sapiens
actcactgagccccaggcccaaggataatgatgtgttgtttcttggtagcataatttgtcacacgtacattttttcttcttcttctcttgcagaaagctctgctccctctctctctccctctctctttctctcttttctccctctcctacattttcttgctgttgctaattcatggtgatcaaatgatgtacgacaaaataaattgtaaagagtgactgcctggagttgggaaccagaaggtgttttccccctcccaaggagacagcaaacctttaaaaaggaaggacaattgatttttggggggagcttaagtgagccttgactttgcagctggttgagaacaggttggaggagggtttaaagccaggtgcaccgagtcagctcgccatgtccagatccggggacaggacctccaccttcgaccccagccacagcgacaacctgctgcacggcctcaacctgctgtggaggaagcagctgttttgcgacgtgaccctgacggcccagggccagcagttccattgccacaaggccgtgctggcctcctgctcgcagtacttccgatcgctcttctccagccacccccctctcgggggaggggtcggcggccaggacggcctgggggcccccaaggaccagcagcagccgccgcagcagcagccgtcacagcagcagcagccgccgccgcaggaggagcccgggactccttcttcctcccccgacgacaagctgctgaccagcccccgggccatcaacaacctggtgctgcagggctgctcgtccatcgggctgcgcctggtgctcgagtacctctacacggccaacgtgaccctgtccctggacacggtggaggaggtgctgtcggtcagcaagatcctgcacatcccccaggtcaccaagctctgcgtgcagttcctcaacgaccagatctcggtgcagaactacaagcaggtgtgcaagatcgccgcgctgcacggcctggaggagaccaagaagctggccaacaagtacctggtggaggatgtgctgctgctcaacttcgaggagatgcgcgccctgctggactcgctgccgccccccgtggagtcggagctggcgctcttccagatgtccgtgctgtggctggagcacgaccgcgagacccgcatgcagtatgcgcctgacctcatgaagcgcctccgcttcgccctcatcccggccccggagctggtggagcgggtccagtcagtggatttcatgcgaaccgacccggtctgccagaagctgctgctggacgccatgaactaccacctgatgcccttcaggcagcactgcaggcagagcctggccagcagaattcgctctaacaagaaaatgctgttattggttggagggctgcctcctggaccggaccggctccccagcaatttggttcagtattacgacgatgaaaagaagacatggaaaatactcacaatcacaggaccacaccccatttcagggaagcaggaaagtgcaagctcaccagagttcagaaggaggaaaaccagagaattttcaaacaacacaatgtga

SEQ ID NO: 6141 - DNA, 1461 bp, Homo sapiens
gcgtggcaggagaggcggggccaattttgctgagctttctcgcgggcttgcagctgcggcaagtgctggcggcggctgctcgcgcaagtcagctggcgtgggaactaccctttgtagctgagaacggcttgtttattgctacaaagactctattgacattggtagcttcagcggcagcagcttcttacggtataaagctgttgcttcctgaagaggctacaagcatccttccctaggactgctgtaagctttgagcctctagcaggagacatgcctcggggacgaaagagtcggcgccgccgtaatgcgagagccgcagaagagaaccgcaacaatcgcaaaatccaggcctcagaggcctccgagacccctatggccgcctctgtggtagcgagcacccccgaagacgacctgagcggccccgaggaagacccgagcactccagaggaggcctctaccacccctgaagaagcctcgagcactgcccaagcacaaaagccttcagtgccccggagcaattttcagggcaccaagaaaagtctcctgatgtctatattagcgctcatcttcatcatgggcaacagcgccaaggaagctctggtctggaaagtgctggggaagttaggaatgcagcctggacgtcagcacagcatctttggagatccgaagaagatcgtcacagaagagtttgtgcgcagagggtacctgatttataaaccggtgccccgtagcagtccggtggagtatgagttcttctgggggccccgagcacacgtggaatcgagcaaactgaaagtcatgcattttgtggcaagggttcgtaaccgatgctctaaagactggccttgtaattatgactgggattcggacgatgatgcagaggttgaggctatcctcaattcaggtgctaggggttattccgccccttaagtagatctgaggcagacccttgggggtgtaaaagagagtcacaggtaccccaaggagtagatgccagggtcctaagttgaaaatgatgtcgattgggggcgggggacactgtatttgatatttgtgatcagtgatcattgttcaactgcgaaatagagtgtttgcttttgataatggaaaattgtattcgttttaaaattccgtttgttgagaataacaatatgtttaaaaatataattgaacaaatttttttctttgtttcctgtcattgacatttagtataacagttttgctaacgttctaaaatgaagtcgttccatcataatctatgatcttgtacagcacttatagaaataagctgttcttttgaagttgaaatacccagtaaaatgttgaagaaggatggaggatttcttcatatctgacgtttctgaaaccctttgtgtctgctgttgtgtgaagattgacatttaccatgattttccttagttactgcagaacatagagaaaaataaaagcctaacgaatagt

SEQ ID NO: 6142 - DNA, 7303 bp, Homo sapiens; identical to SEQ ID NO: 1391

SEQ ID NO: 6143 - DNA, 3481 bp, Homo sapiens
aaacagaaggcagatagagagggagtgagaggcaggagctgagacacagatcctggaggaagaagaccaaaggaagggggcagagacagaaagggaggtgctaggacaaaactcgaaaggtggccctatcagggaagcagaggagaggccgttctagggaagcccagctccggcacttttggccccaactcccgcaggtctgctggctccaggaaaggtggaggagggagggaggagtgggagaatgtgggcgcagggtgggacatgggcatggccaggggcagcctcactcgggttccaggggtgatgggagagggcactcagggcccagagctcagccttgaccctgacccttgctctccccaatccactccggggctcatgaaggggaacaagctggaggagcaggaccctagacctctgcagcccataccaggtctcatggaggggaacaagctggaggagcaggactctagccctccacagtccactccagggctcatgaaggggaacaagcgtgaggagcaggggctgggccccgaacctgcggcgccccagcagcccacggcggaggaggaggccctgatcgagttccaccgctcctaccgagagctcttcgagttcttctgcaacaacaccaccatccacggcgccatccgcctggtgtgctcccagcacaaccgcatgaagacggccttctgggcagtgctgtggctctgcacctttggcatgatgtactggcaattcggcctgcttttcggagagtacttcagctaccccgtcagcctcaacatcaacctcaactcggacaagctcgtcttccccgcagtgaccatctgcaccctcaatccctacaggtacccggaaattaaagaggagctggaggagctggaccgcatcacagagcagacgctctttgacctgtacaaatacagctccttcaccactctcgtggccggctcccgcagccgtcgcgacctgcgggggactctgccgcaccccttgcagcgcctgagggtcccgcccccgcctcacggggcccgtcgagcccgtagcgtggcctccagcttgcgggacaacaacccccaggtggactggaaggactggaagatcggcttccagctgtgcaaccagaacaaatcggactgcttctaccagacatactcatcaggggtggatgcggtgagggagtggtaccgcttccactacatcaacatcctgtcgaggctgccagagactctgccatccctggaggaggacacgctgggcaacttcatcttcgcctgccgcttcaaccaggtctcctgcaaccaggcgaattactctcacttccaccacccgatgtatggaaactgctatactttcaatgacaagaacaactccaacctctggatgtcttccatgcctggaatcaacaacggtctgtccctgatgctgcgcgcagagcagaatgacttcattcccctgctgtccacagtgactggggcccgggtaatggtgcacgggcaggatgaacctgcctttatggatgatggtggctttaacttgcggcctggcgtggagacctccatcagcatgaggaaggaaaccctggacagacttgggggcgattatggcgactgcaccaagaatggcagtgatgttcctgttgagaacctttacccttcaaagtacacacagcaggtgtgtattcactcctgcttccaggagagcatgatcaaggagtgtggctgtgcctacatcttctatccgcggccccagaacgtggagtactgtgactacagaaagcacagttcctgggggtactgctactataagctccaggttgacttctcctcagaccacctgggctgtttcaccaagtgccggaagccatgcagcgtgaccagctaccagctctctgctggttactcacgatggccctcggtgacatcccaggaatgggtcttccagatgctatcgcgacagaacaattacaccgtcaacaacaagagaaatggagtggccaaagtcaacatcttcttcaaggagctgaactacaaaaccaattctgagtctccctctgtcacgatggtcaccctcctgtccaacctgggcagccagtggagcctgtggttcggctcctcggtgttgtctgtggtggagatggctgagctcgtctttgacctgctggtcatcatgttcctcatgctgctccgaaggttccgaagccgatactggtctccaggccgagggggcaggggtgctcaggaggtagcctccaccctggcatcctcccctccttcccacttctgcccccaccccatgtctctgtccttgtcccagccaggccctgctccctctccagccttgacagcccctccccctgcctatgccaccctgggcccccgcccatctccagggggctctgcaggggccagttcctccacctgtcctctgggggggccctgagagggaaggagaggtttctcacaccaaggcagatgctcctctggtgggagggtgctggccctggcaagattgaaggatgtgcagggcttcctctcagagccgcccaaactgccgttgatgtgtggaggggaagcaagatgggtaagggctcaggaagttgctccaagaacagtagctgatgaagctgcccagaagtgccttggctccagccctgtaccccttggtactgcctctgaacactctggtttccccacccaactgcggctaagtctctttttcccttggatcagccaagcgaaacttggagctttgacaaggaactttcctaagaaaccgctgataaccaggacaaaacacaaccaagggtacacgcaggcatgcacgggtttcctgcccagcgacggcttaagccagcccccgactggcctggccacactgctctccagtagcacagatgtctgctcctcctcttgaacttgggtgggaaaccccacccaaaagccccctttgttacttaggcaattccccttccctgactcccgagggctagggctagagcagacccgggtaagtaaaggcagacccagggctcctctagcctcatacccgtgccctcacagagccatgccccggcacctctgccctgtgtctttcatacctctacatgtctgcttgagatatttcctcagcctgaaagtttccccaaccatctgccagagaactcctatgcatcccttagaaccctgctcagacaccattacttttgtgaacgcttctgccacatcttgtcttccccaaaattgatcactccgccttctcctgggctcccgtagcacactataacatctgctggagtgttgctgttgcaccatactttcttgtacatttgtgtctcccttcccaactagactgtaagtgccttgcggtcagggactgaatcttgcccgtttatgtatgctccatgtctagcccatcatcctgcttggagcaagtaggcaggagctcaataaatgtttgttgcatgaaggaa

SEQ ID NO: 6144 - DNA, 2812 bp, Homo sapiens
attttgtcatcgcaacactaaacctttgtcggtctggtgctccccaattcatgaattgcttcttacttaaataaactctttaaaattttactgtgcctcatattttttttaatacagaagaaatgagagaaggaagaatattttagaaataaaggaacttcatgggcagagtcacagtgcaagacaaaaggagcagaccaagggcaagattgcttggggagtgaagactccctccctcttctcccctgagaagctgagataaagggggaggagaagcctgggtgccccccactgataagcaggctccacccagaggccagtcctgtgtgtctggggacaaggcgaaagagcagcagaagtgccccttctccaggatcaaggaactggggcggggggtgtttcctggaccccagtcctccgaatcagctcctagagtggaaccaggaaggattctggagccacagaagatagacagatggaaggtggggaccaaagtgaggaagagccgagggaacgcagccaggcaggtggaatgggaactctctggagccaagagagcactccagaagagaggctgcccgtggaagggagcaggccatgggcagtggccaggcgggtgctgacagctatcctgattttgggcctgctcctttgtttttctgtgcttttgttctacaacttccagaactgtggccctcgcccctgtgagacatctgtgtgtttggatctccgggatcattacctggcctctgggaacacaagtgtggccccctgcaccgacttcttcagctttgcctgtggaagggccaaagagaccaataattcttttcaggagcttgccacaaagaacaaaaaccgacttcggagaatactggaggtccagaattcctggcacccaggctctggggaggagaaagccttccagttctacaactcctgcatggatacacttgccattgaagctgcagggactggtcccctcagacaagttattgaggagcttggaggctggcgcatctctggtaaatggacttccttaaactttaaccgaacgctgagacttctgatgagtcagtatggccatttccctttcttcagagcctacctaggacctcatcctgcctctccacacacaccagtcatccagatagaccagccagagtttgatgttcccctcaagcaagatcaagaacagaagatctatgcccagatctttcgggaatacctgacttacctgaatcagctgggaaccttgctgggaggagacccaagcaaggtgcaagaacactcttccttgtcaatctccatcacttcacggctgttccagtttctgaggcccctggagcagcggcgggcacagggcaagctcttccagatggtcactatcgaccagctcaaggaaatggcccccgccatcgactggttgtcctgcttgcaagcgacattcacaccgatgtccctgagcccttctcagtccctcgtggtccatgacgtggaatatttgaaaaacatgtcacaactggtggaggagatgctgctaaagcagagggactttctgcagagccacatgatcttagggctggtggtgaccctttctccagccctggacagtcaattccaggaggcacgcagaaagctcagccagaaactgcgggaactgacagagcaaccacccatgcctgcccgcccacgatggatgaagtgcgtggaggagacaggcacgttcttcgagcccacgctggcggctttgtttgttcgtgaggcctttggcccgagcacccgaagtgctgccatgaaattattcactgcgatccgggatgccctcatcactcgcctcagaaaccttccctggatgaatgaggagacccagaacatggcccaggacaaggttgctcaactgcaggtggagatgggggcttcagaatgggccctgaagccagagctggcccgacaagaatacaacgatatacagcttggatcgagcttcctgcagtctgtcctgagctgtgtccggtccctccgagctagaattgtccagagcttcttgcagcctcacccccaacacaggtggaaggtgtccccttgggacgtcaatgcttactattcggtatctgaccatgtggtagtctttccagctggactcctccaacccccattcttccaccctggctatcccagagccgtgaactttggcgctgctggcagcatcatggcccacgagctgttgcacatcttctaccagctcttactgcctgggggctgcctcgcctgtgacaaccatgccctccaggaagctcacctgtgcctgaagcgccattatgctgcctttccattacctagcagaacctccttcaatgactccctcacattcttagagaatgctgcagacgttggggggctagccatcgcgctgcaggcatacagcaagaggctgttacggcaccatggggagactgtcctgcccagcctggacctcagcccccagcagatcttctttcgaagctatgcccaggtgatgtgtaggaagcccagcccccaggactctcacgacactcacagccctccacacctccgagtccacgggcccctcagcagcaccccagcctttgccaggtatttccgctgtgcacgtggtgctctcttgaacccctccagccgctgccagctctggtaacttggttaccaaagatgccacagcacagaaatatcgaccaacacctccctggtcacatccatggaatcagagcaagatttcctttctgcttctgttccaaaaataaaagctggcacttggcttccgcttgtctcttaa

SEQ ID NO: 6145 - DNA, 3030 bp, Homo sapiens
ttccttttatgcgaacacaagtatatgaggggttgtgtaaaaattatttttctcttgctgtactacaaagagatagaatcaaactgctttttttcgacatactggtttttctttctgtttttcttctctttcttctatttcttgtggatattatggctaataacacaacaagtttagggagtccatggccagaaaacttttgggaggaccttatcatgtccttcactgtatccatggcaatcgggctggtacttggaggatttatttgggctgtgttcatttgtctgtctcgaagaagaagagccagtgctcccatctcacagtggagttcaagcaggagatctaggtcttcttacacccacggcctcaacagaactggattttaccgccacagtggctgtgaacgtcgaagcaacctcagcctggccagtctcaccttccagcgacaagcttccctggaacaagcaaattcctttccaagaaaatcaagtttcagagcttctactttccatccctttctgcaatgtccaccacttcctgtggaaactgagagtcagctggtgactctcccttcttccaatatctctcccaccatcagcacttcccacagtctgagccgtcctgactactggtccagtaacagtcttcgagtgggcctttcaacaccgcccccacctgcctatgagtccatcatcaaggcattcccagattcctgagtagggtggcttttggtttttgtttctttcttgtcttgtcttttattgaaaggaaatcaaaaataggctaaacagaattttgagggcatggcccaaataactcatgagttccaagttgaaacatggttgtgcaagttggacattacaatgtaaaacacattttcttcaaacacgttttcccttttgtttcaaaaaatgtaatattttcccccaagcgttttatatttatgtattttgtattcaatgtgaggcttattaaaaatagtgattctaatgtaagaatcagctaagatgcattatatatattttaattaaaattaaaacttcagatatttgtggattacaatcctcatttacttccaatgtgactaaaaagagaaaaaaaatcactgtgtcactttaaagaaaaatcttctaagggatttggattttactttctttagaatgacaagtgaatcatattgacattttacaatcttagatttttctttttttttcttttgagacagggtcttgatccgtcgcccaggcgggagttgcagtagcatgatcaggactcactgcagcctctatctcccaggctcaagtaatcctcccatcttagtgccccaagtagctgggactacaggggtgcactaccacaccgggttgaatttttttttaattttagtagagatgaagtgtcactatgttaccaaggctggtctcaaactcctaaactcagatgatcctcctgcctcggcctcccaaagtgctggaattagcctggccaatcttggatttttaatggaatatgtgggcacaaaatgacagaacataggacattctaaagttccttgatttgatcattataagaagtgtgggactcaagcacaggaaactgaactcttttggtgtcattggatgtttcatttttgacactaattttttctggacaaactctttatgtgtttttcccaagaatagttatctacttcctggaggcaaaatccttggatttactaacatgatgatttaccttttcttcaccgttgtcgttacattgttagaaaagcaacaggaaaaaatccaattcatttgacctaaaaacaagcctcaagtttaaaaccaagctcacgtttttcttaagggaaaaattttctttcttaaacttacatctagcaacttggaaagcactttctctggggatcttcttttgtaactttgcagacaaataagtatgagtcactggggagagagtttgttattgaaatagatgttgcccatgaagaattctccttcctggattgactcttaatcatcaggcatcattcctggtttgcttctctacgaatctcaattccaacttctctgcagagtctgtacagtgattaagccatgccagatggtctttggtgcacacagttatttaagaatccacttccacaggtggctgcccttgtaaggaagaatgcatccctaaatgtggccaccagagagttccagtgggcagatgtctgtggctgcccttctcatttaaggacatgagttcactggagtattactcaaaaagtctgtggttcatttccagtattgtgaatatttagtttatgtggccgtttctttgtttctttgaacagtgggattttcagtgaaaaagtaccctctttttcatttcctattgcagtggtcacagctaatagtgtctgaacatggttcaagaataagagattccatgtagcattttctttattattttcatttcccttatattatccatcattccttaaggacaattattcttaataatgcttatagaaaatgttctctaattaaacatgccaaaaggaaaaagtaagagaaagagggagcaagaagaaaatggaagaaaaagggaaaaaagctaaccggataaccaatttgttataagttggttttcaacaaagaaatttagcagccaagtaaggtttcaagggaatattaacttggtatcagggctacttttttttttttttttttacttgcatgtcatccttaatgtctaacatgaaaaatcagcaaagagtatggtttttatcaagaatttgtgttgggagtaaaaactgctttatagctcccaaattaggaagagaagagcagaaatcctctggggcatttaaccatctggcagaattgttgctgcacccttatcccagttataagacagtcaaaatgactatttcctaaatattgtgagtgtatgaaatgtgaaattaaagcaaaaactggagacttttaatgtatttctttaatttgaaatgttttgtggattgtgaaataaaaataaatttatgtc

SEQ ID NO: 6146 - DNA, 921 bp, Homo sapiens
actggtgacgtagatctcatgtgaccaggagtcgacgtgtgcagaagtcctggtaatctggtccttgttcccgtctggataccagcttccttcagcagcgcaggcggtggtccctgaggcccgtggaaggagtcaaacttgcgggaattttgcagaagtcattgtattcaaagaagaataagcaagaaagaaaagaaggaaggaagagaggtagacagatacaagatgaaatcctgtcaaaaaatggaaggaaaaccagaaaatgagagtgaaccaaagcatgaggaagagccaaagcctgaggaaaagccagaagaggaggagaagctagaggaggaggccaaagcaaaaggaacttttagagaaaggctgattcaatctctccaggagtttaaagaagatatacacaacaggcatttaagcaatgaagatatgtttagagaagtggatgaaatagatgagataaggagagtcagaaacaaacttatagtgatgcgttggaaggttaatcgaaaccatccttacccctatttaatgtagtttaccttgatttttatctgatattaacaataccatatagcttgctttttattagcatttcctgatattcctttgtccatatttctacttataacctgttgctattaatggttttagatgtatctcttgttatctgcatctcattgtttattgtattttgaaccaatctacaagtctctgtcttttaataaaagaactttacacatttgtaaaaaagaggttcttggtaagatataaaatggaaaaaggctaagtaatatgtgaatatcatatttttgaaaggtaaaaagtacatttgtatattacatatatggacataacttgtgaaggatgaaagaaagtacagcctctcggtggtgggattatgaatgatttttctcc

SEQ ID NO: 6147 - DNA, 1934 bp, Homo sapiens
aaagctaaccctcgggcttgaggggaagaggctgactgtacgttccttctactctggcaccactctccaggctgccatggggcccagcacccctctcctcatcttgttccttttgtcatggtcgggacccctccaaggacagcagcaccaccttgtggagtacatggaacgccgactagctgctttagaggttgagatccgtagcattttagtgtccgagaggataattgctaagggagcagagacctcttcacaccttcatgcgcttagacctgcctagaggctcagatggctcagtggcactgctcacagagaacacaggctggaggacatggagtcggggaacggctggcccagtgccaggaccagagtagtcggcatgctgctgagctgcgggacttcaagaacaagatgctgccactgctggaggtggcagagaaggagcgggaggcactcagaactgaggccgacaccatctccgggagagtggatcgtctggagcgggaggtagactatctggagacccagaacccagctctgccctgtgtagagtttgatgagaaggtgactggaggccctgggaccaaaggcaagggaagaaggaatgagaagtacgatatggtgacagactgtggctacacaatctctcaagtgagatcaatgaagattctgaagcgatttggtggcccagctggtctatggaccaaggatccactggggcaaacagagaagatctacgtgttagatgggacacagaatgacacagcctttgtcttcccaaggctgcgtgacttcacccttgccatggctgcccggaaagcttcccgagtccgggtgcccttcccctgggtaggcacagggcagctggtatatggtggctttctttattttgctcggaggcctcctggaagacctggtggaggtggtgagatggagaacactttgcagctaatcaaattccacctggcaaaccgaacagtggtggacagctcagtattcccagcagaggggctgatccccccctacggcttgacagcagacacctacatcgacctggcagctgatgaggaaggtctttgggctgtctatgccacccgggaggatgacaggcacttgtgtctggccaagttagatccacagacactggacacagagcagcagtgggacacaccatgtcccagagagaatgctgaggctgcctttgtcatctgtgggaccctctatgtcgtctataacacccgtcctgccagtcgggcccgcatccagtgctcctttgatgccagcggcaccctgacccctgaacgggcagcactcccttattttccccgcagatatggtgcccatgccagcctccgctataacccccgagaacgccagctctatgcctgggatgatggctaccagattgtctataagctggagatgaggaagaaagaggaggaggtttgaggagctagccttgttttttgcatctttctcactcccatacatttatattatatccccactaaatttcttgttcctcattcttcaaatgtgggccagttgtggctcaaatcctctatatttttagccaatggcaatcaaattctttcagctcctttgtttcatacggaactccagatcctgagtaatccttttagagcccgaagagtcaaaaccctcaatgttccctcctgctctcctgccccatgtcaacaaatttcaggctaaggatgccccagacccagggctctaaccttgtatgcgggcaggcccagggagcaggcagcagtgttcttcccctcagagtgacttggggagggagaaataggaggagacgtccagctctgtcctctcttcctcactcctcccttcagtgtcctgaggaacaggactttctccacattgttttgtattgcaacattttgcattaaaaggaaaatccactgctc

SEQ ID NO: 6148 - DNA, 1259 bp, Homo sapiens
ggacagcttggagatagggcccggaattgcgggcgtcactctgctcctgcgacctagccaggcgtgagggagtgacagcagcgcattcgcgggacgagagcgatgagtgagaacgccgcaccaggtctgatctcagagctgaagctggctgtgccctggggccacatcgcagccaaagcctggggctccctgcagggccctccagttctctgcctgcacggctggctggacaatgccagctccttcgacagactcatccctcttctcccgcaagacttttattacgttgccatggatttcggaggtcatgggctctcgtcccattacagcccaggtgtcccatattacctccagacttttgtgagtgagatccgaagagttgtggcagccttgaaatggaatcgattctccattctgggccacagcttcggtggcgtcgtgggcggaatgtttttctgtaccttccccgagatggtggataaacttatcttgctggacacgccgctctttctcctggaatcagatgaaatggagaacttgctgacctacaagcggagagccatagagcacgtgctgcaggtagaggcctcccaggagccctcgcacgtgttcagcctgaagcagctgctgcagaggcagagaacagcattgacttcatcagcagggagctgtgtgcgcattccatcaggaagctgcaggcccatgtcctgttgatcaaagcagtccacggatattttgattcaagacagaattactctgagaaggagtccctgtcgttcatgatagacacgatgaaatccaccctcaaagagcagttccagtttgtggaagtcccaggcaatcactgtgtccacatgagcgaaccccagcacgtggccagtatcatcagctccttcttacagtgcacacacatgctcccagcccagctgtagctctgggcctggaactatgaagacctagtgctcccagactcaacactgggactctgagttcctgagccccacaacaaggccagggatggtggggacaggcctcactagtcttgaggcccagcctaggatggtagtcaggggaaggagcgagattccaacttcaacatctgtgacctcaagggggagacagagtctgggttccagggctgctttctcctggctaataataaatatccagccagctggaggaaggaagggcaggctgggcccacctagcctttccctgctgcccaactggatggaaaataaaaggttcttgtattctca

SEQ ID NO: 6149 - DNA, 506 bp, Homo sapiens
gtctgggtcacctggaacgtcttcatcatctgcttctacctggaagtcggtggcctcttaaaggacagcgagctactgaccttcagcctctcccggcatcgctcctggtggcgtgagcgctggccaggctgtctgcatgaggaggtgccagcagtgggcctcggggccccccatggccaggccctggtgtcaggtgctggctgtgccctggagcccagctatgtggaggccctacacagttgcctgcagatcctgatcgcgaatcccagatggcttgctccacagaggaggaggaacccctggtggctgctggctggagtgggctggggccaaagcttctgggctttgtctgtggctgccaggtggtcagcgtgtttacggaggaagaggacagctttgatttcattggtggatttgatccatttcctctctaccatgtcaatgaaaagccatccagtctcttgtccaagcaggtgtacttccccacaggccagaccccactgaga

SEQ ID NO: 6150 - DNA, 1673 bp, Homo sapiens
cttttgcatcttggaagggactgtaatctactgtagtgaagaacagagcctctcaatcagacgggtgtaaataagagacggaggggagtccaaaagaaaaggaagaggaggaaaaacaagtgtgtgttggggggaacagggggaaaagcatttttggtggatggtatgaagccagccatggaaactgcagccgaggaaaatactgaacaaagccaagagagaaaagtgaacagcagagctgaaatggaaattggcaggtaccactggatgtacccaggctcaaagaaccaccagtaccatcccgtgccaaccctgggggacagggctagccccttgagcagtccaggctgctttgaatgctgcatcaagtgtctgggaggagtcccctacgcctccctggtggccaccatcctctgcttctccggggtggccttattctgcggctgtgggcatgtggctctcgcaggcaccgtggcgattcttgagcaacacttctccaccaacgccagtgaccatgccttgctgagcgaggtgatacaactgatgcagtatgtcatctatggaattgcgtcctttttcttcttgtatgggatcattctgttggcagaaggcttttacaccacaagtgcagtgaaagaactgcacggtgagtttaaaacaaccgcttgtggccgatgcatcagtggaatgttcgttttcctcacctatgtgcttggagtggcctggctgggtgtgtttggtttctcagcggtgcccgtgtttatgttctacaacatatggtcaacttgtgaagtcatcaagtcaccgcagaccaacgggaccacgggtgtggagcagatctgtgtggatatccgacaatacggtatcattccttggaatgctttccccggaaaaatatgtggctctgccctggagaacatctgcaacacaaacgagttctacatgtcctatcacctgttcattgtggcctgtgcaggagctggtgccaccgtcattgccctgctgatctacatgatggctactacatataactatgcggttttgaagtttaagagtcgggaagattgctgcactaaattctaaattgcataaggagttttagagagctatgctctgtagcatgaaatatcactgacactccagactaaagcagagtctaggtttctgcaattttgttacagtaatttgtaaatagctttagtaaactcaccttgcatggtagattaataagatgacttactgtacatgaattacacaataatgagatctggtggctatttccacattttgaaaaggattcagttatttactgacagtggtgagcatcctttttaaaataatgttctcatacttaaacattagagagcagtatctttaaatgaattattaacactttggaatacttacattttctgttatttttgattgcctgataaccagtttcaatgatgaaaatgaaaacaagtgctgaagatgaaatggaagagaaccgttttaatctggattttgttttgtcacacctggaaaatactttgcaaatatgttctaaattgaaaacaatttttttatgatcacatggttcactaccaaatgaccctcaaataagccagatgaaaatttgaagaaaaaggtcacccagttctctggaaaaaaaaaaaaaaaaaaaaaaaaaa

SEQ ID NO: 6151 - DNA, 683 bp, Homo sapiens
gggaatattgccctggatgatgacaccagcatcaaccgccacaacaacttccggacgtttttgcaagccctgatgctgctgttcaggagcgccacgggggaggcctggcacgagatcatgctgtcctgcctgagcaaccaggcctgtgatgagcaggccaatgccaccgagtgtggaagtgactttgcctacttctacttcgtctccttcatcttcctgtgctcctttctgatgttgaacctctttgtggctgtgatcatggacaattttgagtacctcacgcgggactcttccatcctaggtcctcaccacttggatgagttcatccgggtctgggctgaatacgacccggctgcgtgttgccggattcattataaggatatgtacagtttgttgcgttgtattgcgccacccgttggcttagggaagaactgccctcgtaggttggcctacaagcgcctggttcgcatgaacatgcccatctccaacgaggacatgactgttcacttcacgtccacgctgatggccctcatccggacggcactggagatcaagctggccccagctgggacaaagcagcatcagtgtgacgcggagttgaggaaggagatttccgttgtgtgggccaatctgccccagaagactttggacttgctggtaccaccccataagcgtaagtgtga

SEQ ID NO: 6152 - DNA, 479 bp, Homo sapiens
ctggtctcaaactgctgagctcaagtgatccgcccacctcagcctcccaaagtgttgagattagaggcaggagccatcgcgcctggctcgccagggaaaattctaagagtggcgtgtggaggagaccaagcagtggtggtctacttaaccaatgggcagccttccattgagcggttccccatcagctttaaaacctacttctcaggaaactactttcaccacgttgtgctggggatttactgcaatggccgctatggctcattgggcatgagccgcagggctgagctgatggacaagccattgacttttcggactctgagtgacctcatctttgactttgaggactcttacaagaaatacctgcacacagtcaagaaggtcaagattgggctgtacgtcccccatgagcctcatagcttccagcccattgagtggaagcagctggtcctcaacgtctcaaagatgctgagggctgacat

SEQ ID NO: 6153 - DNA, 3217 bp, Homo sapiens
gccagagcagcggggccgggcgcgcagggcctggccggagcccccactcccaggagtttcctctgcagagccccgcgccccccgcgccgggatttcagcccgatcccctcctctccctgcgcccagcctctccccagcatgtaaagtcttctgtctctcctcggagttggcggaggcggcaactttccattctcgccgccgggggccgggcagcagcgggcgcgcgggtcagcgctcagcacggcgggcagcgccgcgctgcgcaccgccgccgaccatgagcgaggacagccgcggagacagccgcgccgagagcgccaaggacctggagaagcagcttcgcctgcgcgtgtgcgtgctcagcgagctccagaagaccgagcgggactatgtgggcacgctggagttcctggtgtcggcattcttacacagaatgaaccagtgtgcagcatcaaaagttgacaaaaatgtgacagaagaaacagtgaagatgttgttctcaaacattgaagacatccttgcagtacataaagaattcttaaaagtcgtggaagaatgcttacaccccgaacctaatgctcaacaagaagtgggaacctgctttcttcactttaaagacaagtttcgtatctatgatgaatattgtagtaaccatgagaaggcacaaaaattacttcttgaactcaacaaaataagaacaatccggacatttcttttgaactgcatgctgcttggaggacggaagaacacagatgttcccttggaaggatatttagtaacaccaatacaaagaatatgcaagtaccctcttattttgaaggagttgctgaagcggactccacggaaacacagtgactatgcagcagtgatggaagccctccaagccatgaaagctgtctgttccaacataaacgaggccaagagacagatggagaagttagaagttttagaggaatggcagtctcacattgaaggctgggaggggtccaacatcactgacacctgcactgaaatgctaatgtgtggagtcttactgaaaatttcttctggaaatattcaagaacgggtgttttttcttttcgataatcttttggtgtactgcaaaagaaaacacagacggttgaagaacagcaaggcatctacagatggacatcggtacctttttcgtggccggatcaacacggaggtgatggaagtggagaatgtggatgatggcaccgctgatttccatagcagtggacacattgttgttaatggatggaagatacataacacagcaaaaaataaatggtttgtttgtatggcaaaaacacctgaagagaagcatgaatggtttgaagctattttgaaagaaagagaacggcggaaaggtttaaaattaggaatggagcaagatacctgggtcatgatctctgaacagggtgagaaactttataaaatgatgtgcagacaaggaaatctgatcaaagaccgaaagagaaaactgactacgttccctaaatgctttcttggaagcgaatttgtgtcatggctgttggaaattggagagattcacaggcctgaggaaggcgtgcacttgggacaagcattattagaaaatggaatcattcaccatgttactgataaacatcaattcaaaccagaacagatgttatatagatttcgctatgatgatggaacattttatccaagaaatgagatgcaggacgtgatttcaaagggtgtaagattatattgtcgtcttcatagcctttttactccagtgataagagataaagattaccatttaaggacctacaaatctgtggtcatggccaacaaactgatagactggttaattgcacagggagattgccgcaccagagaagaggcaatgatatttggcgttggactctgtgacaatggatttatgcaccatgtccttgaaaaaagcgaattcaaagatgaacccctacttttccgttttttttcggatgaggaaatggagggatcaaatatgaaacatcgacttatgaaacatgacttaaaagttgtggaaaatgttatagctaagtcattattgattaaatccaatgaaggcagctatggctttggattagaagacaaaaataaagttccaataataaagttggtagaaaagggatctaatgctgagatggctggcatggaagtcgggaaaaagatttttgctattaatggtgacctagtttttatgagacctttcaatgaagtggattgcttcctgaaatcgtgtttaaacagcagaaaacctctaagagttcttgtgagcacaaagccaagagagacagtgaaaattccagattcagctgatggacttggcttccagatccggggatttggcccttctgttgtgcatgctgtaggaagaggaactgtggctgcagcagctggtcttcaccctggacagtgcattatcaaggtgaatggaatcaatgtcagcaaagagacacatgccagtgtcattgcacacgttacagcctgcaggaagtacaggcggccaacgaagcaagattccatacaatgggtttataatagcattgagagtgctcaagaagaccttcaaaaatctcactccaagccccctggagatgaagcaggggatgcttttgactgtaaagtagaagaggttattgacaaattcaacactatggccatcattgatgggaagaaggagcatgtgagtctgacagtggacaatgtccacctggaatatggtgtcgtgtatgagtacgacagcacagctggcatcaagtgcaatgtggtggaaaagatgattgagcccaaaggtttcttcagcttaactgccaagattcttgaagccctggctaaaagtgatgagcattttgtacaaaactgtaccagcctaaattctctaaatgaagtgattcctactgaccttcagagtaaattcagtgccctttgcagtgaaagaattgaacacctatgtcagagaatatccagttataaaaaggttcaagcttcagaaaggttttacaatttcacagcacggcatgctgtctgggagcacagttttgatcttcacagtgtaagcagcacatttccagtacctgtgactatggagttcctcctgctgcctcctcctctcttaggaatatcccaggatggaagacagcactgcattcctgaggaccttccttctcaagaaatgctcttagcagagagggcccctgtctga

SEQ ID NO: 6154 - DNA, 4960 bp, Homo sapiens; identical to SEQ ID NO: 826

SEQ ID NO: 6155 - DNA, 9784 bp, Homo sapiens
ctgctctgccaataacaaaggcacagcattttccctctgtgcatctccaacatggatgcttttcagggcattttaaaattcttccttaatcagaaaactgttattggctacagcttcatggctctgctgaccgtgggaagtgagcgtctcttttctgttgtggcttttaagtgcccctgcagcactgagaatatgacctatgggctggttttcctctttgctcctgcctgggtgttactgatcctgggattctttctgaacaataggtcgtggagactcttcacaggctgctgtgtgaatcccaggaaaatctttcccagaggccacagctgccgtttcttctacgtcctcggccagatcactctgagctcattggtggctccagtgatgtggctttctgtggctctgctcaatggaactttctatgaatgtgccatgagcgggacgagaagttcaggactcctggaactgatttgcaagggtaagcccaaagagtgctgggaagaacttcacaaagtatcttgtggcaaaactagcatgctacctaccgtcaatgaagaactgaaactctcccttcaggcccagtctcagattctaggatggtgcctgatttgttcagcgtctttcttctctctgctcaccacatgttatgctcgctgccgatctaaagttagctaccttcagctgagtttttggaagacatatgcacaaaaggagaaggagcagttggaaaatacatttctggactatgccaacaagctgagcgagaggaacctgaaatgtttttttgaaaacaagaggccagatccttttcccatgcctacgtttgctgcctgggaggctgcttcagagctgcattctttccaccaaagccagcaacactatagcaccctccacagagtggtggacaatggtctgcaacttagccctgaggatgatgagacgacaatggtccttgtgggtactgcccacaatatgtagctcatccaccatcaatgactcatggtgttgagtggcatgctcattctgtgatcctcctaacgtatcaccagcaacctgtgtgtctctgtattttcttacatttggagtatgtttacaagacaataacacaaaggaaactgctttgaagctctcaagtggaacatcaggatgtgctcaaattgatgctgaggggtgacaaaggtgctcttgcattggtggagaggggctcagtaggcctaaatgttgctccaagatctaagattttatcattcaacagacagactcatgtgagagggctcatcagtctctgtaaatattggttgcagaatttaggggcagaagcaatggcttgtgagtgagcaagttactcttaacataggttgccctacacagtggctcctgcagtgtgatcagcaggagtctctgtcctacaaatctacacttttaaggatgtatgaaattgtggaattcattccctcaggatctgaagatctcagttctcaaaaatcacaagttgcaagaatatgatacctaaaattgaaagtttttcacatgttttcactgtatactgaaaatactcccctggaagcagggctgcatcataatttttgtgggctttatgtacttttgcctttgcgaaccatttcctacattcaaaatagtagtaacaaatatatatatatatatatatatatatatatatatatatatatatatatacacacacacagaaatatatatttataactgcattgataaaaggtgaatatattagcattttcttcaacctaaaagtttatgtattttcttctgattttaaaagaaattaaaaacattttagtgggcccttacaagtattatggtccttaggcacagtgcttactaggccgtgggtatgtcttagtgcgtttgggctactataacaaaatatcatagataggtggcttatacaaaatagaaatttatttctcacagttctggaggctgggaagtccgaggtcaggctgccagcatgctcaggttctggtgagagcaattttccaggttgcaaactgcttgctgacttctcagtgtccttccatggtggaaagtgcaaataagctcccttgagcatttttataaggcactaatcccattcctggaggctccaccttcatgacccaattacttctcaaggctctgcttcttagtactatcagcttgggggttaagatttcaacatatgaaattgggggagacacaaacattcagactatagtagggtaaattgaccttggctaaaggtctggggacactgtccaaagcagtactggcataaaactgcattgcagtcttacatttatcagaaataatgcaaatcttgcattctacaatgtactatatccatgttagtatgtacatatatatgtgtatgtatatatgtacataaattctccttaaatctctgagaagaattgtgctttaaaaaagaactatgttttgtgctgtggctcataccttacagtggtagtctatgtctcttagtttgagaaagctgaatattaacttcttattaacatgaaacatgatggcaaactgaatcctacaagtataggacccagaacatatctatgttattgtcatttacaagaagaaatatgtatttggtctttcttcctattcctggtgcagagctcctaaaacctttgggacctcccaagtgatgtgtctggtagtacgcgaatgagatgactgatagttaggggcttctgaatggcctcagaatagggtctggttgccacgggaaccaaccatgtgtttagagggttggaactttcagccccactcccagaccttggggaaggaagaggggctgaaggttgagtcgatcacaaatggataatgatttaatcaatcatgcctaagaataaagcttcccataaaaatctaaaggacaaggttcagagagcttctgcattgctcaatacatgaggagtggtgagcccaaaggggccgtggaagctccgtgccccttcccccaaacctgttcctgtgcctccatctggctgtttctgagttatattattttataatagactgatgatagtaaataaagccctttcctgagttctgtgagctactctagcaaatggtgaaatctgagaaggaaatcatgggaacctctgctttgtagccacgtcagatagaagatgtgagtaactttggaacctactgcttgtgactggtgtctgaagttgggggagatcttatgggactgagctcttaacctgctggggatctgcacttaatgccgattaatgccagaattgaattgtatgatatccagttggtattggagaattggccagtgtgggagaaaacccacacagttggtggcaaggagtgttcagtgttgagtgtgaatgtcaataaaaaaaggtttgttttttctacgtacaatatctttgggaacttggaggtgcagggtcagacgtctgtgtgtgtatgtggcagggacagaacagggattagggatgtgagggggtagagttttcagaataaagggagagaaaattcagcaaagagttctccttcttaatctttcttgacttaaagtttgtctgcccttaagtgtcttctgagctggaaaaagacatataggaactggccgatgccgatgcctcttttgcagtgtgtgagaggctgaaacagaagttctacagaagtaggttagctgtaaggagctgaggattgaggagtcatatctgggggatattcctgccaccctcaagtccagggactttctgcactcaaaaaacttacgctcatgacaatgactgcctcattcaagaaaacccaagctgactggcaagaagccagcagcctgggtacttgttgctgcagcttagtaagtagcagaagagctcatcctcctcctctggaagaagccacttaacaggttctcatcctgactcctaaattccttaacagtcctttactcaggaataaaacaagtccaagaaaacttatctgtcccacaaatagtcctggaggcagtggagtaagatagggagagcaaattggtgtctgctcttgagtatcttgagggaatgggtatctagaggcagcaggatgaactggctttgatagcagagactttaaaatgtgtggaccattagttgtctttggatgtgctccctagaggctgcgcctgacacagggagctgtgtatacatgatttattaaaaggaaatcctcttaggagaaacatattagcaggataaacacaagaaagaatgcagttacaagtggagtctcaatcaatcccagaggaaattctgggacttcagcctcagcttgacctatgggggggctctggaatgtcagatttctcctgatcccaagtgtgctctggggcttccattgcagccaagagagagcattccccagaaaactccaggtgaggagtctccagtggcccaagggtgatcctccagaggaggttacactgccgaactgggacattggcaccctggatttgaatatctagagagggcacccaatggtcatactaatgtttgccataacagtctcttctaggtctagacttgaagcatatggaagggtccttgggctagagccaacccaagcccaggctgactcccttttaatacttctaattttccctgaagatctggtcttctccctaccaccactaccctattacataagagaaaaggattggagaatgctcttgaaaagaatgtgatgctttcccatacaaggaatatactcaaggaaaaatttcatggcacaaaatgctgattctgtccaatttatcccatgaataaattgtgtacacatatatatatgattcttttgtttttcctgtgcagttccttccttttttcaggctcaaccacttaattcagctttaggatacattcagcttattcatatcaaatataaagtgggagaaaaaaaggtatgtaacaaagattacaaaaataaggcatggcagacaaatcactacataattctatgcattataccttaaagtaatgtattgtaaaatatatgtgtccaaagcaacttttaaaatttttgtatggttttctacttgagacctttaaagcatcactaaaaatgtatacatttaatgagaaaacgatgacattattgattcaaattagttgtttcaaagcctgatgatccactgatttactctaaaaactggttaaagcaatccagaagtcactgggtagcagaaaactgctaccgcttctcacatgatatatttcaagtacttcaactattaactatattattctatttagactttggtggttccgaattctctaaggtaattatcttaattttctaatatttccctctcatttttctctcttattttaaatatcccctgttgtacaagccagaggatattaatttcctttgtgggtagtgcttggacttctctgattttagatcccaaaatcattaagaaaaagctaagaggttggcatgagaggttggatggaaagcatctatctgtgtttgtcagtagctctcgatgttggctgcaaattggaatcacctgggggcctttgacaatcacaatgtctggacccatttcctgagaacctgatgtaacttttctgggttagggcctgaacattgagatttcttttaaaagctttctaagtgattataatgtgcagtcatggtgaagaactactgattttatatggggagtcagtgaaggtggtgaggggctgtgaggttgaaatattggaaatgttatctggatttcaaacagtagagtatgataaaaatttaaaaactggctctccaggaaaaaagagacatcctaatatgatgtatttgccaatataccatgggttttcttgggctgggatgaactttcagaagttttacagtgagcatttttttttttatgaatttaaattggttctagctaagcaattttggagtatctttgatgtacctgggtctctcattttaataaacataacagtggtatgttagtcagggttctccagagaaacagaaccaacagtacaacagtatatatacatacatacatatatatgtgtgtgcatgtgtgtgtgtgtatgcgtgtatatatatatatgctacatatatgaaaggggatttcttgtgggaatatatattatatataacaaaacatgacaaatatataacaaaatatatgtgctatatatattgtgtgtgtatatatatatgaaagaggatttattgtggaaattggctcatgtgattatgaaggctgagaaggcccatgacgtgccacctgtaagctggagaatcagggaaatgtgtagggtggctcaagtcccagtctgagggcctgagaaccaggggagttgatggtacaaatcccagagccaaaggcaaaggaacctgaagtttttatttccaagggccaatagataaggagaatattggtgacccaactccaggagacagagaaaagattggtgacccaactcgagtggagagagagggagagagagagagacagagagcaaatttgcccatcctctccctttttgtcctacccaggccctcaatggattgtatggtgcctgcccaggttaggtgagggcagattttccttactcagtccactgattcaaatgccaatcttttttggaaacacccctacatacatacccagaaataatgctttaataactatctggctaccccttaatccaatcaagttgacatctaaaattaaccagcacatgtgataaattaaatatggttcaatggctccttctggcagatgtagtcgtgttatcctcactttgaatctgaccttatgaaccaataaaatatggcagacatgaggtagattgttaagcagtatcacagtttatgccttggtctcttacaatgttgcaatgctcaacagtctggtaaaagccactatgtaagaactgcaattactcagggactaccaagctctgaagaggcccaagctagccagtgggaggagagagagagagataaaaagagagagagagagagatcccaatggctccaattgtctcagatattctagcttaggggtcaggcatgtgaatgaaggagccattttaaacattcaggccccagtgtacacgacatggagaagaaccaggaagtccaaccaacagtgagaataaaaggccccagatctatggccctaatcaaatcattgcagccatctccaaacatttgacccactccagtggaggctgcaggctttgtagagaagtccttgccatgtcctatccaactccatgaccccaaaaatcatgagcttaaataaatgtttgtggctttaagccactgaattttggggcaatatgaagcgacagaacctgaacactaacatgaaaatcagaatttataaaaagacaaaaattacaggcaaattgtatttatacatttatacattctccctatgcatagagagcattttcttcaatcatgttttctttttctttaggttccagttagcagtatagcatctacagcatgatttgatagatgctgataagtaggtctctaaaatctctccaccaaagctggagattcactttcaattatttttggttaatttttgtttgaaaggaatacaaacatattattgggaggagtaacacattaaactattatttgtcattaatatctacgaaaaaatagcaagtgagggtttcagactaggctggccttcagtaagctggaaagagattgttcttctagtcgtctctcaaaatgttatcttcagactgtcaacatcagtatcacgatgaagcttgttagaaatgcagaatcagacagtatctaaaacctgttgagtcaagcctgcagtttaacgtgatcctagctgattccagttcaagctaaatttgataacactaaggcagtggttctcaaactttagtccatataaaaatcatctggagggcttattaaaatgtggattgctgaactccacccccagggtgtctgattcagtaggtctggggtgaggcaagataatctgcatttctaacaggttctcaggtgatactgatgctgctggtctagggactacatcttgaaaataactgctctacagcacagagcaggctattctggggaaggcaggctgtaagaaactcagaatcctggcctgcactccagatctactgaatcggtcatcagcccgtccaagattttggggtgcctttccattcattcaaggatacctttctattcattcaaggatatattttgtcctttaggaatattttaaagtttacttcacataagttttacatgtttcttgtaaactctatttgtaggtgttttctttgttcctgttgtaaatggtttcttttttccactatatctttctaagtgattgttgtctgagtacgtgaaaagctattgtcttatgcttattaattttatctctctactaattcttttattgtttgtagggcttttcagaatttgaaagtaaacattttgcaacctttgatgacaaaatggatctagacaataaataatgaattctaaactattaggtgaaagcagaatggggtcagacctatgcaatttgaagccactcatctatattagcatcactaaaaatcaaagcagatgctacgtgccttatgatgcaaggcaagaataagtacatagtatcacatgtgaaatattgtttcctaagaagctaaacctaatcaagtatttagacattactgctagtttataggaaacataagcaacaaaaaacaaggcaattagcaccacaaaaaaacaaccaggtacatctagatctaacagaacattccattttacagatgactcagtctccccacagattaacagtattaagaaaggagaataaaggagatataagtgacttaataaccagatatgctatatagaccttatttgtatcctgtttccaacaaccaactgtaacaagatatctttgagatatttaggaaaatatgaatgaatattagatgatttttagagaattattaattttgctatgtgtggtaatggtgtgccgatttatgttttttaaaaagttcttcagttagagatgtatatttaaatatttatgtgtgaactgccatgatgtctagaagtttctttaaaatactctagaaaaaagagtttagggagaaagctgaaagatgaaataagattggcaaaatatggaaactattgaagctggatggtaggtacacggaattcattacattattctctttacatttgtatatgtttgaaaaatttcataaggtacacaacaaaataaatgacatggtcacctcagttattttgctgaagttttgtcaatcaccccctgcttagctggagtttaccttctagtatcattctcagcaaaggctcacaggaatgctattctctgaattcttacatattcagcctgttggcctgttctcgaattgaaggacagcttgtctggttcatactttctctacatgagtgtattgtaagcattacttcattgtcttttgtcattgaatattgctgaggtggccacagcctgatttctgatgccatctctatttctttctttattactaacaagatgttttatcctatattctcattggtttctttatctttcatgtccaaaaatgttaaataggccttcaggtaggtctttttggaacgatttttcctgctacaagtttactctttcattgtggagaatcattttcttatatttcaataaaaaagttggaaaattttcaactta

SEQ ID NO: 6156 - DNA, 4575 bp, Homo sapiens
gtctgggctcggggcgcggcggcagtcagctctatgttcgcggtcttaacctctcctctggccgagtccttgcaagaagtgaattacccgaccctgcaaaacacttactattttggagtttaaagtatgtcatcatggcaaagtttcggagaaggacttgcatcattttggcactttttattctatttattttctctctgatgatgggtttaaaaatgctgagaccaaatacagctacttttggagctccttttggacttgaccttcttccagaacttcatcaacgaactattcatttggggaaaaattttgatttccaaaagagtgacagaatcaacagtgaaacaaataccaagaatttaaaaagtgttgaaatcactatgaaaccttccaaagcctctgaacttaacttggatgaactaccacctctgaacaattatctacatgtattttattacagttggtatggaaatccacaatttgatggtaaatatatacattggaatcatccagtgttagagcattgggaccctagaatagccaagaattatccacaagggagacacaaccctccagatgacattggctccagcttttatcctgaattgggaagttacagttctcgggatccttctgtcatagaaactcacatgagacaaatgcgctcagcttcaattggtgtactagccctctcttggtacccacctgatgtaaatgatgaaaatggagaacctactgataacttggtacccactattttggataaagctcataaatataacctaaaggttacttttcacatagaaccatatagcaatcgagatgatcaaaacatgtacaaaaatgtcaagtatattatagacaaatatggaaatcatccggccttttacaggtacaagacgaagactggcaatgctcttcctatgttttatgtctatgattcctatattaccaagcctgaaaaatgggccaatctgttaaccacctcagggtctcggagtattcgcaattctccttatgatggactgtttattgcccttctggtagaagaaaaacataagtatgatattcttcaaagtggttttgatggaatttacacatattttgccacaaatggctttacttatggctcatcacatcagaattgggctagcctaaaattattttgtgataaatacaacttaatatttatcccaagtgtgggcccaggatacatagataccagcatccgtccatggaacacgcaaaacactcggaaccgaatcaatgggaagtattatgaaattggtctgagtgccgcacttcagacacgccccagcttaatttctatcacctcttttaatgagtggcatgaaggaactcagattgaaaaagctgttcccaaaagaaccagtaatacagtgtacctagattaccgtcctcataaaccaggtctttacctagaactgactcgcaagtggtctgaaaaatacagtaaggaaagagcaacttatgcattagatcgccagctgcctgtttcttaatgcattgattaaagtttaatagttatcaaaatcacctaatttttaaaaatagctttcgttttgagttctggaaagaaaactgtcaaaatcagtatatactattagttatatttaaaaatatttttttaaattctttacagataatattatacttgttacccttcacaataccacatgagaaaatatctgagacaaaatgtatacaaatatattccttatggcataatttattgcatttctgactgaaatcaaaattctgatttgatggcaattgaattttcattttacaatagataaatgcttgtgctacctaaagcacttagcacacagttaaattatatttacatcctagacccaaataaataggattgtgtgtatatttgggatatctattgaagaaaaaaagaaaaccccttaaagataatgtacatgcttcatgtcatgtctttaaaataatttaatcaactttattgtcttagtatttagactctggataactctacaataatgaggaaattcttaagaataacaaaatcactgtaccttcctctcaattttgctgtgaacctgaaatggctttaaattaatactcttattttttatttaatttaattacataaattaaaccttaccatgaccaaattgtgttaggacggcctgctatctacagcacagtgtgtcatttgcagatttgtggttacctataccacgctaggtgttttgacatgtttagtgtttctgctttacagtgctgaattccatattttagaagctatgaaagtccttttatgaaaaagttactgattgcttctcagttattaggaaaacagttgtttcacaattattatgtagatatgatgcccaaatatcatttttagtatatcttgtcgatctttaagttgttactattgtgttattcatgtctttaaatcagataccaaatattttttaggaaagaaaaatgttattactgtcattaggttgtcttttaatactttaagttattttgacgaaaagtaatagagaaaatttacttagcattttagattctagagacatggaaatgaaaattattttatgtctagagtaggtcctgaagtttggctttacattaagtttagcactgtatcagaatgaagaaactaatattttacataaaaactaatactttcaattttttatatagtaatatccccattttgtaaatgttagacttttatcatacctgtaagttaaaatacttgttatcaataacttgtcatgttgtgacaaattgatcacttgtgtacgaaaaataaatctccttaaaaactaaataaaatgcactgtattcttacagttaatgtttataactatagtaaaaaattaatatatatcctattacataaatgttatttcttaggtgttccattaagaagagcaatagaataatgctaaaaaataatgcctataaatcttcagagtataaagacatccattcagaaacaaaaattagcactaaattttttataaaatagaccagatgacaaaatttattttatttttaaacagtggttttgacacaaattatgttattgaaaagcattattaatgtttaatttatttaaaattttggaatttgccatttctcagagaatgatcaggccttaggaaattaatacagtagtagtaatcattttctaggggaaaataaaagaataaatcactatactgatattttgatacaagcaagcacttacatggtaatcactatatagatccaacctgtggattttcttcttatgtccatttaactagaatatattattttaggtataatttacaaatgtcacacctaataatcttttataatataccatatttcattaaagttttgttagagaagtatctaccacagaggagtttttgtcattgtgtacgttgtgtatttgaacccaccatgacagaaagtaaattttaggaaatagttatgagattaagggaaaatctataaaaacaaggttagcatattctcaacacagataccaccactttctttttcccattatagacatggtgaatccacacagcatacttcatctctgagctttgttgtgattcctcaacacattaccctaaccagccagcagtaacagatttcagagtaagataaagcagattctgtcttcattgcaaaaagttattctcaatggaagaatggcatctgatctcataattactagtttatattaatatagtttttttctccctttttaataaaataattacagtcatccctcagtgtctgtgggggattggttccagttacccctatagataccaaaatctgcagatgctcaagtccctgatataaactggcatagtagttgcatataatctatgcacatcctcctgtatacattaagtcatctctagattatttataacacttaatacaatgtaaatgctatgtagttgttataccatactggttagtgaataattacatgaaaaaaaagagtctgtacatcttcagagtttcagtcggcaatttcttggccatggatgtagaacctacagataaggtgagccaactgcattaggaaataactctaataattctgttaattcttagagaggaaaactttcaaaatcttcctcaggtatttattacaactgcctttaccattttagttgtaacacagtttaaattgttatgataacaagtaaataagagcaaagaatgtatttcttaattcaaaactatacgtttgaattcaatatggtataacttaaagtggtataatacatacaatgcatgaatcataatggattcttttataagttattaatttttatggtttaatcagtctaattgttttgactgttatagaaaccaaatattttactgtttcttttaaggactaatattgtcaaaaactgctgttattaacttcacttgagttgtttaacttccttctgttttaagattgtaattaaaaattactattttgttatatggaatggttaatttttacctaataaaaacatagatgaaatacattgtatttta

SEQ ID NO: 6157 - DNA, 2234 bp, Homo sapiens
gtgctaaaggaaaccaacagcggcctaggggtgaaaggacagccagggttagatgttctgaggaggcgggagcaaccgagagagcacgtgagcatctgtcctttctacccgttcctctttatctttagtgttcagtagcagcggggatagcccggggcccggtgtatggccacggagttacagtgtccggactccatgccctgtcacaaccagcaagtaaactctgcctcaaccccaagtcccgagcagctgcgacctggcgatctgatcctggaccacgcagggggaaacagagcctccagggccaaggtgattctcctcacggggtacgcccattctagcctgccggccgagctggactctggggcctgcggcggctccagcctcaactcagagggcaacagtggtagtggtgacagtagcagctatgacgcaccagctggcaactccttcctagaggactgcgaactctcccggcagatcggggcgcagcttaagctgctgcctatgaatgatcagatacgggagctacagaccatcatccgtgacaagacagccagtagaggtgacttcatgttttctgcggatcgtttgatcagacttgttgtggaagagggattgaatcagctgccatataaagaatgcatggtgaccactccaacagggtacaagtatgaaggagtgaaatttgagaagggaaattgtggggtcagcataatgagaagcggtgaggcaatggaacaaggtttacgagactgctgtcgatccatacgaattggaaagatcctgattcagagtgatgaggagacacaaagagccaaagtatattatgccaaattccccccagacatttaccggagaaaagtccttctgatgtatccaattctcagcactggaaatactgtaattgaagctgtaaaggttcttatagaacatggagttcaacccagtgttatcatcctactcagtctgttctccactcctcatggtgagttcagcatgaggcagtaactagggctccatatagtcctgaggtgggtgccaaatcaatcattcaggagtttccagagatcacaattttaactactgaagttcatcctgttgcacctacacattttggacagaaatactttggaacagactaagttatttaagtaaaataattatcttatgtaatattacaatcatgttttgattttctatttgttttactgattcacttgagggtggcagagaaaaatgtgttaaaatgctttttagttttggaagtgggtatatttgaggttatatctcatttagttatttgtttactgttggcaccgaattcaacaatgaagtatatgcaactcttacaaaacataaattttaataatattctaatgcaaattactgaaccctcagtgcattaaaattatttcctaatttatgagcctcttagtttggaggttgcttgaagccacaaataaaactcaaatgagagtcagttctttgtcccactgtagtttgcattttgtttagtttggttttagctctactaaggtttcacatatgtggctattgccacattcctctactgttttctttctgatactggacatgctagtaacttggagaggagaataaaagaatgtctcctggaattttacattcccattaatgtcctcattcagttggcagacctaggatgtatggttaactctcaggccattatgtttttcatggctcatttcccaaactgcattgttggtaggtgccttgctaagctgtaatgcagtgaagaagatggtggggcatttttagtaattggaactgtaacattaatttacaagattgaaccggggatgtctggatgctgacaagggagagccaagtactgttaatgccatcaatcctctaggaaggaattggtggtttttctgaagtgtgggggaaagggtggtttcttgctggatttcatggccagtaagtaaatttaaatgcttcatttttaatttggatgtttctgctagagacctttgatttggaaattagttattttgcatgtttgtcaactgtatatgtatgaaaatagaaaaaaaccatgctttttgtaaaaacccctaagatttgtatatgttcatctttaggcttctgaaagggagagaaatcatattggaaatcagtgttggtgttctgaaatctgcttgtaaaactctcatctcattttacattgatattaaaacattttaacagtg

SEQ ID NO: 6158 - DNA, 1096 bp, Homo sapiens; identical to SEQ ID NO: 356

SEQ ID NO: 6159 - DNA, 1491 bp, Homo sapiens
accgcagcggacagcgccaagtgaagcctcgcttcccctccgcggcgaccagggcccgagccgagagtagcagttgtagctacccgcccagaaactagacacaatgtgcgacgaagacgagaccaccgccctcgtgtgcgacaatggctccggcctggtgaaagccggcttcgccggggatgacgcccctagggccgtgttcccgtccatcgtgggccgcccccgacaccagggcgtcatggtcggtatgggtcagaaagattcctacgtgggcgacgaggctcagagcaagagaggtatcctgaccctgaagtaccctatcgagcacggcatcatcaccaactgggatgacatggagaagatctggcaccacaccttctacaacgagcttcgcgtggctcccgaggagcaccccaccctgctcaccgaggcccccctcaatcccaaggccaaccgcgagaagatgacccagatcatgtttgagaccttcaacgtgcccgccatgtacgtggccatccaggccgtgctgtccctctacgcctccggcaggaccaccggcatcgtgctggactccggcgacggcgtcacccacaacgtgcccatttatgagggctacgcgctgccgcacgccatcatgcgcctggacctggcgggccgcgatctcaccgactacctgatgaagatcctcactgagcgtggctactccttcgtgaccacagctgagcgcgagatcgtgcgcgacatcaaggagaagctgtgctacgtggccctggacttcgagaacgagatggcgacggccgcctcctcctcctccctggaaaagagctacgagctgccagacgggcaggtcatcaccatcggcaacgagcgcttccgctgcccggagacgctcttccagccctccttcatcggtatggagtcggcgggcattcacgagaccacctacaacagcatcatgaagtgtgacatcgacatcaggaaggacctgtatgccaacaacgtcatgtcggggggcaccacgatgtaccctgggatcgctgaccgcatgcagaaagagatcaccgcgctggcacccagcaccatgaagatcaagatcatcgccccgccggagcgcaaatactcggtgtggatcggcggctccatcctggcctcgctgtccaccttccagcagatgtggatcaccaagcaggagtacgacgaggccggcccttccatcgtccaccgcaaatgcttctagacacactccacctccagcacgcgacttctcaggacgacgaatcttctcaatgggggggcggctgagctccagccaccccgcagtcactttctttgtaacaacttccgttgctgccatcgtaaactgacacagtgtttataacgtgtacatacattaacttattacctcattttgttatttttcgaaacaaagccctgtggaagaaaatggaaaacttgaagaagcattaaagtcattctgttaagctgcgtaaa

SEQ ID NO: 6160 - DNA, 3896 bp, Homo sapiens
acagtagtgaatcgtagcatgttagagttagaaggttcagtgttgatggagttattgaagaaatgatggagtaagagactcttttctaagcaactcaagtttgcagtgattcaggcctacttctgaagagacagccttttatctcaatgaatgacacagaaaaaccagcagatactccctctgaggaagaggactttggtgatccaaggacatatgacccagatttcaaggggcctgttgccaacaggagttgtacagatgttctgtgctgtatgatcttcctactgtgtattattggctacattgttttaggacttgtggcctgggtacatggggaccccagaagagcagcctatcctacagacagccagggccacttttgtggccagaagggcactcccaatgagaacaagaccattttgttttactttaacctgttacgctgtaccagtccctccgtgttgctaaacctacagtgccctaccacacagatctgtgtctccaagtgcccagaaaaatttttaacctatgtggaaatgcaacttttgtacacaaaagacaaaagctactgggaagactaccgtcagttctgtaagaccactgctaagcctgtgaagtctctcacacagcttttactggatgatgattgtccaacagcgatttttcccagcaaaccttttctccagagatgtttccctgacttctctaccaaaaatggcactttaacaataggaagtaagatgatgtttcaagatggaaatggagggacaagaagtgttgtagaactcgggattgctgcaaatggtatcaataaacttcttgatgcaaagtcacttggattgaaagtgtttgaagactatgcaagaacttggtattggattctcattggcctgacgattgccatggtccttagttggatatttttgatacttctgaggttcatagctggatgcctcttctgggtcttcatgattggtgtgattggaattataggttatggaatatggcactgttaccagcagtacaccaatcttcaggaacgcccaagttctgtattaactatctatgacatcgggattcagactaacataagcatgtactttgaactgcaacaaacatggttcacatttatgataatactctgcatcattgaagtgattgtcatcctcatgctgatcttcctcaggaatcgaatccgagtcgccattatcctgctgaaggaaggaagcaaagccattggatatgttcctagtacattagtctatccagctttaactttcattttgctctcaatctgcatttgctactgggtcgtgacagcagttttcttggcgacatcgggggtacctgtatacaaagtcatagctccaggggggcattgtatacatgaaaatcaaacctgtgacccagagatttttaatacaactgaaattgccaaagcttgccctggggctctgtgtaactttgctttctatggtggaaagagcttgtaccatcagtacatccctaccttccatgtatacaacttatttgtctttctctggcttataaacttcgtcattgcattaggtcagtgcgcccttgctggtgcattcgctacttattactgggccatgaaaaaacctgatgacatcccacgatatccactttttactgcatttggacgagccatacgatatcacacaggatccctagcatttggatctttaattattgcattaattcaaatgtttaaaattgtactagaatacttggaccaccgtcttaaacgtacccagaacacattgtctaaattcctacaatgctgcctgagatgctgcttctggtgtttggaaaatgcaataaagtttttaaacagaaatgcctatattatgattgcaatatatggcagaaacttctgcaggtcagcaaaagatgctttcaatctgctgatgagaaatgttttgaaagttgcagttacagatgaagttacatactttgtattattcctggggaaacttctagttgctggaagtataggtgttctggccttcctattcttcacacaaagactgccagtgattgcacaaggaccagcatctttaaattactactgggtacctttgctgacagtcatttttgggtcttacctgattgcacatgggttcttcagcgtctatgcaatgtgtgttgaaacaattttcatctgcttcttggaagatttagaaagaaatgatggttctactgcaagaccttattatgtgagtcaacctttgctgaagattttccaggaggaaaatccacaaactaggaagcagtagaagagcaaactggtcgtcctacagctgtgtgttaccttttctccatctgctgtgtctgtgcaacatttgtttcataagtgctttgtgtttagcaacactgtattcacgaccttgttggcttgcatttgcatgttttataccaaagcttatactgtactatgtgaagccatcagaagtcgcaagggaattgttaataacataaaacatttttatactaagatcatttgttttgtaattcgtttttaaagagtggcttggatgttttgaaaatactactgaatatgttaatattcttttaaatcttagattgaaaaatgatacattacttaaattgatagctcctaatatatttttaaaattacaactaaaagaagacttcttctgcagggaaaattggtcagcaaagtgaaattaaaaattttaaagtttttcccactctcgttggacagtaaatcagtgaaaggactgccccagttgagagtttgctctctttaagtatagaatgtttcctcttaaacaaattgccaatcatccagcctttactacttagccctctgacaaagtgccttactggctatttaatattacccagcttttatgggcaagtttacaaacattgttttttaaaaaattaaaacctgcaatgtttcgtgattaaaacaagtcttattgcatttgtttcactcttagctcactgattggaaaacatttgtcattttgctctgtttgatatcctcactattatggaatacattgtgcagctaaacaatttcccttgcgcctagtggacattcatgaatgtgtactacacgcaagaagaaacaaaccccgaaagaacacttgttggatttctttgtttttttttttactaaaagagaagttttaaaatgaaatgttttctatagtagatctttgaaaatacaataggtataatactgcatttctcagtgttttacaaagatcagaaagagaaacttctaggaattgcaaagggaaactttactcctcgaaagggtgctcacagatgtcatgtactgaatagctcccttttaaatgatcatttattttcatcaaagcctgttctatatatgccacttcattttctaacttttggtatgaaaaaatcagtttacttacagtatgttaattgtattgtactactataaacaggaacataatttccaattcagttttaaataattttaccagtactactaacttttaaggaaattaattcagttggttactcagtgtttgttacagaaagagtccagaaaagtattcaccctaagagaatgtcaatcatataatgataatttgtgaaagctttgagaatcaatcatcagtaagttactatcagtttataaaatattatcacatttgtttaaatgtgactttagatacttttatgccaaaaataaactcacatgagcacatgacagtctgagctctataatcagtgtgcttctgctgtgcagaaatgttagaaacgtattgtctaaatatctttgataattaaaatgtttaatatttaatgaaatttgttgttacttgttttaaatcttttttcttttaataaagatttaaataagaaat

SEQ ID NO: 6161 - DNA, 834 bp, Homo sapiens
ggacagcttggagatagggcccggaattgcgggcgtcactctgctcctgcgacctagccaggcgtgagggagtgacagcagcgcattcgcgggacgagagcgatgagtgagaacgccgcaccaggcctttgcggggagcttctcctgcaaagaggaaccacgaaggtggccacaggtctggttctgaacagagaccagaggctcgcctgggcagagaacagcattgacttcatcagcagggagctgtgtgcgcattccatcaggaagctgcaggcccatgtcctgttgatcaaagcagtccacggatattttgattcaagacagaattactctgagaaggagtccctgtcgttcatgatagacacgatgaaatccaccctcaaagagcagttccagtttgtggaagtcccaggcaatcactgtgtccacatgagcgaaccccagcacgtggccagtatcatcagctccttcttacagtgcacacacatgctcccagcccagctgtagctctgggcctggaactatgaagacctagtgctcccagactcaacactgggactctgagttcctgagccccacaacaaggccagggatggtggggacaggcctcactagtcttgaggcccagcctaggatggtagtcaggggaaggagcgagattccaacttcaacatctgtgacctcaagggggagacagagtctgggttccagggctgctttctcctggctaataataaatatccagccagctggaggaaggaagggcaggctgggcccacctagcctttccctgctgcccaactggatggaaaataaaaggttcttgtattctca

SEQ ID NO: 6162 - DNA, 2433 bp, Homo sapiens
gcaggcgcagtggttcccgcaggcttgcgcgcgcactcgctgcgggacaagcttctggaagctctttgcggtggcgttggtgctgtttgcggatgctgatgcagtttctgcaggactgtaaactggattcctggaacctttgatattcctggctgtgtatagtgcctgttggtggactgtactgatactcaactagagtgtgaagggactggattcctgcccctgagacacaatgcaagctgtagtgcccttgaacaagatgacagccatctcaccagaacctcaaactctggcctcgactgaacaaaatgaggtcccaagagtggttacttctggggaacaagaagctattttaagaggaaatgctgctgatgcagagtctttcagacagaggtttaggtggttttgttactcagaagtagctggacccaggaaagctctgagtcaactctgggagctctgcaatcagtggctgagaccagacattcacacgaaagaacagattttagagcttctggtgtttgagcagttcctgaccattttgcctggggagatcaggatttgggtaaagtcacaacatcctgagagtagtgaggaagtggtgaccctaatagaagatttgacccagatgcttgaagaaaaagatccagtctctcaagattctactgtttcccaagaggagaactcaaaagaggataaaatggtcactgtttgtcccaatactgagtcctgtgaatctataacattgaaggatgtagctgtgaacttttcaagaggagagtggaagaagctggagccttttcaaaaggagctatataaggaagtgctactggaaaacctcaggaacctagaatttctggactttccagtttcaaaattagagttgatttcccagctaaagtgggttgaattgccatggctgctggaagaagtctcaaaaagctcccgactagacatacatggagcagtaaaaaagatgcagatgttctctgaggctgaataagaccatgctctgccttcttgtttcaactgttacacagagatgaccagaggatggggccactgcagtgcagttcaagaggctctggttcggggaagagctggatggagtatgaatcccaactctgggggtattagctagtggagtggccataggcaagttacttaacacttctgaacctccttttgtctttcataaaataaaagctactaggatgagttgttttaaggatttcagattatagtctatgtgagatatgtgcaaacatgtacatatttcccctagaagcaatggttttcagccttggtggtgaccttatagaacataaatattgtgaataatgaaaatccactgaatctaataagggacttgtatcggtaagatgtaaagaactcttggccaggtgtggtggctcatgcctataatcccagcactttgggaggccaaggcaggtggatcacctgaggtcaggagttcgagaccaacctggccaacatgacgaaactccgtctctatttaaaatacaaaaattagctgggcatggtggtgcatgcctgtaatcccagctactcgggaggctgaggcaggagaatcacttgaactcgggaggtggaggttgcagtgagccaagatcgcgccactgcactccagcctggatgacagagcaaaaaactgtctcaaaaaaaaaaaaatcttacaacctcacaaataacctagttcaaaaatgggcaaagattttgaacagatatttctccaaagaagatatacaaatggcaaatacatacgttgaaagatccttaatattgttagccatagggaaatgcaagtcaaactcaaatcagaatgaaatatcacttcaaacctactaggatggttataataaaaaagacagacaatagcacgtgttggtgagtatgtagagaagttggaaccctcatacactgcttgtgggaatgtaaagtactgtagccactttgcaaaacagtttgacagctcctcaaaatgttaaacatgaaattatcatatgacccagcaattctactcataggtatatacttaaaagaaatgaaaaatccacacaaaaacctctgcatgaatgttcatagtaacattatacttcatagccagaaagtataagctaatacccatcaggctgggtgtggtggctcacgcctgtaatcctagcactttgggaggccgagttgggaggtttgcttgagcccaggagttccagaccagcctgggcaacatggcgaaaccccatctctactaaaaatataaaaattagttgcgtgtggtggcacatccctatagtcccagctacttgggaggctgaggtggaaggattgcttgagcgagggaggtcgaggctgcagtgagccacgatcacaccactgcactccagcctaggtgacagagtgagatcctgtctc

SEQ ID NO: 6163 - DNA, 2439 bp, Homo sapiens
gggattccggcgagagcctgcgcttgcgacagtgccgtttctcctacctgaagtctcattgggtatcgcactactggaaggggcggcgctgccatgacagagaaggcaataaaactgaaggcctagctcgactaaaagcgcttactattaaggaagacttcgctgtggctccatccggcacggaaagctaaaccgtgtaatggctggcaaccaggaagctagactacctagaatccggaggattggagggactggccggcgtgggcccctgagatctcctactacatgtcttcagttttatccatagacacggaagggcactaaaattgcctggtgccatttcctgtgaaacaagtctagataagagaagggacttgcccaaggtcacatagccgagaaataaagccgagggcagtaggagaaatgatctgactttccgaaccacccccaagcctagggcccttatcaccacacctttcatggaagtgaaaatcctgctcttgtgctctttaacccttaatgaagtttataggtcccagcaaagaaaatggatgtaagaactgggcttttttccccctctaaatgatagtaaagggccctaatgcagtgagatgtgtccccataggccttataaaccctgttttgcaaagtaaaacataagtcccacagatggcaagcaattcaggtcacactgggcctaaaatcccgtctcttaccttccttcaccaccatcattctgagattgtttcagtacttgcactctacttacccgaactctgtgggcagattctgctgcctgggagccctggaatagaacttcaaggaccgttcaacatctggattcaactagaaattaagaatggcccccaaacagaaagccgggcctaggaaccaattagcgcaggtcaagtccctacccggactcattttttttcagccctcaggaagtaggggcctctctgaatccacttgccggaagtgcctttccagtggacctgggctgttgttgcggttgttttccttctctccgtgcaacgctggcaagtctcaaagtcgccacagaaacatgcccctgattcagtgcctctgcttagctgtaacatgttaatcagaactacctggcatcttcctgaacaagactttcaataggggccagtatgcttcgcttcatccagaagttttctcaagcatcttcaaagatactgaagtactctttcccagtgggactaagaaccagcagaacagatatactttctctcaagatgtctctccagcaaaacttttccccatgtccaaggccttggctttcctcatcatttccagcgtatatgagcaagacacagtgctatcatacatccccctgcagctttaaaaagcagcagaagcaagcacttctagccagaccctcaagcaccatcacttacctaactgacagcccaaagccagcattatgtgtaactctggcaggactaatccccttcgttgctccaccactggtcatgctgatgacaaaaacttatattcccatattagcttttactcagatggcttatggagccagtttcctatctttcttgggtgggatcagatggggttttgctctaccagaaggtagtccagccaaaccagactaccttaatttagctagcagtgcagctcctcttttcttttcatggtttgccttccttatttctgaaagacttagtgaagccatagtcacagtaataatgggtatgggagtagcattccaccttgaactttttctcttaccacattatcccaactggtttaaagccctgaggatagtagtcactttattggccactttttcatttataatcactttagtagttaaaagtagttttccagaaaaaggacataagagacctggtcaagtataaaaaatataaaagtctgggaagtgaggagcacctctgcccagctgctgccccgtctgggaagtgaggagcgcctctgcctggccgcctgaccatctgggaagtgtgacaagcgcctctgcccggccgctgtgcaaccttccacgtgtgaagtgacagccttgtgtgtgatcttttctgtcttccccaagtttgcattttcgacattaaagtttactttttagttaaaagttttaaaaatatatatatataaatacactgtagataacatttgtatgccagctacacctttttctacttctgtttggctttttttccccacaccaatggtaatttatcttcacagattgttcttcatttctagaaattgttacttcatggtaattacttgagcaaaagcttgaaaatccctgacaagtacttttcatctcatagtatattagttttcactcagtcattttatgaataatatagttatccacttaaacatttcaatattttaaccatcttgaaaattaaagattaaaaatcccctttgtta

SEQ ID NO: 6164 - DNA, 4728 bp, Homo sapiens
aacaggattattcaagatcaggttgtagccattttcaacaaggatcactgatcaaaattttctttttacaaagagatttacaagttaaacatgaagggaaaatactggaatcatttggattctgacaggataaagaatacaatatttcacatttacttgtaatggaacctttgtaagattcatcacttgtcattcacccagttgggaacatggatgttggtttttctcgtactactgttcagacactgtcaagaagccactgcaaaaacatcaaacaaaaaatttctcaatgggaaggaagggctaatggtatatctaatccagaaaagtggtgtccaaaggactttggagtgagatataactgtcaccaagagatccgtcttaagaaaaatcctatagctgagagaaagagcaaaaacttggatgtaaccagccgtgaaaatgtgggtctagatataaatgaaaataccaaaagccatgatcaaagtgagaatgaaaataagaaacatgaatatgacgatacacacttctttaaaaatgaatcagaatccaactgggtatgttctcgggtcaaagaaattgaaagctgtaaagaagatgtcttagatccagagacttcattacctccaggaaacttctatacctcacaaatactgtggaagaaaatagaagcacttcccccagataaactcttaaatttggctttagaacattgtgactcttcagaaaaagaactgaacttcagagttctggatagttcatacggaataaccaagagcttagaaaatatttactctgaacctgaggggcaagaatgtggaccttccataaatcctttgccaaaacctcgtaggacattcagatatttatccgaatctggtgttacgccgtataaagaaagaaactgtgacaaaaaatactgtgaaaataactcttgtgcacaatcttctttggcctcttctcaggaacctgaaccaaagaaatatggtggaaaaatcagaggaagatctaaaaggaaatcctttgaatttgaggatattcagcactttcgaaatcggaactcacagacgattcgtgaagaacttggaagaaattctgggtcagcactttattacacacagtctgaggacaatatctatgaagatatcatatatcccaccaaagaaaatccatatgaagatattccagtgcagcctttacctatgtggagatccccttcagcatggaagctaccacccgctaaaagtgcttttaaagcacccaagctccctccaaaacctcagttccttcaccggaagactatggaagtaaagaactcacaggcttatttgcggtcaaagcttacaaaagatacaactttgccggtcactttaacggaatggaagcttttccgagctggtgaagttgcaaacacgaaaaggaaaaatcttccaaggcttgtattgaaaatagatgacatatttgaatctaaaagagggaagaagaaggtaaagttacattcttacactggaaaggaattacctccgacaaaaggtgaaaccagtgggaacgaaagtgatgccgagtatctgccaaagaatcgccataaacgcttagcacaactgcaaccgtcttccaagaggaatcctcactaccagaccttggagcgggatcttattgaattacaggagcagcagctgtttgaactttttgtggtggtgtctctacagaagaaaccatcaggaataagctatattccccaggtcatacaacaattccctggcaaggatgatcatggctataagcagtccaaagacatggaagagagacttaaagttattccaaaattttgttttcctgattcaaaggactggatgccaacctcagaactcaagagtgaaacattctcctttgtcttgactggtgaagatggaagccggtggtttggttactgtaagaagctcttgccagtaggcaaaggaaagcgactccctgaggtatactgcatggttagtcgcctaggctgcttcaatcttttttcaaagattctggatgaagtagagaagagaagagaaatgtctccagcccttgtttacccattcatgcgaagtgtcatggaagctcctttcccagctcctggacgcaccatcacagttaagagttacctccctggggctggagatgagtccattgaactctgccgaccactagattcccgattggaacatgttgattttaaatgtctctttaagtgcctgagtgtgtgtcatctcatccgggtctgtgcctctctccttttggagcgtagggtaatctttgttgccaacagcctaagcaccctgtcaaaatgtggccatgctgtggtagctacactgtatccgttcacctggcagcatacctatatcccagtcctgccagcatctatgattgacatcgtgtgctcacctacaccattccttattggaatcctgtcttgctccttaccacagctccaggacctacccattgaagaggtgctgatagttgatctctgtgcagacaagttcttacaggaggtatctgatgaggatgaaattctaccaccaaaacttcaagctgccctgatgcagattttggaagaacgaaatgaaatcttgactcaggagcagaatttttcacaagatgtgacactcaactctctggtgtccgaagcatttgtcaggttttttgtggagttggtaggacattattctttgaacatgactgtcactgagcgtggggagcgtgttttccaaagggaaccattccgtaagtcccacacctcccgaagtgtacgccacttcctggatctcttcatggaaactcagatgtttgcaggattcatccaggaccgagagcttcggaaaagtggagttaaaggtttgtttgagatccgggccatccagtatttggaaacaattcctgagtcggagcccagtgggatgaatagaattttgcggagtcttggaagcaaaatgaaatttctgcaaaagaaatgaaatctctgattgtctccatcctgaatatacaacagaaagtgccaaagaaaatatttttctaagggtcaggatcccatgaagtattctacaaaattcttgaaattttaaaaggttaaagagcgagtcaggctgttagaggaggattctcctgttgctgctgtagtaatcactggagaattgttgggaatggtctggcaccatgccatctttactctgtctccattttttttttatagcagccttttctatgtgattcttgggctcattctctgttttgtgctttgtctgtgaaagtagttgtgtttcacaaggaaaagccttgttgttgttacatttaaaaaatagctcaaagatgagaataatgagagaaatgctgagtttaaggtagtagagagacatgatggaaatggagaacactagccttatacacataattctcatcactgaactatcatggcccctttaaacccatgggctgtttgacctgggctaaggaatagactcatcacatatctccattgttttgccttatattatatctaggggaatctcacttaggaggaagccctacttgtaatattataaggtactgttattaagtaccttataaaattagacatcttgcaactcctcctccaaattatgtggcatttgagtagtttgcttgtgcctcacatgtcaacattaaactttgtggaggctggatgcagtggctcacacctgtaatctccaccactttgggaggctaaggcaggagtttgagggtgggagtttgagactagcctgggcaacatagcaagatcccatctctacaaaaacattttaaaaataagtaaataaatttaaactttgtgaaattatagctaatatgaaaatgtcctttcaagggcatgggagccacctttattttttagtgtccaccatgtgccatgcactgtggtatatgtatgcatatcatctcaaccaatccttaaatcaaccttatgagatagatatttgcatctccattttactaataaactgaggctgggattacaggcatgagtcactgcacccggcctgtgtgtgtgtgtgtgtgtgtgtgtgtgtgttttcaaactcatgggcaaattcaagttcagatggtgcacttttcattgattaatgttatagcaaatgtcagtttgttttcttcagtttctgctgatggttttaactggcacagaaagtatttattcaaccttacaaaactgtgtaagttgtattgtgatacagtttattgacttgtacagtattgtcattacaacccattcaggtatgcatgaatctgaagcagaacaccatttaagactggtgctgtataatataattcctacagatgtgggtccagggaatagaactgagcctgtcttttttttaatgttaagcaggttacccccagtggggcttctactagacatctctccatttggtctcttcttacactccaacccagcaggaacagttaataattggatgtttataaaatgggggtaaaagggtttactgtgatggatcctggctatccctctaggaggagacctttgcttcagcaatggtgtcttcatcctcgcagcctgaagctgcttcatttccttaggtctgttgtgttttctgtaaagtgttaggaattctggatatttttgtaaaagaatcaagatttgtataaaatgttgtttacagatcttttaatgaataaatacataaacccccc

SEQ ID NO: 6165 - DNA, 1976 bp, Homo sapiens
gaggccacctgtttgtgatgtgcaggcacagaagaaaggcacagctccccatcagtttcatggaaaataactcagtgcctgctgggaaccagctgctggagatccctacagagagcttccactgggggcaacccttccaggaaggagttggggagagagaaccctcactgtggggaatgctgataaaccagtcacacagctgctctattctcacacaaatctaccccttgcgtggctggaactgacgtttccctggaggtgtccagaaagctgatgtaacacagagcctataaaagctgtcggtccttaaggctgcccagcgccttgccaaaatggagcttgtaagaaggctcatgccattgaccctcttaattctctcctgtttggcggagctgacaatggcggaggctgaaggcttgatccagatggaagctgtgaaagtgaaaacattaaagtctttgacggaacctccagcaatgggcctctgctagggcaagtctgcagtaaaaacgactatgttcctgtatttgaatcatcatccagtacattgacgtttcaaatagttactgactcagcaagaattcaaagaactgtctttgtcttctactacttcttctctcctaacatctctattccaaactgtggcggttacctggataccttggaaggatccttcaccagccccaattacccaaagccgcatcctgagctggcttattgtgtgtggcacatacaagtggagaaagattacaagataaaactaaacttcaaagagattttattatgccaattcttaccggggattttctgcttcctacacctcaatttatgcagaaaacatcaacactacatctttaacttgctcttctgacaggatgagagttattataagcaaatcctacctagaggcttttaactctaatgggaataacttgcaactaaaagacccaacttgcagaccaaaattatcaaatgttgtggaattttctgtccctcttaatggatgtggtacaatcagaaaggtagaagatcagtcaattacttacaccaatataatcaccttttctgcatcctcaacttctgaagtgatcacccgtcagaaacaactccagattattgtgaagtgtgaaatgggacataattctacagtggagataatatacataacagaagatgatgtaatacaaagtcaaaatgcactgggcaaatataacaccagcatggctctttttgaatccaattcatttgaaaagactatacttgaatcaccatattatgtggatttgaaccaaactctttttgttcaagttagtctgcacacctcagatccaaatttggtggtgtttcttgatacctgtagagcctctcccacctctgactttgcatctccaacctacgacctaatcaagagtggatgtagtcgagatgaaacttgtaaggtgtatcccttatttggacactatgggagattccagtttaatgcctttaaattcttgagaagtatgagctctgtgtatctgcagtgtaaagttttgatatgtgatagcagtgaccaccagtctcgctgcaatcaaggttgtgtctccagaagcaaacgagacatttcttcatataaatggaaaacagattccatcataggacccattcgtctgaaaagggatcgaagtgcaagtggcaattcaggatttcagcatgaaacacatgcggaagaaactccaaaccagcctttcaacagtgtgcatctgttttccttcatggttctagctctgaatgtggtgactgtagcgacaatcacagtgaggcattttgtaaatcaacgggcagactacaaataccagaagctgcagaactattaactaacaggtccaaccctaagtgagacatgtttctccaggatgccaaaggaaatgctacctcgtggctacacatattatgaataaatgaggaagggcctgaaagtgacacacaggcctgca

SEQ ID NO: 6166 - DNA, 1077 bp, Homo sapiens
ttagggagggcgggcctgtttccgggaggcgcgtggggcttgaggccgagaacggcccttgctgccaccaacatggagactttgtaccgtgtcccgttcttagtgctcgaatgtcccaacctgaagctgaagaagccgccctggttgcacatgccgtcggccatgactgtgtatgctctggtggtggtgtcttacttcctcatcaccggaggaataatttatgatgttattgttgaacctccaagtgtcggttctatgactgatgaacatgggcatcagaggccagtagctttcttggcctacagagtaaatggacaatatattatggaaggacttgcatccagcttcctatttacaatgggaggtttaggtttcataatcctggaccgatcgaatgcaccaaatatcccaaaactcaatagattccttcttctgttcattggattcgtctgtgtcctattgagttttttcatggctagagtattcatgagaatgaaactgccgggctatctgatgggttagagtgcctttgagaagaaatcagtggatactggatttgctcctgtcaatgaagttttaaaggctgtaccaatcctctaatatgaaatgtggaaaagaatgaagagcagcagtaaaagaaatatctagtgaaaaaacaggaagcgtattgaagcttggactagaatttcttcttggtattaaagagacaagtttatcacagaattttttttcctgctggcctattgctataccaatgatgttgagtggcattttctttttagtttttcattaaaatatattccatatctacaactataatatcaaataaagtgattattttttacaaccctcttaacattttttggagatgacatttctgattttcagaaattaacataaaatccagaagcaagattccgtaagctgagaactctggacagttgatcagctttacctatggtgctttgcctttaactagagtgtgtgatggtagattatttcagatatgtatgtaaaactgtttcctgaacaataagatgtatgaacggagcagaaataaatactttttctaattaa

SEQ ID NO: 6167 - DNA, 3133 bp, Homo sapiens
aaggaccaggacgccggggttccaggagactctgcaggctccatccctccttattcccccaccccgaccccagtagcgctgggcctaggagcactcgggagttgctcagtggctctgcaccgctggcgcgggaaggggagaaaggggctgccagaggcgggaatttggtccccacgcgctgctccagggacgagaagccagggaccggcggttctgggagcagctgtgctggatgccctggaggaacaaggaggcctccagtccctcttctgctaatccccccttggaagccctccagagccccagcttcagaggcaacatggcggacaagctgaaggaccccagcaccctgggcttcctggaggcggccgtgaagatcagccacacgtccccagatatcccagctgaggtgcagatgtcggtcaaggagcacatcatgcgtcacacccggctgcagcggcaaactacagagccagcgtcatccaccaggcacacgtccttcaagcgccacctgccaaggcagatgcatgtctccagtgtagactatggcaatgagcttccaccagcagcagagcagcccaccagcattggccgcatcaagcctgagctctacaagcagaagtcggtggatggggaggatgccaagtctgaggccaccaagagctgcgggaagatcaacttcagcctacgctacgattacgagaccgagaccctgattgtgcgtatcctgaaggcttttgacctccctgccaaggacttttgtggaagctctgacccttatgtcaagatctacctcctgcctgaccgcaaatgcaagctgcagacccgggtgcaccgcaagaccctgaaccccacctttgatgagaacttccacttccctgtgccctatgaggagctggctgaccgcaagctgcatctcagtgtcttcgactttgaccgcttctcccgccatgacatgattggcgaggtcatcctggacaacctctttgaggcctctgacctgtctcgggaaacctccatctggaaggatatccaatatgccacaagtgaaagcgtggacttgggagagatcatgttctccctttgctacctgcccactgcaggcaggctcaccctcacagtgattaagtgtcggaacctcaaggcgatggacatcacaggctattcagatccctatgtgaaagtgtccttgctctgtgatgggcggaggctgaagaagaagaaaacaaccataaagaaaaacactctcaatcctgtctacaatgaggccatcatctttgacattcccccggaaaacatggatcaagtcagcctgctcatctcagtcatggactatgatcgagtgggccacaatgagatcataggagtctgtcgtgtggggatcactgctgaaggcctgggcagggaccactggaacgagatgctggcatacccccggaagcccatcgcacactggcactccttggtggaggtaaagaaatccttcaaagagggaaaccctcggttgtgatttcattcacgtggatgctgcaagcagagagactgccacctggagttaggatggcagggccgagctgctagcttcgacagtgagagctcgtgcccatctccgaaaccacctccaacaccatgagatgtgcagccaaataacacaaatgggactcagcaatgttctctttgcacttgttcaaccgtctaaacagtgttgtgcagtcgcagtggcggcagcagcggcagccgtccgtcactccagagtcttacctgctcctgtgtaggtcaaagctgagacacttgtcatgtggtcagatctgtcttagtcttttgtgtctcccaaggtgatgtttttgtggtttttcactttttatgggtctgctggtaagaaaagggaaaaaaaaaaagagtaggaaaagacaaagggtggaaagcccagaagttggttctagaaaatacaaggtacagttttttggaaagaggtggattgagtttctgaaatgctgcgtctccagcaagctccacaaccctggaaaaggaggaggcgtggtgggactgcggctgcattttcagtgccctgcaggaatggggtgaatccatggaagagcctttgtgaggtgaattactagtctttgaagctcttcgctggcaggacataaaccacgctgggaccctcagtcccgtgttgaaatcacaagacctctgaggcgcttgtgagccttcagctgatgtgcagggttcctcgctccccttcctcgctggctttccccatgaattgaaaacgtcttgattcctcatgggaacttagtcactttctttaggaatgattcagttcagccgaaactaaacacgccatatgttttctgatgcgccacagttaatgatcacatttgtttgaaaacaggatctttgtcctcagaaataatcttgattgtaaagtaagagagaaacatatgttctggaatgatttctgcattatacatagctttataattccatgaagtatcaagctgctgtttaaaatgcctaaacagattaaagaaaaacctagattaaatgttcttttccaaatggggagttttgaaatccaaatagcagtttgagtccatctttctatgaagagtatgtttttgattgaaaccgagtcagcgtaagcctatttcagcccctttggctctttgacaatattcatcttaaactttagttctataaattactaagtacttcagtgttgtttgtttcagtggttgtgagggtttcttgtttcctttagatctttaccttaggccaaactcagtttaggaaaaaaaaaattgtttgaactattctgtgttgtaatagcacatttctgttgagttaatagtggtcttcccaccaacccctaaaaccaggttgatttgctcaatctcagtttgtataaccccagtaagcgcatggaggtgagtttctacttcgacttgtggcgacacagtgccagtttcctgagctgtgtgtactacttgcaagaggcaagtctgctgaagaaccccttcttttaacagtggaaaatcaagaacagaaaatctgttcacacacctgtgtcttattctttatatatgctacatggtagaggagcagcgaccaataaagtatccctcatttt

SEQ ID NO: 6168 - DNA, 5164 bp, Homo sapiens
gggaagccagacggttaacacagacaaagtgctgccgtgacactcggccctccagtgttgcggagaggcaagagcagcgaccgcggcacctgtccgcccggagctgggacgcgggcgcccgggcggccggacgaagcgaggagggaccgccgaggtgcgcgtctgtgcggctcagcctggcgggggacgcggggagaatgtggactgggtagagatgaacgagacttttctcagatgttggatatttgcttggaaaaacgtgtgggtacgaccttggctgcccccaagtgtaactccagcactgtgaggtttcagggattggcagaggggaccaaggggaccatgaaaatggacatggaggatgcggatatgactctgtggacagaggctgagtttgaagagaagtgtacatacattgtgaacgaccacccctgggattctggtgctgatggcggtacttcggttcaggcggaggcatccttaccaaggaatctgcttttcaagtatgccaccaacagtgaagaggttattggagtgatgagtaaagaatacataccaaagggcacacgttttggacccctaataggtgaaatctacaccaatgacacagttcctaagaacgccaacaggaaatatttttggaggatctattccagaggggagcttcaccacttcattgacggctttaatgaagagaaaagcaactggatgcgctatgtgaatccagcacactctccccgggagcaaaacctggctgcgtgtcagaacgggatgaacatctacttctacaccattaagcccatccctgccaaccaggaacttcttgtgtggtattgtcgggactttgcagaaaggcttcactacccttatcccggagagctgacaatgatgaatctcacacaaacacagagcagtctaaagcaaccgagcactgagaaaaatgaactctgcccaaagaatgtcccaaagagagagtacagcgtgaaagaaatcctaaaattggactccaacccctccaaaggaaaggacctctaccgttctaacatttcacccctcacatcagaaaaggacctcgatgactttagaagacgtgggagccccgaaatgcccttctaccctcgggtcgtttaccccatccgggcccctctgccagaagactttttgaaagcttccctggcctacgggatcgagagacccacgtacatcactcgctcccccattccatcctccaccactccaagcccctctgcaagaagcagccccgaccaaagcctcaagagctccagccctcacagcagccctgggaatacggtgtcccctgtgggccccggctctcaagagcaccgggactcctacgcttacttgaacgcgtcctacggcacggaaggtttgggctcctaccctggctacgcacccctgccccacctcccgccagctttcatcccctcgtacaacgctcactaccccaagttcctcttgcccccctacggcatgaattgtaatggcctgagcgctgtgagcagcatgaatggcatcaacaactttggcctcttcccgaggctgtgccctgtctacagcaatctcctcggtgggggcagcctgccccaccccatgctcaaccccacttctctcccgagctcgctgccctcagatggagcccggaggttgctccagccggagcatcccagggaggtgcttgtcccggcgccccacagtgccttctcctttaccggggccgccgccagcatgaaggacaaggcctgtagccccacaagcgggtctcccacggcgggaacagccgccacggcagaacatgtggtgcagcccaaagctacctcagcagcgatggcagcccccagcagcgacgaagccatgaatctcattaaaaacaaaagaaacatgaccggctacaagacccttccctacccgctgaagaagcagaacggcaagatcaagtacgaatgcaacgtttgcgccaagactttcggccagctctccaatctgaaggtccacctgagagtgcacagtggagaacggcctttcaaatgtcagacttgcaacaagggctttactcagctcgcccacctgcagaaacactacctggtacacacgggagaaaagccacatgaatgccaggtctgccacaagagatttagcagcaccagcaatctcaagacccacctgcgactccattctggagagaaaccataccaatgcaaggtgtgccctgccaagttcacccagtttgtgcacctgaaactgcacaagcgtctgcacacccgggagcggccccacaagtgctcccagtgccacaagaactacatccatctctgtagcctcaaggttcacctgaaagggaactgcgctgcggccccggcgcctgggctgcccttggaagatctgacccgaatcaatgaagaaatcgagaagtttgacatcagtgacaatgctgaccggctcgaggacgtggaggatgacatcagtgtgatctctgtagtggagaaggaaattctggccgtggtcagaaaagagaaagaagaaactggcctgaaagtgtctttgcaaagaaacatggggaatggactcctctcctcagggtgcagcctttatgagtcatcagatctacccctcatgaagttgcctcccagcaacccactacctctggtacctgtaaaggtcaaacaagaaacagttgaaccaatggatccttaagattttcagaaaacacttattttgtttcttaagttatgacttggtgagtcagggtgcctgtaggaagtggcttgtacataatcccagctctgcaaagctctctcgacagcaaatggtttcccctcacctctggaattaaagaaggaactccaaagttactgaaatctcagggcatgaacaaggcaaaggccatatatatatatatatatatatctgtatacatattatatatacttatttacacctgtgtctatatatttgcccctgtgtattttgaatatttgtgtggacatgtttgcatagccttcccattactaagactattacctagtcataattattttttcaatgataatccttcataatttattatacaatttatcattcagaaagcaataattaaaaaagtttacaatgactggaaagattccttgtaatttgagtataaatgtatttttgtcttgtggccattctttgtagataatttctgcacatctgtataagtacctaagatttagttaaacaaatatatgacttcagtcaacctctctctctaataatggtttgaaaatgaggtttgggtaattgccaatgttggacagttgatgtgttcattcctgggatcctatcatttgaacagcattgtacataacttgggggtatgtgtgcaggattacccaagaataacttaagtagaagaaacaagaaagggaatcttgtatatttttgttgatagttcatgtttttcccccagccacaattttaccggaagggtgacaggaaggctttaccaacctgtctctccctccaaaagagcagaatcctcccaccgccctgccctccccaccgagtcctgtggccattcagagcggccacatgacttttgcatccattgtattatcagaaaatgtgaagaagaaaaaaatgccatgttttaaaaccactgcgaaaatttccccaaagcataggtggctttgtgtgtgtgcgatttgggggcttgagtctgggtggtgttttgttgttggtttttgttgctttttttttttttttttttttaatgtcaaaattgcacaaacatggtgctctaccaggaaggattcgaggtagataggctcaggccacactttaaaaacaaacacacaaacaacaaaaaacgggtattctagtcatcttggggtaaaagcgggtaatgaacattcctatccccaacacatcaattgtattttttctgtaaaactcagattttcctcagtatttgtgtttttacattttatggttaatttaatggaagatgaaagggcattgcaaagttgttcaacaacagttacctcattgagtgtgtccagtagtgcaggaaatgatgtcttatctaatgatttgcttctctagaggagaaaccgagtaaatgtgctccagcaagatagactttgtgttattctatcttttattctgctaagcccaaagattacatgttggtgttcaaagtgtagcaaaaaatgatgtatatttataaatctatttataccactatatcatatgtatatatatttataaccacttaaattgtgagccaagccatgtaaaagatctactttttctaagggcaaaaaaaaaaaaaaaaaaaaaagaacactcctttctgagactttgcttaatacttggtgacctcacaatcacgtcggtatgattgggcacccttgcctactgtaagagaccctaaaaccttggtgcagtggtggggaccacaaaacaaccagggaggaagagatacatcattttttagtattaaggaccatctaagacagctctattttttttttgccactttatgattatgtggtcacacccaagtcacagaaataaaaaactgactttaccgctgcaatttttctgttttcctccttactaaatactgatacattactccaatctattttataattatatttgacattttgttcacatcaactaatgttcacctgtagaagagaacaaatttcgaataatccagggaaacccaagagccttactggtcttctgtaacttccaagactgacagctttttatgtatcagtgtttgataaacacagtccttaactgaaggtaaaccaaagcatcacgttgacattagaccaaatacttttgattcccaactactcgtttgttctttttctccttttgtgctttcccatagtgagaatttttataaagacttcttgcttctctcaccatccatccttctcttttctgcctcttacatgtgaatgttgagcccacaatcaacagtggttttattttttcctctactcaaagttaaaactgaccaaagttactggctttttactttgctagaacaacaaactatcttatgtttacatactggtttacaatgttatttatgtgcaaattgtcaaaatgtaaattaaatataaatgttcatgctttaccaaaa

SEQ ID NO: 6169 - DNA, 1151 bp, Homo sapiens
gcaggggagctccgagtgtccacaggaagggaactatcagctcctggcatctgtaaggatgctgtccatgctgaggacaatgaccagactctgcttcctgttattcttctctgtggccaccagtgggtgcagtgcagcagcagcctcttctcttgagatgctctcgagggaattcgaaacctgtgccttctccttttcttccctgcctagaagctgcaaagaaatcaaggaacgctgccatagtgcaggtgatggcctgtattttctccgcaccaagaatggtgttgtctaccagaccttctgtgacatgacttctgggggtggcggctggaccctggtggccagcgtgcacgagaatgacatgcgtgggaagtgcacggtgggtgatcgctggtccagtcagcagggcaacaaagcagactacccagagggggatggcaactgggccaactacaacacctttggatctgcagaggcggccacgagcgatgactacaagaaccctggctactacgacatccaggccaaggacctgggcatctggcatgtgcccaacaagtcccccatgcagcattggagaaacagcgccctgctgaggtaccgcaccaacactggcttcctccagagactgggacataatctgtttggcatctaccagaaatacccagtgaaatacagatcagggaaatgttggaatgacaatggcccagccatacctgtggtctatgactttggtgatgctaagaagactgcatcttattactcaccgtatggtcaacgggaatttgttgcaggattcgttcagttccgggtgtttaataacgagagagcagccaacgccctttgtgctgggataaaagttactggctgtaacactgagcatcactgcatcggtggaggagggttcttcccacagggcaaaccccgtcagtgtggggacttctccgcctttgactgggatggatatggaactcacgttaagagcagctgcagtcgggagataacggaggcggctgtactcttgttctatagatgagacagagctctgcggtgtcagggcgagaacccatcttccaaccccggctatttggagacggaaaaactggaattctaacaaggaggagaggagactaaatcacatcaatttgcaa

SEQ ID NO: 6170 - DNA, 5687 bp, Homo sapiens
attacagaggaaggagctcgctatataagccagccaaagttggctgcaccggccacagcctgcctactgtcacccgcctctcccgcgcgcagatacacgcccccgcctccgtgggcacaaaggcagcgctgctggggaactcgggggaacgcgcacgtgggaaccgccgcagctccacactccaggtacttcttccaaggacctaggtctctcgcccatcggaaagaaaataattctttcaagaagatcagggacaactgatttgaagtctactctgtgcttctaaatccccaattctgctgaaagtgagataccctagagccctagagccccagcagcacccagccaaacccacctccaccatgggggccatgactcagctgttggcaggtgtctttcttgctttccttgccctcgctaccgaaggtggggtcctcaagaaagtcatccggcacaagcgacagagtggggtgaacgccaccctgccagaagagaaccagccagtggtgtttaaccacgtttacaacatcaagctgccagtgggatcccagtgttcggtggatctggagtcagccagtggggagaaagacctggcaccgccttcagagcccagcgaaagctttcaggagcacacagtggatggggaaaaccagattgtcttcacacatcgcatcaacatcccccgccgggcctgtggctgtgccgcagcccctgatgttaaggagctgctgagcagactggaggagctggagaacctggtgtcttccctgagggagcaatgtactgcaggagcaggctgctgtctccagcctgccacaggccgcttggacaccaggcccttctgtagcggtcggggcaacttcagcactgaaggatgtggctgtgtctgcgaacctggctggaaaggccccaactgctctgagcccgaatgtccaggcaactgtcaccttcgaggccggtgcattgatgggcagtgcatctgtgacgacggcttcacgggcgaggactgcagccagctggcttgccccagcgactgcaatgaccagggcaagtgcgtaaatggagtctgcatctgtttcgaaggctacgccggggctgactgcagccgtgaaatctgcccagtgccctgcagtgaggagcacggcacatgtgtagatggcttgtgtgtgtgccacgatggctttgcaggcgatgactgcaacaagcctctgtgtctcaacaattgctacaaccgtggacgatgcgtggagaatgagtgcgtgtgtgatgagggtttcacgggcgaagactgcagtgagctcatctgccccaatgactgcttcgaccggggccgctgcatcaatggcacctgctactgcgaagaaggcttcacaggtgaagactgcgggaaacccacctgcccacatgcctgccacacccagggccggtgtgaggaggggcagtgtgtatgtgatgagggctttgccggtgtggactgcagcgagaagaggtgtcctgctgactgtcacaatcgtggccgctgtgtagacgggcggtgtgagtgtgatgatggtttcactggagctgactgtggggagctcaagtgtcccaatggctgcagtggccatggccgctgtgtcaatgggcagtgtgtgtgtgatgagggctatactggggaggactgcagccagctacggtgccccaatgactgtcacagtcggggccgctgtgtcgagggcaaatgtgtatgtgagcaaggcttcaagggctatgactgcagtgacatgagctgccctaatgactgtcaccagcacggccgctgtgtgaatggcatgtgtgtttgtgatgacggctacacaggggaagactgccgggatcgccaatgccccagggactgcagcaacaggggcctctgtgtggacggacagtgcgtctgtgaggacggcttcaccggccctgactgtgcagaactctcctgtccaaatgactgccatggccagggtcgctgtgtgaatgggcagtgcgtgtgccatgaaggatttatgggcaaagactgcaaggagcaaagatgtcccagtgactgtcatggccagggccgctgcgtggacggccagtgcatctgccacgagggcttcacaggcctggactgtggccagcactcctgccccagtgactgcaacaacttaggacaatgcgtctcgggccgctgcatctgcaacgagggctacagcggagaagactgctcagaggtgtctcctcccaaagacctcgttgtgacagaagtgacggaagagacggtcaacctggcctgggacaatgagatgcgggtcacagagtaccttgtcgtgtacacgcccacccacgagggtggtctggaaatgcagttccgtgtgcctggggaccagacgtccaccatcatccaggagctggagcctggtgtggagtactttatccgtgtatttgccatcctggagaacaagaagagcattcctgtcagcgccagggtggccacgtacttacctgcacctgaaggcctgaaattcaagtccatcaaggagacatctgtggaagtggagtgggatcctctagacattgcttttgaaacctgggagatcatcttccggaatatgaataaagaagatgagggagagatcaccaaaagcctgaggaggccagagacctcttaccggcaaactggtctagctcctgggcaagagtatgagatatctctgcacatagtgaaaaacaatacccggggccctggcctgaagagggtgaccaccacacgcttggatgcccccagccagatcgaggtgaaagatgtcacagacaccactgccttgatcacctggttcaagcccctggctgagatcgatggcattgagctgacctacggcatcaaagacgtgccaggagaccgtaccaccatcgatctcacagaggacgagaaccagtactccatcgggaacctgaagcctgacactgagtacgaggtgtccctcatctcccgcagaggtgacatgtcaagcaacccagccaaagagaccttcacaacaggcctcgatgctcccaggaatcttcgacgtgtttcccagacagataacagcatcaccctggaatggaggaatggcaaggcagctattgacagttacagaattaagtatgcccccatctctggaggggaccacgctgaggttgatgttccaaagagccaacaagccacaaccaaaaccacactcacaggtctgaggccgggaactgaatatgggattggagtttctgctgtgaaggaagacaaggagagcaatccagcgaccatcaacgcagccacagagttggacacgcccaaggaccttcaggtttctgaaactgcagagaccagcctgaccctgctctggaagacaccgttggccaaatttgaccgctaccgcctcaattacagtctccccacaggccagtgggtgggagtgcagcttccaagaaacaccacttcctatgtcctgagaggcctggaaccaggacaggagtacaatgtcctcctgacagccgagaaaggcagacacaagagcaagcccgcacgtgtgaaggcatccactgccatgggctccccaaaggaagtcattttctcagacatcactgaaaattcggctactgtcagctggagggcacccacagcccaagtggagagcttccggattacctatgtgcccattacaggaggtacaccctccatggtaactgtggacggaaccaagactcagaccaggctggtgaaactcatacctggcgtggagtaccttgtcagcatcatcgccatgaagggctttgaggaaagtgaacctgtctcagggtcattcaccacagctctggatggcccatctggcctggtgacagccaacatcactgactcagaagccttggccaggtggcagccagccattgccactgtggacagttatgtcatctcctacacaggcgagaaagtgccagaaattacacgcacggtgtccgggaacacagtggagtatgctctgaccgacctcgagcctgccacggaatacacactgagaatctttgcagagaaagggccccagaagagctcaaccatcactgccaagttcacaacagacctcgattctccaagagacttgactgctactgaggttcagtcggaaactgccctccttacctggcgacccccccgggcatcagtcaccggttacctgctggtctatgaatcagtggatggcacagtcaaggaagtcattgtgggtccagataccacctcctacagcctggcagacctgagcccatccacccactacacagccaagatccaggcactcaatgggcccctgaggagcaatatgatccagaccatcttcaccacaattggactcctgtaccccttccccaaggactgctcccaagcaatgctgaatggagacacgacctctggcctctacaccatttatctgaatggtgataaggctgaggcgctggaagtcttctgtgacatgacctctgatgggggtggatggattgtgttcctgagacgcaaaaacggacgcgagaacttctaccaaaactggaaggcatatgctgctggatttggggaccgcagagaagaattctggcttgggctggacaacctgaacaaaatcacagcccaggggcagtacgagctccgggtggacctgcgggaccatggggagacagcctttgctgtctatgacaagttcagcgtgggagatgccaagactcgctacaagctgaaggtggaggggtacagtgggacagcaggtgactccatggcctaccacaatggcagatccttctccacctttgacaaggacacagattcagccatcaccaactgtgctctgtcctacaaaggggctttctggtacaggaactgtcaccgtgtcaacctgatggggagatatggggacaataaccacagtcagggcgttaactggttccactggaagggccacgaacactcaatccagtttgctgagatgaagctgagaccaagcaacttcagaaatcttgaaggcaggcgcaaacgggcataaattccagggaccactgggtgagagaggaataaggcccagagcgaggaaaggattttaccaaagcatcaatacaaccagcccaaccatcggtccacacctgggcatttggtgagagtcaaagctgaccatggatccctggggccaacggcaacagcatgggcctcacctcctctgtgatttctttctttgcaccaaagacatcagtctccaacatgtttctgttttgttgtttgattcagcaaaaatctcccagtgacaacatcgcaatagttttttacttctcttaggtggctctgggaatgggagaggggtaggatgtacaggggtagtttgttttagaaccagccgtattttacatgaagctgtataattaattgtcattatttttgttagcaaagattaaatgtgtcattggaagccatccctttttttacatttcatacaacagaaaccagaaaagcaatactgtttccattttaaggatatgattaatattattaatataataatgatgatgatgatgatgaaaactaaggatttttcaagagatctttctttccaaaacatttctggacagtacctgattgtattttttttttaaataaaagcacaagtacttttgagtttgtt

SEQ ID NO: 6171 - DNA, 3877 bp, Homo sapiens
caccggcgccgcgtcagcccccaggccgcctgcaggtgtgcgctcagaactagcacgtgtgccggacactatttaagggcccgcctctcctggctcacagctgcttgctgctccagccttgccctcccagagctgccggacgctcgcgggtctcggaacgcatcccgccgcgggggcttcggccgtggcatgggcgccgcgggcctgctcggggttttcttggctctcgtcgcaccgggggtcctcgggatttcttgtggctctcctccgcctatcctaaatggccggattagttattattctacccccattgctgttggtaccgtgataaggtacagttgttcaggtaccttccgcctcattggagaaaaaagtctattatgcataactaaagacaaagtggatggaacctgggataaacctgctcctaaatgtgaatatttcaataaatattcttcttgccctgagcccatagtaccaggaggatacaaaattagaggctctacaccctacagacatggtgattctgtgacatttgcctgtaaaaccaacttctccatgaacggaaacaagtctgtttggtgtcaagcaaataatatgtgggggccgacacgactaccaacctgtgtaagtgttttccctctcgagtgtccagcacttcctatgatccacaatggacatcacacaagtgagaatgttggctccattgctccaggattgtctgtgacttacagctgtgaatctggttacttgcttgttggagaaaagatcattaactgtttgtcttcgggaaaatggagtgctgtcccccccacatgtgaagaggcacgctgtaaatctctaggacgatttcccaatgggaaggtaaaggagcctccaattctccgggttggtgtaactgcaaactttttctgtgatgaagggtatcgactgcaaggcccaccttctagtcggtgtgtaattgctggacagggagttgcttggaccaaaatgccagtatgtgaagaaattttttgcccatcacctccccctattctcaatggaagacatataggcaactcactagcaaatgtctcatatggaagcatagtcacttacacttgtgacccggacccagaggaaggagtgaacttcatccttattggagagagcactctccgttgtacagttgatagtcagaagactgggacctggagtggccctgccccacgctgtgaactttctacttctgcggttcagtgtccacatccccagatcctaagaggccgaatggtatctgggcagaaagatcgatatacctataacgacactgtgatatttgcttgcatgtttggcttcaccttgaagggcagcaagcaaatccgatgcaatgcccaaggcacatgggagccatctgcaccagtctgtgaaaaggaatgccaggcccctcctaacatcctcaatgggcaaaaggaagatagacacatggtccgctttgaccctggaacatctataaaatatagctgtaaccctggctatgtgctggtgggagaagaatccatacagtgtacctctgagggggtgtggacaccccctgtaccccaatgcaaagtggcagcgtgtgaagctacaggaaggcaactcttgacaaaaccccagcaccaatttgttagaccagatgtcaactcttcttgtggtgaagggtacaagttaagtgggagtgtttatcaggagtgtcaaggcacaattccttggtttatggagattcgtctttgtaaagaaatcacctgcccaccaccccctgttatctacaatggggcacacaccgggagttccttagaagattttccatatggaaccacggtcacttacacatgtaaccctgggccagaaagaggagtggaattcagcctcattggagagagcaccatccgttgtacaagcaatgatcaagaaagaggcacctggagtggccctgctcccctgtgtaaactttccctccttgctgtccagtgctcacatgtccatattgcaaatggatacaagatatctggcaaggaagccccatatttctacaatgacactgtgacattcaagtgttatagtggatttactttgaagggcagtagtcagattcgttgcaaagctgataacacctgggatcctgaaataccagtttgtgaaaaagaaacatgccagcatgtgagacagagtcttcaagaacttccagctggttcacgtgtggagctagttaatacgtcctgccaagatgggtaccagttgactggacatgcttatcagatgtgtcaagatgctgaaaatggaatttggttcaaaaagattccactttgtaaagttattcactgtcaccctccaccagtgattgtcaatgggaagcacacaggcatgatggcagaaaactttctatatggaaatgaagtctcttatgaatgtgaccaaggattctatctcctgggagagaaaaaattgcagtgcagaagtgattctaaaggacatggatcttggagcgggccttccccacagtgcttacgatctcctcctgtgactcgctgccctaatccagaagtcaaacatgggtacaagctcaataaaacacattctgcatattcccacaatgacatagtgtatgttgactgcaatcctggcttcatcatgaatggtagtcgcgtgattaggtgtcatactgataacacatgggtgccaggtgtgccaacttgtatcaaaaaagaggtaaactgtagctcaccagcagatatggatggaatccagaaagggctggaaccaaggaaaatgtatcagtatggagctgttgtaactctggagtgtgaagatgggtatatgctggaaggcagtccccagagccagtgccaatcggatcaccaatggaaccctcccctggcggtttgcagatcccgttcacttgctcctgtcctttgtggtattgctgcaggtttgatacttcttaccttcttgattgtcattaccttatacgtgatatcaaaacacagagcacgcaattattatacagatacaagccagaaagaagcttttcatttagaagcacgagaagtatattctgttgatccatacaacccagccagctgatcagaagacaaactggtgtgtgcctcattgcttggaattcagcggaatattgattagaaagaaactgctctaatatcagcaagtctctttatatggcctcaagatcaatgaaatgatgtcataagcgatcacttcctatatgcacttattctcaagaagaacatctttatggtaaagatgggagcccagtttcactgccatatactcttcaaggactttctgaagcctcacttatgagatgcctgaagccaggccatggctataaacaattacatggctctaaaaagttttgccctttttaaggaaggcactaaaaagagctgtcctggtatctagacccatcttctttttgaaatcagcatactcaatgttactatctgcttttggttataatgtgtttttaattatctaaagtatgaagcattttctggggttatgatggctttacctttattaggaagtatggttttattttgatagtagcttcctcctctggtggtgttaatcatttcatttttacccttacttggtttgagtttctctcacattactgtatatactttgcctttccataatcactcagtgattgcaatttgcacaagtttttttaaattatgggaatcaagatttaatcctagagatttggtgtacaattcaggctttggatgtttctttagcagttttgtgataagttctagttgcttgtaaaatttcacttaataatgtgtacattagtcattcaataaattgtaattgtaaagaaaacatacaa

SEQ ID NO: 6172 - DNA, 1560 bp, Homo sapiens
gtgcctcccctagccgcctcctcccagcagtcccccaggagcgagctgcgagatgccccaaatcggacccctccccagttggaaaaaaaacgactcctgacctttcccagcctcctcggtccgctgaggaacccgcagccccgggcctcgagcagactgctgggactgcggggcggccgggcgcggggccagaggcggggcggggcgggtcgggtcgggggcctttaagaggcgcggtcgccgggaccgacacagacgcggacagcgccgggactcgccgccccgggactcgcgcagcccgcagcgctccggctcctcctctcgcgaccgccctccgcagcgatggacggagacggtgacccagagagcgtgggccagcccgaggaggcaagcccggaggagcagccagaggaggcgagtgctgaggaggagcggccggaggaccagcaggaggaggaggcggcggccgccgccgcgtacctggacgagctgcccgagccgctgctgctgcgcgtgctggccgcactgccggccgccgagctggtgcaggcctgccgcctggtgtgcctgcgctggaaggagctggtggacggcgccccgctgtggctgctcaagtgccagcaggaggggctggtgcccgagggcggcgtggaggaggagcgcgaccactggcagcagttctacttcctgagcaagcggcgccgcaaccttctgcgtaacccgtgtggggaagaggacttggaaggctggtgtgacgtggagcatggtggggacggctggagggtggaggagctgcctggagacagtggggtggagttcacccacgatgagagcgtcaagaagtacttcgcctcctcctttgagtggtgtcgcaaagcacaggtcattgacctgcaggctgagggctactgggaggagctgctggacacgactcagccggccatcgtggtgaaggactggtactcgggccgcagcgacgctggttgcctctacgagctcaccgttaagctactgtccgagcacgagaacgtgctggctgagttcagcagcgggcaggtggcagtgccccaagacagtgacggcgggggctggatggagatctcccacaccttcaccgactacgggccgggcgtccgcttcgtccgcttcgagcacggggggcaggactccgtctactggaagggctggttcggggcccgggtgaccaacagcagcgtgtgggtagaaccctgagcgaccctgcctccactctcccccagctgcctggaggggcaaaggtcgagggtagataggccttaacttagtccatagcgtcctcaccttccccaagccacacatcctcctcccatcccttgctccgatcccagcccctgagcagggagagagaagttttgttggcataggtttgcttaggtagccggcttctagaatgtagatccgtgagggcgtgagcttggactggacccactgctgattccctgcacctagcacagtgcttgccacaaagtgggctctcaataaatattatttgtccaaggaaggaatgaatgaaaaaatgga

SEQ ID NO: 6173 - DNA, 2697 bp, Homo sapiens
agatgttgcctctctctctcgctcggattggttcagtgcactctagaaacactgctgtggtggagaaactggaccccaggtctggagcgaattccagcctgcagggctgataagcgaggcattagtgagattgagagagactttaccccgccgtggtggttggagggcgcgcagtagagcagcagcacaggcgcgggtcccgggaggccggctctgctcgcgccgagatgtggaatctccttcacgaaaccgactcggctgtggccaccgcgcgccgcccgcgctggctgtgcgctggggcgctggtgctggcgggtggcttctttctcctcggcttcctcttcggttaaaagccaactgcaaggtctaatgactgcaggatctagctatccattgtttctggccgcctatgcgtgcactgggtgtctggcagagaggctggggtggtttataaaatcctccaatgaagctactaacattactccaaagcataatatgaaagcatttttggatgaattgaaagctgagaacatcaagaagttcttatataattttacacagataccacatttagcaggaacagaacaaaactttcagcttgcaaagcaaattcaatcccagtggaaagaatttggcctggattctgttgagctagcacattatgatgtcctgttgtcctacccaaataagactcatcccaactacatctcaataattaatgaagatggaaatgagattttcaacacatcattatttgaaccacctcctccaggatatgaaaatgtttcggatattgtaccacctttcagtgctttctctcctcaaggaatgccagagggcgatctagtgtatgttaactatgcacgaactgaagacttctttaaattggaacgggacatgaaaatcaattgctctgggaaaattgtaattgccagatatgggaaagttttcagaggaaataaggttaaaaatgcccagctggcaggggccaaaggagtcattctctactccgaccctgctgactactttgctcctggggtgaagtcctatccagatggttggaatcttcctggaggtggtgtccagcgtggaaatatcctaaatctgaatggtgcaggagaccctctcacaccaggttacccagcaaatgaatatgcttataggcgtggaattgcagaggctgttggtcttccaagtattcctgttcatccaattggatactatgatgcacagaagctcctagaaaaaatgggtggctcagcaccaccagatagcagctggagaggaagtctcaaagtgccctacaatgttggacctggctttactggaaacttttctacacaaaaagtcaagatgcacatccactctaccaatgaagtgacaagaatttacaatgtgataggtactctcagaggagcagtggaaccagacagatatgtcattctgggaggtcaccgggactcatgggtgtttggtggtattgaccctcagagtggagcagctgttgttcatgaaattgtgaggagctttggaacactgaaaaaggaagggtggagacctagaagaacaattttgtttgcaagctgggatgcagaagaatttggtcttcttggttctactgagtgggcagaggagaattcaagactccttcaagagcgtggcgtggcttatattaatgctgactcatctatagaaggaaactacactctgagagttgattgtacaccgctgatgtacagcttggtacacaacctaacaaaagagctgaaaagccctgatgaaggctttgaaggcaaatctctttatgaaagttggactaaaaaaagtccttccccagagttcagtggcatgcccaggataagcaaattgggatctggaaatgattttgaggtgttcttccaacgacttggaattgcttcaggcagagcacggtatactaaaaattgggaaacaaacaaattcagcggctatccactgtatcacagtgtctatgaaacatatgagttggtggaaaagttttatgatccaatgtttaaatatcacctcactgtggcccaggttcgaggagggatggtgtttgagctagccaattccatagtgctcccttttgattgtcgagattatgctgtagttttaagaaagtatgctgacaaaatctacagtatttctatgaaacatccacaggaaatgaagacatacagtgtatcatttgattcacttttttctgcagtaaagaattttacagaaattgcttccaagttcagtgagagactccaggactttgacaaaagcaacccaatagtattaagaatgatgaatgatcaactcatgtttctggaaagagcatttattgatccattagggttaccagacaggcctttttataggcatgtcatctatgctccaagcagccacaacaagtatgcaggggagtcattcccaggaatttatgatgctctgtttgatattgaaagcaaagtggacccttccaaggcctggggagaagtgaagagacagatttatgttgcagccttcacagtgcaggcagctgcagagactttgagtgaagtagcctaagaggattctttagagaatccgtattgaatttgtgtggtatgtcactcagaaagaatcgtaatgggtatattgataaattttaaaattggtatatttgaaataaagttgaatattatatat

SEQ ID NO: 6174 - DNA, 2035 bp, Homo sapiens
ggcgggggacacccgcccccgctctccgcagccgcccgccgtccgcgcccgccgaggtgagcccggcgcgcgggccgcgcccgccgccacgacccttccacatccgcggaaaccgctgcaggctccaccggctccccgcgctgcggtcgcctcttctctgcccctttcatcatcccctgcttccttgccctctggtcggaaatctcattctcttcatccccagttccttggcttttacctctttctggcttttgctcccttccccctactcctgtccttcctctttttcgcattataaccccctactttcttcctctcaccttgtaagctttttttctaggccccccattttttttcttaaaaaaaaaagggaaacaaaaaccctattgctacaaatgagaattttgagggtaactcttcgctagagccagagaccttttaaaggaatgcatcggtgtgcaggaatcgtggtggtgaggagactgaggtcctcagtatctgggaaatcttattgaggggaccctgtttcggtcatgtcacttgtgtcttcagtttggagatcctgaggttgtctgaagcgagtggatctatttttctaagtccaatagacgaccgcagtgagacacggtgcggggacggccaccgattactgaatgggaattgtgttatcatttgctaaatatattgtgacatacttcgtgcctcggtgaacagctcccttgaccttgtgcggctcctcctccctcgctctctgtccccctctggaatttcccctgagagatcaccgagaaagacaggacggagtccagtgtgagaatggctataactttggaagaagctccgtggctgggctggctcttggtgaaagcactgatgaggtttgccttcatggtcgtcaacaacctggttgctattccatcctacatctgctatgtaattatacttcagccccttcgagtgctggacagtaagcggttctggtatatcgaaggaatcatgtataaatggcttttaggaatggtagcttcctggggatggtatgctggatatacagtgatggaatggggagaagatattaaagcagtttcaaaagatgaagcagtgatgttggtgaatcatcaggcaacaggagatgtgtgcacactgatgatgtgcctccaggacaaaggactggttgttgctcagatgatgtggttgatggatcatatttttaagtacacaaactttggaattgtttctctagttcatggagacttctttataagacagggaagatcttatcgtgaccaacagctgctgcttctcaagaagcacttagaaaataattacaggagcagagatcgaaaatggattgttttgtttccagaagggggcttcctcaggaagaggcgagaaacaagtcaggcatttgccaagaaaaataacttgccatttcttacaaatgttactctgccaaggtctggggcaacaaaaattattttgaatgcacttgtagcacaacagaaaaatggaagtccagcaggaggagatgctaaagaattagacagcaaatcaaaaggcctccagtggataatagatacaacgatagcttatcccaaagctgaacctatagatattcaaacctggatccttggatacaggaaaccaacagtcacacatgtacattacaggatctttccaattaaagatgtacccctggagactgatgaccttaccacttggctctatcagcggtttgttgaaaaagaagacctcttatcacatttttatgaaacaggagcttttccaccttccaagggccataaggaagctgtttccagggagatgaccctcagcaacttgtggatatttctcatacagtcttttgcatttttgtcaggctatatgtggtacaacatcattcagtatttttaccattgcctgttttaggaattgacgtggacttgtcaaggtcaccgtaggagttcagactttctttcataagtgtgcattattttacatgtgcaaatcagaatatatttaaaaaaaagcaaaa

SEQ ID NO: 6175 - DNA, 2909 bp, Homo sapiens
ctgacggacagacagacagacaccgcccccagccccagctaccacctcctccccggccggcggcggacagtggacgcggcggcgagccgcgggcaggggccggagcccgcgcccggaggcggggtggagggggtcggggctcgcggcgtcgcactgaaacttttcgtccaacttctgggctgttctcgcttcggaggagccgtggtccgcgcgggggaagccgagccgagcggagccgcgagaagtgctagctcgggccgggaggagccgcagccggaggagggggaggaggaagaagagaaggaagaggagagggggccgcagtggcgactcggcgctcggaagccgggctcatggacgggtgaggcggcggtgtgcgcagacagtgctccagccgcgcgcgctccccaggccctggcccgggcctcgggccggggaggaagagtagctcgccgaggcgccgaggagagcgggccgccccacagcccgagccggagagggagcgcgagccgcgccggccccggtcgggcctccgaaaccatgaactttctgctgtcttgggtgcattggagccttgccttgctgctctacctccaccatgccaagtggtcccaggctgcacccatggcagaaggaggagggcagaatcatcacgaagtggtgaagttcatggatgtctatcagcgcagctactgccatccaatcgagaccctggtggacatcttccaggagtaccctgatgagatcgagtacatcttcaagccatcctgtgtgcccctgatgcgatgcgggggctgctgcaatgacgagggcctggagtgtgtgcccactgaggagtccaacatcaccatgcagattatgcggatcaaacctcaccaaggccagcacataggagagatgagcttcctacagcacaacaaatgtgaatgcagaccaaagaaagatagagcaagacaagaaaaatgtgacaagccgaggcggtgagccgggcaggaggaaggagcctccctcagggtttcgggaaccagatctctcaccaggaaagactgatacagaacgatcgatacagaaaccacgctgccgccaccacaccatcaccatcgacagaacagtccttaatccagaaacctgaaatgaaggaagaggagactctgcgcagagcactttgggtccggagggcgagactccggcggaagcattcccgggcgggtgacccagcacggtccctcttggaattggattcgccattttatttttcttgctgctaaatcaccgagcccggaagattagagagttttatttctgggattcctgtagacacacccacccacatacatacatttatatatatatatattatatatatataaaaataaatatctctattttatatatataaaatatatatattctttttttaaattaacagtgctaatgttattggtgtcttcactggatgtatttgactgctgtggacttgagttgggaggggaatgttcccactcagatcctgacagggaagaggaggagatgagagactctggcatgatcttttttttgtcccacttggtggggccagggtcctctcccctgcccaggaatgtgcaaggccagggcatgggggcaaatatgacccagttttgggaacaccgacaaacccagccctggcgctgagcctctctaccccaggtcagacggacagaaagacagatcacaggtacagggatgaggacaccggctctgaccaggagtttggggagcttcaggacattgctgtgctttggggattccctccacatgctgcacgcgcatctcgcccccaggggcactgcctggaagattcaggagcctgggcggccttcgcttactctcacctgcttctgagttgcccaggagaccactggcagatgtcccggcgaagagaagagacacattgttggaagaagcagcccatgacagctccccttcctgggactcgccctcatcctcttcctgctccccttcctggggtgcagcctaaaaggacctatgtcctcacaccattgaaaccactagttctgtccccccaggagacctggttgtgtgtgtgtgagtggttgaccttcctccatcccctggtccttcccttcccttcccgaggcacagagagacagggcaggatccacgtgcccattgtggaggcagagaaaagagaaagtgttttatatacggtacttatttaatatccctttttaattagaaattaaaacagttaatttaattaaagagtagggttttttttcagtattcttggttaatatttaatttcaactatttatgagatgtatcttttgctctctcttgctctcttatttgtaccggtttttgtatataaaattcatgtttccaatctctctctccctgatcggtgacagtcactagcttatcttgaacagatatttaattttgctaacactcagctctgccctccccgatcccctggctccccagcacacattcctttgaaataaggtttcaatatacatctacatactatatatatatttggcaacttgtatttgtgtgtatatatatatatatatgtttatgtatatatgtgattctgataaaatagacattgctattctgttttttatatgtaaaaacaaaacaagaaaaaatagagaattctacatactaaatctctctccttttttaattttaatatttgttatcatttatttattggtgctactgtttatccgtaataattgtggggaaaagatattaacatcacgtctttgtctctagtgcagtttttcgagatattccgtagtacatatttatttttaaacaacgacaaagaaatacagatatatcttaaaaaaaaaaaagcattttgtattaaagaatttaattctgatctcaaa

SEQ ID NO: 6176 - DNA, 2704 bp, Homo sapiens
ggcaatagcagaataggagcaagccagcactagtcagctaactaagtgactcaaccaaggccttttttccttgttatctttgcagatacttcattttcttagcgtttctggagattacaacatcctgcggttccgtttctgggaactttactgatttatctcccccctcacacaaataagcattgattcctgcatttctgaagatctcaagatctggactactgttgaaaaaatttccagtgaggctcacttatgtctgtaaagatgggaaaaaaatacaagaacattgttctactaaaaggattagaggtcatcaatgattatcattttagaatggttaagtccttactgagcaacgatttaaaacttaatttaaaaatgagagaagagtatgacaaaattcagattgctgacttgatggaagaaaagttccgaggtgatgctggtttgggcaaactaataaaaattttcgaagatataccaacgcttgaagacctggctgaaactcttaaaaaagaaaagttaaaagtaaaaggaccagccctatcaagaaagaggaagaaggaagtggatgctacttcacctgcaccctccacaagcagcactgtcaaaactgaaggagcagaggcaactcctggagctcagaaaagaaaaaaatcaaccaaagaaaaggctggacccaaagggagtaaggtgtccgaggaacagactcagcctccctctcctgcaggagccggcatgtccacagccatgggccgttccccatctcccaagacctcattgtcagctccacccaacagttcttcaactgagaacccgaaaacagtggccaaatgtcaggtaactcccagaagaaatgttctccaaaaacgcccagtgatagtgaaggtactgagtacaacaaagccatttgaatatgagaccccagaaatggagaaaaaaataatgtttcatgctacagtggctacacagacacagttcttccatgtgaaggttttaaacaccagcttgaaggagaaattcaatggaaagaaaatcatcatcatatcagattatttggaatatgatagtctcctagaggtcaatgaagaatctactgtatctgaagctggtcctaaccaaacgtttgaggttccaaataaaatcatcaacagagcaaaggaaactctgaagattgatattcttcacaaacaagcttcaggaaatattgtatatggggtatttatgctacataagaaaacagtaaatcagaagaccacaatctacgaaattcaggatgatagaggaaaaatggatgtagtggggacaggacaatgtcacaatatcccctgtgaagaaggagataagctccaacttttctgctttcgacttagaaaaaagaaccagatgtcaaaactgatttcagaaatgcatagttttatccagataaagaaaaaaacaaacccgagaaacaatgaccccaagagcatgaagctaccccaggaacagcgtcagcttccatatccttcagaggccagcacaaccttccctgagagccatcttcggactcctcagatgccaccaacaactccatccagcagtttcttcaccaagaaaagtgaagacacaatctccaaaatgaatgacttcatgaggatgcagatactgaaggaagggagtcattttccaggaccgttcatgaccagcataggcccagctgagagccatccccacactcctcagatgcctccatcaacaccaagcagcagtttcttaaccacgttgaaaccaagactgaagactgaacctgaagaagtttccatagaagacagtgcccagagtgacctcaaagaagtgatggtgctgaacgcaacagaatcatttgtatatgagcccaaagagcagaagaaaatgtttcatgccacagtggcaactgagaatgaagtcttccgagtgaaggtttttaatattgacctaaaggagaagttcaccccaaagaagatcattgccatagcaaattatgtttgccgcaatgggttcctggaggtatatcctttcacacttgtggctgatgtgaatgctgaccgaaacatggagatcccaaaaggattgattagaagtgccagcgtaactcctaaaatcaatcagctttgctcacaaactaaaggaagttttgtgaatggggtgtttgaggtacataagaaaaatgtaaggggtgaattcacttattatgaaatacaagataatacagggaagatggaagtggtggtgcatggacgactgaccacaatcaactgtgaggaaggagataaactgaaactcacctgctttgaattggcaccgaaaagtgggaataccggggagttgagatctgtaattcatagtcacatcaaggtcatcaagaccaggaaaaacaagaaagacatactcaatcctgattcaagtatggaaacttcaccagactttttcttctaaaatctggatgtcattgacgataatgtttatggagataaggtctaagtgcctaaaaaaatgtacatatacctggttgaaatacaacactatacatacacaccaccatatatactagctgttaatcctatggaatggggtattgggagtgcttttttaatttttcatagtttttttttaataaaatggcatattttgcatctacaacttctataatttgaaaaaataaataaacattatcttttttgtgaaa

SEQ ID NO: 6177 - DNA, 3900 bp, Homo sapiens
atgttcaacaagaacaacagcaacaaactcagaagcactcctcgctaccgccggggagacccaggatacctaaactttactgagttggggccactcaagcctgaacagaaggatcagtggagccaacatagaccagatgaagaagctgtggtggatcagggtgggaccagtacaattctcaacattcactatgaaaaagaagagctggaaggtcacagaactctgtatgtgggagttcggatgccgcttggccggcagagccatcggcatcaccgcactcatggccagaagcaccggagacgagggcggggcaaaggagccagccagggggaggaaggcctggaagccctggcccacgacacaccatctcagcgtgttcagttcattcttggcaccgaggaagatgaagagcatgtgcctcatgagctgtttacagagctggatgagatctgtatgaaagagggagaagatgctgagtggaaggaaacagccaggtggctgaagtttgaagaagatgttgaagatgggggagaacgctggagcaagccttatgtggcaaccctttcattgcacagcctgtttgagctaaggagctgccttattaatggaacagtcctcctggatatgcatgcaaatagcatagaagaaatttcagacctgatcctggatcagcaagaactgtccagtgacctgaatgacagcatgagggttaaagtgcgggaagcccttctcaaaaagcatcatcatcagaatgaaaagaagagaaacaacctcattcccattgttcgctcctttgctgaggttggcaagaagcagtctgatcctcatttgatggataaacatggtcaaaccgtgtctcctcagtctgttccaactacaaatcttgaagtaaaaaatggagtgaattgtgaacatagtcctgtggatttaagcaaggtagaccttcatttcatgaaaaaaattcctactggggccgaggcctccaatgtcctggttggagaggtggatattttggaccgtcccattgttgcctttgtgaggctgtctccagctgttcttctctcaggcctaacagaagtgccaatcccaacaagatttttgtttatcttattgggtccagtagggaaaggtcagcagtaccatgagattggcagatccatggccaccatcatgacagatgagatttttcatgacgtagcatataaggcaaaagagcgagatgatctcctggcggggattgatgagttcctagaccaggtgacggtgctccctccaggagagtgggatccctccattagaattgagccacccaaaaatgtcccttcccaggagaaaaggaaaatgcctggagttccaaatggaaatgtttgccacatagaacaggaaccacatgggggtcacagtgggccagaacttcagcgcactgggcggctatttgggggcttggtgctggacatcaagcggaaggccccctggtactggagcgactaccgagatgcactcagcttacagtgtttggcttcctttctgttcctgtactgtgcctgcatgtcacctgtcatcacctttgggggactgcttggagaagccactgagggacgcataagtgcaattgaatccttgtttggagcttccatgactgggattgcttattccttgtttgcgggacaggctctcaccatcctgggaagtactggaccagtgcttgtgtttgaaaagattttgttcaaattctgcaaagactatgctctttcatacctctccctgcgagcttgtattggactgtggaccgctttcctgtgtattgtccttgtggcaactgatgccagttcccttgtctgctacattacccgtttcactgaagaagcatttgcctccctaatttgcattattttcatctatgaagcaatagaaaaactgattcacctggcagagacctaccccatccacatgcacagccagctggaccaccttagcctctattactgcaggtgtactctgccagagaatccaaacaatcacaccctccagtactggaaggaccacaacatcgtgacagcagaagtccactgggctaacctgactgtcagtgaatgccaggagatgcatggagagttcatgggatctgcgtgcggccatcatggaccctacactcctgatgtcctcttttggtcctgtattctctttttcaccaccttcatcctctcaagcaccttaaagacgtttaagacgagccgttatttcccaaccagagtacgctccatggtgagtgactttgctgttttcctcactatcttcacaatggtgattattgattttttgattggagtcccatcaccaaagcttcaagttcccagtgtgttcaagccaacaagggatgatcgcggatggattattaatcccattggccccaatccctggtggactgtgatagctgcaattatcccagctcttctctgtactatcttgatattcatggatcagcagatcacagccgtcattattaacaggaaggaacataagctcaagaaaggctgtggctaccacctggacctactgatggtggccatcatgctgggtgtctgctccatcatgggcctgccctggtttgtagctgcaactgtcttgtccatcacacatgtgaacagcctcaagctagaatctgaatgctctgctcctggagaacagcccaagttcctgggcatccgagaacagagagtgacaggccttatgatctttgtgctgatgggctgctcagtcttcatgacggctatcttaaagtttattccaatgccagtactctacggagttttcctttacatgggagtttcttcactacagggaattcagttctttgatcgtctaaagctctttgggatgcccgcaaagcaccagccagatttcatctacctgcggcatgtgccgctgcgcaaagtgcacctcttcaccctcatccagttgacctgtctcgtcctgctctgggtcatcaaggcatctccagctgccattgttttcccaatgatggttttggccttggtctttgtcaggaaagtcatggatctctgtttctctaagcgagagctgagctggctagatgatctcatgcctgaaagcaaaaagaagaagttggatgatgccaaaaagaaggccaaggaggaagaggtcatagtccttgcaccaactgtatacctgggggcctcaaattacagaacataggaagggtcatgtgaaaagtcagcatgtctggaatcccgagggttatatttaggagctgggaagattacccccaaagatgttctcagctaagaatggattagggattcttgcttctgtctgttcttaatttttgggtttgacaaccacttattttttcctttgtttacaatctactcaccaggctcatacctacaatgtgaacatacagtatgcccttattagcagattcaatggctcacattctttcaaaaggtctaatttgacaaatacataagacccattatttcctagaatgtttgtaatatatctaattgcaaatggtgctgtggttggcaccatgcaaagataacttgcataggactttctgtcttttttcatttccctcagcacttggcatcttgtcatctacacaatggaccctcaataaatggcctatatgtgcaaagaaagaatgtgtagcaaatgaaaataccagaccaagaaatgagtgagctgggaagtgtttccaaatacagttagtgcctaaaatagtgtcctttgaaaaaacttttaaaagacttttttttaggccaggcataatgggttatccctgtaattccagggcttttgggagttgaagctggaggattacttgaggccagaagtttgagactagcctaggcaatataatgagaccctgtctct

SEQ ID NO: 6178 - DNA, 2817 bp, Homo sapiens
atgacactcctggggtctgagcattccttgctgattaggagcaagttcagatcagttttacagttaagacttcaacaaagaaggacccaggaacaactggctaaccaaggcataataccaccactgaaacgtccagctgaattccatgagcaaagaaaacatttggatagtgacaaggctaaaaattccctgaagcgcaaagccagaaacaggtgcaacagtgccgacttggttaatatgcacatactccaagcttccactgcagagaggtccattccaactgctcagatgaagctgaaaagagcccgactcgccgatgatctcaatgaaaaaattgctctacgaccagggccactggagctggtggaaaaaaacattcttcctgtggattctgctgtgaaagaggccataaaaggtaaccaggtgagtttctccaaatccacggatgcttttgcctttgaagaggacagcagcagcgatgggctttctccggatcagactcgaagtgaagacccccaaaactcagcgggatccccgccagacgctaaagcctcagataccccttcgacaggttctctggggacaaaccaggatcttgcttctggctcagaaaatgacagaaatgactcagcctcacagcccagccaccagtcagatgcggggaagcaggggcttggcccccccagcacccccatagccgtgcatgctgctgtaaagtccaaatccttgggtgacagtaagaaccgccacaaaaagcccaaggaccccaagccaaaggtgaagaagcttaaatatcaccagtacattcccccagaccagaaggcagagaagtcccctccacctatggactcagcctacgctcggctgctccagcaacagcagctgttcctgcagctccaaatcctcagccagcagcagcagcagcagcaacaccgattcagctacctagggatgcaccaagctcagcttaaggaaccaaatgaacagatggtcagaaatccaaactcttcttcaacgccactgagcaatacccccttgtctcctgtcaaaaacagtttttctggacaaactggtgtctcttctttcaaaccaggcccactcccacctaacctggatgatctgaaggtctctgaattaagacaacagcttcgaattcggggcttgcctgtgtcaggcaccaaaacggctctcatggaccggcttcgacccttccaggactgctctggcaacccagtgccgaactttggggatataacgactgtcacttttcctgtcacacccaacacgctgcccaattaccagtcttcctcttctaccagtgccctgtccaacggcttctaccactttggcagcaccagctccagccccccgatctccccagcctcctctgacctgtcagtcgctgggtccctgccggacaccttcaatgatgcctccccctccttcggcctgcacccgtccccagtccacgtgtgcacggaggaaagtctcatgagcagcctgaatgggggctctgttccttctgagctggatgggctggactccgagaaggacaagatgctggtggagaagcagaaggtgatcaatgaactcacctggaaactccagcaagagcagaggcaggtggaggagctgaggatgcagcttcagaagcagaaaaggaataactgttcagagaagaagccgctgcctttcctggctgcctccatcaagcaggaagaggctgtctccagctgtccttttgcatcccaagtacctgtgaaaagacaaagcagcagctcagagtgtcacccaccggcttgtgaagctgctcaactccagcctcttggaaatgctcattgtgtggagtcctcagatcaaaccaatgtactttcttccacatttctcagcccccagtgttcccctcagcattcaccgctgggggctgtgaaaagcccacagcacatcagtttgcccccatcacccaacaaccctcactttctgccctcatcctccggggcccagggagaagggcacagggtctcctcgcccatcagcagccaggtgtgcactgcacagatggctggtttacactcttctgataaggtggggccaaagttttcaattccatccccaactttttctaagtcaagttcagcaatttcagaggtaacacagcctccatcctatgaagatgccgtaaagcagcaaatgacccggagtcagcagatggatgaactcctggacgtgcttattgaaagcggagaaatgccagcagacgctagagaggatcactcatgtcttcaaaaagtcccaaagatacccagatcttcccgaagtccaactgctgtcctcaccaagccctcggcttcctttgaacaagcctcttcaggcagccagatcccctttgatccctatgccaccgacagtgatgagcatcttgaagtcttattaaattcccagagccccctaggaaagatgagtgatgtcacccttctaaaaattgggagcgaagagcctcactttgatgggataatggatggattctctgggaaggctgcagaagacctcttcaatgcacatgagatcttgccaggccccctctctccaatgcagacacagttttcaccctcttctgtggacagcaatgggctgcagttaagcttcactgaatctccctgggaaaccatggagtggctggacctcactccgccaaattccacaccaggctttagcgccctcaccaccagcagccccagcatcttcaacatcgatttcctggatgtcactgatctcaatttgaattcttccatggaccttcacttgcagcagtggtag

SEQ ID NO: 6179 - DNA, 1787 bp, Homo sapiens
tctcttctcaatatcagcactggattgtagaacttgttgctgattttggcctggcattcaagttaactcttccccttggtatctgtacatacctttgatgtcagtgtttagtacacgtggcttggtcacttcatggctaaaaacgtgcttgtggaagacaagtctggcttggaatataaatagtttctggaaaggacactgacaacttcaaagcaaaatgaagctcttttggttgcttttcaccattgggttctgctgggctcagtattcctcaaatacacaacaaggacgaacatctattgttcatctgtttgaatggcgatgggttgatattgctcttgaatgtgagcgatatttagctcccaagggatttggaggggttcaggtctctccaccaaatgaaaatgttgccattcacaaccctttcagaccttggtgggaaagataccaaccagttagctataaattatgcacaagatctggaaatgaagatgaatttagaaacatggtgactagatgcaacaatgttggggttcgtatttatgtggatgctgtaattaatcatatgtgtggtaatgctgtgagtgcaggaacaagcagtacctgtggaagttacttcaaccctggaagtagggactttccagcagtcccatattctggatgggattttaatgatggtaaatgtaaaactggaagtggagatatcgagaactataatgatgctactcaggtcagagattgtcgtctgtctggtcttctcgatcttgcactggggaaggattatgtgcgttctaagattgccgaatatatgaaccatctcattgacattggtgttgcagggttcagaattgatgcttccaagcacatgtggcctggagacataaaggcaattttggacaaactgcataatctaaacagtaactggttcccggaaggtagtaaacctttcatttaccaggaggtaattgatctgggtggtgagccaattaaaagcagtgactactttggtaatggccgggtgacagaattcaagtatggtgcaaaactcggcacagttattcgcaagtggaatggagagaagatgtcttacttaaagaactggggagaaggttggggtttcatgccttctgacagagcgcttgtctttgtggataaccatgacaatcaacgaggacatggcgctggaggagcctctatacttaccttctgggatgctaggctgtacaaaatggcagttggatttatgcttgctcatccttatggatttacacgagtaatgtcaagctaccgttggccaagatattttgaaaatggaaaagatgttaatgattgggttgggccaccaaatgataatggagtaactaaagaagttactattaatccagacactacttgtggcaatgactgggtctgtgaacatcgatggcgccaaataaggaacatggttaatttccgcaatgtagtggatggccagccttttacaaactggtatgataatgggagcaaccaagtggcttttgggagaggaaacagaggattcattgttttcaacaatgatgactggacattttctttaactttgcaaactggtcttcctgctggcacatactgtgatgtcatttctggagataaaattaatggcaactgcacaggcattaaaatctacgtttctgatgatggcaaagctcatttttctattagtaactctgctgaagatccatttattgcaattcatgctgaatctaaattgtaaaatttaaaattaaatgcaaatccgcaaagcaata

SEQ ID NO: 6180 - DNA, 494 bp, Homo sapiens
atactgcctgctgtccagagggcacacttaggatcatgagccatcagctcctctggggccagctataggacaacagaactctcaccaaaggaccagacacagatgctcaggaattcagtgatgtggagagggccattgagaccctcatcaagaactttcaccagtactccgtggagggtgggaaggagacgctgaccccttctgagctacgggacctggtcacccagcagctgccccatctcatgccgagcaactgtggcctggaagagaaaattgccaacctgggcagctgcaatgactctaaactggagttcaggagtttctgggagctgattggagaagcggccaagagtgtgaagctggagaggcctgtccgggggcactgagaactccctctggaattcttggggggtgttggggagagactgtgggcctggagataaaacttgtctcctctaccaccaccctgtaccctagcctgcacctgtcctcat

SEQ ID NO: 6181 - DNA, 2181 bp, Homo sapiens
ggaaaataaagggttggagcctctgtgtttctttgttgaaaaatctgctactattattagatctgtgaaaacaattgaaaattcggttattatcaccttaaaagtacaaaacctatagattttgaaaatgtaattatttttctgtaggcatagttaaaaagattttgtaaatgttataaatcagtttctttataagcggtttatttagataaattttgttatactgacatgattcactaattttctaaatataaatggttcagctcttagttatttttaaactaatgacctgtgttatacttcctatttttaatgggcttttatgatgttttaggtttttttgaatcccgtgtccttcaagtgctttctaactttgagaggaagaaattgaccacctggactatggaactttggttgaatctggcgatgtggaacccatggatatggagggctgactatatacaccatgttttttcctggcacatcactcaactactattagctggcgagtcaactcacgttgttggaatgactagggacaactagacttcaagtgatctttcatcccaggaatataaatagtttctggaaaggacactgacaacttcaaagcaaaatgaagttctttctgttgcttttcaccattgggttctgctgggctcagtattccccaaatacacaacaaggacggacatctattgttcatctgtttgaatggcgatgggttgatattgctcttgaatgtgagcgatatttagctcccaagggatttggaggggttcaggtctctccaccaaatgaaaatgttgcaattcacaaccctttcagaccttggtgggaaagataccaaccagttagctataaattatgcacaagatctggaaatgaagatgaatttagaaacatggtgactagatgtaacaatgttggggttcgtatttatgtggatgctgtaattaatcatatgtctggtaatgctgtgagtgcaggaacaagcagtacctgtggaagttacttcaaccctggaagtagggactttccagcagtcccatattctggatgggattttaatgatggtaaatgtaaaactggaagtggagatatcgagaactacaatgatgctactcaggtcagagattgtcgtctggttggtcttcttgatcttgcactggagaaagattatgtgcgttccaagattgccgaatatatgaatcatctcattgacattggtgttgcagggttcagacttgatgcttccaagcacatgtggcctggagacataaaggcaattttggacaaactgcataatctaaacagtaactggttccctgcaggaagtaaacctttcatttaccaggaggtaattgatctgggtggtgagccaattaaaagcagtgactactttggaaatggccgggtgacagaattcaagtatggtgcaaaactcggcacagttattcgcaagtggaatggagagaagatgtcttacctaaagaactggggagaaggttggggtttcatgccttctgacagagcacttgtctttgtggataaccatgacaatcaacgaggacatggggctggaggagcctctattcttaccttctgggatgctaggctgtataaaatggcagttggatttatgcttgctcatccttatggttttacacgagtaatgtcaagctaccgttggccaagacagtttcaaaatggaaacgatgttaatgattgggttgggccaccaaataataatggagtaattaaagaagttactattaatccagacactacttgtggcaatgactgggtctgtgaacatcgatggcgccaaataaggaacatggttaatttccgcaatgtagtggatggccagccttttacaaactggtatgataatgggagcaaccaagtggcttttgggagaggaaacagaggattcattgttttcaacaatgatgactggacattttctttaactttgcaaactggtcttcctgctggcacatactgtgatgtcatttctggagataaaattaatggcaattgcacaggcattaaaatctacgtttctgacgatggcaaagctcatttttctattagtaactctgctgaggatccatttattgcaattcatgctgaatctaaattataaaatttaaaattaaatgcatatcctcaaaa

SEQ ID NO: 6182 - DNA, 2965 bp, Homo sapiens
tcgagcatctggttattcaagctcctcccacggttcgtattgtgcactcaggcttggcctgtaacattgaagaggagcgctactccgaaagggtctacactatccgggaaggagaaacccttgagttgacttgtctagtcacaggacatccacgtccacagatcaggtggaccaaaacagcaggaagtgcctctgacagattccaagactcaagtgtcttcaatgagactttgaggattacaaatattcagcgacaccaaggaggccggtattactgtaaagcagagaatggcttggggtctccagcgataaagtcaatcagagtggatgtatactatttggatgatccagtagtaactgttcatcaaagtataggtgaagctaaagaacaattttactatgagagaacagtgttcctccggtgtgttgccaattccaatcctcctgttcggtatagctggagacgtggccaggaggtcttgctgcaaggatctgataaaggagttgagatttatgaaccattctttacccagggtgaaacaaagatcttaaaactaaagaatcttcgacctcaggactatgctaattatagctgcattgcttcagtgaggaatgtatgtaatattcctgataagatggtgtcgtttagactgtccaataaaacagcatcaccgtcaattaaactcttggtggatgatcctatagttgtaaatcctggagaggccataacattagtatgtgttacaacaggaggagagcctgcaccttctctcacctgggtcaggtcctttgggactctgcctgaaaagactgttttgaatggaggaactttgaccatacctgccatcacctcagatgatgctggtacttacagctgcattgccaataataatgtgggaaaccctgcaaaaaagtccaccaacatcattgtgagagcattaaaaaaaggacgattttggatcacaccagatccttatcacaaagatgacaacatccagattggccgtgaggtgaaaatatcttgccaagtagaagctgttccttctgaggagctaacatttagttggtttaaaaatggtcgtccattaagaagttctgagcggatggtcattacacagactgatcctgatgtctctccgggaacaacaaacttggacatcattgatttaaaattcacggattttgggacgtacacatgtgtagcatctctgaagggaggaggaatatctgatatcagtatcgatgttaatatatccagcagcacagttccacccaatctgactgttccacaggaaaaatcaccattggtcaccagagaaggagacacaatagaactgcaatgtcaagtaactggcaaacctaaaccaatcatcctttggtctagagcggataaagaagttgcaatgcctgatggatcaatgcaaatggagagttatgatggaacactgaggattgtgaatgtatctagggaaatgtcaggaatgtacagatgtcagaccagccaatacaatggatttaacgtgaaaccaagggaagccttggtgcagctcatcgttcagtatccccctgcagtggaaccagcattcttggaaatccggcaaggacaggatcgaagtgtcactatgagttgcagagtactgagagcctatccaatacgggtgctgacctatgagtggcgcttgggcaataaattattacggacgggtcaatttgactctcaggaatacacagagtacgctgtgaagagtctttccaatgaaaactatggggtttataactgtagcatcataaatgaagctggagctgggagatgcagctttcttgttacaggaaaggcctatgctccagaattctattatgatacctacaatccagtatggcagaacagacaccgtgtttattcttacagtctacagtggacacagatgaatcctgatgcagtggatcggattgttgcataccggttgggcatcaggcaggctggacagcagcgctggtgggagcaggagattaaaataaatgggaatattcaaaagggagaattaattacatataacttgacagagctaattaaaccagaagcttatgaagtccgactgactcctctcaccaaatttggtgaaggagattcaacaattcgtgtgatcaaatatagtgctcctgtaaatcctcatttgagagaatttcattgtggatttgaagatggtaatatttgtttgttcactcaagatgatacagataattttgactggacaaagcaaagtacagcaacaagaaatacaaaatatactcctaatacaggacctaatgctgaccgtagtggctccaaagaaggtttttatatgtacattgagacatcacgacccagattggaaggcgaaaaggctcgacttctcagccctgttttcagcatagctcccaaaaacccttatggacccacaaacactgcatattgtttcagcttcttttatcacatgtatggacaacatataggtgtcttaaatgtttatctacgtttgaaagggcaaacaacaatagagaatccactgtggtcttcaagtgggaataaaggacaaagatggaatgaggctcatgttaatatatacccaattacttcatttcagctcatttttgaaggtatccgaggtcctggaatagaaggtgacattgctattgatgatgtatcaattgcagaaggagaatgtgcaaaacaagacctagcaactaagaattccgttgatggtgctgttgggattttggttcatatatggctttttcccattatcgtcctcatctctatcttaagtcctcgaaggtgaccttatcctggcagaggctataaaagattcaccaggcactggcatgaagaaagagtctttgtaaatggacattgaacaaacaaactaccaaagattcctccactgactactgactcaaaaataaaataataaaaacaaattttttt

SEQ ID NO: 6183 - DNA, 1830 bp, Homo sapiens
gttcttggtgcgccgggccgtggtgagtccgggctcccgtggccgcgtgctgggaggagactggagcccggttaggaagaatggagttggcgactcgctaccagatccctaaagaagtggctgacatctttaacgcccccagtgatgatgaagagtttgttggcttccgagatgatgttcccatggaaaccctctcgtcagaggagagctgcgatagttttgactcactagagtcagggaaacaggtcgtggagtcagatttgagtgatgatggcaaagcatctttggtgagcgaggaagaggaagatgaagaagaagataaggctacccctagaagaagcaggtctagaagaagtagtattggtcttcgagtagcctttcagttccccaccaagaagctggccaacaaaccagataaaaacagttcttccgagcagttgttttctagcgcacgcttacagaatgagaaaaaaacaattcttgaaagaaagaaagactgtagacaggtgatacaaagggaagattctacctctgagtctgaggatgactctcgggatgagagccaggagagttcagatgctttgctgaaaaggaccatgaacatcaaggagaacaaagccatgcttgcccagttattggcggaattgaactcgatgccagatttcttcccagtacgaaccccaacctcagcttctaggaagaagacagtgaggcgggccttctcggagggacagatcacgcggcgtatgaacccaacccggagtgcgcggcctcctgagaagtttgctctagagaacttcactgtctcagccgctaaatttgcggaagagttttacagcttccgaagaaggaagacaattggggggaaatgccgggagtacagacgacgtcaccgtatatcttcttttcggccagtggaggatatcaccgaagaggacttagaaaatgttgccataactgttcgagataaaatctatgataaagttctgggtaacacgtgccatcagtgtcgacaaaagaccatcgacaccaagacagtgtgtcggaaccagggttgctgtggtgtgcgaggacagttctgtggaccatgcctgcggaaccgctatggggaggatgtcagatcggcattgctggacccggattgggtgtgtcccccctgtcgtgggatctgcaattgcagctactgtcggaagcgtgacggccgctgtgccacaggaatcctcattcatctggccaagttttatggttatgacaatgttaaggaatatctggagagcttacaaaaggagctggtagaagacaattaagaggaaaacaaacagaaccagccacctcaccatagagtactccaacaagacatgcataccattggtgcctaagaaagatttttttacagttgtgtttttatacagaaattctttgtagaaattactattttttgttaaagattgtttatatgcttacaaagatttctcaggaagacagcagagcagaggaatctatatagatgtatgcacagacctgtctgtatgctgaactttgttaaaaatatctgccagttattaaaaagcacagtttaaatggggtggggttaaagttcaggtaagtaagttagagagaaaacattgtatgatcagctcctgcacttgatctatctatctttggcttcccaaacagtaactcactccaggccaagtgtgccttagcacgagtgaccacagtttaatagaccacacacatcgtttaacctgctcttggtcattggaaatttacactgaacaaagtgcaattaactgtagaacagttttatttttattaaaacttgactga

SEQ ID NO: 6184 - DNA, 9149 bp, Homo sapiens
ctggtggtccagtacctccaaagatatggaatacactcctgaaatatcctgaaaacttttttttttcagaatcctttaataagcagttatgtcaatctgaaagttgcttacttgtactttatattaatagctattcttgtttttcttatccaaagaaaaatcctctaatccccttttcacatgatagttgttaccatgtttaggcattagtcacatcaacccctctcctctcccaaacttctcttcttcaaatcaaactttattagtccctcctttataatgattccttgcctcgttttatccagatcaattttttttcactttgatgcccagagctgaagaaatggactactgtataaattattcattgccaagagaataattgcattttaaacccatattataacaaagaataatgattatattttgtgatttgtaacaaataccctttattttcccttaactattgaattaaatattttaattatttgtattctctttaactatcttggtatattaaagtattatcttttatatatttatcaatggtggacacttttataggtactctgtgtcatttttgatactgtaggtatcttatttcatttatctttattcttaatgtacgaattcataatatttgattcagaacaaatttatcactaattaacagagtgtcaattatgctaacatctcatttactgattttaatttaaaacagtttttgttaacatgcatgtttagggttggcttcttaataatttcttcttcctcttctctctctcctcttcttttggtcagtgttgtgcgggttaatacaacaaactgtaacaagtgtacctggtatggacttgttgtccgggacgtacattttcgcggtcctgctagcatgcgtggtgttccactctggcgcccaggagaaaaactacaccatccgagaagaaatgccagaaaacgtcctgataggcgacttgttgaaagaccttaacttgtcgctgattccaaacaagtccttgacaactgctatgcagttcaagctagtgtacaagaccggagatgtgccactgattcgaattgaagaggatactggtgagatcttcactactggcgctcgcattgatcgtgagaaattatgtgctggtatcccaagggatgagcattgcttttatgaagtggaggttgccattttgccggatgaaatatttagactggttaagatacgttttctgatagaagatataaatgataatgcaccattgttcccagcaacagttatcaacatatcaattccagagaactcggctataaactctaaatatactctcccagcggctgttgatcctgacgtaggaataaacggagttcaaaactacgaactaattaagagtcaaaacatttttggcctcgatgtcattgaaacaccagaaggagacaagatgccacaactgattgttcaaaaggagttagatagggaagagaaggatacctacgtgatgaaagtaaaggttgaagatggtggctttcctcaaagatccagtactgctattttgcaagtgagtgttactgatacaaatgacaaccacccagtctttaaggagacagagattgaagtcagtataccagaaaatgctcctgtaggcacttcagtgacacagctccatgccacagatgctgacataggtgaaaatgccaagatccacttctctttcagcaatctagtctccaacattgccaggagattatttcacctcaatgccaccactggacttatcacaatcaaagaaccactggatagggaagaaacaccaaaccacaagttactggttttggcaagtgatggtggattgatgccagcaagagcaatggtgctggtaaatgttacagatgtcaatgataatgtcccatccattgacataagatacatcgtcaatcctgtcaatgacacagttgttctttcagaaaatattccactcaacaccaaaattgctctcataactgtgacggataaggatgcggaccataatggcagggtgacatgcttcacagatcatgaaatccctttcagattaaggccagtattcagtaatcagttcctcctggagactgcagcatatcttgactatgagtccacaaaagaatatgccattaaattactggctgcagatgctggcaaacctcctttgaatcagtcagcaatgctcttcatcaaagtgaaagatgaaaatgacaatgctccagttttcacccagtctttcgtaactgtttctattcctgagaataactctcctggcatccagttgacgaaagtaagtgcaatggatgcagacagtgggcctaatgctaagatcaattacctgctaggccctgatgctccacctgaattcagcctggattgtcgtacaggcatgctgactgtagtgaagaaactagatagagaaaaagaggataaatatttattcacaattctggcaaaagataacggggtaccacccttaaccagcaatgtcacagtctttgtaagcattattgatcagaatgacaatagcccagttttcactcacaatgaatacaacttctatgtcccagaaaaccttccaaggcatggtacagtaggactaatcactgtaactgatcctgattatggagacaattctgcagttacgctctccattttagatgagaatgatgacttcaccattgattcacaaactggtgtcatccgaccaaatatttcatttgatagagaaaaacaagaatcttacactttctatgtaaaggctgaggatggtggtagagtatcacgttcttcaagtgccaaagtaaccataaatgtggttgatgtcaatgacaacaaaccagttttcattgtccctccttccaactgttcttatgaattggttctaccgtccactaatccaggcacagtggtctttcaggtaattgctgttgacaatgacactggcatgaatgcagaggttcgttacagcattgtaggaggaaacacaagagatctgtttgcaatcgaccaagaaacaggcaacataacattgatggagaaatgtgatgttacagaccttggtttacacagagtgttggtcaaagctaatgacttaggacagcctgattctctcttcagtgttgtaattgtcaatctgttcgtgaatgagtcggtgaccaatgctacactgattaatgaactggtgcgcaaaagcactgaagcaccagtgaccccaaatactgagatagctgatgtatcctcaccaactagtgactatgtcaagatcctggttgcagctgttgctggcaccataactgtcgttgtagttattttcatcactgctgtagtaagatgtcgccaggcaccacaccttaaggctgctcagaaaaacaagcagaattctgaatgggctaccccaaacccagaaaacaggcagatgataatgatgaagaaaaagaaaaagaagaagaagcattcccctaagaacttgctgcttaattttgtcactattgaagaaactaaggcagatgatgttgacagtgatggaaacagagtcacactagaccttcctattgatctagaagagcaaacaatgggaaagtacaattgggtaactacacctactactttcaagcccgacagccctgatttggcccgacactacaaatctgcctctccacagcctgccttccaaattcagcctgaaactcccctgaattcgaagcaccacatcatccaagaactgcctctcgataacacctttgtggcctgtgactctatctccaagtgttcctcaagcagttcagatccctacagcgtttctgactgtggctatccagtgacgaccttcgaggtacctgtgtccgtacacaccagaccgccaatgaaggaggttgtgcgatcttgcacccccatgaaagagtctacaactatggagatctggattcatccccaaccacagtcccagcggcgtgtcacatttcacctgccagaaggctctcaggaaagcagcagtgatggtggactgggagaccatgatgcaggcagccttaccagcacatctcatggcctgccccttggctatcctcaggaggagtactttgatcgtgctacacccagcaatcgcactgaaggggatggcaactccgatcctgaatctactttcatacctggactaaagaaagctgcagaaataactgttcaaccaactgtggaagaggcctctgacaactgcactcaagaatgtctcatctatggccattctgatgcctgctggatgccggcatctctggatcattccagctcttcgcaagcacaggcctctgctctatgccacagcccaccactgtcacaggcctctactcagcaccacagcccacgagtgacacagaccattgctctctgccacagccctccagtgacacagaccatcgcattgtgccacagcccaccaccgatacaggtgtctgctctccaccacagtcctcctctagtgcaggctactgcacttcaccacagcccaccatcagcacaggcctcagccctctgctacagccctcctttagcacaggctgctgcaatcagccacagctctcctctgccacaggttattgccctccatcgtagtcaggcccaatcatcagtcagtttgcagcaaggttgggtgcaaggtgctgatgggctatgctctgttgatcagggagtgcaaggtagtgcaacatctcagttttacaccatgtctgaaagacttcatcccagtgatgattcaattaaagtcattcctttgacaaccttcactccacgccaacaggccagaccgtccagaggtgattcccccattatggaagaacatcccttgtaaagctaaaatagttacttcaaattttcagaaaagatgtatatagtcaaaatttaagatacaattccaatgagtattctgattatcagatttgtaaataactatgtaaatagaaacagataccagaataaatctacagctagacccttagtcaatagttaaccaaaaaattgcaatttgtttaattcagaatgtgtatttaaaaagaaaaggaatttaacaatttgcatccccttgtacagtaaggcttatcatgacagagcgcactatttctgatgtacagtattttttgttgtttttatcatcatgtgcaatattactgatttgtttccatgctgattgtgtggaaccagtatgtagcaaatggaaagcctagaaatatcttattttctaagtttacctttagtttacctaaacttttgttcagataacgttaaaaggtatacgtactctagcctttttttgggctttctttttgatttttgtttgttgttttcagtttttttgttgttgttagtgagtctcccttcaaaatacgcagtaggtagtgtaaatactgcttgtttgtgtctctctgctgtcatgttttctaccttattccaatactatattgttgataaaatttgtatatacattttcaataaagaatatgtataaactgtacagatctagatctacaacctatttctctactctttagtagagttcgagacacagaagtgcaataactgccctaattaagcaactatttgttaaaaagggcctctttttactttaatagtttagtgtaaagtacatcagaaataaagctgtatctgccattttaagcctgtagtccattattacttgggtctttacttctgggaatttgtatgtaacagcctagaaaattaaaaggaggtggatgcatccaaagcacgagtcacttaaaatatcgacggtaaactactattttgtagagaaactcaggaagatttaaatgttgatttgacagctcaataggctgttaccaaagggtgttcagtaaaaataacaaatacatgtaactgtagataaaaccatatactaaatctataagactaagggatttttgttattctagctcaacttactgaagaaaaccactaataacaacaagaatatcaggaaggaacttttcaagaaatgtaattataaatctacatcaaacagaattttaaggaaaaatgcagagggagaaataaggcacatgactgcttcttgcagtcaacaagaaataccaataacacacacagaacaaaaaccatcaaaatctcatatatgaaataaaatatattcttctaagcaaagaaacagtactattcatagaaaacattagttttcttctgttgtctgttatttccttcttgtatcctcttaactggccattatcttgtatgtgcacattttataaatgtacagaaacatcaccaacttaattttcttccatagcaaaactgagaaaataccttgtttcagtataacactaaaccaagagacaattgatgtttaatgggggcggttggggtgggggggggagtcaatatctcctattgattaacttagacatagattttgtaatgtataacttgatatttaatttatgattaaactgtgtgtaaattttgtaacataaactgtggtaattgcataatttcattggtgaggatttccactgaatattgagaaagtttcttttcatgtgcccagcaggttaagtagcgttttcagaatatacattattcccatccattgtaaagttccttaagtcatatttgactgggcgtgcagaataacttcttaacttttaactatcagagtttgattaataaaattaattaatgttttttctccttcgtgttgttaatgttccaagggatttggagcatactggttttccaggtgcatgtgaatcccgaaggactgatgatatttgaatgtttattaaattattatcatacaaatgtgttgatattgtggctattgttgatgttgaaaattttaaacttggggaagattaagaaaagaaccaatagtgacaaaaatcagtgcttccagtagattttagaacattctttgcctcaaaaaacctgcaaagatgatgtgagattttttcttgtgttttaattattttcacattttctctctgcaaaactttagttttctgatgatctacacacacacacacacacacacgtgcacacacacacacatttaaatgatataaaaagaagaggttgaaagattattaaataacttatcaggcatctcaatggttactatctatgttagtgaaaatcaaataggactcaaagttggatatttgggatttttcttctgacagtataatttattgagttactagggaggttcttaaatcctcatatctggaaacttgtgacgttttgacacctttcctatagatgatataggaatgaaccaatacgcttttattaccctttctaactctgattttataatcagacttagattgtgtttagaatattaaatgactgggcaccctcttcttggtttttaccagagaggctttgaatggaagcaggctgagagtagccaaagaggcaaggggtattagcccagttattctcccctatgccttccttctctttctaagcgtccactaggtctggccttggaaacctgttacttctagggcttcagatctgatgatatctttttcatcacattacaagttatttctctgactgaatagacagtggtataggttgacacagcacacaagtggctattgtgatgtatgatgtatgtagtcctacaactgcaaaacgtcttactgaaccaacaatcaaaaaatggttctgttttaaaaaggattttgtttgatttgaaattaaaacttcaagctgaatgacttatatgagaataatacgttcaatcaaagtagttattctattttgtgtccatattccattagattgtgattattaattttctagctatggtattactatatcacacttgtgagtatgtattcaaatactaagtatcttatatgctacgtgcatacacattcttttcttaaactttacctgtgttttaactaatattgtgtcagtgtattaaaaattagcttttacatatgatatctacaatgtaataaatttagagagtaattttgtgtattcttatttacttaacattttacttttaattatgtaaatttggttagaaaataataataaatggttagtgctattgtgtaatggtagcagttacaaagagcctctgccttcccaaactaatatttatcacacatggtcattaaatgggaaaaaaatagactaaacaaatcacaaattgttcagttcttaaaatgtaattatgtcacacacacaaaaaatccttttcaatcctgagaaaattaaaggcgttttactcacatggctatttcaacattagttttttttgtttgtttctttttcatggtattactgaaggtgtgtatactccctaatacacatttatgaaaatctacttgtttaggcttttatttatactcttctgatttatattttttattataattattatttcttatctttcttcttttatattttttggaaaccaaatttatagttagtttaggtaaactttttattatgaccattagaaactattttgaatgcttccaactggctcaattggccgggaaaacatgggagcaagagaagctgaaatatatttctgcaagaacctttctatattatgtgccaattaccacaccagatcaattttatgcagaggccttaaaatattctttcacagtagctttcttacactaaccgtcatgtgcttttagtaaatatgatttttaaaagcagttcaagttgacaacagcagaaacagtaacaaaaaaatctgctcagaaaaatgtatgtgcacaaataaaaaaaattaatggcaattgtttagtgattgtaagtgatactttttaaagagtaaactgtgtgaaatttatactatccctgcttaaaatattaagatttttatgaaatatgtatttatgtttgtattgtgggaagattcctcctctgtgatatcatacagcatctgaaagtgaacagtatcccaaagcagttccaaccatgctttggaagtaagaaggttgactattgtatggccaaggatggcagtatgtaatccagaagcaaacttgtattaattgttctatttcaggttctgtattgcatgttttcttattaatatatattaataaaagttatgagaaataaa

SEQ ID NO: 6185 - DNA, 2231 bp, Homo sapiens
acttaatgggctcaaggtcacctacctgacctaccagcagctcaatggccttcccaaagaagaaacttcagggtcttgtggctgcaaccatcacgccaatgactgagaatggagaaatcaacttttcagtaattggtcagtatgtggattatcttgtgaaagaacagggagtgaagaacatttttgtgaatggcacaacaggagaaggcctgtccctgagcgtctcagagcgtcgccaggttgcagaggagtgggtgacaaaagggaaggacaagctggatcaggtgataattcacgtaggagcactgagcttgaaggagtcacaggaactggcccaacatgcagcagaaataggagctgatggcatcgctgtcattgcaccgttcttcctcaagccatggaccaaagatatcctgattaatttcctaaaggaagtggctgctgccgcccctgccctgccattttattactatcacattcctgccttgacaggggtaaagattcgtgctgaggagttgttggatgggattctggataagatccccaccttccaagggctgaaattcagtgatacagatctcttagacttcgggcaatgtgttgatcagaatcgccagcaacagtttgctttcctttttggggtggatgagcaactgttgagtgctctggtgatgggagcaactggagcagtgggcagtacctataactacctgggaaaaaagacaaaccagatgttggaggcttttgaacaaaaggacttctctttagccctgaactatcagttttgtatccagagatttatcaactttgttgtcaaactaggttttggagtgtcacagaccaaagccatcatgactctggtctctgggattccaatgggcccaccccggcttccactgcagaaagcctccagggagtttactgatagtgctgaagctaaactgaagagcctggatttcctttctttcactgatttaaaggatggaaacttggaagctggtagctagtgcctctctatcaaatcagggtttgcaccttgagacataatctaccttaaatagtgcatttttttctcagggaattttagatgaacttgaataaactctcctagcaaatgaaatctcacaataagcattgaggtaccttttgtgagccttaaaaagtcttattttgtgaaggggcaaaaactctaggagtcacaactctcagtcattcatttcacagatttttttgtggagaaatttctgtttatatggatgaaatggaatcaagaggaaaattgtaattgattaattccatctgtctttaggagctctcattatctcggtctctggttcctaatcctattttaaagttgtctaattttaaaccactataatatgtcttcattttaataaatattcatttggaatctaggaaaactctgagctactgcatttaggcaggcactttaataccaaactgtaacatgtctcaactgtatacaactcaaaatacaccagctcatttggctgctcagtctaactctagaatggatgcttttgaattcatttcgatgtcaccacttttcgctctttaaaaacactgggtcaggtgaggacttgtttcagttcctataactaagtaaagggcggctttctcataacaaaggaaaaagtcttccccaaagatgaatttaagtctccacttttttctatacagaaaactcaaaactcaaagtttcaaagaaccaaaggactcttcctctgggcaccacaaacttccccttcctccactgagaagactgtctctcccgcaggaccctgaattattgaaatcgaaggctgacttcctttctgcagtgagcccaggggctaatgttattatcctgtcacacttgcaactagtgacttttgtttagtgatagaagatttggggaggacccaaaggactcagaactttctctccatacctccttttactcttttctttctgtgtaatgtatcaacaactgtttaatctcccttctaacaaaccttgatataagctttctgatatcaaagtatattgacagttaacccttactgattttaaacttgactatccagtctgttaattacctaagattttgttttcatttcatctctaattgttttgatcattggcagagaaagagtatttgaaattcatatcagttttgctccttattttaatctctttgaattaaaaataaaactttttcaaaatggaaa

SEQ ID NO: 6186 - DNA, 3059 bp, Homo sapiens
gcgcggccggcccgaggggcggtccctgggctcccgctcgccgccgctgccgctcctcgttctgctcctcactccccagcggctggaggccggtaccggcgggcaggaggcgcccgaggatgtgctgctggccgctgctcctgctgtgggggctgctccccgggacggcggcggggggctcgggccgaacctatccgcaccggaccctcctggactcggagggcaagtactggctgggctggagccagcggggcagccagatcgccttccgcctccaggtgcgcactgcaggctacgtgggcttcggcttctcgcccaccggggccatggcgtccgccgacatcgtcgtgggcggggtggcccacgggcggccctacctccaggattattttacaaatgcaaatagagagttgaaaaaagatgctcagcaagattaccatctagaatatgccatggaaaatagcacacacacaataattgaatttaccagagagctgcatacatgtgacataaatgacaagagtataacggatagcactgtgagagtgatctgggcctaccaccatgaagatgcaggagaagctggtcccaagtaccatgactccaataggggcaccaagagtttgcggttattgaatcctgagaaaactagtgtgctatctacagccttaccatactttgatctggtaaatcaggacgtccccatcccaaacaaagatacaacatattggtgccaaatgtttaagattcctgtgttccaagaaaagcatcatgtaataaaggttgagccagtgatacagagaggccatgagagtctggtgcaccacatcctgctctatcagtgcagcaacaactttaacgacagcgttctggagtccggccacgagtgctatcaccccaacatgcccgatgcattcctcacctgtgaaactgtgatttttgcctgggctattggtggagagggcttttcttatccacctcatgttggattatcccttggcactccattagatccgcattatgtgctcctagaagtccattatgataatcccacttatgaggaaggcttaatagataattctggactgaggttattttacacaatggatataaggaaatatgatgctggggtgattgaggctggcctctgggtgagcctcttccataccatccctccagggatgcctgagttccagtctgagggtcactgcactttggagtgcctggaagaggctctggaagccgaaaagccaagtggaattcatgtgtttgctgttcttctccatgctcacctggctggcagaggcatcaggctgcgtcattttcgaaaagggaaggaaatgaaattacttgcctatgatgatgattttgacttcaatttccaggagtttcagtatctaaaggaagaacaaacaatcttaccaggagataacctaattactgagtgtcgctacaacacgaaagatagagctgagatgacttggggaggactaagcaccaggagtgaaatgtgtctctcataccttctttattacccaagaattaatcttactcgatgtgcaagtattccagacattatggaacaacttcagttcattggggttaaggagatctacagaccagtcacgacctggcctttcattatcaaaagtcccaagcaatataaaaacctttctttcatggatgctatgaataagtttaaatggactaaaaaggaaggtctctccttcaacaagctggtcctcagcctgccagtgaatgtgagatgttccaagacagacaatgctgagtggtcgattcaaggaatgacagcattacctccagatatagaaagaccctataaagcagaacctttggtgtgtggcacgtcttcttcctcttccctgcacagagatttctccatcaacttgcttgtttgccttctgctactcagctgcacgctgagcaccaagagcttgtgatcaaaattctgttggacttgacaatgttttctatgatctgaacctgtcatttgaagtacaggttaaagactgtgtccactttgggcatgaagagtgtggagacttttcttccccattttccctccctcctttttcctttccatgttacatgagagacatcaatcaggttctcttctctttcttagaaatatctgatgttatatatacatggtcaataaaataaaactggcctgacttaagataaccattttaaaaaattgggctgtcatgtgggaataaaagaattctttctttcctactacattctgttttatttaaatactcattgttgctatttcactttttgacttgacttttatatttctttaaaaaattccttccttttaaaaaatataaaagggactactgttcattccagttttcttcttctttgttgttcttctagtgtgacttttcaagtgtaacagccattcttcctgactttaatattgtccagttctggtcttttctgtgaattaccactgggccccttacctcaatgctttttgttgatgcccactctggttcccttgtttatctgagtctgttggtaccccaaatgaccccacacccatcttaaagtactttttttcaccttccctgtttagtactggccagatgagttttttctagagctctgtcactatctgaaaagaaagaggctatgggaaacatagaaatggtatgtattaataactgatcataggctgaggagaaaaaatgtagctggctgcaaacccagtgctgtgaggtgacttatatgaggttccagatcaaagacaggccgtgtgagccagtccaggagggtgtaagttctgaatggttccttgctgactttgggtgacacatgtaccacatactggctcagtttaagtcatggttctattgtagatttatttttatattagttaataaatgactttaaattgtcaccaattgaaaatcttgtcactcttttggttttctttatatagctcagccaaatcttgttttatgtcctgtcctcatctcttaagctaaatctgtttggatcatattaataaactaaatgaaattaca

SEQ ID NO: 6187 - DNA, 762 bp, Homo sapiens
atgtgcgacgaagacgagaccaccgccctcgtgtgcgacaatggctccggcctggtgaaagccggcttcgccggggatgacgcccctagggccgtgttcccgtccatcgtgggccgcccccgacaccagggcgtcatggtcggtatgggtcagaaagattcctacgtgggcgacgaggctcagagcaagagaggtatcctgaccctgaagtaccctatcgagcacggcatcatcaccaactgggatgacatggagaagatctggcaccacaccttctacaacgagcttcgcgtggctcccgaggagcaccccaccctgctcaccgaggcccccctcaatcccaaggccaaccgcgagaagatgacccagatcatgtttgagaccttcaacgtgcccgccatgtacgtggccatccaggccgtgctgtccctctacgcctccggcaggaccaccggcatcgtgctggactccggcgacggcatcatgaagtgtgacatcgacatcaggaaggacctgtatgccaacaacgtcatgtcggggggcaccacgatgtaccctgggatcgctgaccgcatgcagaaagagatcaccgcgctggcacccagcaccatgaagatcaagatcatcgccccgccggagcgcaaatactcggtgtggatcggcggctccatcctggcctcgctgtccaccttccagcagatgtggatcaccaagcaggagtacgacgaggccggcccttccatcgtccaccgcaaatgcttc

SEQ ID NO: 6188 - DNA, 1787 bp, Homo sapiens
gatttatctagaggctgggaagggctcctgaaccagttgtttccgtcttgtcggtctgtcagggttggaaagtccaagccataggacccagtttcctttcttagcttacgttatctaccagagcaccgtgggctgttacttgccttgagttggaagcggttcgcatttataccggaatataaatagtttctggaaaggacactgacaacttcaaagcaaaatgaagctcttttggttgcttttcaccattgggttctgctgggctcagtattcctcaaatacacaacaaggacgaacatctattgttcatctgtttgaatggcgatgggttgatattgctcttgaatgtgagcgatatttagctcccaagggatttggaggggttcaggtctctccaccaaatgaaaatgttgccattcacaaccctttcagaccttggtgggaaagataccaaccagttagctataaattatgcacaagatctggaaatgaagatgaatttagaaacatggtgactagatgcaacaatgttggggttcgtatttatgtggatgctgtaattaatcatatgtgtggtaatgctgtgagtgcaggaacaagcagtacctgtggaagttacttcaaccctggaagtagggactttccagcagtcccatattctggatgggattttaatgatggtaaatgtaaaactggaagtggagatatcgagaactataatgatgctactcaggtcagagattgtcgtctgtctggtcttctcgatcttgcactggggaaggattatgtgcgttctaagattgccgaatatatgaaccatctcattgacattggtgttgcagggttcagaattgatgcttccaagcacatgtggcctggagacataaaggcaattttggacaaactgcataatctaaacagtaactggttcccggaaggtagtaaacctttcatttaccaggaggtaattgatctgggtggtgagccaattaaaagcagtgactactttggtaatggccgggtgacagaattcaagtatggtgcaaaactcggcacagttattcgcaagtggaatggagagaagatgtcttacttaaagaactggggagaaggttggggtttcatgccttctgacagagcgcttgtctttgtggataaccatgacaatcaacgaggacatggcgctggaggagcctctatacttaccttctgggatgctaggctgtacaaaatggcagttggatttatgcttgctcatccttatggatttacacgagtaatgtcaagctaccgttggccaagatattttgaaaatggaaaagatgttaatgattgggttgggccaccaaatgataatggagtaactaaagaagttactattaatccagacactacttgtggcaatgactgggtctgtgaacatcgatggcgccaaataaggaacatggttaatttccgcaatgtagtggatggccagccttttacaaactggtatgataatgggagcaaccaagtggcttttgggagaggaaacagaggattcattgttttcaacaatgatgactggacattttctttaactttgcaaactggtcttcctgctggcacatactgtgatgtcatttctggagataaaattaatggcaactgcacaggcattaaaatctacgtttctgatgatggcaaagctcatttttctattagtaactctgctgaagatccatttattgcaattcatgctgaatctaaattgtaaaatttaaaattaaatgcaaatccgcaaagca

SEQ ID NO: 6189 - DNA, 4220 bp, Homo sapiens
ggtggtccagtacctccaaagatatggaatacactcctgaaatatcctgaaaccttttttttttcagaatcctttaataagcagttatgtcaatctgaaagttgcttacttgtactttatattaatagctattcttgtttttcttatccaaagaaaaatcctctaatccccttttcacatgatagttgttaccatgtttaggcgttagtcacatcaacccctctcctctcccaaacttctcttcttcaaatcaaactttattagtccctcctttataatgattccttgcctccttttatccagatcaattttttttcactttgatgcccagagctgaagaaatggactattgtataaattattcattgccaagagaataattgcattttaaacccatgttataacaaagaataatgattatattttgtgatttgtaacaaataccctttattttcccttaactattgaattaaatattttaattatttgtattctctttaactatcttggtatattaaagtattatcttttatatatttatcaatggtggacacttttataggtactctgtgtcatttttgatactgtaggtatcttatttcatttatctttattcttaatgtacgaattcataatatttgattcagaacagatttatcactaattaacagagtgtcaattatgctaacatctcatttactgattttaatttaaaacagtttttgttaacatgcatgtttagggttggcttcttaataatttcttcttcctcttctctctctcctcttcttttggtcagtgttgtgcgggttaatacaacaaactgtcacaagtgtttgttgtccgggacgtacattttcgcggtcctgctagtatgcgtggtgttccactctggcgcccaggagaaaaactacaccatccgagaagaaattccagaaaacgtcctgataggcaacttgttgaaagaccttaacttgtcgctgattccaaacaagtccttgacaactactatgcagttcaagctagtgtacaagaccggagatgtgccactgattcgaattgaagaggatactggtgagatcttcactaccggcgctcgcattgatcgtgagaaattatgtgctggtatcccaagggatgagcattgcttttatgaagtggaggttgccattttgccggatgaaatatttagactggttaagatacgttttctgatagaagatataaatgataatgcaccattgttcccagcaacagttatcaacatatcaattccagagaactcggctataaactctaaatatactctcccagcggctgttgatcctgacgtaggcataaacggagttcaaaactacgaactaattaagagtcaaaacatttttggcctcgatgtcattgaaacaccagaaggagacaagatgccacaactgattgttcaaaaggagttagatagggaagagaaggatacctatgtgatgaaagtaaaggttgaagatggtggctttcctcaaagatccagtactgctattttgcaagtaagtgttactgatacaaatgacaaccacccagtctttaaggagacagagattgaagtcagtataccagaaaatgctcctgtaggcacttcagtgacacagctccatgccacagatgctgacataggtgaaaatgccaagatccacttctctttcagcaatctagtctccaacattgccaggagattatttcacctcaatgccaccactggacttatcacaatcaaagaaccactggatagggaagaaacaccaaaccacaagttactggttttggcaagtgatggtggattgatgccagcaagagcaatggtgctggtaaatgttacagatgtcaatgataatgtcccatccattgacataagatacatcgtcaatcctgtcaatgacacagttgttctttcagaaaatattccactcaacaccaaaattgctctcataactgtgacggataaggatgcggaccataatggcagggtgacatgcttcacagatcatgaaattcctttcagattaaggccagtattcagtaatcagttcctcctggagaatgcagcatatcttgactatgagtccacaaaagaatatgccattaaattactggctgcagatgctggcaaacctcctttgaatcagtcagcaatgctcttcatcaaagtgaaagatgaaaatgacaatgctccagttttcacccagtctttcgtaactgtttctattcctgagaataactctcctggcatccagttgatgaaagtaagtgcaacggatgcagacagtgggcctaatgctgagatcaattacctgctaggccctgatgctccacctgaattcagcctggatcgtcgtacaggcatgctgactgtagtgaagaaactagatagagaaaaagaggataaatatttattcacaattctggcaaaagataatggggtaccacccttaaccagcaatgtcacagtctttgtaagcattattgatcagaatgacaatagcccagttttcactcacaatgaatacaaattctatgtcccagaaaaccttccaaggcatggtacagtaggactaatcactgtaactgatcctgattatggagacaattctgcagttacgctctccattttagatgagaatgatgacttcaccattgattcacaaactggtgtcatccgaccaaatatttcatttgatagagaaaaacaagaatcttacactttctatgtaaaggctgaggatggtggtagagtatcacgttcttcaagtgccaaagtaaccataaatgtggttgatgtcaatgacaacaaaccagttttcattgtccctccttacaactattcttatgaattggttctaccgtccactaatccaggcacagtggtctttcaggtaattgctgttgacaatgacactggcatgaatgcagaggttcgttacagcattgtaggaggaaacacaagagatctgtttgcaatcgaccaagaaacaggcaacataacattgatggagaaatgtgatgttacagaccttggtttacacagagtgttggtcaaagctaatgacttaggacagcctgattctctcttcagtgttgtaattgtcaatctgttcgtgaatgagtcagtgaccaatgctacactgattaatgaactggtgcgcaaaagcattgaagcaccagtgaccccaaatactgagatagctgatgtatcctcaccaactagtgactatgtcaagatcctggttgcagctgttgctggcaccataactgtcgttgtagttattttcatcactgctgtagtaagatgtcgccaggcaccacaccttaaggctgctcagaaaaacatgcagaattctgaatgggctaccccaaacccagaaaacaggcagatgataatgatgaagaaaaagaaaaagaagaagaagcattcccctaagaacctgctgcttaatgttgtcactattgaagaaactaaggcagatgatgttgacagtgatggaaacagagtcacactagaccttcctattgatctagaagagcaaacaatgggaaagtacaattgggtaactacacctactactttcaagcctgacagccctgatttggcccgacactacaaatctgcctctccacagcctgccttccaaattcagcctgaaactcccctgaatttgaagcaccacatcatccaagaactgcctctcgataacacctttgtggcctgtgactctatctccaattgttcctcaagcagttcagatccctacagcgtttctgactgtggctatccagtgacaaccttcgaggtacctgtgtccgtacacaccagaccgactgattccaggacatgaactattgaaatctgcagtgagatgtaactttctaggaacaacaaaattccattccccttccaaaaaatttcaatgattgtgatttcaaaattaggctaagatcattaattttgtaatctagatttcccattataaaagcaagcaaaaatcatcttaaaaatgatgtcctagtgaaccttgtgctttctttagctgtaatctggcaatggaaatttaaaatttatggaagagacagtgcagcgcaataacagagtactctcatgctgtttctctgtttgctctgaatcaacagccatgatgtaatataaggctgtcttggtgtatacacttatggttaat

SEQ ID NO: 6190 - DNA, 1346 bp, Homo sapiens
tggaactgcaggatacactcccctcctgctacctaggcaggcgtgagggtgtgacggccgcgcattcgccagacgagagcgatggctgagaacgccgcaccaggtctgatctcagagctgaagctggctgtgccctggggccacatcgcagccaaagcctggggctccctgcagggccctccagttctctgcctgcacggctggctggacaatgccagctccttcgacagactcatccctcttctcccgcaagacttttattacgttgccatggatttcggaggtcatgggctctcgtcccattacagcccaggtgtcccatattacctccagacttttgtgagtgagatccgaagagttgtggcagccttgaaatggaatcgattctccattctgggccacagcttcggtggcgtcgtgggcggaatgtttttctgtaccttccccgagatggtggataaacttatcttgctggacacgccgctctttctcctggaatcagatgaaatggagaacttgctgacctacaagcggagagccatagagcacgtgctgcaggtagaggcctcccaggagccctcgcacgtgttcagcctgaagcagctgctgcagaggcagagaacagcattgacttcgtcagcagggagctgtgtgcgcattccatcaggaagctgcaggcccatgtcctgttgatcaaagcagtccacggatattttgatccaagagagaattactctgacaaggagtccctgtcgttcatgatagacacaatgaaatccaccctcaaagaggactacttcggatacaatcacagcaaccctggcctcggccctgccctgtccctgccatgcaacttcacaactcagctggcctagacccctgggaggcctccaagtccctaagcggttccagtttgtggaagtcccaggcaatcactgtgtccacatgagcgaaccccagcacgtggccagtatcatcagctccttcttacagtgcacacacacgctcccagcccagctgtagctctgggcctggaactatgaagacctagtgctcccagactcaacactgggactctgagttcctgagccccacaacaaggccagggatggtggggacaggcctcactagtcttgaggcccagcctaggatggtagtcaggggaaggagcgagattccaacttcaacatctgtgacctcaagggggagacagagtctgggttccagggctgctgtctcctggctaataatctccagccagctggaggaaggaagggcgggctgggcccacctagcctttccctgctgcccaactggatggaaaataaaaggttcttgtattctca

SEQ ID NO: 6191 - DNA, 1645 bp, Homo sapiens
cgcctcgctcccggaccccacggctgcaaactgatctggcgcgcggggaggaggagagcgcaggcgagcgaacccgcgagagagggagagagcgagcgagcaacagcgagagcgagagcgagagagccgggaggcagagggagtagtgaccgccttccggagccgggattcatgcctgtcctcgggaccagcgaaggggactttacggctgagtatgagccaggctgctaggagccaggtacccccacgcctgcagtccccgcgccgtgcccggaatgcgagctgcacgcagggctctcccaagttcccaccgagccgaataaaaagcgtcctcccgcagctctccgccaaagacggacattgactccaggtaaggcggcgccgaatggagcaagaatgagaggaaaaaggccggcagaaaagcatgaactggaggtttgttgagctcctctacttcctgtttatatggggccgtatctcagtgcagccctcccaccaggaaccagctgggacagaccaacatgtctccaaggaatttgattggctcatttcagacagggggcctttccaccactccaggagctacctatcctttgtggaaagacaccgtcaaggatttacaaccagatataaaatatacagggagtttgcccgttggaaggtgaggaacacagccatcgagaggagagatctggtccgccatccagtgcccctcatgccggagtttcaaaggagcatccgcctgcttggcaggagacctaccactcagcagttcatcgataccatcatcaaaaagtacggcacccacctgctcatctcagccacattgggaggggaggaggctttgaccatgtatatggacaaaagtcgcctcgacaggaagtcagggaatgccactcaaagtgttgaagctctgcaccagctcgcatcatcctactttgttgaccgtgatggtaccatgaggaggcttcatgagatccagatatcaactggagcaatcaaggtcacagagacacgcactgggcctctgggctgtaacagctatgacaatctggactctgtgagttccgtccttctgcaaagcacggagagcaaactgcaccttcaaggtcttcagataatctttcctcagtatctgcaagagaagtttgtccagtcggccttgagctatatcatgtgcaatggggagggggagtacctgtgccagaacagccagtgtcgctgccaatgtgccgaggagtttccgcagtgcaactgccccatcacggacatccagatcatggagtacacgctggccaacatggccaagtcttgggccgaagcttataaggacctggagaattcaggtagagagtctcactcagtgccactgcatgagtggccttgagccaagtctgaaagggagctaatctaactggaattaggactgctgcaagggaaagttcagtgaccctgaccctttcactttggagtgtccagatgcaagtataatagctgtcacagagcaggcactcaataaatctcaactgaataaaattaatgaatagcataatccagtttgtggtcatatgatgtattgtttctgtcgtacccagaagacagaaagaataaatctgcataggaagcctctggagagggaagagtc

SEQ ID NO: 6192 - DNA, 2377 bp, Homo sapiens
aaaagacgcggccaaggcccgctcggtccacgcttcccgccggcccggcaaggggttccggagaacggcttgggggggcgagaaccatgggcgggggaaatggaagacagagggaactgaagcacgggggtcttcgatgagcagtgcggatgttcgactccaaacatcaaagccaacgagaggttcaggttactcctccttgaccccaaacatccagtgagtggagactggcctgttcacagagtaaaatatgtcgtctctaattcggcaaagacggtgatgactgtatatatgcaggccaattccgctctccaagagattctaactcagtcacagtttgaaccactactgaaccactgctgttaggaagctacaacccaaaagaaaagccccacagatgctgagagctggtgatcctcaggataaaacaaaggaaccagaaccacatccactgatcggatttgcctggggaggaggggtgctctctcctttgatcttctcttctggaagagatggaccaaaagcctctccagcaataatccgaaatgattcttgaagactatctttccagcttgtcacatatgcaaggtgtatttacaggagacagcaatggaaacctggtcagttgagcaggtctgcagttggttggtggagaaaaatttaggagagctagttcatagatttcaagaggaagaagtaagtggggccgctcttcttgcacttaatgatcggatggttcagcaactggtaaagaaaattgggcaccaggctgttctgatggatttaattaaaaaatacaagcagaacactcaaggactgaagtccccagaaaaccccaaaaaggcagccctggtcatgcaaacagaagcagctcgagattacagggatgaagagtcctccagtccagccaggcatggggagcagatgccatctttctatccagctgaaaaccttgataatggactaattgaccaaagagtattgaaacagagaagaaatgtgaaacaaattctagcaagaagcaaagcattacagtggacgaagtcctatgttttaccagagtttccctatgatgtcaaatgcatgttagcagagcagaagtgcccggatcacagcatgaggataaggatcattgagtttctccaggccgacatgactaagtatctggaaggctcactgtaccccagcacccagcagtacaatgacgtggttaatgccctgctgcaggcccaccctttcctggatgaggatggctgtggcttctttttatggaaacgagccctcaaagatcgctttaaatatgttcgaagacccatagaagatgatgagcaagtgattagaaataagtgtaaatttggacaccgaagaggccagacaaggaaatctcttgctgatataagatttgatgaaattaaacttgtccagataaaagaagaagctgtttgttttgattctgagctagatgaacatattaagtggttccagcaagaatacgtgaaaacagaaaaggactggagagaaattgacaagagaatgagccaaactttggaaataagaagaaagatgattggcagccgaacacctctgaaggacattcttaaactgtttcctttcttgaagtgcccttatcagatgttcagagaattccaacttcttacaagaacagatatttataagaaaacaaggcacattttggaatcctattcagaaaatatactgacttctttttcagtggtggacaatccaatcaatattgtattgcaagaaaaaatgaaacattacacagatgaagacatgttgaaatacatgaagatgacagccacatgtttactcctcccagatgtttttggggatgatcccagcctttttgtcatcatgaatgaacaggtgcaagtgtccacacctgtgttggaagttaaaaaccctttcaacatggaggtctgcgaattttctttatatttagaaagggagaggctcacaaaggtggacgactgtgttacagccttggctgcgctagtagctgcctttcatgtatttaggattgagtgtccaagaagactgtcccaaactttcaacttcctagaaacgctgattttcgatatgcacagtccttattttccttctttgaaagaaaaggaaaacgaagtaggatttcagcacccactcacttaatagcatgccaaatattgtactggaatttacctctgggaaaactgaagcttcataagaaattgttttgatttagggttgtggtagaggtaggtatgagaaaatcatcttgtatttatagatgctaatgaatttcaatgctttctatctttacacttagatattaagttctttgtgaaattctgtaataaaattctacttcattaaa

SEQ ID NO: 6193 - DNA, 1224 bp, Homo sapiens
gccgttcgaagagtcgtgagggggtgacgggttaagattcggagagagaggtgctagtggctggacttgacctggaaagaatcttctgctgactctcaacttttcctggaaaaaatggatcattcccaccatatggggatgagctatatggactccaacagtaccatgcaaccttctcaccatcacccaaccacttcagcctcacactcccatggtggaggagacagcagcatgatgatgatgcctatgaccttctactttggctttaagaatgtggaactactgttttccggtttggtgatcaatacagctggagaaatggctggagcttttgtggcagtgtttttactagcaatgttctatgaaggactcaagatagcccgagagagcctgctgcgtaagtcacaagtcagcattcgctacaattccatgcctgtcccaggaccaaatggaaccatccttatggagacacacaaaactgttgggcaacagatgctgagctttcctcacctcctgcaaacatgctgggattacaggcatgagccaccacacctgtccctctccccctcgtattactcagacttaaactaccccaaaaaggctaaagtcctgctaagagtctccgtagaactgatgattcaagaggctcttatgatcacagctggtgattccctgtgttgaattagtgaaaacaggccaggcacagtaatcccagcactttgagaggactgcttaatgtcaggagctcaagcccagcttgggcaacacagatgcctgtctctacataaaacaataaaaatttttaaaaaaaatttttttttaatgcccagaacaatagggcatgattcaaaattatcctccgagctgcctctctggttctttctgggaaaaacacttaggcaagttgagaaaggaaggaaagttggaataatggcaaaactgttagaagcattcctctttcctccattgcctgtcctcccaacattatacccaaactagttacaaagccattctgtaaagagatcgggtacctacaatttcttcagatttacacaatatccactagaatttaatttctacaagggcagggatctttgttgagtggcacatggtagacactcaataaatacttattgaatagatgggttaagtgaaagtggcagggatcaactagagtgtcctgtgcttagggtcttttaataaagatggaaagaatgatgttaa

SEQ ID NO: 6194 - DNA, 3025 bp, Homo sapiens
cagcgtgtgtcatgtcttggctgcgtttctggggcccatggcccctccttacgtggcaactattgtctttactagtcaaggaggctcagcctctggtgtgggtcaaggacccgctccagctgacctctaaccccctggggccacctgagccctggtcttcccgctcctcccatctcccatgggaatctccccatgcacctgctcccccagcagccccgggggactttgattacctggggccctctgcttcttcgcagatgtcagccctgcctcaggaaccaactgaaaatttggctccattcctgaaggaattggattcagctggagagctgcccctggggccagagccgttcttggctgcacatcaggacttaaatgacaagcggactccagaagaaaggctcccagaggtggttccgcttctcaaccgggatcagaaccaggccctagttcagcttcctcgcctcaagtgggttcaaactacagatctagatcgggctgcaggtcatcaggcagatgaaatacttgttccactagacagtaaggtttcaagaccaaccaaatttgttgtttcgcccaagaacctgaagaaagatctagctgaacgttggagccttcctgagattgttgggattccacaccaattatccaaacctcagcgtcagaaacagactttgccagatgattatttgagtatggacacactgtatcccggcagcctacctccagaactccgggtgaacgcagatgagcctccagggcctcctgagcaagttggactttctcaattccatctagagcccaaaagtcaaaatccagagacccttgaagacatccagtcctcttcactccaggaagaagccccagcgcagcttctacagctccctcaggaggtagaaccttcaacccagcaggaggccccagctctgcctccagagtcctctatggagagtctagctcaaactccactgaatcatgaagtgacagttcaacctccaggtgaggatcaagctcattataatttgcccaagtttacagtcaaacctgcagatgtggaggttaccatgacttcagagcctaaaaatgagacagaatctacccaagcccagcaggaggccccaattcagcctcccgaggaggcggaaccttcttctacagccctgaggactacagatcctcctccagaacaccctgaggtgacacttccaccttcagacaagggtcaggctcagcattcacacctgactgaagccacagttcaacctctggacctggagcttagcataactacagagcctactacagaggttaaaccgtctccaaccacggaggaaacctcagctcagcctccagacccggggcttgccataactccagaacccactacagagattggacattccacagccctggagaagactagagctcctcatccagaccaggttcagactctgcatcgaagcctgactgaagtcacaggtccacctacaaagttagaatcttcgcaggattcattggtgcagtctgaaactgcaccagaggaacagaaggcctccacaagcaccaacatatgtgagctctgcacctgcggagatgagactctgtcatgtgttggtctcagcccaaagcagaggctccgccaagtgcctgtgccagagcccgacacctacaatggcatcttcaccaccttaaatttccaaggaaactatatttcataccttgatggaaatgtatggaaagcatacagttggaccgagaaactaattctcagtgaaaattatttgactgaattacctaaggattcatttgaaggcctgctatacctccagtatttagatttatcctgcaataaaatacgatatattgaaagacaaacatttgaatcactaccatttttgcagtatataaatctgggctgcaatttaattacaaaactgagccttggaacatttcaggcctggcacggaatgcagtttttacacaacttaattctcaatcgcaatcctctgactactgtcgaagatccatatctctttgaactgccggcattaaaatatctagacatgggaacaacacacatcacacttacaacacttaagaacattctcacgatgactgttgaactggaaaaactgatcttacctagccatatggcctgctgcctctgccaatttaaaaatagcattgaggctgtctgcaagacagtcaagctgcattgcaacactgcatgtctgactaacagcatacattgtcctgaagaagcatctgtagggaatccagaaggagcgttcatgaagatgttacaagcccggaagcagcacatgagcactcagctgactattgagtcggaggcgccctcagacagcagtggcatcaacttgtcaggctttgggggtgatcagcttgaaattcagctaaccgagcagctacggtccctcatccccaacgaggatgtgagaaagttcatgtctcatgttatccggaccttgaaaatggaatgttcagaaacacatgtgcaagggagctgtgccaagctcatgttgcgaacaggcctcctgatgaagcttctcagcgagcagcaggaagcaaaggcattgaatgtagaatgggatacggaccaacaaaaaacaaattatattaatgagaacatggaacagaatgaacagaaagagcagaagtcaagtgagctcatgaaagaagttccaggagatgactataagaacaaactcatcttcgcaatatctgtgactgtaatactaataattttgattataattttttgtcttatagaggtgaattcacataaaagggcatcagaaaaatacaaagacaacccatcaatatcaggagcctgagcatgagttaaagcatgtggatggcctggagctatgtttttaaaattgttattaaatattggttttttacttaaatcaatgaaaactttctttactttgtggttgtgttcctcaaaatgagaatttttaacaataataaaaataaagcttgttagatcatttttaatggt

SEQ ID NO: 6195 - DNA, 2375 bp, Homo sapiens
gtctaacgtggcaccttcctggattcccctctatctcctgttcttcctaccttctactccttccctcctcttctcctccgaagaccctggcgcccactccactgcggacccctgaacacttaaggaataacccttggcagctgcacgactacgctctccgaaacctcatgggcagtttctcccgccggcgatgatggagaacctaataaggggaaggaatcccccgcaataccagagaagtccttgtaaagaggttcgtgcagcacttcggaagaggcctgaagaggagttgcagtgcctggagatgaccaccaaacggaaaatcatcggccgtctggtgccatgccgatgtttccgaggtgaagaagaaatcatctcagttttagattactcccactgcagtcttcagcaggtgccaaaggaggtctttaacttcgaacgaacattagaggagctttatctagatgccaatcaaattgaagaactacccaagcaattgttcaactgtcaagctctacgaaaactaagtattcctgataacgacctttcaaatctgccaaccactattgctagtttagttaatcttaaagaactcgacatcagtaaaaatggtgtacaagaatttccagaaaacataaagtgctgtaagtgtttaacaattattgaagccagtgtcaatcccatttctaaactacctgatggcttcacacagctcctaaacctgacccagctctacctgaatgacgcctttcttgaatttcttccagccaattttggaagacttgtcaaattgcggatcttggagttaagagaaaatcacttgaaaactctaccaaacatctgaagatccagagtgtgccccttgcccaatcgcctgagactatacagtgacacctacaacagaggatgtggagggagcagcttttcgggcaccagaaatggcagcatcaggagcatcagcacgaatagactttgtagaggtagttctcccaaactatattatgaaaccaaacatttttggtgcgctacctgctgatgggggctgccttcttactgcctagtatctacaaaatgtttggtctttgttaaagtttaacgatgacatttctgactaatatagagagacctgatttttttccaaatgtgttcagttgccataactttcaatgaatatgaaattttatcagtctcagaaaaacattaatacccatatttttatctaattgatttcactatttgttatgttaaggtgcttttgtgtataatttttgtatatatttttaaatgggatcaaactaagccataatttaaaagtcatcctaatgcagtaaataagataatttctctagtttgttaaattcttcagagaccgaatataattgctcgtttttctgtcatactccctgatgatgttccattgtggacttattttgcaaagttcccagatggcacaagtcaaaatatgaaatgctgatgattgattgattttatgtatcctttcatcttatgtaatttaatgtggaacagttattttgtagctctaaaatacatttgttaattaaccatattggcttttcatgcagttcaatggcttatagcatttcaatttgcatagaaaatgaatctctgtaatgatacttttgctaaataaataacaatcgacataatgggttcatttgcttttaacattttatacatacaatttagaagtaggatatatttcatattgaaattttgaaaagcttgaaattcaacatacaaggtcaccatcttgctgatgcctaatgcagtacagcaaattcattcttcatcccatgttaactcctttttggaacaagtcaaaatacaaataatttacaatgattgtgttggagctattgcttgattaaatacaattcaaaggttctttttataaaacaggtgtgagcaggacacattgcacttacgggcttttcctatttttttggttctatttcattttactgcctaggaaagaaacatttttttgtaaaacctatgctatggaactgaaatgtactttattgaatatttctattctgttttatgaatatcaattatgtgaaatatataaatataaaattgccttagaatgcctaactctttgtataaaacagatatctgaaagtagatgttggttttttgttcaaattgtgtaaatgctgatttttccatgagtacttatgaagatctatatgtaaaaattttaagtctgcttactgtgtttgtaccaccttgttcttagctgtgtatactctatgctaattgacttctgtcattgtcacatatattgcatatgtctctcaaaaattaaaaggtatattgctattctaaaaataaaaaatgtaaattcctga

SEQ ID NO: 6196 - DNA, 2131 bp, Homo sapiens
cggggcccaaggcaggggtggcgggtcagtgctgctcgggggcttctccatccaggtccctggagttcctggtccctggagctccgcacttggcggcgcaacctgcgtgaggcagcgcgactctggcgactggccggccatgccttcccgggctgaggactatgaagtgttgtacaccattggcacaggctcctacggccgctgccagaagatccggaggaagagtgatggcaagatattagtttggaaagaacttgactatggctccatgacagaagctgagaaacagatgcttgtttctgaagtgaatttgcttcgtgaactgaaacatccaaacatcgttcgttactatgatcggattattgaccggaccaatacaacactgtacattgtaatggaatattgtgaaggaggggatctggctagtgtaattacaaagggaaccaaggaaaggcaatacttagatgaagagtttgttcttcgagtgatgactcagttgactctggccctgaaggaatgccacagacgaagtgatggtggtcataccgtattgcatcgggatctgaaaccagccaatgttttcctggatggcaagcaaaacgtcaagcttggagactttgggctagctagaatattaaaccatgacacgagttttgcaaaaacatttgttggcacaccttattacatgtctcctgaacaaatgaatcgcatgtcctacaatgagaaatcagatatctggtcattgggctgcttgctgtatgagttatgtgcattaatgcctccatttacagcttttagccagaaagaactcgctgggaaaatcagagaaggcaaattcaggcgaattccataccgttactctgatgaattgaatgaaattattacgaggatgttaaacttaaaggattaccatcgaccttctgttgaagaaattcttgagaaccctttaatagcagatttggttgcagacgagcaaagaagaaatcttgagagaagagggcgacaattaggagagccagaaaaatcgcaggattccagccctgtattgagtgagctgaaactgaaggaaattcagttacaggagcgagagcgagctctcaaagcaagagaagaaagattggagcagaaagaacaggagctttgtgttcgtgagagactagcagaggacaaactggctagagcagaaaatctgttgaagaactacagcttgctaaaggaacggaagttcctgtctctggcaagtaatccagaacttcttaatcttccatcctcagtaattaagaagaaagttcatttcagtggggaaagtaaagagaacatcatgaggagtgagaattctgagagtcagctcacatctaagtccaagtgcaaggacctgaagaaaaggcttcacgctgcccagctgcgggctcaagccctgtcagatattgagaaaaattaccaactgaaaagcagacagatcctgggcatgcgctagccaggtagagagacacagagctgtgtacaggatgtaatattaccaacctttaaagactgatattcaaatgctgtagtgttgaatacttggttccatgagccatgcctttctgtatagtacacatgatatttcggaattggttttactgttcttcagcaactattgtacaaaatgttcacatttaatttttctttcttcttttaagaacatattataaaaagaatactttcttggttgggcttttaatcctgtgtgtgattactagtaggaacatgagatgtgacattctaaatcttgggagaaaaaataatgttaggaaaaaaatatttatgcaggaagagtagcactcactgaatagttttaaatgactgagtggtatgcttacaattgtcatgtctagatttaaattttaagtctgagattttaaatgtttttgagcttagaaaacccagttagatgcaatttggtcattaataccatgacatcttgcttataaatattccattgctctgtagttcaaatctgttagctttgtgaaaattcatcactgtgatgtttgtattctttttttttttctgtttaacagaatatgagctgtctgtcatttacctacttctttcccactaaataaaagaattcttcagtttccctgta

SEQ ID NO: 6197 - DNA, 6570 bp, Homo sapiens
tccctgggctgctggtcttctttaccttccagctgctcacagaacagagagtttctacatacaagcagaagatgtgaaaatattgggaataaataaagtatatgcttataaacaagttgtggctgctcctggttacgttgtgcctgaccgaggaactggcagcagcgggagagaagtcttatggaaagccatgtgggggccaggactgcagtgggagctgtcagtgttttcctgagaaaggagcgagaggacgacctggaccaattggaattcaaggcccaacaggtcctcaaggattcactggctctactggtttatcgggattgaaaggagaaaggggtttcccaggccttctgggaccttatggaccaaaaggagataagggtcccatgggagttcctggctttcttggcatcaatgggattccgggccaccctggacaaccaggccccagaggcccacctggtctggatggctgtaatggaactcaaggagctgttggatttccaggccctgatggctatcctgggcttctcggaccacccgggcttcctggtcagaaaggatcaaaaggtgaccctgtccttgctccaggtagtttcaaaggaatgaagggggatcctgggctgcctggactggatggaatcactggcccacaaggagcacccggatttcctggagctgtaggacctgcaggaccaccaggattacaaggtcctccagggcctcctggtcctcttggtcctgatgggaatatggggctaggttttcaaggagagaaaggagtcaagggggatgttggcctccctggcccagcaggacctccaccatctactggagagctggaattcatgggattccccaaagggaagaaaggatccaagggtgaaccagggcctaagggttttccaggcataagtggccctccaggcttcccgggccttggaactactggagaaaagggagaaaagggagaaaagggaatccctggtttgccaggacctaggggtcccatgggttcagaaggagtccaaggccctccagggcaacagggcaagaaagggaccctgggatttcctgggcttaatggattccaaggaattgagggtcaaaagggtgacattggcctgccaggcccagatgttttcatcgatatagatggtgctgtgatctcaggtaatcctggagatcctggtgtacctggcctcccaggccttaaaggagatgaaggcatccaaggcctacgtggcccttctggtgtccctggattgccagcattatcaggtgtcccaggagccctagggcctcagggatttccagggctgaagggggaccaaggaaacccaggccgtaccacaattggagcagctggcctccctggcagagatggtttgccaggcccaccaggtccaccaggcccacctagtccagaatttgagactgaaactctacacaacaaagagtcagggttccctggtctccgaggagaacaaggtccaaaaggaaacctaggcctcaaaggaataaaaggagactcaggtttctgtgcttgtgacggtggtgttcccaacactggaccacccggggaaccaggcccacctggtccatggggtctcataggccttccaggccttaaaggagccagaggagatcgaggctctgggggtgcacagggcccagcaggggctccaggcttagttgggcctctgggtccttcaggacccaaaggaaagaagggggaaccaattctcagtacaatccaaggaatgccaggagatcggggtgattctggctcccagggcttccgtggtgtaataggagaaccaggcaaggacggagtaccaggtttaccaggtctgccaggccttccgggtgatggtggacagggcttcccaggtgaaaaggggttacctggacttcctggtgaaaaaggccatcctggtccacctggcctcccaggaaatgggttaccaggacttcctggaccccgtgggcttcctggagataaaggcaaggatggattaccgggacaacaaggccttcccggatctaagggaatcaccctgccctgtattattcctgggtcatacggtccatcaggatttccaggcactcccggattcccaggccctaaagggtctcgaggcctccctgggaccccaggccagcctgggtcaagtggaagtaaaggagagccagggagtccaggattggttcatcttcctgaattaccaggatttcctggacctcgtggggagaagggcttgcctgggtttcctgggctccctggaaaagatggcttgcctgggatgattggcagtccaggcttacctggttccaagggagccactggtgacatctttggtgctgaaaatggtgctccgggggaacaaggcctacaaggattaacagggcacaaaggatttcttggagactctggccttccaggactcaagggtgtgcacgggaagcctggcttactaggccccaaaggtgagcggggcagccctgggacaccaggacaggtgggacagccaggcaccccaggatctagtggtccatatggcatcaagggcaaatctgggctcccaggagcaccaggcttcccaggcatctcaggacatcctggaaagaaaggaacaagaggcaagaaaggtcctcctggatcaattgtaaagaaagggctgccagggctaaaaggccttcctggaaatccaggcctagtaggactgaaaggaagcccaggctctccaggggtcgctgggttgccagccctctctggacccaagggagagaaggggtctgttggattcgtaggttttccaggaataccaggtctgcctggtattcctggaacaagaggattaaaaggaattccaggatcaactggaaaaatgggaccatctggacgtgctggtactcctggtgaaaagggagacagaggcaatccggggccagtcggaatacctagtccaagacgtccaatgtcaaacctttggctcaaaggagacaaaggctctcaaggctcagccggatccaatggatttcctgggccaagaggtgacaaaggagaggctggtcgacctggaccaccaggcctacctggagctcctggcctcccaggcattatcaaaggagttagtggaaagccagggccccctggcttcatgggaatccggggcttacctggcctgaaggggtcctctgggatcacaggtttcccaggaatgccaggagaaagtggttcacaaggtatcagagggtcgcctggactcccaggagcatctggtctcccaggcctgaaaggagacaacggccagacagttgaaatttccggtagcccaggacccaagggacagcctggcgaatctggttttaaaggcacaaaaggaagagatggactaataggcaatataggcttccctggaaacaaaggtgaagatggaaaagttggtgtttctggagatgttggccttcctggagctccaggatttccaggagttgccggcatgagaggagaaccaggacttccaggttcttctggtcaccaaggggcaattgggcctctaggatcccccggattaataggacccaaaggcttccctggatttcctggtttacatggactgaatgggcttccgggcaccaagggtacccatggcactccaggacctagtatcaccggtgtgcctgggcctgctggtctccctggacccaaaggagaaaaaggatatccaggaattggcatcggagctccagggaagccgggcctgagagggcaaaaaggtgatcgaggtttcccaggtctccagggccctgctggtctccccggtgccccaggcatctccttgccctcactcatagcaggacagcctggtgaccccgggcgaccaggcctagatggagaacgaggccgcccaggccccgctggacccccaggtccccctgggccatcctcgaatcaaggcgacaccggagaccctggcttccctggaattcctggacctaaagggcctaagggagaccaaggaattccaggtttttctggcctccctggagagctaggactgaaaggcatgagaggtgagcctggcttcatggggactccaggcaaggttgggccacctggagacccaggatttcccggaatgaaggggaaggcagggccaagaggctcttctggcctccaaggtgatcctggacaaacaccaactgcagaagctgtccaggttcctcctggacccttgggtctaccagggatcgatggcatccctggcctcactggggaccctggggctcaaggccctgtaggcctacaaggctccaaaggtttacctggcatccccggtaaagatggccccagtgggctcccaggcccacctggggctcttggtgatcctggtctgcctggactgcaaggccctccaggatttgaaggagctccagggcagcaaggccccttcgggatgcctggaatgcctggccagagcatgagagtgggctacacgttggtaaagcacagccagtcggaacaggtgcccccgtgtcccatcgggatgagccagctgtgggtggggtacagcttactgtttgtggaggggcaagagaaagcccacaaccaggacctgggctttgctggctcctgtctgccccgcttcagcaccatgcccttcatctactgcaacatcaacgaggtgtgccactatgccaggcgcaatgataaatcttactggctctccactaccgcccctatccccatgatgcccgtcagccagacccagattccccagtacatcagccgctgctctgtgtgtgaggcaccctcgcaagccattgctgtgcacagccaggacatcaccatcccgcagtgccccctgggctggcgcagcctctggattgggtactctttcctcatgcacactgccgctggtgccgagggtggaggccagtccctggtctcacctggctcctgcctagaggactttcgggccactcctttcatcgaatgcagtggtgcccgaggcacctgccactactttgcaaacaagtacagtttctggttgaccacagtggaggagaggcagcagtttggggagttgcctgtgtctgaaacgctgaaagctgggcagctccacactcgagtcagtcgctgccaggtgtgtatgaaaagcctgtagggtggcacctgccactctgccccttgccctcccctgcccctcacaacagtcacctcacaaacctgaatggtctgaagaaggaaggcctgagcccctttgcctgtcaagttgtacattggagtctcatttgggctagactaccggacactcgtcaccccagccctcgggtccatagagatgagcccaccctgctgagatctgctgtcctgtttctgtcaagctggtgctactgtttgatttggatgattgtgtgactattcatggctacctcagaaagatttgatgggccacaactgtcttagactgctagctttctccttaccgtcttgatcggaaagctcttcctaatcgctaatcagtcatttcttcatgtacagaggtcagcacacattatttggcttaaaccagaacccagtgtttccacacttaaattctctaaccgaatattcatggatggctcaagtctgcacagagcaagtcctcactcttcaaggaggcccactgtgtctaggcaggcaagagaattgaaatgaggtgccacccagtagcccagagtgagctttagctctctctagaatgagcaagactgggccccacatggcttagagaggcttgaaggccagcagctgggttgggggtggtggtcattaatggcatatggtcctagacaaaccatctcctccttgccggctccccctccagccagagacagaggatgtggcctggttcaaagtaaagcagaggatgcaacaaatgtggccaagcctatcaaaggaaatgagaatgacagccttttttcctgggccagaagtagaggggtgggtgcgtaaggatgtgtgagttttgcttttgactccaggaacaaaaaggtaaatcccacatcccagtttctcagaagtccctgtttattccaaatgccatccagatgtgtgcaatgtggcaaactgaagctgcacagtgttggtttccttgtattctgaggatgttaaagactttgttaaatggttatccaattgctctttcacaggtagcctattaaactattttaatatgtttttttaaacctcataaaaatctagcacactcttctcttgagcagttagcagacctaaagcaagcctgaattggctatgcagtacattgtattctgtttgggggaatttgttttagccattttctttaattaccagttttccagaacactcttagctatgttgacatgaggcagttccttccaggtgattctgtttccttaagtattatataaactgtgccaatacagacaaagcataatcaatataatctgaattattgttatctttacctcctgagtaataagcatggtgtcagttttgtacatagcaaataaaataaatgaaatctgaacatgtga

SEQ ID NO: 6198 - DNA, 9648 bp, Homo sapiens
atggtccgcttcggggacgagctgggcggccgctatgggggccccggcggcggagagcgggcccggggcggcggggccggcggggcggggggcccgggtcccggggggctgcagcccggccagcgggtcctctacaagcaatcgatcgcgcagcgcgcgcggaccatggcgctgtacaaccccatcccggtcaagcagaactgcttcaccgtcaaccgctcgctcttcgtcttcagcgaggacaacgtcgtccgcaaatacgcgaagcgcatcaccgagtggccaccattcgagtatatgatcctggccaccatcatcgccaactgcatcgtgctggccctggagcagcacctccctgatggggacaaaacgcccatgtccgagcggctggacgacacggagccctatttcatcgggatcttttgcttcgaggcagggatcaaaatcatcgctctgggctttgtcttccacaagggctcttacctgcggaacggctggaacgtcatggacttcgtggtcgtcctcacagggatccttgccacggctggaactgacttcgacctgcgaacactgagggctgtgcgtgtgctgaggcccctgaagctggtgtctgggattccaagtttgcaggtggtgctcaagtccatcatgaaggccatggttccactcctgcagattgggctgcttctcttctttgccatcctcatgtttgccatcattggcctggagttctacatgggcaagttccacaaggcctgtttccccaacagcacagatgcggagcccgtgggtgacttcccctgtggcaaggaggccccagcccggctgtgcgagggcgacactgagtgccgggagtactggccaggacccaactttggcatcaccaactttgacaatatcctgtttgccatcttgacggtgttccagtgcatcaccatggagggctggactgacatcctctataatacaaacgatgcggccggcaacacctggaactggctctacttcatccctctcatcatcatcggctccttcttcatgctcaacctggtgctgggcgtgctctcgggggagtttgccaaggagcgagagagggtggagaaccgccgcgccttcctgaagctgcgccggcagcagcagatcgagcgagagctcaacgggtacctggagtggatcttcaaggcggaggaagtcatgctggccgaggaggacaggaatgcagaggagaagtcccctttggacgcagtgctgaagagagcggccaccaagaagagcagaaatgacctgatccacgcagaggagggagaggaccggtttgcagatctctgtgctgttggatcccccttcgcccgcgccagcctcaagagcgggaagacagagagctcgtcatacttccggaggaaggagaagatgttccggttttttatccggcgcatggtgaaggctcagagcttctactgggtggtgctgtgcgtggtggccctgaacacactgtgtgtggccatggtgcattacaaccagccgcggcggcttaccacgaccctgtattttgcagagtttgttttcctgggtctcttcctcacagagatgtccctgaagatgtatggcctggggcccagaagctacttccggtcctccttcaactgcttcgactttggggtcatcgtggggagcgtctttgaagtggtctgggcggccatcaagccgggaagctcctttgggatcagtgtgctgcgggccctccgcctgctgaggatcttcaaagtcacgaagtactggagctccctgcggaacctggtggtgtccctgctgaactccatgaagtccatcatcagcctgctcttcttgctcttcctgttcattgtggtcttcgccctgctggggatgcagctgtttgggggacagttcaacttccaggatgagactcccacaaccaacttcgacaccttccctgccgccatcctcactgtcttccagatcctgacgggagaggactggaatgcagtgatgtatcacgggatcgaatcgcaaggcggcgtcagcaaaggcatgttctcgtccttttacttcattgtcctgacactgttcggaaactacactctgctgaatgtctttctggccatcgctgtggacaacctggccaacgcccaagagctgaccaaggatgaagaggagatggaagaagcagccaatcagaagcttgctctgcaaaaggccaaagaagtggctgaagtcagccccatgtctgccgcgaacatctccatcgccgccaggcagcagaactcggccaaggcgcgctcggtgtgggagcagcgggccagccagctacggctgcagaacctgcgggccagctgcgaggcgctgtacagcgagatggaccccgaggagcggctgcgcttcgccactacgcgccacctgcggcccgacatgaagacgcacctggaccggccgctggtggtggagctgggccgcgacggcgcgcgggggcccgtgggaggcaaagcccgacctgaggctgcggaggcccccgagggcgtcgaccctccgcgcaggcaccaccggcaccgcgacaaggacaagacccccgcggcgggggaccaggaccgagcagaggccccgaaggcggagagcggggagcccggtgcccgggaggagcggccgcggccgcaccgcagccacagcaaggaggccgcggggcccccggaggcgcggagcgagcgcggccgaggcccaggccccgagggcggccggcggcaccaccggcgcggctccccggaggaggcggccgagcgggagccccgacgccaccgcgcgcaccggcaccaggatccgagcaaggagtgcgccggcgccaagggcgagcggcgcgcgcggcaccgcggcggcccccgagcggggccccgggaggcggagagcggggaggagccggcgcggcggcaccgggcccggcacaaggcgcagcctgctcacgaggctgtggagaaggagaccacggagaaggaggccacggagaaggaggctgagatagtggaagccgacaaggaaaaggagctccggaaccaccagccccgggagccacactgtgacctggagaccagtgggactgtgactgtgggtcccatgcacacactgcccagcacctgtctccagaaggtggaggaacagccagaggatgcagacaatcagcggaacgtcactcgcatgggcagtcagcccccagacccgaacactattgtacatatcccagtgatgctgacgggccctcttggggaagccacggtcgttcccagtggtaacgtggacctggaaagccaagcagaggggaagaaggaggtggaagcggatgacgtgatgaggagcggcccccggcctatcgtcccatacagctccatgttctgtttaagccccaccaacctgctccgccgcttctgccactacatcgtgaccatgaggtacttcgaggtggtcattctcgtggtcatcgccttgagcagcatcgccctggctgctgaggacccagtgcgcacagactcgcccaggaacaacgctctgaaatacctggattacattttcactggtgtctttacctttgagatggtgataaagatgatcgacttgggactgctgcttcaccctggagcctatttccgggacttgtggaacattctggacttcattgtggtcagtggcgccctggtggcgtttgctttctcaggatccaaagggaaagacatcaataccatcaagtctctgagagtccttcgtgtcctgcggcccctcaagaccatcaaacggctgcccaagctcaaggctgtgtttgactgtgtggtgaactccctgaagaatgtcctcaacatcttgattgtctacatgctcttcatgttcatatttgccgtcattgcggtgcagctcttcaaagggaagtttttctactgcacagatgaatccaaggagctggagagggactgcaggggtcagtatttggattatgagaaggaggaagtggaagctcagcccaggcagtggaagaaatacgactttcactacgacaatgtgctctgggctctgctgacgctgttcacagtgtccacgggagaaggctggcccatggtgctgaaacactccgtggatgccacctatgaggagcagggtccaagccctgggtaccgcatggagctgtccatcttctacgtggtctactttgtggtctttcccttcttcttcgtcaacatctttgtggctttgatcatcatcaccttccaggagcagggggacaaggtgatgtctgaatgcagcctggagaagaacgagagggcttgcattgacttcgccatcagcgccaaacccctgacacggtacatgccccaaaaccggcagtcgttccagtataagacgtggacatttgtggtctccccgccctttgaatacttcatcatggccatgatagccctcaacactgtggtgctgatgatgaagttctatgatgcaccctatgagtacgagctgatgctgaaatgcctgaacatcgtgttcacatccatgttctccatggaatgcgtgctgaagatcatcgcctttggggtgctgaactatttcagagatgcctggaatgtctttgactttgtcactgtgttgggaagtattactgatattttagtaacagagattgcggaaacaaacaatttcatcaacctcagcttcctccgcctctttcgagctgcgcggctgatcaagctgctccgccagggctacaccatccgcatcctgctgtggacctttgtccagtccttcaaggccctgccctacgtgtgtctgctcattgccatgctgttcttcatctacgccatcatcggcatgcaggtgtttgggaatattgccctggatgatgacaccagcatcaaccgccacaacaacttccggacgtttttgcaagccctgatgctgctgttcaggagcgccacgggggaggcctggcacgagatcatgctgtcctgcctgagcaaccaggcctgtgatgagcaggccaatgccaccgagtgtggaagtgactttgcctacttctacttcgtctccttcatcttcctgtgctcctttctgatgttgaacctctttgtggctgtgatcatggacaattttgagtacctcacgcgggactcttccatcctaggtcctcaccacttggatgagttcatccgggtctgggctgaatacgacccggctgcgtgtgggcgcatcagttacaatgacatgtttgagatgctgaaacacatgtccccgcctctggggctggggaagaaatgccctgctcgagttgcttacaagcgcctggttcgcatgaacatgcccatctccaacgaggacatgactgttcacttcacgtccacgctgatggccctcatccggacggcactggagatcaagctggccccagctgggacaaagcagcatcagtgtgacgcggagttgaggaaggagatttccgttgtgtgggccaatctgccccagaagactttggacttgctggtaccaccccataagcctgatgagatgacagtggggaaggtttatgcagctctgatgatattcgacttctacaagcagaacaaaaccaccagagaccagatgcagcaggctcctggaggcctctcccagatgggtcctgtgtccctgttccaccctctgaaggccaccctggagcagacacagccggctgtgctccgaggagcccgggttttccttcgacagaagagttccacctccctcagcaatggcggggccatacaaaaccaagagagtggcatcaaagagtctgtctcctggggcactcaaaggacccaggatgcaccccatgaggccaggccacccctggagcgtggccactccacagagatccctgtggggcggtcaggagcactggctgtggacgttcagatgcagagcataacccggaggggccctgatggggagccccagcctgggctggagagccagggtcgagcggcctccatgccccgccttgcggccgagactcagcccgtcacagatgccagccccatgaagcgctccatctccacgctggcccagcggccccgtgggactcatctttgcagcaccaccccggaccgcccaccccctagccaggcgtcgtcgcaccaccaccaccaccgctgccaccgccgcagggacaggaagcagaggtccctggagaaggggcccagcctgtctgccgatatggatggcgcaccaagcagtgctgtggggccggggctgcccccgggagaggggcctacaggctgccggcgggaacgagagcgccggcaggagcggggccggtcccaggagcggaggcagccctcatcctcctcctcggagaagcagcgcttctactcctgcgaccgctttgggggccgtgagcccccgaagcccaagccctccctcagcagccacccaacgtcgccaacagctggccaggagccgggaccccacccacagggcagtggttccgtgaatgggagccccttgctgtcaacatctggtgctagcacccccggccgcggtgggcggaggcagctcccccagacgcccctgactccccgccccagcatcacctacaagacggccaactcctcacccatccacttcgccggggctcagaccagcctccctgccttctccccaggccggctcagccgtgggctttccgaacacaacgccctgctgcagagagaccccctcagccagcccctggcccctggctctcgaattggctctgacccttacctggggcagcgtctggacagtgaggcctctgtccacgccctgcctgaggacactctcactttcgaggaggctgtggccaccaactcgggccgctcctccaggacttcctacgtgtcctccctgacctcccagtctcaccctctccgccgcgtgcccaacggttaccactgcaccctgggactcagctcgggtggccgagcacggcacagctaccaccaccctgaccaagaccactggtgctagctgcaccgtgaccgctcagacgcctgcatgcagcaggcgtgtgttccagtggatgagttttatcatccacacggggcagccggccctcgggggaggccttgcccaccttggtgaggctcctgtggcccctccctccccctcctcccctcttttactctagacgacgaataaagccctgttagaggatgcggctctctctgtccccttcctgtcctgccttcctgggtctcgtaccacacaccagaccctaaaccgcaggctgctgtgtgtggctgagaaggacccaggagtccaaatcccgtgtcctgggactcagcatccagcatgggtgcttggagccgttgtgaggagctctgcgtcctgtggggagcacccttcacgtggccgtgcggcacagagaagcagggcccacctgaaagtgcgccgagacctcgggacggaggggatggggagggggacacagtcgtggcttgtgcagcccgccagtgtcagcgaatgctcactcaggcaagctctgtcctccctggacaccgtcagccccacaggaaccgagctgggaagtgttcttgctgtggttgtgatttttaattgcaacacctctcattcttgtcacttctatatacgtgatgtagaaaaaatggaaaaccagaaaaatggggaaggaaatgttcacataactttaaaaaatcaaacctgtgaaagaaagatgtcagctttttgccacgtgtctttgtggcttatgcgaggagactccctgtgcagccctgtccggtccaggtggacgtagacggcccctggctctgctgctcttgaccaagtgcctgaccgccaggccctcacacccaggctcctgggcactgtggtgtgaggcgaggcctcgggatccatcaccgcaggatgctgtgaaaagtactcgcgatggcagccaggtagcaagcccttgccagtggagagcactggatgtcatggtggcaaacaaggcagccatttgctgtcctcctcccacgagtggaaggggtttccaaggaagccacagggcagctgaccacgtgcttgtgtgaggcattttcagtctgttctgcatatgattctcagggcacactctgtggtatgtgaaataggtttccttccacatacagcagaagagaggcaaaggctggtaggaaggaggaagacattggctgggggcttggatgtggggccgtcagggcaggagggaggaagccccagctggaatgaaactcagagcaagtgaccgagggaggacacggctcctgccactgaggccgggcacctgatgcccagcactgtcctggcgccagacacagggagcaggcagtcaagtgaggtctgacccccatggccacgctcaggagagaaagaccatgctcaggacactgtccaaggtgcacaagatgctgggaggtcccttgtttggtgaagaaagggagcatttagagcagttgatggtggtgtgtcctccgtgttctgaaattccagatgatctgtgttggattcttggcttctaccccatgattctcctcaaagaaattgtgtgtgatgtgtgtgtgtgtgtgtgtgtgtgtgtgtctgtgtcacaggagatgcagtgcctgtacaggtgtgttcagtgtgtggatgtcattaacccatagggctatgcaacaaaagacacatttaatagaagtaaaacacacaagaccgctgcctggtctcggggttcagcatgattgtgaccaaacctttttatagaatttccttacctgaaggcacaacactctgaaactttaaagataacagagtattttattccaatagaataaaccaggaatctcggactgtgcatgtgatcactgtgctcctgttgcaaagtagaaggatgtgtattttgacactgacgttttgtctcttgttccccagcccccagcccatgttatcttgggtgtcgaatgtgtccattccatgcagaaccacagccatttccccaggcagtgttgggtcgagaatccacttttctaaacccacacagcctagctggcttgtctagactcttctaggcattggaattgatgaaaactacagggagcggggaaaggagacattatgtcttgttttcctgactttgggttttgtttctcactgtgtcttctccggctatcatatatgtcccctgaatctcatagtgagctgccaaatttgaagtgcatcacccagttgtctgcatctggaaccagtcaagcagtggctgtagtttgaacaagttatgtgtgcatgtaacatatatacatatatacatatatacaagtatgtgcatgataatgtatatcttcgtactttttgatacaatgtattcatttgttaatttttaattatatttgatataaatcaaaggtttgttgcaaaactttatatttaagaagtgttaaaaaaaaaaaaaagtcccaaccatgcaacacaactgggacctacttaaaaagaaattctgtgattgactagtttgctgcctgagtcatatttatcagccaaactttggattctgctgttgtttctacaatgacattttgtatgaagcaaagtccttgaattaaaataaaaacttagcaaaaaatcaaaaacaaaacccca

SEQ ID NO: 6199 - DNA, 2826 bp, Homo sapiens
tatgatctcgtgaaatcttgagagaaactgaatgacgaatgaaactattgttcctgtttcacacagaagaaaactgaggttaaaaggggtaaagtaattttgcatggcatgaagtagaaattcaaagtacaggaatttgaacttggttctgtccttttctgaagcccttgaccactatagactcaaacatcaccttgtttttccactcattcaacacttttttttttaaattatctaataggttggcactcatcatgagcccctgttctcattctgcaaatggtgaagctctctattgtcctgaccccacagttcctgtcccatgaccagggccagctcaccaaggagctgcagcagcatgtaaagtcagtgacatgcccatgcgagtacctgaggaaggttatcaatactctggctgaccatcatcatcgtgggactgactttggtggaagtccttggttacatgtcattattgcatttccgacaagttataaagttgtcattaccctctggatagtttacctttgggtgtctctcctgaagactatcttctggtctcgaaatggacatgatggatccacggatgtacagcagagagcctggaggtccaaccgccgtagacaggaagggctgaggtccatttgtatgcacacaaagaaaagagtttcttcctttcgaggaaataaaattgtcctgaaagacgtcattactctacggagacatgtggaaacaaaagttagagctaaaatccgtaagaggaaggtgacaacgaaaatcaaccatcatgacaaaatcaatggaaagaggaagaccgccagaaaacagaaaatgtttcaacgtgcgcaagagttgcggcggcgagcagaggactaccacaaatgcaaaatccccccttctgcaagaaaggctctttgcaactgggtcagaatggcggcagcggagcatcgtcattcttcaggattgccctactggccctacctcacagctgaaactttaaaaaacaggatgggccaccagccacctcctccaactcaacaacattctataactgataactccctgagcctcaagacacctcccgagtgtctgctcactccccttccaccctcagcggatgataatctcaagacacctcccgagtgtgtgctcactccccttccaccctcagcggatgataatctcaagacacctcccgagtgtctgctcactccccttccaccctcagctctaccctcagctccaccctcagcggatgataatctcaagacacgtgccgagtgtctgctccatccccttccaccctcagcggatgataatctcaagacaccttccgagcgtcagctcactccccttccaccctcagctccaccctcagcagatgataatatcaagacacctgccttccaccctcagcggatgataatctcaagacaccttccgagcgtcagctcactccccttccaccctcagctccaccctcagcagatgataatatcaagacacctgccgagcgtctgcgggggccgcttccaccctcagcggatgataatctcaagacaccttccgagcgtcagctcactccccttccaccctcagctccaccctcagcagatgataatatcaagacacctgccgagcgtctgcgggggccgcttccaccctcagcggatgataatctcaagacaccttccgagcgtcagctcactccccttccaccctcagctccaccctcagcagatgataatatcaagacacctgccgagcgtctgcgggggccgcttccaccctcagcggatgataatctcaagacaccttccgagcgtcagctcactccccttccaccctcagctccaccctcagcagatgataatatcaagacacctgccgagcgtctgcgggggccgcttccaccctcagcggatgataatctcaagacaccttccgagcgtcagctcactccccttccaccctcagctccaccctcagcagatgataatatcaagacacctgccgagcgtctgcgggggccgcttccaccctcagcggatgataatctcaagacaccttccgagcgtcagctcactccccttccacactcagctccaccctcagcagatgataatatcaagacacctgccgagcgtctgcggggagcgtctgcgggggccgcttccaccctcagcggatgataatctcaagacaccttccgagcgtcagctcactccccttccaccctcagctccaccctcagcagatgataatatcaagacacctgccgagcgtctgcgggggccgcttccaccctcagcggatgataatctcaagacaccttccgagcgtcagctcactccccttccaccctcagctccaccctcagcagatgataatatcaagacacctgccgagcgtctgcgggggccgcttccaccctcagccgatgataatctcaagacacctcccttagctactcaggaggctgaggcagaaaaaccacgcaaacccaagaggcagagggcggctgagatggaaccacctcccgaacccaagaggcggagggtcggtgacgtggaaccgtcacgcaaacccaagaggcggagggccgctgacgtggaaccatcatcacccgaacccaagaggcggagggtcggtgatgtggaaccgtcacgcaaacccaagaggcggagggccgctgacgtggaaccatcatcacccgaacccaagaggcggagggtcggtgacgtggaaccgtcacgcaaacccaagaggcggagggccgctgacgtggaaccatcattacccgaacccaagaggcggaggttgagctga

SEQ ID NO: 6200 - DNA, 2986 bp, Homo sapiens
gggagcgcgccgggcgcagggagctgagtggacggctcgagacggcggcgcgtgcagcagctccagaaagcagcgagttggcagagcagggctgcatttccagcaggagctgcgagcacagtgctggctcacaacaagatgctcaaggtgtcagccgtactgtgtgtgtgtgcagccgcttggtgcagtcagtctctcgcagctgccgcggcggtggctgcagccggggggcggtcggacggcggtaattttctggatgataaacaatggctcaccacaatctctcagtatgacaaggaagtcggacagtggaacaaattccgagacgaagtagaggatgattatttccgcacttggagtccaggaaaacccttcgatcaggctttagatccagctaaggatccatgcttaaagatgaaatgtagtcgccataaagtatgcattgctcaagattctcagactgcagtctgcattagtcaccggaggcttacacacaggatgaaagaagcaggagtagaccataggcagtggaggggtcccatattatccacctgcaagcagtgcccagtggtctatcccagccctgtttgtggttcagatggtcatacctactcttttcagtgcaaactagaatatcaggcatgtgtcttaggaaaacagatctcagtcaaatgtgaaggacattgcccatgtccttcagataagcccaccagtacaagcagaaatgttaagagagcatgcagtgacctggagttcagggaagtggcaaacagattgcgggactggttcaaggcccttcatgaaagtggaagtcaaaacaagaagacaaaaacattgctgaggcctgagagaagcagattcgataccagcatcttgccaatttgcaaggactcacttggctggatgtttaacagacttgatacaaactatgacctgctattggaccagtcagagctcagaagcatttaccttgataagaatgaacagtgtaccaaggcattcttcaattcttgtgacacatacaaggacagtttaatatctaataatgagtggtgctactgcttccagagacagcaagacccaccttgccagactgagctcagcaatattcagaagcggcaaggggtaaagaagctcctaggacagtatatccccctgtgtgatgaagatggttactacaagccaacacaatgtcatggcagtgttggacagtgctggtgtgttgacagatatggaaatgaagtcatgggatccagaataaatggtgttgcagattgtgctatagattttgagatctccggagattttgctagtggcgattttcatgaatggactgatgatgaggatgatgaagacgatattatgaatgatgaagatgaaattgaagatgatgatgaagatgaaggggatgatgatgatggtggtgatgaccatgatgtatacatttgattgatgacagttgaaatcaataaattctacatttctaatatttacaaaaatgatagcctatttaaaattatcttcttccccaataacaaaatgattctaaacctcacatatattttgtataattatttgaaaaattgcagctaaagttatagaactttatgtttaaataagaatcatttgctttgagtttttatattccttacacaaaaagaaaatacatatgcagtctagtcagacaaaataaagttttgaagtgctactataataagtttttcacgagaacaaactttgtaaatcttccataagcaaaatgacagctagtgcttgggatcgtacatgttaattttctgaaagataattctaagtgaaatttaaaataaataaatttttaatgacctgggtcttaaggatttaggaaaaatatgcatgctttaattgcatttccaaagtagcatcttgctagacctagttgagtcaggataacagagagataccacatggcaagaaaaacaaagtgacaattgtagagtcctcaattgtgtttacattaatagtggtgtttttacctatgaaattattctggatctaataggacattttacaaaatggcaagtatggaaaaccatggattctgaaagttaaaaatttagttgttctccccaatgtgtattttaatttggatggcagtctcatgcagattttttaaaagattctttaataacatgatttgtttgcctttctagatttctttatctttctgaccagcaacttagggagcagaatttaaattaggaagacaaagggaaagattcatttaaaccatatttttacaaagtttgtcatttgccccaaggtcaaattttaaattcttaattttcattttatttcccattttaggtaaaagtttgcatttaatcttagaattatgttatttttgttagtagtgtggaaacttagagaacttattgtatggtgccttgcaaaaatagagatagaaagattttagcatgcataccaatatagtatattacgcaatatataagcacacctaattaacagattaatatcagtaaaggtattgctgctggaatgaagaaaatgggatacgtttgtttctttttttctattgttacataattgccatgtggacttgtttatgattattgtgtagagtagcatttaagatttaactgtagcaaaaattactttaaccgctgtatttaagttagcatgttaattaattgtgtagacattttggcacaccatcacttttaactatatcataccaatggttttgtgcccataataaaaatggaaaaacctgttgaatgttacgtattggtatctttaatttcaacagtgggtaaactggtttcccagtatacaattcattgaaagcaaaattgattaattatttccatttaatttatacacactcaatacaaaatttaatgttgactttacgtaataaagtataatgcattttcttttttactgtttatgtatagtttacaaaataaagaatcttgtaaccaaa

SEQ ID NO: 6201 - DNA, 1340 bp, Homo sapiens
tgtctggctgcgcgtttggctgcaatgagctcggcctcggggctccgcagggggcacccggcagtgtcaactgttagccacgcagatgccgattgctttgtgtgtgtcttcctgagccatggcgaaggcaatcacatttatgcatatgatgctaaaatcgaaattcagacattaactggcttgttcaaaggagacaagtgtcacagcctggttggaaaacccaagatatttatcattcaggcatgtcggggaaaccagcacgatgtgccagtcattcctttggatgtagtagataatcagacagagaagttggacaccaacataactgaggtggatgcagcctccgtttacacgctgcctgctggagctgacttcctcatgtgttactctgttgcagaaggatattattctcaccgggaaactgtgaacggctcatggtacattcaagatttgtgtgagatgttgggaaaatatggctcctccttagagttcacagaactcctcacactggtgaacaggaaagtttctcagcgccgagtggacttttgcaaagacccaagtgcaattggaaagaagcaggttccctgttttgcctcaatgctaactaaaaagctgcatttctttccaaaatctaattaattaatagaggctatctaattttacactctgtattgaaaatggctttctcagccaggcgtggttactcacacctgtaatcccagcactttgggagtccaaggtgggcggatcacctgaggtcgggagttcgagaccagcctgaccaacatggagaagccccgtctctactaaaaatgcaaaaaaaaatttagctaggcatggcggcgcatgcctgcaatcccagctacttggaaggctgaggcaggagaatcacttgaacccaggaggtggaggctgcggtgagccgagattgcgccattgcactccagcctgggcaacgagtgaaactccgtctcaaaaaaaagaaaatgtctttctcttccttttatataaatatcgttagggtgaagcattatggtctaatgattcaaatgttttaaagtttaatgcctagcagagaactgccttaaaaaaaaaaaaaaaaagttcatgttggccatggtgaaagggtttgatatggagaaacaaaatcctcaggaaattagataaataaaaatttataagcatttgtattattttttaataaactgcagggttacacaaaaatctagctgatttaacttgtattttgtcacttttttataaaagtttattgtttgatgtttttaaaggtttttgaaatccaggaattaaatcatcccttaataaaatattcgaaattc

SEQ ID NO: 6202 - DNA, 1947 bp, Homo sapiens
cgcgactgcgcgcgcagggcctgagcgggcgccggagggaaggggaagcggcggggtagtaacagattatgggcaacagtccttttaattaatctaccgtcatcatggctaatgaggactgtcccaaggctgctgatagtcctttttcatcagataaacatgcccaactcatcttggcccaaatcaataagatgagaaatggacagcatttctgtgatgtgcagctgcaagttggacaggaaagttttaaagctcatcggctggttttggctgccagcagtccttactttgcagctttgttcactggaggaatgaaagagtcctcaaaagatgttgtaccgattctaggaattgaagcaggaatctttcagatacttctagatttcatttacacaggtatagtgaacataggtgtgaataatgtccaggagttgattattgcagcagacatgctacagttgactgaagttgttcatctttgctgtgaatttctgaaaggacaaattgatccactgaactgcattggaatttttcagttctctgagcaaattgcctgccatgatctcttggaattctcagaaaactacattcatgtccatttcttggaggttcatagtggagaagagttcctggcacttacgaaagatcagctgatcaaaattttgcgaagtgaagagcttagcattgaggatgaataccaggtcttcttagctgcaatgcaatggattctgaaagatttgggaaaaagaagaaaacatgtggtggaagtgctagacccaattcgattccctttattacctcctcagagacttttaaagtatatagaaggagtatccgattttaatcttcgtgttgcattgcaaacacttctgaaagagtactgtgaagtatgcaaatctcccaaagagaacaagttttgtagttttctgcagacatctaaggttcgacctcggaagaaagcaagaaagtacctgtatgcagtaggtggatatactcggttgcaggggggtcgctggagtgatagcagagccctcagctgtgtagaacgttttgacacctttagccagtactggaccactgtgtcttcacttcatcaggctcgaagtgggctgggagtaacagttctgggagggatggtctacgctattggaggtgaaaaggattcaatgatttttgattgtactgaatgctatgatccagttactaaacagtggacaactgtagcttcgatgaatcatccccgctgcggcttaggagtgtgtgtgtgttatggggctatctatgctttgggtggatgggttggagctgagatagggaacaccattgaacgatttgatcctgatgaaaataaatgggaagtagttggtaacatggctgtgtcacgctactactttgggtgctgtgaaatgcaaggtttaatttatgtaattgggggcatcagcaatgaaggaatagaacttcgttcttttgaagtctatgatccactttctaagcgttggtctccacttcctccaatgggaaccaggagagcatatcttggtgtggctgcactcaatgactgcatctattctgttggaggatggaatgagacccaagatgctcttcatactgtagaaaaatattcctttgaagaggaaaagtgggttgaagttgcctcaatgaaagtgcctagagcaggcatgtgtgttgtggcagtcaatggtcttctgtatgtttctggaggtcgatcttccagccatgattttttggctccagatactcacagatacgaggttttccgcttgaagtgggagaatatgtgcattcttttcaatgatcacaagactctaacaaaggggatttttaatctttaattttcaagatggttaaaatattgaaatgtttaagtggataactatattattcataaaatgactgagtgaaaactaatatactatgagatgaaaa

SEQ ID NO: 6203 - DNA, 1885 bp, Homo sapiens
gagacttgcaggcagcaaacacggtgcgagcgaacaggagtgggggggaaattaaaaaaagctaaacgtggagcagccgatcggggaccgagaaggggaatcgatgcaaggagcacaataaaacaaaagctacttcggaacaaacagcatttaaaaatccacgactcaagataactgaaacctaaaataaaacctgctcatgcaccatggtttttcaaactcggtacccttcatggattattttatgctacatctggctgctccgctttgcacacacaggggaggcgcaggctgcgaaggaagtactactgctggattctaaagcacaacaaacagagttggagtggatttcctctccacccaatgggtgggaagaaattagtggtttggatgagaactataccccgatacgaacataccaggtgtgccaagtcatggagcccaaccaaaacaactggctgcggactaactggatttccaaaggcaatgcacaaaggatttttgtagaattgaaattcaccctgagggattgtaacagtcttcctggagtactgggaacttgcaaggaaacatttaatttgtactattatgaaacagactatgacactggcaggaatataagagaaaacctctatgtaaaaatagacaccattgctgcagatgaaagttttacccaaggtgaccttggtgaaagaaagatgaagcttaacactgaggtgagagagattggacctttgtccaaaaagggattctatcttgcctttcaggatgtaggggcttgcatagctttggtttctgtcaaagtgtactacaagaagtgctggtccattattgagaacttagctatctttccagatacagtgactggttcagaattttcctctttagtcgaggttcgagggacatgtgtcagcagtgcagaggaagaagcggaaaacgcccccaggatgcactgcagtgcagaaggagaatggttagtgcccattggaaaatgtatctgcaaagcaggctaccagcaaaaaggagacacttgtgaacgtaagtaatgtgtcctattaaaactccactttgcctttttaaatttcagtatcagacattttaaactttaatagttatttgaatacgtgaatctgctctgtaccagaagcgcaattcagtagatcttaaacaaagtcaccgttgaacttagtgattgccctacagtagcatctgcactaagtgtatgtaatcaatataggtgataatgaaatttgttactaaaatttaatgtgtcctatgcttaacatggaagtcaatagttgcacgttgggctatggagtttagagaggagtctgggtagttggacatatagcctggcaagactgaggtgacatttaacaggatttaatgagatgccattcctcctgtttttaaacccatattgtctgggcccttgagtagcagtaaataggaggttaagagggctgtgaataagagctctagtgacaggcagggcataaacgaatatatttacaaacttttagaattatcttatataaatactataactttaatacaaaattttcaaatttcacttacaaaatctctgtggttacttctgagaaaggtgtgtgttttttttttttttttttggactaagtaccaaaatgaccacatttttgtgaaagtgggccaaagtaaagttttaattattatagtacaccaattgcatgttttgaaacaatcatgtatgaattagtaaacttttttctttgttttataaaaccgttttttttctttcctagcattatgtggctaaatatttaaaactatgtcatatggaccttcaagattgatagatattctgtttctaggtttcatgaaaataaattataaagttatgtta

SEQ ID NO: 6204 - DNA, 1863 bp, Homo sapiens
cggttctttccggaaattatgactgcagctgttttcactccgctgtgactcagagcgctccgggctgcaggagaggaagaaatcttgcatcaccatggtgcacttctgtggcctactcaccctccaccgggagccagtgccgctgaagagtatctctgtgagcgtgaacatttacgagtttgtggctggtgtgtctgcaactttgaactacgagaatgaggagaaagttcctttggaggccttctttgtgttccccatggatgaagactctgctgtttacagctttgaggccttggtggatgggaagaaaattgtagcagaattacaagacaagatgaaggcccgcaccaactatgagaaagccatctcccagggccaccaggccttcttattggagggggacagcagctccagggatgtcttctcttgcaatgtgggtaacctccaacctgggtcgaaggcggcagtcaccctgaagtatgtgcaggagctgcctctggaagcagatggggctctgcgctttgtgctcccagctgtcctgaatcctagataccagttctctgggtcgtctaaggacagttgccttaatgtgaagactcctatagtccctgtggaggacctgccctacacactcagcatggtcgccaccatagattcccagcatggcattgagaaggtccaatccaactgccccttgagtcctaccgagtacctaggagaggacaagacttctgctcaggtttccctggctgctggacacaagtttgatcgggacgtggaactcctgatttactacaatgaggtgcatacccccagcgtggttttggagatggggatgcctaacatgaagccaggtcatttgatgggagatccatctgcaatggtgagtttctatccaaatatcccagaagatcaaccatcaaatacctgtggagagtttatctttctcatggaccgctcgggaagtatgcagagccccatgagtagccaggatacatctcagctgcgaatacaggcagccaaggaaacactgattttgctgctgaagagtttacctataggctgttatttcaacatctatggatttggctcttcctatgaggcatgctttccggagagtgtgaagtacactcagcaaacaatggaggaggctctggggagagtgaagcttatgcaggccgacctagggggcactgaaatcttggcaccactccagaacatttacaggggaccctccatcccaggccaccccctacagctttttgtctttacagatggagaagttacagacacgtttagtgtaattaaagaagttaggatcaacagacagaaacacaggtaggaagaaaatgtgatttccgggtgattggtgctgagtagtgacacacagactctagtgctacatgatgccggtgttgaccttccttcaagaggaccaaatgatttcagaatttagttttagcagctgaaaatttatttctccctgtaaacgttaaaaacagttttccaaataacatcaacaacacagcaaaaccattgtttcttattctttctaaactacaacgaacacaagaattgaatagtaagatgttaattttttttactataaacatttttagagaagtaaaacatgctgaaaactacacaaattataagcatacaactggactcattatcacagtgaatgcactgtgtgatcgccacataggtaaaaactggaatggtcgtaggcctctccatctgtacccttttccatcatgtcctattccctgtcactacacactaaaactttcctgacttacaataccatgggttatttatgcttgtttttgaatgaaaataaataagttatacagtatgctt

SEQ ID NO: 6205 - DNA, 8905 bp, Homo sapiens
cggggcggggacagcccggcgggtctctcctcccccgcgccccgggcctccagaggggcgggaggggaccgtcccatataagccccggctcccggcgctcggacgcccgcgccggctgtgctgcacagggggaggagagggaaccccaggcgcgagcgggaagaggggacctgcagccacaacttctctggtcctctgcatcccttctgtccctccacccgtccccttccccaccctctggcccccaccttcttggaggcgacaacccccgggaggcattagaagggatttttcccgcaggttgcgaagggaagcaaacttggtggcaacttgcctcccggtgcgggcgtctctcccccaccgtctcaacatgcttaggggtccggggcccgggctgctgctgctggccgtccagtgcctggggacagcggtgccctccacgggagcctcgaagagcaagaggcaggctcagcaaatggttcagccccagtccccggtggctgtcagtcaaagcaagcccggttgttatgacaatggaaaacactatcagataaatcaacagtgggagcggacctacctaggcaatgcgttggtttgtacttgttatggaggaagccgaggttttaactgcgagagtaaacctgaagctgaagagacttgctttgacaagtacactgggaacacttaccgagtgggtgacacttatgagcgtcctaaagactccatgatctgggactgtacctgcatcggggctgggcgagggagaataagctgtaccatcgcaaaccgctgccatgaagggggtcagtcctacaagattggtgacacctggaggagaccacatgagactggtggttacatgttagagtgtgtgtgtcttggtaatggaaaaggagaatggacctgcaagcccatagctgagaagtgttttgatcatgctgctgggacttcctatgtggtcggagaaacgtgggagaagccctaccaaggctggatgatggtagattgtacttgcctgggagaaggcagcggacgcatcacttgcacttctagaaatagatgcaacgatcaggacacaaggacatcctatagaattggagacacctggagcaagaaggataatcgaggaaacctgctccagtgcatctgcacaggcaacggccgaggagagtggaagtgtgagaggcacacctctgtgcagaccacatcgagcggatctggccccttcaccgatgttcgtgcagctgtttaccaaccgcagcctcacccccagcctcctccctatggccactgtgtcacagacagtggtgtggtctactctgtggggatgcagtggctgaagacacaaggaaataagcaaatgctttgcacgtgcctgggcaacggagtcagctgccaagagacagctgtaacccagacttacggtggcaactcaaatggagagccatgtgtcttaccattcacctacaatggcaggacgttctactcctgcaccacagaagggcgacaggacggacatctttggtgcagcacaacttcgaattatgagcaggaccagaaatactctttctgcacagaccacactgttttggttcagactcgaggaggaaattccaatggtgccttgtgccacttccccttcctatacaacaaccacaattacactgattgcacttctgagggcagaagagacaacatgaagtggtgtgggaccacacagaactatgatgccgaccagaagtttgggttctgccccatggctgcccacgaggaaatctgcacaaccaatgaaggggtcatgtaccgcattggagatcagtgggataagcagcatgacatgggtcacatgatgaggtgcacgtgtgttgggaatggtcgtggggaatggacatgcattgcctactcgcagcttcgagatcagtgcattgttgatgacatcacttacaatgtgaacgacacattccacaagcgtcatgaagaggggcacatgctgaactgtacatgcttcggtcagggtcggggcaggtggaagtgtgatcccgtcgaccaatgccaggattcagagactgggacgttttatcaaattggagattcatgggagaagtatgtgcatggtgtcagataccagtgctactgctatggccgtggcattggggagtggcattgccaacctttacagacctatccaagctcaagtggtcctgtcgaagtatttatcactgagactccgagtcagcccaactcccaccccatccagtggaatgcaccacagccatctcacatttccaagtacattctcaggtggagacctaaaaattctgtaggccgttggaaggaagctaccataccaggccacttaaactcctacaccatcaaaggcctgaagcctggtgtggtatacgagggccagctcatcagcatccagcagtacggccaccaagaagtgactcgctttgacttcaccaccaccagcaccagcacacctgtgaccagcaacaccgtgacaggagagacgactcccttttctcctcttgtggccacttctgaatctgtgaccgaaatcacagccagtagctttgtggtctcctgggtctcagcttccgacaccgtgtcgggattccgggtggaatatgagctgagtgaggagggagatgagccacagtacctggatcttccaagcacagccacttctgtgaacatccctgacctgcttcctggccgaaaatacattgtaaatgtctatcagatatctgaggatggggagcagagtttgatcctgtctacttcacaaacaacagcgcctgatgcccctcctgacacgactgtggaccaagttgatgacacctcaattgttgttcgctggagcagaccccaggctcccatcacagggtacagaatagtctattcgccatcagtagaaggtagcagcacagaactcaaccttcctgaaactgcaaactccgtcaccctcagtgacttgcaacctggtgttcagtataacatcactatctatgctgtggaagaaaatcaagaaagtacacctgttgtcattcaacaagaaaccactggcaccccacgctcagatacagtgccctctcccagggacctgcagtttgtggaagtgacagacgtgaaggtcaccatcatgtggacaccgcctgagagtgcagtgaccggctaccgtgtggatgtgatccccgtcaacctgcctggcgagcacgggcagaggctgcccatcagcaggaacacctttgcagaagtcaccgggctgtcccctggggtcacctattacttcaaagtctttgcagtgagccatgggagggagagcaagcctctgactgctcaacagacaaccaaactggatgctcccactaacctccagtttgtcaatgaaactgattctactgtcctggtgagatggactccacctcgggcccagataacaggataccgactgaccgtgggccttacccgaagaggacagcccaggcagtacaatgtgggtccctctgtctccaagtacccactgaggaatctgcagcctgcatctgagtacaccgtatccctcgtggccataaagggcaaccaagagagccccaaagccactggagtctttaccacactgcagcctgggagctctattccaccttacaacaccgaggtgactgagaccaccattgtgatcacatggacgcctgctccaagaattggttttaagctgggtgtacgaccaagccagggaggagaggcaccacgagaagtgacttcagactcaggaagcatcgttgtgtccggcttgactccaggagtagaatacgtctacaccatccaagtcctgagagatggacaggaaagagatgcgccaattgtaaacaaagtggtgacaccattgtctccaccaacaaacttgcatctggaggcaaaccctgacactggagtgctcacagtctcctgggagaggagcaccaccccagacattactggttatagaattaccacaacccctacaaacggccagcagggaaattctttggaagaagtggtccatgctgatcagagctcctgcacttttgataacctgagtcccggcctggagtacaatgtcagtgtttacactgtcaaggatgacaaggaaagtgtccctatctctgataccatcatcccagaggtgccccaactcactgacctaagctttgttgatataaccgattcaagcatcggcctgaggtggaccccgctaaactcttccaccattattgggtaccgcatcacagtagttgcggcaggagaaggtatccctatttttgaagattttgtggactcctcagtaggatactacacagtcacagggctggagccgggcattgactatgatatcagcgttatcactctcattaatggcggcgagagtgcccctactacactgacacaacaaacggctgttcctcctcccactgacctgcgattcaccaacattggtccagacaccatgcgtgtcacctgggctccacccccatccattgatttaaccaacttcctggtgcgttactcacctgtgaaaaatgaggaagatgttgcagagttgtcaatttctccttcagacaatgcagtggtcttaacaaatctcctgcctggtacagaatatgtagtgagtgtctccagtgtctacgaacaacatgagagcacacctcttagaggaagacagaaaacaggtcttgattccccaactggcattgacttttctgatattactgccaactcttttactgtgcactggattgctcctcgagccaccatcactggctacaggatccgccatcatcccgagcacttcagtgggagacctcgagaagatcgggtgccccactctcggaattccatcaccctcaccaacctcactccaggcacagagtatgtggtcagcatcgttgctcttaatggcagagaggaaagtcccttattgattggccaacaatcaacagtttctgatgttccgagggacctggaagttgttgctgcgacccccaccagcctactgatcagctgggatgctcctgctgtcacagtgagatattacaggatcacttacggagagacaggaggaaatagccctgtccaggagttcactgtgcctgggagcaagtctacagctaccatcagcggccttaaacctggagttgattataccatcactgtgtatgctgtcactggccgtggagacagccccgcaagcagcaagccaatttccattaattaccgaacagaaattgacaaaccatcccagatgcaagtgaccgatgttcaggacaacagcattagtgtcaagtggctgccttcaagttcccctgttactggttacagagtaaccaccactcccaaaaatggaccaggaccaacaaaaactaaaactgcaggtccagatcaaacagaaatgactattgaaggcttgcagcccacagtggagtatgtggttagtgtctatgctcagaatccaagcggagagagtcagcctctggttcagactgcagtaaccaacattgatcgccctaaaggactggcattcactgatgtggatgtcgattccatcaaaattgcttgggaaagcccacaggggcaagtttccaggtacagggtgacctactcgagccctgaggatggaatccatgagctattccctgcacctgatggtgaagaagacactgcagagctgcaaggcctcagaccgggttctgagtacacagtcagtgtggttgccttgcacgatgatatggagagccagcccctgattggaacccagtccacagctattcctgcaccaactgacctgaagttcactcaggtcacacccacaagcctgagcgcccagtggacaccacccaatgttcagctcactggatatcgagtgcgggtgacccccaaggagaagaccggaccaatgaaagaaatcaaccttgctcctgacagctcatccgtggttgtatcaggacttatggtggccaccaaatatgaagtgagtgtctatgctcttaaggacactttgacaagcagaccagctcagggagttgtcaccactctggagaatgtcagcccaccaagaagggctcgtgtgacagatgctactgagaccaccatcaccattagctggagaaccaagactgagacgatcactggcttccaagttgatgccgttccagccaatggccagactccaatccagagaaccatcaagccagatgtcagaagctacaccatcacaggtttacaaccaggcactgactacaagatctacctgtacaccttgaatgacaatgctcggagctcccctgtggtcatcgacgcctccactgccattgatgcaccatccaacctgcgtttcctggccaccacacccaattccttgctggtatcatggcagccgccacgtgccaggattaccggctacatcatcaagtatgagaagcctgggtctcctcccagagaagtggtccctcggccccgccctggtgtcacagaggctactattactggcctggaaccgggaaccgaatatacaatttatgtcattgccctgaagaataatcagaagagcgagcccctgattggaaggaaaaagacagacgagcttccccaactggtaacccttccacaccccaatcttcatggaccagagatcttggatgttccttccacagttcaaaagacccctttcgtcacccaccctgggtatgacactggaaatggtattcagcttcctggcacttctggtcagcaacccagtgttgggcaacaaatgatctttgaggaacatggttttaggcggaccacaccgcccacaacggccacccccataaggcataggccaagaccatacccgccgaatgtaggtgaggaaatccaaattggtcacatccccagggaagatgtagactatcacctgtacccacacggtccgggactcaatccaaatgcctctacaggacaagaagctctctctcagacaaccatctcatgggccccattccaggacacttctgagtacatcatttcatgtcatcctgttggcactgatgaagaacccttacagttcagggttcctggaacttctaccagtgccactctgacaggcctcaccagaggtgccacctacaacgtcatagtggaggcactgaaagaccagcagaggcataaggttcgggaagaggttgttaccgtgggcaactctgtcaacgaaggcttgaaccaacctacggatgactcgtgctttgacccctacacagtttcccattatgccgttggagatgagtgggaacgaatgtctgaatcaggctttaaactgttgtgccagtgcttaggctttggaagtggtcatttcagatgtgattcatctagatggtgccatgacaatggtgtgaactacaagattggagagaagtgggaccgtcagggagaaaatggccagatgatgagctgcacatgtcttgggaacggaaaaggagaattcaagtgtgaccctcatgaggcaacgtgttatgatgatgggaagacataccacgtaggagaacagtggcagaaggaatatctcggtgccatttgctcctgcacatgctttggaggccagcggggctggcgctgtgacaactgccgcagacctgggggtgaacccagtcccgaaggcactactggccagtcctacaaccagtattctcagagataccatcagagaacaaacactaatgttaattgcccaattgagtgcttcatgcctttagatgtacaggctgacagagaagattcccgagagtaaatcatctttccaatccagaggaacaagcatgtctctctgccaagatccatctaaactggagtgatgttagcagacccagcttagagttcttctttctttcttaagccctttgctctggaggaagttctccagcttcagctcaactcacagcttctccaagcatcaccctgggagtttcctgagggttttctcataaatgagggctgcacattgcctgttctgcttcgaagtattcaataccgctcagtattttaaatgaagtgattctaagatttggtttgggatcaataggaaagcatatgcagccaaccaagatgcaaatgttttgaaatgatatgaccaaaattttaagtaggaaagtcacccaaacacttctgctttcacttaagtgtctggcccgcaatactgtaggaacaagcatgatcttgttactgtgatattttaaatatccacagtactcactttttccaaatgatcctagtaattgcctagaaatatctttctcttacctgttatttatcaatttttcccagtatttttatacggaaaaaattgtattgaaaacacttagtatgcagttgataagaggaatttggtataattatggtgggtgattattttttatactgtatgtgccaaagctttactactgtggaaagacaactgttttaataaaagatttacattccacaacttgaagttcatctatttgatataagacaccttcgggggaaataattcctgtgaatattctttttcaattcagcaaacatttgaaaatctatgatgtgcaagtctaattgttgatttcagtacaagattttctaaatcagttgctacaaaaactgattggtttttgtcacttcatctcttcactaatggagatagctttacactttctgctttaatagatttaagtggaccccaatatttattaaaattgctagtttaccgttcagaagtataatagaaataatctttagttgctcttttctaaccattgtaattcttcccttcttccctccacctttccttcattgaataaacctctgttcaaagagattgcctgcaagggaaataaaaatgactaagatattaaaa

SEQ ID NO: 6206 - DNA, 7918 bp, Homo sapiens
gcccgcgccggctgtgctgcacagggggaggagagggaaccccaggcgcgagcgggaagaggggacctgcagccacaacttctctggtcctctgcatcccttctgtccctccacccgtccccttccccaccctctggcccccaccttcttggaggcgacaacccccgggaggcattagaagggatttttcccgcaggttgcgaagggaagcaaacttggtggcaacttgcctcccggtgcgggcgtctctcccccaccgtctcaacatgcttaggggtccggggcccgggctgctgctgctggccgtccagtgcctggggacagcggtgccctccacgggagcctcgaagagcaagaggcaggctcagcaaatggttcagccccagtccccggtggctgtcagtcaaagcaagcccggttgttatgacaatggaaaacactatcagataaatcaacagtgggagcggacctacctaggcaatgcgttggtttgtacttgttatggaggaagccgaggttttaactgcgagagtaaacctgaagctgaagagacttgctttgacaagtacactgggaacacttaccgagtgggtgacacttatgagcgtcctaaagactccatgatctgggactgtacctgcatcggggctgggcgagggagaataagctgtaccatcgcaaaccgctgccatgaagggggtcagtcctacaagattggtgacacctggaggagaccacatgagactggtggttacatgttagagtgtgtgtgtcttggtaatggaaaaggagaatggacctgcaagcccatagctgagaagtgttttgatcatgctgctgggacttcctatgtggtcggagaaacgtgggagaagccctaccaaggctggatgatggtagattgtacttgcctgggagaaggcagcggacgcatcacttgcacttctagaaatagatgcaacgatcaggacacaaggacatcctatagaattggagacacctggagcaagaaggataatcgaggaaacctgctccagtgcatctgcacaggcaacggccgaggagagtggaagtgtgagaggcacacctctgtgcagaccacatcgagcggatctggccccttcaccgatgttcgtgcagctgtttaccaaccgcagcctcacccccagcctcctccctatggccactgtgtcacagacagtggtgtggtctactctgtggggatgcagtggctgaagacacaaggaaataagcaaatgctttgcacgtgcctgggcaacggagtcagctgccaagagacagctgtaacccagacttacggtggcaactcaaatggagagccatgtgtcttaccattcacctacaatggcaggacgttctactcctgcaccacagaagggcgacaggacggacatctttggtgcagcacaacttcgaattatgagcaggaccagaaatactctttctgcacagaccacactgttttggttcagactcgaggaggaaattccaatggtgccttgtgccacttccccttcctatacaacaaccacaattacactgattgcacttctgagggcagaagagacaacatgaagtggtgtgggaccacacagaactatgatgccgaccagaagtttgggttctgccccatggctgcccacgaggaaatctgcacaaccaatgaaggggtcatgtaccgcattggagatcagtgggataagcagcatgacatgggtcacatgatgaggtgcacgtgtgttgggaatggtcgtggggaatggacatgcattgcctactcgcagcttcgagatcagtgcattgttgatgacatcacttacaatgtgaacgacacattccacaagcgtcatgaagaggggcacatgctgaactgtacatgcttcggtcagggtcggggcaggtggaagtgtgatcccgtcgaccaatgccaggattcagagactgggacgttttatcaaattggagattcatgggagaagtatgtgcatggtgtcagataccagtgctactgctatggccgtggcattggggagtggcattgccaacctttacagacctatccaagctcaagtggtcctgtcgaagtatttatcactgagactccgagtcagcccaactcccaccccatccagtggaatgcaccacagccatctcacatttccaagtacattctcaggtggagacctaaaaattctgtaggccgttggaaggaagctaccataccaggccacttaaactcctacaccatcaaaggcctgaagcctggtgtggtatacgagggccagctcatcagcatccagcagtacggccaccaagaagtgactcgctttgacttcaccaccaccagcaccagcacacctgtgaccagcaacaccgtgacaggagagacgactcccttttctcctcttgtggccacttctgaatctgtgaccgaaatcacagccagtagctttgtggtctcctgggtctcagcttccgacaccgtgtcgggattccgggtggaatatgagctgagtgaggagggagatgagccacagtacctggatcttccaagcacagccacttctgtgaacatccctgacctgcttcctggccgaaaatacattgtaaatgtctatcagatatctgaggatggggagcagagtttgatcctgtctacttcacaaacaacagcgcctgatgcccctcctgacacgactgtggaccaagttgatgacacctcaattgttgttcgctggagcagaccccaggctcccatcacagggtacagaatagtctattcgccatcagtagaaggtagcagcacagaactcaaccttcctgaaactgcaaactccgtcaccctcagtgacttgcaacctggtgttcagtataacatcactatctatgctgtggaagaaaatcaagaaagtacacctgttgtcattcaacaagaaaccactggcaccccacgctcagatacagtgccctctcccagggacctgcagtttgtggaagtgacagacgtgaaggtcaccatcatgtggacaccgcctgagagtgcagtgaccggctaccgtgtggatgtgatccccgtcaacctgcctggcgagcacgggcagaggctgcccatcagcaggaacacctttgcagaagtcaccgggctgtcccctggggtcacctattacttcaaagtctttgcagtgagccatgggagggagagcaagcctctgactgctcaacagacaaccaaactggatgctcccactaacctccagtttgtcaatgaaactgattctactgtcctggtgagatggactccacctcgggcccagataacaggataccgactgaccgtgggccttacccgaagaggacagcccaggcagtacaatgtgggtccctctgtctccaagtacccactgaggaatctgcagcctgcatctgagtacaccgtatccctcgtggccataaagggcaaccaagagagccccaaagccactggagtctttaccacactgcagcctgggagctctattccaccttacaacaccgaggtgactgagaccaccattgtgatcacatggacgcctgctccaagaattggttttaagctgggtgtacgaccaagccagggaggagaggcaccacgagaagtgacttcagactcaggaagcatcgttgtgtccggcttgactccaggagtagaatacgtctacaccatccaagtcctgagagatggacaggaaagagatgcgccaattgtaaacaaagtggtgacaccattgtctccaccaacaaacttgcatctggaggcaaaccctgacactggagtgctcacagtctcctgggagaggagcaccaccccagacattactggttatagaattaccacaacccctacaaacggccagcagggaaattctttggaagaagtggtccatgctgatcagagctcctgcacttttgataacctgagtcccggcctggagtacaatgtcagtgtttacactgtcaaggatgacaaggaaagtgtccctatctctgataccatcatcccagctgttcctcctcccactgacctgcgattcaccaacattggtccagacaccatgcgtgtcacctgggctccacccccatccattgatttaaccaacttcctggtgcgttactcacctgtgaaaaatgaggaagatgttgcagagttgtcaatttctccttcagacaatgcagtggtcttaacaaatctcctgcctggtacagaatatgtagtgagtgtctccagtgtctacgaacaacatgagagcacacctcttagaggaagacagaaaacaggtcttgattccccaactggcattgacttttctgatattactgccaactcttttactgtgcactggattgctcctcgagccaccatcactggctacaggatccgccatcatcccgagcacttcagtgggagacctcgagaagatcgggtgccccactctcggaattccatcaccctcaccaacctcactccaggcacagagtatgtggtcagcatcgttgctcttaatggcagagaggaaagtcccttattgattggccaacaatcaacagtttctgatgttccgagggacctggaagttgttgctgcgacccccaccagcctactgatcagctgggatgctcctgctgtcacagtgagatattacaggatcacttacggagagacaggaggaaatagccctgtccaggagttcactgtgcctgggagcaagtctacagctaccatcagcggccttaaacctggagttgattataccatcactgtgtatgctgtcactggccgtggagacagccccgcaagcagcaagccaatttccattaattaccgaacagaaattgacaaaccatcccagatgcaagtgaccgatgttcaggacaacagcattagtgtcaagtggctgccttcaagttcccctgttactggttacagagtaaccaccactcccaaaaatggaccaggaccaacaaaaactaaaactgcaggtccagatcaaacagaaatgactattgaaggcttgcagcccacagtggagtatgtggttagtgtctatgctcagaatccaagcggagagagtcagcctctggttcagactgcagtaaccaacattgatcgccctaaaggactggcattcactgatgtggatgtcgattccatcaaaattgcttgggaaagcccacaggggcaagtttccaggtacagggtgacctactcgagccctgaggatggaatccatgagctattccctgcacctgatggtgaagaagacactgcagagctgcaaggcctcagaccgggttctgagtacacagtcagtgtggttgccttgcacgatgatatggagagccagcccctgattggaacccagtccacagctattcctgcaccaactgacctgaagttcactcaggtcacacccacaagcctgagcgcccagtggacaccacccaatgttcagctcactggatatcgagtgcgggtgacccccaaggagaagaccggaccaatgaaagaaatcaaccttgctcctgacagctcatccgtggttgtatcaggacttatggtggccaccaaatatgaagtgagtgtctatgctcttaaggacactttgacaagcagaccagctcagggagttgtcaccactctggagaatgtcagcccaccaagaagggctcgtgtgacagatgctactgagaccaccatcaccattagctggagaaccaagactgagacgatcactggcttccaagttgatgccgttccagccaatggccagactccaatccagagaaccatcaagccagatgtcagaagctacaccatcacaggtttacaaccaggcactgactacaagatctacctgtacaccttgaatgacaatgctcggagctcccctgtggtcatcgacgcctccactgccattgatgcaccatccaacctgcgtttcctggccaccacacccaattccttgctggtatcatggcagccgccacgtgccaggattaccggctacatcatcaagtatgagaagcctgggtctcctcccagagaagtggtccctcggccccgccctggtgtcacagaggctactattactggcctggaaccgggaaccgaatatacaatttatgtcattgccctgaagaataatcagaagagcgagcccctgattggaaggaaaaagacagtcaacgaaggcttgaaccaacctacggatgactcgtgctttgacccctacacagtttcccattatgccgttggagatgagtgggaacgaatgtctgaatcaggctttaaactgttgtgccagtgcttaggctttggaagtggtcatttcagatgtgattcatctagatggtgccatgacaatggtgtgaactacaagattggagagaagtgggaccgtcagggagaaaatggccagatgatgagctgcacatgtcttgggaacggaaaaggagaattcaagtgtgaccctcatgaggcaacgtgttatgatgatgggaagacataccacgtaggagaacagtggcagaaggaatatctcggtgccatttgctcctgcacatgctttggaggccagcggggctggcgctgtgacaactgccgcagacctgggggtgaacccagtcccgaaggcactactggccagtcctacaaccagtattctcagagataccatcagagaacaaacactaatgttaattgcccaattgagtgcttcatgcctttagatgtacaggctgacagagaagattcccgagagtaaatcatctttccaatccagaggaacaagcatgtctctctgccaagatccatctaaactggagtgatgttagcagacccagcttagagttcttctttctttcttaagccctttgctctggaggaagttctccagcttcagctcaactcacagcttctccaagcatcaccctgggagtttcctgagggttttctcataaatgagggctgcacattgcctgttctgcttcgaagtattcaataccgctcagtattttaaatgaagtgattctaagatttggtttgggatcaataggaaagcatatgcagccaaccaagatgcaaatgttttgaaatgatatgaccaaaattttaagtaggaaagtcacccaaacacttctgctttcacttaagtgtctggcccgcaatactgtaggaacaagcatgatcttgttactgtgatattttaaatatccacagtactcactttttccaaatgatcctagtaattgcctagaaatatctttctcttacctgttatttatcaatttttcccagtatttttatacggaaaaaattgtattgaaaacacttagtatgcagttgataagaggaatttggtataattatggtgggtgattattttttatactgtatgtgccaaagctttactactgtggaaagacaactgttttaataaaagatttacattccacaacttgaagttcatctatttgatataagacaccttcgggggaaataattcctgtgaatattctttttcaattcagcaaacatttgaaaatctatgatgtgcaagtctaattgttgatttcagtacaagattttctaaatcagttgctacaaaaactgattggtttttgtcacttcatctcttcactaatggagatagctttacactttctgctttaatagatttaagtggaccccaatatttattaaaattgctagtttaccgttcagaagtataatagaaataatctttagttgctcttttctaaccattgtaattcttcccttcttccctccacctttccttcattgaataaacctctgttcaaagagattgcctgcaagggaaataaaaatgactaagatatt

SEQ ID NO: 6207 - DNA, 2112 bp, Homo sapiens; identical to SEQ ID NO: 2166

SEQ ID NO: 6208 - DNA, 873 bp, Homo sapiens
gcggctgcacggacaagagcggaggcctggagaaatcaacttttcagtaattggtcagtatgtggattatcttgtgaaagaacagggagtgaagaacatttttgtgaatggcacaacaggagaaggcctgtccctgagcgtctcagagcgtcgccaggttgcagaggagtgggtgacaaaagggaaggacaagtgagtggctgcatgaggataaaaatgccctttggcaacagctgtattcagtgagcctcttccccagaggatacgccctccctgcttcctggtcagagccggggcttgaggtcagctggtgggaagatgagcagggcccccgggatcctggcttcttggagaagagccccctccctttctgtgcagaagggcagccaaactgctagacacacctgccacccagaggttccgctgggaaactgcttcttacctgtctacaaggccagtcccctcacagttacccgtctttgggctgaaaggctggatcaggtgataattcacgtaggagcactgagcttgaaggagtcacaggaactggcccaacatgcagcagaaataggagctgatggcatcgctgtcattgcaccgttcttcctcaagccatggaccaaagatatcctgattaatttcctaaaggaagtggctgctgccgcccctgccctgccattttattactatcacattcctgccttgacaggggtaaagattcgtgctgaggagttgttggatgggattctggataagatccccaccttccaagggctgaaattcagtgatacagatctcttagacttcgggcaatgtgttgatcagaatcgccagcaacagtttgctttcctttttggggtggatgagcatctc

SEQ ID NO: 6209 - DNA, 6752 bp, Homo sapiens
aaggaaaccagcccaatagtggacctaacaccccaataatgggaactggcgactcgaaacacacggtttcagtatccccaggcgccttaacaataagcagcgggttacagaggaaatcgagtctctccgtggcgcttccaggctgaggacccagcgcctaccggccgagcaccccctagggcagaggggcgagggagacccgcgggaaggggcagcaagccgcctgattgacagcccgaaatctgatcttgtgaaagagacgcggagccaatgggaggcagcgatccatcagtttggattggaggcccctggaggagaagtagaggaaaaaccaccgaattgagctctgtcagaggcgctttcggcttccaagggggaagtgctgggctataattaatgtttttattaaatttggagggaagtttttgcagcctttcgcctagcgtggccttcagtcccgttaggtgcaaagcaagtctcgttgatcgccattgctagttttgcacacgtttgcgaatcagagctgcccggggtacaccgaccgcgcagggaaacatcgagagtgtaaataaatacatcgcctcttgttcggatttttgctactaccgaaaatatgtaaattgtgaactctgttggctctctttggatccaggttgatagaagtccagatcctgaggaaatctccagctaaatgctcaaaatataaaatactgagctgagatttgcgaagagcagcagcatggatggattttatgaccagcaagtgccttacatggtcaccaatagtcagcgtgggagaaattgtaacgagaaaccaacaaatgtcaggaaaagaaaattcattaacagagatctggctcatgattcagaagaactctttcaagatctaagtcaattacaggaaacatggcttgcagaagtggcttttcatggcctgccactgaaaatcaagaaagaaccccacagtccatgttcagaaatcagctctgcctgcagtcaagaacagccctttaaattcagctatggagaaaagtgcctgtacaatgtcagtgcctatgatcagaagccacaagtgggaatgaggccctccaacccccccacaccatccagcacgccagtgtccccactgcatcatgcatctccaaactcaactcatacaccgaaacctgaccgggccttcccagctcacctccctccatcgcagtccataccagatagcagctaccccatggaccacagatttcgccgccagctttctgaaccctgtaactcctttcctcctttgccgacgatgccaagggaaggacgtcctatgtaccaacgccagatgtctgagccaaacatccccttcccaccacaaggctttaagcaggagtaccacgacccagtgtatgaacacaacaccatggttggcagtgcggccagccaaagctttccccctcctctgatgattaaacaggaacccagagattttgcatatgactcagaagtgcctagctgccactccatttatatgaggcaagaaggcttcctggctcatcccagcagaacagaaggctgtatgtttgaaaagggccccaggcagttttatgatgacacctgtgttgtcccagaaaaattcgatggagacatcaaacaagagccaggaatgtatcgggaaggacccacataccaacggcgaggatcacttcagctctggcagtttttggtagctcttctggatgacccttcaaattctcattttattgcctggactggtcgaggcatggaatttaaactgattgagcctgaagaggtggcccgacgttggggcattcagaaaaacaggccagctatgaactatgataaacttagccgttcactccgctattactatgagaaaggaattatgcaaaaggtggctggagagagatatgtctacaagtttgtgtgtgatccagaagcccttttctccatggcctttccagataatcagcgtccactgctgaagacagacatggaacgtcacatcaacgaggaggacacagtgcctctttctcactttgatgagagcatggcctacatgccggaagggggctgctgcaacccccacccctacaacgaaggctacgtgtattaacacaagtgacagtcaagcagggcgtttttgcgcttttccttttttctgcaagatacagagaattgctgaatctttgttttatttctgttgtttgtattttatttttaaataataatacacaaaaaggggcttttcctgttgcattattctatggtctgccatggactgtgcactttatttgagggtgggtgggagtaatctaaacatttattctgtgtaacaggaagctaatgggtgaatgggcagagggatttggggattactttttacttaggcttgggatggggtcctacaagttttgagtatgatgaaactatatcatgtctgtttgatttcataacaacataagataatgtttattttatcggggtatctatggtacagttaatttcacgttgtgtaaatatccacttggagactatttgccttgggcattttcccctgtcatttatgagtctctgcaggtgtacaaaaaaaccccaatctactgtaaatggcagtttaattgttagaaatgactgtttttgcaccacttgtaaaaaggtatttagcgattgcatttgctgtttgttgttttattttgctttatatatgacttgcagaggataaccataaaatgggtaattctctctgaagttgaataatcaccatgactgtaaatgaggggcacaattttggactctggcgccaaactgagtcataggccagtagcattacgtgtatctggtgccaccttgctgtttagatacaaatcataccgtcttttaaatattttgaagcccatttcagttaaataatgacatgtcatggtcctttggaatcttcatttaaatgttaaatctggaatcaaaatgaagcaaaaaatatctgtctccttttcactttcttcagtacataaatacattatttaatcaataagaattaactgtactaaatcatgtattatgctgttctagttacagcaaacactctttaagaaaaatatccaatacactaaataggtactatagtaatttttagacatggtacccattgatatgcatttaaaccttttactgctgtgttatgttgataacatatataaatattagataatgctaatgcttctgctgctgtcttttctgtaatattctctttcatgctgaatttactatgaccatttataagcagtgcagttaactacagatagcatttcaggacaaaatagatgactcaaaccatttattgcttaaaaaatagcttacgccatgctatgctataagcagcttttatgcacattgacaaatgaagagtaagcttcagcttgctaaaggaaactgtggaaccttttgtaacttttggtgatatggaaaattatttacaaaccgtcaaagaatatgaggaagttgctgtatgacatagtgctggcactgatattatccatcatctctttttggacacttctgtaaatgtgattggattgtttgaaagaagatttaaagtttcaaagttttttgttctgtttttgctttgcatttggagaaaatattgaaagcagggtatgttgtttcattcaccttgaaaaaaccatgagtaaatggggatatagaatctctgaatagctcgctaaaagattcaagcaagggacatgaattttgttccatctatcaataatatccagaagaacaacttttttaaagagtctatagcaaaaagcaaaaaaaaaaaaaaattctaaacacaaagtcaaaataaacctattgtaaaagcatttcgtgatgagcatgaaaaagattgtttaaagatgatccccccagctacccattttccaaaactacacagatcacagctcatttctctaagtggagcagttatcaagaaacccaaacaccaaaattgctactcttcacatttaatcctacaaaaagtactccaatttcaaaatatgtatgtaacctgcgatttcaatgattgttgttcatatacatcatgtattattttggcccattttgggcctaaaaaagaaaactatgccttaaaaatcagaaccttttctccccactatgcttatgtggccatctacagcacttagaataaaaacagatgttaaaatattcagtgaaagttttattggaaaaaggaattgagatatataattgagatttggtgaaattgaaggagaaaatttaagtgagtctttaaaatatattctgaatgaaaactgtattgaggattcatttttgttccttttttttctttttctcttttctcctttttcttctttttaatagtctagttttagtcagtcagtgaggaagaattgggccatgctaacgttatcacaagagaacaatggcagaaatggtattagttatataatatttaaggacaaactatatgttttgctgttttaacgtagtgactcactgaactaaatacataattgaccaacattaagtgtatttccaatacagaagggttgaaaatattacattataaactcttttgaaaaatgtatctaaaattttttaagttctgttttgattccactttttggttgagtttttatgtttttgttttcaggtagattaataaatctggcagctgatttctgcaagattcttgtgttttgaatttctcattgaattggctactcaaacatagaaatcatttgttaatgatgtaatgtcttctctcagcttttatcttcactgctgtttgctgtctcttgatgatgacatgttaatacccaatagattaattgcaacaaacacttatactcaaataactaagtaaaaataatttttcttgttatgtccatgaaaagtgcttcagaataaaaatccacaagactgacagtgcagaacatttttctcaaatcatgggcggatcttggaggtctagtttcccgtagatgctgtaaccaattaccacaacttcagtaatttacacaaatttatcttatagttctggaggcagaagttcaaaagaagccttaagagactaaaaccaagatgtccttaggtctggttccttctggaggctccaggggagattcttccagctttcacttctagagtctgctgacattccttggctcctggctacatcacttcaatctctgcttccatggtcacatactcttctactatagtcaaatttccttcctgcctcttataaggatgcttgtgattacatttaggggatgctcagataatccaggacaatctctccatctcaagatccttaacttaatgacgtgtgccaagtccctttggctagataattattcataggtcccagggattaggacatggatgtaaggggtgagggcagggctgttattcagaacaccgcacggaggaggaagactgtgtagcaaagactctaattgatttactcaggaacagtggagttctgctgagggatctaggatttgaaagtactagagtttgcttttatttaccactgagatattttccccttattctgcataaataattttgaaaactttctatattaaatttcaactattccactaaaatgtctggtaatcacatcaagcctttagattattcaaatccttccccagcccccaggaaaacactaagtcatgaaacagaaaaacagaaggtatgataataatagtaataacagttaaatcagtggtctaatccagattttattttttaatacatttcttttggtgttaatatgggttactatgtgatcttatcatttgctagtgattattacttattaggtaagaacaatgtgtaaaatatgtctattactcaaaagaacaattgcaaaatgagtcaacttatctttatataaccaggaaagaaatatattgccagaagctacagaattttgccagatgatagggatttctaaaatgagccactttgtctatcatgcagccttttcagagcttgtaatgagaaaacattacagaggagaaggtcatttggatgtttgttacttggaatcctagaaaacaaaaactaaaatttaaaaataagaagtgagtaagctattttccatttgcgatttggtatggagaagagaggaaatagaattattaaaaaaatacaaattgggtaaaagtgatggtggaaaaaatataaagaaggcaaatgtacatattaagcaattctactaagaattggaaaaatcaagtttcaaaaagatggtaatagttgggcatgatactagaaaatttcacccagtttattcagagctcaactagtacttttaggacttctttttttatatacatgagactcactttgacatacttaaaaaaaaaacagtttatggaaagtacagtttaagaggagaatttgattagactaagtggatatctttatagaaatattaatgatttcagaattttcagttacaagtgtatataccgtggctattgtttatggattcatatgtaaggtagggtcttttttgcatatagactccagtattagttactttcattctaaaattatatttatgcttctatggggaagaaaatttttaattcacttggttgtattaaaattatacttacggtttgagaaaacatgctatgaaaatcatgattatagcaaattaaatatgctcaaaatttaaatctaaaataaaagcccagaaactg

SEQ ID NO: 6210 - DNA, 2952 bp, Homo sapiens
ctcgctcggtgttcgcccgccgacgccgcacggcttgctggggctgggctcttcctcgcggaagtggggaggaggcggttgcggttagtggaccgggaccggtaggggtgctgttgccatcatggctgaccccgacccccggtaccctcgctcctcgatcgaggacgacttcaactatggcagcagcgtggcctccgccaccgtgcacatccgaatggcctttctgagaaaagtctacagcattctttctctgcaggttctcttaactacagtgacttcaacagtttttttatactttgagtctgtacggacatttgtacatgagagtcctgccttaattttgctgtttgccctcggatctctgggtttgatttttgcgttgattttaaacagacataagtatccccttaacctgtacctactttttggatttacgctgttggaagctctgactgtggcagttgttgttactttctatgatgtatatattattctgcaagctttcatactgactactacagtattttttggtttgactgtgtatactctacaatctaagaaggatttcagcaaatttggagcagggctgtttgctcttttgtggatattgtgcctgtcaggattcttgaagttttttttttatagtgagataatggagttggtcttagccgctgcaggagcccttcttttctgtggattcatcatctatgacacacactcactgatgcataaactgtcacctgaagagtacgtattagctgccatcagcctctacttggatatcatcaatctattcctgcacctgttacggtttctggaagcagttaataaaaagtaattaaaagtatctcagctcaactgaagaacaacaaaaaaaatttaatgagaaaaaaggattaaagtaattggaagcagtatatagaaactgtttcattaagtaataaagtttgaaacaatgattaaatactgttacaatctttatttgtatcatatgtaattttgagagctttaaaatcttactattctttatgatacctcatttctaaatccttgatttaggatctcagttaagagctatcaaaattctattaaaaatgcttttctggctgggcacagtggctcacgcctgtaatcccaccactttgggagaccgaggcaggtggatcacgaggtcaagaggttgagaccatcctggccaacatggtgaaaccccgtctctactaaaaatacaaaaattagctggatgtggtggcacacacctgtagtcccagctagtcaagaggctgaggccagagaatcgcttgaacctgggaggtggaggttgcattgagccaagatcacgccactgcattccagcctggtgacagagcgagactcagtctcaaaaaaaaaaaaaaaatttttcttcctaaattagccacgcatagcagttcgtttgcaattcaaaaataattttatgagtagataagaatatcagtttaccgttgtctagtgattttatctaaattttccctgaattattaagtaatattgatttggctttgattctgaagtagtagagtctttaccattataaactgtaaatctctttttgcttaaaaggaaaaaaatgtaaaagataaattccacagagaattattcagtattacattaaaatgttaatgactttttattttaaattgtactaacattaaaagttggcctgaaagtcagatattatgacaaaatttgacattaattgtttttaaagtatagatttcatttgaaattatagaatggtaatgtggttagaggacaccaaagatactgggtcatcagccattaagtatatctatttcaaaattaaaatatttgggaagtattgtcttatggtttcatttgtgttggtccacacagcatgttaggtcagtgtaccagtaaccaatgaaattttgtcaaattccctcactgtactagtttgttaggctgccataacaaagttctacagcttgggtggcttcaacaagaaatttgttttcccacagttctggaggctaaaagtccaagatcaaggtgttagcagggttggtttcctttgaggcctttctctttgatttgtagatggccatcttctccctgtgtctttaaatggccttccctctgtacttgtctgtgcccaaatttcttcttcttatgaggacaccagtcatactggattagggcccacactgaggacctcatttttccttaattatctctttcaaaacctatctccaaatacagtcacattctgaagtgctgggattaggatttcttcatgtgaattttggggggactacaactcagcccataacaccccctaagtatttcccagctattaagttgaaataaacttgtagtatcaatttaagcttgcatgatttgtagatgtaaatttgactttattatcattaactgttgaattatcaagtgtatgatgcagtgcaatcaagtttaacagcatggtgggtaagagcatctagattagaatcattgcagtccaaccaggtgcttaagtgacatttggcgaattatttatccttccttaggtcttctgcctcatcttcataatgggaataatgatgtctagcttattgggctgttataaggattaaatgagatagataaataaactaaactaagtgcttaattaatgtcagctgatggtattaataccattttctttttttttttttttttttttttttaatttatttttttattgataattcttggttgtttctcacagagggggatttggcagggtcatgggacaatagtggagggaaggtcagcagataaacaagtgaacaaaggtctctggttttcctaggcagaggaccctgcagccttccgcagtgtttgtgtccctgattacttgagattagggattggtgatgactcttaacgagcatgctgccttcaagcatctgt

SEQ ID NO: 6211 - DNA, 3431 bp, Homo sapiens
aaccgcctccattacatggtccgttcctgacgtgtacaccagcctctcagagaaaactccatccctacactcggtagtctcagaattgcgctgtccacttgtcgtgtggctctgtgtcgacactgtgcgccaccatggccgtgactgcctgtcagggcttggggttcgtggtttcactgattgggattgcgggcatcattgctgccacctgcatggaccagtggagcacccaagacttgtacaacaaccccgtaacagctgttttcaactaccaggggctgtggcgctcctgtgtccgagagagctctggcttcaccgagtgccggggctacttcaccctgctggggctgccagccatgctgcaggcagtgcgagccctgatgatcgtaggcatcgtcctgggtgccattggcctcctggtatccatctttgccctgaaatgcatccgcattggcagcatggaggactctgccaaagccaacatgacactgacctccgggatcatgttcattgtctcaggtctttgtgcaattgctggagtgtctgtgtttgccaacatgctggtgactaacttctggatgtccacagctaacatgtacaccggcatgggtgggatggtgcagactgttcagaccaggtacacatttggtgcggctctgttcgtgggctgggtcgctggaggcctcacactaattgggggtgtgatgatgtgcatcgcctgccggggcctggcaccagaagaaaccaactacaaagccgtttcttatcatgcctcaggccacagtgttgcctacaagcctggaggcttcaaggccagcactggctttgggtccaacaccaaaaacaagaagatatacgatggaggtgcccgcacagaggacgaggtacaatcttatccttccaagcacgactatgtgtaatgctctaagacctctcagcacgggcggaagaaactcccggagagctcacccaaaaaacaaggagatcccatctagatttcttcttgcttttgactcacagctggaagttagaaaagcctcgatttcatctttggagaggccaaatggtcttagcctcagtctctgtctctaaatattccaccataaaacagctgagttatttatgaattagaggctatagctcacattttcaatcctctatttctttttttaaatataactttctactctgatgagagaatgtggttttaatctctctctcacattttgatgatttagacagactccccctcttcctcctagtcaataaacccattgatgatctatttcccagcttatccccaagaaaacttttgaaaggaaagagtagacccaaagatgttattttctgctgtttgaattttgtctccccacccccaacttggctagtaataaacacttactgaagaagaagcaataagagaaagatatttgtaatctctccagcccatgatctcggttttcttacactgtgatcttaaaagttaccaaaccaaagtcattttcagtttgaggcaaccaaacctttctactgctgttgacatcttcttattacagcaacaccattctaggagtttcctgagctctccactggagtcctctttctgtcgcgggtcagaaattgtccctagatgaatgagaaaattattttttttaatttaagtcctaaatatagttaaaataaataatgttttagtaaaatgatacactatctctgtgaaatagcctcacccctacatgtggatagaaggaaatgaaaaaataattgctttgacattgtctatatggtactttgtaaagtcatgcttaagtacaaattccatgaaaagctcactgatcctaattctttccctttgaggtctctatggctctgattgtacatgatagtaagtgtaagccatgtaaaaagtaaataatgtctgggcacagtggctcacgcctgtaatcctagcactttgggaggctgaggaggaaggatcacttgagcccagaagttcgagactagcctgggcaacatggagaagccctgtctctacaaaatacagagagaaaaaatcagccagtcatggtggcctacacctgtagtcccagcattccgggaggctgaggtgggaggatcacttgagcccagggaggttggggctgcagtgagccatgatcacaccactgcactccagccaggtgacatagcgagatcctgtctaaaaaaataaaaaataaataatggaacacagcaagtcctaggaagtaggttaaaactaattctttaaaaaaaaaaaaaagttgagcctgaattaaatgtaatgtttccaagtgacaggtatccacatttgcatggttacaagccactgccagttagcagtagcactttcctggcactgtggtcggttttgttttgttttgctttgtttagagacggggtctcactttccaggctggcctcaaactcctgcactcaagcaattcttctaccctggcctcccaagtagctggaattacaggtgtgcgccatcacaactagctggtggtcagttttgttactctgagagctgttcacttctctgaattcacctagagtggttggaccatcagatgtttgggcaaaactgaaagctctttgcaaccacacaccttccctgagcttacatcactgcccttttgagcagaaagtctaaattccttccaagacagtagaattccatcccagtaccaaagccagataggccccctaggaaactgaggtaagagcagtctctaaaaactacccacagcagcattggtgcaggggaacttggccattaggttattatttgagaggaaagtcctcacatcaatagtacatatgaaagtgacctccaaggggattggtgaatactcataaggatcttcaggctgaacagactatgtctggggaaagaacggattatgccccattaaataacaagttgtgttcaagagtcagagcagtgagctcagaggcccttctcactgagacagcaacatttaaaccaaaccagaggaagtatttgtggaactcactgcctcagtttgggtaaaggatgagcagacaagtcaactaaagaaaaaagaaaagcaaggaggagggttgagcaatctagagcatggagtttgttaagtgctctctggatttgagttgaagagcatccatttgagttgaaggccacagggcacaatgagctctcccttctaccaccagaaagtccctggtcaggtctcaggtagtgcggtgtggctcagctgggtttttaattagcgcattctctatccaacatttaattgtttgaaagcctccatatagttagattgtgctttgtaattttgttgttgttgctctatcttattgtatatgcattgagtattaacctgaatgttttgttacttaaatattaaaaacactgttatcctacagtt

SEQ ID NO: 6212 - DNA, 1304 bp, Homo sapiens
ggttaggctgccttcgcttctcaaggtaaggaagtggaggattaaatgatttgcccaaagtctcacagtaatttgtagagctgagattgaaattcgggtgaaacttcacatatcacattctttttatcagatggcagtttctggatttactcttggtacctgcatacttctgttgcacattagttatgtggctaattatcccaatggaaaagtaacacagtcatgccatggaatgattcctgaacatggtcatagtccacagtctgttcctgttcatgacatttacgtgagtcagatgacattcaggccaggagatcagattgaaggtaccgtgctgggattaactgtttacattttggatttcactcttttactgtttattgaatctttattattacttgatttagaagatttcacttaaatctgttttcttttgtaagatactatcatacttcttatttttggttccagatgactgtattacttaagtagtctgtgtattccccatccagaacaggctttaaaataagtttttatcgttatttactatttttattaattgtgctatcacttcaagagaagagaaaaatgaagtttattttatcttgtttaaaatataataaacccttgtccttcttgatatcatataattttaagaacaattctctaatttctctggtaaaatgtaggctgattattaaagataaatctataacagcattttgcaaactattttttgcaactctagaaatgcaaaatgttaacaggtactctgttacatagagagtatatagaaaaataagtttggaatattctgtgtgatatataatataccttagagttcacactgtacagtaggatattaaatatcctaagaaatttgcagtaaagaaacaagtatttactttcatccagtgtttttctttttttgtaattcaataagaatttattgagtgtcactgtgagccagacactgtgttaaatactgcaattcaaaagaaaacacctcatgttttttcctctaatgaggtcaagtaaacattttttttttaaacttttattttgggttcaggggtacatgtgtaggtttgtttataggtaaattccatgtcacgagggtttggtgtacagattatttcatcactcaggtgataagcatagtacccaattggtatcatctagcattttccaaactaacttagccttatggactgcccctggaccatcacctatttttcttttctctttgcggaatggctattaatatctcacagattgaatatcttatggaacactggaaaaaa

SEQ ID NO: 6213 - DNA, 2581 bp, Homo sapiens
ctgcaattgtgtccggaatttattccttctggtgggttcatggtcttgctgacttcaagaatgaagccgctgacctcgcgcataattagcatcatcattattctggctggagcaattgcactcatcattggctttggtatttcagggagacactccatcacagtcactactgtcgcctcagctgggaacattggggaggatggaatcctgagctgcacttttgaacctgacatcaaactttctgatatcgtgatacaatggctgaaggaaggtgttttaggcttggtccatgagttcaaagaaggcaaagatgagctgtcggagcaggatgaaatgttcagaggccggacagcagtgtttgctgatcaagtgatagttggcaatgcctctttgcggctgaaaaacgtgcaactcacagatgctggcacctacaaatgttatatcatcacttctaaaggcaaggggaatgctaaccttgagtataaaactggagccttcagcatgccggaagtgaatgtggactataatgccagctcagagaccttgcggtgtgaggctccccgatggttcccccagcccacagtggtctgggcatcccaagttgaccagggagccaacttctcggaagtctccaataccagctttgagctgaactctgagaatgtgaccatgaaggttgtgtctgtgctctacaatgttacgatcaacaacacatactcctgtatgattgaaaatgacattgccaaagcaacaggggatatcaaagtgacagaatcggagatcaaaaggcggagtcacctacagctgctaaactcaaaggcttctctgtgtgtctcttctttctttgccatcagctgggcacttctgcctctcagcccttacctgatgctaaaataatgtgcctcggccacaaaaaagcatgcaaagtcattgttacaacagggatctacagaactatttcaccaccagatatgacctagttttatatttctgggaggaaatgaattcatatctagaagtctggagtgagcaaacaagagcaagaaacaaaaagaagccaaaagcagaaggctccaatatgaacaagataaatctatcttcaaagacatattagaagttgggaaaataattcatgtgaactagacaagtgtgttaagagtgataagtaaaatgcacgtggagacaagtgcatccccagatctcagggacctccccctgcctgtcacctggggagtgagaggacaggatagtgcatgttctttgtctctgaatttttagttatatgtgctgtaatgttgctctgaggaagcccctggaaagtctatcccaacatatccacatcttatattccacaaattaagctgtagtatgtaccctaagacgctgctaattgactgccacttcgcaactcaggggcggctgcattttagtaatgggtcaaatgattcactttttatgatgcttccaaaggtgccttggcttctcttcccaactgacaaatgccaaagttgagaaaaatgatcataattttagcataaacagagcagtcggcgacaccgattttataaataaactgagcaccttctttttaaacaaacaaatgcgggtttatttctcagatgatgttcatccgtgaatggtccagggaaggacctttcaccttgtctatatggcattatgtcatcacaagctctgaggcttctcctttccatcctgcgtggacagctaagacctcagttttcaatagcatctagagcagtgggactcagctggggtgatttcgccccccatctccgggggaatgtctgaagacaattttggttacctcaatgagggagtggaggaggatacagtgctactaccaactagtggatagaggccagggatgctgctcaacctcctaccatgtacaggacgtctccccattacaactacccaatccgaagtgtcaactgtgtcagggctaagaaaccctggttttgagtagaaaagggcctggaaagaggggagccaacaaatctgtctgcttcctcacattagtcattggcaaataagcattctgtctctttggctgctgcctcagcacagagagccagaactctatcgggcaccaggataacatctctcagtgaacagagttgacaaggcctatgggaaatgcctgatgggattatcttcagcttgttgagcttctaagtttctttcccttcattctaccctgcaagccaagttctgtaagagaaatgcctgagttctagctcaggttttcttactctgaatttagatctccagaccctgcctggccacaattcaaattaaggcaacaaacatataccttccatgaagcacacacagacttttgaaagcaaggacaatgactgcttgaattgaggccttgaggaatgaagctttgaaggaaaagaatactttgtttccagcccccttcccacactcttcatgtgttaaccactgccttcctggaccttggagccacggtgactgtattacatgttgttatagaaaactgattttagagttctgatcgttcaagagaatgattaaatatacatttcctacacca

SEQ ID NO: 6214 - DNA, 3033 bp, Homo sapiens
ccatgggcagcggcacacggcggcgcgatgatggacgttaacagcagcggccgcccggacctctacgggcacctccgctctttccttctgccagaagtggggcgcgggctgcccgacttgagccccgacggtggcgccgacccggtcgcgggctcctgggcgccgcacctgctgagcgaggtgacagccagcccggcgcccacctgggacgcgcccccggacaatgcctccggctgtggggaacagatcaactacggcagagtcgagaaagttgtgatcggctccatcctgacgctcatcacgctgctgacgatcgcgggcaactgcctggtggtgatctccgtgtgcttcgtcaagaagctccgccagccctccaactacctgatcgtgtccctggcgctggccgacctctcggtggctgtggcggtcatgcccttcgtcagcgtcaccgacctcatcgggggcaagtggatctttggacactttttctgtaatgtcttcatcgccatggacgtcatgtgctgcacggcctcgatcatgaccctgtgcgtgatcagcattgacaggtaccttgggatcacaaggcccctcacataccctgtgaggcagaatgggaaatgcatggcgaagatgattctctccgtctggcttctctccgcctccatcaccttacctccactctttggatgggctcagaatgtaaatgatgataaggtgtgcttgatcagccaggactttggctatacgatttactctaccgcagtggcattttatatccccatgtccgtcatgcttttcatgtactaccagatttacaaggctgccaggaagagtgctgccaaacacaagtttcctggcttccctcgagtggagccagacagcgtcatcgccctgaatggcatagtgaagctccagaaggaggtggaagagtgtgcaaacctttcgagactcctcaagcatgaaaggaaaaacatctccatctttaagcgagaacagaaagcagccaccaccctggggatcatcgtcggggcctttaccgtgtgctggctgccatttttcctcctctcgacagccagacccttcatctgtggcacttcctgcagctgcatcccactgtgggtggagaggacatttctgtggctaggctatgcaaactctctcattaacccttttatatatgccttcttcaaccgggacctgaggaccacctatcgcagcctgctccagtgccagtaccggaatatcaaccggaagctctcagctgcaggcatgcatgaagccctgaagcttgctgagaggccagagagacctgagtttgtgctgtaagacaaaatgctgactactgtagaaaaaaaggtcatgattcatgattgaaagcagaacaatggagatgaaataaacaaggcaaaatagaggtggaaacagaaggaagtcatttgctgagtctgcagaatggaatgcagcttctgtcctttcttgggatgtctaaaacatgacaaacagggtgatctgttgtacacactatcttatgagggagatggtgacttctccttttttctgtggatcagtgctattgtgtgttctcagtttaagatagcagatcatctcagcagtaagcacaccaacagaactgagttccagaaaggaagcagtttctggtgctttgcatatgtccaaatccatgcaagtgggagaaagttccagtgcacacttcccatgcttctgagtctaggcgttgtggtgaatatgcaggaatcattcatgagacagaatgtattttgttgtatgacagaaggcttttccaagcaaactgcggtgagcgtagtgttgaatatgttgcatgtccatgttagaaaacagaatccagtcatcagctaatacaaatgatttcccagagcagtgtttgtttcaagcttctgtcaaatagtttggcttttctgcagggtctctgtgatttccccacctatgtacttttctgtgttaactcacttattatggtataactcaggaacaggtctcaggatggagagaagcatacaacatgagcaaagctttttctcgtgctctgaagggtcttgagaggggagtgggatgccttctgtgaggatttttatcgcagtgaagctcaagtggtacccaactgcgttgtaattaacatgattattggcatgtttttgactctcattttctacaaggctgcagtgggcccacccatgggctggcccataactgtatgttatgtggaagaagtgtgggaatgatgggttttccatgaaatgtgatgcttctggagatggggcataaacatgttcattcttgttgagctgcattgtgttaaaccaaattgtgtgaagcgaggtcacctggaccactcttgggaaatgcttcagaacaccagtctgttccttctagagaatttgtttttgtgttctatgtatcttaaatcaaatgtgtgcctaagcaattctgtcctctgattcccacccctacccaccaaaaaatggtagacatgaaaggcaggtgaggaaacagaaaaggtctctttgcagatatatattttttaaatggcactatgtagtaattaagagctaaggagacagaaagacagtagatgagaatagaagagtacctgtacctacaaggggaaaaatgaatgcaattctttatttgataagagtgaactgaaagagaatattattttcctacaataaagcaagctgtcctctcacaggataaagtggaattctgacatggattatggacttcttctaactcccattgacattgcttcttaccagacatggggaaaagctacctttcctgaaaggggaggagggcactgtcctttcagacaaagcttgtacaaattcctgaaccgcaaatttgctgaagtgaccgtatatattatattcataatttaaatgattatttatggtcagatacatattgttaaacttgaaaatgttttattacattacatcaaataaagtttatttgtagctgaaataaagcaacgtaagtaacaatttttaa

SEQ ID NO: 6215 - DNA, 4723 bp, Homo sapiens
gaattctagaggcggcggagggtggcgaggagctctcgctttctctcgctccctccctctccgactccgtctctctctctctctctctctctcccctccctctctttccctctgttccattttttccccctctaaatcctccctgccctgcgcgcctggacacagatttaggaagcgaattcgctcacgttttaggacaaggaagagagagaggcacgggagaagagcccagcaagatttggattgaaaccgagacaccctccggaggctcggagcagaggaaggaggaggagggcggcgaacggaagccagtttgcaattcaagttttgatagcgctggtagaagggggtttaaatcagatttttttttttttaaaggagagagactttttccgctctctcgctccctgttaaagccgggtctagcacagctgcagacgccaccagcgagaaagagggagaggaagacagatagggggcgggggaagaagaaaaagaaaggtaaaaagtcttctaggagaacctttcacatttgcaacaaaagacctaggggctggagagagattcctgggacgcagggctggagtgtctatttcgagctcagcggcagggctcgggcgcgagtcgagaccctgctcgctcctctcgcttctgaaaccgacgttcaggagcggctttttaaaaacgcaaggcacaaggacggtcacccgcgcgactatgtttgctgatttttcgccttgccctctttaaaagcggcctcccattctccaaaagacacttcccctcctccctttgaagtgcattagttgtgatttctgcctccttttcttttttctttcttttttgttttgctttttccccccttttgaattatgtgctgctgttaaacaacaacaaaaaaacaacaaaacacagcagctgcggacttgtccccggctggagcccagcgccccgcctggagtggatgagcctctccatgagagatccggtcattcctgggacaagcatggcctaccatccgttcctacctcaccgggcgccggacttcgccatgagcgcggtgctgggtcaccagccgccgttcttccccgcgctgacgctgcctcccaacggcgcggcggcgctctcgctgccgggcgccctggccaagccgatcatggatcaattggtgggggcggccgagaccggcatcccgttctcctccctggggccccaggcgcatctgaggcctttgaagaccatggagcccgaagaagaggtggaggacgaccccaaggtgcacctggaggctaaagaactttgggatcagtttcacaagcggggcaccgagatggtcattaccaagtcgggaaggcgaatgtttcctccatttaaagtgagatgttctgggctggataaaaaagccaaatacattttattgatggacattatagctgctgatgactgtcgttataaatttcacaattctcggtggatggtggctggtaaggccgaccccgaaatgccaaagaggatgtacattcacccggacagccccgctactggggaacagtggatgtccaaagtcgtcactttccacaaactgaaactcaccaacaacatttcagacaaacatggatttactatattgaactccatgcacaaataccagccccggttccacattgtaagagccaatgacatcttgaaactcccttatagtacatttcggacatacttgttccccgaaactgaattcatcgctgtgactgcataccagaatgataagataacccagttaaaaatagacaacaacccttttgcaaaaggtttccgggacactggaaatggccgaagagaaaaaagaaaacagctcaccctgcagtccatgagggtgtttgatgaaagacacaaaaaggagaatgggacctctgatgagtcctccagtgaacaagcagctttcaactgcttcgcccaggcttcttctccagccgcctccactgtagggacatcgaacctcaaagatttatgtcccagcgagggtgagagcgacgccgaggccgagagcaaagaggagcatggccccgaggcctgcgacgcggccaagatctccaccaccacgtcggaggagccctgccgtgacaagggcagccccgcggtcaaggctcaccttttcgctgctgagcggccccgggacagcgggcggctggacaaagcgtcgcccgactcacgccatagccccgccaccatctcgtccagcactcgcggcctgggcgcggaggagcgcaggagcccggttcgcgagggcacagcgccggccaaggtggaagaggcgcgcgcgctcccgggcaaggaggccttcgcgccgctcacggtgcagacggacgcggccgccgcgcacctggcccagggccccctgcctggcctcggcttcgccccgggcctggcgggccaacagttcttcaacgggcacccgctcttcctgcaccccagccagtttgccatggggggcgccttctccagcatggcggccgctggcatgggtcccctcctggccacggtttctggggcctccaccggtgtctcgggcctggattccacggccatggcctctgccgctgcggcgcagggactgtccggggcgtccgcggccaccctgcccttccacctccagcagcacgtcctggcctctcagggcctggccatgtcccctttcggaagcctgttcccttacccctacacgtacatggccgcagcggcggccgcctcctctgcggcagcctccagctcggtgcaccgccaccccttcctcaatctgaacaccatgcgcccgcggctgcgctacagcccctactccatcccggtgccggtcccggacggcagcagtctgctcaccaccgccctgccctccatggcggcggccgcggggcccctggacggcaaagtcgccgccctggccgccagcccggcctcggtggcagtggactcgggctctgaactcaacagccgctcctccacgctctcctccagctccatgtccttgtcgcccaaactctgcgcggagaaagaggcggccaccagcgaactgcagagcatccagcggttggttagcggcttggaagccaagccggacaggtcccgcagcgcgtccccgtagacccgtcccagacacgtcttttcattccagtccagttcaggctgccgtgcactttgtcggatataaaataaaccacgggcccgccatggcgttagcccttccttttgcagttgcgtctgggaaggggccccggactccctcgagagaatgtgctagagacagcccctgtcttcttggcgtggtttatatgtccgggatctggatcagattctgggggctcagaaacgtcggttgcattgagctactgggggtaggagttccaacatttatgtccagagcaacttccagcaaggctggtctgggtctctgcccaccaggcggggaggtgttcaaagacatctccctcagtgcggatttatatatatatttttccttcactgtgtcaagtggaaacaaaaacaaaatctttcaaaaaaaaaatcgggacaagtgaacacattaacatgattctgtttgtgcagattaaaaactttatagggacttgcattatcggttctcaataaattactgagcagctttgtttggggagggaagtccctaccatccttgtttagtctatattaagaaaatctgtgtctttttaatattcttgtgatgttttcagagccgctgtaggtctcttcttgcatgtccacagtaatgtatttgtggtttttattttgaacgcttgcttttagagagaaaacaatatagccccctacccttttcccaatcctttgccctcaaatcagtgacccaagggagggggggatttaaagggaaggagtgggcaaaacacataaaatgaatttattatatctaagctctgtagcaggattcatgtcgttctttgacagttctttctctttcctgtatatgcaataacaaggttttaaaaaaataataaagaagtgagactattagacaaagtatttatgtaattatttgataactcttgtaaataggtggaatatgaatgcttggaaaattaaactttaatttattgacattgtacatagctctgtgtaaatagaattgcaactgtcaggttttgtgttcttgttttcctttagttgggtttatttccaggtcacagaattgctgttaacactagaaaacacacttcctgcaccaacaccaataccctttcaaaagagttgtctgcaacatttttgttttcttttttaatgtccaaaagtgggggaaagtgctatttcctattttcaccaaaattggggaaggagtgccactttccagctccacttcaaattccttaaaatataactgagattgctgtggggagggaggagggcagaggctgcggtttgactttttaatttttcttttgttatttgtatttgctagtctctgatttcctcaaaacgaagtggaatttactactgttgtcagtatcggtgttttgaattggtgcctgcctatagagatatattcacagttcaaaagtcaggtgctgagagatggtttaaagacaaattcatgaaggtatattttgtgttatagttgttgatgagttctttggttttctgtatttttccccctctctttaaaacatcactgaaatttcaataaatttttattgaaatgtct

SEQ ID NO: 6216 - DNA, 1948 bp, Homo sapiens
aacagagggagctccgagccctctctggcgcgcgaggtatttcgtctgtccccgggggtgccaggtgagccccagcggatccgggagggtaagctgggactcctcgcgagcagtagctgcagggtaccaagcttcgccctctgcgtccccgcgccttcgcggtctcccgccagtgcaggtccggggcccccaggcgagcggacaaggttggcctaatctgccaaacttctggggcatttaccgtgctctggccgccctcccgattcttccctccgcgcccttgcctgcttctcgcctaccccgggctccggaagggaaggaggcgtgtccggagcaggcgggcgggaactgtataaaagcgccggcggctcagcagccgggcttcgctcgccgcctcgcgccgagactagaagcgctgcgggaagcagggacagtggagagggcgctgcgctcgggctacccaatgcgtggactatctgccgccgctgttcgtgcaatatgctggagctccagaacagctaaacggagtcgccacaccactgtttgtgctggatcgcagcgctgcctttccttatgaagaagacacaaacttggattctcacttgcatttatcttcagctgctcctatttaatcctctcgtcaaaactgaagggatctgcaggaatcgtgtgactaataatgtaaaagacgtcactaaattggtggcaaatcttccaaaagactacatgataaccctcaaatatgtccccgggatggatgttttgccaagtcattgttggataagcgagatggtagtacaattgtcagacagcttgactgatcttctggacaagttttcaaatatttctgaaggcttgagtaattattccatcatagacaaacttgtgaatatagtggatgaccttgtggagtgcgtgaaagaaaactcatctaaggatctaaaaaaatcattcaagagcccagaacccaggctctttactcctgaagaattctttagaatttttaatagatccattgatgccttcaaggactttgtagtggcatctgaaactagtgattgtgtggtttcttcaacattaagtcctgagaaagggaaggccaaaaatccccctggagactccagcctacactgggcagccatggcattgccagcattgttttctcttataattggctttgcttttggagccttatactggaagaagagacagccaagtcttacaagggcagttgaaaatatacaaattaatgaagaggataatgagataagtatgttgcaagagaaagagagagagtttcaagaagtgtaattgtggcttgtatcaacactgttactttcgtacattggctggtaacagttcatgtttgcttcataaatgaagcagctttaaacaaattcatattctgtctggagtgacagaccacatctttatctgttcttgctacccatgactttatatggatgattcagaaattggaacagaatgttttactgtgaaactggcactgaattaatcatctataaagaagaacttgcatggagcaggactctattttaaggactgcgggacttgggtctcatttagaacttgcagctgatgttggaagagaaagcacgtgtctcagactgcatgtaccatttgcatggctccagaaatgtctaaatgctgaaaaaacacctagctttattcttcagatacaaactgcagcctgtagttatcctggtctctgcaagtagatttcagcttggatagtgagggtaacaatttttctcaaagggatctggaaaaaatgtttaaaactcagtagtgtcagccactgtacagtgtagaaagcagtgggaactgtgattggatttggcaacatgtcagctttatagttgccgattagtgatatgggtctgatttcgatctcttcctgatgtaaaccatgctcacccatatccca

SEQ ID NO: 6217 - DNA, 572 bp, Homo sapiens
acaatcacagctccgggcattgggggaacccgagccggctgcgccgggggaatccgtgcgggcgccttccgtcccggtcccatcctcgccgcgctccagcacctctgaagttttgcagcgcccagaaaggaggcgaggaaggagggagtgtctggacattgccttcaagctaaacaaccaaatcagagaaaatgcagaagtctccatggacgtttccctggcttaccgtgatgacgcgtttgctgagtggactgaaatggcccatgaaagagtaccacggaaactcaaatgcaccttcacatctcccaagactccagagcatgagggccgttactatgaatgtgatgtccttcctttcatggaaattgggtctgtggcccataagttttaccttttaaacatccggctgcctgtgaatgagaagaagaaaatcaatgtgggaattggggagataaaggatatccggttggtggggatccaccaaaatggaggcttcaccaaggtgtggtttgccatgaagaccttccttacgcccagcatcttcatcattatggtgtggtattggaggagga

SEQ ID NO: 6218 - DNA, 2612 bp, Homo sapiens
gctggttgtgagtcaccaaggaaggcagcggcagctccactcagccagtacccagatacgctgggaaccttccccagccatggcttccctggggcagatcctcttctggagcataattagcatcatcattattctggctggagcaattgcactcatcattggctttggtatttcagggagacactccatcacagtcactactgtcgcctcagctgggaacattggggaggatggaatcctgagctgcacttttgaacctgacatcaaactttctgatatcgtgatacaatggctgaaggaaggtgttttaggcttggtccatgagttcaaagaaggcaaagatgagctgtcggagcaggatgaaatgttcagaggccggacagcagtgtttgctgatcaagtgatagttggcaatgcctctttgcggctgaaaaacgtgcaactcacagatgctggcacctacaaatgttatatcatcacttctaaaggcaaggggaatgctaaccttgagtataaaactggagccttcagcatgccggaagtgaatgtggactataatgccagctcagagaccttgcggtgtgaggctccccgatggttcccccagcccacagtggtctgggcatcccaagttgaccagggagccaacttctcggaagtctccaataccagctttgagctgaactctgagaatgtgaccatgaaggttgtgtctgtgctctacaatgttacgatcaacaacacatactcctgtatgattgaaaatgacattgccaaagcaacaggggatatcaaagtgacagaatcggagatcaaaaggcggagtcacctacagctgctaaactcaaaggcttctctgtgtgtctcttctttctttgccatcagctgggcacttctgcctctcagcccttacctgatgctaaaataatgtgcctcggccacaaaaaagcatgcaaagtcattgttacaacagggatctacagaactatttcaccaccagatatgacctagttttatatttctgggaggaaatgaattcatatctagaagtctggagtgagcaaacaagagcaagaaacaaaaagaagccaaaagcagaaggctccaatatgaacaagataaatctatcttcaaagacatattagaagttgggaaaataattcatgtgaactagacaagtgtgttaagagtgataagtaaaatgcacgtggagacaagtgcatccccagatctcagggacctccccctgcctgtcacctggggagtgagaggacaggatagtgcatgttctttgtctctgaatttttagttatatgtgctgtaatgttgctctgaggaagcccctggaaagtctatcccaacatatccacatcttatattccacaaattaagctgtagtatgtaccctaagacgctgctaattgactgccacttcgcaactcaggggcggctgcattttagtaatgggtcaaatgattcactttttatgatgcttccaaaggtgccttggcttctcttcccaactgacaaatgccaaagttgagaaaaatgatcataattttagcataaacagagcagtcggcgacaccgattttataaataaactgagcaccttctttttaaacaaacaaatgcgggtttatttctcagatgatgttcatccgtgaatggtccagggaaggacctttcaccttgtctatatggcattatgtcatcacaagctctgaggcttctcctttccatcctgcgtggacagctaagacctcagttttcaatagcatctagagcagtgggactcagctggggtgatttcgccccccatctccgggggaatgtctgaagacaattttggttacctcaatgagggagtggaggaggatacagtgctactaccaactagtggatagaggccagggatgctgctcaacctcctaccatgtacaggacgtctccccattacaactacccaatccgaagtgtcaactgtgtcagggctaagaaaccctggttttgagtagaaaagggcctggaaagaggggagccaacaaatctgtctgcttcctcacattagtcattggcaaataagcattctgtctctttggctgctgcctcagcacagagagccagaactctatcgggcaccaggataacatctctcagtgaacagagttgacaaggcctatgggaaatgcctgatgggattatcttcagcttgttgagcttctaagtttctttcccttcattctaccctgcaagccaagttctgtaagagaaatgcctgagttctagctcaggttttcttactctgaatttagatctccagaccctgcctggccacaattcaaattaaggcaacaaacatataccttccatgaagcacacacagacttttgaaagcaaggacaatgactgcttgaattgaggccttgaggaatgaagctttgaaggaaaagaatactttgtttccagcccccttcccacactcttcatgtgttaaccactgccttcctggaccttggagccacggtgactgtattacatgttgttatagaaaactgattttagagttctgatcgttcaagagaatgattaaatatacatttcctacacca

SEQ ID NO: 6219 - DNA, 3996 bp, Homo sapiens
atggcgagcgactccccggctcgaagcctggatgaaatagatctctcggctctgagggaccccgcagggatctttgaattggtggaacttgttggaaatggaacatacgggcaagtttataagggtcgtcatgtcaaaacgggccagcttgcagccatcaaggttatggatgtcacaggggatgaagaggaagaaatcaaacaagaaattaacatgttgaagaaatattctcatcaccggaatattgctacatactatggtgcttttatcaaaaagaacccaccaggcatggatgaccaactttggttggtgatggagttttgtggtgctggctctgtcaccgacctgatcaagaacacaaaaggtaacacgttgaaagaggagtggattgcatacatctgcagggaaatcttacgggggctgagtcacctgcaccagcataaagtgattcatcgagatattaaagggcaaaatgtcttgctgactgaaaatgcagaagttaaactagtggactttggagtcagtgctcagcttgatcgaacagtgggcaggaggaatactttcattggaactccctactggatggcaccagaagttattgcctgtgatgaaaacccagatgccacatatgatttcaagagtgacttgtggtctttgggtatcaccgccattgaaatggcagaaggtgctccccctctctgtgacatgcaccccatgagagctctcttcctcatcccccggaacccagcgcctcggctgaagtctaagaagtggtcaaaaaaattccagtcatttattgagagctgcttggtaaagaatcacagccagcgaccagcaacagaacaattgatgaagcatccatttatacgagaccaacctaatgagcgacaggtccgcattcaactcaaggaccatattgatagaacaaagaagaagcgaggagaaaaagatgagacagagtatgagtacagtggaagtgaggaagaagaggaggagaatgactcaggagagcccagctccatcctgaatctgccaggggagtcgacgctgcggagggactttctgaggctgcagctggccaacaaggagcgttctgaggccctacggaggcagcagctggagcagcagcagcgggagaatgaggagcacaagcggcagctgctggccgagcgtcagaagcgcatcgaggagcagaaagagcagaggcggcggctggaggagcaacaaaggcgagagaaggagctgcggaagcagcaggagagggagcagcgccggcactatgaggagcagatgcgccgggaggaggagaggaggcgtgcggagcatgaacaggaatataagcgcaaacaattggaagaacagagacaagcagaaagactgcagaggcagctaaagcaagaaagagactacttagtttcccttcagcatcagcggcaggagcagaggcctgtggagaagaagccactgtaccattacaaagaaggaatgagtcctagtgagaagccagcatgggccaaggaggtagaagaacggtcaaggctcaaccggcaaagttcccctgccatgcctcacaaggttgccaacaggatatctgaccccaacctgcccccaaggtcggagtccttcagcattagtggagttcagcctgctcgaacaccccccatgctcagaccagtcgatccccagatcccacatctggtagctgtaaaatcccagggacctgccttgaccgcctcccagtcagtgcacgagcagcccacaaagggcctctctgggtttcaggaggctctgaacgtgacctcccaccgcgtggagatgccacgccagaactcagatcccacctcggaaaatcctcctctccccactcgcattgaaaagtttgaccgaagctcttggttacgacaggaagaagacattccaccaaaggtgcctcaaagaacaacttctatatccccagcattagccagaaagaattctcctgggaatggtagtgctctgggacccagactaggatctcaacccatcagagcaagcaaccctgatctccggagaactgagcccatcttggagagccccttgcagaggaccagcagtggcagttcctccagctccagcacccctagctcccagcccagctcccaaggaggctcccagcctggatcacaagcaggatccagtgaacgcaccagagttcgagccaacagtaagtcagaaggatcacctgtgctcccccatgagcctgcgaaggtgaaaccagaagaatccagggacattacccggcccagtcgaccagctagctacaaaaaagctatagatgaggatctgacggcattagccaaagaactaagagaactccggattgaagaaacaaaccgcccaatgaagaaggtgactgattactcctcctccagtgaggagtcagaaagtagcgaggaagaggaggaagatggagagagcgagacccatgatgggacagtggctgtcagcgacatacccagactgataccaacaggagctccaggcagcaacgagcagtacaatgtgggaatggtggggacgcatgggctggagacctctcatgcggacagtttcagcggcagtatttcaagagaaggaaccttgatgattagagagacgtctggagagaagaagcgatctggccacagtgacagcaatggctttgctggccacatcaacctccctgacctggtgcagcagagccattctccagctggaaccccgactgagggactggggcgcgtctcaacccattcccaggagatggactctgggactgaatatggcatggggagcagcaccaaagcctccttcaccccctttgtggaccccagagtataccagacgtctcccactgatgaagatgaagaggatgaggaatcatcagccgcagctctgtttactagcgaacttcttaggcaagaacaggccaaactcaatgaagcaagaaagatttcggtggtaaatgtaaacccaaccaacattcggcctcatagcgacacaccagaaatcagaaaatacaagaaacgattcaactcagaaatactttgtgcagctctgtggggtgtaaaccttctggtggggactgaaaatggcctgatgcttttggaccgaagtgggcaaggcaaagtctataatctgatcaaccggaggcgatttcagcagatggatgtgctagagggactgaatgtccttgtgacaatttcaggaaagaagaataagctacgagtttactatctttcatggttaagaaacagaatactacataatgacccagaagtagaaaagaaacaaggctggatcactgttggggacttggaaggctgtatacattataaagttgttaaatatgaaaggatcaaatttttggtgattgccttaaagaatgctgtggaaatatatgcttgggctcctaaaccgtatcataaattcatggcatttaagtcttttgcagatctccagcacaagcctctgctagttgatctcacggtagaagaaggtcaaagattaaaggttatttttggttcacacactggtttccatgtaattgatgttgattcaggaaactcttatgatatctacataccatctcatattcagggcaatatcactcctcatgctattgtcatcttgcctaaaacagatggaatggaaatgcttgtttgctatgaggatgagggggtgtatgtaaacacctatggccggataactaaggatgtggtgctccaatggggagaaatgcccacgtctgtggcctacattcattccaatcagataatgggctggggcgagaaagctattgagatccggtcagtggaaacaggacatttggatggagtatttatgcataagcgagctcaaaggttaaagtttctatgtgaaagaaatgataaggtattttttgcatccgtgcgatctggaggaagtagccaagtgtttttcatgaccctcaacagaaattccatgatgaactggtaa

SEQ ID NO: 6220 - DNA, 1096 bp, Homo sapiens
ggctccagcccggccgggctccgaggcgagaggctgcatggagtggccggcgcggctctgcgggctgtgggcgctgctgctctgcgccggcggcgggggcgggggcgggggcgccgcgcctacggaaactcagccacctgtgacaaatttgagtgtctctgttgaaaacctctgcacagtaatatggacatggaatccacccgagggagccagctcaaattgtagtctatggtattttagtcattttggcgacaaacaagataagaaaatagctccggaaactcgtcgttcaatagaagtacccctgaatgagaggatttgtctgcaagtggggtcccagtgtagcaccaatgagagtgagaagcctagcattttggttgaaaaatgcatctcacccccagaaggtgatcctgagtctgctgtgactgagcttcaatgcatttggcacaacctgagctacatgaagtgttcttggctccctggaaggaataccagtcccgacactaactatactctctactattggcacagaagcctggaaaaaattcatcaatgtgaaaacatctttagagaaggccaatactttggttgttcctttgatctgaccaaagtgaaggattccagttttgaacaacacagtgtccaaataatggtcaaggataatgcaggaaaaattaaaccatccttcaatatagtgcctttaacttcccgtgtgaaacctgatcctccacatattaaaaacctctccttccacaatgatgacctatatgtgcaatgggagaatccacagaattttattagcagatgcctattttatgaagtagaagtcaataacagccaaactgagacacataatgttttctacgtaaggttttaaaattattgtttttatttggctatttttcttttacttgaatttcttacattgaaatatcaatgaaacatagctcttacatttgtcaccttatgatgatgatggtaatgaaacttcttgtctaaaataaggcatggtggaagatttgaagatttatggtatgatagtatcagctgcaagtttcaagccatttattcatctgtaagcttcttagaaaggcct

SEQ ID NO: 6221 - DNA, 7154 bp, Homo sapiens; identical to SEQ ID NO: 4892

SEQ ID NO: 6222 - DNA, 822 bp, Homo sapiens
ttgcatatgagagagacaaatgtcttcacattgaagaagggaaggagtgggccattggttttacatcctccagatgcactgattgctgtcccctttgatgatgatgacaagatcgttgggggctacacctgtgaggagaattctgtcccctaccaggtgtccttgaattctggctcccacttctgcggtggctccctcatcagcgaacagtgggtggtgtcagcaggtcactgctacaagccccacatccaggtgagactgggagagcacaatatcgaagtcctggaggggaatgagcagttcatcaatgcagccaagatcatccgccaccccaaatacaacaggattattctgaacaatgacatcatgctgatcaagctctccacacctgccgtcatcaatgcccatgtgtccaccatctctctgcccactgcccctccagctgctggcaccgagtgccttatctccggctggggcaataccctgagctctggggccgactacccagatgagctgcagtgcctggacgctcctgtgctgacccaggctaagtgtaaagcctcctaccctttaaagattaccagcaacatgttctgtgtgggcttccttgagggaggcaaggattcctgccagggtgactctggtggccctgtggtctgcaatggacagcttcaaggaattgtctcctggggctatggctgtgcccagaagagaaggcctggagtctacaccaaggtctacaactatgtggactggattaaggacaccatagctgccaacagctaaagcccctggtcactctgcagtctctataccaataaa

SEQ ID NO: 6223 - DNA, 7898 bp, Homo sapiens
gcccgcgccggctgtgctgcacagggggaggagagggaaccccaggcgcgagcgggaagaggggacctgcagccacaacttctctggtcctctgcatcccttctgtccctccacccgtccccttccccaccctctggcccccaccttcttggaggcgacaacccccgggaggcattagaagggatttttcccgcaggttgcgaagggaagcaaacttggtggcaacttgcctcccggtgcgggcgtctctcccccaccgtctcaacatgcttaggggtccggggcccgggctgctgctgctggccgtccagtgcctggggacagcggtgccctccacgggagcctcgaagagcaagaggcaggctcagcaaatggttcagccccagtccccggtggctgtcagtcaaagcaagcccggttgttatgacaatggaaaacactatcagataaatcaacagtgggagcggacctacctaggcaatgcgttggtttgtacttgttatggaggaagccgaggttttaactgcgagagtaaacctgaagctgaagagacttgctttgacaagtacactgggaacacttaccgagtgggtgacacttatgagcgtcctaaagactccatgatctgggactgtacctgcatcggggctgggcgagggagaataagctgtaccatcgcaaaccgctgccatgaagggggtcagtcctacaagattggtgacacctggaggagaccacatgagactggtggttacatgttagagtgtgtgtgtcttggtaatggaaaaggagaatggacctgcaagcccatagctgagaagtgttttgatcatgctgctgggacttcctatgtggtcggagaaacgtgggagaagccctaccaaggctggatgatggtagattgtacttgcctgggagaaggcagcggacgcatcacttgcacttctagaaatagatgcaacgatcaggacacaaggacatcctatagaattggagacacctggagcaagaaggataatcgaggaaacctgctccagtgcatctgcacaggcaacggccgaggagagtggaagtgtgagaggcacacctctgtgcagaccacatcgagcggatctggccccttcaccgatgttcgtgcagctgtttaccaaccgcagcctcacccccagcctcctccctatggccactgtgtcacagacagtggtgtggtctactctgtggggatgcagtggctgaagacacaaggaaataagcaaatgctttgcacgtgcctgggcaacggagtcagctgccaagagacagctgtaacccagacttacggtggcaactcaaatggagagccatgtgtcttaccattcacctacaatggcaggacgttctactcctgcaccacagaagggcgacaggacggacatctttggtgcagcacaacttcgaattatgagcaggaccagaaatactctttctgcacagaccacactgttttggttcagactcgaggaggaaattccaatggtgccttgtgccacttccccttcctatacaacaaccacaattacactgattgcacttctgagggcagaagagacaacatgaagtggtgtgggaccacacagaactatgatgccgaccagaagtttgggttctgccccatggctgcccacgaggaaatctgcacaaccaatgaaggggtcatgtaccgcattggagatcagtgggataagcagcatgacatgggtcacatgatgaggtgcacgtgtgttgggaatggtcgtggggaatggacatgcattgcctactcgcagcttcgagatcagtgcattgttgatgacatcacttacaatgtgaacgacacattccacaagcgtcatgaagaggggcacatgctgaactgtacatgcttcggtcagggtcggggcaggtggaagtgtgatcccgtcgaccaatgccaggattcagagactgggacgttttatcaaattggagattcatgggagaagtatgtgcatggtgtcagataccagtgctactgctatggccgtggcattggggagtggcattgccaacctttacagacctatccaagctcaagtggtcctgtcgaagtatttatcactgagactccgagtcagcccaactcccaccccatccagtggaatgcaccacagccatctcacatttccaagtacattctcaggtggagacctaaaaattctgtaggccgttggaaggaagctaccataccaggccacttaaactcctacaccatcaaaggcctgaagcctggtgtggtatacgagggccagctcatcagcatccagcagtacggccaccaagaagtgactcgctttgacttcaccaccaccagcaccagcacacctgtgaccagcaacaccgtgacaggagagacgactcccttttctcctcttgtggccacttctgaatctgtgaccgaaatcacagccagtagctttgtggtctcctgggtctcagcttccgacaccgtgtcgggattccgggtggaatatgagctgagtgaggagggagatgagccacagtacctggatcttccaagcacagccacttctgtgaacatccctgacctgcttcctggccgaaaatacattgtaaatgtctatcagatatctgaggatggggagcagagtttgatcctgtctacttcacaaacaacagcgcctgatgcccctcctgacacgactgtggaccaagttgatgacacctcaattgttgttcgctggagcagaccccaggctcccatcacagggtacagaatagtctattcgccatcagtagaaggtagcagcacagaactcaaccttcctgaaactgcaaactccgtcaccctcagtgacttgcaacctggtgttcagtataacatcactatctatgctgtggaagaaaatcaagaaagtacacctgttgtcattcaacaagaaaccactggcaccccacgctcagatacagtgccctctcccagggacctgcagtttgtggaagtgacagacgtgaaggtcaccatcatgtggacaccgcctgagagtgcagtgaccggctaccgtgtggatgtgatccccgtcaacctgcctggcgagcacgggcagaggctgcccatcagcaggaacacctttgcagaagtcaccgggctgtcccctggggtcacctattacttcaaagtctttgcagtgagccatgggagggagagcaagcctctgactgctcaacagacaaccaaactggatgctcccactaacctccagtttgtcaatgaaactgattctactgtcctggtgagatggactccacctcgggcccagataacaggataccgactgaccgtgggccttacccgaagaggacagcccaggcagtacaatgtgggtccctctgtctccaagtacccactgaggaatctgcagcctgcatctgagtacaccgtatccctcgtggccataaagggcaaccaagagagccccaaagccactggagtctttaccacactgcagcctgggagctctattccaccttacaacaccgaggtgactgagaccaccattgtgatcacatggacgcctgctccaagaattggttttaagctgggtgtacgaccaagccagggaggagaggcaccacgagaagtgacttcagactcaggaagcatcgttgtgtccggcttgactccaggagtagaatacgtctacaccatccaagtcctgagagatggacaggaaagagatgcgccaattgtaaacaaagtggtgacaccattgtctccaccaacaaacttgcatctggaggcaaaccctgacactggagtgctcacagtctcctgggagaggagcaccaccccagacattactggttatagaattaccacaacccctacaaacggccagcagggaaattctttggaagaagtggtccatgctgatcagagctcctgcacttttgataacctgagtcccggcctggagtacaatgtcagtgtttacactgtcaaggatgacaaggaaagtgtccctatctctgataccatcatcccagctgttcctcctcccactgacctgcgattcaccaacattggtccagacaccatgcgtgtcacctgggctccacccccatccattgatttaaccaacttcctggtgcgttactcacctgtgaaaaatgaggaagatgttgcagagttgtcaatttctccttcagacaatgcagtggtcttaacaaatctcctgcctggtacagaatatgtagtgagtgtctccagtgtctacgaacaacatgagagcacacctcttagaggaagacagaaaacaggtcttgattccccaactggcattgacttttctgatattactgccaactcttttactgtgcactggattgctcctcgagccaccatcactggctacaggatccgccatcatcccgagcacttcagtgggagacctcgagaagatcgggtgccccactctcggaattccatcaccctcaccaacctcactccaggcacagagtatgtggtcagcatcgttgctcttaatggcagagaggaaagtcccttattgattggccaacaatcaacagtttctgatgttccgagggacctggaagttgttgctgcgacccccaccagcctactgatcagctgggatgctcctgctgtcacagtgagatattacaggatcacttacggagagacaggaggaaatagccctgtccaggagttcactgtgcctgggagcaagtctacagctaccatcagcggccttaaacctggagttgattataccatcactgtgtatgctgtcactggccgtggagacagccccgcaagcagcaagccaatttccattaattaccgaacagaaattgacaaaccatcccagatgcaagtgaccgatgttcaggacaacagcattagtgtcaagtggctgccttcaagttcccctgttactggttacagagtaaccaccactcccaaaaatggaccaggaccaacaaaaactaaaactgcaggtccagatcaaacagaaatgactattgaaggcttgcagcccacagtggagtatgtggttagtgtctatgctcagaatccaagcggagagagtcagcctctggttcagactgcagtaaccactattcctgcaccaactgacctgaagttcactcaggtcacacccacaagcctgagcgcccagtggacaccacccaatgttcagctcactggatatcgagtgcgggtgacccccaaggagaagaccggaccaatgaaagaaatcaaccttgctcctgacagctcatccgtggttgtatcaggacttatggtggccaccaaatatgaagtgagtgtctatgctcttaaggacactttgacaagcagaccagctcagggagttgtcaccactctggagaatgtcagcccaccaagaagggctcgtgtgacagatgctactgagaccaccatcaccattagctggagaaccaagactgagacgatcactggcttccaagttgatgccgttccagccaatggccagactccaatccagagaaccatcaagccagatgtcagaagctacaccatcacaggtttacaaccaggcactgactacaagatctacctgtacaccttgaatgacaatgctcggagctcccctgtggtcatcgacgcctccactgccattgatgcaccatccaacctgcgtttcctggccaccacacccaattccttgctggtatcatggcagccgccacgtgccaggattaccggctacatcatcaagtatgagaagcctgggtctcctcccagagaagtggtccctcggccccgccctggtgtcacagaggctactattactggcctggaaccgggaaccgaatatacaatttatgtcattgccctgaagaataatcagaagagcgagcccctgattggaaggaaaaagacaggacaagaagctctctctcagacaaccatctcatgggccccattccaggacacttctgagtacatcatttcatgtcatcctgttggcactgatgaagaacccttacagttcagggttcctggaacttctaccagtgccactctgacaggcctcaccagaggtgccacctacaacgtcatagtggaggcactgaaagaccagcagaggcataaggttcgggaagaggttgttaccgtgggcaactctgtcaacgaaggcttgaaccaacctacggatgactcgtgctttgacccctacacagtttcccattatgccgttggagatgagtgggaacgaatgtctgaatcaggctttaaactgttgtgccagtgcttaggctttggaagtggtcatttcagatgtgattcatctagatggtgccatgacaatggtgtgaactacaagattggagagaagtgggaccgtcagggagaaaatggccagatgatgagctgcacatgtcttgggaacggaaaaggagaattcaagtgtgaccctcatgaggcaacgtgttatgatgatgggaagacataccacgtaggagaacagtggcagaaggaatatctcggtgccatttgctcctgcacatgctttggaggccagcggggctggcgctgtgacaactgccgcagacctgggggtgaacccagtcccgaaggcactactggccagtcctacaaccagtattctcagagataccatcagagaacaaacactaatgttaattgcccaattgagtgcttcatgcctttagatgtacaggctgacagagaagattcccgagagtaaatcatctttccaatccagaggaacaagcatgtctctctgccaagatccatctaaactggagtgatgttagcagacccagcttagagttcttctttctttcttaagccctttgctctggaggaagttctccagcttcagctcaactcacagcttctccaagcatcaccctgggagtttcctgagggttttctcataaatgagggctgcacattgcctgttctgcttcgaagtattcaataccgctcagtattttaaatgaagtgattctaagatttggtttgggatcaataggaaagcatatgcagccaaccaagatgcaaatgttttgaaatgatatgaccaaaattttaagtaggaaagtcacccaaacacttctgctttcacttaagtgtctggcccgcaatactgtaggaacaagcatgatcttgttactgtgatattttaaatatccacagtactcactttttccaaatgatcctagtaattgcctagaaatatctttctcttacctgttatttatcaatttttcccagtatttttatacggaaaaaattgtattgaaaacacttagtatgcagttgataagaggaatttggtataattatggtgggtgattattttttatactgtatgtgccaaagctttactactgtggaaagacaactgttttaataaaagatttacattccacaacttgaagttcatctatttgatataagacaccttcgggggaaataattcctgtgaatattctttttcaattcagcaaacatttgaaaatctatgatgtgcaagtctaattgttgatttcagtacaagattttctaaatcagttgctacaaaaactgattggtttttgtcacttcatctcttcactaatggagatagctttacactttctgctttaatagatttaagtggaccccaatatttattaaaattgctagtttaccgttcagaagtataatagaaataatctttagttgctcttttctaaccattgtaattcttcccttcttccctccacctttccttcattgaataaacctctgttcaaagagattgcctgcaagggaaataaaaatgactaagatattaaaa

SEQ ID NO: 6224 - DNA, 6588 bp, Homo sapiens
cggtgcgagcgaacaggagtgggggggaaattaaaaaaagctaaacgtggagcagccgatcggggaccgagaaggggaatcgatgcaaggagcacaataaaacaaaagctacttcggaacaaacagcatttaaaaatccacgactcaagataactgaaacctaaaataaaacctgctcatgcaccatggtttttcaaactcggtacccttcatggattattttatgctacatctggctgctccgctttgcacacacaggggaggcgcaggctgcgaaggaagtactactgctggattctaaagcacaacaaacagagttggagtggatttcctctccacccaatgggtgggaagaaattagtggtttggatgagaactataccccgatacgaacataccaggtgtgccaagtcatggagcccaaccaaaacaactggctgcggactaactggatttccaaaggcaatgcacaaaggatttttgtagaattgaaattcaccctgagggattgtaacagtcttcctggagtactgggaacttgcaaggaaacatttaatttgtactattatgaaacagactatgacactggcaggaatataagagaaaacctctatgtaaaaatagacaccattgctgcagatgaaagttttacccaaggtgaccttggtgaaagaaagatgaagcttaacactgaggtgagagagattggacctttgtccaaaaagggattctatcttgcctttcaggatgtaggggcttgcatagctttggtttctgtcaaagtgtactacaagaagtgctggtccattattgagaacttagctatctttccagatacagtgactggttcagaattttcctctttagtcgaggttcgagggacatgtgtcagcagtgcagaggaagaagcggaaaacgcccccaggatgcactgcagtgcagaaggagaatggttagtgcccattggaaaatgtatctgcaaagcaggctaccagcaaaaaggagacacttgtgaaccctgtggccgtgggttctacaagtcttcctctcaagatcttcagtgctctcgttgtccaactcacagtttttctgataaagaaggctcctccagatgtgaatgtgaagatgggtattacagggctccatctgacccaccatacgttgcgtgcacaaggcctccatctgcaccacagaacctcattttcaacatcaaccaaaccacagtaagtttggaatggagtcctcctgcagacaatgggggaagaaacgatgtgacctacagaatattgtgtaagcggtgcagttgggagcagggcgaatgtgttccctgtgggagtaacattggatacatgccccagcagactggattagaggataactatgtcactgtcatggacctgctagcccacgctaattatacttttgaagttgaagctgtaaatggagtttctgacttaagccgatcccagaggctctttgctgctgtcagtatcaccactggtcaagcagctccctcgcaagtgagtggagtaatgaaggagagagtactgcagcggagtgtcgagctttcctggcaggaaccagagcatcccaatggagtcatcacagaatatgaaatcaagtattacgagaaagatcaaagggaacggacctactcaacagtaaaaaccaagtctacttcagcctccattaataatctgaaaccaggaacagtgtatgttttccagattcgggcttttactgctgctggttatggaaattacagtcccagacttgatgttgctacactagaggaagctacaggtaaaatgtttgaagctacagctgtctccagtgaacagaatcctgttattatcattgctgtggttgctgtagctgggaccatcattttggtgttcatggtctttggcttcatcattgggagaaggcactgtggttatagcaaagctgaccaagaaggcgatgaagagctttactttcattttaaatttccaggcaccaaaacctacattgaccctgaaacctatgaggacccaaatagagctgtccatcaattcgccaaggagctagatgcctcctgtattaaaattgagcgtgtgattggtgcaggagaattcggtgaagtctgcagtggccgtttgaaacttccagggaaaagagatgttgcagtagccataaaaaccctgaaagttggttacacagaaaaacaaaggagagactttttgtgtgaagcaagcatcatggggcagtttgaccacccgaatgttgtccatttggaaggggttgttacaagagggaaaccagtcatgatagtaatagagttcatggaaaatggagccctagatgcatttctcaggaaacatgatgggcaatttacagtcattcagttagtaggaatgctgagaggaattgctgctggaatgagatatttggctgatatgggatatgttcacagggaccttgcagctcgcaatattcttgtcaacagcaatctcgtttgtaaagtgtcagattttggcctgtcccgagttatagaggatgatccagaagctgtctatacaactactggtggaaaaattccagtaaggtggacagcacccgaagccatccagtaccggaaattcacatcagccagtgatgtatggagctatggaatagtcatgtgggaagttatgtcttatggagaaagaccttattgggacatgtcaaatcaagatgttataaaagcaatagaagaaggttatcgtttaccagcacccatggactgcccagctggccttcaccagctaatgttggattgttggcaaaaggagcgtgctgaaaggccaaaatttgaacagatagttggaattctagacaaaatgattcgaaacccaaatagtctgaaaactcccctgggaacttgtagtaggccaataagccctcttctggatcaaaacactcctgatttcactaccttttgttcagttggagaatggctacaagctattaagatggaaagatataaagataatttcacggcagctggctacaattcccttgaatcagtagccaggatgactattgaggatgtgatgagtttagggatcacactggttggtcatcaaaagaaaatcatgagcagcattcagactatgagagcacaaatgctacatttacatggaactggcattcaagtgtgatatgcatttctcccttttaagggagattacagactgcaagagaacagtactggccttcagtatatgcatagaatgctgctagaagacaagtgatgtcctgggtccttccaacagtgaagagaagatttaagaagcacctatagacttgaactcctaagtgccaccagaatatataaaaagggaatttaggatccaccatcggtggccaggaaaatagcagtgacaataaacaaagtactacctgaaaaacatccaaacaccttgagctctctaacctcctttttgtcttatagactttttaaaatgtacataaagaatttaagaaagaatatatttgtcaaataaaatcatgatcttattgttaaaattaatgaaatattttccttaaatatgtgatttcagactattcctttttaaaatcatttgtgtttattcttcataaggactttgttttagaaagctgtttatagctttggacctttttagtgttaaatctgtaacattactacactgggtacctttgaaagaatctcaaatttcaaaagaaatagcatgattgaagatacatctctgttagaacattggtatcctttttgtgccattttattctgtttaatcagtgctgttttgatattgtttgctaattggcaggtagtcaagaaaatgcaagttgccaagagctctgatattttttaaaaagaatttttttgtaaagatcagacaacacactatcttttcaatgaaaaaagcaataatgatccatacatactataaggcacttttaacagattgtttatagagtgattttactagaaagaatttaataaactcgaagtttaggtttatgagtatataaacaaatgaggcacttcatctgaagaatgttggtgaaggcaagtctctgaaagcagaactatccagtgttatctaaaaattaatctgagcacatcaagattttttcattctcgtgacattaggaaatttaggataaatagttgacatatattttatatcctcttctgttgaatgcagtccaaacatgaaaggaaataattgttttatattataactctgaagcatgataaaggggcagttcacaattttcaccatttaaacacaaatttgctgcacagaatatcaccattgcagttcaaaacaaaacaaaacaaaaagtcttttgtttgtgaacactgatgcaagaaacttgttaaatgaaaggactctttaccctagaaggaagaggtgaaggatctggcttgtttttaaagctttatttattaaaccatattatttgattactgtgttagaatttcataagcaataattaaatgtgtctttatagatattgcaggaatgtatacatattgtgattaatgctttcaaaacttatgaaaatcatgaactaccccagaattgaactgttgtacttccaaagagaattgggctgtttataatgattttaatagagaaagatcccagggatcggtcataattggtcttgtttgataatgtgggcatccacaaacaaacaaacaaataacagaaacaaaatctgtaaatgttcctttgtaaaacttgtaaattttatttatactgtcttgttttgtacacacatttctctgtagtgggctctgaatacattgaaaatgcactatatttttctattttacttgcagagcatcacaaaagaacaggtattttcagtgctacataatgtgttttcccacatttaggaccaaagacggctatagaaaaactcaaatggattgcttcccaaacccctccccaccctttttttttggttttaaatcactgtacagtgttatttgatattttaatttattttttgattgactagaaaaatcattttaatttcactaaaatgttttttgtccctaaggaaaagtaatctgtaaaaataattttaattagcataatacagtcacctagacacttccatttgtaatctttgtaatagactgtaaatatatttttggaactataacacaatgtgcttgagggttatttttcagtgtctgcagtgtgtacaagtgtttatactaagtccagcactttacaattctaatcagtagcattggcctttgtgagaatgagtgaaagagtttgagtgagtgttcttaattccttttggattctagactcactaataatgaagttcttttcttgttcatagcttaaggtgcttattttttctattaaaattaaattaacaaaagccattctagaaatagaagacatagtatggtacatgcaaacggtgtctttcctgcttttttctagcactagatttatagttgagtagtctttcttgagtagaagggcagaataaaagtttttttgagtttttttcaaaaataaatttttccttcagcaatatacctcatctgccttaaattttttacagctctttacagggaaaggggagaagggatgggaaagacacacagcacaataggaagtgtatgattacatcactatctcgtttgtaagtttcttttcctaatcaacattatgatttcgaaatacatgtatgtgaaacaaatattaagagaaaaagaattaacattgtaatgctgattgtaatactctcttccagaaagagatgagatggtataacgataagaatgtacaacttgcaccttgaaatctttttttttaaataaattagtgctcaggggaggaaaagtagagaaagtgaacgtcaaaaatagaattccaaaattataaaaatgcaaaaggaaatggcctccttgctttaatagagccaccttttttagaacactgtcctcacacttgacctgtgttttgcattcagtactgaaataaaagtaacttgttctacatttgaatctaacattttctcagcaattgatctggtccttgtttactagaactggtggtttatgcttgtcagagcactattagttgaatcatattgtatacttatgtaatctacattagctagtactgtttaggactatattttaattgctcttcttatccgtgtttttaagacaattaaaatggtgtgattcacctctcttttttatttaggtaatgctgatattctcccttttgtttcttgagtagcctagaactatgctactcactgatgtgcatgttcaaataaattactgatgtgtatttttttgctatatgtggagaaatcatggggaactcggggcgagatgtgcttttcgttggttgaatttgtccctccttgcctaagaaatactacaggggtcatccttttataaggacaaactgcttttgaacagtgtcttcaatgtatcaagcacaaataactctttcttcaacatgaatcataagtctctttttaccagcttaaaataataaacaagtctattagacaatgtaaagaaaa

SEQ ID NO: 6225 - DNA, 1023 bp, Homo sapiens; identical to SEQ ID NO: 4631

SEQ ID NO: 6226 - DNA, 2084 bp, Homo sapiens
ggtctcattctgttgcccaggctggagtgcagtggtgcgatctcggctcacagcaacctctctgcctccagaaatgacctccaccttcaacccccgagaatgtaaactgtccaagcaagaagggcaaaactatggcttcttcctgcgaattgagaaggacaccgagggccacctggtccgggtggttgagaagtgtagcccagcagagaaggctggccttcaagatggagacagagttcttaggatcaatggtgtctttgtggacaaagaagaacatatgcaggttgtggatctggtcagaaagagtgggaattcagtgactttactagttctggatggggattcctatgagaaagcagtgaaaacacgggtggacttgaaagagttgggtcaaagtcagaaggagcaaggtttgagtgataatatactttcccctgtgatgaatggaggtgtgcaaacttggacccagccccggctctgctatctcgtgaaggaaggaggcagctatggcttctctctgaaaactgtccaaggtaaaaagggggtgtacatgactgatattacacctcaaggtgtggctatgagagctggagttctggctgatgatcacttgattgaagtgaatggagagaatgtagaggatgccagccatgaggaagtggttgaaaaggtgaagaagtcaggaagccgtgtcatgttcctgctggtggacaaagaaactgacaagcgtcatgttgagcagaagatacaattcaaaagagaaacagccagtttgaaactgttaccccaccagccccgaattgtggagatgaagaaaggaagcaatggctatggtttctatctgagggcaggctcagaacagaaaggtcaaatcatcaaggacatagattctggaagtccagcagaggaggctggcttgaagaacaatgatctggtagttgctgtcaacggcgagtctgtggaaaccctggatcatgacagtgtggtagaaatgattagaaagggtggagatcagacttcactgttggtggtagacaaagagacggacaacatgtacagactggctcatttttctccatttctctactatcaaagtcaagaactgcccaatggctctgtcaaggaggctccagctcctactcccacttctctggaagtctcaagtccaccagatactacagaggaagtagatcataagcctaaactctgcaggctggctaaaggtgaaaatggctatggctttcacttaaatgcgattcggggtctgccaggctcattcatcaaagaggtacagaagggcggtcctgctgacttggctgggctagaggatgaggatgtcatcattgaagtgaatggggtgaatgtgctagatgaaccctatgagaaggtggtggatagaatccagagcagtgggaagaatgtcacacttctagtctgtggaaagaaggcctatgattatttccaagctaagaaaatccctattgtttcctccctggctgatccacttgacacccctccagattctaaagaaggaatagtggtggagtcaaaccatgactcgcacatggcaaaagaacgggcccacagtacagcctcacattcttcttccaattctgaagatacagagatgtgatgaaaacaagtaatagctttggctgtttatttgatagctgtttctgggtatttaataggaatcctttctcaaggaatgagttgtgacctgtttactgtctctttagaagaaaaactccactggaaaccattcaccatgtgtgattgtcttctgttatcatttgtcttacaggcggctattgcagacggctaatttatgcttaacttaggaagagataaggcaagagctagatttttttcatgtgatcttttccaagcttcaacttaacttaactacatttctctgtatgatgatgtctcttacttctacaggttccttgagcaccaaagatgattcataactctgtataggtgacagctgcttataaaagcatcttagcagataagcctattaaaattgtgcttttgtaacaatgttgtggttgctagaataaataccattaacaaatgcc

SEQ ID NO: 6227 - DNA, 2912 bp, Homo sapiens
cttcgctttcagagcatcctcactccgcccagttcggtgccagctgcgtgggctccagcttcgatcgttttccttggaatgctccaaaactcagcagcgactaagggaattccattggaatttgccgggcgtgctctcaccccgcacggcacccgcgccgtcagtcctcggatcccatcacttcagcccgaagattgcaactttgcagagacgaagaaatagcatggcatgaaacatggctcagttctattacaaaagaaatgttaatgctccctatagagaccgcatccctctaaggatagtaagagcagaatcagaactctcgccatcagaaaaagcctacttgaatgctgtggaaaagggagattatgccagtgtcaagaaatccctagaggaagctgaaatttattttaaaatcaatattaattgcattgatcctctcggaagaactgctctcctcattgcaattgaaaatgagaacttggagctcatcgaactactcttaagctttaatgtctatgttggagatgctctattacatgctatcagaaaagaagtcgtcggagctgttgagctgttattgaaccacaaaaaacctagtggagaaaaacagtttgttgcccagcccaattgtcaacagctgctggcatctcgctggtacgatgagtttccaggctggaggagaagacactgggcagtgaagatggtgacatgtttcataataggacttctttttcctgtcttctctgtgtgctacctgatagctcccaaaagcccacttggactgttcatcaggaagccatttatcaagtttatctgccacacagcctcctatttgacttttttgttcctgctgctgcttgcctctcagcacatcgacaggtcagacttgaacaggcaaggtccaccaccaaccatcgtcgagtggatgatattaccgtgggtcctgggcttcatatggggagaaattaaacagatgtgggatggcggacttcaggactacatccatgattggtggaatctaatggactttgtaatgaactccttatatttagcaacaatctccttgaaaattgttgcatttgtaaagtacagtgcccttaatccacgagaatcatgggacatgtggcatcccactctggtggcagaggctttatttgctattgcaaacatcttcagttctctgcgtctgatctcactgtttactgcaaattctcacctgggacctctgcaaatatctctgggaagaatgctcctggacattttgaagtttctattcatatactgccttgtgttgctagcatttgcaaatggcctaaatcaattgtacttctattatgaagaaacgaaagggttaacctgcaaaggcataagatgtgaaaagcagaataatgcattttcaacgttatttgagacactgcagtccctgttttggtcaatatttgggctcatcaatttatatgtgaccaatgtcaaagcacagcatgaatttactgagtttgttggtgccaccatgtttgggacatacaatgtcatctctctggttgttctactcaacatgttaatagctatgatgaataattcttaccaactgattgctgaccatgcagatatagaatggaaatttgcacgaacaaagctttggatgagttattttgaagaaggaggtactctgcctactcccttcaatgtcatcccgagccccaagtctctctggtacctgatcaaatggatctggacacacttgtgcaagaaaaagatgagaagaaagccagaaagttttggaacaatagggaggcgagctgctgataacttgagaagacatcaccaataccaagaagttatgaggaacctggtgaagcgatacgttgctgcaatgattagagatgctaaaactgaagaaggcctgaccgaagagaactttaaggaactaaagcaagacatttctagtttccgctttgaagtcctgggattactaagaggaagcaaactttccacaatacaatctgcgaatgcctcgaaggagtcttcaaattcggcagactcagatgaaaagagtgatagcgaaggtaatagcaaggacaagaaaaagaatttcagcctttttgatttaaccaccctgattcatccgagatcagcagcaattgcctctgaaagacataacataagcaatggctctgccctggtggttcaggagccgcccagggagaagcagagaaaagtgaattttgtgaccgatatcaaaaactttgggttatttcatagacgatcaaaacaaaatgctgctgagcaaaatgcaaaccaaatcttctctgtttcagaagaagttgctcgtcaacaggctgcaggaccacttgagagaaatattcaactggaatctcgaggattagcttcacggggtgacctgagcattcccggtctcagtgaacaatgtgtgttagtagaccatagagaaaggaatacggacacactggggttacaggtaggaaagagagtgtgtccattcaagtcagagaaggtggtggtggaggacacggttcctataataccaaaggagaaacatgcaaaagaagaggactctagtatagactatgatctaaacctcccagacacagtcacccacgaagattacgtgaccacaagattgtgatacttgaaggaggaagcgtttaccatacacatacgtattttccgtagtgctctgggtgggggaaaatgtttaaattgtattagcaaatgctaacttacactttatagcgtttatcagctgtggcatattacctgtaacatgtttaaataaggcaaaggcaatcaaaaacctttttgttttgtagcctgcttttgctttcacaatttgtcttacaattgtttttgttaataaataaatgcaccttgtattcttgtactgttgc

SEQ ID NO: 6228 - DNA, 2612 bp, Homo sapiens
gggaagccagacggttaacacagacaaagtgctgccgtgacactcggccctccagtgttgcggagaggcaagagcagcgaccgcggcacctgtccgcccggagctgggacgcgggcgcccgggcggccggacgaagcgaggagggaccgccgaggctgcccccaagtgtaactccagcactgtgaggtttcagggattggcagaggggaccaaggggaccatgaaaatggacatggaggatgcggatatgactctgtggacagaggctgagtttgaagagaagtgtacatacattgtgaacgaccacccctgggattctggtgctgatggcggtacttcggttcaggcggaggcatccttaccaaggaatctgcttttcaagtatgccaccaacagtgaagaggttattggagtgatgagtaaagaatacataccaaagggcacacgttttggacccctaataggtgaaatctacaccaatgacacagttcctaagaacgccaacaggaaatatttttggaggatctattccagaggggagcttcaccacttcattgacggctttaatgaagagaaaagcaactggatgcgctatgtgaatccagcacactctccccgggagcaaaacctggctgcgtgtcagaacgggatgaacatctacttctacaccattaagcccatccctgccaaccaggaacttcttgtgtggtattgtcgggactttgcagaaaggcttcactacccttatcccggagagctgacaatgatgaatctcacacaaacacagagcagtctaaagcaaccgagcactgagaaaaatgaactctgcccaaagaatgtcccaaagagagagtacagcgtgaaagaaatcctaaaattggactccaacccctccaaaggaaaggacctctaccgttctaacatttcacccctcacatcagaaaaggacctcgatgactttagaagacgtgggagccccgaaatgcccttctaccctcgggtcgtttaccccatccgggcccctctgccagaagactttttgaaagcttccctggcctacgggatcgagagacccacgtacatcactcgctcccccattccatcctccaccactccaagcccctctgcaagaagcagccccgaccaaagcctcaagagctccagccctcacagcagccctgggaatacggtgtcccctgtgggccccggctctcaagagcaccgggactcctacgcttacttgaacgcgtcctacggcacggaaggtttgggctcctaccctggctacgcacccctgccccacctcccgccagctttcatcccctcgtacaacgctcactaccccaagttcctcttgcccccctacggcatgaattgtaatggcctgagcgctgtgagcagcatgaatggcatcaacaactttggcctcttcccgaggctgtgccctgtctacagcaatctcctcggtgggggcagcctgccccaccccatgctcaaccccacttctctcccgagctcgctgccctcagatggagcccggaggttgctccagccggagcatcccagggaggtgcttgtcccggcgccccacagtgccttctcctttaccggggccgccgccagcatgaaggacaaggcctgtagccccacaagcgggtctcccacggcgggaacagccgccacggcagaacatgtggtgcagcccaaagctacctcagcagcgatggcagcccccagcagcgacgaagccatgaatctcattaaaaacaaaagaaacatgaccggctacaagacccttccctacccgctgaagaagcagaacggcaagatcaagtacgaatgcaacgtttgcgccaagactttcggccagctctccaatctgaaggtccacctgagagtgcacagtggagaacggcctttcaaatgtcagacttgcaacaagggctttactcagctcgcccacctgcagaaacactacctggtacacacgggagaaaagccacatgaatgccaggtctgccacaagagatttagcagcaccagcaatctcaagacccacctgcgactccattctggagagaaaccataccaatgcaaggtgtgccctgccaagttcacccagtttgtgcacctgaaactgcacaagcgtctgcacacccgggagcggccccacaagtgctcccagtgccacaagaactacatccatctctgtagcctcaaggttcacctgaaagggaactgcgctgcggccccggcgcctgggctgcccttggaagatctgacccgaatcaatgaagaaatcgagaagtttgacatcagtgacaatgctgaccggctcgaggacgtggaggatgacatcagtgtgatctctgtagtggagaaggaaattctggccgtggtcagaaaagagaaagaagaaactggcctgaaagtgtctttgcaaagaaacatggggaatggactcctctcctcagggtgcagcctttatgagtcatcagatctacccctcatgaagttgcctcccagcaacccactacctctggtacctgtaaaggtcaaacaagaaacagttgaaccaatggatccttaagattttcagaaaacacttattt

SEQ ID NO: 6229 - DNA, 2903 bp, Homo sapiens
ccttctctctggactttgcatttccattccttttcattgacaaactgactttttttatttctttttttccatctctgggccagcttgggatcctaggccgccctgggaagacatttgtgttttacacacataaggatctgtgtttggggtttcttcttcctcccctgacattggcattgcttagtggttgtgtggggagggagaccacgtgggctcagtgcttgcttgcacttatctgcctaggtacatcgaagtcttttgacctccatacagtgattatgcctgtcatcgctggtggtatcctggcggccttgctcctgctgatagttgtcgtgctctgtctttacttcaaaatacacaacgcgctaaaagctgcaaaggaacctgaagctgtggctgtaaaaaatcacaacccagacaaggtgtggtgggccaagaacagccaggccaaaaccattgccacggagtcttgtcctgccctgcagtgctgtgaaggatatagaatgtgtgccagttttgattccctgccaccttgctgttgcgacataaatgagggcctctgagttaggaaaggctcccttctcaaagcagagccctgaagacttcaatgatgtcaatgaggccacctgtttgtgatgtgcaggcacagaagaaaggcacagctccccatcagtttcatggaaaataactcagtgcctgctgggaaccagctgctggagatccctacagagagcttccactgggggcaacccttccaggaaggagttggggagagagaaccctcactgtggggaatgctgataaaccagtcacacagctgctctattctcacacaaatctaccccttgcgtggctggaactgacgtttccctggaggtgtccagaaagctgatgtaacacagagcctataaaagctgtcggtccttaaggctgcccagcgccttgccaaaatggagcttgtaagaaggctcatgccattgaccctcttaattctctcctgtttggcggagctgacaatggcggaggctgaaggcaatgcaagctgcacagtcagtctagggggtgccaatatggcagagacccacaaagccatgatcctgcaactcaatcccagtgagaactgcacctggacaatagaaagaccagaaaacaaaagcatcagaattatcttttcctatgtccagcttgatccagatggaagctgtgaaagtgaaaacattaaagtctttgacggaacctccagcaatgggcctctgctagggcaagtctgcagtaaaaacgactatgttcctgtatttgaatcatcatccagtacattgacgtttcaaatagttactgactcagcaagaattcaaagaactgtctttgtcttctactacttcttctctcctaacatctctattccaaactgtggcggttacctggataccttggaaggatccttcaccagccccaattacccaaagccgcatcctgagctggcttattgtgtgtggcacatacaagtggagaaagattacaagataaaactaaacttcaaagagattttcctagaaatagacaaacagtgcaaatttgattttcttgccatctatgatggcccctccaccaactctggcctgattggacaagtctgtggccgtgtgactcccaccttcgaatcgtcatcaaactctctgactgtcgtgttgtctacagattatgccaattcttaccggggattttctgcttcctacacctcaatttatgcagaaaacatcaacactacatctttaacttgctcttctgacaggatgagagttattataagcaaatcctacctagaggcttttaactctaatgggaataacttgcaactaaaagacccaacttgcagaccaaaattatcaaatgttgtggaattttctgtccctcttaatggatgtggtacaatcagaaaggtagaagatcagtcaattacttacaccaatataatcaccttttctgcatcctcaacttctgaagtgatcacccgtcagaaacaactccagattattgtgaagtgtgaaatgggacataattctacagtggagataatatacataacagaagatgatgtaatacaaagtcaaaatgcactgggcaaatataacaccagcatggctctttttgaatccaattcatttgaaaagactatacttgaatcaccatattatgtggatttgaaccaaactctttttgttcaagttagtctgcacacctcagatccaaatttggtggtgtttcttgatacctgtagagcctctcccacctctgactttgcatctccaacctacgacctaatcaagagtggatgtagtcgagatgaaacttgtaaggtgtatcccttatttggacactatgggagattccagtttaatgcctttaaattcttgagaagtatgagctctgtgtatctgcagtgtaaagttttgatatgtgatagcagtgaccaccagtctcgctgcaatcaaggttgtgtctccagaagcaaacgagacatttcttcatataaatggaaaacagattccatcataggacccattcgtctgaaaagggatcgaagtgcaagtggcaattcaggatttcagcatgaaacacatgcggaagaaactccaaaccagcctttcaacagtgtgcatctgttttccttcatggttctagctctgaatgtggtgactgtagcgacaatcacagtgaggcattttgtaaatcaacgggcagactacaaataccagaagctgcagaactattaactaacaggtccaaccctaagtgagacatgtttctccaggatgccaaaggaaatgctacctcgtggctacacatattatgaataaatgaggaagggcctgaaagtgacacacaggcctgcatgtcactgt

SEQ ID NO: 6230 - DNA, 1471 bp, Homo sapiens
gatccctcccatctcacagtacctcacaggtctcttcccccgagcagtgcattgctggagcgaggagaagctcacgaatcagctgcaggtctctgttttgaaaaagcagagatacagaggcagaggaaaagggtggactcctatgtgacctgttcttagagcaagacaatcaccatctgaattccagaagccctgttcatggttggggatattttctcgactgcatggaatcagaaagaagcaaaaggatgggaaatgcctgcattcccctgaaaagaattgcttatttcctatgtctcttatctgcgcttttgctgactgaggggaagaaaccagcgaagccaaaatgccctgccgtgtgtacttgtaccaaagataatgctttatgtgagaatgccagatccattccacgcaccgttcctcctgatgttatctcattatcctttgtgagatctggttttactgaaatctcagaagggagttttttattcacgccatcgctgcagctcttgttattcacatcgaactcctttgatgtgatcagtgatgatgcttttattggtcttccacatctagagtatttattcatagaaaacaacaacatcaagtcaatttcaagacatactttccggggactaaagtcattaattcacttgagccttgcaaacaacaatctccagacactcccaaaagatattttcaaaggcctggattctttaacaaatgtggacctgaggggtaattcatttaattgtgactgtaaactgaaatggctagtggaatggcttggccacaccaatgcaactgttgaagacatctactgcgaaggccccccagaatacaagaagcgcaaaatcaatagtctctcctcgaaggattttgattgcatcattacagaatttgcaaagtctcaagacctgccttatcaatcattgtccatagacactttttcttatttgaatgatgagtatgtagtcatcgctcagccttttactggaaaatgcattttccttgaatgggaccatgtggaaaagaccttccggaattatgacaacattacagttttaagggaaatacacagatttacaaacatgtcatagttgacttaagcgcatgagacaccaaattctgtggctgccatcagaaattttctacagtacatgacccggatgaactcaatgcatgatgactcttcttatcacacttgcaaatgaatgcctttcaaacattgagactgctagaaccaagcactaccagtatctccatccttaactgtccagtccagtgatgtgggaagttaccttttataagacaaaatttaattgtgtaactgttctttgcagtgaagatgtgtaaataagcgtttaatggtatctgttactccaaaaagaaatattaatatgtacttttccatttatttattcatgtgtacagaaacaactgccaaataaaatgtttacattttctttca

SEQ ID NO: 6231 - DNA, 1227 bp, Homo sapiens
ggccaccgcagcggacagcgccaagtgaagcctcgcttcccctccgcggcgaccagggcccgagccgagagtagcagttgtagctacccgcccagaaactagacacaatgtgcgacgaagacgagaccaccgccctcgtgtgcgacaatggctccggcctggtgaaagccggcttcgccggggatgacgcccctagggccgtgttcccgtccatcgtgggccgcccccgacaccagggcgtcatggtcggtatgggtcagaaagattcctacgtgggcgacgaggctcagagcaagagaggtatcctgaccctgaagtaccctatcgagcacggcatcatcaccaactgggatgacatggagaagatctggcaccacaccttctacaacgagcttcgcgtggctcccgaggagcaccccaccctgctcaccgaggcccccctcaatcccaaggccaaccctgagcgcgagatcgtgcgcgacatcaaggagaagctgtgctacgtggccctggacttcgagaacgagatggcgacggccgcctcctcctcctccctggaaaagagctacgagctgccagacgggcaggtcatcaccatcggcaacgagcgcttccgctgcccggagacgctcttccagccctccttcatcggtatggagtcggcgggcattcacgagaccacctacaacagcatcatgaagtgtgacatcgacatcaggaaggacctgtatgccaacaacgtcatgtcggggggcaccacgatgtaccctgggatcgctgaccgcatgcagaaagagatcaccgcgctggcacccagcaccatgaagatcaagatcatcgccccgccggagcgcaaatactcggtgtggatcggcggctccatcctggcctcgctgtccaccttccagcagatgtggatcaccaagcaggagtacgacgaggccggcccttccatcgtccaccgcaaatgcttctagacacactccacctccagcacgcgacttctcaggacgacgaatcttctcaatgggggggcggctgagctccagccaccccgcagtcactttctttgtaacaacttccgttgctgccatcgtaaactgacacagtgtttataacgtgtacatacattaacttattacctcattttgttatttttcgaaacaaagccctgtggaagaaaatggaaaacttgaagaagcattaaagtcattctgttaagctgcg

SEQ ID NO: 6232 - DNA, 2676 bp, Homo sapiens
gtaggtgcgtgcccgggactctgccgatgcgggccgcgccccctggggccaagagactccacgtcccgctcagggcaaagggtgtggggagaagcggtcacgcccctcggctggaatccgtgaggaccaggtctttttcagtgtgctcaatatggtcaccaagcctggaaacatagagtctcaccctgttgcttaggcagatggcgcgatctcggctcctgggttcaagcaattctcctgcctcagcctcctgaatagccgggattacagtcgtccagcatgctctgcccaccccacgccgaggtgcactgaccatgagcctcaactcctccctcagctgcaggaaggagctgagtaatctcactgaggaggagggtggcgaagggggcgtcatcatcacccagttcatcgccatcattgtcatcaccatttttgtctgcctgggaaacctggtcatcgtggtcaccttgtacaagaagtcctacctcctcaccctcagcaacaagttcgtcttcagcctgactctgtccaacttcctgctgtccgtgttggtgctgccttttgtggtgacgagctccatccgcagggaatggatctttggtgtagtgtggtgcaacttctctgccctcctctacctgctgatcagctctgccagcatgctaaccctcggggtcattgccatcgaccgctactatgctgtcctgtaccccatggtgtaccccatgaagatcacagggaaccgggctgtgatggcacttgtctacatctggcttcactcgctcatcggctgcctgccacccctgtttggttggtcatccgtggagtttgacgagttcaaatggatgtgtgtggctgcttggcaccgggagcctggctacacggccttctggcagatctggtgtgccctcttcccctttctggtcatgctggtgtgctatggcttcatcttccgcgtggccagggtcaaggcacgcaaggtgcactgtggcacagtcgtcatcgtggaggaggatgctcagaggaccgggaggaagaactccagcacctccacctcctcttcaggcagcaggaggaatgcctttcagggtgtggtctactcggccaaccagtgcaaagccctcatcaccatcctggtggtcctcggtgccttcatggtcacctggggcccctacatggttgtcatcgcctctgaggccctctgggggaaaagctccgtctccccgagcctggagacttgggccacatggctgtcctttgccagcgctgtctgccaccccctgatctatggactctggaacaagacagttcgcaaagaactactgggcatgtgctttggggaccggtattatcgggaaccatttgtgcaacgacagaggacttccaggctcttcagcatttccaacaggatcacagacctgggcctgtccccacacctcactgcgctcatggcaggtggacagcccctggggcacagcagcagcacgggggacactggcttcagctgctcccaggactcagggacagatatgatgctgcttgaggactacacgtctgatgacaaccctccctctcactgcacttgcccacccaagagaaggagctcggtgacatttgaggatgaagtggaacaaatcaaagaagctgccaagaactcgattcttcatgtgaaagctgaagtacacaagtccttggacagttacgcagcaagcttggccaaagccattgaggccgaagccaaaatcaacttatttggggaggaggctttgccaggggtcttggttacagcacggactgtcccggggggcggcttcgggggccgccgaggcagcagaactcttgtgagccagaggctgcagttgcagagcatcgaagaaggagatgttttagctgccgagcagagatgagggcctcagggtgccgtggggctgcagcctgagaggctggcccggggaggagttcccatcaccgcctgtgccgcggccttgggagcatgtcactgtgtacagctggccacacacagggaaggagcagcatctggtatgcagccaccaggacaaggactgaaaataatgtctacagtccacagcttcagcatttccagagaccacatgtgagcttcttttaggtcccagtgatgggaccagaagcatctaaagcaaaaaaaaaaccaaaaaaaaatctagagatgtggctgtggctttttgggaggtggggcatgggaggaccagagacgaagggcttggaaggagacccccacatgcatcatttcctcctcttcacagtgtgctgggagtccagccgtgcactgtgccagatgcctcaggaggagaaccctccccagtgtactgtgaaggatgacacagcacttcttcctaatgacacgcgaccgtcctggtgcctctacatggttgatgcgggcagtgtgggaccctcagttctaggactggtccgcagagaaagcacccaggagcagagcgcttcggagcggtcctcagtggcgccacctgctggtgctaatagggacagccacaggcctcttgcagactggcccaccctgcctacttccctactgacaagttctttggtatttcaaaagggagaaaccactataaaagacaagaggaagggcaggtactaggtgtttcatttccagaattaaaaaaaaaatccatttaa

SEQ ID NO: 6233 - DNA, 2897 bp, Homo sapiens
ctgctttgcaggcccaggctcaaggcaaattataagtagggaaccaatttgagggaaagacatgtgaacagagttaaggtaccacgtcctgggagcgaccagcagccccacctgaagtccgcatgcaactctgacaagctcaggtgcttgttttaaggaaaggggctactagagtcttaccaacagcgagcccaggtgggagatgaaacaggtactccccaaaataggtcatccgagggaggaaaactgatggagagcacaatgtgctctgagcgtttttaatgtttttaagcttttaaatgatttcttcaaggccgagcagcagcagcaaaggtgtggcttaaaggattaagggggtttctgctgacacctagaatgaagttactctattactaatcaagccgagaggaggcccactatgcccccgtttatcatcctttcccagttcctttttgctggtcacaaaacgatgctcatcaatcccacctaaagcaggaggccaggagcccagcctcttgtagaaacagcgagggtataactgccctcccgttctgcccccaagacgaaggaggactctcggaagccaagaaaggtttaagaagtctttctggatagagagcagtgcccaggcaggaagcctttcgccggcagagcggggtccaaggacgagctggagaggacagaggcgcgatgggcctgctgcagggcctgctccgagtccggaagctgctgctggtcgtctgcgtcccgctcctgctgctgcctctgcccgtcctccaccccagcagcgaggcctcgtgtgcttacgtgctgatcgtgactgctgtgtactgggtgtcggaggcagtgcctctgggagctgcagccctggtgccggccttcctttacccgttcttcggagtcctccggtccaatgaggtggcggcggagtacttcaagaacaccacgctgctgctggtgggggtcatctgcgtggcggctgccgtggagaagtggaacctgcataagcgcattgctctgcgcatggtcttgatggccggagccaagccgggcatgctgctgctctgcttcatgtgctgtaccacgttgctgtccatgtggctgtccaacacctccaccaccgccatggtgatgcccatcgtggaggccgtgctgcaggagctggtcagtgctgaggacgagcagctcgtggcgggcaactccaacaccgaagaggccgaacccatcagtctggatgtaaagaacagccaaccttctctggaactcatctttgtcaatgaagagtccaacgcagacctcaccactctgatgcacaacgagaacctgaatggtgtgccctcgatcaccaaccccatcaaaactgcaaaccaacaccagggcaagaagcaacacccatcccaggaaaagccacaagtcctgacccccagccccaggaagcagaagctgaacagaaagtacaggtcccaccatgaccagatgatctgcaagtgcctctccctgagcatatcctactccgctaccattggcggcctgaccaccatcatcggcacctccaccagcctcatcttcctggaacacttcaacaaccagtatccagccgcagaggtggtgaactttggcacctggttcctcttcagcttccccatatccctcatcatgctggtggtcagctggttctggatgcactggctgttcctgggctgcaattttaaagagacctgctctctgagcaagaagaagaagaccaaaagggaacagttgtcagagaagaggatccaagaagaatatgaaaaactgggagacattagctacccagaaatggtgactggatttttcttcatcctgatgaccgtactgtggtttacccgggagcctggctttgtccctggctgggattctttctttgaaaagaaaggctaccgtactgatgccacagtctctgtcttccttggcttcctcctcttcctcattccagcgaagaagccctgctttgggaaaaagaatgatggagagaaccaggagcactcactggggaccgagcccatcatcacgtggaaggacttccagaagaccatgccctgggagattgtcattctggttgggggaggctatgctctggcttctggtagcaagagctctggcctctctacatggattgggaaccagatgttgtccctgagcagcctcccaccgtgggctgtcaccctgctggcatgcatcctcgtgtccattgtcactgagtttgtgagcaacccagcaaccatcaccatcttcctgcccatcctgtgcagcctgtctgaaacgctgcacattaaccccctctacaccctgatcccagtcaccatgtgcatctcctttgcagtgatgctgcctgtgggcaatccccctaatgccatcgtcttcagctatgggcactgccagatcaaagatatggtgaaagctggcctgggagtcaacgttattggactggtgatagtaatggtggccatcaacacctggggagttagcctcttccacctggacacttacccagcatgggcgagggtcagcaacatcactgatcaagcctaacgccaagtgtacaaactggcccaaccacaggagctgccagtatccagcagtatctggaccacaggcaaagaaaaccactaggaccaccaggagcacacaaccccagacccacgccggagggcatccctccaccagaagattccgccacctcaagtgaactgcaggaatcctccaacaaccacaaacacatgcttcgctgttagtgtcttcttcctgccctcagcaccacagctcaagaaaacctaaagtttcaatacaagccataggctcacagaaaaagaaaaagaaaataaaaattaaattaaaaaaaaagaagacaaagaaaa

SEQ ID NO: 6234 - DNA, 4370 bp, Homo sapiens; identical to SEQ ID NO: 1545

SEQ ID NO: 6235 - DNA, 6298 bp, Homo sapiens
agagggaggtggcgatggtgcgcccggtggcggtggcggcggcggttgcggaggcttccttggtcggattgcaacgaggagaagatgactgaccaaccgactggctgaatgaatgaatggcggagccgagcgcgccatgaggagcctgccgagcctgggcggcctcgccctgttgtgctgcgccgccgccgccgccgccgccgccgtcgcctcagccgcctcggcggggaatgtcaccggtggcggcggggccgcggggcaggtggacgcgtcgccgggccccgggttgcggggcgagcccagccaccccttccctagggcgacggctcccacggcccaggccccgaggaccgggcccccgcgcgccaccgtccaccgacccctggctgcgacttctccagcccagtccccggagaccacccctctttgggcgactgctggaccctcttccaccacctttcaggcgccgctcggcccctcgccgaccacccctccggcggcggaacgcacttcgaccacctctcaggcgccgaccagacccgcgccgaccaccctttcgacgaccactggcccggcgccgaccacccctgtagcgaccaccgtaccggcgcccacgactccccggaccccgacccccgatctccccagcagcagcaacagcagcgtcctccccaccccacctgccaccgaggccccctcttcgcctcctccagagtatgtatgtaactgctctgtggttggaagcctgaatgtgaatcgctgcaaccagaccacagggcagtgtgagtgtcggccaggttatcaggggcttcactgtgaaacctgcaaagagggcttttacctaaattacacttctgggctctgtcagccatgtgactgtagtccacatggagctctcagcataccgtgcaacagttctgggaaatgccagtgcaaagtgggtgtcattggctctatatgtgaccgatgccaagatggatattatggctttagtaagaatggctgcttgccctgccaatgcaataatcggtctgccagttgcgatgccctcacaggtgcttgtttaaactgccaggaaaatagcaaaggaaatcactgtgaagaatgtaaagaaggattttatcagagtcctgatgccactaaagaatgtcttcgctgcccttgttcagcagtgacatctacaggcagctgctctataaaatcgagtgaattggaacctgaatgtgaccagtgtaaagatggttacataggcccgaactgcaataaatgtgaaaatggctattacaattttgacagcatctgtagaaagtgccaatgtcacggccatgtggacccagttaaaactccaaagatttgtaagcccgagagtggtgagtgcatcaactgcctccataacaccactgggttttggtgtgagaactgcctagaaggttatgttcacgacctcgagggaaattgcatcaagaaagaagttattcttccaacacctgaaggttctaccattttggtttccaatgcctctttgaccacatcagtgcccacccctgttataaatagtacttttacccctacaaccctgcagactatcttttcagtaagcacttctgaaaacagcacttcagctttagctgatgtatcatggacccaatttaacatcatcattttgacagtcatcatcattgttgtggtgctgctaatgggatttgtgggggctgtatatatgtaccgcgagtaccaaaaccggaaactcaatgcccccttttggaccatcgagctgaaagaagacaatatcagtttcagcagctaccatgacagcattcccaatgcagatgtttcgggattgttggaagatgatggcaatgaagtggctcccaatgggcagctgaccctgacgacgcccatacataactacaaagcctaaggagctagaactgttctgaattgttaaaccacagtgcttgctaagacagagtcagcccctgggccagacaaagcctggctagagtttgctgagaaagcaaaggcaaatagtgcatctgaaattttcaggtacaaatttgtaatgcgcttagcctatctattgctcttagttttcccatgaagatctgaagcgttcactgtcattaggacttgaagtaaagtatatttttgtaccaaaccacatgggagtatggaaaggctgaaccccatagtgcagcccaaaaccactttgacctccagatagactcctggggaagcattcaccaagccagtggtaacaagatgatgaatgtggagggggaaaagactgctggaagacttcatctccattcctgaaacattttttttaaaacagtgtcagggattatattcgttttactatacaaaaggacatcattgaggaaaagcttgtttctaggctgtatcacagtaaataatcttgattgtttctagaacaggggtagaaaagtcccaagatcttcagaagggcttggttttttcctcccaggattcttgctcagtgatgagttgaaagcacaggataagcttctaagggaggaaggcagcattggggagcaggaggctgatggtcctcctcagggtctcagtgtaaatgataaattgtctaaaaataaggaatattcctgcctctagagaaataaggtgtacatagttaatgtagcatatctggtcgacgttgtatttgtatctatttgtaaaaaaaaaatcatgtcatattttatcatctggaatttatttgtacagcagttaatggtgttgtaaaaagaaaaatatggggattgcttaaaatactgtaaaatagatggcaatattgctagagctgggactctggtgagcatccgtcatttttagtccttcttgaggacattgctgaaatttataagaggtcgaatgtttctttctttcctttctcagtctaaaagtagagttatatgctctttgacttactatgattcaagcaatagattttgaagtcagtaatcgttaagctgggacataggatgcattctccaaaaacattaatctaattagacattagccaccctatatattttacatagattaatataaaacatatcctcattaaaaaatgtttttcttgaatgtaaaagatagtcttccaaaggatagaaatattttagttccaagagaaaagccatcatattacttgggatctgtagttttcatgcctatgaaatatttataatcctccctcaccccaaataaaaaatctcctacatgtgaacatagcctgtcactcatttgccatgaggtatgtgccatctccctgcagtgctatagttctcccattgtcttcctgtctggttaatgagcagctttgtagatgggtgtgtctagttagttcttgctttttgatggagttttttcctagaggccaactactgttgctctcgtttattatgatattgacattttgggttaagcaaggtgggtgggaaaggtggtcagatgttaaatataacttattaggaggaacagtgaactgtgaagtggttagaaaaaaaataaaaacttcttattagattagacctaggaaattcaagctgacccctttgcctaacttccctagagaaaaacctagaacttggtcatccctttataggagacccctaagttgttctcagggtttggagatgatgttctggagggagtacaagcaaataatctacttctggtaatctgagggtgctttgcgtatttggccattgctcagaagaatagaggttacattatattacattatatgaaaattatttagtttttctatagccctttgtagtttgcaaagcacttttccatatgtgtgtcctctcttccacaccatagccccctgaggaagtaattgttgtccccattttatagatgaaaaggctgaggcacagaggagctaaatatcttgttcaaggctatacaatgtgtgtgattattaggcttggaatcagggcctctaactctaaagcacatgttttttcaactatatgcagaaattgcctagccatggacacaagaaagctgggaggaagagttctacttgtggatgtttttaattttttttaaatatcaggagcaatccagggccatacagctatgaagcacttagtgaaaagaacacaagaagatttactaactgaagttagtattagtgattagaaaacaaaactgccagtttgtgcttcattaaggtgaactcatctctccaagcaggaagggaaaatttgctttccctagcagttgctgcatatgtgtgtacagactgcacaattctaagaaattgtgcaaaatggcatacctgtctttctcccagatacaccgccccctgccccccccaaaaaaggtcaggattaaaggtggtgagaagtgaacatttattaaacagaagttaaaccaatagagagaaaggaggtttgttggagtctaagaggattttgaccatgtagaaattccttgaaacagaccttaaaaggtattgaaaaattgaatcacaaagaaagtttacctttaaatacttgttaatggctcctagatcatggttataatttttctcaatgggaaaaaaagtcttaaaatttgttttaaataagatcctctaatgtctcgagctttttgattctggaaataatttgctttaaaatataaatcaatcagaaagtgatctaccactgaaatcattctaggaaactagcatgggatgcactgcacaatgttctttcctctaaaggcatgggccccataaactgtggcatctggcagcaggatgccatcagtcctttagaaagcctaattttgggccgggtgcggtggctcacgcctgtaatcccagcactttgggaggccgaggcgggtggatcacaaggtcaggagttcgagaccagcctggtcaacatggcgaaatcccgtctctactaaaaacacaaaaattagccgggtgtacgtgcctgtagtctcagctacttgggaggctgaggcaggagaatcacttgaacctgggaggcagaggttacagtgagccgagatggcgccatttcactccagcctgggcgacagagcaagactctgtctcaaaaaaaaggaagaaaaagaaagcctaatattgggagaatgtttgtgtaaggattggaaatctgtttatttttaaataagatagcactgatgtgaatcttatttggaaattacagatactgccattaagcgatgcttttatcttcattaattcattttggtaagcgcctatgcatttctgatggttaggtgccctaggtagtgttaagtatgtccgtgtcctcccttactcccctctcgctccctctaccctctatcccctagggttcttttattaatggaatttctccagttatagagaaaaaaatgacatttgaaaactaaagctcatttatattaatactaaggtcctgtgggcctagtgcgttactcttcccagtgatacctagattttaagagtagagaacagaggaaacatgggatgagaggagagaggttttttagacaacatttgtagacacctcaaattatatcactgttctctagcgccaatattcccaggtaaattgaccattaaagcaatactcactgacctactagtttattttggtcagctgagtaccatcaggatatttaaccctttaagtgctgttttgggagtagaaaactaaagcaacaatacttcctcttgacagctttgattggaatggggttattagatcattcaccttggtcctacactttttaggatgcttggtgaacataacaccacttataatgaacatccctggttcctatattttgggctatgtgggtaggaattgttacttgttactgcagcagcagccctagaaagtaagcccagggcttcagatctaagttagtccaaaagctaaatgatttaaagtcaagttgtaatgctaggcataagcactctataatacattaaattataggccgagcaattagggaatgtttctgaaacattaaacttgtatttatgtcactaaaattctaacacaaacttaaaaaatgtgtctcatacatatgctgtactaggcttcatcatgcatttctaaatttgtgtatgatttgaatatatgaaagaatttatacaagagtgttatttaaaattattaaaaataaatgtatataatttgtacctattgtagatttgttgtttacttttttgtgtggtcagagttgtttcatgtcttcaaatacatgccaaggatcatttactttcagcccacttcataaaaatctttgaactctt

SEQ ID NO: 6236 - DNA, 1344 bp, Homo sapiens
gcgggacccaactgattgtcaaaggcggcagattgtagtttttgttttggccggaaaggcttaccatgagttgccagggctgagagagatggagaaggattcgcggcggtgacagattaaattccccagttacattatagacttggaggtgggggatcttctcatcgttagaggccccgatcatgggagataggcggttcggagccagttctgcctaactttgtgttcactgatgttagggctgctagggctgcaaaggtgggcacccctactcgcctaagagctttctcctctcttctctttttcccctttgcctctctccttacatcacctgcccactaagtagacttgtccttgtgtggacgggagccggaaagccttgagaacttattcctcgacccggacatggcacaggagaaaatgaaactaggtttcaagtcgctgccgagttccactaccgcagacggcaacattctgagaagagtcaacagtgcccctttgatcaatggacttggttttaattcacaggtgttgcaagctgacatgttaagaattaggacaaacagaacaacatttaggaatcgacgctctctgttgttgccacctcctccctttcatggttccatcagccgccttcatcaaatcaaacaggaagaagccatggatttaataaatagagaaacaatgtctgaatggaagctacaaagtgagatacagataagtcactcttgggaagaaggcttgaaactgaatgacaatggcttacagaaatcatcctctctaaagtgcattgatttaactccagtatcctcaatggcttcttccatcaagaagactgggaagtctacttccagctacttttgatggaaacgacagcaatgctggatcttctggtaattcgtcagctgaaatcggcactgtcacaaactctcctgtgtcaccttctgatactggttctcatttgttctagtagacaaactttcaactaaatgattcacccatcccaagactttctcaccagtggagaaacacacacatcaagcaaaccaagtcagagcaatgagaattgtactgtataatttaaactatctcctatttatcttttttcctcaatttcctaaaattctatttatctacagaacttgcgtgtataattcttgtgtacatccttaaatttaatgtaataacatgttaaagatgttttccaaatcagaaccatgttgaagatacaagcgtaaattgttaggctgctattttctagaaaatgctgtaccttgactttttaaaataatcttatgaaacataattctgataaaatataattgttcaattaacaaagtaaaa

SEQ ID NO: 6237 - DNA, 3858 bp, Homo sapiens
tttctttctccacagacctttgtagtattaaacagagggaaaactctcttcagatttagtgccacgcctgccttgtacattttaagtccttttaacctgataagaagaatagctattaaaattttgatacattcattatttagcatgatcattatgtgcactattttgaccaactgtgtattcatgacttttagtaaccctcctgactggtcgaagaatgtggagtacacgttcacagggatttatacatttgaatcactagtgaaaatcattgcaagaggtttctgcatagatggctttacctttttacgggacccatggaactggttagatttcagtgtcatcatgatggcgtatataacagagtttgtaaacctaggcaatgtttcagctctacgcactttcagggtactgagggctttgaaaactatttcggtaatcccaggcctgaagacaattgtgggtgccctgattcagtctgtgaagaaactgtcagatgtgatgatcctgacagtgttctgcctgagtgtttttgccttgatcggactgcagctgttcatggggaaccttcgaaacaagtgtgttgtgtggcccataaacttcaacgagagctatcttgaaaatggcaccaaaggctttgattgggaagagtatatcaacaataaaacaaatttctacacagttcctggcatgctggaacctttactctgtgggaacagttctgatgctgggcaatgcccagagggataccagtgtatgaaagcaggaaggaaccccaactatggttacacaagttttgacacttttagctgggccttcttggcattatttcgccttatgacccaggactattgggaaaacttgtatcaattgactttacgagcagccgggaaaacatacatgatcttcttcgtcttggtcatctttgtgggttctttctatctggtgaacttgatcttggctgtggtggccatggcttatgaagaacagaatcaggcaacactggaggaggcagaacaaaaagaggctgaatttaaagcaatgttggagcaacttaagaagcaacaggaagaggcacaggctgctgcgatggccacttcagcaggaactgtctcagaagatgccatagaggaagaaggtgaagaaggagggggctcccctcggagctcttctgaaatctctaaactcagctcaaagagtgcaaaggaaagacgtaacaggagaaagaagaggaagcaaaaggaactctctgaaggagaggagaaaggggatcccgagaaggtgtttaagtcagagtcagaagatggcatgagaaggaaggcctttcggctgccagacaacagaatagggaggaaattttccatcatgaatcagtcactgctcagcatcccaggctcgcccttcctctcccgccacaacagcaagagcagcatcttcagtttcaggggacctgggcggttccgagacccgggctccgagaatgagttcgcggatgacgagcacagcacggtggaggagagcgagggccgccgggactccctcttcatccccatccgggcccgcgagcgccggagcagctacagcggctacagcggctacagccagggcagccgctcctcgcgcatcttccccagcctgcggcgcagcgtgaagcgcaacagcacggtggactgcaacggcgtggtgtccctcatcggcggccccggctcccacatcggcgggcgtctcctgccagaggctacaactgaggtggaaattaagaagaaaggccctggatctcttttagtttccatggaccaattagcctcctacgggcggaaggacagaatcaacagtataatgagtgttgttacaaatacactagtagaagaactggaagagtctcagagaaagtgcccgccatgctggtataaatttgccaacactttcctcatctgggagtgccacccctactggataaaactgaaagagattgtgaacttgatagttatggacccttttgtggatttagccatcaccatctgcatcgtcctgaatacactgtttatggcaatggagcaccatcctatgacaccacaatttgaacatgtcttggctgtaggaaatctggttttcactggaattttcacagcggaaatgttcctgaagctcatagccatggatccctactattatttccaagaaggttggaacatttttgacggatttattgtctccctcagtttaatggaactgagtctagcagacgtggaggggctttcagtgctgcgatctttccgattgctccgagtcttcaaattggccaaatcctggcccaccctgaacatgctaatcaagattattggaaattcagtgggtgccctgggcaacctgacactggtgctggccattattgtcttcatctttgccgtggtggggatgcaactctttggaaaaagctacaaagagtgtgtctgcaagatcaaccaggactgtgaactccctcgctggcatatgcatgactttttccattccttcctcattgtctttcgagtgttgtgcggggagtggattgagaccatgtgggactgcatggaagtggcaggccaggccatgtgcctcattgtctttatgatggtcatggtgattggcaacttggtggtgctgaacctgtttctggccttgctcctgagctccttcagtgcagacaacctggctgccacagatgacgatggggaaatgaacaacctccagatctcagtgatccgtatcaagaagggtgtggcctggaccaaactaaaggtgcacgccttcatgcaggcccactttaagcagcgtgaggctgatgaggtgaagcctctggatgagttgtatgaaaagaaggccaactgtatcgccaatcacaccggtgcagacatccaccggaatggtgacttccagaagaatggcaatggcacaaccagcggcattggcagcagcgtggagaagtacatcattgatgaggaccacatgtccttcatcaacaaccccaacttgactgtacgggtacccattgctgtgggcgagtctgactttgagaacctcaacacagaggatgttagcagcgagtcggatcctgaaggcagcaaagataaactagatgacaccagctcctctgaaggaagcaccattgatatcaaaccagaagtagaagaggtccctgtggaacagcctgaggaatacttggatccagatgcctgcttcacagaaggttgtgtccagcggttcaagtgctgccaggtcaacatcgaggaagggctaggcaagtcttggtggatcctgcggaaaacctgcttcctcatcgtggagcacaactggtttgagaccttcatcatcttcatgattctgctgagcagtggcgccctggccttcgaggacatctacattgagcagagaaagaccatccgcaccatcctggaatatgctgacaaagtcttcacctatatcttcatcctggagatgttgctcaagtggacagcctatggcttcgtcaagttcttcaccaatgcctggtgttggctggacttcctcattgtggctgtaccattaaatttgtctggcttaatttaatggggacttctgggacctgcagagactgtaaagggcgagggtggtggtgaatgccttggtgggcgccatcccctccatcatgaatgtgctgctggtgtgtctcatcttctggctgattttcagcatcatgggagttaacttgtttgcgggaaagtaccactactgctttaatgagacttctgaaatccgatttgaaattgaagatgtcaacaataaaactgaatgtgaaaagcttatggaggggaacaatacagagatcagatggaagaa

SEQ ID NO: 6238 - DNA, 3961 bp, Homo sapiens
gcggcttccggcggcgtgacctgaccgcaagaggccaatggagtgtgggagctgaaagggtcttcgctggcggccggtaactggcggcggttgggaacggccgagtgtggctcttctggtgtttcagcttggggagagaggggtggccttcctcttgcagttgaggccggcgccgagccggacttcaggcggatctcgtggcggagcccatcttgctccctctcccaggcctttacccgctccctaggattcccgggccctgtaggtgggagttgggagacgacagtactgcttttaaagagacagtgttagggatcttggaagcacagccaacatgtgtgacattgaagaagccactaaccaactcctagatgtgaaccttcatgagaaccagaagtctgtacaagtgacagaaagtgacctcggaagtgaatctgagcttctagtcactattggagccactgtacctactggctttgagcaaacagctgcagatgaagtcagagagaaacttgggtcatcatgcaaaatcagcagagaccgtggcaagatatattttgtcatttcagtggaaagtctggcacaggttcattgtctgagatcagttgataacttatttgtggtggttcaggagtttcaagattaccagttcaaacaaacaaaggaagaagttctaaaggattttgaagacttggctggaaaactcccatggtcaaaccccttaaaagtgtggaaaattaatgccagttttaaaaagaaaaaagcaaagcgcaaaaagataaatcagaattcaagtaaagagaagattaataatggacaagaagtcaaaatcgatcagagaaatgttaaaaaagagttcactagccatgctttagattctcatatcttagattattatgaaaatccagccatcaaagaggatgtatcaacattaataggtgatgatttggcatcttgcaaagatgagactgatgaaagctcaaaagaagaaactgagcctcaagtgctgaagtttagagtcacatgcaacagggcaggagagaaacattgctttacctcaaatgaggctgcaagagattttgggggtgctgttcaagattattttaagtggaaggccgacatgaccaactttgatgtggaggttcttttgaacatccatgataatgaagtcattgtgggcattgcattgactgaagagagtctccaccgaagaaatataacacattttggacctacaactcttagatcaactcttgcctatgggatgctcaggctctgtgatcctctaccttatgatataatagtcgatccaatgtgtggaactggggcaataccaatagagggggccactgaatggtctgactgtttccatattgctggtgataataatccactggctgtgaatagagcagcaaataacattgcatctttattgaccaagagccaaattaaagaaggcaaaccctcctggggcttgcccatagatgctgttcagtgggatatctgcaatctgccattgagaactggctctgtggatattattgtaacagatttgccatttggaaaaaggatgggatccaagaagagaaactggaacctttatccagcttgcctacgggagatgagccgtgtctgcacacctaccacaggccgagctgtactacttactcaagacacaaaatgctttaccaaggcgttatctggaatgcgacacgtatggcgaaaggtggatacagtctgggtgaacgttggtggtcttcgtgctgcagtttacgttctgatacgtacacctcaagcttttgttcatccttcagaacaagacggagaaagaggaactctttggcaatgcaaagaatgaagatgactaatagtacttgtacttcccaccactggaaatgttagcataaaagaacttggagaggaaaaaagtattaacaaaactgcagtctgcactctttaaacctgtttaaggctcttcatcctggttagcaaaaggtgtgaatgtaatgtgatggaatttaaaagttttatgagaccaggcacagtggctcacgactgtaattccagcagtttaggaagccgaagtgtgcagatcacctgaggtccggagaccagcctggccaacatggtgaaaccctgtctctactagaaatacaaaaattagccaggtgtggtggcgggcgcctgtaatcccaactactcaggaggctgaggctagagaatcacttgaacccagcaggcggaggttgcggtgagtcgagatcacgccattgcactccagcctgtgcgacaagagcgaaactctgtctcaaaaagattttataagaaagcagagcttttccttgaagctcttttgaagtggtagcttaattagtattttgttgaaaatactttaaagatgcctagtgaaaagcctactaaagtgctgtgagattggggtttagaacattttattttcaggctttatggcctattttccattgtgtcaagtgcaaaactaccctggcccaaaggaagggcagagaacataattacatcttaggccacatttcattctttgcagctttgctaatccagttgctcaagttctttacctcaacctgaaggaatgaagcattattacattttgtgaatggtgttcagcctataagacgaagtctcacaagacctataggaaagtttaccatctgccttaaatattaaaatatccatctgttattcacattaatacacagaatgaaaatagaggtctaggaattatcaaaggtactgcaaaaatactgtatagaacttatttgtaaatagcacatacattgatagatggggtgtgggaccaacaaaccaaattaaaagaaattgtttttctttcagtacactaaggtgtgtgttttcaaaaccaaacacaaacctgtcaagagtatttgttggctagtttcttaaaaggccaagagaaaaaaaatgatatatctttggaaaacttttaatttgggagttatgtgagttgttactttctcctggatcacgattcacatttaattgcttttccagttgcaacaagtccttcttgagagttttgtggaaaatggtgcttccctggaacaaagagtagttgaggtttttttgtggaactcatcatagtattgtttattttggagcctctggctgcaatcagtatagattttcagtatcctattagtattataatagtactcctcttaatactttctgatgtctccattgagaataaaaggacacaatacttttgaaagaagagttcacattagcagcacagccagcaatcctcatctggtttctctgatctcctaccccacacttcataatgaatgggaaataagatgtttatgaaggttttatatcctagactggcctttttaccactatcagaattcacagctgctttgtttatgggccgaacacaaaacttttcacctgatgggagaaaccatttaaacctcaaattaagcaacccacagaaccaggaagttcaaggaccatgtctgttttcaccacgatgtctttccccacccccccaccccccactccaccccccactaagggcagggtattgtatctgccagactgggtatttgttgaacaagcgagtattttcgcctattagcttagtttttaaggaaatcattttttacttgattcatcatagctttaattctattacatactacaataaaaatttgacaagactgatacaaatatgtagtgggcaatagtttgccgtcttcttccctagtatggtgtttttcaatctggtgactagaataggcagtgggctataagcaggattcataaggcctggagctgagttatatgtgacactgccacctattcattgtgtgaccttggttttaaccttcaaagtgggtctcctggactaaaagaatgtgaaaagatggggaaataaatctgtaatctgaacatggaa

SEQ ID NO: 6239 - DNA, 5272 bp, Homo sapiens
gcgaagcgagtggctgcagagggctgcatcctgccgtccccagccccccacaaccgtacagccgtgcccaggtttccgcttagggaaccaggaggtccaggccctttctgccagcagccgggcgtgcaagcccccgacagagagaaatcttaaagatagctagagccacgggggctgatgcagcactgggcccggcgtctggagcaggaggtcgacggcgtgatgcggatttttggaggcgtccagcagctccgtgagatttacaaggacaaccggaacctgttcgaggtacaggagaatgagcctcagaagttggtggagaaggtggcaggggacattgagagccttctggacaggaaggtgcaggccctgaagagactggctgatgctgcagagaacttccagaaagcacaccgctggcaggacaacatcaaggaggaagacatcgtgtactatgacgccaaggctgacgctgagctggacgaccctgagagtgaggatgtggaaagggggtctaaggccagcaccctaaggctggacttcatcgaggacccaaacttcaagaacaaggtcaactattcatacgcggctgtacagatccctacggacatctacaaaggctccactgtcatcctcaatgagctcaactggacagaggccctggagaatgtgttcatggaaaaccgcagacaagaccccacactgctgtggcaggtcttcggcagcgccacaggagtcactcgctactacccggccaccccgtggcgagcccccaagaagatcgacctgtacgatgtccgaaggagaccctggtatatccagggggcctcgtcacccaaagacatggtcatcatcgtggatgtgagtggcagtgtgagcggcctgaccctgaagctgatgaagacatctgtctgcgagatgctggacacgctgtctgatgatgactatgtgaatgtggcctcgttcaacgagaaggcacagcctgtgtcatgcttcacacacctggtgcaggccaatgtgcgcaacaagaaggtgttcaaggaagctgtgcagggcatggtggccaagggcaccacaggctacaaggccggctttgagtatgcctttgaccagctgcagaactccaacatcactcgggccaactgcaacaagatgatcatgatgttcacggatggtggtgaggaccgcgtgcaggacgtctttgagaagtacaattggccaaaccggacggtgcgcgtgtttactttctccgtggggcagcataactatgacgtcacaccgctgcagtggatggcctgtgccaacaaaggctactattttgagatcccttccatcggagccatccgcatcaacacacaggaatatctagatgtgttgggcaggcccatggtgctggcaggcaaggaggccaagcaggtgcagtggaccaacgtgtatgaggatgcactgggactggggttggtggtaacagggaccctccctgttttcaacctgacacaggatggccctggggaaaagaagaaccagctgatcctgggcgtgatgggcattgacgtggctctgaatgacatcaagaggctgacccccaactacacgcttggagccaacggctatgtgtttgccattgacctgaacggctacgtgttgctgcaccccaatctcaagccccagaccaccaacttccgggagcctgtgactctggacttcctggatgcggagctagaggatgagaacaaggaagagatccgtcggagcatgattgatggcaacaagggccacaagcagatcagaacgttggtcaagtccctggatgagaggtacatagatgaggtgacacggaactacacctgggtgcctataaggagcactaactacagcctggggctggtgctcccaccctacagcaccttctacctccaagccaatctcagtgaccagatcctgcaggtcaagtattttgagttcctgctccccagcagctttgagtctgaaggacacgttttcattgctcccagagagtactgcaaggacctgaatgcctcagacaacaacaccgagttcctgaaaaactttattgagctcatggagaaagtgactccagactccaagcagtgcaacaacttccttctgcacaacctgatcttggacacgggcatcacgcagcagctggtagagcgtgtgtggagggaccaggatctcaacacgtacagcctactggccgtgttcgctgccacagacggtggcatcacccgagtcttccccaacaaggcagctgaggactggacagagaaccctgagcccttcaatgccagcttctaccgccgcagcctggataaccacggttatgtcttcaagcccccacaccaggatgccctgttaaggccgctggagctggagaatgacactgtgggcatcctcgtcagcacagctgtggagctcagcctaggcaggcgcacactgaggccagcagtggtgggcgtcaagctggacctagaggcttgggctgagaagttcaaggtgctagccagcaaccgtacccaccaagaccagcctcagaagtgcggccccaacagccactgtgagatggactgcgaggttaacaatgaggacttactctgtgtcctcattgatgatggaggattcctggtgctgtcaaaccagaaccatcagtgggaccaggtgggcaggttcttcagtgaggtggatgccaacctgatgctggcactctacaataactccttctacacccgcaaggagtcctatgactatcaggcagcctgtgcccctcagccccctggcaacctgggtgctgcaccccggggtgtctttgtgcccaccgttgcagatttccttaacctggcctggtggacctctgctgccgcctggtccctgttccagcagcttctctacggcctcatctaccacagctggttccaagcagaccccgcggaggccgaggggagccccgagacgcgcgagagcagctgcgtcatgaaacagacccagtactacttcggctcggtaaacgcctcctacaacgccatcatcgactgcggaaactgctccaggctgttccacgcgcagagactgaccaacaccaatcttctctttgtggtggccgagaagccgctgtgcagccagtgcgaggctggccggctgctgcagaaggagacgcactgcccagcggacggcccggagcagtgtgagctagtgcagagaccgcgataccggagaggcccgcacatctgcttcgactacaacgcgacagaagatacctcagactgtggccgcggggcctccttcccgccgtcgctgggcgtcctggtctccctgcaactgctgctcctcctgggcctgccgccccggccgcagcctcaagtcctcgtccacgcctctcgccgcctctgagcaccctgccccaccccacctccactcccacctcacccggcctcttcgcctttcccaccctcctgccccacactccccgccttagagcctcgtccctccctcactgaaggacctgagctggccaggccctgagagtctggtctgcgccttgggatggggagtcccaaagcgggacgccgcaggtgtttggcacccaaatcacatctcacctccgaactgttcaagtgtccccagacccttcttgcctgctgggctccccccagtgggatgggacagggaggccacacgcactggtgccaaaaccaggcctctgctgccgcccttcctggaggctgcctatgttgggggggaccctgcctcagctgacccggcctctctgccccacccaagcccaaacttggtttctgtgagaatagtggaggaaggtgagatggccagtttgaagcctgtgcctcccagcttaaatcctagcaggagagaggctctggggcagcccccatgggctcctgcccctttcaggcctacagccacatccccaagcccaccaggtgtcaggatagtcacagtgataccagttcagacactaccccatatacacctggaacattgaggatggaaactggactcacattcgacataccccactgggcacacgcacaaacacacacactatggggtggggtgggtgtaggggcttacaaagccttacacagggcgaggggttggtgggagggttggcacctgcacactccatctcctgctcaccacctgcctctaatctgagctgcagcctggctggtcctcccatttctaaagctgaatgtcaaacagtgccaaatgctggggcagggggtgaagaaccctctgtcccacccctagccaccagtgtcctccaagtgccccctcacctctccaggtgctcattgtaaccatttctcactagtgtcaggcccccagtgggaccacatgccactgcctgcacctttcggcagaggaacccccaccagacatcaccctttgccttagcaggggtgactttgtctctcctggctgggccatccttccgccaatctggcccttacacactcaggcctgtgcccactccctatctccttcccacccctacacacacactccctgcttgcaggaggccaaactgtccctcccttgctgaacacacacacacacacacacacacaggtggggactgggcacagctcttcacaccattcattctggtcatttcccccaaaggcatcccagcctgggggccagtggggaactgagggcaaggggatatagtgatggggctcagatggactgggaggagggggagggtgatgcattaattaatggcttcgttaattaatgtcatgttgcttgtcgctttctcagtgtgtgtgtgtggtccatgcccactgctggtgccagggtgggtgtccatgtgcacccggcctggatgccagctgtgtccttcgggggcgtgcgtgtaactgtagtgtagtcaggtgctcaatggagaatataaacatatacagaaaaatatatattttaagtttaaaaaacagaaaaacagacaaaacaatccccatcaggtagctgtctaacccccagctgggtctaatccttctcattacccacccgacctggctgcccctcaccttgggctgggggactggggggccatttccttttctctgccctttttttgttgttctattttgtacagacaagttggaaaaacaacagcgacaaaaaagtcaagaaactttgtaaaatatcgtgtgtgtgattccttgtaaaatattttcaaatggtttattacagaagatcagttattaaataatgttcatattttcacttc

SEQ ID NO: 6240 - DNA, 4237 bp, Homo sapiens
cgcagcagctgctcccggctccgcggccgcagcccgcgtggacgctccgagcgccccccgacggacgggaccggctccctggcggtcgggcgagcgggcggcaacgctgcccggccggcagcgctggggttaagtggcccaagtaaacctagctcggcgatcggcgccggagattcgcgagcccagcgccctgcacggccgccagccggcctcccgccagccagccccgacccgcggctccgccgcccagccgcgccccagccagccctgcggcaggaaagcatgaagggagacaccaggcatctcaatggagaggaggacgccggcgggagggaagactcgatcctcgtcaacggggcctgcagcgaccagtcctccgactcgcccccaatcctggaggctatccgcaccccggagatcagaggccgaagatcaagctcgcgactctccaagagggaggtgtccagtctgctaagctacacacaggacttgacaggcgatggcgacggggaagatggggatggctctgacaccccagtcatgccaaagctcttccgggaaaccaggactcgttcagaaagcccagctgtccgaactcgaaataacaacagtgtctccagccgggagaggcacaggccttccccacgttccacccgaggccggcagggccgcaaccatgtggacgagtcccccgtggagttcccggctaccaggtccctgagacggcgggcaacagcatcggcaggaacgccatggccgtcccctcccagctcttaccttaccatcgacctcacagacgacacagaggacacacatgggacgccccagagcagcagtaccccctacgcccgcctagcccaggacagccagcaggggggcatggagtccccgcaggtggaggcagacagtggagatggagacagttcagagtatcaggatgggaaggagtttggaataggggacctcgtgtggggaaagatcaagggcttctcctggtggcccgccatggtggtgtcttggaaggccacctccaagcgacaggctatgtctggcatgcggtgggtccagtggtttggcgatggcaagttctccgaggtctctgcagacaaactggtggcactggggctgttcagccagcactttaatttggccaccttcaataagctcgtctcctatcgaaaagccatgtaccatgctctggagaaagctagggtgcgagctggcaagaccttccccagcagccctggagactcattggaggaccagctgaagcccatgttggagtgggcccacgggggcttcaagcccactgggatcgagggcctcaaacccaacaacacgcaaccagagaacaagactcgaagacgcacagctgacgactcagccacctctgactactgccccgcacccaagcgcctcaagacaaattgctataacaacggcaaagaccgaggggatgaagatcagagccgagaacaaatggcttcagatgttgccaacaacaagagcagcctggaagatggctgtttgtcttgtggcaggaaaaaccccgtgtccttccaccctctctttgagggggggctctgtcagacatgccgggatcgcttccttgagctgttttacatgtatgatgacgatggctatcagtcttactgcactgtgtgctgcgagggccgagagctgctgctttgcagcaacacgagctgctgccggtgtttctgtgtggagtgcctggaggtgctggtgggcacaggcacagcggccgaggccaagcttcaggagccctggagctgttacatgtgtctcccgcagcgctgtcatggcgtcctgcggcgccggaaggactggaacgtgcgcctgcaggccttcttcaccagtgacacggggcttgaatatgaagcccccaagctgtaccctgccattcccgcagcccgaaggcggcccattcgagtcctgtcattgtttgatggcatcgcgacaggctacctagtcctcaaagagttgggcataaaggtaggaaagtacgtcgcttctgaagtgtgtgaggagtccattgctgttggaaccgtgaagcacgaggggaatatcaaatacgtgaacgacgtgaggaacatcacaaagaaaaatattgaagaatggggcccatttgacttggtgattggcggaagcccatgcaacgatctctcaaatgtgaatccagccaggaaaggcctgtatgagggtacaggccggctcttcttcgaattttaccacctgctgaattactcacgccccaaggagggtgatgaccggccgttcttctggatgtttgagaatgttgtagccatgaaggttggcgacaagagggacatctcacggttcctggagtgtaatccagtgatgattgatgccatcaaagtttctgctgctcacagggcccgatacttctggggcaacctacccgggatgaacaggcccgtgatagcatcaaagaatgataaactcgagctgcaggactgcttggaatacaataggatagccaagttaaagaaagtacagacaataaccaccaagtcgaactcgatcaaacaggggaaaaaccaacttttccctgttgtcatgaatggcaaagaagatgttttgtggtgcactgagctcgaaaggatctttggctttcctgtgcactacacagacgtgtccaacatgggccgtggtgcccgccagaagctgctgggaaggtcctggagcgtgcctgtcatccgacacctcttcgcccctctgaaggactactttgcatgtgaatagttccagccaggccccaagcccactggggtgtgtggcagagccaggacccaggaggtgtgattcctgaaggcatccccaggccctgctcttcctcagctgtgtgggtcataccgtgtacctcagttccctcttgctcagtgggggcagagccacctgactcttgcaggggtagcctgaggtgccgcctccttgtgcacaaatcagacctggctgcttggagcagcctaacacggtgctcattttttcttctcctaaaactttaaaacttgaagtaggtagcaacgtggctttttttttttcccttcctgggtctaccactcagagaaacaatggctaagataccaaaaccacagtgccgacagctctccaatactcaggttaatgctgaaaaatcatccaagacagttattgcaagagtttaatttttgaaaactggctactgctctgtgtttacagacgtgtgcagttgtaggcatgtagctacaggacatttttaagggcccaggatcgttttttcccagggcaagcagaagagaaaatgttgtatatgtcttttacccggcacattccccttgcctaaatacaagggctggagtctgcacgggacctattagagtattttccacaatgatgatgatttcagcagggatgacgtcatcatcacattcagggctattttttcccccacaaacccaagggcaggggccactcttagctaaatccctccccgtgactgcaatagaaccctctggggagctcaggaaggggtgtgctgagttctataatataagctgccatatattttgtagacaagtatggctcctccatatctccctcttccctaggagaggagtgtgaagcaaggagcttagataagacaccccctcaaacccattccctctccaggagacctaccctccacaggcacaggtccccagatgagaagtctgctaccctcatttctcatctttttactaaactcagaggcagtgacagcagtcagggacagacatacatttctcataccttccccacatctgagagatgacagggaaaactgcaaagctcggtgctccctttggagattttttaatccttttttattccataagaagtcgtttttagggagaacgggaattcagacaagctgcatttcagaaatgctgtcataatggtttttaacaccttttactcttcttactggtgctattttgtagaataaggaacaacgttgacaagttttgtggggctttttatacactttttaaaatctcaaacttctatttttatgtttaacgttttcattaaaattttttttgtaactggagccacgacgtaacaaatatggggaaaaaactgtgccttgtttcaacagtttttgctaatttttaggctgaaagatgacggatgcctagagtttaccttatgtttaattaaaatcagtatttgtcta

SEQ ID NO: 6241 - DNA, 4603 bp, Homo sapiens; identical to SEQ ID NO: 2807

SEQ ID NO: 6242 - DNA, 2198 bp, Homo sapiens
cctgagagcgggaccggcctcagctccaacacagcctccactgtgattaaaaataaaaattgctagagcagccctcactcgccacatctactttgatagctggctatttggaatttaaaggatatttgactttttctaacctcccatgaggctgtaagttccactgctccaaacccacccaccaaggactctgaacctgtccaccccgggcgcatcaagatcttccagctgggtacccccgatttgggccgactttgcacctccaaacaaccttagcatgatgtcttatcttaagcaaccgccttacgcagtcaatgggctgagtctgaccacttcgggtatggacttgctgcacccctccgtgggctacccggggccctgggcttcttgtcccgcagccaccccccggaaacagcgccgggagaggacgacgttcactcgggcgcagctagatgtgctggaagcactgtttgccaagacccggtacccagacatcttcatgcgagaggaggtggcactgaaaatcaacttgcccgagtcgagggtgcaggtatggtttaagaatcgaagagctaagtgccgccaacaacagcaacaacagcagaatggaggtcaaaacaaagtgagacctgccaaaaagaagacatctccagctcgggaagtgagttcagagagtggaacaagtggccaattcactcccccctctagcacctcagtcccgaccattgccagcagcagtgctcctgtgtctatctggagcccagcttccatctccccactgtcagatcccttgtccacctcctcttcctgcatgcagaggtcctatcccatgacctatactcaggcttcaggttatagtcaaggatatgctggctcaacttcctactttgggggcatggactgtggatcatatttgacccctatgcatcaccagcttcccggaccaggggccacactcagtcccatgggtaccaatgcagtcaccagccatctcaatcagtccccagcttctctttccacccagggatatggagcttcaagcttgggttttaactcaaccactgattgcttggattataaggaccaaactgcctcctggaagcttaacttcaatgctgactgcttggattataaagatcagacatcctcgtggaaattccaggttttgtgaagacctgtagaacctctttttgtgggtgatttttaaatatactgggctggacattccagttttagccaggcattggttaaaagagttagatgggatgatgctcagactcatctgatcaaagttccgagaggcatagaaggaaaaacgaagggccttagaggggcctacaaaccagcaacatgaaatggacaaaccaatctgcttaagatcctgtcatagttttagatcattggttatcctgatttgcaaagtgatcaaaagcattctagccatgtgcaaccaaacaccaccaaaaataaaatcaaacaaaactaagttgtgaaggaagggagggaaggtcatagccttcttaagcagaggtgttccattgttttagccaatccttggttgaatcttaggaatgaacagtgtctcaagctcattcacgtttcatgaccaactggtagttggcactgaaaaaacttttcagggctgtgtgaattgtgtgactgattgtcctagatgcactactttatttaaaaaataatgttcataaggagtcaatatgtagtttaagagacaatcagtgtgtgtcttataaatggtacatctgtggtttttaatctgtgctagacttcaaaactgtgatctcctgttattgtatgcaaccttgaactccacctctgcaggggttcttctgtgattaaataggttataattataagcaaaattcagagcaactgagtactgatctaaaaagattacctttggctggaggtgagctgcactgaaactttacgacaaaatgtctctggacaaagagagtcagagaagagaagcaaaaggacactaattcatctgtaatttactgttggtaagcctagcagtaaagagacattggtcaattgctctgaccctgatgaattattaaactgagatcattgtcgtttatgcttgcagatgttaaatggaaaagttatatatgcataaaccttttcttcctggatttggcagatatgtataattatattaaaatggttctagcaca

SEQ ID NO: 6243 - DNA, 7368 bp, Homo sapiens
cccggaagtgggccagaggtacggtccgctcccacctggggcgagtgcgcgcacggccaggttgggtaccgggtgcgcccaggaacccgcgcgaggcgaagtcgctgagactctgcctgcttctcacccagctgcctcggcgctgccccggtcgctcgccgcccctccctttgcccttcacggcgcccggccctccttgggctgcggcttctgtgcgaggctgggcagccagcccttccccttctgtttctccccgtcccctccccccgaccgtagcaccagagtcgcgggtcctgcagtgccccagaagccgcacgtataactccctcggcgggtaactcattcgactgtggagttcttttaattcttatgaaagatttcaaatcctctagaagccaaaatgggacacagtaaacagattcgaattttacttctgaacgaaatggagaaactggaaaagaccctcttcagacttgaacaagggtatgagctacagttccgattaggcccaactttacagggaaaagcagttaccgtgtatacaaattacccatttcctggagaaacatttaatagagaaaaattccgttctctggattgggaaaatccaacagaaagagaagatgattctgataaatactgtaaacttaatctgcaacaatctggttcatttcagtattatttccttcaaggaaatgagaaaagtggtggaggttacatagttgtggaccccattttacgtgttggtgctgataatcatgtgctacccttggactgtgttactcttcagacatttttagctaagtgtttgggaccttttgatgaatgggaaagcagacttagggttgcaaaagaatcaggctacaacatgattcattttaccccattgcagactcttggactatctaggtcatgctactcccttgccaatcagttagaattaaatcctgacttttcaagacctaatagaaagtatacctggaatgatgttggacagctagtggaaaaattaaaaaaggaatggaatgttatttgtattactgatgttgtctacaatcatactgctgctaatagtaaatggatccaggaacatccagaatgtgcctataatcttgtgaattctccacacttaaaacctgcctgggtcttagacagagcactttggcgtttctcctgtgatgttgcagaagggaaatacaaagaaaagggaatacctgctttgattgaaaatgatcaccatatgaattccatccgaaaaataatttgggaggatatttttccaaagcttaaactctgggaatttttccaagtagatgtcaacaaagcggttgagcaatttagaagacttcttacacaagaaaataggcgagtaaccaagtctgatccaaaccaacaccttacgattattcaagatcctgaatacagacggtttggctgtactgtagatatgaacattgcactaacgactttcataccacatgacaaggggccagcagcaattgaagaatgctgtaattggtttcataaaagaatggaggaattaaattcagagaagcatcgactcattaactatcatcaggaacaggcagttaattgccttttgggaaatgtgttttatgaacgactggctggccatggtccaaaactaggacctgtcactagaaagcatcctttagttaccaggtattttactttcccatttgaagagatagacttctccatggaagaatctatgattcatctgccaaataaagcttgttttctgatggcacacaatggatgggtaatgggagatgatcctcttcgaaactttgctgaaccgggttcagaagtttacctaaggagagaacttatttgctggggagacagtgttaaattacgctatgggaataaaccagaggactgtccttatctctgggcacacatgaaaaaatacactgaaataactgcaacttatttccagggagtacgtcttgataactgccactcaacacctcttcacgtagctgagtacatgttggatgctgctaggaatttgcaacccaatttatatgtagtagctgaactgttcacaggaagtgaagatctggacaatgtctttgttactagactgggcattagttccttaataagagaggcaatgagtgcatataatagtcatgaagagggcagattagtttaccgatatggaggagaacctgttggatcctttgttcagccctgtttgaggcctttaatgccagctattgcacatgccctgtttatggatattacgcatgataatgagtgtcctattgtgcatagatcagcgtatgatgctcttccaagtactacaattgtttctatggcatgttgtgctagtggaagtacaagaggctatgatgaattagtgcctcatcagatttcagtggtttctgaagaacggttttacactaagtggaatcctgaagcattgccttcaaacacaggtgaagttaatttccaaagcggcattattgcagccaggtgtgctatcagtaaacttcatcaggagcttggagccaagggttttattcaggtgtatgtggatcaagttgatgaagacatagtggcagtaacaagacactcacctagcatccatcagtctgttgtggctgtatctagaactgctttcaggaatcccaagacttcattttacagcaaggaagtgcctcaaatgtgcatccctggcaaaattgaagaagtagttcttgaagctagaactattgagagaaacacgaaaccttataggaaggatgagaattcaatcaatggaacaccagatatcacagtagaaattagagaacatattcagcttaatgaaagtaaaattgttaaacaagctggagttgccacaaaagggcccaatgaatatattcaagaaatagaatttgaaaacttgtctccaggaagtgttattatattcagagttagtcttgatccacatgcacaagtcgctgttggaattcttcgaaatcatctgacacaattcagtcctcactttaaatctggcagcctagctgttgacaatgcagatcctatattaaaaattccttttgcttctcttgcctccagattaactttggctgagctaaatcagatcctttaccgatgtgaatcagaagaaaaggaagatggtggagggtgctatgacataccaaactggtcagcccttaaatatgcaggtcttcaaggtttaatgtctgtattggcagaaataagaccaaagaatgacttggggcatcctttttgtaataatttgagatctggagattggatgattgactatgtcagtaaccggcttatttcacgatcaggaactattgctgaagttggtaaatggttgcaggctatgttcttctacctgaagcagatcccacgttaccttatcccatgttactttgatgctatattaattggtgcatataccactcttctggatacagcatggaagcagatgtcaagctttgttcagaatggttcaacctttgtgaaacacctttcattgggttcagttcaactgtgtggagtaggaaaattcccttccctgccaattctttcacctgccctaatggatgtaccttataggttaaatgagatcacaaaagaaaaggagcaatgttgtgtttctctagctgcaggcttacctcatttttcttctggtattttccgctgctggggaagggatacttttattgcacttagaggtatactgctgattactggacgctatgtagaagccaggaatattattttagcatttgcgggtaccctgaggcatggtctcattcctaatctactgggtgaaggaatttatgccagatacaattgtcgggatgctgtgtggtggtggctgcagtgtatccaggattactgtaaaatggttccaaatggtctagacattctcaagtgcccagtttccagaatgtatcctacagatgattctgctcctttgcctgctggcacactggatcagccattgtttgaagtcatacaggaagcaatgcaaaaacacatgcagggcatacagttccgagaaaggaatgctggtccccagatagatcgaaacatgaaggacgaaggttttaatataactgcaggagttgatgaagaaacaggatttgtttatggaggaaatcgtttcaattgtggcacatggatggataaaatgggagaaagtgacagagctagaaacagaggaatcccagccacaccaagagatgggtctgctgtggaaattgtgggcctgagtaaatctgctgttcgctggttgctggaattatccaaaaaaaatattttcccttatcatgaagtcacagtaaaaagacatggaaaggctataaaggtctcatatgatgagtggaacagaaaaatacaagacaactttgaaaagctatttcatgtttccgaagacccttcagatttaaatgaaaagcatccaaatctggttcacaaacgtggcatatacaaagatagttatggagcttcaagtccttggtgtgactatcagctcaggcctaattttaccatagcaatggttgtggcccctgagctctttactacagaaaaagcatggaaagctttggagattgcagaaaaaaaattgcttggtccccttggcatgaaaactttagatccagatgatatggtttactgtggaatttatgacaatgcattagacaatgacaactacaatcttgctaaaggtttcaattatcaccaaggacctgagtggctgtggcctattgggtattttcttcgtgcaaaattatatttttccagattgatgggcccggagactactgcaaagactatagttttggttaaaaatgttctttcccgacattatgttcatcttgagagatccccttggaaaggacttccagaactgaccaatgagaatgcccagtactgtcctttcagctgtgaaacacaagcctggtcaattgctactattcttgagacactttatgatttatagtttattacagatattaagtatgcaattacttgtattataggatgcaaggtcatcatatgtaaatgccttatatgcacaggctcaagttgttttaaaaatctcatttattataatattgatgctcaattaggtaagattgtaaaagcattgattttttttaatgtacagaggtagatttcaatttgaatcagaaagaaatatcattaccaatgaaatgtgtttgagttcagtaagaattattcaaatgcctagaaatccatagtttggaaaagaaaaatcatgtcatcttctatttgtacagaaatgaaaataaaatatgaaaataatgaaagaaatgaaaagatagcttttaattgtggtatatataatcttcagtaacaatacatactgaatacgctgtggttcattaatattaacaccacgtactatagtattcttaatacagtgctcactgcatttaataaatatttaataaatgatgaatgatagaagtttccatctacaatatatgttcctaaatggagcacagatgttcaaactatgctttcattttttcactgatatattaatttttgtgtaatgaatgccaacagtatattttatatgatttacttatgtgaggaaacatgcaaagcattaggaaatttatttcctaaaaacagttttgtaaaattagtattgagttctattgagtattataagatagcttacattttcaaaatggaaattgtcggtcatatttctagaactttaaagaaaaaagaatgttatattagttttctaaaactcaactatctttagtcatgttcaaaaatctattgctagatcatagtagatactggttttctattaactcaaaacctacattgacaagtttaacattgagaagaatcttaacaaaaatatggatatgaattcagtagatatcttaaattcaataaaatcactggaagtttttcatgataacttattttaagatgccttaaaaatcttaaagtcacaaaaggaaaaaggtttttaacatttacatgagttaacattttttcatagaacttatttcctagatagaattttttactgttttttactgttttcttaagaaaacagttaaatcattatgcattcagttggaagaaagtagtggcaagaattctttcattgctatataatattcagtggctcatttatacctaataaaataatggtattttaaaataatgctactttcaaagtagcatttttttagttagtttacaggttacatacccaaaaccttaactatgactaagaaattaaagaagaaaaccagcaaactaaaacttctgggcagcaaaaatatataaatgcttcagatgtcaaatacccatgcttgaaagctcgtgtaatttactttaagattatctgcctgctcttcttcaaagctgaccttgctttagaaatagttttaactagcttagttttctggtttccaaaactaaaatagattaaatcctacaaatttaaggacagttgtgacagtaatctgaccactatctataaatacattggacattggtttccaaatctccctttcttcttcagttccttccttgttcaatatatacccttctctaaactgtgcgggtaaaaggaatgactgtccttgagagaaccattagtttatcaaaggtttatgtagttttgttgctgtaccctaactttgatattcagggaggtaggaaaggtaacagaaaaccagcatatttaatcaaagcaagaagtaatcgctgacagttaaatgtgaccaaaaaaattaaaagttcacaatttttttaatgtagccatttggggttatctctagtaaggcagatacccacgttggtaaatttttaggatattgtgttgcactagaaaactaagtggttcatatttctaatgaggaagattaatgaaagaacattgttatattctgcgtggtatattttaaagtttaagaaggcatgttaaacattatttcctctatggtagttaaaatacagaattagatttttaacaggtgtcatttgactaaacgtttcggtagaatgcttcatacttgagtgatgctggataaggtattgtatttcaacaatggactatgccttggtttttcactaatcaaaatcaaaattactctttaacatgataaatgaatttaccagtttagtatgctgtggtattttaataagttttcaaagataattgggaaaacatgagactggtcatattgatgaatattgtaacatgtgaattgtgatccatttctgatatgtcttgaactactgtgtctagtgggcaaatgtcattgttacctctgtgtgttaagaaaataaaaatattttctaaaggtc

SEQ ID NO: 6244 - DNA, 2039 bp, Homo sapiens
ccggcccttgtttcgttgggcccggacgggacgtgcgcgctcaaaggttgcccgtctctgacgcccgcatttcctggtctggagccggctgagccacagcagggtcgccgcggggtcccggggccgtgctcccctgcccctcccgggagcgcgcggggcggggcggggcggggcgggaccaggcgggcgagctgggccctcgcccctccctcgggcggtcacctgggcacgggcgctgcaggtgtcggggcctcaaccttgcggagccgacagccatcgatcctcgggtggcctcgaggtggtggcagggccgccccctgcagtccggagacgaacgcacggaccgggcctccggaggcaggttcggctggaaggaaccgctctcgcttcgtcctacacttgcgcaaatgtctccgagcttactcacatagcatattggtatatcaaaatgaaatgcaaggaaccaaaaataacataattgaaggcagtaaaagtgaaattaaataggaagatcatcagtcaaggaagacccactggagaggacagaaaatgaagcagtgttttatcatgtgtatttcagcaggtcttcttgaaatttaactaaaaatatgactgctctctcttcagagaactgctcttttcagtaccagttacgtcaaacaaaccagcccctagatgttaactatctgctattcttgatcatacttgggaaaatattattaaatatccttacactaggaatgagaagaaaaaacacctgtcaaaattttatggaatatttttgcatttcactagcattcgttgatcttttacttttggtaaacatttccattatattgtatttcagggattttgtacttttaagcattaggttcactaaataccacatctgcctatttactcaaattatttcctttacttatggctttttgcattatccagttttcctgacagcttgtatagattattgcctgaatttctctaaaacaaccaagctttcatttaagtgtcaaaaattattttatttctttacagtaattttaatttggatttcagtccttgcttatgttttgggagacccagccatctaccaaagcctgaaggcacagaatgcttattctcgtcactgtcctttctatgtcagcattcagagttactggctgtcatttttcatggtgatgattttatttgtagctttcataacctgttgggaagaagttactactttggtacaggctatcaggataacttcctatatgaatgaaactatcttatattttcctttttcatcccactccagttatactgtgagatctaaaaaaatattcttatccaagctcattgtctgttttctcagtacctggttaccatttgtactacttcaggtaatcattgttttacttaaagttcagattccagcatatattgagatgaatattccctggttatactttgtcaatagttttctcattgctacagtgtattggtttaattgtcacaagcttaatttaaaagacattggattacctttggatccatttgtcaactggaagtgctgcttcattccacttacaattcctaatcttgagcaaattgaaaagcctatatcaataatgatttgttaatattattaattaaaagttacagctgtcataagatcataattttatgaacagaaagaactcaggacatattaaaaaataaactgaactaaaacaacttttgccccctgactgatagcatttcagaatgtgtcttttgaagggctatgataccagttattaaatagtgttttattttaaaaacaaaataattccaagaagtttttatagttattcagggacactatattacaaatattactttgttattaacacaaaaagtgataagagttaacatttggctatactgatgtttgtgttactcaaaaaaactactggatgcaaactgttatgtaaatctgagatttcactgacaactttaagatatcaacctaaacatttttattaaatgttcaaatgaaagcaagaaagtaaaaa

SEQ ID NO: 6245 - DNA, 2492 bp, Homo sapiens
atggaatctacgttgactttagcaacggaacaacctgttaagaagaacactcttaagaaatataaaatagcttgcattgttcttcttgctttgctggtgatcatgtcacttggattaggcctggggcttggactcaggaaactggaaaagcaaggcagctgcaggaagaagtgctttgatgcatcatttagaggactggagaactgccggtgtgatgtggcatgtaaagaccgaggtgattgctgctgggattttgaagacacctgtgtggaatcaactcgaatatggatgtgcaataaatttcgttgtggagagaccagattagaggccagcctttgctcttgttcagatgactgtttgcagaggaaagattgctgtgctgactataagagtgtttgccaaggagaaacctcatggctggaagaaaactgtgacacagcccagcagtctcagtgcccagaagggtttgacctgccaccagttatcttgttttctatggatggatttagagctgaatatttatacacatgggatactttaatgccaaatatcaataaactgaaaacatgtggaattcattcaaaatacatgagagctatgtatcctaccaaaaccttcccaaatcattacaccattgtcacgggcttgtatccagagtcacatggcatcattgacaataatatgtatgatgtaaatctcaacaagaatttttcactttcttcaaaggaacaaaataatccagcctggtggcatgggcaaccaatgtggctgacagcaatgtatcaaggtttaaaagccgctacctacttttggcccggatcagaagtggctataaatggctcctttccttccatatacatgccttacaacggaagtgtcccatttgaagagaggatttctacactgttaaaatggctggacctgcccaaagctgaaagacccaggttttataccatgtattttgaagaacctgattcctctggacatgcaggtggaccagtcagtgccagagtaattaaagccttacaggtagtagatcatgcttttgggatgttgatggaaggcctgaagcagcggaatttgcacaactgtgtcaatatcatccttctggctgaccatggaatggaccagacttattgtaacaagatggaatacatgactgattattttcccagaataaacttcttctacatgtacgaagggcctgccccccgcatccgagctcataatatacctcatgacttttttagttttaattctgaggaaattgttagaaacctcagttgccgaaaacctgatcagcatttcaagccctatttgactcctgatttgccaaagcgactgcactatgccaagaacgtcagaatcgacaaagttcatctctttgtggatcaacagtggctggctgttaggagtaaatcaaatacaaattgtggaggaggcaaccatggttataacaatgagtttaggagcatggaggctatctttctggcacatggacccagttttaaagagaagactgaagttgaaccatttgaaaatattgaagtctataacctaatgtgtgatcttctacgcattcaaccagcaccaaacaatggaacccatggtagtttaaaccatcttctgaaggtgcctttttatgagccatcccatgcagaggaggtgtcaaagttttctgtttgtggctttgctaatccattgcccacagagtctcttgactgtttctgccctcacctacaaaatagtactcagctggaacaagtgaatcagatgctaaatctcacccaagaagaaataacagcaacagtgaaagtaaatttgccatttgggaggcctagggtactgcagaagaacgtggaccactgtctcctttaccacagggaatatgtcagtggatttggaaaagctatgaggatgcccatgtggagttcatacacagtcccccagttgccagcaatagaacatcagatagccaatatgatgctttaattactagcaatttggtacctatgtatgaagaattcagaaaaatgtgggactacttccacagtgttcttcttataaaacatgccacagaaagaaatggagtaaatgtggttagtggaccaatatttgattataattatgatggccattttgatgctccagatgaaattaccaaacatttagccaacactgatgttcccatcccaacacactactttgtggtgctgaccagttgtaaaaacaagagccacacaccggaaaactgccctgggtggctggatgtcctaccctttatcatccctcaccgacctaccaacgtggagagctgtcctgaaggtaaaccagaagctctttgggttgaagaaagatttacagctcacattgcccgggtccgtgatgtagaacttctcactgggcttgacttctatcaggataaagtgcagcctgtctctgaaattttgcaactaaagacatatttaccaacatttgaaaccactatttaa

SEQ ID NO: 6246 - DNA, 1689 bp, Homo sapiens
caagccatagcaggaaacagcgagcttgcagcctcaccgacgagtctcaactaaaagggactcccggagctaggggtggggactcggcctcacacagtgagtgccggctattggacttttgtccagtgacagctgagacaacaaggaccacgggaggaggtgtaggagagaagcgccgcgaacagcgatcgcccagcaccaagtccgcttccaggctttcggtttctttgcctccatcttgggtgcgccttcccggcgtctaggggagcgaaggctgaggtggcagcggcaggagagtccggccgcgacaggacgaactcccccactggaaaggattctgaaagaaatgaagtcagccctcagaaatgaagttgactgcctgctggctttctgttgactggcccggagctgtactgcaagacccttgtgagcttccctagtctaagagtaggatgtctgctgaagtcatccatcaggttgaagaagcacttgatacagatgagaaggagatgctgctctttttgtgccgggatgttgctatagatgtggttccacctaatgtcagggaccttctggatattttacgggaaagaggtaagctgtctgtcggggacttggctgaactgctctacagagtgaggcgatttgacctgctcaaacgtatcttgaagatggacagaaaagctgtggagacccacctgctcaggaaccctcaccttgtttcggactatagagtgctgatggcagagattggtgaggatttggataaatctgatgtgtcctcattaattttcctcatgaaggattacatgggccgaggcaagataagcaaggagaagagtttcttggaccttgtggttgagttggagaaactaaatctggttgccccagatcaactggatttattagaaaaatgcctaaagaacatccacagaatagacctgaagacaaaaatccagaagtacaagcagtctgttcaaggagcagggacaagttacaggaatgttctccaagcagcaatccaaaagagtctcaaggatccttcaaataacttcaggctccataatgggagaagtaaagaacaaagacttaaggaacagcttggcgctcaacaagaaccagtgaagaaatccattcaggaatcagaagcttttttgcctcagagcatacctgaagagagatacaagatgaagagcaagcccctaggaatctgcctgataatcgattgcattggcaatgagacagaaaacgcccactcctggatcttcacattgaactcaatggctacatgtatgattggaacagcagagtttctgccaaggagaaatattatgtctggctgcagcacactctgagaaagaaacttatcctctcctacacataagaaaccaaaaggctgggcgtagtggctcacacctgtaatcccagcactttgggaggccaaggagggcagatcacttcaggtcaggagttcgagaccagcctggccaacatggtaaacgctgtccctagtaaaaatacaaaaattagctgggtgtgggtgtgggtacctgtattcccagttacttgggaggctgaggtgggaggatcttttgaacccaggagttcagggtcatagcatgctgtgattgtgcctacgaatagccactgcataccaacctgggcaatatagcaagatcccatctcttt

SEQ ID NO: 6247 - DNA, 4044 bp, Homo sapiens
atggacttgttgtccgggacgtacattttcgcggtcctgctagcatgcgtggtgttccactctggcgcccaggagaaaaactacaccatccgagaagaaatgccagaaaacgtcctgataggcgacttgttgaaagaccttaacttgtcgctgattccaaacaagtccttgacaactgctatgcagttcaagctagtgtacaagaccggagatgtgccactgattcgaattgaagaggatactggtgagatcttcactactggcgctcgcattgatcgtgagaaattatgtgctggtatcccaagggatgagcattgcttttatgaagtggaggttgccattttgccggatgaaatatttagactggttaagatacgttttctgatagaagatataaatgataatgcaccattgttcccagcaacagttatcaacatatcaattccagagaactcggctataaactctaaatatactctcccagcggctgttgatcctgacgtaggaataaacggagttcaaaactacgaactaattaagagtcaaaacatttttggcctcgatgtcattgaaacaccagaaggagacaagatgccacaactgattgttcaaaaggagttagatagggaagagaaggatacctacgtgatgaaagtaaaggttgaagatggtggctttcctcaaagatccagtactgctattttgcaagtgagtgttactgatacaaatgacaaccacccagtctttaaggagacagagattgaagtcagtataccagaaaatgctcctgtaggcacttcagtgacacagctccatgccacagatgctgacataggtgaaaatgccaagatccacttctctttcagcaatctagtctccaacattgccaggagattatttcacctcaatgccaccactggacttatcacaatcaaagaaccactggatagggaagaaacaccaaaccacaagttactggttttggcaagtgatggtggattgatgccagcaagagcaatggtgctggtaaatgttacagatgtcaatgataatgtcccatccattgacataagatacatcgtcaatcctgtcaatgacacagttgttctttcagaaaatattccactcaacaccaaaattgctctcataactgtgacggataaggatgcggaccataatggcagggtgacatgcttcacagatcatgaaatccctttcagattaaggccagtattcagtaatcagttcctcctggagactgcagcatatcttgactatgagtccacaaaagaatatgccattaaattactggctgcagatgctggcaaacctcctttgaatcagtcagcaatgctcttcatcaaagtgaaagatgaaaatgacaatgctccagttttcacccagtctttcgtaactgtttctattcctgagaataactctcctggcatccagttgacgaaagtaagtgcaatggatgcagacagtgggcctaatgctaagatcaattacctgctaggccctgatgctccacctgaattcagcctggattgtcgtacaggcatgctgactgtagtgaagaaactagatagagaaaaagaggataaatatttattcacaattctggcaaaagataacggggtaccacccttaaccagcaatgtcacagtctttgtaagcattattgatcagaatgacaatagcccagttttcactcacaatgaatacaacttctatgtcccagaaaaccttccaaggcatggtacagtaggactaatcactgtaactgatcctgattatggagacaattctgcagttacgctctccattttagatgagaatgatgacttcaccattgattcacaaactggtgtcatccgaccaaatatttcatttgatagagaaaaacaagaatcttacactttctatgtaaaggctgaggatggtggtagagtatcacgttcttcaagtgccaaagtaaccataaatgtggttgatgtcaatgacaacaaaccagttttcattgtccctccttccaactgttcttatgaattggttctaccgtccactaatccaggcacagtggtctttcaggtaattgctgttgacaatgacactggcatgaatgcagaggttcgttacagcattgtaggaggaaacacaagagatctgtttgcaatcgaccaagaaacaggcaacataacattgatggagaaatgtgatgttacagaccttggtttacacagagtgttggtcaaagctaatgacttaggacagcctgattctctcttcagtgttgtaattgtcaatctgttcgtgaatgagtcggtgaccaatgctacactgattaatgaactggtgcgcaaaagcactgaagcaccagtgaccccaaatactgagatagctgatgtatcctcaccaactagtgactatgtcaagatcctggttgcagctgttgctggcaccataactgtcgttgtagttattttcatcactgctgtagtaagatgtcgccaggcaccacaccttaaggctgctcagaaaaacaagcagaattctgaatgggctaccccaaacccagaaaacaggcagatgataatgatgaagaaaaagaaaaagaagaagaagcattcccctaagaacttgctgcttaattttgtcactattgaagaaactaaggcagatgatgttgacagtgatggaaacagagtcacactagaccttcctattgatctagaagagcaaacaatgggaaagtacaattgggtaactacacctactactttcaagcccgacagccctgatttggcccgacactacaaatctgcctctccacagcctgccttccaaattcagcctgaaactcccctgaattcgaagcaccacatcatccaagaactgcctctcgataacacctttgtggcctgtgactctatctccaagtgttcctcaagcagttcagatccctacagcgtttctgactgtggctatccagtgacgaccttcgaggtacctgtgtccgtacacaccagaccgccaatgaaggaggttgtgcgatcttgcacccccatgaaagagtctacaactatggagatctggattcatccccaaccacagcggaaatctgaagggaaagtggcaggaaagtcccagcggcgtgtcacatttcacctgccagaaggctctcaggaaagcagcagtgatggtggactgggagaccatgatgcaggcagccttaccagcacatctcatggcctgccccttggctatcctcaggaggagtactttgatcgtgctacacccagcaatcgcactgaaggggatggcaactccgatcctgaatctaccttcatcccaaggagcccaacagctgcagaaataactgttcaaccaactgtggaagaggcctctgacaactgcactcaagaatgtctcatctatggccattctgatgcctgctggatgccggcatctctggatcattccagctcttcgcaagcacaggcctctgctctatgccacagcccaccactgtcacaggcctctactcagcaccacagcccacgagtgacacagaccattgctctctgccacagccctccagtgacacagaccatcgcattgtgccacagcccaccaccgatacaggtgtctgctctccaccacagtcctcctctagtgcaggctactgcacttcaccacagcccaccatcagcacaggcctcagccctctgctacagccctcctttagcacaggctgctgcaatcagccacagctctcctctgccacaggttattgccctccatcgtagtcaggcccaatcatcagtcagtttgcagcaaggttgggtgcaaggtgctgatgggctatgctctgttgatcagggagtgcaaggtagtgcaacatctcagttttacaccatgtctgaaagacttcatcccagtgatgattcaattaaagtcattcctttgacaaccttcactccacgccaacaggccagaccgtccagaggtgattcccccattatggaagaacatcccttgtaa

SEQ ID NO: 6248 - DNA, 1359 bp, Homo sapiens
ggctgatggatgccagggagtgccgcattgcttagcgaccccgcctctgggtttgctggtacacactggtggatattttgcgtgccatcttactttctttagaagccatgattgaagatcctgagcttcaagtgaatgggtttgttttgatcatagactggagtaacttcactttcaagcaagcctctaaactcacaccaagtatgctgcgattagctattgaaggcctgcaggatagtttcccagcgcgatttggaggaattcattttgtcaatcaaccatggtatatccatgccctgtacaccgtgatccggcctttcctgaaggagaaaactcggaaaaggatatttttgcatggtaacaacctgaacagtctacaccaactaattcatcctgagatcctgccctctgagtttggaggaatgctgcctccttatgacatggggacatgggcaagaacactgctagaccatgaatatgacgatgacagcgagtacaatgtagactcctacagcatgcctgtgaaggaagtagagaaggaactctccccaaagtccatgaagagatctcaatcagtagtggatcctacagtactaaaacgcatggataaaaatgaggaagaaaacatgcaaccattgctttctctggactaataacttctctacatccccttcatggattagaaatggaaagtattggttttcagcaacagggacaacactgtagaggaattaccagctggaaaccgacttattcatgttaatgtagcataatatataacaaggcatcaggctttccttggcctgaaccatgggggccctgggctggatttttaaaatgtcaataatttattctgtaagtgccaagttgtttgtaaatataatgtaatcttcatgtcaagtttgtaaatttcagtagtaactcagtttggaaaaaggttggctcaaaagtccatgccagtgttatgaactataacaaaaagcagaaaagacacagtcaaagctaattaaatgtagccctctttcctatgaagccatatttcagctctcatagtgattgtttcattgtttttctctgaaactctgtcagtattcaaacatactcttaacgggcacacacaactaagtgattccaggaaattttatgattaatgtatttcctgtctagtgattttcatttcagagaaatgtgtcttagtaactatcattggccttgcattttggaggcaaggaatggcagatgagctggtaaactgaacacttgaactcttctatgttgtttaattcttggaatcttgtgaaaagatgtgtttcctcaattaagacgtagaaatgtaaaaaagagtggattctttttaaa

SEQ ID NO: 6249 - DNA, 3904 bp, Homo sapiens
ctttcactggcaagagacggagtcctgggtttcagttccagttgcctgcggtgggctgtgtgagtttgccaaagtcccctgccctctctgggtctcggttccctcgcctgtccacgtgaggttggaggagctgaacgccgacgtcatttttagctaagagggagcagggtccccgagtcgccggcccagggtctgcgcatccgaggccgcgcgccctttcccctcccccacggctcctccgggccccgcactctgcgccccggctgccgcccagcgccctacaccgccctcagggggccctcgcgggctccccccggccgggatgccagtgccccgcgccacgcgcgcctgctcccgcgccgcctgccctgcagcctgcccgcggcgcctttatacccagcgggctcggcgctcactaatgtttaactcggggccgaaacttgccagcggcgagtgactccaccgcccggagcagcggtgcaggacgcgcgtctccgccgcccgcggtgacttctgcctgcgctccttctctgaacgctcacttccgaggagacgccgacgatgaagacaccgtggaaggttcttctgggactgctgggtgctgctgcgcttgtcaccatcatcaccgtgcccgtggttctgctgaacaaaggcacagatgatgctacagctgacagtcgcaaaacttacactctaactgattacttaaaaaatacttatagactgaagttatactccttaagatggatttcagatcatgaatatctctacaaacaagaaaataatatcttggtattcaatgctgaatatggaaacagctcagttttcttggagaacagtacatttgatgagtttggacattctatcaatgattattcaatatctcctgatgggcagtttattctcttagaatacaactacgtgaagcaatggaggcattcctacacagcttcatatgacatttatgatttaaataaaaggcagctgattacagaagagaggattccaaacaacacacagtgggtcacatggtcaccagtgggtcataaattggcatatgtttggaacaatgacatttatgttaaaattgaaccaaatttaccaagttacagaatcacatggacggggaaagaagatataatatataatggaataactgactgggtttatgaagaggaagtcttcagtgcctactctgctctgtggtggtctccaaacggcacttttttagcatatgcccaatttaacgacacagaagtcccacttattgaatactccttctactctgatgagtcactgcagtacccaaagactgtacgggttccatatccaaaggcaggagctgtgaatccaactgtaaagttctttgttgtaaatacagactctctcagctcagtcaccaatgcaacttccatacaaatcactgctcctgcttctatgttgataggggatcactacttgtgtgatgtgacatgggcaacacaagaaagaatttctttgcagtggctcaggaggattcagaactattcggtcatggatatttgtgactatgatgaatccagtggaagatggaactgcttagtggcacggcaacacattgaaatgagtactactggctgggttggaagatttaggccttcagaacctcattttacccttgatggtaatagcttctacaagatcatcagcaatgaagaaggttacagacacatttgctatttccaaatagataaaaaagactgcacatttattacaaaaggcacctgggaagtcatcgggatagaagctctaaccagtgattatctatactacattagtaatgaatataaaggaatgccaggaggaaggaatctttataaaatccaacttagtgactatacaaaagtgacatgcctcagttgtgagctgaatccggaaaggtgtcagtactattctgtgtcattcagtaaagaggcgaagtattatcagctgagatgttccggtcctggtctgcccctctatactctacacagcagcgtgaatgataaagggctgagagtcctggaagacaattcagctttggataaaatgctgcagaatgtccagatgccctccaaaaaactggacttcattattttgaatgaaacaaaattttggtatcagatgatcttgcctcctcattttgataaatccaagaaatatcctctactattagatgtgtatgcaggcccatgtagtcaaaaagcagacactgtcttcagactgaactgggccacttaccttgcaagcacagaaaacattatagtagctagctttgatggcagaggaagtggttaccaaggagataagatcatgcatgcaatcaacagaagactgggaacatttgaagttgaagatcaaattgaagcagccagacaattttcaaaaatgggatttgtggacaacaaacgaattgcaatttggggctggtcatatggagggtacgtaacctcaatggtcctgggatcgggaagtggcgtgttcaagtgtggaatagccgtggcgcctgtatcccggtgggagtactatgactcagtgtacacagaacgttacatgggtctcccaactccagaagacaaccttgaccattacagaaattcaacagtcatgagcagagctgaaaattttaaacaagttgagtacctccttattcatggaacagcagatgataacgttcactttcagcagtcagctcagatctccaaagccctggtcgatgttggagtggatttccaggcaatgtggtatactgatgaagaccatggaatagctagcagcacagcacaccaacatatatatacccacatgagccacttcataaaacaatgtttctctttaccttagcacctcaaaataccatgccatttaaagcttattaaaactcatttttgttttcattatctcaaaactgcactgtcaagatgatgatgatctttaaaatacacactcaaatcaagaaacttaaggttacctttgttcccaaatttcatacctatcatcttaagtagggacttctgtcttcacaacagattattaccttacagaagtttgaattatccggtcgggttttattgtttaaaatcatttctgcatcagctgctgaaacaacaaataggaattgtttttatggaggctttgcatagattccctgagcaggattttaatctttttctaactggactggttcaaatgttgttctcttctttaaagggatggcaagatgtgggcagtgatgtcactagggcagggacaggataagagggattagggagagaagatagcagggcatggctgggaacccaagtccaagcataccaacacgagcaggctactgtcagctcccctcggagaagagctgttcacagccagactggcacagttttctgagaaagactattcaaacagtctcaggaaatcaaatatgcaaagcactgacttctaagtaaaaccacagcagttgaaaagactccaaagaaatgtaagggaaactgccagcaacgcaggcccccaggtgccagttatggctataggtgctacaaaaacacagcaagggtgatgggaaagcattgtaaatgtgcttttaaaaaaaaatactgatgttcctagtgaaagaggcagcttgaaactgagatgtgaacacatcagcttgccctgttaaaagatgaaaatatttgtatcacaaatcttaacttgaaggagtccttgcatcaatttttcttatttcatttctttgagtgtcttaattaaaagaatattttaacttccttggactcattttaaaaaatggaacataaaatacaatgttatgtattattattcccattctacatactatggaatttctcccagtcatttaataaatgtgccttcattttttcagaagtaa

SEQ ID NO: 6250 - DNA, 1614 bp, Homo sapiens
ttgctccgcagggagagactgcccctggagtattctgcttttaataagcttcccaatcagctctcgagtgcaaagcgctctccctccctcgcccagccttcgtcctcctggcccgctcctctcatccctcccattctccatttcccttccgttccctccctgtcagggcgtaattgagtcaaaggcaggatcaggttccccgccttccagtccaaaaatcccgccaagagagccccagagcagaggaaaatccaaagtggagagaggggaagaaagagaccagtgagtcatccgtccagaaggcggggagagcagcagcggcccaagcaggagctgcagcgagccgggtacctggactcagcggtagcaacctcgccccttgcaacaaaggcagactgagcgccagagaggacgtttccaactcaaaaatgcaggctcaacagtaccagcagcagcgtcgaaaatttgcagctgccttcttggcattcattttcatactggcagctgtggatactgctgaagcagggaagaaagagaaaccagaaaaaaaagtgaagaagtctgactgtggagaatggcagtggagtgtgtgtgtgcccaccagtggagactgtgggctgggcacacgggagggcactcggactggagctgagtgcaagcaaaccatgaagacccagagatgtaagatcccctgcaactggaagaagcaatttggcgcggagtgcaaataccagttccaggcctggggagaatgtgacctgaacacagccctgaagaccagaactggaagtctgaagcgagccctgcacaatgccgaatgccagaagactgtcaccatctccaagccctgtggcaaactgaccaagcccaaacctcaagcagaatctaagaagaagaaaaaggaaggcaagaaacaggagaagatgctggattaaaagatgtcacctgtggaacataaaaaggacatcagcaaacaggatcagttaactattgcatttatatgtaccgtaggctttgtattcaaaaattatctatagctaagtacacaataagcaaaaacaaaaagaaaagaaaatttttgtagtagcgttttttaaatgtatactatagtaccagtaggggcttataataaaggactgtaatcttatttaggaagttgacttatagtacatgataaatgatagacaattgaggtaagttttttgaaattatgtgacattttacattaaattttttttacattttttgggcagcaatttaaatgttatgactatgtaaactacttctcttgttaggtaatttttttcacctagatttttttcccaattgagaaaaatatatactaaacaaaatagcaataaaacataatcactctatttgaagaaaatatcttgttttctgccaatagattttttaaaatgtagtcagcaaaatgggggtggggaagcagagcatgtcctagttcaatgttgactttttttttttttaaagaaaagcattaagacataaaattctttcactttggcagaagcatttgttttcttgatgaaattatttttccatctgaggaaaaaaatactaggaaaataaatcaaggtgatgctgaaaaaaaaa

SEQ ID NO: 6251 - DNA, 7205 bp, Homo sapiens
gagcgctccaagatggcgcccaccgcagtcccgcccgccgcatcctcggcgcctttgcagtccggccgcgcctcccgggccccgcgttagggccgccgctgcctccctcgccgccgccgctgccagctgacctgtcctggacgcagcataactaacgaagctgctgcaggatgagaagatggcagcgcggctgcttgcaccaccaggccctgatagtttcaagcctttcacccctgagtcactggcaaacattgagaggcgcattgctgagagcaagctcaagaaaccaccaaaggccgatggcagtcatcgggaggacgatgaggacagcaagcccaagccaaacagcgacctggaagcagggaagagtttgcctttcatctacggggacatcccccaaggcctggttgcagttcccctggaggactttgacccatactatttgacgcagaaaacctttgtagtattaaacagagggaaaactctcttcagatttagtgccacgcctgccttgtacattttaagtccttttaacctgataagaagaatagctattaaaattttgatacattcagtatttagcatgatcattatgtgcactattttgaccaactgtgtattcatgacttttagtaaccctcctgactggtcgaagaatgtggagtacacgttcacagggatttatacatttgaatcactagtgaaaatcattgcaagaggtttctgcatagatggctttacctttttacgggacccatggaactggttagatttcagtgtcatcatgatggcgtatataacagagtttgtaaacctaggcaatgtttcagctctacgcactttcagggtactgagggctttgaaaactatttcggtaatcccaggcctgaagacaattgtgggtgccctgattcagtctgtgaagaaactgtcagatgtgatgatcctgacagtgttctgcctgagtgtttttgccttgatcggactgcagctgttcatggggaaccttcgaaacaagtgtgttgtgtggcccataaacttcaacgagagctatcttgaaaatggcaccaaaggctttgattgggaagagtatatcaacaataaaacaaatttctacacagttcctggcatgctggaacctttactctgtgggaacagttctgatgctgggcaatgcccagagggataccagtgtatgaaagcaggaaggaaccccaactatggttacacaagttttgacacttttagctgggccttcttggcattatttcgccttatgacccaggactattgggaaaacttgtatcaattgactttacgagcagccgggaaaacatacatgatcttcttcgtcttggtcatctttgtgggttctttctatctggtgaacttgatcttggctgtggtggccatggcttatgaagaacagaatcaggcaacactggaggaggcagaacaaaaagaggctgaatttaaagcaatgttggagcaacttaagaagcaacaggaagaggcacaggctgctgcgatggccacttcagcaggaactgtctcagaagatgccatagaggaagaaggtgaagaaggagggggctcccctcggagctcttctgaaatctctaaactcagctcaaagagtgcaaaggaaagacgtaacaggagaaagaagaggaagcaaaaggaactctctgaaggagaggagaaaggggatcccgagaaggtgtttaagtcagagtcagaagatggcatgagaaggaaggcctttcggctgccagacaacagaatagggaggaaattttccatcatgaatcagtcactgctcagcatcccaggctcgcccttcctctcccgccacaacagcaagagcagcatcttcagtttcaggggacctgggcggttccgagacccgggctccgagaatgagttcgcggatgacgagcacagcacggtggaggagagcgagggccgccgggactccctcttcatccccatccgggcccgcgagcgccggagcagctacagcggctacagcggctacagccagggcagccgctcctcgcgcatcttccccagcctgcggcgcagcgtgaagcgcaacagcacggtggactgcaacggcgtggtgtccctcatcggcggccccggctcccacatcggcgggcgtctcctgccagaggctacaactgaggtggaaattaagaagaaaggccctggatctcttttagtttccatggaccaattagcctcctacgggcggaaggacagaatcaacagtataatgagtgttgttacaaatacactagtagaagaactggaagagtctcagagaaagtgcccgccatgctggtataaatttgccaacactttcctcatctgggagtgccacccctactggataaaactgaaagagattgtgaacttgatagttatggacccttttgtggatttagccatcaccatctgcatcgtcctgaatacactgtttatggcaatggagcaccatcctatgacaccacaatttgaacatgtcttggctgtaggaaatctggttttcactggaattttcacagcggaaatgttcctgaagctcatagccatggatccctactattatttccaagaaggttggaacatttttgacggatttattgtctccctcagtttaatggaactgagtctagcagacgtggaggggctttcagtgctgcgatctttccgattgctccgagtcttcaaattggccaaatcctggcccaccctgaacatgctaatcaagattattggaaattcagtgggtgccctgggcaacctgacactggtgctggccattattgtcttcatctttgccgtggtggggatgcaactctttggaaaaagctacaaagagtgtgtctgcaagatcaaccaggactgtgaactccctcgctggcatatgcatgactttttccattccttcctcattgtctttcgagtgttgtgcggggagtggattgagaccatgtgggactgcatggaagtggcaggccaggccatgtgcctcattgtctttatgatggtcatggtgattggcaacttggtggtgctgaacctgtttctggccttgctcctgagctccttcagtgcagacaacctggctgccacagatgacgatggggaaatgaacaacctccagatctcagtgatccgtatcaagaagggtgtggcctggaccaaactaaaggtgcacgccttcatgcaggcccactttaagcagcgtgaggctgatgaggtgaagcctctggatgagttgtatgaaaagaaggccaactgtatcgccaatcacaccggtgcagacatccaccggaatggtgacttccagaagaatggcaatggcacaaccagcggcattggcagcagcgtggagaagtacatcattgatgaggaccacatgtccttcatcaacaaccccaacttgactgtacgggtacccattgctgtgggcgagtctgactttgagaacctcaacacagaggatgttagcagcgagtcggatcctgaaggcagcaaagataaactagatgacaccagctcctctgaaggaagcaccattgatatcaaaccagaagtagaagaggtccctgtggaacagcctgaggaatacttggatccagatgcctgcttcacagaaggttgtgtccagcggttcaagtgctgccaggtcaacatcgaggaagggctaggcaagtcttggtggatcctgcggaaaacctgcttcctcatcgtggagcacaactggtttgagaccttcatcatcttcatgattctgctgagcagtggcgccctggccttcgaggacatctacattgagcagagaaagaccatccgcaccatcctggaatatgctgacaaagtcttcacctatatcttcatcctggagatgttgctcaagtggacagcctatggcttcgtcaagttcttcaccaatgcctggtgttggctggacttcctcattgtggctgtctctttagtcagccttatagctaatgccctgggctactcggaactaggtgccataaagtcccttaggaccctaagagctttgagacccttaagagccttatcacgatttgaagggatgagggtggtggtgaatgccttggtgggcgccatcccctccatcatgaatgtgctgctggtgtgtctcatcttctggctgattttcagcatcatgggagttaacttgtttgcgggaaagtaccactactgctttaatgagacttctgaaatccgatttgaaattgaagatgtcaacaataaaactgaatgtgaaaagcttatggaggggaacaatacagagatcagatggaagaacgtgaagatcaactttgacaatgttggggcaggatacctggcccttcttcaagtagcaaccttcaaaggctggatggacatcatgtatgcagctgtagattcccggaagcctgatgagcagcctaagtatgaggacaatatctacatgtacatctattttgtcatcttcatcatcttcggctccttcttcaccctgaacctgttcattggtgtcatcattgataacttcaatcaacaaaagaaaaagttcggaggtcaggacatcttcatgaccgaagaacagaagaagtactacaatgccatgaaaaagctgggctcaaagaagccacagaaacctattccccgccccttgaacaaaatccaaggaatcgtctttgattttgtcactcagcaagcctttgacattgttatcatgatgctcatctgccttaacatggtgacaatgatggtggagacagacactcaaagcaagcagatggagaacatcctctactggattaacctggtgtttgttatcttcttcacctgtgagtgtgtgctcaaaatgtttgcgttgaggcactactacttcaccattggctggaacatcttcgacttcgtggtagtcatcctctccattgtgggaatgttcctggcagatataattgagaaatactttgtttccccaaccctattccgagtcatccgattggcccgtattgggcgcatcttgcgtctgatcaaaggcgccaaagggattcgtaccctgctctttgccttaatgatgtccttgcctgccctgttcaacatcggccttctgctcttcctggtcatgttcatcttctccatttttgggatgtccaattttgcatatgtgaagcacgaggctggtatcgatgacatgttcaactttgagacatttggcaacagcatgatctgcctgtttcaaatcacaacctcagctggttgggatggcctgctgctgcccatcctaaaccgcccccctgactgcagcctagataaggaacacccagggagtggctttaagggagattgtgggaacccctcagtgggcatcttcttctttgtaagctacatcatcatctctttcctaattgtcgtgaacatgtacattgccatcatcctggagaacttcagtgtagccacagaggaaagtgcagaccctctgagtgaggatgactttgagaccttctatgagatctgggagaagttcgaccccgatgccacccagttcattgagtactgtaagctggcagactttgcagatgccttggagcatcctctccgagtgcccaagcccaataccattgagctcatcgctatggatctgccaatggtgagcggggatcgcatccactgcttggacatcctttttgccttcaccaagcgggtcctgggagatagcggggagttggacatcctgcggcagcagatggaagagcggttcgtggcatccaatccttccaaagtgtcttacgagccaatcacaaccacactgcgtcgcaagcaggaggaggtatctgcagtggtcctgcagcgtgcctaccggggacatttggcaaggcggggcttcatctgcaaaaagacaacttctaataagctggagaatggaggcacacaccgggagaaaaaagagagcaccccatctacagcctccctcccgtcctatgacagtgtaactaaacctgaaaaggagaaacagcagcgggcagaggaaggaagaagggaaagagccaaaagacaaaaagaggtcagagaatccaagtgttagaggagaacaaaaattcagtattatacagatctaaaactcgcaagtgaaagattgtttacaaacttcctgaatattatcaatgcagaacagctgtggagactctaacctgaagatctataccaaacgtcgtctgcttaccacgtaacacagctgcatcttgagcagtgacctgccaagggcaaaggaccccgctccctagacttacagattttctaatgcttgggcaggtggttactgcatgttccacatcagtcaatgcaacttaggacaaaactaaccagatacagaaacagaagagaggctgccgggaccagcatatttccgttgcagccaaatggattttattttttcattttattgattctcagaagcagaaagcatcactttaaaagttcgtttgttcatgcaaactatatttgcattcttacattagttaagctaagcagcaaaaagaaaacacacacacacactcacatttagcccatgtcatttaattgtcagtttctttgacataaagcgcatcttctccacatgggcttcacgtggtttggagatgggtgggggaaaacaatcaggtttcttcaggctgaggaggacttgctcaggccgattccaaacattgtgctcgttcaatgcgtagaaatgatttgcatgatggcatgccgtgatcagaagtcatgcatgagatccatacaccacaggacactactaatctagtcccttgcactgggtcagcctttggacaggacccagccctgcaccgttcactgtatttggagaaaatggtaagagttccataccggctacaattctttgagttcttaaaagtccttcatacaccttctgggtagggaaacaaccaactaattgactaacaccaccaacaacaaaaaacaaacccaatccaacaagcagatggatccgttgcgtgtatatgtttaacagacatctctaacatacagccattgttgcacattttgcaagatgaactatttaatgctgctctgtgtccagtacatgggggagactttgatcccaaatggcttgtactatttatgtcactgtaaaaccaaatcctagggct

SEQ ID NO: 6252 - DNA, 2588 bp, Homo sapiens
agttctcaagtcagatctcttctcataagggcactgtgtggagcttctgagatctgtggaggtttttctctgcaaatgcaggaagaaatcaggtggatggatgcataattatggccctgctcctggtctctttgctggcattcctgagcttgggctcaggatgtcatcatcggatctgtcactgctctaacagggtttttctctgccaagagagcaaggtgacagagattccttctgacctcccgaggaatgccattgaactgaggtttgtcctcaccaagcttcgagtcatccaaaaaggtgcattttcaggatttggggacctggagaaaatagagatctctcagaatgatgtcttggaggtgatagaggcagatgtgttctccaaccttcccaaattacatgaaattagaattgaaaaggccaacaacctgctctacatcaaccctgaggccttccagaaccttcccaaccttcaatatctgttaatatccaacacaggtattaagcaccttccagatgttcacaagattcattctctccaaaaagttttacttgacattcaagataacataaacatccacacaattgaaagaaattctttcgtggggctgagctttgaaagtgtgattctatggctgaataagaatgggattcaagaaatacacaactgtgcattcaatggaacccaactagatgagctgaatctaagcgataataataatttagaagaattgcctaatgatgttttccacggagcctctggaccagtcattctctctgagcttcatccaatttgcaacaaatctattttaaggcaagaagttgattatatgactcaggctaggggtcagagatcctctctggcagaagacaatgagtccagctacagcagaggatttgacatgacgtacactgagtttgactatgacttatgcaatgaagtggttgacgtgacctgctcccctaagccagatgcattcaacccatgtgaagatatcatggggtacaacatcctcagagtcctgatatggtttatcagcatcctggccatcactgggaacatcatagtgctagtgatcctaactaccagccaatataaactcacagtccccaggttccttatgtgcaacctggcctttgctgatctctgcattggaatctacctgctgctcattgcatcagttgatatccataccaagagccaatatcacaactatgccattgactggcaaactggggcaggctgtgatgctgctggctttttcactgtctttgccagtgagctgtcagtctacactctgacagctatcaccttggaaagatggcataccatcacgcatgccatgcagctggactgcaaggtgcagctccgccatgctgccagtgtcatggtgatgggctggatttttgcttttgcagctgccctctttcccatctttggcatcagcagctacatgaaggtgagcatctgcctgcccatggatattgacagccctttgtcacagctgtatgtcatgtccctccttgtgctcaatgtcctggcctttgtggtcatctgtggctgctatatccacatctacctcacagtgcggaaccccaacatcgtgtcctcctctagtgacaccaggatcgccaagcgcatggccatgctcatcttcactgacttcctctgcatggcacccatttctttctttgccatttctgcctccctcaaggtgcccctcatcactgtgtccaaagcaaagattctgctggttctgtttcaccccatcaactcctgtgccaaccccttcctctatgccatctttaccaaaaactttcgcagagatttcttcattctgctgagcaagtgtggctgctatgaaatgcaagcccaaatttataggacagaaacttcatccactgtccacaacacccatccaaggaatggccactgctcttcagctcccagagtcaccagtggttccacttacatacttgtccctctaagtcatttagcccaaaactaaaacacaatgtgaaaatgtatctgagtattgaatgataattcagtcttgcctttgaagggtatgtcacaaagagctgacagtgcttctacacatttcatctaatttaatattcctggcatacctttaaggtaaattggtcaggaactattaattccatgtgatacattaggaagctgaattattagtaacaacaataataattaaagaatgcaatactgtattacatattttatccttatatatgttatttttgcacgttatgttcaaagtgcttttgttcagatatctcaagtgatccctgttaaataagcaggacagggattattcttggagttttacaaatgaggaaaccacgactcaaagagttaagtgacttgttcaaaattgtttagtttgtaagaggcagagccaggattaggtattccgactcccagagaatttcccagagaagcaccatggtattcattcattcattcattcaacaaatattaattgaacacccatctgaagcctttgtaatgcgtcagtgtggataggctgaaatacatttcccagatttcccttcctcatgtgttt

SEQ ID NO: 6253 - DNA, 474 bp, Homo sapiens; identical to SEQ ID NO: 249

SEQ ID NO: 6254 - DNA, 841 bp, Homo sapiens
aaaagccagccttcagccggagaaccgtttactcgctgctgtgcccatctatcagcaggctccgggctgaagattgcttctcttctctcctccaaggtctagtgacggagcccgcgcgcggcgccaccatgcggcagaaggcggtatcgcttttcttgtgctacctgctgctcttcacttgcagtggggtggaggcaggtaagaaaaagtgctcggagagctcggacagcggctccgggttctggaaggccctgaccttcatggccgtcggaggaggactcgcagtcgccgggctgcccgcgctgggcttcaccggcgccggcatcgcggccaactcggtggctgcctcgctgatgagctggtctgcgatcctgaatgggggcggcgtgcccgccggggggctagtggccacgctgcagagcctcggggctggtggcagcagcgtcgtcataggtaatattggtgccctgatgggctacgccacccacaagtatctcgatagtgaggaggatgaggagtagccagcagctcccagaacctcttcttccttcttggcctaactcttccagttaggatctagaactttgcctttttttttttttttttttttttgagatgggttctcactatattgtccaggctagagtgcagtggctattcacagatgcgaacatagtacactgcagcctccaactcctagcctcaagtgatcctcctgtctcaacctcccaagtaggattacaagcatgcgccgacgatgcccagaatccagaactttgtctatcactctccccaacaacctagatgtgaaaacagaataaacttcacccagaaaacactt

SEQ ID NO: 6255 - DNA, 598 bp, Homo sapiens
ccaatgagaatggagaaggtccaggacacgtgggtgggggaagctgagcgctgagaccaagggctaaagctgggagactgaaaaaatgcagaccgccggggcattattcatttctccagctctgatccgctgttgtaccaggggtctaatcaggcctgtgtctgcctccttcttgaatagcccagtgaattcatctaaacagccttcctacagcaacttcccactccaggtggccagacgggagttccagaccagtgttgtctcccgggacattgacacagcagccaagtttattggtgctggggcagccacagttggtgtggctggttcaggggctggcattggaaccgtgtttggcagcttgatcattggctatgccaggaacccgtctctcaagcagcagctcttctcctatgccattcttggctttgccctgtctgaggccatggggcttttctgtttgatggtcgccttcctcatcctcttcgccatgtgaggctccatgggggggtcaccggcctgttgctactgcaactccacaccattcttggtgctggggtgtgttaagctttaccattaaacacaacgtttctctaaa

SEQ ID NO: 6256 - DNA, 4036 bp, Homo sapiens
agagggagcgaaggaggcggggactgccaaggctccagcccggccgggctccgaggcgagaggctgcatggagtggccggcgcggctctgcgggctgtgggcgctgctgctctgcgccggcggcgggggcgggggcgggggcgccgcgcctacggaaactcagccacctgtgacaaatttgagtgtctctgttgaaaacctctgcacagtaatatggacatggaatccacccgagggagccagctcaaattgtagtctatggtattttagtcattttggcgacaaacaagataagaaaatagctccggaaactcgtcgttcaatagaagtacccctgaatgagaggatttgtctgcaagtggggtcccagtgtagcaccaatgagagtgagaagcctagcattttggttgaaaaatgcatctcacccccagaaggtgatcctgagtctgctgtgactgagcttcaatgcatttggcacaacctgagctacatgaagtgttcttggctccctggaaggaataccagtcccgacactaactatactctctactattggcacagaagcctggaaaaaattcatcaatgtgaaaacatctttagagaaggccaatactttggttgttcctttgatctgaccaaagtgaaggattccagttttgaacaacacagtgtccaaataatggtcaaggataatgcaggaaaaattaaaccatccttcaatatagtgcctttaacttcccgtgtgaaacctgatcctccacatattaaaaacctctccttccacaatgatgacctatatgtgcaatgggagaatccacagaattttattagcagatgcctattttatgaagtagaagtcaataacagccaaactgagacacataatgttttctacgtccaagaggctaaatgtgagaatccagaatttgagagaaatgtggagaatacatcttgtttcatggtccctggtgttcttcctgatactttgaacacagtcagaataagagtcaaaacaaataagttatgctatgaggatgacaaactctggagtaattggagccaagaaatgagtataggtaagaagcgcaattccacactctacataaccatgttactcattgttccagtcatcgtcgcaggtgcaatcatagtactcctgctttacctaaaaaggctcaagattattatattccctccaattcctgatcctggcaagatttttaaagaaatgtttggagaccagaatgatgatactctgcactggaagaagtacgacatctatgagaagcaaaccaaggaggaaaccgactctgtagtgctgatagaaaacctgaagaaagcctctcagtgatggagataatttatttttaccttcactgtgaccttgagaagattcttcccattctccatttgttatctgggaacttattaaatggaaactgaaactactgcaccatttaaaaacaggcagctcataagagccacaggtctttatgttgagtcgcgcaccgaaaaactaaaaataatgggcgctttggagaagagtgtggagtcattctcattgaattataaaagccagcaggcttcaaactaggggacaaagcaaaaagtgatgatagtggtggagttaatcttatcaagagttgtgacaacttcctgagggatctatacttgctttgtgttctttgtgtcaacatgaacaaattttatttgtaggggaactcatttggggtgcaaatgctaatgtcaaacttgagtcacaaagaacatgtagaaaacaaaatggataaaatctgatatgtattgtttgggatcctattgaaccatgtttgtggctattaaaactcttttaacagtctgggctgggtccggtggctcacgcctgtaatcccagcaatttgggagtccgaggcgggcggatcactcgaggtcaggagttccagaccagcctgaccaaaatggtgaaacctcctctctactaaaactacaaaaattaactgggtgtggtggcgcgtgcctgtaatcccagctactcgggaagctgaggcaggtgaattgtttgaacctgggaggtggaggttgcagtgagcagagatcacaccactgcactctagcctgggtgacagagcaagactctgtctaaaaaacaaaacaaaacaaaacaaaacaaaaaaacctcttaatattctggagtcatcattcccttcgacagcattttcctctgctttgaaagccccagaaatcagtgttggccatgatgacaactacagaaaaaccagaggcagcttctttgccaagacctttcaaagccattttaggctgttaggggcagtggaggtagaatgactccttgggtattagagtttcaaccatgaagtctctaacaatgtattttcttcacctctgctactcaagtagcatttactgtgtctttggtttgtgctaggcccccgggtgtgaagcacagaccccttccaggggtttacagtctatttgagactcctcagttcttgccacttttttttttaatctccaccagtcatttttcagaccttttaactcctcaattccaacactgatttccccttttgcattctccctccttcccttccttgtagccttttgactttcattggaaattaggatgtaaatctgctcaggagacctggaggagcagaggataattagcatctcaggttaagtgtgagtaatctgagaaacaatgactaattcttgcatattttgtaacttccatgtgagggttttcagcattgatatttgtgcattttctaaacagagatgaggtggtatcttcacgtagaacattggtattcgcttgagaaaaaaagaatagttgaacctatttctctttctttacaagatgggtccaggattcctcttttctctgccataaatgattaattaaatagcttttgtgtcttacattggtagccagccagccaaggctctgtttatgcttttggggggcatatattgggttccattctcacctatccacacaacatatccgtatatatcccctctactcttacttcccccaaatttaaagaagtatgggaaatgagaggcatttcccccaccccatttctctcctcacacacagactcatattactggtaggaacttgagaactttatttccaagttgttcaaacatttaccaatcatattaatacaatgatgctatttgcaattcctgctcctaggggaggggagataagaaaccctcactctctacaggtttgggtacaagtggcaacctgcttccatggccgtgtagaagcatggtgccctggcttctctgaggaagctggggttcatgacaatggcagatgtaaagttattcttgaagtcagattgaggctgggagacagccgtagtagatgttctactttgttctgctgttctctagaaagaatatttggttttcctgtataggaatgagattaattcctttccaggtattttataattctgggaagcaaaacccatgcctccccctagccatttttactgttatcctatttagatggccatgaagaggatgctgtgaaattcccaacaaacattgatgctgacagtcatgcagtctgggagtggggaagtgatcttttgttcccatcctcttcttttagcagtaaaatagctgagggaaaagggagggaaaaggaagttatgggaatacctgtggtggttgtgatccctaggtcttgggagctcttggaggtgtctgtatcagtggatttcccatcccctgtgggaaattagtaggctcatttactgttttaggtctagcctatgtggattttttcctaacatacctaagcaaacccagtgtcaggatggtaattcttattctttcgttcagttaagtttttcccttcatctgggcactgaagggatatgtgaaacaatgttaacatttttggtagtcttcaaccagggattgtttctgtttaacttcttataggaaagcttgagtaaaataaatattgtctttttgtatgtcacccaaa

SEQ ID NO: 6257 - DNA, 1632 bp, Homo sapiens
aaaatgtgcttcttacaggaatataaatagtttctggaaaggacactgacaacttcaaagcaaaatgaagctcttttggttgcttttcaccattgggttctgctgggctcagtattcctcaaatacacaacaaggacgaacatctattgttcatctgtttgaatggcgatgggttgatattgctcttgaatgtgagcgatatttagctcccaagggatttggaggggttcaggtctctccaccaaatgaaaatgttgccattcacaaccctttcagaccttggtgggaaagataccaaccagttagctataaattatgcacaagatctggaaatgaagatgaatttagaaacatggtgactagatgcaacaatgttggggttcgtatttatgtggatgctgtaattaatcatatgtgtggtaatgctgtgagtgcaggaacaagcagtacctgtggaagttacttcaaccctggaagtagggactttccagcagtcccatattctggatgggattttaatgatggtaaatgtaaaactggaagtggagatatcgagaactataatgatgctactcaggtcagagattgtcgtctgtctggtcttctcgatcttgcactggggaaggattatgtgcgttctaagattgccgaatatatgaaccatctcattgacattggtgttgcagggttcagaattgatgcttccaagcacatgtggcctggagacataaaggcaattttggacaaactgcataatctaaacagtaactggttcccggaaggtagtaaacctttcatttaccaggaggtaattgatctgggtggtgagccaattaaaagcagtgactactttggtaatggccgggtgacagaattcaagtatggtgcaaaactcggcacagttattcgcaagtggaatggagagaagatgtcttacttaaagaactggggagaaggttggggtttcatgccttctgacagagcgcttgtctttgtggataaccatgacaatcaacgaggacatggcgctggaggagcctctatacttaccttctgggatgctaggctgtacaaaatggcagttggatttatgcttgctcatccttatggatttacacgagtaatgtcaagctaccgttggccaagatattttgaaaatggaaaagatgttaatgattgggttgggccaccaaatgataatggagtaactaaagaagttactattaatccagacactacttgtggcaatgactgggtctgtgaacatcgatggcgccaaataaggaacatggttaatttccgcaatgtagtggatggccagccttttacaaactggtatgataatgggagcaaccaagtggcttttgggagaggaaacagaggattcattgttttcaacaatgatgactggacattttctttaactttgcaaactggtcttcctgctggcacatactgtgatgtcatttctggagataaaattaatggcaactgcacaggcattaaaatctacgtttctgatgatggcaaagctcatttttctattagtaactctgctgaagatccatttattgcaattcatgctgaatctaaattgtaaaatttaaaattaaatgcaaatccgcaaagcaa

SEQ ID NO: 6258 - DNA, 2439 bp, Homo sapiens
aaggctcctcagccgagcgccgagcggtcgatcgccgtagctcccgcagcctgcgatctccagtctgtggctcctaccagccattgtaggccaataatccgttatggagcatgcctttaccccgttggagcccctgctttccactgggaatttgaagtactgccttgtaattcttaatcagcctttggacaactattttcgtcatctttggaacaaagctcttttaagagcctgtgccgatggaggtgccaaccgcttatatgatatcaccgaaggagagagagaaagctttttgcctgaattcatcaatggagactttgattctattaggcctgaagtcagagaatactatgctactaagggatgtgagctcatttcaactcctgatcaagaccacactgactttactaagtgccttaaaatgctccaaaagaagatagaagaaaaagacttaaaggttgatgtgatcgtgacactgggaggccttgctgggcgttttgaccagattatggcatctgtgaataccttgttccaagcgactcacatcactccttttccaattataataatccaagaggaatcgctgatctacctgctccaaccaggaaagcacaggttgcatgtagacactggaatggagggtgattggtgtggccttattcctgttggacagccttgtatgcaggttacaaccacaggcctcaagtggaacctcacaaatgatgtgcttgcttttggaacattggtcagtacttccaatacctacgacgggtctggtgttgtgactgtggaaactgaccacccactcctctggaccatggccatcaaaagctaacctgttgactggcatccataagtgtgcctctgccttatctcatttctcaacagttcattgctcaacaagaacgattcacctgggtttgcaagaatctaaacctctctaggggaagcccactgggtttaaagatgttagtgtttagataatacaggtaacattataaatgacagatctcaattttatagtagtgggaaagatacatgctaagaaagcaaataagctctattatattcggttggaacctaatgggaatcattccactatacaattcagtactgattattcttcttacattattaatcattccatttatcctagaaaattgtttttaatttgaatcagagaaaactgttgaggttcctcttggagtctagaacatccttaaatgtctaacaacaagggctacctctgagtaccttttagtattagttttctgtatatgatatatattatcttatactgaaaaaaaattcctttcagattggggtgttagaagtgcaccaggtcactctgaccttattactgtctttggtattgtcttaaataaatcaagaatcattgacctaattgttaaatttaaaaataggtagttagcaataggtggaaagagaaatgatgtgaaagataaatgatgattcgtggagccctactcacacattaacccccaaattcaaaagtaagaatgcaaaagtctagagggggtaacagtctgcatcatcatcacaacctaaatggagaaagctgtgcagaggaaacttaagcataaaaattgaattcgtttctgacataccttagactgaaaaactgttggttcatccagaagtgtattcatattaccagaaaatgagtttgtctatggggatacatgaacttcatatactaaggagcctaactccaaagcctgcgttctcatcccagtctgatattcacctaagtttccggacccttttccttagctgtaaaatggaagcggttggactgatggtgtctgaggttctttcccacactgaaattctaaatattgacacttagcagtcatagggctgataatacacacagttactgacttagcctaaacaacctggtgcatcgaaatgtattcacctttcttttgtaaagagaccatcttctatcttctttccacctttctctgttttatgaaaccaactgttgacatacaaaccatgattgaaggagaacctgtccaacatgttttatgtacacaaatccctatgttgctataagaaaagtgaaagtaactgttttcttcttggtgctatgacagtgtgagactcaggttgtctgtagagaatgaaaggagcagtggcccgcgtgattgtggcatttaaggagcagtggcccatgtgactgtggcattttcggcacttttcattactttctgcttgaccggaagttgaggcttagctatgtttccatcttcagtttctgaagactagttatatattccttactagaaatatattcataatatataaaagaaatatatctgtgattttaaaattttgctaccaaagaatgcatgttctgtgtgccctgaaaatgttaccagtgttaataaatggatacttatcaaaaaagaa

SEQ ID NO: 6259 - DNA, 5941 bp, Homo sapiens
cttgccggcttccttgcaaagcccggtgcaagggcctctttcaaaatgaacccactggtgtgcctagcagtcggtagaagaagcgggagggcgtccggtctgcacgcccgccgcgaggttacaatgctgaacgcatgagatggaagataccaacgggaggccgaggggatccacggcgcccgcgcgggctccggcttcctcctgctctcggcgccgctgggcgaccgcccatgacccgctcttgcgggctctgtccggttgacaggcgaccctgtggcccggggaagcgcgggagggcgccggcggaaagttgaagagcgtttttctcgccgccgcgtgcattaggagctcgacgagtccgccctgggcttcctggtggggctgggcgggcgggggaggggccgcgcagcagcagcggaagccagacctcggcgataagaggctgcacagcgacatgcaacagtcttttcactgcagctgaatgagttgtggcgcccacaatgctcccatgacaaggagctgacaagttccattttccgtcgcgggcatcttggaatcatgactcccacaatgccttgggcacttggtcgacagtggggccgcctctgaaaaaaaaatgtgagaggttggtactaagaagtgcctttcctgacgtctctgctgcttggaaccgcttctagagcagtctctgcttttgccttgcttgctgccagctagactgtgacgacagcacatccaccctccacctctagcccagacacccccatttctacttataatcaagagaaaagctctaagtatctggcattgccctaggctgctttagtgttaaaagaaaagtttgctgaaaaagtaagatatcttctgccaggaaatcaaggaggaaaaaaaaaatcattttctcgattttgctctaaactgctgcatctgtctatgccaaactaatcaataccgattgcaccaccaaactccattgcaaattcagctgtgaggagattccctttcagacaactttgctgaaagcagcttggaaattcggtgtcgaagggtctgccacgttttcatgcttgcattttgggctccaaattggcactgggaaggggttactgagagcacaaggctgataccaggccctacttttaaacgttcatctacttacaatcctagtatttctctaaaaaccaaaacctctttgaattaacagtttcatgctgtgaatttctagtgggagatcttttccttgatattgacgacacaattttccatgtacttttaaagcagggagtggggaaaagtattttgaggggacattttcatcatcagttcagctttttttttttggttgttgctcttttttgggggggttgggtttgttggtttcactgaaacatttaactacctgtaaaatctaaacatggctgttagtgtcacaccaattcgggacacaaaatggctaacactggaagtatgtagagagttccagagggggacttgctcacggccagacacggaatgtaaatttgcacatccttcgaaaagctgccaagttgaaaatggacgagtaatcgcctgctttgattcattgaaaggccgttgctccagggagaactgcaaatatcttcatccacccccacatttaaaaacgcagttggagataaatggacgcaataacttgattcagcagaagaacatggccatgttggcccagcaaatgcaactagccaatgccatgatgcctggtgccccattacaacccgtgccaatgttttcagttgcaccaagcttagccaccaatgcatcagcagccgcctttaatccctatctgggacctgtttctccaagcctggtcccggcagagatcttgccgactgcaccaatgttggttacagggaatccgggtgtccctgtacctgcagctgctgcagctgctgcacagaaattaatgcgaacagacagacttgaggtatgtcgagagtaccaacgtggcaattgcaaccgaggagaaaatgattgtcggtttgctcatcctgctgacagcacaatgattgacaccaatgacaacacagtcactgtgtgtatggattacatcaaagggagatgctctcgggaaaagtgcaaatactttcatccccctgcacatttgcaagccaagatcaaggctgcccaataccaggtcaaccaggctgcagctgcacaggctgcagccaccgcagctgccatgggaattcctcaagctgtacttcccccattaccaaagaggcctgctcttgaaaaaaccaacggtgccaccgcagtctttaacactggtattttccaataccaacaggctctagccaacatgcagttacaacagcatacagcatttctcccaccagttcccatggtgcacggtgctacgccagccactgtgtccgcagcaacaacatctgccacaagtgttcccttcgctgcaacagccacagccaaccagatacccataatatctgccgaacatctgactagccacaagtatgttacccagatgtagaattttcatcactaaacaatcatgctaaagaggaaaggacagtgtgcttggttagagtaaaggacgaggtcattagccatattgtatatatcgtcaagcaacacacacaaaagttcctcagccacaagacatccacatattgcatgttaaccagaagaaaagacaacattttccggaaatccactgcacactgttgcctatacactttgtacatttaattgatatttgtgctgaggtgatattcctgtctaaaagaacaacattgtctttcttttctagcacagagttatgcattcaaagatgcatacctagttagtttcctatatattcatgccatcttgaaaagacagactatggtgtaaccatgattctattatgtattggtacgtctgtagaccaagatataattttttaaaaataagtttatttctttcaaggtttacaaataacaaaggtgcaccttgtatttaaaattgccattatagatgagagcgtgcatgcacagtcatttttgtttaagagtaatatttttaatgtaatagattgtaagacgtggtgagggagggatctgacagagatgaatgtgccaagcaaaaccacaactgtgtatattttaaagcacatcatggctttaagtaccatgttgttaaggattctcatgaagtgccatagactgtacatcaaattagagtattatttcttcagtgttattgttttcagagccacattttgttgcatatttgctagtactaatcagtcaaagggcaccattctttttttttttttttgaaaccaaagctgtctcagaaatggccaatttaactttacagtaacaatagacagcacaacacaaactctctcaatacagataaactcacacatactggagatatatatataatagatatatataaaattattttaatgcattgtagtgtaatatttatgcatactatactgtataacatgttattcaaaagggattgccatttctgagacacagtaacaaaaaaatgaggaaattattttgcttctatttatagcctctgtcaaaagtcaaaagactataaatgctttgcaaaaatggtttcacgtttgcttaaatgcttcatcacagtcacattcaaaatagtgactctaaacaaagaagaaagcagcactgtcatcagatgcatgataaaccaaaatatgaaaatgggaaatgtttaattaacctagtaattgggtgggttaagtacatgggtgaattttatatgtgatttttgttttgttttgttttgttcagattaactgcttatagccttagaaagccttttacaaaattaaaaaaaaaatagatgtgcattcagtttttaagaatggaatcatccaaaggaattcctttttttgaggtttggatgttgcagctagtaaaggatatttttgctctgttcagcagttctaaaaattgctgaagtaggggccaggtcactggtagttatagtatggaatgggagaagtgaaagttcagttatagaactttccatacttccaagtttactgcaagtttttatgcttgagagagatgctttctaatataagactgatgtgttgattttactgattgtactgtacatctattaaagccttagattattacattacgggttggaacccataccaatgtaatttcaatcgtgttaagaaagtaatggtgacttcacatgttattgtagttagttacattatagaatattacttatttttcttgttaaaatgtagtttttcatttcctacatttattagattttcattttctattaacaattgaataccatttcagtttatagacttgttttattagattttaccaatgaatttttcaaaatacaaaaaaaagtagtttttccttcataacatactcagttttgaattacatgtagtgtcacatgaatattcgtattgttaactaaatgatttatattttactgatttaatattacagtgtaagaatgtcagtcattgttagttcttgtctagttttcattaaaagaacaaagatcttttatatggatatcttataaatatataatcattgctaagtaagaagttaagttgttgctatcgcaacaatcctggcagacaattgagtaatattttgatgatttattttgtttgtaattagttattataagaagatctagatcctagatattagaataaaatttattttctactgtatccatttcaaatgttaaaatattgtttaatatttttgaaatccctgagtatcaggccttgttataaataagctgcataatcaataaatagaacaagggactttttgttgataatccaaatactcaaagtttacgtaatgaaaattatagcgtgtgtgcaaactcttgagggttgattatgctgcaatttagcatgttggaacgtctagggagaaggttgactttttgcacttctgtatatagtcaaaagagagaaacctgtataatagtaagatcttattttgaataaaaacgtctataattacaaggagttttgttaaggctaatacaatgacagactgagcaaaattgcttgcaaaagtggcacagagttagcactccataccccttcaaacatgttgctttgctttcttgtggacagcttgtagtttgccaggattttttcagctggaaagatacgccatcctttcaaaccctcatgactgacaaaaactccatggggccaaatctgcctgaagatcattaccaaaaatagcaggtacttctaccattaaggtgaaatcatggatcagatattccttacatttttcaaaactactgcatgtttaaaacttcaacaaaaaaagagagaaagaactatactaagaacatatattattcagatcagtttctgccaatttcagtggtttattgttcacaaaaaaatcttcaaaacaagtattgactttcacaaaatttaaatcataaacaggcaaaccaaacagcacactgtagctatagttgttatgtgattgttttttaattgctgtaggatcctgttctttcagcaggtgaaaaataaaacgcagttcaaatttcatggttttaattttcaactcagaagcactcaaaaatgcaaaatgtgataatgggcacttgtttaaaagaattagtgtatccagccttcactccagctggttaaaaatgttgcacttatcagcaaccctaccactttcatctgctgaaaggacaaatgtgcttggttttactattatgtaatcacaacttactttctgcttgtagttgcttaaaattatgtattttgtcttgggctgcaatttgttttatgcttattttattattactgcagtagttgactttgctgtatggaaaaataaagtgaaattgccctaataaaacttctctttcttaagta

SEQ ID NO: 6260 - DNA, 1430 bp, Homo sapiens
gggtccaggctgcggcgcgtggggagcgggcggagcgggggcgggggccgagcgcggggcacccgggggcctcctgtataggcgggcaccatgggctcctgctccggccgctgcgcgctcgtcgtcctctgcgcttttcagctggtcgccgccctggagaggcaggtgtttgacttcctgggctaccagtgggcgcccatcctggccaactttgtccacatcatcatcgtcatcctgggactcttcggcaccatccagtaccggctgcgctatgtcatggtgtacacgctgtgggcagccgtctgggtcacctggaacgtcttcatcatctgcttctacctggaagtcggtggcctcttaaaggacagcgagctactgaccttcagcctctcccggcatcgctcctggtggcgtgagcgctggccaggctgtctgcatgaggaggtgccagcagtgggcctcggggccccccatggccaggccctggtgtcaggtgctggctgtgccctggagcccagctatgtggaggccctacacagttgcctgcagatcctgatcgcgcttctgggctttgtctgtggctgccaggtggtcagcgtgtttacggaggaagaggacagctttgatttcattggtggatttgatccatttcctctctaccatgtcaatgaaaagccatccagtctcttgtccaagcaggtgtacttgcctgcgtaagtgaggaaacagctgatcctgctcctgtggcctccagcctcagcgaccgaccagtgacaatgacaggagctcccaggccttgggacgcgcccccacccagcaccccccaggcggccggcagcacctgccctgggttctaagtactggacaccagccagggcggcagggcagtgccacggctggctgcagcgtcaagagagtttgtaatttcctttctcttaaaaaaaaaaaagaaaagaaaacatacaaaagaaaaggcaaaaccccacatgcccacctcctctggcaacatgggggtcacagctctgcccccaggctgtcgtctcgtcgaggagcccctccctcaggtgcccacctggggctgctggaccctcgggctgcaagcactgctgctgggatgcagcctccccaggaagtcaatgtgaggcccgagacccctcaagcggtgagggcccctgttgaacatggagggttcctaaccccaaactcgtgccagaagaacccccaccccacccaggagctgaggctgatggagccctagggtgggggctgggcttgaccaggaacagcagagccaggccccaaggcatagggcagggcacatggtggtgacgagcaggcagtactcttgtaaagggggctcttgggcaaacagtcccaaaggctcccccaggtatcatcaagttggtaaataaacaggaacatggccctca

SEQ ID NO: 6261 - DNA, 6786 bp, Homo sapiens
ttctttcaagaagatcagggacaactgatttgaagtctactctgtgcttctaaatccccaattctgctgaaagtgagataccctagagccctagagccccagcagcacccagccaaacccacctccaccatgggggccatgactcagctgttggcaggtgtctttcttgctttccttgccctcgctaccgaaggtggggtcctcaagaaagtcatccggcacaagcgacagagtggggtgaacgccaccctgccagaagagaaccagccagtggtgtttaaccacgtttacaacatcaagctgccagtgggatcccagtgttcggtggatctggagtcagccagtggggagaaagacctggcaccgccttcagagcccagcgaaagctttcaggagcacacagtggatggggaaaaccagattgtcttcacacatcgcatcaacatcccccgccgggcctgtggctgtgccgcagcccctgatgttaaggagctgctgagcagactggaggagctggagaacctggtgtcttccctgagggagcaatgtactgcaggagcaggctgctgtctccagcctgccacaggccgcttggacaccaggcccttctgtagcggtcggggcaacttcagcactgaaggatgtggctgtgtctgcgaacctggctggaaaggccccaactgctctgagcccgaatgtccaggcaactgtcaccttcgaggccggtgcattgatgggcagtgcatctgtgacgacggcttcacgggcgaggactgcagccagctggcttgccccagcgactgcaatgaccagggcaagtgcgtaaatggagtctgcatctgtttcgaaggctacgccggggctgactgcagccgtgaaatctgcccagtgccctgcagtgaggagcacggcacatgtgtagatggcttgtgtgtgtgccacgatggctttgcaggcgatgactgcaacaagcctctgtgtctcaacaattgctacaaccgtggacgatgcgtggagaatgagtgcgtgtgtgatgagggtttcacgggcgaagactgcagtgagctcatctgccccaatgactgcttcgaccggggccgctgcatcaatggcacctgctactgcgaagaaggcttcacaggtgaagactgcgggaaacccacctgcccacatgcctgccacacccagggccggtgtgaggaggggcagtgtgtatgtgatgagggctttgccggtgtggactgcagcgagaagaggtgtcctgctgactgtcacaatcgtggccgctgtgtagacgggcggtgtgagtgtgatgatggtttcactggagctgactgtggggagctcaagtgtcccaatggctgcagtggccatggccgctgtgtcaatgggcagtgtgtgtgtgatgagggctatactggggaggactgcagccagctacggtgccccaatgactgtcacagtcggggccgctgtgtcgagggcaaatgtgtatgtgagcaaggcttcaagggctatgactgcagtgacatgagctgccctaatgactgtcaccagcacggccgctgtgtgaatggcatgtgtgtttgtgatgacggctacacaggggaagactgccgggatcgccaatgccccagggactgcagcaacaggggcctctgtgtggacggacagtgcgtctgtgaggacggcttcaccggccctgactgtgcagaactctcctgtccaaatgactgccatggccagggtcgctgtgtgaatgggcagtgcgtgtgccatgaaggatttatgggcaaagactgcaaggagcaaagatgtcccagtgactgtcatggccagggccgctgcgtggacggccagtgcatctgccacgagggcttcacaggcctggactgtggccagcactcctgccccagtgactgcaacaacttaggacaatgcgtctcgggccgctgcatctgcaacgagggctacagcggagaagactgctcagaggtgtctcctcccaaagacctcgttgtgacagaagtgacggaagagacggtcaacctggcctgggacaatgagatgcgggtcacagagtaccttgtcgtgtacacgcccacccacgagggtggtctggaaatgcagttccgtgtgcctggggaccagacgtccaccatcatccaggagctggagcctggtgtggagtactttatccgtgtatttgccatcctggagaacaagaagagcattcctgtcagcgccagggtggccacgtacttacctgcacctgaaggcctgaaattcaagtccatcaaggagacatctgtggaagtggagtgggatcctctagacattgcttttgaaacctgggagatcatcttccggaatatgaataaagaagatgagggagagatcaccaaaagcctgaggaggccagagacctcttaccggcaaactggtctagctcctgggcaagagtatgagatatctctgcacatagtgaaaaacaatacccggggccctggcctgaagagggtgaccaccacacgcttggatgcccccagccagatcgaggtgaaagatgtcacagacaccactgccttgatcacctggttcaagcccctggctgagatcgatggcattgagctgacctacggcatcaaagacgtgccaggagaccgtaccaccatcgatctcacagaggacgagaaccagtactccatcgggaacctgaagcctgacactgagtacgaggtgtccctcatctcccgcagaggtgacatgtcaagcaacccagccaaagagaccttcacaacaggcctcgatgctcccaggaatcttcgacgtgtttcccagacagataacagcatcaccctggaatggaggaatggcaaggcagctattgacagttacagaattaagtatgcccccatctctggaggggaccacgctgaggttgatgttccaaagagccaacaagccacaaccaaaaccacactcacaggtctgaggccgggaactgaatatgggattggagtttctgctgtgaaggaagacaaggagagcaatccagcgaccatcaacgcagccacagagttggacacgcccaaggaccttcaggtttctgaaactgcagagaccagcctgaccctgctctggaagacaccgttggccaaatttgaccgctaccgcctcaattacagtctccccacaggccagtgggtgggagtgcagcttccaagaaacaccacttcctatgtcctgagaggcctggaaccaggacaggagtacaatgtcctcctgacagccgagaaaggcagacacaagagcaagcccgcacgtgtgaaggcatccactgaacaagcccctgagctggaaaacctcaccgtgactgaggttggctgggatggcctcagactcaactggaccgcagctgaccaggcctatgagcactttatcattcaggtgcaggaggccaacaaggtggaggcagctcggaacctcaccgtgcctggcagccttcgggctgtggacataccgggcctcaaggctgctacgccttatacagtctccatctatggggtgatccagggctatagaacaccagtgctctctgctgaggcctccacaggggaaactcccaatttgggagaggtcgtggtggccgaggtgggctgggatgccctcaaactcaactggactgctccagaaggggcctatgagtactttttcattcaggtgcaggaggctgacacagtagaggcagcccagaacctcaccgtcccaggaggactgaggtccacagacctgcctgggctcaaagcagccactcattataccatcaccatccgcggggtcactcaggacttcagcacaacccctctctctgttgaagtcttgacagaggatctcccacagctgggagatttagccgtgtctgaggttggctgggatggcctcagactcaactggaccgcagctgacaatgcctatgagcactttgtcattcaggtgcaggaggtcaacaaagtggaggcagcccagaacctcacgttgcctggcagcctcagggctgtggacatcccgggcctcgaggctgccacgccttatagagtctccatctatggggtgatccggggctatagaacaccagtactctctgctgaggcctccacagccaaagaacctgaaattggaaacttaaatgtttctgacataactcccgagagcttcaatctctcctggatggctaccgatgggatcttcgagacctttaccattgaaattattgattccaataggttgctggagactgtggaatataatatctctggtgctgaacgaactgcccatatctcagggctaccccctagtactgattttattgtctacctctctggacttgctcccagcatccggaccaaaaccatcagtgccacagccacgacagaagccgaaccggaagttgacaaccttctggtttcagatgccaccccagacggtttccgtctgtcctggacagctgatgaaggggtcttcgacaattttgttctcaaaatcagagataccaaaaagcagtctgagccactggaaataaccctacttgcccccgaacgtaccagggacataacaggtctcagagaggctactgaatacgaaattgaactctatggaataagcaaaggaaggcgatcccagacagtcagtgctatagcaacaacagccatgggctccccaaaggaagtcattttctcagacatcactgaaaattcggctactgtcagctggagggcacccacagcccaagtggagagcttccggattacctatgtgcccattacaggaggtacaccctccatggtaactgtggacggaaccaagactcagaccaggctggtgaaactcatacctggcgtggagtaccttgtcagcatcatcgccatgaagggctttgaggaaagtgaacctgtctcagggtcattcaccacagctctggatggcccatctggcctggtgacagccaacatcactgactcagaagccttggccaggtggcagccagccattgccactgtggacagttatgtcatctcctacacaggcgagaaagtgccagaaattacacgcacggtgtccgggaacacagtggagtatgctctgaccgacctcgagcctgccacggaatacacactgagaatctttgcagagaaagggccccagaagagctcaaccatcactgccaagttcacaacagacctcgattctccaagagacttgactgctactgaggttcagtcggaaactgccctccttacctggcgacccccccgggcatcagtcaccggttacctgctggtctatgaatcagtggatggcacagtcaaggaagtcattgtgggtccagataccacctcctacagcctggcagacctgagcccatccacccactacacagccaagatccaggcactcaatgggcccctgaggagcaatatgatccagaccatcttcaccacaattggactcctgtaccccttccccaaggactgctcccaagcaatgctgaatggagacacgacctctggcctctacaccatttatctgaatggtgataaggctgaggcgctggaagtcttctgtgacatgacctctgatgggggtggatggattgtgttcctgagacgcaaaaacggacgcgagaacttctaccaaaactggaaggcatatgctgctggatttggggaccgcagagaagaattctggcttgggctggacaacctgaacaaaatcacagcccaggggcagtacgagctccgggtggacctgcgggaccatggggagacagcctttgctgtctatgacaagttcagcgtgggagatgccaagactcgctacaagctgaaggtggaggggtacagtgggacagcaggtgactccatggcctaccacaatggcagatccttctccacctttgacaaggacacagattcagccatcaccaactgtgctctgtcctacaaaggggctttctggtacaggaactgtcaccgtgtcaacctgatggggagatatggggacaataaccacagtcagggcgttaactggttccactggaagggccacgaacactcaatccagtttgctgagatgaagctgagaccaagcaacttcagaaatcttgaaggcaggcgcaaacgggcataaattccagggaccactgggtgagagaggaataaggcccagagcgaggaaaggattttaccaaagcatcaatacaaccagcccaaccatcggtccacacctgggcatttggtgagagtcaaagctgaccatggatccctggggccaacggcaacagcatgggcctcacctcctctgtgatttctttctttgcaccaaagacatcagtctccaacatgtttctgttttgttgtttgattcagcaaaaatctcccagtgacaacatcgcaatagttttttacttctcttaggtggctctgggaatgggagaggggtaggatgtacaggggtagtttgttttagaaccagccgtattttacatgaagctgtataattaattgtcattatttttgttagcaaagattaaatgtgtcattggaagccatccctttttttacatttcatacaacagaaaccagaaaagcaatactgtttccattttaaggatatgattaatattattaatataataatgatgatgatgatgatgaaaactaaggatttttcaagagatctttctttccaaaacatttctggacagtacctgattgtatttttttt

SEQ ID NO: 6262 - DNA, 4141 bp, Homo sapiens
ggtaacggcggctcccgcgtcctcctccatgtccccgcctatccccgccgcagcccgccccgtctcctcctccctccgcagcctcgccgagtcctcggtgcgggctgcgagcgggacccgcggagctgcgctgtcctcgacgcctccgccaggcgcgggccgaggagcctccaagagctggcccggcccccggccgccgccgcccaaccccgggcatctgccccgcgccgttgtccccgcggcttcgggccggcgggaccgccccgtcccttccaggggtgacccgggggtcgcgggtgggacggcgcctgcggccgagtctggggggcgccgggtgtcgggtcgggaagcggccgccgcgactcttgcctcccgggcgtcgttgctccacgggcctgcctccacccgcggggacaggtgccccggctggggtctgttgggaagatggcgaccccgggcatgagctggcagcagcactattacggcggctcggcggccaaattcgcgccctcgccggccaccgcacagctggctgggcacagcatggactacagccaggagatgcacctgaaaatgagcaagaaaatcgcccagctcaccaaggtaatatatgctttaaacactaaaaatgatgagcatgaatctgcaattcaagccctcaaagatgctcatgaagaagaaattcaacaaattcttgctgaaacaagagaaaaaatattgcagtataaaagcaaagtaacagaggagctagaccttagaagaaagattcaagttttagaatcatcattagaagatcacataaaaatgaagcagcaggctttgacagaatttgaagcttataagcacagagttgaggacatgcaactttgtgcagaagcccagcatgtccaacgcatagtgaccatgtctagagaagtcgaagagattagaaggaaatttgaagaaaaattacggagctttggacaacttcaagtacagtttgaaaaagacaaacgattggcattggaagacttgcaagctgctcacagacgggagatacaagagctattgaagtcacagcaggatcacagtgcctcagtaaataaaggccaggaaaaggcagaggaactacacagaatggaggtggagtccctaaacaaaatgcttgaggagctaagacttgaacggaagaaactaattgaggattatgaaggcaagttgaataaagctcagtccttttatgaacgtgagcttgatactttgaaaaggtcacagctttttacagcagaaagcctacaggccagcaaagaaaaggaagctgatcttagaaaagaatttcagggacaagaagcaattttacgaaaaactataggaaaattaaagacagagttacagatggtacaggatgaagctggaagtcttcttgacaaatgccaaaagcttcagacggcacttgccatagcagagaacaatgttcaggttcttcaaaaacagcttgatgatgccaaggagggagaaatggccctattaagcaagcacaaagaagtggaaagtgagctagcagctgccagagaacgtttacaacagcaagcttcagatcttgtcctcaaagctagtcatattggaatgcttcaagcaactcaaatgacccaggaagttacaattaaagatttagaatcagaaaaatcgagagtcaatgagagattatctcaacttgaagaggaaagagcttttttgcgaagcaaaacccaaagtctggatgaagagcagaagcaacagattctagaactggagaagaaagtaaatgaagcaaagagaactcagcaagaatattatgaaagggaacttaaaaacctgcaaagtagattggaagaggaggtgactcaattaaacgaggcccattctaagactttggaagaattagcttggaagcaccatatggcaattgaagctgtccacagtaatgcaattagggataagaaaaaactgcaaatggatttggaagaacaacataacaaagataaactaaacctggaagaggataaaaatcagcttcaacaagagctagaaaacctaaaggaagtactggaagacaagttgaatacagccaatcaagagattggccacctccaagatatggtaaggaaaagtgaacaaggtcttggctctgcagaaggacttattgctagtcttcaggactcccaggaaaggcttcagaatgagcttgacttgactaaagacagcctaaaggagaccaaggatgctctattaaatgtggagggtgagctagaacaagaaaggcaacagcatgaagaaacaattgctgccatgaaagaagaagagaagctcaaagtggacaaaatggcccatgacttagaaattaagtggactgaaaatcttagacaagagtgttctaaacttcgtgaagagttaaggcttcaacatgaagaggataagaagtcagcaatgtctcaacttttgcagttgaaagatcgagagaaaaatgcagcaagagattcatggcagaagaaagtagaagatctcttaaaccagatttccttgctgaaacagaatctggagatacagctttcccagtctcagacttctttgcaacaactgcaagcccagtttacgcaagaacgacagcggcttacgcaagagcttgaagaattagaggagcaacatcagcaaagacacaaatcattaaaagaagcacatgtccttgcatttcaaactatggaagaggaaaaggaaaaggagcaaagagctcttgaaaatcatttacaacagaagcattctgcagagcttcaatcactaaaagatgcacacagagagtcaatggagggcttccggatagaaatggaacaggaacttcagactcttcggtttgaattagaagatgaaggaaaggctatgcttgcttccttgcgctcagaactcaaccatcaacatgcagctgcaattgatttgttacggcataatcatcatcaagaattggcagctgctaaaatggaattagagagaagcatagacatcagcagaagacagagtaaggagcacatatgtagaattacagatctacaagaggaattaagacacagagagcatcacatctctgaattggataaggaggttcagcaccttcatgagaatataagtgccctaaccaaagaactggaatttaaggggaaagaaattctcagaatacgaagtgaatctaaccaacagataaggttgcatgaacaagatttaaacaagagacttgaaaaagagttggatgtcatgacagcagaccacctcagagagaaaaatatcatgcgggcagattttaataagactaacgagctactcaaggaaataaatgccgctttacaagtgtcattagaagaaatggaagaaaaatatctaatgagagaatcaaaaccagaagatatacagatgattacagaattaaaagccatgcttacagaaagagaccagatcataaagaaactaattgaggataataagttttatcagctggaattagtcaatcgagaaactaacttcaacaaagtgtttaactcaagtcctactgttggtgttattaatccattggctaagcaaaagaagaagaatgataaatcaccaacaaacaggtttgtgagtgttcccaatctaagtgctctggaatctggtggagtgggcaatggacatcctaaccgcctggatcccattcctaattctccagtccacgatattgagttcaacagcagcaaaccacttccacagccagtgccacctaaagggcccaagacatttttgagtcctgctcagagtgaagcttctccagtggcttctccagatccccagcgccaggagtggtttgcccggtacttcacattctgaaagaattgtgttggcacagctctgtatagactgttactaagagcatgactttatacagattgttatgtaaataggctttcctatgtcaaacactgtgaatgagaaagtatttgtctctccaacttgaaaatgcactgtatttcctgtgatatttattggaatcattctataaggtactatattatgtgtgtaattataactgttatttttatttgagatggaagagtctttaacctttgtaattactgcataataaattttgttagaatcaaac

SEQ ID NO: 6263 - DNA, 2211 bp, Homo sapiens
gctgctgcgccgcgctcccggcgcactcggagcccggcggggaccgggaggcagagacggggcggccgtggctccgagggcgggagctgagccgggccccgggaccgaagtttggcggcggctccgggaggcagagcgggctccccgggcgacttccaggcccctctcgcgtcctcgccccggacccgtgggcagccggggggaacggaagccgcggccgggccaactccgaggcggggacgccgcgacgggaacttgaggcccgagagggatgtgaaggcccaaaatgaccctcttaccgggagacaattctgactacgactacagcgcgctgagctgcacctcggacgcctccttccacccggccttcctcccgcagcgccaggccatcaagggcgcgttctaccgccgggcgcagcggctgcggccgcaggatgagccccgccagggctgtcagcccgaggaccgccgccgtcggatcatcatcaacgtaggcggcatcaagtactcgctgccctggaccacgctggacgagttcccgctgacgcgcctgggccagctcaaggcctgcaccaacttcgacgacatcctcaacgtgtgcgatgactacgacgtcacctgcaacgagttcttcttcgaccgcaacccgggggccttcggcactatcctgaccttcctgcgcgcgggcaagctgcggctgctgcgcgagatgtgcgcgctgtccttccaggaggagctgctgtactggggcatcgcggaggaccacctggacggctgctgcaagcgccgctacctgcagaagattgaggagttcgcggagatggtggagcgggaggaagaggacgacgcgctggacagcgagggccgcgacagcgagggcccggccgagggcgagggccgcctggggcgctgcatgcggcgactgcgcgacatggtggagaggccgcactcggggctgcctggcaaggtgttcgcctgcctgtcggtgctcttcgtgaccgtcaccgccgtcaacctctccgtcagcaccttgcccagcctgagggaggaggaggagcagggccactgttcccagatgtgccacaacgtcttcatcgtggagtcggtgtgcgtgggctggttctccctggagttcctcctgcggctcattcaggcgcccagcaagttcgccttcctgcggagcccgctgacgctgatcgacctggtggccatcctgccctactacatcacgctgctggtggacggcgccgccgcaggccgtcgcaagcccggcgcgggcaacagctacctggacaaggtggggctggtgctgcgcgtgctgcgggcgctgcgcatcctgtacgtgatgcgcctggcgcgccactccctggggctgcagacgctggggctcacggcccgccgctgcacccgcgagttcgggctcctgctgctcttcctctgcgtggccatcgccctcttcgcgcccctgctctacgtcatcgagaacgagatggccgacagccccgagttcaccagcatccctgcctgctactggtgggctgtcatcaccatgacgacggtgggctatggcgacatggtccccaggagcaccccgggccaggtagtggccctgagcagcatcctgagcggcatcctgctcatggccttcccagtcacctccatcttccacaccttctcccgctcctacctggagctcaagcaggagcaagagagggtgatgttccggagggcgcagttcctcatcaaaaccaagtcgcagctgagcgtgtcccaggacagtgacatcttgttcggaagtgcctcctcggacaccagagacaataactgagcgcggaggacacgcctgccctgcctgccatctgtggcccgaagccattgccatccactgcagacgcctggagagggacaggccgcttccgagtgcagtcctggcgcagcaccgactcccacgcacccggggaaggacaccctcactcccacaccccgggaagaacactagaacatcagcagaggggccctgcccctccgcctgcagccgtgaaaggaagctgggtcatcagcccagccccgcccaccccagcccctatgtgtgtttccctcaataaggagatgccttgttcttttcaccatgcaaataacatgcccagcaaaaacttgctttatgggtctgcctggagaaaaaaaaaaaaaatacaaacagcagaaacagca

SEQ ID NO: 6264 - DNA, 2955 bp, Homo sapiens
cttcgctttcagagcatcctcactccgcccagttcggtgccagctgcgtgggctccagcttcgatcgttttccttggaatgctccaaaactcagcagcgactaagggaattccattggaatttgccgggcgtgctctcaccccgcacggcacccgcgccgtcagtcctcggatcccatcacttcagcccgaagattgcaactttgcagagacgaagaaatagcatggcatgaaacatggctcagttctattacaaaagaaatgttaatgctccctatagagaccgcatccctctaaggatagtaagagcagaatcagaactctcgccatcagaaaaagcctacttgaatgctgtggaaaagggagattatgccagtgtcaagaaatccctagaggaagctgaaatttattttaaaatcaatattaattgcattgatcctctcggaagaactgctctcctcattgcaattgaaaatgagaacttggagctcatcgaactactcttaagctttaatgtctatgttggagatgctctattacatgctatcagaaaagaagtcgtcggagctgttgagctgttattgaaccacaaaaaacctagtggagaaaaacaggtgcctcctatactccttgataagcagttctctgaattcactccagacattacaccaatcattttggcagcccatacaaataattatgagataataaaactcttggttcagaaaggagtctcagtgcctcgaccccacgaggtccgctgtaactgtgtggaatgcgtgtccagttcagatgtggacagcctccgtcactcacgctccagactcaacatctacaaggccttggccagtccctctctcattgcactgtcaagcgaagatccttttctcacagcctttcagttaagttgggaacttcaggaactgagcaaggtggaaaatgaattcaagtcggagtatgaagagctgtcacggcagtgcaaacaatttgctaaggacctactggatcagacgagaagttccagagaactggaaatcattcttaattaccgagatgacaatagtctcatagaagaacaaagtggaaatgatcttgcaagactaaaattggccattaagtaccgtcaaaaagagtttgttgcccagcccaattgtcaacagctgctggcatctcgctggtacgatgagtttccaggctggaggagaagacactgggcagtgaagatggtgacatgtttcataataggacttctttttcctgtcttctctgtgtgctacctgatagctcccaaaagcccacttggactgttcatcaggaagccatttatcaagtttatctgccacacagcctcctatttgacttttttgttcctgctgctgcttgcctctcagcacatcgacaggtcagacttgaacaggcaaggtccaccaccaaccatcgtcgagtggatgatattaccgtgggtcctgggcttcatatggggagaaattaaacagatgtgggatggcggacttcaggactacatccatgattggtggaatctaatggactttgtaatgaactccttatatttagcaacaatctccttgaaaattgttgcatttgtaaagtacagtgcccttaatccacgagaatcatgggacatgtggcatcccactctggtggcagaggctttatttgctattgcaaacatcttcagttctctgcgtctgatctcactgtttactgcaaattctcacctgggacctctgcaaatatctctgggaagaatgctcctggacattttgaagtttctattcatatactgccttgtgttgctagcatttgcaaatggcctaaatcaattgtacttctattatgaagaaacgaaagggttaacctgcaaaggcataagatgtgaaaagcagaataatgcattttcaacgttatttgagacactgcagtccctgttttggtcaatatttgggctcatcaatttatatgtgaccaatgtcaaagcacagcatgaatttactgagtttgttggtgccaccatgtttgggacatacaatgtcatctctctggttgttctactcaacatgttaatagctatgatgaataattcttaccaactgattgctgaccatgcagatatagaatggaaatttgcacgaacaaagctttggatgagttattttgaagaaggaggtactctgcctactcccttcaatgtcatcccgagccccaagtctctctggtacctgatcaaatggatctggacacacttgtgcaagaaaaagatgagaagaaagccagaaagttttggaacaatagggaggcgagctgctgataacttgagaagacatcaccaataccaagaagttatgaggaacctggtgaagcgatacgttgctgcaatgattagagatgctaaaactgaagaaggcctgaccgaagagaactttaaggaactaaagcaagacatttctagtttccgctttgaagtcctgggattactaagaggaagcaaactttccacaatacaatctgcgaatgcctcgaaggagtcttcaaattcggcagactcagatgaaaagagtgatagcgaagaagaagttgctcgtcaacaggctgcaggaccacttgagagaaatattcaactggaatctcgaggattagcttcacggggtgacctgagcattcccggtctcagtgaacaatgtgtgttagtagaccatagagaaaggaatacggacacactggggttacaggtaggaaagagagtgtgtccattcaagtcagagaaggtggtggtggaggacacggttcctataataccaaaggagaaacatgcaaaagaagaggactctagtatagactatgatctaaacctcccagacacagtcacccacgaagattacgtgaccacaagattgtgatacttgaaggaggaagcgtttaccatacacatacgtat

SEQ ID NO: 6265 - DNA, 2888 bp, Homo sapiens
atgaaggaaggccctgaggaggcgggaagtggccgctatggaccccgttatatcaccgacatgggagctggtgaggatgatgaaggatttgaagacgacttagatttggatatttcctttgaggaggttaaaccacttcctgctaccaaaggagggaataagaaatttttggtggaaagcaagaagatgtctatatctaacccaaagaccatttctaggctcatcccccctacctcagcatctctccctgtgaccacggtggctccccagcccattcccatacagagaaaggggaagaatggtgtggccataatgtcaaggctctttgacatgccttgtgatgaaactctctgctctgctgacagcttctgtgtcaatgactacacctgggggggctcgcgatgccagtgcaccctgggcaaaggtggtgagagctgctcagaagatattgttatccagtatcctcagttctttggccactcctatgtaacgtttgaacctctgaagaattcttatcaggcatttcaaattactcttgaatttagggcggaggcagaggatggcttactgctctactgtggggagaacgaacacgggaggggggatttcatgtccctggctatcatccgacgctccctgcagttcaggtttaattgtggaactggggttgccatcatcgtaagtgagaccaaaatcaaactagggggttggcacacggttatgctctacagagatgggctgaacgggctgctgcagctgaacaatggcaccccagtgacaggccagtctcagggccaatacagtaaaattactttccggacacctctctatcttggtggcgctcccagcgcttactggttggttagagcaacagggacaaaccgaggctttcaaggctgtgtgcagtcgctcgctgtgaatgggaggagaattgacatgaggccctggcccctgggaaaagcactcagtggggctgatgtgggggaatgcagcagtggaatctgtgatgaggcctcgtgcatccatggtggcacctgcacagcaatcaaagccgactcctacatttgcctctgtccccttgggtttaaaggtcgacactgtgaagatgctttcaccttgaccattcctcagttcagagagtctctgagatcttacgctgcaactccctggccactggagccccagcattacctttccttcatggaatttgagatcacatttcggccagactcaggagatggtgtcctcctgtacagctatgacacaggcagcaaagacttcctgtccatcaacttggcagggggccacgtggagttccgctttgactgtggctctgggaccggtgtcctcaggagtgaagatcccctcaccctgggcaactggcacgagcttcgtgtatctcgcacagcaaagaatggaatcttacaggtggataagcagaagatagtggagggaatggcagagggaggcttcacacagattaagtgcaacacagacattttcattggcggagtccccaattatgatgatgtgaagaagaactcgggtgtcctgaagcctttcagcgggagcatccagaagatcatcctgaatgaccgaaccatccatgtgaagcatgacttcacctccggagtgaatgtggagaatgcggcccacccctgtgtgagagccccttgtgcccatgggggcagctgccggcccaggaaggagggctatgactgtgactgccccttgggctttgaggggcttcactgccagaaagcgatcatagaagccattgagatcccgcagtttatcggccgcagttacctgacgtatgacaacccagatatcttgaagagggtgtcaggatcaagatcaaatgtgttcatgaggtttaaaacaactgccaaggatggccttttgctgtggaggggagacagccccatgagacccaacagcgacttcatttccttgggccttcgggatggagccctcgtgttcagctataacctgggcagtggtgtggcatccatcatggtgaatggctccttcaacgatggtcggtggcaccgagttaaggccgttagggatggccagtcaggaaagataaccgtggatgactatggagccagaacaggcaaatccccaggcatgatgcggcagcttaacatcaatggagctctgtatgtgggtggaatgaaggaaattgctctgcacactaacaggcaatatatgagagggctcgtgggctgtatctctcacttcaccctgtccaccgattaccacatttccctcgtggaagatgccgtggatgggaaaaacatcaacacttgtggagccaagtaacaccagctggccttgtccaagggacagagccttctattctgagaatcccaggggccctcagaccctgcctgatgctatatgcagaggcccagggaccaggtgtgtttcctctcaccaagaagaaagtacacactgatgagaaactgagaaccaagacaggcatccctgggtggcctttcctgctgacactccacgagctgacccagcagaattctctgtgtaggaagcatcggactttgtccattgaatatgtagcggctgccagagatcacacatcaatgcaaattccagagcctgtctgctatagctcagtgactgtgttgtgattcatagtacattaaaaagagagagagagagaaagaatcccacagggcactattaaaatacttctctccttccctgactcatgacactcttcctgacagcagaatgactgtgtgaccttgaacttcacatttcccacattggcccttggattgttcggattaaccccttccactcctcactggctggttcactgtgttctgactagtccataaaaataaagatggaaggagatc

SEQ ID NO: 6266 - DNA, 6514 bp, Homo sapiens
atggtttcagaaggaagtgcagcaggaagagactttgcaggaatggaagaggtgaggcagctccacgtgagattctgcaaagggattaagatttggcaccaggcttggtttctgtgcagcctcttaggcagagagccccaggagagggaagcaggctgtcagctgtggctttgcacgctctcagctgtcttgaaggttggttggctcttcccgctctctgaggtacccaattttaccttgttaaaggatggatgtggatgctggaggcttaaagaagaccagatctacaatgcagtgagaagagaagaaacagaaaatacagttggatctctactccatttcctcaccaagctcccagcctccgagacagcccatggaaggataagcgttggtccatgcttaaagcaatgtgtccgagacactgtatgtgagtatcgcgccaccctccaaaggacttcaatatcgcagtacatcaccggttctctcctagaagcaaccacgtctttgggagcaagaagtggccttctcagtacttttggaggatccactggacgaatgatgctgaaagaacgccagccaggcccctctgtggccaattccaatgccctcccttcaagttcagctgggatcagcaaggagctgatcgatctgcagcctctcatccagttcccagaggaagtcgccagcatcctgatggagcaagagcagactatttaccgcagggtcttgccagtcgactacctttgcttcttaacacgggacttgggcactcctgaatgccagagctccttgccctgcctcaaagcatccatctcagcgtcgattcttaccactcagaatggagagcacaatgcccttgaagatctggtgatgaggtttaatgaggtgagctcctgggtgacatggctgatcctcacggcaggctccatggaggagaagcgagaagtcttttcatatttggtgcatgtggccaaatgctgctggaacatgggcaactacaacgctgtcatggagttcttggctggcctcaggtcaagaaaagttttaaaaatgtggcagttcatggaccagtctgatattgagaccatgaggagcctgaaggatgctatggcccagcatgagtcctcttgtgagtacagaaaggtggtgacacgtgccctgcacatccctggctgtaaggtggttccattctgtggggtgtttctgaaggagctctgtgaagtgcttgacggcgcctccggtctcatgaagctttgcccgcggtacaattcccaagaagaaactttagagtttgtagcagattacagtggacaagataatttcttacaacgagtgggacaaaatggcttaaagaattcggagaaggagtccactgtcaacagcatctttcaggtcatccggagctgcaatcgaagtctggagacagacgaggaggacagccccagtgaaggaaacagctccaggaaaagctccttgaaggataaaagccgatggcagtttataattggagatttgttggattcagacaatgacatctttgagcaatccaaagaatacgactctcatggttcagaggactcacagaaggccttcgaccatgggacggagctcatcccttggtacgtgctgtccatccaagccgatgtgcaccagttcctgctgcagggggccacggtcatccactacgaccaggacacacacctctctgcccgctgcttcctccagcttcagcccgacaatagcaccttgacctgggtaaagcccacaactgcctccccagccagcagtaaagcaaaacttggtgtacttaataacacagctgagcctggaaaattcccactactgggtaatgctggattaagtagcctgacggaaggggtcttggatctttttgcagtgaaggctgtatacatgggccaccctggcattgatatacacactgtgtgtgttcagaacaaactgggtagcatgttcctgtcagagactggtgtgacattgctctatgggcttcagaccacagacaacagattattgcacttcgtggcaccaaagcacacagctaaaatgctcttcagcggattattggaactcactagagctgtgagaaagatgaggaaattccctgaccaaagacagcagtggctgcggaaacagtacgtcagcctttatcaggaggatggacggtatgaaggcccaactttggctcacgctgtggagttgtttggtggcagacggtggagtgctcgaaaccccagccccggaacatcagcaaagaatgctgagaagcccaatatgcagagaaacaataccctgggcataagcactaccaagaaaaagaagaaaatcctcatgaggggtgagagtggagaggtaactgacgatgagatggcaacccgaaaggccaagatgcacaaagagtgtcgaagccggagtggttctgatcctcaagacattaatgaacaagaagaatcagaggtgaatgccatcgctaaccctccaaaccccctcccttccagaagagcccactctttgaccacagctgggtcccccaacttggctgccgggacgtcatctcccatcaggccagtgtcctcccctgtgctgtcttcttcaaacaagagcccatccagtgcttggagcagtagtagctggcacgggcggatcaaaggcggcatgaagggatttcagagcttcatggtttcagatagcaacatgagttttgttgaatttgttgagctgttcaaatcattcagtgtcaggagccgcaaggacctgaaggatctgtttgatgtctatgcagtgccctgcaaccgatctggctccgagtcagccccactctacaccaacctgacaattgatgaaaacaccagcgatcttcagcctgacctagatctgttgaccagaaatgtctcggatttggggttgttcattaagagtaaacagcagctatcggacaaccagaggcagatatctgatgccattgctgctgcaagcattgtgacaaatggcactgggattgagagcacatctctgggcatttttggggtgggcatacttcagctcaacgatttcctcgtgaattgccaaggagaacactgcacttatgatgaaatcctcagcatcatccagaagttcgagcctagcatcagtatgtgtcatcagggactaatgtcatttgaagggtttgccaggtttctgatggataaagaaaattttgcctcaaaaaatgatgagtcacaggagaacattaaagaactgcagctacccctctcatactattacatcgaatcttcgcacaatacctacctcacgggccatcagctcaaaggagaatcctcggtagaactctacagccaggtccttttgcaaggctgtcgaagtgtagaattggactgctgggacggagacgatgggatgcccatcatttatcatggacatacgctgacaaccaagatccccttcaaggaagtggttgaagccattgatcgcagtgccttcatcaactctgacctgccaatcatcatatcgattgagaaccactgttcattgcctcagcaacgaaaaatggcagaaattttcaagactgtgtttggagaaaagctggtgactaaattcttatttgagactgatttctcagatgatccaatgcttccttcacctgaccaactcagaaagaaagttcttcttaaaaacaagaagctaaaagcccatcagacgccagtggatatcttaaagcaaaaggctcatcagttagcatctatgcaagtgcaggcttataatggtgggaatgccaacccccgacctgccaataatgaggaagaggaagatgaggaggacgaatatgattatgactatgaatccctttctgatgacaacattctggaagacagacctgaaaataaatcatgtaatgacaagcttcagtttgaatataatgaagaaatcccaaagaggataaagaaagcagataactctgcttgcaacaaaggaaaggtttatgatatggaactgggagaagaattttatcttgatcagaataaaaaggaaagcagacagattgcaccagagctttctgaccttgtaatctattgtcaagcagtaaaatttccaggactgtcaactctaaatgcatctggctctagcagaggaaaagaaaggaaaagcaggaagtccatttttggcaacaatccgggcagaatgagcccaggggagacagcatcatttaacaaaacatctggaaaaagttcctgtgaaggcattcgacagacctgggaggaatcttcttcccctctcaacccaaccacgtccctcagtgctatcattagaactcccaaatgttatcatatctcgtcgctgaatgaaaatgccgccaaacgtctgtgtcgcaggtattctcagaaactgacccagcacaccgcctgtcagctgctgagaacttaccctgctgccacccgcatcgactcttccaacccgaaccccctcatgttctggctccatgggatacagcttgtggcactcaactaccagactgatgatctccctttacatttaaatgctgcaatgtttgaggcaaatggtggttgtggttatgtattgaaacctccagttctgtgggacaagaactgccccatgtatcagaagttttctccactagaaagagatctggacagcatggatcctgcagtctattctttaactattgtctctggtcagaatgtgtgccccagtaatagcatgggaagcccgtgcattgaagtcgacgtcctgggcatgcctctggacagctgccatttccgcacaaagcccatccatcgaaacaccctgaaccccatgtggaacgagcagtttctgttccacgttcacttcgaagatcttgtatttcttcgttttgcagttgtggaaaacaatagttcagcggtaactgctcagagaatcattccactgaaagctttaaaacgaggatatcgacatcttcagctgcgaaaccttcacaatgaagtcttggagatttctagtttattcattaacagcagaaggatggaagaaaattcctctggcaataccatgtcagcctcttcgatgtttaatacagaagaaagaaaatgtttgcagactcacagagtcacggtgcatggggtcccagggccagagccctttaccgttttcactattaatggaggcaccaaggcaaagcagcttctgcagcaaattctgacaaatgaacaagacatcaaacctgttaccacagactattttttgatggaagaaaaatattttatatctaaagaaaagaatgaatgtaggaaacaaccattccagagagccattggtccagaagaggagatcatgcaaattttaagcagctggtttccagaagagggatacatgggcaggattgtcttaaaaacccagcaggaaaacctagaagagaaaaacattgttcaagatgacaaagaggtgatcttgagctcagaggaggagagtttctttgtccaagtgcatgatgtttctccagagcaacctcgaacagtcatcaaagcaccccgcgtcagcactgcacaggatgtcattcagcagaccttatgcaaagccaaatattcctacagcatcctgagcaaccccaatccaagcgactatgtgcttttggaagaggtggtgaaagacactaccaacaagaagactaccacaccaaagtcctctcagcgggtccttctggatcaggagtgtgtgtttcaagcccaaagcaagtggaaaggtgcaggaaaattcatccttaagctaaaggagcaggtgcaggcatctcgagaagataaaaagaaaggcatttctttcgcaagtgaactcaagaagctcaccaagtcaactaaacagccccgaggacttacatcaccttctcagctcttgacctcagaaagtatccaaaccaaggaggagaaacctgtgggtggcttgtcctccagtgacacaatggattaccgacagtgactaagggcagcatgtttaacccaggtatagtaagtcattgcaccatcctggaacagggcttaacttaaactactttgtaaggaaggcataattagtacaatgtcttttatcttttccaacaggaggatgtcccttgaaggcaggtaggaatgggaccttaaaacaggaaaagggctctgaagatatgtgtaacatgatatgctattgaacaccgcctataaagaaaaagggaaagaggctgggcgtggtggcgcatgcctgtaatcccagcactttgggaggccaaggcaggcagatcacctgaggtcagttcaagaccagcctgaccaacatggagaaaccccgtctctactaaaaatacaaaattagctgggcatggtggtgcatgcctataatcccagctactggggaggctgaggcaggagaatcacttgaacttggaaggcagaggttgcagtgagctgagatcacaccattgcactccagcctgggcaatgagagtgaaaactccgtctcaaaaaaaaaaaaa

SEQ ID NO: 6267 - DNA, 738 bp, Homo sapiens
ttaaaatgacagtgtctgttggccacatatgcagtctgaactttgctttgcagacatccacgacagcgatggcagttccagcagcagccaccagagcctcaagagcacagccaaatgggcggcatccctggagaatctgctggaagacccagaaggcgtgaaaagatttagggaatttttaaaaaaggaattcagtgaagaaaatgttttgttttggctagcatgtgaagattttaagaaaatgcaagataagacgcagatgcaggaaaaggcaaaggagatctacatgacctttctgtccagcaaggcctcatcacaggtcaacgtggaggggcagtctcggctcaacgagaagatcctggaagaaccgcaccctctgatgttccagaaactccaggaccagatctttaatctcatgaagtacgacagctacagccgcttcttaaagtctgacttgtttttaaaacacaagcgaaccgaggaagaggaagaagatttgcctgatgctcaaactgcagctaaaagagcttccagaatttataacacatgagcccccaaaaagccgggactggcagctttaagaagcaaaggaatttcctctcaggaccgtgccgggtttatcattgctttgttatttgtaaggactgaaatgtacaaaacccttcaatgggatgtgtgttttattaactgcttcaccagtaaattttgcatgatggctaagctaacataaaaaaagaa

SEQ ID NO: 6268 - DNA, 3650 bp, Homo sapiens; identical to SEQ ID NO: 46

SEQ ID NO: 6269 - DNA, 1042 bp, Homo sapiens
attaatcccctggcccaacccgtcatctactctaccatctttgcaggcacactcatcacagcgctaagctcgcactgattttttacctgagtaggcctagaaataaacatgctagcttttattccagttctaaccaaaaaaataaaccctcgttccacagaagctgccatcaagtatttcctcacgcaagcaaccgcatccataatccttctaatagctatcctcttcaacaatatactctccggacaatgaaccataaccaatactaccaatcaatactcatcattaataatcataatagctatagcaataaaactaggaatagccccctttcacttctgagtcccagaggttacccaaggcacccctctgacatccggcctgcttcttctcacatgacaaaaactagcccccatctcaatcatataccaaatctctccctcactaaacgtaagccttctcctcactctctcaatcttatccatcatagcaggcagttgaggtggattaaaccaaacccagctacgcaaaatcttagcatactcctcaattacccacataggatgaataatagcagttctaccgtacaaccctaacataaccattcttaatttaactatttatattatcctaactactaccgcattcctactactcaacttaaactccagcaccacgaccctactactatctcgcacctgaaacaagctaacatgactaacacccttaattccatccaccctcctctccctaggaggcctgcccccgctaaccggctttttgcccaaatgggccattatcgaagaattcacaaaaaacaatagcctcatcatccccaccatcatagccaccatcaccctccttaacctctacttctacctacgcctaatctactccacctcaatcacactactccccatatctaacaacgtaaaaataaaatgacagtttgaacatacaaaacccaccccattcctccccacactcatcgcccttaccacgctactcctacctatctccccttttatactaataatcttat

SEQ ID NO: 6270 - DNA, 999 bp, Homo sapiens
gcacgcgtttaatataagtggaggcgtcgcgctggcgggcattcctgaagctgacagcattcgggccgagatgtctcgctccgtggccttagctgtgctcgcgctactctctctttctggcctggaggctatccagcgtactccaaagattcaggtttactcacgtcatccagcagagaatggaaagtcaaatttcctgaattgctatgtgtctgggtttcatccatccgacattgaagttgacttactgaagaatggagagagaattgaaaaagtggagcattcagacttgtctttcagcaaggactggtctttctatctcttgtactacactgaattcacccccactgaaaaagatgagtatgcctgccgtgtgaaccatgtgactttgtcacagcccaagatagttaagtgggatcgagacatgtaagcagcatcatggaggtttgaagatgccgcatttggattggatgaattccaaattctgcttgcttgctttttaatattgatatgcttatacacttacactttatgcacaaaatgtagggttataataatgttaacatggacatgatcttctttataattctactttgagtgctgtctccatgtttgatgtatctgagcaggttgctccacaggtagctctaggagggctggcaacttagaggtggggagcagagaattctcttatccaacatcaacatcttggtcagatttgaactcttcaatctcttgcactcaaagcttgttaagatagttaagcgtgcataagttaacttccaatttacatactctgcttagaatttgggggaaaatttagaaatataattgacaggattattggaaatttgttataatgaatgaaacattttgtcatataagattcatatttacttcttatacatttgataaagtaaggcatggttgtggttaatctggtttatttttgttccacaagttaaataaatcataaaacttgatgtgttatctcttata

SEQ ID NO: 6271 - DNA, 3633 bp, Homo sapiens
aatcagcgatcagactccggagtttggcccgggagctggggagctcaccgatcccccgcccagcagttctggccgctgtcccggtgcgcacggacgtggctcgagtttcctctgctctccgctctcgcccgctagctctcctcccttccgctcctgcttctctccgggtctcccgctccagctccagccccacccggccggtcccgcacggctccgggtagccatggaggaccccacgctctatattgtcgagcggccgcttcccgggtaccccgacgccgaggccccggagccttcctccgctggggctcaggcagcggaggagccgtcgggggccggctcagaagagctgatcaagtcggaccaggtgaacggcgtgctggtgctgagcctcctggacaaaatcatcggggccgtagaccagatccagctgactcaagcacagctggaggagcggcaggcggagatggagggcgcagtgcagagcatccagggcgagctgagcaagctgggcaaggcgcacgccaccacgagcaatacggtgagcaagctgctggagaaggtgcgcaaggtcagcgtcaacgtgaagaccgtgcgcggcagcctggagcgccaggcggggcagatcaagaagctggaggtcaacgaggccgagctgctgcggcgccgcaactttaaagtcatgatctaccaggatgaagtgaagctgccggccaaactgagcatcagcaaatcgctgaaagagtcggaggcgctgccagagaaggagggcgaggagctgggcgagggcgagcggcccgaggaggacgcagcggcgctggagctttcgtcggacgaggcggtggaggttgaggaggttattgaggagtcccgcgcagagcgtatcaagcgcagcggcctgcggcgcgtggacgacttcaagaaggccttctccaaggagaagatggagaagaccaaggtgcgtacccgcgagaacctggagaagacgcgcctcaagaccaaggaaaacctggagaagacgcggcacaccctggagaagcgcatgaacaagctgggcacgcgcctggtgcccgccgagcggcgcgagaaactgaagacgtcgcgggacaagttgcgcaaatccttcacgcccgaccacgtggtgtacgcgcgctccaagaccgcggtctacaaggtgccacccttcaccttccacgtcaagaagatccgcgagggccaggtggaagtgctcaaggccaccgagatggtggaggtgggcgccgacgacgacgagggcggcgcggagcgcggggaggccggcgacctgcggcgcgggagcagccccgacgtgcacgcgctgctggagatcaccgaggagtcggacgccgtgctggtggacaagagcgacagcgactgagccgcccccgctgccacccaccccattcctcgctccttccgaacttcctctttcgcattctctctcggctcgagctggctgagatttttctaaattgaaaacacgcccccctccccacacctccaggaactccactcccagtcttagagctgttaggacccgatggggaggcagcccccgcagtggacaacccccgcttggacacagtccgagtggaatgggaagggaatggtcaatccctgtcctggttgtccaagtcgggatctcagaggaaattgcagtgattccacggttaggcccccctgggggggctgccttcccctcagcctctccccacaccacccacccagctgctgtcattccgctcactgagctcttcttcattctcaccctgatccctgggggactcaaagccaaaactgcccaaagaggaaagattgaatcctaaaggggatccctgcccccatgggaggccccctactagaaggacgtgaaagcagcttttgggggaaactgaggcagtggggaagacagagcagaatgagccctcaccctggctgggggtccagcacaggctgtatctgcagagggtcccagaggaacgctggagccaagagaagccctgggaaggaggggtggggaacgacatgcatgtgagggatggcacactgatgtgtttatgcacctgtacacaggagcgcatggccatggctttggaaaggagaatggaaaaatagaagaaggtcggccgggcttggtggcttatgcctgtaaccccagcactttgggaggccgaggtgggcggatcacctgaagtcaggagttcgggaccagcctggcaaacaccccatctctactaagcgaaaacccatctctactaaaattacaaaaattagctgggcatggttgcgcatgcctgtaatcccagctactttggaggctgaggtggggagaattgcttgaacctgggaggtggaggttgcagtgagccaaggtcgcgacactgcactccagcctgggtgacagagtgagactccatctcaacagaaggaaaaaaaaggaaaataggagaaggtggaaatgggtgaagagagaagtcccctcactagctgcatgagaaatctatcttactgtggttctccatgggcagcaggaccatttttcagaatcaagagggaggacagtgtgagaaggcgatgatccaaagaagacagagaggtcagccccacccgatccctcaaatgggctcttggaggcacccccaggggcagcccatttctcaaagtccagaaaattagggtcccagaagggggcagcagcaggctgggagttaggagggagagcagggtgccggccctgccaccaagttgagagctggaggggaggtggggagagaacatcacagagcagccagccctggttcactcctggcagtttcttctcaagctccttccctaggagcatggtggcacgtgcctgtggtctcagctacttgggaggctgaggcgggaggatcgccagagcccaggagtttgaggctgcagtgagctatgagggtgcctctgtgctccatcctaggcaacagagtgatacgctgtttaaaaaggaaaaaatccttccctagagctagtatcctaaagctgcagagctagcccagacctcattggtttccttgtccttggggtgcttttcctgaatctttgcgggtgaagggagtgttgctcccagtccagaggcctgattctgtttggactgggttctcaagacacgaccaggttctcaagacacgagtccccttgttcctccccattaaagggggtttgtcagaagcaagaacagcccctctccccagtcacagcctgaagggaggccccgagagcttcctccttccccccacctgctccttaccttctctgccctgctttttagaactgcagttcattgttttaagggattgggggagggagcctggggacacaaaccttttatacaatacaaagctttgctttttttttttttttcttccttttccctttctcggttctcttctctcctctgaatggctgaagacccctctgccgagggaggttggggattgtgggacaaggtcccttggtgctgatggcctgaaggggcctgagctgtgggcagatgcagttttctgtgggcttggggaacctctcacgttgctgtgtcctggtgagcagcccgaccaataaacctgcttttctaaaagg

SEQ ID NO: 6272 - DNA, 574 bp, Homo sapiens
aacacacctctaacatttcacctctagctcagatgagagagagaatgggacttcttggtactgattgtttttcccatgcctcaattggtttcttttagggagctacaaatttacgtgttcactggtgattgatcttttcatccagcacaatggacagaagtctaaggaacgtccttgtggtttcctttgggttcctgcttctctttacagcctatggaggtctgcagagcctgcagcctgtacagcgaggagggcctgggtgtcacagcgctcagcaccctctatggaggcatgctcctgtcctccatgttcctcccaccgctcctcatcgagaggctgggctgcaaggggaccatcatcctctccatgtgtggctacgtggccttctccgtgggcaacttcttcgccagctggtacactttgatccccacctccatactgctgggactcggggccgccccgctgtggtctgcacagtgcacatacctcacgatcacgggaaacacacatgcagagaaggcgggaaagcgtggcaaagacatggtgaaccagtattttggcatcttcttcctca

SEQ ID NO: 6273 - DNA, 3430 bp, Homo sapiens
tcggccaccgctcgcttcaatatggctgcccccagggagagacgaggctaccatgaaggagccgagcgcagaccctgagtccgtcacccatggatcgcagcgcggagttcaggaaatggaaggcgcaatgtttgagcaaagcggacctcagccggaagggcagtgttgacgaggatgtggtagagcttgtgcagtttctgaacatgcgagatcagtttttcaccaccagctcctgcgctggccgcatcctactccttgaccggggtataaatggttttgaggttcagaaacaaaactgttgctggctactggttacacacaaactttgtgtaaaagatgatgtgattgtagctctgaagaaagcaaatggtgatgccactttgaaatttgaaccatttgttcttcatgtgcagtgtcgacaattgcaggatgcacagattctgcattccatggcaatagattctggtttcaggaactctggcataacggtgggaaagagaggaaaaactatgttggctgtccggagtacacatggcttagaagttccattaagccataagggaaaactgatggtgacagaggaatatattgacttcctgttaaatgtggcaaatcaaaaaatggaggaaaacaagaaaagaattgagaggttttacaactgcctacagcatgctttggaaagggaaacgatgactaacttacatcccaagatcaaagagaaaaataactcatcatatattcataagaaaaaaagaaacccagaaaaaacacgtgcccagtgtattactaaagaaagtgatgaagaacttgaaaatgatgatgatgatgatctaggaatcaatgttaccatcttccctgaagattactaagctttggttctgatgtgtcttggccgtaatgtttctagtaggttttataaagctgctcttcataagagtattttagtttgttgagtgtatcagccattcataagccagtaatgacaagtgcagagcttcaaactataactttgttgcccagaggatgtgcagttgtcatctaagctctcagcagtacccggcttatcctacgacttcacctgaaatgctatagttatccctacttttttaccagtttctcccagaagcacctgcttaataaatcaaagatgtttgaatggtgtcttattctgaaataacctgacctaagacaggtatttagattattttggatacattttgaaaagggatagcataaatattttaagtaaaaagacctttattttaaataatagtggatattttaatgctggaaattagcattatagttgatatgccagaaattatatctttggttgtgatttaaacttatgctataaactaaattaatgatgtaaatacatagttttaaacattcttttagggacatgtaacttttaagtatcacttcaataatacgtattattataggaacaaagatttgggaataattgattacaggtgaggaagtactggaattccagttcaaggagataccatttcatttaggactaaaaggacaagatacaagttcacatgatgggaaaaatcagaaaacctctcgcagacaaagggtatataatggatatgaggcatcaaaaagcatggtatagtcagtgatggggaatagtccagaaaggctgaaacacagcatgtgatgcgagtcaaggtagttgatgcccaactgtgaagggccgttctaatctagcatggaggtagacagtgtttccttaatatggctgcatatcagaattacctaggtcaggacgaggcatggagatgctactttaataggccctgccgcagatcttccaaaccagaatcttaatcctggagtctaggaatctttatttttcacacaactcatccaagtggttctgataaaatcagtccagcacttttagaacccactgataacagacttattcctggagacagcatttgaggaggaattgaagatttttctaatgaaaagaaaaagggtcacatgaacagatgttgcagtgtacctgtgccagggatttcatgtgtacactttataggagaataagcaagagcttaggtaagttatagtccttaccattgggtctaaggcagtttccaggaaagcatggcaactcgttcagctatgtaagttgaactctgtaccacttgggagggaacattcccctagatgacaatgtcagtggcactcgaagttgtgcagtgcacattcttatctaccaacatatacagcagtccttctgggaaggaaatttgggcaggaaagggaactcacagtgtcggaatgcctggagcatttcttctagtctggtggacagaatatgaaagtatctgcctggcagtgcagtaaatgaaaagagaagataaatgaataaaaaaaaaagttataaataacagtaggaaagagagagtgcaggtggaacgagcctatcctgtggtgaaatgacaacacattctgcagttttaaaatctaagaggctcattgacttttcttcattcatttaaattgatctccaagaaaactatgtattttaaagattccataaactgaatatatgaatgagaattaagaagagaggggctgcttcctaatctgtttatataaggtatagtatagtataatctgtttatataaggttagtagagaggagacaccaggtgctggccataaacctaagaagacattgaatcccattcactccttaacattccttaatatacattcatgagctacataacattttaatcatcaatgatggaccatataccatatacgatatggtggccccataagattataatggacctgaaaaattcctattgctagtgatgtggtcattgtaaagctgtagcacaacacattacccacgtttgtggtgacagtcatataaaagtatggtacatataattatgtacagtgcatacataatacttgataatatgttactggtttgtgtctttgctatgctttttatcattattttagggtatactacttaaaatgttaactgtaaaacagcttctgacaggtccttcaggaagtactccagaagaaggcattgttatcatagaaggtgacagcttcatgtgtgttattgcccctgaagaccttccagtggtacaagatgtggaggaggaagacagtgatactgaggattctgaccctgtgtaggcttaggctaatgtgtgtgtttatatcttagtttttcacaaaaaggtttttccaatgttaaaaaaaatatataaaaaagcttatagaataaggatataaagaaatattttgtacagctgtacaataagctaagcattattaccaaagagtcaaaaagttttaagaaattaaagtttataaaccaaatgttcattgtgagccaaggttaatttattgaagaaataaaacatttttaatg

SEQ ID NO: 6274 - DNA, 1421 bp, Homo sapiens
tccgtggctgtgcagcttgggtgtcctgtgctcggcttaggggcacaggcttgcgggcggacctagggacggcggaggcatcgtgtccttcctgcaggaaggaaggagcttccggcgctttcctgggaggctcgctggggccgcggagataacctgaggtcctgcaacaggctgggggcccaaggaccatcccaggccttggaacagttggtatctttcagtcgccgccctggagaggcaggtgtttgacttcctgggctaccagtgggcgcccatcctggccaactttgtccacatcatcatcgtcatcctgggactcttcggcaccatccagtaccggctgcgctatgtcatggtgtacacgctgtgggcagccgtctgggtcacctggaacgtcttcatcatctgcttctacctggaagtcggtggcctcttaaaggacagcgagctactgaccttcagcctctcccggcatcgctcctggtggcgtgagcgctggccaggctgtctgcatgaggaggtgccagcagtgggcctcggggccccccatggccaggccctggtgtcaggtgctggctgtgccctggagcccagctatgtggaggccctacacagttgcctgcagatcctgatcgcgcttctgggctttgtctgtggctgccaggtggtcagcgtgtttacggaggaagaggacagctgcctgcgtaagtgaggaaacagctgatcctgctcctgtggcctccagcctcagcgaccgaccagtgacaatgacaggagctcccaggccttgggacgcgcccccacccagcaccccccaggcggccggcagcacctgccctgggttctaagtactggacaccagccagggcggcagggcagtgccacggctggctgcagcgtcaagagagtttgtaatttcctttctcttaaaaaaaaaaaagaaaagaaaacatacaaaagaaaaggcaaaaccccacatgcccacctcctctggcaacatgggggtcacagctctgcccccaggctgtcgtctcgtcgaggagcccctccctcaggtgcccacctggggctgctggaccctcgggctgcaagcactgctgctgggatgcagcctccccaggaagtcaatgtgaggcccgagacccctcaagcggtgagggcccctgttgaacatggagggttcctaaccccaaactcgtgccagaagaacccccaccccacccaggagctgaggctgatggagccctagggtgggggctgggcttgaccaggaacagcagagccaggccccaaggcatagggcagggcacatggtggtgacgagcaggcagtactcttgtaaagggggctcttgggcaaacagtcccaaaggctcccccaggtatcatcaagttggtaaataaacaggaacatggccctca

SEQ ID NO: 6275 - DNA, 4063 bp, Homo sapiens
caccggcgccgcgtcagcccccaggccgcctgcaggtgtgcgctcagaactagcacgtgtgccggacactatttaagggcccgcctctcctggctcacagctgcttgctgctccagccttgccctcccagagctgccggacgctcgcgggtctcggaacgcatcccgccgcgggggcttcggccgtggcatgggcgccgcgggcctgctcggggttttcttggctctcgtcgcaccgggggtcctcgggatttcttgtggctctcctccgcctatcctaaatggccggattagttattattctacccccattgctgttggtaccgtgataaggtacagttgttcaggtaccttccgcctcattggagaaaaaagtctattatgcataactaaagacaaagtggatggaacctgggataaacctgctcctaaatgtgaatatttcaataaatattcttcttgccctgagcccatagtaccaggaggatacaaaattagaggctctacaccctacagacatggtgattctgtgacatttgcctgtaaaaccaacttctccatgaacggaaacaagtctgtttggtgtcaagcaaataatatgtgggggccgacacgactaccaacctgtgtaagtgttttccctctcgagtgtccagcacttcctatgatccacaatggacatcacacaagtgagaatgttggctccattgctccaggattgtctgtgacttacagctgtgaatctggttacttgcttgttggagaaaagatcattaactgtttgtcttcgggaaaatggagtgctgtcccccccacatgtgaagaggcacgctgtaaatctctaggacgatttcccaatgggaaggtaaaggagcctccaattctccgggttggtgtaactgcaaactttttctgtgatgaagggtatcgactgcaaggcccaccttctagtcggtgtgtaattgctggacagggagttgcttggaccaaaatgccagtatgtgaagaaattttttgcccatcacctccccctattctcaatggaagacatataggcaactcactagcaaatgtctcatatggaagcatagtcacttacacttgtgacccggacccagaggaaggagtgaacttcatccttattggagagagcactctccgttgtacagttgatagtcagaagactgggacctggagtggccctgccccacgctgtgaactttctacttctgcggttcagtgtccacatccccagatcctaagaggccgaatggtatctgggcagaaagatcgatatacctataacgacactgtgatatttgcttgcatgtttggcttcaccttgaagggcagcaagcaaatccgatgcaatgcccaaggcacatgggagccatctgcaccagtctgtgaaaaggaatgccaggcccctcctaacatcctcaatgggcaaaaggaagatagacacatggtccgctttgaccctggaacatctataaaatatagctgtaaccctggctatgtgctggtgggagaagaatccatacagtgtacctctgagggggtgtggacaccccctgtaccccaatgcaaagtggcagcgtgtgaagctacaggaaggcaactcttgacaaaaccccagcaccaatttgttagaccagatgtcaactcttcttgtggtgaagggtacaagttaagtgggagtgtttatcaggagtgtcaaggcacaattccttggtttatggagattcgtctttgtaaagaaatcacctgcccaccaccccctgttatctacaatggggcacacaccgggagttccttagaagattttccatatggaaccacggtcacttacacatgtaaccctgggccagaaagaggagtggaattcagcctcattggagagagcaccatccgttgtacaagcaatgatcaagaaagaggcacctggagtggccctgctcccctgtgtaaactttccctccttgctgtccagtgctcacatgtccatattgcaaatggatacaagatatctggcaaggaagccccatatttctacaatgacactgtgacattcaagtgttatagtggatttactttgaagggcagtagtcagattcgttgcaaagctgataacacctgggatcctgaaataccagtttgtgaaaaagaaacatgccagcatgtgagacagagtcttcaagaacttccagctggttcacgtgtggagctagttaatacgtcctgccaagatgggtaccagttgactggacatgcttatcagatgtgtcaagatgctgaaaatggaatttggttcaaaaagattccactttgtaaagttattcactgtcaccctccaccagtgattgtcaatgggaagcacacaggcatgatggcagaaaactttctatatggaaatgaagtctcttatgaatgtgaccaaggattctatctcctgggagagaaaaaattgcagtgcagaagtgattctaaaggacatggatcttggagcgggccttccccacagtgcttacgatctcctcctgtgactcgctgccctaatccagaagtcaaacatgggtacaagctcaataaaacacattctgcatattcccacaatgacatagtgtatgttgactgcaatcctggcttcatcatgaatggtagtcgcgtgattaggtgtcatactgataacacatgggtgccaggtgtgccaacttgtatcaaaaaagccttcatagggtgtccacctccgcctaagacccctaacgggaaccatactggtggaaacatagctcgattttctcctggaatgtcaatcctgtacagctgtgaccaaggctacctgctggtgggagaggcactccttctttgcacacatgagggaacctggagccaacctgcccctcattgtaaagaggtaaactgtagctcaccagcagatatggatggaatccagaaagggctggaaccaaggaaaatgtatcagtatggagctgttgtaactctggagtgtgaagatgggtatatgctggaaggcagtccccagagccagtgccaatcggatcaccaatggaaccctcccctggcggtttgcagatcccgttcacttgctcctgtcctttgtggtattgctgcaggtttgatacttcttaccttcttgattgtcattaccttatacgtgatatcaaaacacagagcacgcaattattatacagatacaagccagaaagaagcttttcatttagaagcacgagaagtatattctgttgatccatacaacccagccagctgatcagaagacaaactggtgtgtgcctcattgcttggaattcagcggaatattgattagaaagaaactgctctaatatcagcaagtctctttatatggcctcaagatcaatgaaatgatgtcataagcgatcacttcctatatgcacttattctcaagaagaacatctttatggtaaagatgggagcccagtttcactgccatatactcttcaaggactttctgaagcctcacttatgagatgcctgaagccaggccatggctataaacaattacatggctctaaaaagttttgccctttttaaggaaggcactaaaaagagctgtcctggtatctagacccatcttctttttgaaatcagcatactcaatgttactatctgcttttggttataatgtgtttttaattatctaaagtatgaagcattttctggggttatgatggctttacctttattaggaagtatggttttattttgatagtagcttcctcctctggtggtgttaatcatttcatttttacccttacttggtttgagtttctctcacattactgtatatactttgcctttccataatcactcagtgattgcaatttgcacaagtttttttaaattatgggaatcaagatttaatcctagagatttggtgtacaattcaggctttggatgtttctttagcagttttgtgataagttctagttgcttgtaaaatttcacttaataatgtgtacattagtcattcaataaattgtaattgtaaagaaaacatacaa

SEQ ID NO: 6276 - DNA, 2125 bp, Homo sapiens
gaggccacctgtttgtgatgtgcaggcacagaagaaaggcacagctccccatcagtttcatggaaaataactcagtgcctgctgggaaccagctgctggagatccctacagagagcttccactgggggcaacccttccaggaaggagttggggagagagaaccctcactgtggggaatgctgataaaccagtcacacagctgctctattctcacacaaatctaccccttgcgtggctggaactgacgtttccctggaggtgtccagaaagctgatgtaacacagagcctataaaagctgtcggtccttaaggctgcccagcgccttgccaaaatggagcttgtaagaaggctcatgccattgaccctcttaattctctcctgtttggcggagctgacaatggcggaggctgaaggcttgatccagatggaagctgtgaaagtgaaaacattaaagtctttgacggaacctccagcaatgggcctctgctagggcaagtctgcagtaaaaacgactatgttcctgtatttgaatcatcatccagtacattgacgtttcaaatagttactgactcagcaagaattcaaagaactgtctttgtcttctactacttcttctctcctaacatctctattccaaactgtggcggttacctggataccttggaaggatccttcaccagccccaattacccaaagccgcatcctgagctggcttattgtgtgtggcacatacaagtggagaaagattacaagataaaactaaacttcaaagagattttcctagaaatagacaaacagtgcaaatttgattttcttgccatctatgatggcccctccaccaactctggcctgattggacaagtctgtggccgtgtgactcccaccttcgaatcgtcatcaaactctctgactgtcgtgttgtctacagattatgccaattcttaccggggattttctgcttcctacacctcaatttatgcagaaaacatcaacactacatctttaacttgctcttctgacaggatgagagttattataagcaaatcctacctagaggcttttaactctaatgggaataacttgcaactaaaagacccaacttgcagaccaaaattatcaaatgttgtggaattttctgtccctcttaatggatgtggtacaatcagaaaggtagaagatcagtcaattacttacaccaatataatcaccttttctgcatcctcaacttctgaagtgatcacccgtcagaaacaactccagattattgtgaagtgtgaaatgggacataattctacagtggagataatatacataacagaagatgatgtaatacaaagtcaaaatgcactgggcaaatataacaccagcatggctctttttgaatccaattcatttgaaaagactatacttgaatcaccatattatgtggatttgaaccaaactctttttgttcaagttagtctgcacacctcagatccaaatttggtggtgtttcttgatacctgtagagcctctcccacctctgactttgcatctccaacctacgacctaatcaagagtggatgtagtcgagatgaaacttgtaaggtgtatcccttatttggacactatgggagattccagtttaatgcctttaaattcttgagaagtatgagctctgtgtatctgcagtgtaaagttttgatatgtgatagcagtgaccaccagtctcgctgcaatcaaggttgtgtctccagaagcaaacgagacatttcttcatataaatggaaaacagattccatcataggacccattcgtctgaaaagggatcgaagtgcaagtggcaattcaggatttcagcatgaaacacatgcggaagaaactccaaaccagcctttcaacagtgtgcatctgttttccttcatggttctagctctgaatgtggtgactgtagcgacaatcacagtgaggcattttgtaaatcaacgggcagactacaaataccagaagctgcagaactattaactaacaggtccaaccctaagtgagacatgtttctccaggatgccaaaggaaatgctacctcgtggctacacatattatgaataaatgaggaagggcctgaaagtgacacacaggcctgca

SEQ ID NO: 6277 - DNA, 1381 bp, Homo sapiens
atgaacaaacccataacaccatcaacatatgtgcgctgcctcaatgttggactaattaggaagctgtcagattttattgatcctcaagaaggatggaagaagttagctgtagctattaaaaaaccatctggtgatgatagatacaatcagtttcacataaggagatttgaagcattacttcaaactggaaaaagtcccacttctgaattactgtttgactggggcaccacaaattgcacagttggtgatcttgtggatcttttgatccaaaatgaattttttgctcctgcgagtcttttgctcccagatgctgttcccaaaactgctaatacactaccttctaaagaagctataacagttcagcaaaaacagatgcctttctgtgacaaagacaggacattgatgacacctgtgcagaatcttgaacaaagctatatgccacctgactcctcaagtccagaaaataaaagtttagaagttagtgatacacgttttcacagtttttcattttatgaattgaagaatgtcacaaataactttgatgaacgacccatttctgttggtggtaataaaatgggagagggaggatttggagttgtatataaaggctacgtaaataacaactgtggcagtgaagaagcttgcagcaatggttgacattactactgaagaactgaaacagcagtttgatcaagaaataaaagtaatggcaaagtgtcaacatgaaaacttagtagaactacttggtttctcaagtgatggagatgacctctgcttagtatatgtttacatgcctaatggttcattgctagacagactctcttgcttggatggtactccaccactttcttggcacatgagatgcaagattgctcagggtgcagctaatggcatcaattttctacatgaaaatcatcatattcatagagatattaaaagtgcaaatatcttactggatgaagcttttactgctaaaatatctgactttggccttgcacgggcttctgagaagtttgcccagacagtcatgactagcagaattgtgggaacaacagcttatatggcaccagaagctttgcgtggagaaataacacccaaatctgatatttacagctttggtgtggttttactagaaataataactggacttccagctgtggatgaacaccgtgaacctcagttattgctagatattaaagaagaaattgaagatgaagaaaagacaattgaagattatattgataaaaagatgaatgatgctgattccacttcagttgaagctatgtactctgttgctagtcaatgtctgcatgaaaagaaaaataagagaccagacattaagaaggttcaacagctgctgcaagagatgacagcttcttaa

SEQ ID NO: 6278 - DNA, 4937 bp, Homo sapiens
agatccggggatggagggagccggagaagaggagtgagaaggccggggaggcaggccctgctgtcttcctgcaggccggcagcctgctggcagtggaggaccaggccgtccaggaaaggaaggggtcaggaggtcgggcagggcctcagcaggttcagacaagtccccagaagggagctgcaggcgccctcgagtccaggccccaagcctggctccggttgtccaaagagggcctaggccaggcctctggtgcggaaactgagtcacagccagacctcagggcacggcctagacgcttacgagccaaagttaggggtagagagcagagacctccggggggtctcagggagtagggggcttcagggcctcccagtctagagccggattggcgagttagacgcttgtagatccaaggttggattggggtggggtctctgggacgttggatcgctacgcaaggattggggggattcaagtgcttagagatcgaagtctgccctgggtagggggagtcagacaattggaaagcctaggtagttatttggggaggggtctctacgccttggcgaagcgcacagctgcatctttttggcttgaggcctgaggccttgtcgagaagcttccgtgaaagggtgggccagccgggccacgagaaagaaagtgaataaatcaggaatataagtgggcggggggcccctgagaggggggtcgcaaagggtgagacatggccaccaggcgtttaaccgacgctttcttgttgttgcggaataattccatccaaaaccggcagctgttagccgagcaagtgagtagtcacatcacctccagccctctgcattcacgtagcattgctgcggagctggacgagcttgctgatgaccgtatggcactggtgtcaggcatcagcttagatccagaagcagcgattggtgtgacaaaacggccacctcctaagtgggtggatggagtggatgaaattcagtatgatgttggccggattaagcagaagatgaaagaattggccagccttcatgacaagcatttaaacagacccaccctggatgacagcagcgaagaggaacatgccattgagataactacccaagagatcactcagctcttccacaggtgccagcgtgccgtgcaggccctgccgagccgggcccgggcctgctccgagcaggaggggcggctgcttgggaacgtggtggcctcgctggcgcaggccctgcaggaactctccaccagcttccggcacgcacagtcaggctacctcaaacgcatgaagaatcgagaggaaagatcccagcattttttcgacacatcagtaccactaatggatgatggagacgataacactctttaccatcggggttttacagaggaccagttagttctggtggagcagaacacactgatggtggaagagcgggaacgagagattcgccagattgtacagtccatttctgacctgaatgaaatattcagggacttaggggcgatgattgtagaacagggtacagtccttgacagaattgactataacgttgaacagtcctgtatcaaaactgaagatggtttgaaacagcttcacaaggcagaacagtatcaaaagaagaatcggaagatgcttgtgattttaatattatttgtcatcatcattgtgctcattgttgtcctcgttggcgtgaagtctcgataagtggcattgggttttcgtgtgtgccgcgcgtgtggatctcccgggtgtgaggggcttggcctgcgccccgccagctgcccgcagaggtgcagcctcgaggaatctgagggcgtcggggcagcgaacctttgcatccacggactcctccttccctagtcctgctcaagcggtccggggaatgggtttttgtttttccttcattgttgagaatttaaggacctttgatactgctgcacaatagagattgagttctgggatcagttataatatatattttttttagaaagagaaaatgagctgagagtttacaggcactgcagaagctgttcagtattatatgtgtatatgctatttttttagcagccatgtctgagcagaatgttaacataatttttggaaaaattttctttaaaccatctggtttttaagaaatttggtaccaaaaattgatgagtagaggcaaaaatgccccttcatctttctctatatattttccagttgaaaacaaactaagaagtcctttaagaatttataatccgttccccattaacttaatttagcttttccatcactgttaatgatcagagtaacaaagtgtgaaaaataagaaaccatcattgatgttaattaacacatttagatgggccagttaaaacagcttcataagttttaaattaattgtaaatggaatattcctcatttaaaatttttgcactgcattttctactgtaaaccaaaagaggttactaagcaaaaccacctaaatttaagttggtgatttaaatgaatctcacattaaaagaaagcttgacagtgttatgaaagccaccagactcagccagtgtgtccccatgggtatccccagccatccttgctcaatccattacttatatactaactacataatgacctgttcaaaccagactctatttaatgaactgtgaatttacacagaggccattttaaatgggtcaccccatttaggattagtggatctcaaattattaaccaaacatcactccatttcaaagtaaaatattccaccagcgatttgatttattggctcttccattgccactgagcaatgcccaggaagcaggcacattgccaaggactgggggcatcttgactaggaagctcctcgtttgtgtgagcgtgggtcagaccgccaaagtaggacttcatcgtttacctacctattatcaatatggtgcttgaatatattcctataactgtagaacagtgtggaaagtgatggtaactttgaagttgttcatgttttattggctttgttttaattgacactagtagagttttaatggtctttgtgtaaattttaatggcttttccattgtttttgcttctcttaaaaagtttaagaagaatatgacctcattaaatgtgctgttttatttggaccagtcacacaaaatgtctctctagagttgactttaaagttgtttacagaaatttaaactcaattccagagattgaagttgtccaaacagctcatgggcttagtgtccaaacccctgcccagccttccctttccaagttggtgccacctccaggtagccattggtggttttcctattactgatgtggctgtggaatgataaggtcctagaggggccctggcatttcaggaagcggacctggtattccctgacaaacattgcttaggaaagagggccggagaataagaagccagcacctcatcagtcagccctgcaatgtgagacttccgtagctgttgagagtcactgcaggtgttctttcatcccatctgattttaacccatggttgagacgttccaagttagatctgctgctcttaggtgtggggctgtccacattagggaacttgcctcaaaaacagtccacagtggcaataccggacttctgttcaagctttttaaagtgctgagccttacaaacccctgaaggaaagtgaccctttaagagaggatcatctttttttatatttattttcaccaaatagggtgatgagggttggtttttgttccctcaacccatttgggtaaaataacggatctgattagaaactgttttaaggaggggctgggctcggtggctcacgcctgtaatcccagactttgagaggccaaggcggtcacgaggtcaggagttcgagaccagcctagccaacatggtgaaaccccgtctctacaaaaaatacaaaaattagccgggtgggacacgcctgtaatcccagctactcaagaggctgaggcaggagaatagcttgaacccgggaggcagaggttgcagtgagccgagatcacaccactgcactccagcctgggtgacagagcgaggctccgtctcaaaaaaaaaaaaaaaaaattgttttagcgctgggtttcccaaggtgggagagacagacccagcctggagctggcccctggcctgtgtgctgacttcttggggtcctcaaaccactgtatttttctgttgagcctgtacttggggagagatcagtagcatttgaggaagtaagagaaaagaatcatggtacctcagggtttctttccctttactcgctggcagccattgtctgtgggcacctcatgtttttccacactctactgggccgtggaggtaacgatcacccaggccagtctcctctgcctgggatgcgccctctgagaggaggcctagcagggcaggctccctctgggcatccctggatgcagcctctggacacatgcctcctttaaagtgtccgggtgcagctcaggttgagtggaggtagaaggagaaacagacatgtttaccacgcgttttccaaagctcctgatctttcccaagattgtaactgaaaactgctgtctcttgttttgttcgttttgggggtggtggtgctggctgggccatgcttgtgaagtgatgtgtgtctctgatttaacggattcactgttttctctgctaattgagagagcgttatttacattatttatttgttttgacacaagtgctttcagtgttttatcctagctaatggcttcttaaaggtaataaaacccttccaacgtaattggtcagataaaactttttttcttgtatgcttaaataaagcaattagtgaagcacttctatccaaaatgacttttttgtccttttttaaaaccaatttactgttactggaaactttttgtacaataaagcaatcacgcagattaaagaacatcctgcaatcctagtattaattttaa

SEQ ID NO: 6279 - DNA, 2948 bp, Homo sapiens
aatacaaagcatgcttgtgagacagaattcctccttagacatgccggtcaacttacagaagagaaccgcaatgagataaaaaatggcactatccttcgattaaccacatctccagctcagaacgcccagcagctccatgaacgaatccagtcctcgagtatggatgccaagctggaagccctgaaggacttggccagcctctcccgggatgtcacgtttgcccaggagtttataaacctggacggtatctctctcctcacgcagatggtggagagcggcactgagcgataccagaaattgcagaagatcatgaagccttgctttggagacatgctgtccttcaccctgacggccttcgttgagctgatggaccatggcatagtgtcctgggatacattttcggtggcgttcattaagaagatagcaagttttgtgaacaagtcagccatagacatctcgatcctgcagcggtccttggccattttggagtcgatggtgctcaatagccatgacctctaccagaaagtggcgcaggagatcaccatcggccagctcattccacacctgcaagggtcagatcaagaaatccaaacctatactattgcagtgattaatgcgcttttcctgaaggctcctgatgagaggaggcaggagatggcgaatattttggctcagaagcaactgcgttccatcattttaacacatgtcatccgagcccagcgggccatcaacaatgagatggcgcaccagctgtatgttctacaagtgctcacctttaacctcctggaagacaggatgatgaccaaaatggacccccaggaccaggctcagagggacatcatatttgaacttcgaagaattgcttttgatgctgagtctgaacctaacaacagcagtggcagcatggagaaacgcaagtccatgtacacgcgagattataagaagcttgggttcattaatcatgtcaaccctgccatggacttcacgcagactccacctgggatgttggctctggacaacatgctgtactttgccaagcaccaccaagatgcctacatccggattgtgcttgagaacagtagtcgagaagacaagcatgaatgtccctttggccgcagtagtatagagctgaccaagatgctatgtgagatcttgaaagtgggcgagttgcctagtgagacctgcaacgacttccacccgatgttcttcacccacgacagatcctttgaggagtttttctgcatctgtatccagctcctgaacaagacatggaaggaaatgagggcaacttctgaagacttcaacaaggtaatgcaggtggtgaaggagcaggttatgagagcacttacaaccaagcctagctccctggaccagttcaagagcaaactgcagaacctgagctacactgagatcctgaaaatccgccagtccgagaggatgaaccaggaagatttccagtcccgcccgattttggaactaaaggagaagattcagccagaaatcttagagctgatcaaacagcaacgcctgaaccgccttgtggaagggacctgctttaggaaactcaatgcccggcggaggcaagacaagttttggtattgtcggctttcgccaaatcacaaagtcctgcattacggagacttagaagagagtcctcagggagaagtgccccacgattccttgcaggacaaactgccggtggcagatatcaaagccgtggtgacgggaaaggactgccctcatatgaaagagaaaggtgcccttaaacaaaacaaggaggtgcttgaactcgctttctccatcttgtatgactcaaactgccaactgaacttcatcgctcctgacaagcatgagtactgtatctggacggatggactgaatgcgctactcgggaaggacatgatgagcgacctgacgcggaatgacctggacaccctgctcagcatggaaatcaagctccgcctcctggacctggaaaacatccagatccctgacgcacctccgccgattcccaaggagcccagcaactatgacttcgtctatgactgtaactgaagtggccgggcccagacatgcccttccttcccttgggcaggaaagccagcagccccagactgcccaaaaacttgcccaccagaccaagggcagtgccccaaggcccctgtctggaggaaatggcctagctatttgatgagaagaccaaaccccacatcctcctttcccctctctctagaatcatctcgcaccaccagttacacttgaattaagatctgcgctcaaatctcctcccacctctctccctgcttttgccttgctctgttcctctttggtcccaagagcagcagccgcagcctcctcgtgatcctccctagcataaatttcccaaacagtccacaggtcccatgcccactttgcgtctgcactgtgatcgtgacaaatcttccctcctcaccagctagtctggggtttcctctccctgccccaggccagaactgccttcttcatttccacccacgctcccagcctcttagctgaaagcacaaatggtgaaatcagtagtctcgctccatctctaatagactaaacctaaatgcctctaggacggactgttgctatccaagcgtttggtgttaccttctcctgggaggtcctgctgcaactcaagttccacaggatggtcaagctgtcagacatccaagtttacatcattgtaattattactggtatttacaatttgcaagagttttgggttagtttttttttttttttttgctttgtttttgtacaaaagagtctaacattttttgccaaacagatatatatttaatgaaaagaagagatacataaatgtgtgaatttccagtttttttttaattattttaatcccaaacatcttcctgaaaataacattcccttaaacatgctgtggaataaaatggattgtgatg

SEQ ID NO: 6280 - DNA, 9790 bp, Homo sapiens
gcggcggcggctgcggcggtggggccgggcgaggtccgctgcggtcccggcggctccgtggctgctccgctctgagcgcctggcgcgccccgcgccctccctgccggggccgctgggccggggatgcacgcggggcccgggagccatggtccgcttcggggacgagctgggcggccgctatgggggccccggcggcggagagcgggcccggggcggcggggccggcggggcggggggcccgggtcccggggggctgcagcccggccagcgggtcctctacaagcaatcgatcgcgcagcgcgcgcggaccatggcgctgtacaaccccatcccggtcaagcagaactgcttcaccgtcaaccgctcgctcttcgtcttcagcgaggacaacgtcgtccgcaaatacgcgaagcgcatcaccgagtggcctccattcgagtatatgatcctggccaccatcatcgccaactgcatcgtgctggccctggagcagcacctccctgatggggacaaaacgcccatgtccgagcggctggacgacacggagccctatttcatcgggatcttttgcttcgaggcagggatcaaaatcatcgctctgggctttgtcttccacaagggctcttacctgcggaacggctggaacgtcatggacttcgtggtcgtcctcacagggatccttgccacggctggaactgacttcgacctgcgaacactgagggctgtgcgtgtgctgaggcccctgaagctggtgtctgggattccaagtttgcaggtggtgctcaagtccatcatgaaggccatggttccactcctgcagattgggctgcttctcttctttgccatcctcatgtttgccatcattggcctggagttctacatgggcaagttccacaaggcctgtttccccaacagcacagatgcggagcccgtgggtgacttcccctgtggcaaggaggccccagcccggctgtgcgagggcgacactgagtgccgggagtactggccaggacccaactttggcatcaccaactttgacaatatcctgtttgccatcttgacggtgttccagtgcatcaccatggagggctggactgacatcctctataatacaaacgatgcggccggcaacacctggaactggctctacttcatccctctcatcatcatcggctccttcttcatgctcaacctggtgctgggcgtgctctcgggggagtttgccaaggagcgagagagggtggagaaccgccgcgccttcctgaagctgcgccggcagcagcagatcgagcgagagctcaacgggtacctggagtggatcttcaaggcggaggaagtcatgctggccgaggaggacaggaatgcagaggagaagtcccctttggacgtgctgaagagagcggccaccaagaagagcagaaatgacctgatccacgcagaggagggagaggaccggtttgcagatctctgtgctgttggatcccccttcgcccgcgccagcctcaagagcgggaagacagagagctcgtcatacttccggaggaaggagaagatgttccggttttttatccggcgcatggtgaaggctcagagcttctactgggtggtgctgtgcgtggtggccctgaacacactgtgtgtggccatggtgcattacaaccagccgcggcggcttaccacgaccctgtattttgcagagtttgttttcctgggtctcttcctcacagagatgtccctgaagatgtatggcctggggcccagaagctacttccggtcctccttcaactgcttcgactttggggtcatcgtggggagcgtctttgaagtggtctgggcggccatcaagccgggaagctcctttgggatcagtgtgctgcgggccctccgcctgctgaggatcttcaaagtcacgaagtactggagctccctgcggaacctggtggtgtccctgctgaactccatgaagtccatcatcagcctgctcttcttgctcttcctgttcattgtggtcttcgccctgctggggatgcagctgtttgggggacagttcaacttccaggatgagactcccacaaccaacttcgacaccttccctgccgccatcctcactgtcttccagatcctgacgggagaggactggaatgcagtgatgtatcacgggatcgaatcgcaaggcggcgtcagcaaaggcatgttctcgtccttttacttcattgtcctgacactgttcggaaactacactctgctgaatgtctttctggccatcgctgtggacaacctggccaacgcccaagagctgaccaaggatgaagaggagatggaagaagcagccaatcagaagcttgctctgcaaaaggccaaagaagtggctgaagtcagccccatgtctgccgcgaacatctccatcgccgccaggcagcagaactcggccaaggcgcgctcggtgtgggagcagcgggccagccagctacggctgcagaacctgcgggccagctgcgaggcgctgtacagcgagatggaccccgaggagcggctgcgcttcgccactacgcgccacctgcggcccgacatgaagacgcacctggaccggccgctggtggtggagctgggccgcgacggcgcgcgggggcccgtgggaggcaaagcccgacctgaggctgcggaggcccccgagggcgtcgaccctccgcgcaggcaccaccggcaccgcgacaaggacaagacccccgcggcgggggaccaggaccgagcagaggccccgaaggcggagagcggggagcccggtgcccgggaggagcggccgcggccgcaccgcagccacagcaaggaggccgcggggcccccggaggcgcggagcgagcgcggccgaggcccaggccccgagggcggccggcggcaccaccggcgcggctccccggaggaggcggccgagcgggagccccgacgccaccgcgcgcaccggcaccaggatccgagcaaggagtgcgccggcgccaagggcgagcggcgcgcgcggcaccgcggcggcccccgagcggggccccgggaggcggagagcggggaggagccggcgcggcggcaccgggcccggcacaaggcgcagcctgctcacgaggctgtggagaaggagaccacggagaaggaggccacggagaaggaggctgagatagtggaagccgacaaggaaaaggagctccggaaccaccagccccgggagccacactgtgacctggagaccagtgggactgtgactgtgggtcccatgcacacactgcccagcacctgtctccagaaggtggaggaacagccagaggatgcagacaatcagcggaacgtcactcgcatgggcagtcagcccccagacccgaacactattgtacatatcccagtgatgctgacgggccctcttggggaagccacggtcgttcccagtggtaacgtggacctggaaagccaagcagaggggaagaaggaggtggaagcggatgacgtgatgaggagcggcccccggcctatcgtcccatacagctccatgttctgtttaagccccaccaacctgctccgccgcttctgccactacatcgtgaccatgaggtacttcgaggtggtcattctcgtggtcatcgccttgagcagcatcgccctggctgctgaggacccagtgcgcacagactcgcccaggaacaacgctctgaaatacctggattacattttcactggtgtctttacctttgagatggtgataaagatgatcgacttgggactgctgcttcaccctggagcctatttccgggacttgtggaacattctggacttcattgtggtcagtggcgccctggtggcgtttgctttctcaggatccaaagggaaagacatcaataccatcaagtctctgagagtccttcgtgtcctgcggcccctcaagaccatcaaacggctgcccaagctcaaggctgtgtttgactgtgtggtgaactccctgaagaatgtcctcaacatcttgattgtctacatgctcttcatgttcatatttgccgtcattgcggtgcagctcttcaaagggaagtttttctactgcacagatgaatccaaggagctggagagggactgcaggggtcagtatttggattatgagaaggaggaagtggaagctcagcccaggcagtggaagaaatacgactttcactacgacaatgtgctctgggctctgctgacgctgttcacagtgtccacgggagaaggctggcccatggtgctgaaacactccgtggatgccacctatgaggagcagggtccaagccctgggtaccgcatggagctgtccatcttctacgtggtctactttgtggtctttcccttcttcttcgtcaacatctttgtggctttgatcatcatcaccttccaggagcagggggacaaggtgatgtctgaatgcagcctggagaagaacgagagggcttgcattgacttcgccatcagcgccaaacccctgacacggtacatgccccaaaaccggcagtcgttccagtataagacgtggacatttgtggtctccccgccctttgaatacttcatcatggccatgatagccctcaacactgtggtgctgatgatgaagttctatgatgcaccctatgagtacgagctgatgctgaaatgcctgaacatcgtgttcacatccatgttctccatggaatgcgtgctgaagatcatcgcctttggggtgctgaactatttcagagatgcctggaatgtctttgactttgtcactgtgttgggaagtattactgatattttagtaacagagattgcggaaacgaacaatttcatcaacctcagcttcctccgcctctttcgagctgcgcggctgatcaagctgctccgccagggctacaccatccgcatcctgctgtggacctttgtccagtccttcaaggccctgccctacgtgtgtctgctcattgccatgctgttcttcatctacgccatcatcggcatgcaggtgtttgggaatattgccctggatgatgacaccagcatcaaccgccacaacaacttccggacgtttttgcaagccctgatgctgctgttcaggagcgccacgggggaggcctggcacgagatcatgctgtcctgcctgagcaaccaggcctgtgatgagcaggccaatgccaccgagtgtggaagtgactttgcctacttctacttcgtctccttcatcttcctgtgctcctttctgatgttgaacctctttgtggctgtgatcatggacaattttgagtacctcacgcgggactcttccatcctaggtcctcaccacttggatgagttcatccgggtctgggctgaatacgacccggctgcgtgtgggcgcatcagttacaatgacatgtttgagatgctgaaacacatgtccccgcctctggggctggggaagaaatgccctgctcgagttgcttacaagcgcctggttcgcatgaacatgcccatctccaacgaggacatgactgttcacttcacgtccacgctgatggccctcatccggacggcactggagatcaagctggccccagctgggacaaagcagcatcagtgtgacgcggagttgaggaaggagatttccgttgtgtgggccaatctgccccagaagactttggacttgctggtaccaccccataagcctgatgagatgacagtggggaaggtttatgcagctctgatgatattcgacttctacaagcagaacaaaaccaccagagaccagatgcagcaggctcctggaggcctctcccagatgggtcctgtgtccctgttccaccctctgaaggccaccctggagcagacacagccggctgtgctccgaggagcccgggttttccttcgacagaagagttccacctccctcagcaatggcggggccatacaaaaccaagagagtggcatcaaagagtctgtctcctggggcactcaaaggacccaggatgcaccccatgaggccaggccacccctggagcgtggccactccacagagatccctgtggggcggtcaggagcactggctgtggacgttcagatgcagagcataacccggaggggccctgatggggagccccagcctgggctggagagccagggtcgagcggcctccatgccccgccttgcggccgagactcagcccgtcacagatgccagccccatgaagcgctccatctccacgctggcccagcggccccgtgggactcatctttgcagcaccaccccggaccgcccaccccctagccaggcgtcgtcgcaccaccaccaccaccgctgccaccgccgcagggacaggaagcagaggtccctggagaaggggcccagcctgtctgccgatatggatggcgcaccaagcagtgctgtggggccggggctgcccccgggagaggggcctacaggctgccggcgggaacgagagcgccggcaggagcggggccggtcccaggagcggaggcagccctcatcctcctcctcggagaagcagcgcttctactcctgcgaccgctttgggggccgtgagcccccgaagcccaagccctccctcagcagccacccaacgtcgccaacagctggccaggagccgggaccccacccacagggcagtggttccgtgaatgggagccccttgctgtcaacatctggtgctagcacccccggccgcggtgggcggaggcagctcccccagacgcccctgactccccgccccagcatcacctacaagacggccaactcctcacccatccacttcgccggggctcagaccagcctccctgccttctccccaggccggctcagccgtgggctttccgaacacaacgccctgctgcagagagaccccctcagccagcccctggcccctggctctcgaattggctctgacccttacctggggcagcgtctggacagtgaggcctctgtccacgccctgcctgaggacactctcactttcgaggaggctgtggccaccaactcgggccgctcctccaggacttcctacgtgtcctccctgacctcccagtctcaccctctccgccgcgtgcccaacggttaccactgcaccctgggactcagctcgggtggccgagcacggcacagctaccaccaccctgaccaagaccactggtgctagctgcaccgtgaccgctcagacgcctgcatgcagcaggcgtgtgttccagtggatgagttttatcatccacacggggcagccggccctcgggggaggccttgcccaccttggtgaggctcctgtggcccctccctccccctcctcccctcttttactctagacgacgaataaagccctgttagaggatgcggctctctctgtccccttcctgtcctgccttcctgggtctcgtaccacacaccagaccctaaaccgcaggctgctgtgtgtggctgagaaggacccaggagtccaaatcccgtgtcctgggactcagcatccagcatgggtgcttggagccgttgtgaggagctctgcgtcctgtggggagcacccttcacgtggccgtgcggcacagagaagcagggcccacctgaaagtgcgccgagacctcgggacggaggggatggggagggggacacagtcgtggcttgtgcagcccgccagtgtcagcgaatgctcactcaggcaagctctgtcctccctggacaccgtcagccccacaggaaccgagctgggaagtgttcttgctgtggttgtgatttttaattgcaacacctctcattcttgtcacttctatatacgtgatgtagaaaaaatggaaaaccagaaaaatggggaaggaaatgttcacataactttaaaaaatcaaacctgtgaaagaaagatgtcagctttttgccacgtgtctttgtggcttatgcgaggagactccctgtgcagccctgtccggtccaggtggacgtagacggcccctggctctgctgctcttgaccaagtgcctgaccgccaggccctcacacccaggctcctgggcactgtggtgtgaggcgaggcctcgggatccatcaccgcaggatgctgtgaaaagtactcgcgatggcagccaggtagcaagcccttgccagtggagagcactggatgtcatggtggcaaacaaggcagccatttgctgtcctcctcccacgagtggaaggggtttccaaggaagccacagggcagctgaccacgtgcttgtgtgaggcattttcagtctgttctgcatatgattctcagggcacactctgtggtatgtgaaataggtttccttccacatacagcagaagagaggcaaaggctggtaggaaggaggaagacattggctgggggcttggatgtggggccgtcagggcaggagggaggaagccccagctggaatgaaactcagagcaagtgaccgagggaggacacggctcctgccactgaggccgggcacctgatgcccagcactgtcctggcgccagacacagggagcaggcagtcaagtgaggtctgacccccatggccacgctcaggagagaaagaccatgctcaggacactgtccaaggtgcacaagatgctgggaggtcccttgtttggtgaagaaagggagcatttagagcagttgatggtggtgtgtcctccgtgttctgaaattccagatgatctgtgttggattcttggcttctaccccatgattctcctcaaagaaattgtgtgtgatgtgtgtgtgtgtgtgtgtgtgtgtgtgtctgtgtcacaggagatgcagtgcctgtacaggtgtgttcagtgtgtggatgtcattaacccatagggctatgcaacaaaagacacatttaatagaagtaaaacacacaagaccgctgcctggtctcggggttcagcatgattgtgaccaaacctttttatagaatttccttacctgaaggcacaacactctgaaactttaaagataacagagtattttattccaatagaataaaccaggaatctcggactgtgcatgtgatcactgtgctcctgttgcaaagtagaaggatgtgtattttgacactgacgttttgtctcttgttccccagcccccagcccatgttatcttgggtgtcgaatgtgtccattccatgcagaaccacagccatttccccaggcagtgttgggtcgagaatccacttttctaaacccacacagcctagctggcttgtctagactcttctaggcattggaattgatgaaaactacagggagcggggaaaggagacattatgtcttgttttcctgactttgggttttgtttctcactgtgtcttctccggctatcatatatgtcccctgaatctcatagtgagctgccaaatttgaagtgcatcacccagttgtctgcatctggaaccagtcaagcagtggctgtagtttgaacaagttatgtgtgcatgtaacatatatacatatatacatatatacaagtatgtgcatgataatgtatatcttcgtactttttgatacaatgtattcatttgttaatttttaattatatttgatataaatcaaaggtttgttgcaaaactttatatttaagaagtgttaaaaaaaaaaaaaagtcccaaccatgcaacacaactgggacctacttaaaaagaaattctgtgattgactagtttgctgcctgagtcatatttatcagccaaactttggattctgctgttgtttctacaatgacattttgtatgaagcaaagtccttgaattaaaataaaaacttagcaaaaaatcaaaaacaaaacccca

SEQ ID NO: 6281 - DNA, 1290 bp, Homo sapiens
gccatcacagcacgcctatcggatgtgagaggagaagtcccgctgctcgggcactgtctatatacgcctaacacctacatatattttaaaaacattaaatataattaacaatcaaaagaaagaggagaaaggaagggaagcattactgggttactatgcacttgcgactgatttcttggctttttatcattttgaactttatggaatacatcggcagccaaaacgcctcccggggaaggcgccagcgaagaatgcatcctaacgttagtcaaggctgccaaggaggctgtgcaacatgctcagattacaatggatgtttgtcatgtaagcccagactattttttgctctggaaagaattggcatgaagcagattggagtatgtctctcttcatgtccaagtggatattatggaactcgatatccagatataaataagtgtacaaaatgcaaagctgactgtgatacctgtttcaacaaaaatttctgcacaaaatgtaaaagtggattttacttacaccttggaaagtgccttgacaattgcccagaagggttggaagccaacaaccatactatggagtgtgtcagtattgtgcactgtgaggtcagtgaatggaatccttggagtccatgcacgaagaagggaaaaacatgtggcttcaaaagagggactgaaacacgggtccgagaaataatacagcatccttcagcaaagggtaacctgtgtcccccaacaaatgagacaagaaagtgtacagtgcaaaggaagaagtgtcagaagggagaacgaggaaaaaaaggaagggagaggaaaagaaaaaaacctaataaaggagaaagtaaagaagcaatacctgacagcaaaagtctggaatccagcaaagaaatcccagagcaacgagaaaacaaacagcagcagaagaagcgaaaagtccaagataaacagaaatcggggattgaagtcaccctagctgaaggcctcaccagtgtttcacagaggacacagcccaccccttgcaggaggaggtatctctgagtgtgcagcacagaatcgcatgacccaccttaaccttcctgttgtcatggaaggatgcacggctgctctgtccactgtgattcctagccctctcaagatcactgctttctgaagaatttgcaatgactctggcttctggctgcttatctctggacacccgttctccaccagttgtacagttcatgtaatctacttggcttaattgattttccacttctctcttcctcttctaagatataaacattttaaatgattt

SEQ ID NO: 6282 - DNA, 2226 bp, Homo sapiens
atttcctcccagcctcgtgcgggaaatggctttaattctgacggcagggctgtgagggactagcgggaacccgagccttttgtcaaggaactgcggcgtcggtggccagtcatccccgccgccgcggagccgctgcactgctgggggatctcccagcagctctgacgagcgcgggctgcagcatgggcagaaaacgctgccctgcagattagctgggtggattttttaagcgcaccccaccccccaaacccataaaataacaaaaccaacccgcagtggccgaccggagatagctaagatgccgcgcaggagtttccacctggatgtttgaggttgtgtagatgtggccggcacccttgagagtggagctagggggtgcagactgagcagtgaacagaaggagccttggacagggctgggccagcctcccgagttccaggagcgaattgcaaacccaccgggaaaatgagcgaagagacggtccccgaggctgcctcgccgccgcccccgcaggggcagccttactttgaccgcttctcagaggacgaccccgagtacatgcgccttcgcaaccgggcggcggacctgcggcaggacttcaacctgatggagcagaagaagcgcgtcaccatgatcctgcagagtccctctttcagggaggagctggaaggcctcatccaggagcagatgaagaaggggaacaactcctccaacatctgggccctgcgacagatcgcggacttcatggccagcacctcccacgcagtcttcccgacatcttccatgaatgtctccatgatgacgcctatcaatgacctccacacagctgactccctgaacctggccaaaggggagcggctcatgcggtgcaagatcagcagtgtctaccgactcctggacctctatggctgggcccagctgagtgacacctatgtcacgttgagagtcagcaaggagcaggaccacttcctgatcagccctaagggagtttcttgcagtgaagtcacagcgtccagcctgatcaaggtgaacattctgggagaggtggtggagaagggcagcagctgcttcccagtggacaccacaggcttctgtctgcactcggccatctatgcagcgaggcccgacgtgcgctgcatcatccacctgcacacaccggccacagcagcggtgtcggccatgaagtggggcctcctgcctgtctcccacaatgccctgctggtgggggacatggcctattatgacttcaatggggaaatggagcaggaagccgatcggatcaacctgcagaagtgccttggacccacctgcaagatcctggtgctaagaaaccatggagtggttgctctgggtgacacggtagaggaggcattttacaagatcttccacctgcaggctgcatgtgagatacaggtgtcggctctgtccagtgccgggggagtggagaacctcatcctcctggagcaggagaagcaccggccccatgaggtgggctccgtgcagtgggccgggagcacctttgggcctatgcagaagagtcggctgggggagcatgagtttgaggccctcatgaggatgctggacaacctgggctacagaacaggttacacgtatcgccacccctttgttcaagagaaaaccaaacacaaaagtgaggtggagattccagccacggtcacagccttcgtgtttgaggaggacggtgccccggtgcccgccctgcgacagcatgcccagaagcagcagaaggagaagacccgctggctcaatacgcccaacacctacctgcgggtcaatgtggccgatgaggtccagaggagcatgggcagcccccgacccaagaccacgtggatgaaggctgacgaggtggagaaatccagcagtggcatgccgattcgcatcgaaaacccaaaccaatttgtgcctctctatactgacccccaggaagtactggagatgaggaacaagattcgagaacaaaaccgacaagatgtgaagtcagcggggcctcagtcccagctcctggcgagcgtcattgccgagaagagccgaagcccgtctacagagagccagctgatgtccaagggagacgaggataccaaagacgattcagaggagacggtgcccaaccccttcagccaactcactgaccaggagttggaggagtacaagaaagaggtggagaggaagaaactagaacttgatgctcctggctggttctcttca

SEQ ID NO: 6283 - DNA, 1705 bp, Homo sapiens
ggggaccctgcggggaagtgattaaaagcagagcggagccgcagggggccgctgcagggagggtcttcttggggccgtcgtgccccgccccagtgcggccggggcgcgggttcgagctgctgctcggcaagcctgggtgtctagggcatgagcggagtgtggggggccggcgggcctcggtgccaggaggcgctcgcggtcctcgcctcgctgtgccgggcccggccgccccctctcgggctggacgtggagacttgtcggagcttcgagctgcagcccccagagcggagtcccagcgcggcaggcgcaggcacctctgtcagcctcctcgcagttgtagttattgtgtgtggcgtggccctggtggcagtttttctctttctcttttggaagctgtgctggatgccctggaggaacaaggaggcctccagtccctcttctgctaatccccccttggaagccctccagagccccagcttcagaggcaacatggcggacaagctgaaggaccccagcaccctgggcttcctggaggcggccgtgaagatcagccacacgtccccagatatcccagctgaggtgcagatgtcggtcaaggagcacatcatgcgtcacacccggctgcagcggcaaactacagagccagcgtcatccaccaggcacacgtccttcaagcgccacctgccaaggcagatgcatgtctccagtgtagactatggcaatgagcttccaccagcagcagagcagcccaccagcattggccgcatcaagcctgagctctacaagcagaagtcggtggatggggaggatgccaagtctgaggccaccaagagctgcgggaagatcaacttcagcctacgctacgattacgagaccgagaccctgattgtgcgtatcctgaaggcttttgacctccctgccaaggacttttgtggaagctctgacccttatgtcaagatctacctcctgcctgaccgcaaatgcaagctgcagacccgggtgcaccgcaagaccctgaaccccacctttgatgagaacttccacttccctgtgccctatgaggagctggctgaccgcaagctgcatctcagtgtcttcgactttgaccgcttctcccgccatgacatgattggcgaggtcatcctggacaacctctttgaggcctctgacctgtctcgggaaacctccatctggaaggatatccaatatgccacaagtgaaagcgtggacttgggagagatcatgttctccctttgctacctgcccactgcaggcaggctcaccctcacagtgattaagtgtcggaacctcaaggcgatggacatcacaggctattcagatccctatgtgaaagtgtccttgctctgtgatgggcggaggctgaagaagaagaaaacaaccataaagaaaaacactctcaatcctgtctacaatgaggccatcatctttgacattcccccggaaaacatggatcaagtcagcctgctcatctcagtcatggactatgatcgagtgggccacaatgagatcataggagtctgtcgtgtggggatcactgctgaaggcctgggcagggaccactggaacgagatgctggcatacccccggaagcccatcgcacactggcactccttggtggaggtaaagaaatccttcaaagagggaaaccctcggttgtgatttcattcacgtggatgctgcaagc

SEQ ID NO: 6284 - DNA, 3932 bp, Homo sapiens
gcgccctgcacggccgccagccggcctcccgccagccagccccgacccgcggctccgccgcccagccgcgccccagccagccctgcggcaggaaagcatgaagggagacaccaggcatctcaatggagaggaggacgccggcgggagggaagactcgatcctcgtcaacggggcctgcagcgaccagtcctccgactcgcccccaatcctggaggctatccgcaccccggagatcagaggccgaagatcaagctcgcgactctccaagagggaggtgtccagtctgctaagctacacacaggacttgacaggcgatggcgacggggaagatggggatggctctgacaccccagtcatgccaaagctcttccgggaaaccaggactcgttcagaaagcccagctgtccgaactcgaaataacaacagtgtctccagccgggagaggcacaggccttccccacgttccacccgaggccggcagggccgcaaccatgtggacgagtcccccgtggagttcccggctaccaggtccctgagacggcgggcaacagcatcggcaggaacgccatggccgtcccctcccagctcttaccttaccatcgacctcacagacgacacagaggacacacatgggacgccccagagcagcagtaccccctacgcccgcctagcccaggacagccagcaggggggcatggagtccccgcaggtggaggcagacagtggagatggagacagttcagagtatcaggatgggaaggagtttggaataggggacctcgtgtggggaaagatcaagggcttctcctggtggcccgccatggtggtgtcttggaaggccacctccaagcgacaggctatgtctggcatgcggtgggtccagtggtttggcgatggcaagttctccgaggtctctgcagacaaactggtggcactggggctgttcagccagcactttaatttggccaccttcaataagctcgtctcctatcgaaaagccatgtaccatgctctggagaaagctagggtgcgagctggcaagaccttccccagcagccctggagactcattggaggaccagctgaagcccatgttggagtgggcccacgggggcttcaagcccactgggatcgagggcctcaaacccaacaacacgcaaccagagaacaagactcgaagacgcacagctgacgactcagccacctctgactactgccccgcacccaagcgcctcaagacaaattgctataacaacggcaaagaccgaggggatgaagatcagagccgagaacaaatggcttcagatgttgccaacaacaagagcagcctggaagatggctgtttgtcttgtggcaggaaaaaccccgtgtccttccaccctctctttgagggggggctctgtcagacatgccgggatcgcttccttgagctgttttacatgtatgatgacgatggctatcagtcttactgcactgtgtgctgcgagggccgagagctgctgctttgcagcaacacgagctgctgccggtgtttctgtgtggagtgcctggaggtgctggtgggcacaggcacagcggccgaggccaagcttcaggagccctggagctgttacatgtgtctcccgcagcgctgtcatggcgtcctgcggcgccggaaggactggaacgtgcgcctgcaggccttcttcaccagtgacacggggcttgaatatgaagcccccaagctgtaccctgccattcccgcagcccgaaggcggcccattcgagtcctgtcattgtttgatggcatcgcgacaggctacctagtcctcaaagagttgggcataaaggtaggaaagtacgtcgcttctgaagtgtgtgaggagtccattgctgttggaaccgtgaagcacgaggggaatatcaaatacgtgaacgacgtgaggaacatcacaaagaaaaatattgaagaatggggcccatttgacttggtgattggcggaagcccatgcaacgatctctcaaatgtgaatccagccaggaaaggcctgtatgagggtacaggccggctcttcttcgaattttaccacctgctgaattactcacgccccaaggagggtgatgaccggccgttcttctggatgtttgagaatgttgtagccatgaaggttggcgacaagagggacatctcacggttcctggagtgtaatccagtgatgattgatgccatcaaagtttctgctgctcacagggcccgatacttctggggcaacctacccgggatgaacaggcccgtgatagcatcaaagaatgataaactcgagctgcaggactgcttggaatacaataggatagccaaggatctttggctttcctgtgcactacacagacgtgtccaacatgggccgtggtgcccgccagaagctgctgggaaggtcctggagcgtgcctgtcatccgacacctcttcgcccctctgaaggactactttgcatgtgaatagttccagccaggccccaagcccactggggtgtgtggcagagccaggacccaggaggtgtgattcctgaaggcatccccaggccctgctcttcctcagctgtgtgggtcataccgtgtacctcagttccctcttgctcagtgggggcagagccacctgactcttgcaggggtagcctgaggtgccgcctccttgtgcacaaatcagacctggctgcttggagcagcctaacacggtgctcattttttcttctcctaaaactttaaaacttgaagtaggtagcaacgtggctttttttttttcccttcctgggtctaccactcagagaaacaatggctaagataccaaaaccacagtgccgacagctctccaatactcaggttaatgctgaaaaatcatccaagacagttattgcaagagtttaatttttgaaaactggctactgctctgtgtttacagacgtgtgcagttgtaggcatgtagctacaggacatttttaagggcccaggatcgttttttcccagggcaagcagaagagaaaatgttgtatatgtcttttacccggcacattccccttgcctaaatacaagggctggagtctgcacgggacctattagagtattttccacaatgatgatgatttcagcagggatgacgtcatcatcacattcagggctattttttcccccacaaacccaagggcaggggccactcttagctaaatccctccccgtgactgcaatagaaccctctggggagctcaggaaggggtgtgctgagttctataatataagctgccatatattttgtagacaagtatggctcctccatatctccctcttccctaggagaggagtgtgaagcaaggagcttagataagacaccccctcaaacccattccctctccaggagacctaccctccacaggcacaggtccccagatgagaagtctgctaccctcatttctcatctttttactaaactcagaggcagtgacagcagtcagggacagacatacatttctcataccttccccacatctgagagatgacagggaaaactgcaaagctcggtgctccctttggagattttttaatccttttttattccataagaagtcgtttttagggagaacgggaattcagacaagctgcatttcagaaatgctgtcataatggtttttaacaccttttactcttcttactggtgctattttgtagaataaggaacaacgttgacaagttttgtggggctttttatacactttttaaaatctcaaacttctatttttatgtttaacgttttcattaaaattttttttgtaactggagccacgacgtaacaaatatggggaaaaaactgtgccttgtttcaacagtttttgctaatttttaggctgaaagatgacggatgcctagagtttaccttatgtttaattaaaatcagtatttgtct

SEQ ID NO: 6285 - DNA, 1203 bp, Homo sapiens
tttaacaagggcccaaccccagggccaagtcaagaaggagctcagccactatctccccaccgagccagctcagcgggcagggctgggagggagtgggacagattctgggagtgcagcggggaggagtcccggctgggctgagcgcagggagctgcttggcagtgccagagcccaggccccagagccctgctggagaggaggcagactgaggcagcaggccccgccagcaggcgaagcagggagatgtcagactgctacacggagctggagaaggcagtcattgtcctggtggaaaacttctacaaatatgtgtctaagtacagcctggtcaagaacaagatcagcaagagcagcttccgcgagatgctccagaaagagctgaaccacatgctgtcggacacagggaaccggaaggctgcggataagctcatccagaacctggatgccaatcatgatgggcgcatcagcttcgatgagtactggaccttgataggcggcatcaccggccccatcgccaaactcatccatgagcaggagcagcagagcagcagctagagacccctttggccacaccttccaggcactggcctgatgccccgccctggtgctctccccaggctccctcctcagcctcctgcccacccagggccctttactctcttctccctccagaccttcctctgacccttgctgaactggggtccctttgtgagtgtctcagtctagaggtacctccctccctggggggtctcagctcctggagtcgcaggcccttggggcccctctgtgagatctcaatgctgtctggggaccctaagagttttctcacctgttcagtctcatctaaccttccaatgtctgatgttcctgccaaattcctgcctgattctgggtccgtcctgacctccaaaggtcagcttggtgcttgaggtctccctgctcttggtggcagtggtagcagcaacagcagcagcagcagcagcagcagcagcagagacctctccactttcccttagcccctctgctgggtagagaggcactttcagggacttccctccagctgcctcttcatctgggaatgagctaagcaaggctgagcctcctcctgttgcttgaaataatgatgatataaaggctggatttggagtttgtatcccctggtccctctgggatgctcattaaaaccttcccactccttggaaa

SEQ ID NO: 6286 - DNA, 4238 bp, Homo sapiens
gacgcagcaggaggaaactgctcgggctgcaagcagtcttccaggctttgcggctgccaaaggaataattgagacgtctgagttgagcaggtggaatgtcagaagactgagaacattgttccttcttcatactgctgctctgttgccagagaatcccaatttacactcaaagcttctttgattaagtgctaggagataaatttgcattttctcaaggaaaaggctaaaagtggtagcaggtggcatttaccgtcatggagagcagggatcataacaacccccaggagggacccacgtcctccagcggtagaagggctgcagtggaagacaatcacttgctgattaaagctgttcaaaacgaagatgttgacctggtccagcaattgctggaaggtggagccaatgttaatttccaggaagaggaagggggctggacacctctgcataacgcagtacaaatgagcagggaggacattgtggaacttctgcttcgtcatggtgctgaccctgttctgaggaagaagaatggggccacgccttttatcctcgcagcgattgcggggagcgtgaagctgctgaaacttttcctttctaaaggagcagatgtcaatgagtgtgatttttatggcttcacagccttcatggaagccgctgtgtatggtaaggtcaaagccctaaaattcctttataagagaggagcaaatgtgaatttgaggcgaaagacaaaggaggatcaagagcggctgaggaaaggaggggccacagctctcatggacgctgctgaaaaaggacacgtagaggtcttgaagattctccttgatgagatgggggcagatgtaaacgcctgtgacaatatgggcagaaatgccttgatccatgctctcctgagctctgacgatagtgatgtggaggctattacgcatctgctgctggaccatggggctgatgtcaatgtgaggggagaaagagggaagactcccctgatcctggcagtggagaagaagcacttgggtttggtgcagaggcttctggagcaagagcacatagagattaatgacacagacagtgatggcaaaacagcactgctgcttgctgttgaactcaaactgaagaaaatcgccgagttgctgtgcaaacgtggagccagtacagattgtggggatcttgttatgacagcgaggcggaattatgaccattcccttgtgaaggttcttctctctcatggagccaaagaagattttcaccctcctgctgaagactggaagcctcagagctcacactggggggcagccctgaaggatctccacagaatataccgccctatgattggcaaactcaagttctttattgatgaaaaatacaaaattgctgatacttcagaaggaggcatctacctggggttctatgagaagcaagaagtagctgtgaagacgttctgtgagggcagcccacgtgcacagcgggaagtctcttgtctgcaaagcagccgagagaacagtcacttggtgacattctatgggagtgagagccacaggggccacttgtttgtgtgtgtcaccctctgtgagcagactctggaagcgtgtttggatgtgcacagaggggaagatgtggaaaatgaggaagatgaatttgcccgaaatgtcctgtcatctatatttaaggctgttcaagaactacacttgtcctgtggatacacccaccaggatctgcaaccacaaaacatcttaatagattctaagaaagctgctcacctggcagattttgataagagcatcaagtgggctggagatccacaggaagtcaagagagatctagaggaccttggacggctggtcctctatgtggtaaagaagggaagcatctcatttgaggatctgaaagctcaaagtaatgaagaggtggttcaactttctccagatgaggaaactaaggacctcattcatcgtctcttccatcctggggaacatgtgagggactgtctgagtgacctgctgggtcatcccttcttttggacttgggagagccgctataggacgcttcggaatgtgggaaatgaatccgacatcaaaacacgaaaatctgaaagtgagatcctcagactactgcaacctgggccttctgaacattccaaaagttttgacaagtggacgactaagattaatgaatgtgttatgaaaaaaatgaataagttttatgaaaaaagaggcaatttctaccagaacactgtgggtgatctgctaaagttcatccggaatttgggagaacacattgatgaagaaaagcataaaaagatgaaattaaaaattggagacccttccctgtattttcagaagacatttccagatctggtgatctatgtctacacaaaactacagaacacagaatatagaaagcatttcccccaaacccacagtccaaacaagcctcagtgtgatggagctggtggggccagtgggttggccagccctgggtgctgatggactgatttgctggagttcagggaactacttattagctgtagagtccttggcaaatcacaacattctgggccttttaactcaccaggttgcttgtgagggatgagttgcatagctgatatgtcagtccctggcatcgtgtattccatatgtctataacaaaagcaatatatacccagactacactagtccataagctttacccactaactgggaggacattctgctaagattccttttgtcaattgcaccaaaagaatgagtgccttgacccctaatgctgcatatgttacaattctctcacttaattttcccaatgatcttgcaaaacagggattatcatccccatttaagaactgaggaacctgagactcagagagtgtgagctactggcccaagattattcaatttatacctagcactttataaatttatgtggtgttattggtacctctcatttgggcaccttaaaacttaactatccttccagggctcttccagatgaggcccaaaacatatataggggttccaggaatctcattcattcattcagtatttattgagcatctagtataagtctgggcactggatgcatgaattccactccttccagaaccaactgcattggttttccatgaccttaaggcagtagttctcaactggggggcaattttgcactgaagagagcatttggcagagtctgaagaagtttttggtgtcacagctttgtggggagcatgctatggcatttagtgggtaaagaccagggatgctgccaaacctgccttgcacaggacagcccctgcaacaaagaattatccagacaaaaatatcaatggtgctgaggttgagaaaacctgacttaaggggctgggatgcttttgaactagcttaaggcccaggactgtggagtgtgtggaccaccccacagaggagggactcagatttatttactcttgctggatctgtagtgatggagttccttctggtgtcagccccacaggaggctcccaggcctccctcacttcccatacccagtctaggagctccttctggctcccaagcacccagagctttcctccgccttttagttttggttcctccactggaatgtaggctcctcacgggcgatggctgtcttttcttgactttgtatcttcactgccaagcaaaaagtctgccaagtgggaatgtttaataaatattcattgaataatgaatgaaccatcttcgtacatgaataataatactgtcttacgtttttctggtgctttataatgtatacattacatctgagtattttattttatttaattttcaaaacaatcctttaaggtcaacattgttatccctattttgctgatgaggaaactaaggttagaaacattttgatttcctctaggacgtatagctaggaagtgttactatcttgatttgaacaaattttctggtgctaagtctgatgttctttccatgaatcattgtggtggttgagatggagctttgtaatgggaataaaacagtaccttaggttctttctgaaaaggaggtatctagcaatggataaatagataccactgaatgaaattaaatgttgattaggaacaaatttaaggcttaaaaaatactttatgagcagcaagattgctttaacttttaaaatgaagctttggttctctgatttgtaatgagcacctggacatgtcaattaaaatgcccatttgtgaagcttactcaataaaactttaaattgtctta

SEQ ID NO: 6287 - DNA, 2203 bp, Homo sapiens
agcccagcgctcctccccgcaaatgatcccgccccaggggcctatcccagtccccccagtgcctttggttgctggagggaagaacacaatggatctggtgctaaaaagatgccttcttcatttggctgtgataggtgctttgctggctgtgggggctacaaaagtacccagaaaccaggactggcttggtgtctcaaggcaactcagaaccaaagcctggaacaggcagctgtatccagagtggacagaagcccagagacttgactgctggagaggtggtcaagtgtccctcaaggtcagtaatgatgggcctacactgattggtgcaaatgcctccttctctattgccttgaacttccctggaagccaaaaggtattgccagatgggcaggttatctgggtcaacaataccatcatcaatggtgaccaggtgtggggaggacagccagtgtatccccaggaaactgacgatgcctgcatcttccctgatggtggaccttgcccatctggctcttggtctcagaagagaagctttgtttatgtctggaagacctggggccaatactggcaagttctagggggcccagtgtctgggctgagcattgggacaggcagggcaatgctgggcacacacaccatggaagtgactgtctaccatcgccggggatcccggagctatgtgcctcttgctcattccagctcagccttcaccattactgaccaggtgcctttctccgtgagcgtgtcccagttgcgggccttggatggagggaacaagcacttcctgagaaatcagcctctgacctttgccctccagctccatgaccccagtggctatctggctgaagctgacctctcctacacctgggactttggagacagtagtggaaccctgatctctcgggcacttgtggtcactcatacttacctggagcctggcccagtcactgcccaggtggtcctgcaggctgccattcctctcacctcctgtggctcctccccagttccaggcaccacagatgggcacaggccaactgcagaggcccctaacaccacagctggccaagtgcctactacagaagttgtgggtactacacctggtcaggcgccaactgcagagccctctggaaccacatctgtgcaggtgccaaccactgaagtcataagcactgcacctgtgcagatgccaactgcagagagcacaggtatgacacctgagaaggtgccagtttcagaggtcatgggtaccacactggcagagatgtcaactccagaggctacaggtatgacacctgcagaggtatcaattgtggtgctttctggaaccacagctgcacaggtaacaactacagagtgggtggagaccacagctagagagctacctatccctgagcctgaaggtccagatgccagctcaatcatgtctacggaaagtattacaggttccctgggccccctgctggatggtacagccaccttaaggctggtgaagagacaagtccccctggattgtgttctgtatcgatatggttccttttccgtcaccctggacattgtccagggtattgaaagtgccgagatcctgcaggctgtgccgtccggtgagggggatgcatttgagctgactgtgtcctgccaaggcgggctgcccaaggaagcctgcatggagatctcatcgccagggtgccagccccctgcccagcggctgtgccagcctgtgctacccagcccagcctgccagctggttctgcaccagatactgaagggtggctcggggacatactgcctcaatgtgtctctggctgataccaacagcctggcagtggtcagcacccagcttatcatgcctgtgcctgggattcttctcacaggtcaagaagcaggccttgggcaggttccgctgatcgtgggcatcttgctggtgttgatggctgtggtccttgcatctctgatatataggcgcagacttatgaagcaagacttctccgtaccccagttgccacatagcagcagtcactggctgcgtctaccccgcatcttctgctcttgtcccattggtgagaacagccccctcctcagtgggcagcaggtctgagtactctcatatgatgctgtgattttcctggagttgacagaaacacctatatttcccccagtcttccctgggagactactattaactgaaataaatactcagagcctg

SEQ ID NO: 6288 - DNA, 888 bp, Homo sapiens
gcacatcctgggtggagcctgcaaaagttggagaaggtgtggcagtcctcatttctgtggaatctgaagaagcccacgcagattttaattcccactctagattctggcttcatcgttatgaagcatatgatgatcccgtggatagtatctagatcaccatggcgactggacagaagttgatgagagctgttagagtttttgaatttggtgggccagaagtcctgaaattgcgatcagatattgcagtaccgattccaaaagaccatcaggttctaatcaaggtccatgcatgtggtgtcaaccccgtggagacatacattcgctctggtacttatagtagaaaaccactcttaccctatactcctggctcagatgtggctggggtgatagaagctgttggagataatgcatctgctttcaagaaaggtgacagagttttcactagcagcacgatctctgggggttatgcagagtatgctcttgcagcagaccacactgtttacaaactacctgaaaaactggactttaaacaaggagctgccatcggcattccatattttactgcttatcgagctctgatccacagtgcctgtgtgaaagctggagagagtgttctggttcatggggcaagtggaggagttggattagcagcatgccaaattgctagagcttatggcttaaagattttgggcactgctggtactgaggaaggacaaaagattgttttgcaaaatggagcccatgaagtgttcaatcacagagaagtgaattacattgataaaattaagaagtatgttggtgagaaaggaattgatataattattgaaatgttagctaatgtaaatcttagtaaagacttgagtcttctgtcacatggaggacgagtga

SEQ ID NO: 6289 - DNA, 5928 bp, Homo sapiens
gcggccgcttcccaccgtccctctccccttactggcagagcgcgctgcgggcggactcccgggcccggagcagcccaccggccaccccaccgcccacccggctcccggtgtctcctcccggccgctctacccagcaactttccgtgctttgttccccgactggaaatgctttacggaagcgtcttggacagggtctccgccaggcgacaagagctcggtgctgagatgtgttacgttctcatctccccatcaattatggatggaaacaaataaggaagagtcaattttgctgagccccttctccggcaacgagaggcgttctgcagccgggagggagccgccgctcgcgccggcagccgctggcaggggcatggtgaggaggaaggtagctcagtggcatttctgagcaggggccaccctgacttcaccttggcccaccatgagggtcttcctgctttgtgcctacatactgctgctgatggtttcccagttgagggcagtcagctttcctgaagatgatgaaccccttaatactgtcgactatcactattcaaggcaatatccggtttttagaggacgcccttcaggcaatgaatcgcagcacaggctggactttcagctgatgttgaaaattcgagacacactttatattgctggcagggatcaagtttatacagtaaacttaaatgaaatgcccaaaacagaagtaatacccaacaagaaactgacatggcgatcaagacaacaggatcgagaaaactgtgctatgaaaggcaagcataaagatgaatgccacaactttatcaaagtatttgttccaagaaacgatgagatggtttttgtttgtggtaccaatgcattcaatcccatgtgtagatactacaggttgagtaccttagaatatgatggggaagaaattagtggcctggcaagatgcccatttgatgccagacaaaccaatgttgccctctttgctgatgggaagctgtattctgccacagtggctgacttcttggccagcgatgccgttatttatcgaagcatgggtgatggatctgcccttcgcacaataaaatatgattccaaatggataaaagagccacactttcttcatgccatagaatatggaaactatgtctatttcttctttcgagaaatcgctgtcgaacataataatttaggcaaggctgtgtattcccgcgtggcccgcatatgtaaaaacgacatgggtggttcccagcgggtcctggagaaacactggacttcatttctaaaggctcggctgaactgttctgtccctggagattcgtttttctactttgatgttctgcagtctattacagacataatacaaatcaatggcatccccactgtggtcggggtgtttaccacgcagctcaatagcatccctggttctgctgtctgtgcatttagcatggatgacattgaaaaagtattcaaaggacggtttaaggaacagaaaactccagattctgtttggacagcagttcccgaagacaaagtgccaaagccaaggcctggctgttgtgcaaaacacggccttgccgaagcttataaaacctccatcgatttcccggatgaaactctgtcattcatcaaatctcatcccctgatggactctgccgttccacccattgccgatgagccctggttcacaaagactcgggtcaggtacagactgacggccatctcagtggaccattcagccggaccctaccagaactacacagtcatctttgttggctctgaagctggcatggtacttaaagttctggcaaagaccagtcctttctctttgaacgacagcgtattactggaagagattgaagcctacaaccatgcaaagtgcagtgctgagaatgaggaagacaaaaaggtcatctcattacagttggataaagatcaccacgctttatatgtggcgttctctagctgcattatccgcatccccctcagtcgctgtgagcgttatggatcatgtaaaaagtcttgtattgcatctcgtgacccgtattgtggctggttaagccagggatcctgtggtagagtgaccccagggatgcttgctgaaggatatgaacaagacacagaattcggcaacacagctcatctaggggactgccatgaaattttgcctacttcaactacaccagattacaaaatatttggcggtccaacatctggtgtacgatgggaagtccagtctggagagtccaaccagatggtccacatgaatgtcctcatcacctgtgtctttgctgcttttgttttgggggcattcattgcaggtgtggcagtatactgctatcgagacatgtttgttcggaaaaacagaaagatccataaagatgcagagtccgcccagtcatgcacagactccagtggaagttttgccaaactgaatggtctctttgacagccctgtcaaggaataccaacagaatattgattctcctaaactgtatagtaacctgctaaccagtcggaaagagctaccacccaatggagatactaaatccatggtaatggaccatcgagggcaacctccagagttggctgctcttcctactcctgagtctacacccgtgcttcaccagaagaccctgcaggccatgaagagccactcagaaaaggcccatggccatggagcttcaaggaaagaaacccctcagttttttccgtctagtccgccacctcattccccattaagtcatgggcatatccccagtgccattgttcttccaaatgctacccatgactacaacacgtctttctcaaactccaatgctcacaaagctgaaaagaagcttcaaaacattgatcaccctctcacaaagtcatccagtaagagagatcaccggcgttctgttgattccagaaataccctcaatgatctcctgaagcatctgaatgacccaaatagtaaccccaaagccatcatgggagacatccagatggcacaccagaacttaatgctggatcccatgggatcgatgtctgaggtcccacctaaagtccctaaccgggaggcatcgctatactcccctccttcaactctccccagaaatagcccaaccaagcgagtggatgtccccaccactcctggagtcccaatgacttctctggaaagacaaagaggttatcacaaaaattcctcccagaggcactctatatctgctatgcctaaaaacttaaactcaccaaatggtgttttgttatccagacagcctagtatgaaccgtggaggatatatgcccacccccactggggcgaaggtggactatattcagggaacaccagtgagtgttcatctgcagccttccctctccagacagagcagctacaccagtaatggcactcttcctaggacgggactaaagaggacgccgtccttaaaacctgacgtgccaccaaagccttcctttgttcctcaaaccccatctgtcagaccactgaacaaatacacatactaggcctcaagtgtgctattcccatgtggctttatcctgtccgtgttgttgagaggatgatgttgtaagggtaccttaaaacaagagactcgcttgtattttaagagaaccaagtggccaaagaaactctttctaactttggcaacatcagaacttgccacatgtagctactgcagcaaggcttctgtgtacttgcctgaaaacaaaggaaggtgctggtcattccatttcttttgtttgaagctaaagagatgtgtagctcacaggggctaccttaccagtataaagagctgataacagtactcagaagaatctgtgaacaaatacttgaaaatgggttcaatgtagactgccattatgtgtggtcttcccattaaatgtgaacattttaatatgtatgcattcaccttgcctcttgcacaaatgtcaaaaaaaagatggtaatatctcaaagaaatgaacttgtagattaccaagcagtttgctaaaaattcaatctttgacccaagctgtagcatttttttttcatgtgtggcatctttttcatgccaccaacaaacttgttgtgtgtgtgcgtgtgtgtgtgtgtgtgtgtgtgtgtgtgtgtgttctgtacccactaggatttgtttaggtgcccattgcatctttttgtgctatggagttgtttacattaagcatgaccgaacgagagacaatactatttcccacaggagtccattgggttcagctttgaaagaggaatagaatcgaggctcctttgaccatcaaaatgatgaactttacttatgtggtacccaatgccagaatgtaagagttgcaagtgattttgtgctgctattcattaaaacttgtattccagtcttgccagcttaaggagatcaagatattaagaggtatccttgatttattttccagtattcagtagtaaaattttcctgtccactgtgaatcaaagcctgagtcactctatttaaccttggacacactaataaggttttattttgattgtgttcgtttccccccccccaatagtaaaatttctcctcctttaactcctcctaccccccaaggtaagaaacaaaaaacaaacaaacaaacaaaaatagaagacaaaagaaagacatatgaaaggaattgtaattggcttaacagaaacagtctgtaaaaacctaacagtggtgcaatcatgttgtctgtgttgtgttatgtgagaattttctcctaagtcatgcaggtaatgacaatatactgtaaataccacatgtgagtttacctgaatctgtgcattttgtgccttattcatgagaatgatagaagtactaaaatctgtcaagtgttttcagtatagcacattatttactgagtgccagttgtaaatgtttttcaaccagcacctaaaaagactcttttcaaaaaatcacagaaacaacctaggacaattatttgttacataatccgacctcatagcagcattacattctttgccgtgataaacattccactcctgctttcctaaggatgaaacagtgataatgtgaactcaaatgaggtttcctgggtaatgtgacacctgcagaaactatagagcgtcatttatacgtagtttggcagaaaccacttacggctgatgatgcgcaaccctgctgactgtttcagttaatatgctgcacaccacacacttgtttagtgaaccaaatctagaaagtaccaaggcagaggtatgctcctgctgtaatcaggcaaatgagttcaactggatttcttttgacaatactgttggtacctattacttgggggaggacatgttgcagaagaccagatcatttttatacagaatgtgaaatactgatacagttattcttttttttaaagaacattgttttataaagaacgtgatttccagtgatctctggaagcgctaaagctaaaatttctgttcttgaaacacttcagctttgcaactaaaatattacagattaataataaattaaaccaaccaatgataaacactactcagtccaccaacaacaaacgtgtttgaattcaccttaccaatattaatcccagcgtgtgtaaaacagaacagtaactctatgtgaccccagataacattttgtaacattgtgcttccttgtagtttgtaatgtgagttcaatcagtatttatgttgaaatttctaacattaaatctagtctctatcctgttaatttaatttttaaatgctttatccatttgtgcaaaggtaaacgcagattgtatcttttttaatggtacggcataaaaagtaaccctcaagtgaagtgtctctatactgttttatagagtactttaacatgaatagataccttgtaaacttgtattgtggatgtgtaaataatatgtactttgggtttttaacaccgcatgtaaagtcaaaataaaatatacaaatcatt

SEQ ID NO: 6290 - DNA, 773 bp, Homo sapiens
ggaggagcagtcgcagctgctttccgaggaagccggtgttgccgagattgccaaaatgctttggagtttttaactgaatctaagaaaagtccaaaatagatttgagactgtaaaaacagaaactgcagcaagggggattcagtgccaatgcatcaacaaaaaagacaaccagagttagtggaaggaaatcttcctgttttcgtgttccccacggagctcatattttatgcagatgatcagtcaacacataagcaagtgttgacactgtacaatccctatgagtttgccttaaagttcaaagttttgtgtactactccaaataagtatgttgtcgttgatgctgcaggtgcagtaaagcctcagtgttgtgtggatattgtgattcgtcatcgagatgttcgatcctgtcactatggtgtaatagacaaattccgtctccaagtttccgagcaaagccaaaggaaggctttgggaagaaaagaggttgttgctactcttctcccatcagcaaaagaacaacaaaaggaagaagaggaaaaaagattaaaggaacatttaactgaaagtttattttttgagcagtcgtttcaaccaggtcttatcacaatggccatacttagaacatgagcaaggatttcaattgacttctgaagtaaatctgtcttgaaaatatgaatgtggactgccttttatctctatttcactccattaacatgcaacaaactattgaatgatttcaaataattgcaaatgtataatatatattttaaatt

SEQ ID NO: 6291 - DNA, 3499 bp, Homo sapiens
cgacttccggcagctggacttggaaaagcaaggagtgtcgggaatggcgaccaagcggctcgcgcggcagcttggattaattaggagaaagtcaattgcgccagcaaatggaaatctcggaagaagcaaatccaagcagttgtttgactacttaattgtcattgattttgaatcgacatgctggaatgatgggaagcaccaccatagccaggaaataattgagtttccagcagtgttgctgaacacatcaactggacagattgactctgagttccaggcttatgttcaacctcaggaacatccaattctttcagaattttgcatggaattgacaggcataaagcaggctcaagttgatgaaggagtccctctgaagatttgcttatctcagttctgtaaatggattcataagattcagcaacagaagaacattatttttgctactgggatttcagagccttctgcttctgaagtaaaattatgtgcatttgttacttggtcagactgggacttgggggtttgcctggagtatgagtgtaaaagaaagcagctgttaaaacctgtgtttttaaattcttggattgatctcagagcaacttacaagcttttctataggagaaaaccaaaaggactaagtggtgccttgcaggaagtaggaatagaattctcaggacgagaacattctgggttggacgattctcggaatactgcccttcttgcttggaaaatgatcagagatggttgtgtaatgaaaattacaaggtcgttgaacaaggttcccactaagaagaatttcagcattctggccagaaatttgaatacaattcaagttgaagaaatgtctgcctgtaacattagcatccagggtcccagcatatataataaggagcctaaaaatataataaatcctcatgaaaaagttcaaatgaagtcaatttgtgcaaattctcctataaaggcacaacaggatcaattacaagtaaaaaacaatataaaagcaagtcttcacaatgtcaaaagttccttacctctttttaatactaagtcctctacttctgtggggcagttgcagtctcctaccttgaattcacctatctatatgcaaaagcaaggaaaaaatgaacatcttgcatttaataccaaatctaaggcttcaacagttggttcagaattggtacttgtttctaccaccgttccaactgttcatcatgtttctgatttggaaatgagctctactctggactgtttacctgtgttggctgattgggaggatgtggttttactgccagcatctcagcctgaggaaaacgtagactgtacagttcccattagtgactcagacttagagatttcatttaattctggagaaagattaatggttttgaaagaattggaaatgtcaagtcatgaaaactttggagacatagaggaaactcctcaaaaatctgagacttctaagtctattgtgtacaagagtcctcacactactatttataatgtaaaagaagccaaagatccaggttcagatatttctgcctttaagttacctgaacacaaatcaagtaccttcaacagagttaatgccaatatgtctcatcctttagttttggggaaacatcctcttctttcaggtggtaccaaaaggaatccatgcagtccccaagctttcccaccagcaaaaaaacaacccttcactattcatgaagaaaagcctacatcatctgattgctccccagtaagaagttcttcctggaggcgtctcccatctatattaacttctacagttaacctacaagagccatggaagagtgggaaaatgacacctccattatgcaagtgtggtcggagatctaagagacttgttgtttctaataatggaccgaaccatggaaaagtcttctattgttgccctatcgggaaataccaagaaaacagaaaatgttgtggttatttcaaatgggaacaaacacttcaaaaggaaagagccaacagcatggttccatctcattccacagggggactcacttttagttctccagaaacaagccatatttgtgacagaaatttaagtatttccaccaaaaattctttgagactcaggccttcaatgaggaattgataacctttcatgtatgaatcctaattgttccttgaatttccaaacatgagtattctgataacatcttacactattttatttttattttatatattaatgtttactgcatttaccatactttcttcaggaaccacaagtgtaatcttttgtaaacagtatttattagattacatataataagcaacaatagtatatgatccttcttttatagttagaccttgaaacaagtctaaactatttttaaattatttgcaaaaaatgtgactaataaaaatccctagtctattttcaggtagattcttgtactttgagattatcataatcttctaactgatattttatatttttctaaaaacttttataagttctttagttttatttcaggcttgaacattggttctgatttgtatatcaacatatcagaagaattagtcaactaaagtttgaaaacctatgtagcagagatctggttcagaaactgcttctatactatacatttaaaaattaatcagcaattgatggtattatttttatattaagaaatgataggaacattgacactaatgtggaggaatttgccaaatattttatttcaaaatttagcctctgatatcataaccacaagatattttaaatcaacagtttctaagcatactaccacagtttttatgacctctccatcatcttgtggtttctagagattgacagatactatgtttgttttatagatatggtaattaatgaaacaactttaaattgtcttccattctttcttcctcagttcatttctttttgtcttcccactgatagtctttggcagctcttgaataaattctacctgttggcatcaaggggaagaaaattagcctggaaatttttatctttacataaagccaattatatagcagtttgattatgaattctaggtggaagaattagaatagtctttggaatgggttttgggtaacagccaaaatagggaaaagggtattgttaggaaagttgtcttgatattaagtatttactgtgagtccagtaagccaaaggaccaaacaaaataggttcagggtttcattttaatctcaaagattctgattcttacccatatgtcatcagttcagtttgggacatgtggtgcagcatgtgtgaagaaaatattcattaaaatgtaaaaataaacacttgaaattgtccacaacactgagcaaatattcgttataattaggatgcctacctttctgggatatttgtaaggtgctgtagtttttttaacatgctcctgaatctcctttattagttgttcttgatcatgtgacttgtaatcaggatttagaacgacaaaagcctttactacctaaaataaatatttgaaacaccagg

SEQ ID NO: 6292 - DNA, 3207 bp, Homo sapiens
ggagaccgcggcgcacttggacttccctctccattcgccagccgcctcgctcccggaccccacggctgcaaactgatctggcgcgcggggaggaggagagcgcaggcgagcgaacccgcgagagagggagagagcgagcgagcaacagcgagagcgagagcgagagagccgggaggcagagggagtagtgaccgccttccggagccgggattcatgcctgtcctcgggaccagcgaaggggactttacggctgagtatgagccaggctgctaggagccaggtacccccacgcctgcagtccccgcgccgtgcccggaatgcgagctgcacgcagggctctcccaagttcccaccgagccgaataaaaagcgtcctcccgcagctctccgccaaagacggacattgactccaggtaaggcggcgccgaatggagcaagaatgagaggaaaaaggccggcagaaaagcatgaactggaggtttgttgagctcctctacttcctgtttatatggggccgtatctcagtgcagccctcccaccaggaaccagctgggacagaccaacatgtctccaaggaatttgattggctcatttcagacagggggcctttccaccactccaggagctacctatcctttgtggaaagacaccgtcaaggatttacaaccagatataaaatatacagggagtttgcccgttggaaggtgaggaacacagccatcgagaggagagatctggtccgccatccagtgcccctcatgccggagtttcaaaggagcatccgcctgcttggcaggagacctaccactcagcagttcatcgataccatcatcaaaaagtacggcacccacctgctcatctcagccacattgggaggggaggaggctttgaccatgtatatggacaaaagtcgcctcgacaggaagtcagggaatgccactcaaagtgttgaagctctgcaccagctcgcatcatcctactttgttgaccgtgatggtaccatgaggaggcttcatgagatccagatatcaactggagcaatcaaggtcacagagacacgcactgggcctctgggctgtaacagctatgacaatctggactctgtgagttccgtccttctgcaaagcacggagagcaaactgcaccttcaaggtcttcagataatctttcctcagtatctgcaagagaagtttgtccagtcggccttgagctatatcatgtgcaatggggagggggagtacctgtgccagaacagccagtgtcgctgccaatgtgccgaggagtttccgcagtgcaactgccccatcacggacatccagatcatggagtacacgctggccaacatggccaagtcttgggccgaagcttataaggacctggagaattcagatgagtttaaatcatttatgaagcgcctccccagcaaccacttcctgaccatcggaagcatccatcagcactggggcaatgactgggacctgcagaaccgctacaagctcctgcagagtgccacggaggcacagagacaaaagatccaacgcactgcccgcaagcttttcggcctcagtgtacgctgtcgccacaatcccaaccaccagctgcctagagagaggacaattcagcagtggcttgcaagggtccagtcactcctctactgtaatgagaatgggttttggggaaccttcctggagagccagcggagctgcgtgtgccacggcagcaccacgctgtgccagcgccccatcccctgcgtgataggcgggaacaacagctgcgccatgtgcagcctggccaacatctccctctgcggctcctgcaacaagggctacaagctgtatcgaggccgctgtgaaccacagaacgtggactcggagcggagcgagcagttcatcagctttgagactgacctggacttccaggacctggagctgaagtacctgctgcagaagatggactcacgcctctacgtccacaccaccttcatcagcaacgagatccgcctcgacaccttctttgaccctcggtggcgcaagcgcatgtccctcactctcaagagcaacaagaaccgcatggacttcatccacatggtgatcggcatgtccatgcgcatctgccagatgcgcaacagcagcctggaccccatgttctttgtctatgtcaacccctttagcgggagccattcggagggctggaacatgcccttcggggaatttggctacccacgctgggagaagatccgtctccaaaacagccagtgctacaactggactcttttgctgggcaatcggtggaaaacatttttcgagacggtccacatctacctacgtagtcggactcggctacctaccctactgcgaaatgagactggccagggccccgtggacctgtcggatccctccaagaggcagttctacatcaagatctcagacgtgcaggtgtttgggtatagcctgaggttcaacgccgacctcctgcgcagtgcagtgcagcaggtcaaccagtcctacacacagggcggccagttctattcctcttcgtcagtgatgctcctcttgttggatattcgggaccgaattaatcgcctggcccctcctgtggccccggggaaaccccagctggacttgttctcctgtatgctgaaacaccgcctgaaactgaccaacagcgagatcatcagggtgaaccacgccttggacctgtacaacacggagatcctcaaacagtcggaccagatgacagccaaactctgctaacccgggactccttgccatggacttttcctgttgttgtacacacacaacagaacaaaatgaagcaaaacaaaacaaaaaaacccacaaaaatttgtaaaatgtaattaatattcaaagaaaaggaggaaaatcttcatttgttggaaatgaaaacgttctagcaactgtataaaagcgttgggcatgtttgttatttctatactcactctgtcatgaagaagggtctcagccttttgtggagcattgagggagttgcttcttaggcctcaggtgctgtattgggggagaagggagaaagcatatgcaatgaattgtaaagatctctgctgtgcaggtgctaagattaaacactaaaaagaaagagagatatatgtaatgtacaactgacactgccatttttcctttttggaggaaatggacatagataaagaagatatttcttcggttaagattta

SEQ ID NO: 6293 - DNA, 1793 bp, Homo sapiens
aagatctggaagagctttgtcccgtgtgtggagataaagtgtctgggtaccattatgggctcctcacctgtgaaagctgcaagggattttttaagcgaacagtccaaaataataaaaggtacacatgtatagaaaaccagaactgccaaattgacaaaacacagagaaagcgttgtccttactgtcgttttcaaaaatgtctaagtgttggaatgaagctagaagctgtaagggccgaccgaatgcgtggaggaaggaataagtttgggccaatgtacaagagagacagggccctgaagcaacagaaaaaagccctcatccgagccaatggacttaagctagaagccatgtctcaggtgatccaagctatgccctctgacctgaccatttcctctgcaattcaaaacatccactctgcctccaaaggcctacctctgaaccatgctgccttgcctcctacagactatgacagaagtccctttgtaacatcccccattagcatgacaatgccccctcacggcagcctgcaaggttaccaaacatatggccactttcctagccgggccatcaagtctgagtacccagacccctataccagctcacccgagtccataatgggctattcatatatggatagttaccagacgagctctccagcaagcatcccacatctgatactggaacttttgaagtgtgagccagatgagcctcaagtccaggctaaaatcatggcctatttgcagcaagagcaggctaaccgaagcaagcacgaaaagctgagcacctttgggcttatgtgcaaaatggcagatcaaactctcttctccattgtcgagtgggccaggagtagtatcttcttcagagaacttaagggtctcactctgtcgcccagtctggagtgcagtggcacgatcttggctcatggcaacctccacctcctgcattcaagtgattcgcctgcctcagcctcccgagtagctgggattacaggcgtgcaccacaacacccatctaatttttgtatttttagtagagatgggattttgccatgttggccaggctggtctcaaaactcctgacctcagggtgatctgcctgcctcggcctcccaaagtgctgggattatgggcatgagccactgcgcctggccgtaattgtgcttttttttccttttttctttttttgagatggagttacactcttgttgcctgggctggggtgcaatggcacagtctcggctcactgcaacctccacctcctgggttccagcaattctcctgcctcagcctcccgagtagctgggattacaggcatgcgccaccatgcctagctaattttcgtattattagtagaaacaaggtttcaccatgtcagccaggctggtctcaaactcctgacctcagatgatccacccgccttggcctcccaaagtgctgggattacagatgtgagccaccacgctcagccaaattgtactttcagtaaagtactttactgtttacaaagaacttccatatacatttttttggtcctggtctctgtctttcattttgggagcatggatgtaactggcctttcatcaatggttcagtagtgttgttttttaaagcctacaacagaaccatctcctatgaattgactatcacctgtctaaatgccctgtttacagcatgttgtacctgcaagagcaggatatttaaagtactttataattgataattgccattatcaatatgctcacctctttaccatattccaacaggtcttaaaggacttgtattattttttaccgaa

SEQ ID NO: 6294 - DNA, 2203 bp, Homo sapiens
tgcagcccataccaggtctcatggaggggaacaagctggaggagcaggactctagccctccacagtccactccagggctcatgaaggggaacaagcgtgaggagcaggggctgggccccgaacctgcggcgccccagcagcccacggcggaggaggaggccctgatcgagttccaccgctcctaccgagagctcttcgagttcttctgcaacaacaccaccatccacggcgccatccgcctggtgtgctcccagcacaaccgcatgaagacggccttctgggcagtgctgtggctctgcacctttggcatgatgtactggcaattcggcctgcttttcggagagtacttcagctaccccgtcagcctcaacatcaacctcaactcggacaagctcgtcttccccgcagtgaccatctgcaccctcaatccctacaggtacccggaaattaaagaggagctggaggagctggaccgcatcacagagcagacgctctttgacctgtacaaatacagctccttcaccactctcgtggccggctcccgcagccgtcgcgacctgcgggggactctgccgcaccccttgcagcgcctgagggtcccgcccccgcctcacggggcccgtcgagcccgtagcgtggcctccagcttgcgggacaacaacccccaggtggactggaaggactggaagatcggcttccagctggaattactctcacttccaccacccgatgtatggaaactgctatactttcaatgacaagaacaactccaacctctggatgtcttccatgcctggaatcaacaacggtctgtccctgatgctgcgcgcagagcagaatgacttcattcccctgctgtccacagtgactggggcccgggtaatggtgcacgggcaggatgaacctgcctttatggatgatggtggctttaacttgcggcctggcgtggagacctccatcagcatgaggaaggaaaccctggacagacttgggggcgattatggcgactgcaccaagaatggcagtgatgttcctgttgagaacctttacccttcaaagtacacacagcaggtgtgtattcactcctgcttccaggagagcatgatcaaggagtgtggctgtgcctacatcttctatccgcggccccagaacgtggagtactgtgactacagaaagcacagttcctgggggtactgctactataagctccaggttgacttctcctcagaccacctgggctgtttcaccaagtgccggaagccatgcagcgtgaccagctaccagctctctgctggttactcacgatggccctcggtgacatcccaggaatgggtcttccagatgctatcgcgacagaacaattacaccgtcaacaacaagagaaatggagtggccaaagtcaacatcttcttcaaggagctgaactacaaaaccaattctgagtctccctctgtcacgatggtcaccctcctgtccaacctgggcagccagtggagcctgtggttcggctcctcggtgttgtctgtggtggagatggctgagctcgtctttgacctgctggtcatcatgttcctcatgctgctccgaaggttccgaagccgatactggtctccaggccgagggggcaggggtgctcaggaggtagcctccaccctggcatcctcccctccttcccacttctgcccccaccccatgtctctgtccttgtcccagccaggccctgctccctctccagccttgacagcccctccccctgcctatgccaccctgggcccccgcccatctccagggggctctgcaggggccagttcctccacctgtcctctgggggggccctgagagggaaggagaggtttctcacaccaaggcagatgctcctctggtgggagggtgctggccctggcaagattgaaggatgtgcagggcttcctctcagagccgcccaaactgccgttgatgtgtggaggggaagcaagatgggtaagggctcaggaagttgctccaagaacagtagctgatgaagctgcccagaagtgccttggctccagccctgtaccccttggtactgcctctgaacactctggtttccccacccaactgcggctaagtctctttttcccttggatcagccaagcgaaacttggagctttgacaaggaactttcctaagaaaccgctgataaccaggacaaaacacaaccaag

SEQ ID NO: 6295 - DNA, 2462 bp, Homo sapiens
gtcactggccaccagtggagttaaggcccatccacctgttaccagtgctcccctctccccaccacaacccaatgacctctacaagaatcccacaagttccagtgaattctacaaggcccaagggccacttcctaaccagcatagcctgaagggcatggaacaccgaggccccccaccagaatatcccttcaagggcatgccaccccaatctgtagtgtgcaagccccaagagccagggcacttctatagtgagcatcgcctgaaccagccagggagaacagaggggcaactgatgaggtatcagcatccccctgagtatggagcagccaggccagcgcaggacatctcattgccattgtcagccaggaactcgcagcctcacagccctacttcttctctgacctctggggggtccttgcccttgctacaatctccaccatccactagattgtctcctgcccgacaccccttggtcccaaaccagggagaccattcagctcacctgcctaggccgcagcagcatttccttcctaatcaggctcaccagggggatcattaccgtctctcccaacctggcctgagtcagcagcagcagcaacagcagcagcagcaccatcatcaccatcaccaccaacaacagcagcagcagcagccacagcagcagccaggagaagcctattcagctatgcctcgggctcagccatcctctgcttcttatcagccagtgccagcagacccttttgccattgtttccagagcccagcagatggttgagatcctctcagacgagaaccggaacttgaggcaagagttggaaggatgctatgagaaggtggcaagactgcagaaggtggagacagaaatccagcgcgtctcggaggcatatgagaacctcgtgaagtcatcctccaaaagagaggccctagagaaagccatgagaaacaagctagagggcgagattcggaggatgcatgatttcaacagggatctgagagagcgtctagagactgccaacaagcagcttgcagagaaggaatatgaggggtcagaggacaccagaaaaaccatctcgcagctctttgcaaaaaataaagaaagccagcgtgagaaggagaagctggaagcggagctggccactgcccgttctaccaatgaggaccaaagacgacacatcgaaatccgagatcaggccctgagtaatgcccaggccaaggtggtaaagctggaagaagagctgaaaaagaagcaagtgtacgttgacaaggtggagaagatgcagcaggcccttgtacagctccaggcagcatgtgaaaaacgtgagcagctagagcaccgtctccggacacgactggagagggaactggaatccctgagaatccagcagcgtcagggcaactgtcagcccaccaacgtttcagaatacaatgctgctgcactgatggagctccttcgggagaaagaggagaggattctggctctggaagctgatatgacaaagtgggagcagaaatatttggaggagaatgtgatgagacattttgctctggatgctgctgcaactgtggctgctcagagggacacaacagtcatcagtcactctcctaacaccagctatgacacagctctagaagctcgcatccagaaagaggaggaagaaatcttgatggccaataagcgttgccttgacatggagggcaggattaagaccctccatgcccagattattgagaaggatgccatgatcaaagtactccagcagcgttcccggaaggagccgagcaagacagagcagctgtcgtgcatgcggccagcgaagtctctgatgtccatttccaatgctggatcaggcttgctctcccactcatccaccctgactggctcccccatcatggaagaaaagcgagacgacaagagctggaaggggagcctaggtaatgacagtaaataaggaagattatagtcacgtgttcaaagagagccctgagataagcacccatgcttaaggaaaagggatgatggtccaggttctagagaggaaggtgtaccagggttttggagtttttttttcctcctgagaccctagttccacattctggagctcctccacactttgaagtctcccggtgagaataccgattgaggccaaggcttagaggacaagaatcttgagtttcatttgggtgtcaaggaagataactctaatttcctctaaactattctcagatttggcctttgccatgtggcacctttatctttctccaaagcccatgtggcctttgtgtcgttccaaatgtcaaaattccggcatttctgtgttccttcctcctctataataggagaacccagagttttagttacactaaatcgtttgggtagcaggttttgttcccacagtgttgtgagatgagaacagaatgtactttttcattccgttcctgtccattccctcccctctaatcaaa

SEQ ID NO: 6296 - DNA, 3594 bp, Homo sapiens; identical to SEQ ID NO: 3992

SEQ ID NO: 6297 - DNA, 745 bp, Homo sapiens
ttccagacctaccagcagctcaatggccttcccaaagaagaaacttcagggtcttgtggctgcaaccatcacgccaatgactgagaatggagaaatcaacttttcagtaattggtcagtatgtggattatcttgtgaaagaacagggagtgaagaacatttttgtgaatggcacaacaggagaaggcctgtccctgagcgtctcagagcgtcgccaggttgcagaggagtgggtgacaaaagggaaggacaagctggatcaggtgataattcacgtaggagcactgagcttgaaggagtcacaggaactggcccaacatgcagcagaaataggagctgatggcatcgctgtcattgcaccgttcttcctcaagccatggaccaaagatatcctgattaatttcctaaaggaagtggctgctgccgcccctgccctgccattttattactatcacattcctgccttgacaggggtaaagattcgtgctgaggagttgttggatgggattctggataagatccccaccttccaagggctgaaattcagtgatacagatctcttagacttcgggcaatgtgttgatcagaatcgccagcaacagtttgctttcctttttggggtggatgagttttgtatccagagatttatcaactttgttgtcaaactagaaaactcaaaactcaaagtttcaaagaaccaaaggactcttcctctgggcaccacaaacttccccttcctccactga

SEQ ID NO: 6298 - DNA, 947 bp, Homo sapiens
ctctgttccccttttcctgccaccttcttctccagggaccagaaacaagggccccgccagcaggcgaagcagggagatgtcagactgctacacggagctggagaaggcagtcattgtcctggtggaaaacttctacaaatatgtgtctaagtacagcctggtcaagaacaagatcagcaagagcagcttccgcgagatgctccagaaagagctgaaccacatgctgtcggacacagggaaccggaaggctgcggataagctcatccagaacctggatgccaatcatgatgggcgcatcagcttcgatgagtactggaccttgataggcggcatcaccggccccatcgccaaactcatccatgagcaggagcagcagagcagcagctagagacccctttggccacaccttccaggcactggcctgatgccccgccctggtgctctccccaggctccctcctcagcctcctgcccacccagggccctttactctcttctccctccagaccttcctctgacccttgctgaactggggtccctttgtgagtgtctcagtctagaggtacctccctccctggggggtctcagctcctggagtcgcaggcccttggggcccctctgtgagatctcaatgctgtctggggaccctaagagttttctcacctgttcagtctcatctaaccttccaatgtctgatgttcctgccaaattcctgcctgattctgggtccgtcctgacctccaaaggtcagcttggtgcttgaggtctccctgctcttggtggcagtggtagcagcaacagcagcagcagcagcagcagcagcagcagagacctctccactttcccttagcccctctgctgggtagagaggcactttcagggacttccctccagctgcctcttcatctgggaatgagctaagcaaggctgagcctcctcctgttgctt

SEQ ID NO: 6299 - DNA, 4048 bp, Homo sapiens
cgcagcagctgctcccggctccgcggccgcagcccgcgtggacgctccgagcgccccccgacggacgggaccggctccctggcggtcgggcgagcgggcggcaacgctgcccggccggcagcgctggggttaagtggcccaagtaaacctagctcggcgatcggcgccggagattcgcgagcccagcgccctgcacggccgccagccggcctcccgccagccagccccgacccgcggctccgccgcccagccgcgccccagccagccctgcggcaggaaagcatgaagggagacaccaggcatctcaatggagaggaggacgccggcgggagggaagactcgatcctcgtcaacggggcctgcagcgaccagtcctccgactcgcccccaatcctggaggctatccgcaccccggagatcagaggccgaagatcaagctcgcgactctccaagagggaggtgtccagtctgctaagctacacacaggacttgacaggcgatggcgacggggaagatggggatggctctgacaccccagtcatgccaaagctcttccgggaaaccaggactcgttcagaaagcccagctgtccgaactcgaaataacaacagtgtctccagccgggagaggcacaggccttccccacgttccacccgaggccggcagggccgcaaccatgtggacgagtcccccgtggagttcccggctaccaggtccctgagacggcgggcaacagcatcggcaggaacgccatggccgtcccctcccagctcttaccttaccatcgacctcacagacgacacagaggacacacatgggacgccccagagcagcagtaccccctacgcccgcctagcccaggacagccagcaggggggcatggagtccccgcaggtggaggcagacagtggagatggagacagttcagagtatcaggatgggaaggagtttggaataggggacctcgtgtggggaaagatcaagggcttctcctggtggcccgccatggtggtgtcttggaaggccacctccaagcgacaggctatgtctggcatgcggtgggtccagtggtttggcgatggcaagttctccgaggtctctgcagacaaactggtggcactggggctgttcagccagcactttaatttggccaccttcaataagctcgtctcctatcgaaaagccatgtaccatgctctggagaaagctagggtgcgagctggcaagaccttccccagcagccctggagactcattggaggaccagctgaagcccatgttggagtgggcccacgggggcttcaagcccactgggatcgagggcctcaaacccaacaacacgcaaccagagaacaagactcgaagacgcacagctgacgactcagccacctctgactactgccccgcacccaagcgcctcaagacaaattgctataacaacggcaaagaccgaggggatgaagatcagagccgagaacaaatggcttcagatgttgccaacaacaagagcagcctggaagatggctgtttgtcttgtggcaggaaaaaccccgtgtccttccaccctctctttgagggggggctctgtcagacatgccgggatcgcttccttgagctgttttacatgtatgatgacgatggctatcagtcttactgcactgtgtgctgcgagggccgagagctgctgctttgcagcaacacgagctgctgccggtgtttctgtgtggagtgcctggaggtgctggtgggcacaggcacagcggccgaggccaagcttcaggagccctggagctgttacatgtgtctcccgcagcgctgtcatggcgtcctgcggcgccggaaggactggaacgtgcgcctgcaggccttcttcaccagtgacacggggcttgaatatgaagcccccaagctgtaccctgccattcccgcagcccgaaggcggcccattcgagtcctgtcattgtttgatggcatcgcgacaggctacctagtcctcaaagagttgggcataaaggtaggaaagtacgtcgcttctgaagtgtgtgaggagtccattgctgttggaaccgtgaagcacgaggggaatatcaaatacgtgaacgacgtgaggaacatcacaaagaaaaatattgaagaatggggcccatttgacttggtgattggcggaagcccatgcaacgatctctcaaatgtgaatccagccaggaaaggcctgtatgagggtacaggccggctcttcttcgaattttaccacctgctgaattactcacgccccaaggagggtgatgaccggccgttcttctggatgtttgagaatgttgtagccatgaaggttggcgacaagagggacatctcacggttcctggagtgtaatccagtgatgattgatgccatcaaagtttctgctgctcacagggcccgatacttctggggcaacctacccgggatgaacaggatctttggctttcctgtgcactacacagacgtgtccaacatgggccgtggtgcccgccagaagctgctgggaaggtcctggagcgtgcctgtcatccgacacctcttcgcccctctgaaggactactttgcatgtgaatagttccagccaggccccaagcccactggggtgtgtggcagagccaggacccaggaggtgtgattcctgaaggcatccccaggccctgctcttcctcagctgtgtgggtcataccgtgtacctcagttccctcttgctcagtgggggcagagccacctgactcttgcaggggtagcctgaggtgccgcctccttgtgcacaaatcagacctggctgcttggagcagcctaacacggtgctcattttttcttctcctaaaactttaaaacttgaagtaggtagcaacgtggctttttttttttcccttcctgggtctaccactcagagaaacaatggctaagataccaaaaccacagtgccgacagctctccaatactcaggttaatgctgaaaaatcatccaagacagttattgcaagagtttaatttttgaaaactggctactgctctgtgtttacagacgtgtgcagttgtaggcatgtagctacaggacatttttaagggcccaggatcgttttttcccagggcaagcagaagagaaaatgttgtatatgtcttttacccggcacattccccttgcctaaatacaagggctggagtctgcacgggacctattagagtattttccacaatgatgatgatttcagcagggatgacgtcatcatcacattcagggctattttttcccccacaaacccaagggcaggggccactcttagctaaatccctccccgtgactgcaatagaaccctctggggagctcaggaaggggtgtgctgagttctataatataagctgccatatattttgtagacaagtatggctcctccatatctccctcttccctaggagaggagtgtgaagcaaggagcttagataagacaccccctcaaacccattccctctccaggagacctaccctccacaggcacaggtccccagatgagaagtctgctaccctcatttctcatctttttactaaactcagaggcagtgacagcagtcagggacagacatacatttctcataccttccccacatctgagagatgacagggaaaactgcaaagctcggtgctccctttggagattttttaatccttttttattccataagaagtcgtttttagggagaacgggaattcagacaagctgcatttcagaaatgctgtcataatggtttttaacaccttttactcttcttactggtgctattttgtagaataaggaacaacgttgacaagttttgtggggctttttatacactttttaaaatctcaaacttctatttttatgtttaacgttttcattaaaattttttttgtaactggagccacgacgtaacaaatatggggaaaaaactgtgccttgtttcaacagtttttgctaatttttaggctgaaagatgacggatgcctagagtttaccttatgtttaattaaaatcagtatttgtcta

SEQ ID NO: 6300 - DNA, 1188 bp, Homo sapiens
atgagagccctgctggcgcgcctgcttctctgcgtcctggtcgtgagcgactccaaaggcagcaatgaacttcatcaagttccatataagtcaaaaacctgctatgaggggaatggtcacttttaccgaggaaaggccagcactgacaccatgggccggccctgcctgccctggaactctgccactgtccttcagcaaacgtaccatgcccacagatctgatgctcttcagctgggcctggggaaacataattactgcaggaacccagacaaccggaggcgaccctggtgctatgtgcaggtgggcctaaagctgcttgtccaagagtgcatggtgcatgactgcgcagatggaaaaaagccctcctctcctccagaagaattaaaatttcagtgtggccaaaagactctgaggccccgctttaagattattgggggagaattcaccaccatcgagaaccagccctggtttgcggccatctacaggaggcaccgggggggctctgtcacctacgtgtgtggaggcagcctcatcagcccttgctgggtgatcagcgccacacactgcttcattgattacccaaagaaggaggactacatcgtctacctgggtcgctcaaggcttaactccaacacgcaaggggagatgaagtttgaggtggaaaacctcatcctacacaaggactacagcgctgacacgcttgctcaccacaacgacattgccttgctgaagatccgttccaaggagggcaggtgtgcgcagccatcccggactatacagaccatctgcctgccctcgatgtataacgatccccagtttggcacaagctgtgagatcactggctttggaaaagagaattctaccgactatctctatccggagcagctgaaaatgactgttgtgaagctgatttcccaccgggagtgtcagcagccccactactacggctctgaagtcaccaccaaaatgctgtgtgctgctgacccacagtggaaaacagattcctgccagggagactcagggggacccctcgtctgttccctccaaggccgcatgactttgactggaattgtgagctggggccgtggatgtgccctgaaggacaagccaggcgtctacacgagagtctcacacttcttaccctggatccgcagtcacaccaaggaagagaatggcctggccctctga

SEQ ID NO: 6301 - DNA, 1841 bp, Homo sapiens
caagccatagcaggaaacagcgagcttgcagcctcaccgacgagtctcaactaaaagggactcccggagctaggggtggggactcggcctcacacagtgagtgccggctattggacttttgtccagtgacagctgagacaacaaggaccacgggaggaggtgtaggagagaagcgccgcgaacagcgatcgcccagcaccaagtccgcttccaggctttcggtttctttgcctccatcttgggtgcgccttcccggcgtctaggggagcgaaggctgaggtggcagcggcaggagagtccggccgcgacaggacgaactcccccactggaaaggattctgaaagaaatgaagtcagccctcagaaatgaagttgactgcctgctggctttctgttgactggcccggagctgtactgcaagacccttgtgagcttccctagtctaagagtaggatgtctgctgaagtcatccatcaggttgaagaagcacttgatacagatgagaaggagatgctgctctttttgtgccgggatgttgctatagatgtggttccacctaatgtcagggaccttctggatattttacgggaaagaggtaagctgtctgtcggggacttggctgaactgctctacagagtgaggcgatttgacctgctcaaacgtatcttgaagatggacagaaaagctgtggagacccacctgctcaggaaccctcaccttgtttcggactatagagtgctgatggcagagattggtgaggatttggataaatctgatgtgtcctcattaattttcctcatgaaggattacatgggccgaggcaagataagcaaggagaagagtttcttggaccttgtggttgagttggagaaactaaatctggttgccccagatcaactggatttattagaaaaatgcctaaagaacatccacagaatagacctgaagacaaaaatccagaagtacaagcagtctgttcaaggagcagggacaagttacaggaatgttctccaagcagcaatccaaaagagtctcaaggatccttcaaataacttcaggctccataatgggagaagtaaagaacaaagacttaaggaacagcttggcgctcaacaagaaccagtgaagaaatccattcaggaatcagaagcttttttgcctcagagcatacctgaagagagatacaagatgaagagcaagcccctaggaatctgcctgataatcgattgcattggcaatgagacagagcttcttcgagacaccttcacttccctgggctatgaagtccagaaattcttgcatctcagtatgcatggtatatcccagattcttggccaatttgcctgtatgcccgagcaccgagactacgacagctttgtgtgtgtcctggtgagccgaggaggctcccagagtgtgtatggtgtggatcagactcactcagggctccccctgcatcacatcaggaggatgttcatgggagattcatgcccttatctagcagggaagccaaagatgttttttattcagaactatgtggtgtcagagggccagctggaggacagcagcctcttggaggtggatgggccagcgatgaagaatgtggaattcaaggctcagaagcgagggctgtgcacagttcaccgagaagctgacttcttctggagcctgtgtactgcggacatgtccctgctggagcagtctcacagctcaccatccctgtacctgcagtgcctctcccagaaactgagacaagaaagggggacaattcccggaagtggaattacagagtcaaaggacatgcatttttcaagcctcggatgcatcttactagatgtcctatag

SEQ ID NO: 6302 - DNA, 6822 bp, Homo sapiens; identical to SEQ ID NO: 83

SEQ ID NO: 6303 - DNA, 11444 bp, Homo sapiens
cgccgccgccgccgccaccgcgggagccagagctgccgggaggagcggcatccgcgccagactggagcgggagggcggcggagggcagttgctgggaatttttcagccgagagggcgagcgatccggagagagaccccgagagcttgggagcggtagggcgtgcgagcgccgcagccagcggagcaaacctcgaaatagatctggaaagccaggctcccggaggaaatgggactgtgaacgaaccggagagcaagaagggaaggaagcgccgggattgctgatgtcagaggagcccggaaagtcgcgctggaaaaatctgaagacagccggggctctgcttcttcctcaggagagacaccgccggccgcccccacacgccccctcggcgcctccgggtgccccctgagagccggcgacagcgcccagccgggctgctgcggggcgacggaggactgaggggcgcgcggagcggagaccgaggagcgacttcaggaatacagataagtgtctggtggcttgacgtggattttaatgaatttggactccatgtggatttggtcgtctccctgattccgagctgcgggcagggagaggggcctcgcgccgccctcagcagccggcggcggccgaggtagaccgagcggggacggaaggacagaccgacgtcgccgagctggaatcatgtgagggccaaccggggaaggtggagcagatgagcacacacaggagccgtctcctcaccgccgcccctctcagcatggaacagaggcggccctggccccgggccctggaggtggacagccgctctgtggtcctgctctcagtggtctgggtgctgctggcccccccagcagccggcatgcctcagttcagcaccttccactctgagaatcgtgactggaccttcaaccacttgaccgtccaccaagggacgggggccgtctatgtgggggccatcaaccgggtctataagctgacaggcaacctgaccatccaggtggctcataagacagggccagaagaggacaacaagtcttgttacccgcccctcatcgtgcagccctgcagcgaagtgctcaccctcaccaacaatgtcaacaagctgctcatcattgactactctgagaaccgcctgctggcctgtgggagcctctaccagggggtctgcaagctgctgcggctggatgacctcttcatcctggtggagccatcccacaagaaggagcactacctgtccagtgtcaacaagacgggcaccatgtacggggtgattgtgcgctctgagggtgaggatggcaagctcttcatcggcacggctgtggatgggaagcaggattacttcccgaccctgtccagccggaagctgccccgagaccctgagtcctcagccatgctcgactatgagctacacagcgattttgtctcctctctcatcaagatcccttcagacaccctggccctggtctcccactttgacatcttctacatctacggctttgctagtgggggctttgtctactttctcactgtccagcccgagacccctgagggtgtggccatcaactccgctggagacctcttctacacctcacgcatcgtgcggctctgcaaggatgaccccaagttccactcatacgtgtccctgcccttcggctgcacccgggccggggtggaataccgcctcctgcaggctgcttacctggccaagcctggggactcactggcccaggccttcaatatcaccagccaggacgatgtactctttgccatcttctccaaagggcagaagcagtatcaccacccgcccgatgactctgccctgtgtgccttccctatccgggccatcaacttgcagatcaaggagcgcctgcagtcctgctaccagggcgagggcaacctggagctcaactggctgctggggaaggacgtccagtgcaccaaggcgcctgtccccatcgatgataacttctgtggactggacatcaaccagcccctgggaggctcaactccagtggagggcctgaccctgtacaccaccagcagggaccgcatgacctctgtggcctcctacgtttacaacggctacagcgtggtttttgtggggactaagagtggcaagctgaaaaagattcgggccgacggtcccccccatggtggggtccagtacgagatggtctctgtgctcaaggacggaagccccatcctccgggacatggccttctccattgatcagcgctacctgtacgtcatgtctgagagacaggtcaccagggtccccgtggagtcatgtgagcagtatacgacttgtggggagtgcctgagctctggggaccctcactgtggctggtgtgccctgcacaacatgtgctcccgcagggacaaatgccaacaggcctgggaacctaatcgatttgctgccagcatcagccagtgtgtgagccttgcagtgcatcccagcagcatctcagtatctgagcacagccggttgcttagcctggtagtgagtgatgctcctgatctatctgcgggtatcgcctgtgcctttgggaacctgacagaggtggaggggcaggtgtccgggagccaggtcatctgcatctcacctgggcccaaggatgtccctgtcatcccgctggatcaagactggtttgggctggagctacagctgaggtccaaggagacagggaagatatttgtcagcaccgagttcaagttttacaactgcagtgcccaccaactgtgcctgtcctgtgtcaacagcgccttccgctgccattggtgcaagtaccgcaacctctgcactcatgaccccaccacctgctccttccaggagggccggatcaatatttcagaggactgtccccagctggtgcccacagaggagatcttgattccagtcggggaggtaaagccaatcacccttaaggcgcgaaatctgccccagccgcagtccggccagcgaggctatgagtgtgtcctcaacatacaaggagccatccaccgggtccccgctctgcgcttcaacagctccagcgttcagtgtcagaacagctcgtaccagtatgatggcatggacatcagcaatctggccgtggatttcgctgtggtgtggaacggcaatttcatcattgacaaccctcaggacctgaaagtccatctctacaagtgtgcagcccagcgggagagctgcggcctctgcctcaaggccgaccggaagtttgagtgtggctggtgcagcggcgagcgcaggtgcaccctccaccagcactgtaccagcccttccagcccctggctcgactggtccagccacaatgtcaagtgctccaaccctcaaatcaccgagattttgacggtgtctggaccgccggaaggagggacgcgagtgaccatccatggcgtgaacctgggtctggacttctccgagatcgcccaccatgtgcaggtggctggggtgccctgcacgcccctcccaggggaatacatcatcgctgagcagattgtctgtgagatgggccatgccctcgtgggaaccacctccgggccagtacgcctgtgtattggcgagtgtaagccagagttcatgacgaagtcccatcagcagtacaccttcgtgaacccttctgtgctgtcactcaacccaatccgaggtcccgagtcaggaggcactatggtgaccattaccggccattaccttggggctgggagcagcgtggcagtctacctgggcaaccagacctgcgagttctacgggaggtcaatgagtgagatcgtgtgtgtctcacccccatcatccaatggccttggcccggtccctgtttctgtgagtgtcgaccgagcccatgtggatagcaacctgcagtttgagtacatagatgaccctcgggtccagcgcatcgagccagagtggagcattgccagtggccacacacccctgaccatcacaggcttcaacctggatgtcattcaggagccaaggatccgagtcaaattcaatggcaaagaatctgtcaatgtgtgtaaagttgtgaacacaaccaccctcacctgcctggcaccctctctgaccacggactaccgccctggcctggacactgtggaacgcccagatgagtttggatttgtctttaacaatgtccaatccttgctaatttacaacgacaccaagtttatctactaccccaacccgacctttgaactgcttagccctactggagtcttggatcaaaagccaggatcgcccatcattctgaagggcaaaaacctctgccctcctgcctctggaggggccaaactcaactacactgtgctcatcggagagaccccttgtgctgtcaccgtatctgagacccagcttctctgcgagcctcccaacctcaccgggcagcacaaggtcatggttcacgtgggcgggatggtgttctcgcctggctcggtgagtgtcatctcagacagcttgctgaccctgccagccatcgtcagcatcgcggccggcggcagcctcctcctcatcatcgtcatcatcgtcctcattgcctacaagcgcaagtctcgagaaaatgacctcactctcaagcggctgcaaatgcagatggacaatctggagtcccgtgtggccttggagtgcaaggaagcttttgctgagctccagacggatatcaatgagttgaccagtgacctggaccgctcaggaatcccttacctggactatcgtacctacgctatgcgagtcctgttcccgggcatcgaggaccaccccgtcctgcgggagctggaggtacaaggaaacgggcagcagcacgtggagaaggccctgaagctctttgcccagctcatcaacaacaaggtgttcctgctgaccttcatccgcaccctggagctgcagcgcagtttctccatgcgcgaccggggcaacgtggcttcgctcatcatgaccggcctgcagggccgcctggaatatgccactgatgtcctcaagcagctgctctctgacctcatcgataagaacctggagaacaagaaccaccccaagctgctactccggaggacagagtctgtggctgaaaagatgctgaccaattggttcgccttcctcctgcacaagttcctaaaggagtgcgcaggggagccactcttcatgctatactgtgccatcaagcagcagatggagaagggccccattgatgccatcacgggcgaggcccgctactccctgagcgaggacaagctcatccggcagcagatcgagtacaagaccctgatcctgaactgcgtcaaccctgacaacgagaacagtccagagatcccagtgaaggtgttaaactgtgacaccatcacacaggtcaaggagaagattcttgatgccgtgtataagaatgtgccctattcccagcggccgagggcagtggacatggacttggagtggcgccaaggccggatcgcccgggtcgtgctgcaagatgaggacatcaccaccaagattgagggtgactggaagcggctcaacacactgatgcattatcaggtgtcagacaggtcggtggtggctctggtccccaaacagacctcctcctacaacatccctgcctctgccagcatctcccggacgtccatcagcagatacgactcctccttcaggtatacgggcagccccgacagcctgcggtcccgggccccgatgatcaccccagacctggaaagtggggtcaaggtgtggcatctggtgaagaaccatgaccacggtgaccagaaggagggtgaccggggcagcaagatggtgtccgagatctacctgacccggctactggccaccaagggcaccctgcagaagtttgtggacgacttgtttgagaccttgttcagcactgtgcaccggggcagcgctctccccctggccatcaagtacatgtttgatttcctagatgagcaggcagacaggcacagcatccatgacacagatgtgcggcacacctggaaaagcaactgcctccctctgcgcttctgggtgaacgtgattaagaacccccagttcgtgtttgacatccacaagggcagcatcacggacgcctgcctctctgtggtggcccagaccttcatggactcttgttcaacgtcagagcaccggctgggcaaggactccccctccaacaagctgctctatgccaaggacatccccagctacaagagctgggtggagagatactacgcagacatcgccaagctcccagccatcagtgaccaggacatgaatgcctacctcgccgagcagtcccgcctgcacgccgtggagttcaacatgctgagtgccctcaatgagatctactcctatgtcagcaagtatagtgaggagctcatcggggccctagagcaggatgagcaggcacggcggcagcggctggcttataaggtggagcagctcattaatgccatgtccattgagagctgagaggaggagcctcgcattcctgggaagagggacctgtccaagctgtcacactgggagtctcagatggaaggacaagtgatggggatcaggccccagagcttgctgtcccctgagaccccatcctggggagaggggaggactcctctccctacgccagccaagtttcgtcatagccagttccagctgggagagacagtgggcgtcgtccatcctcagtgagaacaccagagaacccggggccgggagaaggtggttcttcaagccgagaggcacgagctggggacagttctgcctctgtgactgctgctttgcatgaaaactcatttgatgtatattggggaaataatgagaactttatttaatttttttaagaaaaagggaaaaaaacagaaataaaacaaaaagccgccctgttaatcccgtccaacttttgtttaattctgatttctgtctcccttccatcttttctcccattcctccttctttatataatgcctatttccaaatgccagagaaagcagagatgctgagagacattggagagaaaatgactgtctccttttccttgaaattaaaaaaaaaaaaaaaaagagaaagaggagaagaagaatgatgagcacaagtatgcaccaaacacttcgcaaaaacagaggccagtaaaacctggaattatcccggcagccagaggagtatggaacttccagaactttgcacaaattgcaaagccatcaagagctcaccctggctgactggaaactgagctttatctaccacacacctgtatattctcatcttttgagaggagatgtgtacctagatagtaccaatgctttttgctactgttttttgttttgttttatttaatcctaaacctcaacaaatgaggagctggtctttgatatgtttcctttcaatttccctaaagttactatgagaagtggggtgaggtgggcctctcccagaccagacacctggcagccctgcctcatatcaatccctgtcataaaccaggcaccctggggaaacggcctggaggtgtgtgggccaggcctccacgaggttccatttgaaagttgatttggagacataggtgtttgactttggagttcactccaatcatccagtggtccctggcaattaaaaagaaaacaaaaatcaaacactgtttacagcaagcaatacttgaagagcataggttacagaagctgcagtatttattattatgctttctttctttcattctctcgtgcctggagaggggagaccacccttcgctcatatacggaagctcctgaccatctgggcctacagcacttcctcagtagaaatgactgtggcatgcccacgttactaccttctgcctctctttctgcctctcacggacttgtgagtgtgaaggacaagtggatgacttctcactggactttccttctctgtctcttctgatgatgcctaaaactatggataaccaattctcctgagtgtagattccaaacaaagagaccaaagctccatgcccaggtccaaaggccccatagaagccagtgggagtcatcgagaggaaaggcgctctgtgagtgtcaggaccttggtggccaggatagccatcagagtgtccaggcctcccacattaccttggatccgagcagccagctccaactgttctgcaagcagcactggagtcagggggtaggaggacaagtggaagcaaaggtgtgggactggggaagacaaagaggaacaagctgcccttcctcacttttcaaagggtcaggaatcctaggctatgatgctgggaagctagaccagctcctccaagagagactagaccagggtcattttctctgttattaactctgggctccagcttctccgtgccctgctttacctccaagtggttccaatttccaaaggccctgctgaccacatgtgattcccaggagagggctgggggaggggagcgcagaggtctggcttccatccttggcgtgtagctttggatcgctgtctaaccacacagcagacgttgcccggtctccccagctctagtttcttgcctgaatgcggctgacaaatgggaagagaaaagcattcagcaaaatactcaggaaacttgctgttttcattataattcacaaccagccatgccaaggccactttcttttgaaaatccacttctttaaagtttctcaggccctattagtagcctgaaggaaatactaatgactggccttccgcactaagccaaagtgtttgctcttcatagcactcaaagcttatcagcgcagagcccataatttatggagataaaaggaaaggagatataggtaagaagagtgtgaccaggagaccttatgctacctgtaaaaaagttcagcccaccccatctaacttctgagctctgtttgggtgaagattttctggccgcatggctgctcagactggcatccaggctttgctccaccaagaagttaaaggcagtcggacatctcagtagcatctctaccagcccttaactcaatgcatctacctggcatctcccagcagttacttttggagacgattcactgcccctggggcgtttccttgaaggtttgtggagagcgtggagaatgatggggcaatggccaattggagggtggagagtgaagagccggagctggctgtgagtggtttggccacatttctcaggattccatgagagacttggggaacttgggctgacaaaggaagtagcctggggcatccttaaggaaggaattaagaaaagggaaaaagctggactcaagccacgccatgagggtgaaaggttataaggccctgccccctttccagctgcccacctgttcctcctccacacctcttcgctttgggccaccaagaaccaatgaagtccacaccctttggatgagaaaaagagggagttggttggcctctcttctccctgttatccaatttgaggatattttgaccttgggtaaggatgaagtgttaaagccacagctcctctccacaagaagccattcatcttgggggaggcagagagggaagtctctctccaaagtctatccagcttcgcttcgtttcattgatctgcacaagagacaatgctctggaaaaggaagaggaccccagaagggtgcttggcaagacagaggatgctaatgggcaatggagagcactccctccagctggcccctgctgctgcctcccgtcctctgcatggggtcaggtgcttctgtgcttgctgtcctacctctctccacagcagggctctcaaaaccattttgatcccccattggcagagggttcccctctttacagagttcagtcattaaaagcatggatcagctgttaatctcattggaggagggaactgtttcctgcattcattcatctgggaaccttcttgagtagccactgtctgccagccactgctctagagatgggaaaacagcacggaacaaaaccaaggtctttcttccagcgaatttatatccttcaggaagctggttcctgccaccaacttagcaggcaacagttctcctcccctagtggcacagggtaccagttttgtaggaaaagtggtccagcaaaggaagaaagcagaccaacccagctgccttaccttattctggggccattcccccagcgatgagagctgctcttgtttctactgccaccatctcttctggctgcacttcacctgctgcttgagcttctgaccttccttcagttccaccaaatgaggacaggaaatagcagtcaagacccctggccctgctgagcgtgaaacagaagcaatggatgagtgctggacgaagaatggcctgggcagaacaaatagggagcatttgaaagcttctggctgataaatctccaggtgcatcccggttgccacgcctgcccccattaacctgctcctggtaaatactgatccagcagctgctccaggagaggccgtctttttttcccagccacgctgtgtcttgcatgagactcctggggcctgggcacagagagaaaagaattgagactcaggaggctcagtgggtgagaaaatgcaaagtggcttcacagacacagggctgtgggagcagatcgacggggaacttgggagatgaacttcagggccttccgacgccttgtctcaggaacatgctttgagaaaaatggtagcatcctttccataactcagtctctcttccctagtttccctgaagtgtgacgttttagtatctggagctcagtgatccccatgaatgagggataaagtttcactcttggtattttctaactagtgctagggaaagtcctgagacacgatcacagccactgcttggcatacagggcctccacccaataagcaaactggagattcctcagcctctcgtggacacccacatctcattcttctcacagcagagaagctctcccttcagcctgagctgtcttctttctgctgcagtgcagcctgctccctcctaccctggcctcaaggaaggtaggaaacatcttctgcatttcaaagtcctcactttgacttatttggccttcatcttggcatggaaggtggcaggcagaatggaaatactccccccaaacagaacagatattcttgcgtgtgtaagggcagaagggacaagctctctatcccatgagactaggggccggagcccacctgcctttccccacaacttttcctgctcaaacccactcctcttgacacactggaatctgtattatatatatttttaagaaaatacaatgatggttgtctggttttgttgtttttacaggtgttgtggaataaaaactgtaagaaaattaagtatttaaaatgttccaataaagtggggttttttgttattctaatatattattgtgtacctattgtaaatatgaaacactcctattttgcaagctgaggacacaatttgtactgttgttatatataaataaagtttactgaattaaaaaaaccttaaatctttaaataaa

SEQ ID NO: 6304 - DNA, 3572 bp, Homo sapiens
gccccagcagccccagccccagccccaggcccagcagcagcagcagcagcccctgctctcccgccgcccggagaggctctgcagccatgaagccaaccgtcccgaggcaccgccggtaagcagggagcctccgcggagctcccgccgccgctcccccttggtgagtcctgccgcagcgagaggcatggagaaggccgcccccgcggggcgctgatcccctcgccgcgcccgcgcgcacacgccccccgccgccgccgccgctgccgccgccgcgcgcccccagtacctcgctccccgcccaggccccaccatgaccggctccgcggccgacactcaccgctgcccccaccccaaaggcgccaaaggcacccggtcccggagcagccacgcgcggcccgtgagcctcgccaccagcgggggctcagaggaggaggacaaagacggcggggtgctgttccacgtcaacaagagcggcttccccatcgacagccacacctgggagcgcatgtggatgcacgtggccaaggtgcaccctaaggggggagaaatggtgggcgccatcaggaacgccgccttcttggcaaagccttcaataccccaggtcccaaactacaggctgtcgatgacgatcccagactggctccaggcgatccagaattacatgaagaccctacactacttaaccaatgggcagccttccattgagcggttccccatcagctttaaaacctacttctcaggaaactactttcaccacgttgtgctggggatttactgcaatggccgctatggctcattgggcatgagccgcagggctgagctgatggacaagccattgacttttcggactctgagtgacctcatctttgactttgaggactcttacaagaaatacctgcacacagtcaagaaggtcaagattgggctgtacgtcccccatgagcctcatagcttccagcccattgagtggaagcagctggtcctcaacgtctcaaagatgctgagggctgacataaggaaggagctggagaaatatgccagggacatgagaatgaagatcctgaaacctgcaagtgcccactctccgacccaagtgagaagccggggaaaatccctgtcccccagaaggagacaggcaagccccccgaggaggctcggccggcgagagaagtcgcctgcactgcctgaaaagaaggtggctgatctgagcactctgaatgaagtgggctatcaaatccgaatttagccaagccataccggccagcaagagggtttctgtggtgcttctctctgcactttacccagcatcttcaggaggaactgcaactatttattaagaacttgtgaattttatttttaaggattcacctggaaatagaatctgagtgggtggtaaccattagctttaaaaaattcactaaaaggcaccatgaaaaggctgaagtaataagccccactggggttggactatgtccctcactcaagatcttaaggataaccgtaactgaagttttatatttttccatttacctactttcttttacttgctttgaacattatgcctcaccaatagtaaatgttcatgaaataatctcttgaacttttggtatagtaaggtaactctaacagtattactgtctttttcagcaataacagaaagcaaaaatgggtgggttttttttaagcagttattacctcagcattttgacatcagatatgcaaacttaatggcgttttgtttttttatattctatttgtattctttccccagtatttcccatggggatctccacaagtttggagttttttcctggtgcacacacgtgaggagatttaaggtactatatgcaagtgttttactaaaaagcactgaaattcttctggcaatacaagaaccattttcaggatcttggagttacttccttcttaatctttcttaaagcattcactgatgtttttgttttttcaaaatgaaacaaaaatatcacattgagaagctagtctatgttctgtcactaacatttaaactttgcagactctaacaaaaagcacaagaggtcacgtactattatacaaatttagcggtactggatttacctctgacattaacacactcaggcagagaccaggagtgatcagcaggtcttcagaaccaaaaaacctttctgttcacatttcatctgatttttaaactgaggcaggctttgattcttctgaaggatgccaagaatcaaactaagggaggactcactgttaaagatgtgttctgatgtcttatattaagaccaaatgtgacatgatgtgattatcttccagtactttgcttttaggtaccatttcatgacattttaggaatgagtattggaaaatataaagaattagaaaagcagcactttttttttaatggaaaagtcttcggtccagtgttacaccttatagtgtaattcagtccctaagcacagaatgaatgtctggcctgcatatggtagttacagtgtaacctctggctgcagaccacacaggacaaccctaacagcctagtcttgtatggtgtaaatatcaagagtacagcttcaatttcatttgctttatcttagcaacaatgccaactcaggagagcagacggccgatttcagtgaagtctggtagtcaacagatgttatttcagtctcagtgcatctcctctggctttctttgactgaaggtgtttataggaaggaagttaaaaaaaaaaaaagctcattgagattctttaccaattctttacaagatttctgggggtgacagggaaagcaaaaggacttcaaagcaaaagggtgcacaagagcttacttcaccctgaaaatcagtattattaatgaaaagtactgttttcttaaagaagtcgaatgtcctttagatgaacaagaccaagtatacatctccattagattaaaatgtagcacagggttaaaaattatcagtttaatctctttaagaacagtattatcagagtttaaaatgagttagctctgtttatctacacacagcaaacccattcgcagcctcttggccacatgtattcagatgtttgaaatagtgaatcatttcattttcattctaaaacaatactgacttagccatataccttctgtttgtcaatctgaaacttgcttacatctaataagtagacctcttataacactgcaaccattctaagagttggaatttatttttgccaagtattaagtactgttacatctaaaatacagaatgtcaaatggttgcatagcttgtttcccacaacaaggaggaaaagaacaggaatacaaactctgtaatatgctgataaagaagccttagaactgccaactggcttgatggttcaattagtaagctaatttctcccacacccgctccttgatttttagactaattttcccaaagcaaggtttagtcacacaaacttgaaagtacatttaaaatgttcttagttgtcatcctacttttattgcctatggaatatgctaatttctaaaaaaaatacgggagaggcaccaaacccctaaattctagtgcaataatttaaaaaa

SEQ ID NO: 6305 - DNA, 4744 bp, Homo sapiens
gcggtggtggacacgtcgagccgggtagaagtggaggggccgttcgaagagtcgtgagggggtgacgggttaagattcggagagagaggtgctagtggctggacttgacctggaaagaatcttctgctgactctcaacttttcctggaaaaaatggatcattcccaccatatggggatgagctatatggactccaacagtaccatgcaaccttctcaccatcacccaaccacttcagcctcacactcccatggtggaggagacagcagcatgatgatgatgcctatgaccttctactttggctttaagaatgtggaactactgttttccggtttggtgatcaatacagctggagaaatggctggagcttttgtggcagtgtttttactagcaatgttctatgaaggactcaagatagcccgagagagcctgctgcgtaagtcacaagtcagcattcgctacaattccatgcctgtcccaggaccaaatggaaccatccttatggagacacacaaaactgttgggcaacagatgctgagctttcctcacctcctgcaaacagtgctgcacatcatccaggtggtcataagctacttcctcatgctcatcttcatgacctacaacgggtacctctgcattgcagtagcagcaggggccggtacaggatacttcctcttcagctggaagaaggcagtggtagtggatatcacagagcattgccattgacatcaaactctatggcgtggccttatcgattgcagtgggaagttgttgaagacttgaagacgtgattcctgctccaatcatcccttcttgctcctctttgtgcacgtacacacacacacacacacacacacacacacacccctgctcaacagaggtttagtttacagtctctgaactaaagtagtaacctcccaaattgttttttctaataagctgagattcccatttctcttaaggagaagccacccatgagatgtcttttccttctccatcatcttagagccaagttatatgttcttgtctaatccatgtagctttttgttcaatgacttgatcatctgcttcctttttgaatttttaacagatagtaagtaaatttggtggttttttcccctgggtcagtgatggaaaggggttaacttcagccaggattgatggcagctgagggaaattcttgcccaactaaacccagaactcaaacttaacattagaaaataaggtccagggccggacacagtggcccatgcctgtaatcccagcactttggggggccaaggcaggctggatcacctgaggacaggagttcgagaccagtctggccaacatggggaaaccccgtctctactaaaaatacaaaaattagccgggcatggtggtgggcgcctgtaatcccagctactcagaaggctgaggcaggagaatcacttgaacctaggaggcggaggttgcagtgagccaagatggcgccattgcactccagcctgggtgacaagagtgaaactccatctcaaaaaaaaagaaaagaaggtccagcttttggattcaatgagtgggaaatacattgtgcctttctctagatgtgatacgttataccaaaatctttgtagtgtgcagagcggtggtttgagactaaatacaggcttagaacttgcagagtgtgtattcttggatggctgatgcatcgacttgcattcccacttaacactttgattagcatgaacttgccaatcaaaaaatgacaatcaatttgagaaaatagaaatagatatttttaaataaaaccattcacagtttactttgtcttgataccttggtttgtcccagctgaagtgaagcaagagagtttgaattaatttttccattataatgttttcgcatgtctgcctctaaaactgtgattttcaagctttagcgtgcatcagaatcacctgtagggcttgttaaaacactaattgctgggcctcaacccaaaagcccccaaagtggcacttctgagttcctgctgatgttacaagggaccacacttttgagaatctgtgctttaagctaaggaaatattgcctggtgggttggctgcctggtattgggcatggaaatttgaattgctgattggtagatggtgtgtctggacttaactcacgtagtaaatactgctgatcaatacctaatcattccacatttattgagctccacctgtgtgtatgtgtacccaagcacacatgtgtgaagggctatagccaaagtatttttactagcctgtatgaaatcactagtccttatttttaaaggtctatggtttcttggaagtagtttgattgttgagagagacctttgatctgcagtgtaaatctaccagtcatgggccagaagggcaaaagcccagctttctctttggaaagactcaggctgtggtttgttgatggccaggttttcctcaggctccaacaactgtgcttataccaagcagatcctcatcctccatataatcatctttgttattcgtgggggtttaattacattacaagtggccaaaacccctgttctcagtgaagaaccacattggatttgtattctgttcagttgtagtctacactgcagtcttattcctggttcaaactacctctttaaattgatttgtcttgtgctggtctgttaaatcctgccctccttggtgctagatccagttgtgcctcagggcagaggaaacaaaacacagctatcctgttggcctgtgttgtggttttgaagtttgtactttctctgtgggtgccagttaaatattggagagcaaggaatgtggacttgtatggctttgaaccaagagagggttatgagcctactggattgaggttaaaatccaagaaccaacatttagagctttgtgcttttctctcattccatcactttgtaatgatgatacttaacatgagcagggtgaatgacaggtactgacgaagtccaacacaaaggtataatacagcctgttgtctaaagccaaggagtcataaaaccatgagaaataaataggaatcaatagttagtagtgacattggtgctctctagaaatctcagcatgagctgctatagaataccctcccagcaacaaaacctaatcagtaaggccagctagacccaatggctcatgcctgtaatcccaacactttgggaggccaaggtgggaggatggcttgtgtccagaagttcgagaccagcctggacaacatagtgagatcctatctctataaaaaatcaaaaattagccaggcatggtggtgcatacctatagtcctggctatttgggaggctgaggcaggaggattgctttagccctggaggtcgaggctgcagtaagccatgattgcgccactgcactcagcccgggtgacaaagcaagaccctgtctcagaaaaaaagaaaattcaaggccagttaagacaaaatgctatgactttgaaattcacagaaagaaataacagtttagattaggtcttcaggtattcaggatagagataatctcctgaaaaacctgaatttcagagattcttagactggctgccaaaggatgaagctagtgaaggagaaaaagcttaaattccatcttgagctcttggattgtgataatacaatgatttcattaacttttcatttctgtatacctgttcatttggaatttaatgcttgacttctttgttcattttggatctaaacttctcttttcttccttccccattcacatctattagaagactgcatcaccatttctttggcccccttactctgttgtcctttcccttttctttcagtttttttaatcgcatgtctagtatattaagtctccatagccctcctgatgcagtagacagtgctatgctgtggatataataccaaccagaaattggcatttataaacctgttaagagactttaagcatgcttcaagaggcagttgacccactggaatttctataaggctggtacccttcccagagttacagaatcttaggtgccgtctctagtctgtgagggaggaactcccagcatccccattgcccacaaatggaatcctcactgtatccactaggagattagaaattaaggtttcttcactacttctatggtagggttgtctgaaattccctttcaggctgtgggtactggtcttgggttctagtcataaggggttccttataaggagcaggcggaggggagtacactttcatgtgatttaattttgatcctgccctctccagctgctccttcaaaagatacatcaaaagatagaaactctgggctgggcacagtggctcacacactttgggaggccaagcgggggtgcagatcacctgaggtcaggagtttgagaccagcctggccaatgtggtgaaaccccatctctactaaaaatacaaaaattagctgggcgtggtggtgcatgcctgtaatcccagctactcgggaggctgaggcaggagaatcgcttgaacccaggaggcggaggttgcagtgagccaagatggcgccattgcactccagcctgggcgacaagagcaaaactccgtctcaaaaaaaaaaaaaagatacaaagtctgcatttgatataatgccttaattactgggtctacaattaatgttgactgttttagattgtaagctcctggagagcagtattgctgtagtaggaatgttttaacagtgtcatatgaaaaagaacaaaataaatattttgattttgtgattcta

SEQ ID NO: 6306 - DNA, 932 bp, Homo sapiens
aggaggtgcgtcctgctgcctgccccggtcactctggctccccagctcaaggtcccccacggcccttcaggatgaaagctgcggtgctgaccttggccgtgctcttcctgacggggagccaggctcggcatttctggcagcaagatgaacccccccagagcccctgggatcgagtgaaggacctggccactgtgtacgtggatgtgctcaaagacagcggcagagactatgtgtcccagtttgaaggctccgccttgggaaaacagctaaacctaaagctccttgacaactgggacagcgtgacctccaccttcagcaagctgcgcgaacagctcggccctgtgacccaggagttctgggataacctggaaaaggagacagagggcctgaggcaggagatgagcaaggatctggaggaggtgaaggccaaggtgcagccctacctggacgacttccagaagaagtggcaggaggagatggagctctaccgccagaaggtggagccgctgcgcgcagagctccaagagggcgcgcgccagaagctgcacgagctgcaagagaagctgagcccactgggcgaggagatgcgcgaccgcgcgcgcgcccatgtggacgcgctgcgcacgcatctggccccctacagcgacgagctgcgccagcgcttggccgcgcgccttgaggctctcaaggagaacggcggcgccagactggccgagtaccacgccaaggccaccgagcatctgagcacgctcagcgagaaggccaagcccgcgctcgaggacctccgccaaggcctgctgcccgtgctggagagcttcaaggtcagcttcctgagcgctctcgaggagtacactaagaagctcaacacccagtgaggcgcccgccgccgccccccttcccggtgctcagaataaacgtttccaaagtgggaa

SEQ ID NO: 6307 - DNA, 2403 bp, Homo sapiens
ggctgataagcgaggcattagtgagattgagagagactttaccccgccgtggtggttggagggcgcgcagtagagcagcagcacaggcgcgggtcccgggaggccggctctgctcgcgccgagatgtggaatctccttcacgaaaccgactcggctgtggccaccgcgcgccgcccgcgctggctgtgcgctggggcgctggtgctggcgggtggcttctttctcctcggcttcctcttcgggtggtttataaaatcctccaatgaagctactaacattactccaaagcataatatgaaagcatttttggatgaattgaaagctgagaacatcaagaagttcttatataattttacacagataccacatttagcaggaacagaacaaaactttcagcttgcaaagcaaattcaatcccagtggaaagaatttggcctggattctgttgagctagcacattatgatgtcctgttgtcctacccaaataagactcatcccaactacatctcaataattaatgaagatggaaatgagattttcaacacatcattatttgaaccacctcctccaggatatgaaaatgtttcggatattgtaccacctttcagtgctttctctcctcaaggaatgccagagggcgatctagtgtatgttaactatgcacgaactgaagacttctttaaattggaacgggacatgaaaatcaattgctctgggaaaattgtaattgccagatatgggaaagttttcagaggaaataaggttaaaaatgcccagctggcaggggccaaaggagtcattctctactccgaccctgctgactactttgctcctggggtgaagtcctatccagatggttggaatcttcctggaggtggtgtccagcgtggaaatatcctaaatctgaatggtgcaggagaccctctcacaccaggttacccagcaaatgaatatgcttataggcgtggaattgcagaggctgttggtcttccaagtattcctgttcatccaattggatactatgatgcacagaagctcctagaaaaaatgggtggctcagcaccaccagatagcagctggagaggaagtctcaaagtgccctacaatgttggacctggctttactggaaacttttctacacaaaaagtcaagatgcacatccactctaccaatgaagtgacaagaatttacaatgtgataggtactctcagaggagcagtggaaccagacagatatgtcattctgggaggtcaccgggactcatgggtgtttggtggtattgaccctcagagtggagcagctgttgttcatgaaattgtgaggagctttggaacactgaaaaaggaagggtggagacctagaagaacaattttgtttgcaagctgggatgcagaagaatttggtcttcttggttctactgagtgggcagaggagaattcaagactccttcaagagcgtggcgtggcttatattaatgctgactcatctatagaaggaaactacactctgagagttgattgtacaccgctgatgtacagcttggtacacaacctaacaaaagagctgaaaagccctgatgaaggctttgaaggcaaatctctttatgaaagttggactaaaaaaagtccttccccagagttcagtggcatgcccaggataagcaaattgggatctggaaatgattttgaggtgttcttccaacgacttggaattgcttcaggcagagcacggtatactaaaaattgggaaacaaacaaattcagcggctatccactgtatcacagtgtctatgaaacatatgagttggtggaaaagttttatgatccaatgtttaaatatcacctcactgtggcccaggttcgaggagggatggtgtttgagctagccaattccatagtgctcccttttgattgtcgagattatgctgtagttttaagaaagtatgctgacaaaatctacagtatttctatgaaacatccacaggaaatgaagacatacagtgtatcatttgattcacttttttctgcagtaaagaattttacagaaattgcttccaagttcagtgagagactccaggactttgacaaaagcaagcatgtcatctatgctccaagcagccacaacaagtatgcaggggagtcattcccaggaatttatgatgctctgtttgatattgaaagcaaagtggacccttccaaggcctggggagaagtgaagagacagatttatgttgcagccttcacagtgcaggcagctgcagagactttgagtgaagtagcctaagaggattctttagagaatccgtattgaatttgtgtggtatgtcactcagaaagaatcgtaatgggtatattgataaattttaaaattggtatatttgaaataaagttgaatattatatat

SEQ ID NO: 6308 - DNA, 2321 bp, Homo sapiens
gcccgggccagggtccacctgtccccgcagcgccggctcgcgccctcctgccgcagccaccgagccgccgtctagcgccccgacctcgccaccatgagagccctgctggcgcgcctgcttctctgcgtcctggtcgtgagcgactccaaaggcagcaatgaacttcatcaagttccatcgaactgtgactgtctaaatggaggaacatgtgtgtccaacaagtacttctccaacattcactggtgcaactgcccaaagaaattcggagggcagcactgtgaaatagataagtcaaaaacctgctatgaggggaatggtcacttttaccgaggaaaggccagcactgacaccatgggccggccctgcctgccctggaactctgccactgtccttcagcaaacgtaccatgcccacagatctgatgctcttcagctgggcctggggaaacataattactgcaggaacccagacaaccggaggcgaccctggtgctatgtgcaggtgggcctaaagctgcttgtccaagagtgcatggtgcatgactgcgcagatggaaaaaagccctcctctcctccagaagaattaaaatttcagtgtggccaaaagactctgaggccccgctttaagattattgggggagaattcaccaccatcgagaaccagccctggtttgcggccatctacaggaggcaccgggggggctctgtcacctacgtgtgtggaggcagcctcatcagcccttgctgggtgatcagcgccacacactgcttcattgattacccaaagaaggaggactacatcgtctacctgggtcgctcaaggcttaactccaacacgcaaggggagatgaagtttgaggtggaaaacctcatcctacacaaggactacagcgctgacacgcttgctcaccacaacgacattgccttgctgaagatccgttccaaggagggcaggtgtgcgcagccatcccggactatacagaccatctgcctgccctcgatgtataacgatccccagtttggcacaagctgtgagatcactggctttggaaaagagaattctaccgactatctctatccggagcagctgaaaatgactgttgtgaagctgatttcccaccgggagtgtcagcagccccactactacggctctgaagtcaccaccaaaatgctgtgtgctgctgacccacagtggaaaacagattcctgccagggagactcagggggacccctcgtctgttccctccaaggccgcatgactttgactggaattgtgagctggggccgtggatgtgccctgaaggacaagccaggcgtctacacgagagtctcacacttcttaccctggatccgcagtcacaccaaggaagagaatggcctggccctctgagggtccccagggaggaaacgggcaccacccgctttcttgctggttgtcatttttgcagtagagtcatctccatcagctgtaagaagagactgggaagataggctctgcacagatggatttgcctgtgccacccaccagggcgaacgacaatagctttaccctcaggcataggcctgggtgctggctgcccagacccctctggccaggatggaggggtggtcctgactcaacatgttactgaccagcaacttgtctttttctggactgaagcctgcaggagttaaaaagggcagggcatctcctgtgcatgggtgaagggagagccagctcccccgacggtgggcatttgtgaggcccatggttgagaaatgaataatttcccaattaggaagtgtaacagctgaggtctcttgagggagcttagccaatgtgggagcagcggtttggggagcagagacactaacgacttcagggcagggctctgatattccatgaatgtatcaggaaatatatatgtgtgtgtatgtttgcacacttgtgtgtgggctgtgagtgtaagtgtgagtaagagctggtgtctgattgttaagtctaaatatttccttaaactgtgtggactgtgatgccacacagagtggtctttctggagaggttataggtcactcctggggcctcttgggtcccccacgtgacagtgcctgggaatgtattattctgcagcatgacctgtgaccagcactgtctcagtttcactttcacatagatgtccctttcttggccagttatcccttccttttagcctagttcatccaatcctcactgggtggggtgaggaccactcctgtacactgaatatttatatttcactatttttatttatatttttgtaattttaaataaaagtgatcaataaaatgtgatttttctgatga

SEQ ID NO: 6309 - DNA, 2654 bp, Homo sapiens
gggaaatggctttaattctgacggcagggctgtgagggactagcgggaacccgagccttttgtcaaggaactgcggcgtcggtggccagtcatccccgccgccgcggagccgctgcactgctgggggatctcccagcagctctgacgagcgcgggctgcagcatgggcagaaaacgctgccctgcagattagctgggtggattttttaagcgcaccccaccccccaaacccataaaataacaaaaccaacccgcagtggccgaccggagatagctaagatgccgcgcaggagtttccacctggatgtttgaggttgtgtagatgtggccggcacccttgagagtggagctagggggtgcagactgagcagtgaacagaaggagccttggacagggctgggccagcctcccgagttccaggagcgaattgcaaacccaccgggaaaatgagcgaagagacggtccccgaggctgcctcgccgccgcccccgcaggggcagccttactttgaccgcttctcagaggacgaccccgagtacatgcgccttcgcaaccgggcggcggacctgcggcaggacttcaacctgatggagcagaagaagcgcgtcaccatgatcctgcagagtccctctttcagggaggagctggaaggcctcatccaggagcagatgaagaaggggaacaactcctccaacatctgggccctgcgacagatcgcggacttcatggccagcacctcccacgcagtcttcccgacatcttccatgaatgtctccatgatgacgcctatcaatgacctccacacagctgactccctgaacctggccaaaggggagcggctcatgcggtgcaagatcagcagtgtctaccgactcctggacctctatggctgggcccagctgagtgacacctatgtcacgttgagagtcagcaaggagcaggaccacttcctgatcagccctaagggagtttcttgcagtgaagtcacagcgtccagcctgatcaaggtgaacattctgggagaggtggtggagaagggcagcagctgcttcccagtggacaccacaggcttctgtctgcactcggccatctatgcagcgaggcccgacgtgcgctgcatcatccacctgcacacaccggccacagcagcggtgtcggccatgaagtggggcctcctgcctgtctcccacaatgccctgctggtgggggacatggcctattatgacttcaatggggaaatggagcaggaagccgatcggatcaacctgcagaagtgccttggacccacctgcaagatcctggtgctaagaaaccatggagtggttgctctgggtgacacggtagaggaggcattttacaagatcttccacctgcaggctgcatgtgagatacaggtgtcggctctgtccagtgccgggggagtggagaacctcatcctcctggagcaggagaagcaccggccccatgaggtgggctccgtgcagtgggccgggagcacctttgggcctatgcagaagagtcggctgggggagcatgagtttgaggccctcatgaggatgctggacaacctgggctacagaacaggttacacgtatcgccacccctttgttcaagagaaaaccaaacacaaaagtgaggtggagattccagccacggtcacagccttcgtgtttgaggaggacggtgccccggtgcccgccctgcgacagcatgcccagaagcagcagaaggagaagacccgctggctcaatacgcccaacacctacctgcgggtcaatgtggccgatgaggtccagaggagcatgggcagcccccgacccaagaccacgtggatgaaggctgacgaggtggagaaatccagcagtggcatgccgattcgcatcgaaaacccaaaccaatttgtgcctctctatactgacccccaggaagtactggagatgaggaacaagattcgagaacaaaaccgacaagatgtgaagtcagcggggcctcagtcccagctcctggcgagcgtcattgccgagaagagccgaagcccgtctacagagagccagctgatgtccaagggagacgaggataccaaagacgattcagaggagacggtgcccaaccccttcagccaactcactgaccaggagttggaggagtacaagaaagaggtggagaggaagaaactagaacttgatgagacaggacaggaacgagagccaggctctggtccggccgtgtgcgagttcttcagcgttgccctccacatctggagtaacatattggagagaaagaaactgccccagaagagcctggctcacctgcaaagtctgcacctgcttctccagtgcagagcccagcgaaggaggcagagacaaagagccctttagtctctccttccaagtctttagaggaaggtactaagaagacagaaacaagcaaagccgccaccacagagcccgaaacaacccagccggaaggggtggtggtcaacgggagggaggaggagcagacggcagaggaaatcctcagcaaaggcctgagccagatgaccaccagtgctgacacggatgttgatacctctaaggacaaaaccgagtcggtcaccagcggccccatgtccccagagggctcaccttccaagtctccctcaaagaagaaaaagaa

SEQ ID NO: 6310 - DNA, 1300 bp, Homo sapiens
gtgtatgcatgtgtgtgtgtgtgtgtgtacatgcatgtgtgtgtggatgcatgcatgtgctgtgaagcagggagactagctttccactcctccttgtcttctctctgcagtgccctgggagctgtcattgccctcctgctctggggacagctttttgcagtggactcaggcaatgatgtcacggatatcgcagatgacggctgcccgaagccccccgagattgcacatggctatgtggagcactcggttcgctaccagtgtaagaactactacaaactgcgcacagaaggagatggagtatacaccttaaatgataagaagcagtggataaataaggctgttggagataaacttcctgaatgtgaagcagtatgtgggaagcccaagaatccggcaaacccagtgcagcggatcctgggtggacacctggatgccaaaggcagctttccctggcaggctaagatggtttcccaccataatctcaccacaggtgccacgctgatcaatgaacaatggctgctgaccacggctaaaaatctcttcctgaaccattcagaaaatgcaacagcgaaagacattgcccctactttaacactctatgtggggaaaaagcagcttgtagagattgagaaggttgttctacaccctaactactcccaggtagatattgggctcatcaaactcaaacagaaggtgtctgttaatgagagagtgatgcccatctgcctaccttcaaaggattatgcagaagtagggcgtgtgggttatgtttctggctgggggcgaaatgccaattttaaatttactgaccatctgaagtatgtcatgctgcctgtggctgaccaagaccaatgcataaggcattatgaaggcagcacagtccccgaaaagaagacaccgaagagccctgtaggggtgcagcccatactgaatgaacacaccttctgtgctggcatgtctaagtaccaagaagacacctgctatggcgatgcgggcagtgcctttgccgttcacgacctggaggaggacacctggtatgcgactgggatcttaagctttgataagagctgtgctgtggctgagtatggtgtgtatgtgaaggtgacttccatccaggactgggttcagaagaccatagctgagaactaatgcaaggctggccggaagcccttgcctgaaagcaagatttcagcctggaagagggcaaagtggacgggagtggacaggagtggatgcgataagatgtggtttgaagctgatgggtgccagccctgcattgctgagtcaatcaataaagagc

SEQ ID NO: 6311 - DNA, 3144 bp, Homo sapiens
ccgcggacctgtcagagatacagaggttgtgggggcgggagacagaaagagagagagatccagagaccgagtcttacgttgacacgcagagagaaagacgcagagacagacaaacaaacagataggagaggctctccaggaggccggggggcccactccgcctatcgctcccctcggctacgctgccacttcaatgccccgcaggtcgcgagctgctgttctttcgaaggcgtcggagaaccaggggcgtcccgcgccacctctgactcggagcagcgccgagcactgacgctcccgcccttgggcaaggacgccagtgcgcccgcgcgcgtccctctgcgcggcagcccgtcgcgggccctcaaggggaagcccaggccaggatggccccgggtcgcgcggtggccgggctcctgttgctggcggccgccggcctcggaggagtggcggaggggccagggctagccttcagcgaggatgtgctgagcgtgttcggcgcgaatctgagcctgtcggcggcgcagctccagcacttgctggagcagatgggagccgcctcccgcgtgggcgtcccggagcctggccagctgcacttcaaccagtgtttaactgctgaagagatcttttcccttcatggcttttcaaatgctacccaaataaccagctccaaattctctgtcatctgtccagcagtcttacagcaattgaactttcacccatgtgaggatcggcccaagcacaaaacaagaccaagtcattcagaagtttggggatatggattcctgtcagtgacgattattaatctggcatctctcctcggattgattttgactccactgataaagaaatcttatttcccaaagattttgaccttttttgtggggctggctattgggactcttttttcaaatgcaattttccaacttattccagaggcatttggatttgatcccaaagtcgacagttatgttgagaaggcagttgctgtgtttggtggattttacctacttttcttttttgaaagaatgctaaagatgttattaaagacatatggtcagaatggtcatacccactttggaaatgataactttggtcctcaagaaaaaactcatcaacctaaagcattacctgccatcaatggtgtgacatgctatgcaaatcctgctgtcacagaagctaatggacatatccattttgataatgtcagtgtggtatctctacaggatggaaaaaaagagccaagttcatgtacctgtttgaaggggcccaaactgtcagaaatagggacgattgcctggatgataacgctctgcgatgccctccacaatttcatcgatggcctggcgattggggcttcctgcaccttgtctctccttcagggactcagtacttccatagcaatcctatgtgaggagtttccccacgagttaggagactttgtgatcctactcaatgcagggatgagcactcgacaagccttgctattcaacttcctttctgcatgttcctgctatgttgggctagcttttggcattttggtgggcaacaatttcgctccaaatattatatttgcacttgctggaggcatgttcctctatatttctctggcagatatgtttccagagatgaatgatatgctgagagaaaaggtaactggaagaaaaaccgatttcaccttcttcatgattcagaatgctggaatgttaactggattcacagccattctactcattaccttgtatgcaggagaaatcgaattggagtaatagaaaatggaagatggtgttgttaataaaggcatttaatagataaaaacatctccaaaaaggattttgaagctgatcctatttagttaaaaagataattttgctttcaactgtaggtccagaaaactaattattggcatcagtctgtgaaatagtccattatttgttgttaaaaatgcttcaaaaggttttcagtgtcagtctgagatgcctggtatataggagcctttgggaaatacctatttttcagtattccatgcatattagatatcaccatgaagcaagagacatgcattctataatcatgtagacactcagactcaggggaaaatacaagttatatcctgaaagcctttaaaactctatggtaggatcaaagattcaaatggtttcagagaggttttatttcaattaatttgttctagtgctttcaagagcaagtacatcaaaatgtagaaggtaaaatgtatgcaacactaatataaattattccaagtctttaaggagccaaagaaaaaaaagatttctcacagctttttgttctgttttgtatttcaattaggaacttgcagtattattttgaaaaccattctaaaataataggagttaggaaataaataaagttttgctagccctgctaagttcaggcttagaggcttatcgctaagtataaacttcaccagattccacgaaaagctggatagctttttttctgacttatgttgtggttgcacccctcacaaatggcagaacagtatgtaaagctggtaacacctcggtttcagtgcaccatgtgtttgctttgtgaaggtgaagaatatgttggtttagagaaagaaattggatgtaattttatgcaatttacttttaaagacaaacataactatttagcagagaatattttaataaatgcaaaacaacagctggactgctgtacatcaaggacagattaactggaaaacatatgttccttatgtgtgatcgagagccattcagaaaagacttcctttgtgttcagcctatacttttccatatggtataccttgaaaaaaattagcacaccatggttatttttctaccttttataaaagacagagcctgtttactcatttagaagatagagaaaattggtctaaaattgaacatcctagattcacactcccaagtcacttaaggtgatttgatggtgaggaaaatgattgacaaagcccaacaatgatctcaggaattacattttccaacagaccaaaaaatgttttcatgtagcagcaatgcagatttggtgaatatttaatatatattttagtatgtatttcactttatgactgacaattaaaaaatattgtttggccaaatagtaaacacccttttgaaacca

SEQ ID NO: 6312 - DNA, 6228 bp, Homo sapiens
agccagaggggatagcttcgtcgagaacggaggacaccggcggtccagggtcctgggcagtcgcgccagagctgagcggagggcgcggcgcgagaacgaatctttgtgacattctctctcagcattctttatcccctgtttgctgaagacttcgacaaaagctggtcttagctgttggcattctcctgagaaaaggatagcttcagaaatcagaaaaacatttgggaggtgtctagcccagtggaccttctgaagagcaatgctaagaagacgtttggtttaaagaattaaaaggaagaacaacttaagagcttcttcaaagtttcccgcatgaaaattacttaaacgttgcacacaacgtttcacaaaatcttttgtgaaagaagaaaaggaaattcagtgtgtgagtctcagcaggagttaagctaatgcagcttaaaataatgccgaaaaagaagcgcttatctgcgggcagagtgcccctgattctcttcctgtgccagatgattagtgcactggaagtacctcttgatctggtacagcctccaaccatcacccaacagtctccaaaagattacattattgaccctcgggagaatattgtaatccagtgtgaagccaaagggaaaccgcccccaagcttttcctggacccgtaatgggactcattttgacatcgataaagaccctctggtcaccatgaagcctggcacaggaacgctcataattaacatcatgagcgaagggaaagctgagacctatgaaggagtctatcagtgtacagcaaggaacgaacgcggagctgcagtttctaataacattgttgtccgcccatccagatcaccattgtggaccaaagaaaaacttgaaccaatcacacttcaaagtggtcagtctttagtacttccctgcagacccccaattggattaccaccacctataatattttggatggataattcctttcaaagacttccacaaagtgagagagtttctcaaggtttgaatggggacctttatttttccaatgtcctcccagaggacacccgcgaagactatatctgttatgctagatttaatcatactcaaaccatacagcagaagcaacctatttctgtgaaggtgatttcagtggatgaattgaatgacactatagctgctaatttgagtgacactgagttttatggtgctaaatcaagtagagagaggccaccaacatttttaactccagaaggcaatgcaagtaacaaagaggaattaagaggaaatgtgctttcactggagtgcattgcagaaggactgcctaccccaattatttactgggcaaaggaagatggaatgctacccaaaaacaggacagtttataagaactttgagaaaaccttgcagatcattcatgtttcagaagcagactctggaaattaccaatgtatagcaaaaaacgcattaggagccatccaccataccatttctgttagagttaaagcggctccatactggatcacagcccctcaaaatcttgtgctgtccccaggagaggatgggaccttgatctgcagagctaatggcaaccccaaacccagaattagctggttaacaaatggagtcccaatagaaattgcccctgatgaccccagcagaaaaatagatggcgataccattattttttcaaatgttcaagaaagatcaagtgcagtctatcagtgcaatgcctctaatgaatatggatatttactggcaaacgcatttgtaaatgtgctggctgagccaccacgaatcctcacacctgcaaacacactctaccaggtcattgcaaacaggcctgctttactagactgtgccttctttgggtctcctctcccaaccatcgagtggtttaaaggagctaaaggaagtgctcttcatgaagatatttatgttttacatgaaaatggaactttggaaattcctgtggcccaaaaggacagtacaggaacttatacgtgtgttgcaaggaataaattagggatggcgaagaatgaagttcacttagaaatcaaagatcctacatggatcgttaaacagcccgaatatgcagttgtgcaaagagggagcatggtgtcctttgaatgcaaagtgaaacatgatcacaccttatccctcactgtcctgtggctgaaggacaacagggaactgcccagtgatgaaaggttcactgttgacaaggatcatctagtggtagctgatgtcagtgacgatgacagcgggacctacacgtgtgtggccaacaccactctggacagcgtctccgccagcgctgtgcttagcgttgttgatgtcccaaatcctccctttgacttagaactgacagatcaacttgacaaaagtgttcagctgtcatggaccccaggcgatgacaacaatagccccattacaaaattcatcatcgaatatgaagatgcaatgcacaagccagggctgtggcaccaccaaactgaagtttctggaacacagaccacagcccagctgaagctgtctccttacgtgaactactccttccgcgtgatggcagtgaacagcattgggaagagcttgcccagcgaggcgtctgagcagtatttgacgaaagcctcagaaccagataaaaaccccacagctgtggaaggactgggatcagagcctgataatttggtgattacgtggaagcccttgaatggtttcgaatctaatgggccaggccttcagtacaaagttagctggcgccagaaagatggtgatgatgaatggacatctgtggttgtggcaaatgtatccaaatatattgtctcaggcacgccaacctttgttccatacctgatcaaagttcaggccctgaatgacatggggtttgcccccgagccagctgtagtcatgggacattctggagaagacctcccaatggtggctcctgggaacgtgcgtgtgaatgtggtgaacagtaccttagccgaggtgcactgggacccagtacctctgaaaagcatccgaggacacctacaaggctatcggatttactattggaagacccagagttcatctaaaagaaacagacgtcacattgagaaaaagatcctcaccttccaaggcagcaagactcatggcatgttgccggggctagagccctttagccactacacactgaatgtccgagtggtcaatgggaaaggggagggcccagccagccctgacagagtctttaatactccagaaggagtccccagtgctccctcgtctttgaagattgtgaatccaacactggactctctcactttggaatgggatccaccgagccacccgaatggcattttgacagagtacaccttaaagtatcagccaattaacagcacacatgaattaggccctctggtagatttgaaaattcctgccaacaagacacggtggactttaaaaaatttaaatttcagcactcgatataagttttatttctatgcacaaacatcagcaggatcaggaagtcaaattacagaggaagcagtaacaactgtggatgaagcgatggcaagccggcaggtggatattgcaactcagggctggttcattggtctgatgtgtgctgttgctctccttatcttaattttgctgattgtttgcttcatcagaagaaacaagggtggtaaatatccagttaaagaaaaggaagatgcccatgctgaccctgaaatccagcctatgaaggaagatgatgggacatttggagaatacagtgatgcagaagaccacaagcctttgaaaaaaggaagtcgaactccttcagacaggactgtgaaaaaagaagatagtgacgacagcctagttgactatggagaaggggttaatggccagttcaatgaggatggctcctttattggacaatacagtggtaagaaagagaaagagccggctgaaggaaacgaaagctcagaggcaccttctcctgtcaacgccatgaattcctttgtttaatttttaagctctttgccaatattccatttctctagaatgtttatcctaagcacttgtttgtcagccctctcatactatgaacatatgggtagagagtatattttctgctgtatgttagtattatgagaatagttacagcaaaaacataactcagtcaaatgatatgttaatatgaactggaatgcaaagtgcatactttttcattcaaaatgggtattcttgatttcctcagaactgataaaaaataatgcaacatcaccaacagatcctgttatttcctctgcaggatacagttcaatatgatgcatgaaaaatgctccacatttaaaggacatacccgtgtatgttatgaaaacatggtttgatactttgtttatactaccctcagctgaacccctatatatgaattccgttttcattgtcaagaatgttactgtagtattctctagaacttcaatgtctttgtggacattgttgtgaaattggtgactatgtatagctgtcgttagtctttttgggagactgttaggaacagtttgtacagtatatacttgctaaatgagttcattatgacagtcacattgctgatgcttactgagaactattacctactcttggctcctgttactccgtaggcttcttaatcttccaggcattacagcagcacagtgttctactttttacatcatttctatgttcggttgtttttaggcataaacaatgtgtattgcagtgcatttcggcatttgtgccatactgaaagaatcaaaaacaaatcatccaaattaaatttcaaacattatttcagagaacacagggcaagacacatacagtgccttcagatattaagcattccacaacatcgtgcattctgtatcagctggtccagtccattctgggtcctagattactgtcattgtctaaaagtaacttttaaaaagcagagttcatgaaaactgcaatgctgggaaaagaaggaaacatgaaaataaaaataagacagtttattagaaatagcatttcctcataagcataaaaagaaaatctttgttgccaactgaagcacatgatgattttgtggtcctttatggtttctattacattcagtaagaaagatgtcaacatgctagaaaattaattttaaaactaagttattccaacactaaaagcatacaacagcatgccaacagtaatatattattctccaagactttacctatgtaagtgttcaaaactctgcagcattaaacaacgtgtatgcaaattgttatggatacatttcagaatctaagaaatcaggcaagtgcttaaaaggccaacggtccaagggattacatctgcagtttaaaaagtaaatatatattctatcgtattcataaacaatatctatcaaatgggttacctccaaatatgaaaatctataacaacctatggttgaaggaatgctcagtttcatttgccaataaattggtttctcataacttgcatcaagtttaattttaagtaaagctttttatatgtagatattttgttgaatttgtaaatacacttaaaatgtagatgctatatgcttataggtgttacatacaaataaacatgcaatgtttatgttgtactgtataagaggtaagctaattaatgcagtgaatgggattggaaagcatctacttaaatatctattgggttcccccctccccccaccttttttgctgtgaaactgaaatagtgaacttttctacgtattgacagcagatttttcgatgaaatcttcagagctttgcctatggggcacagtaggcctagtaacctggcatgtttgatatatgtaggtaaagcataatttaaagtaatcccaggtaaagatggccctaaatactttcatgtctctatattcatttttcacagatccacctgtctcttgaaaatataaaaagacaaaacaggtttgccttggcatcagagagcacaaagattaaaagttactttaaatttgccaatattttgggagaacaataaaactacattttttcctcttccatactggtagatgcgaaatttatctgtgcatgaaagggtcacttctgtaatagtgcaacagatttggtattaaaaattaaatgtggttttaaaagttcctctctcttttgtaatttatgttcccaattgagtgtgaatgtccaagtaatggtgtatgtaatggtacaggcaaatgtgactggatttccctcaaaaaagtaactattaaaca

SEQ ID NO: 6313 - DNA, 3222 bp, Homo sapiens
agcagccagctccccagcaccgcacggcggggacgcgagcgcgcccccgacggcagcccggacgccgagcacgggtcacctgcggcgccggcccgggcgccgaccgaggttcaacgcacggcccggggacccccaggcggggccaacgccgccgtcgcccccggcctcgcggggagcaggaagagccaacatgctggccccgcgcggagccgccgtcctcctgctgcacctggtcctgcagcggtggctagcggcaggcgcccaggccaccccccaggtctttgaccttctcccatcttccagtcagaggctaaacccaggcgctctgctgccagtcctgacagaccccgccctgaatgatctctatgtgatttccaccttcaagctgcagactaaaagttcagccaccatcttcggtctttactcttcaactgacaacagtaaatattttgaatttactgtgatgggacgcttaaacaaagccatcctccgttacctgaagaacgatgggaaggtgcatttggtggttttcaacaacctgcagctggcagacggaaggcggcacaggatcctcctgaggctgagcaatttgcagcgaggggccggctccctagagctctacctggactgcatccaggtggattccgttcacaatctccccagggcctttgctggcccctcccagaaacctgagaccattgaattgaggactttccagaggaagccacaggacttcttggaagagctgaagctggtggtgagaggctcactgttccaggtggccagcctgcaagactgcttcctgcagcagagtgagccactggctgccacaggcacaggggactttaaccggcagttcttgggtcaaatgacacaattaaaccaactcctgggagaggtgaaggaccttctgagacagcaggttaaggaaacatcatttttgcgaaacaccatagctgaatgccaggcttgcggtcctctcaagtttcagtctccgaccccaagcacggtggtgcccccggctccccctgcaccgccaacacgcccacctcgtcggtgtgactccaacccatgtttccgaggtgtccaatgtaccgacagtagagatggcttccagtgtgggccctgccccgagggctacacaggaaacgggatcacctgtattgatgttgatgagtgcaaataccatccctgctacccgggcgtgcactgcataaatttgtctcctggcttcagatgtgacgcctgcccagtgggcttcacagggcccatggtgcagggtgttgggatcagttttgccaagtcaaacaagcaggtctgcactgacattgatgagtgtcgaaatggagcgtgcgttcccaactcgatctgcgttaatactttgggatcttaccgctgtgggccttgtaagccggggtatactggtgatcagataaggggatgcaaagcggaaagaaactgcagaaacccagagctgaacccttgcagtgtgaatgcccagtgcattgaagagaggcagggggatgtgacatgtgtgtgtggagtcggttgggctggagatggctatatctgtggaaaggatgtggacatcgacagttaccccgacgaagaactgccatgctctgccaggaactgtaaaaaggacaactgcaaatatgtgccaaattctggccaagaagatgcagacagagatggcattggcgacgcttgtgacgaggatgctgacggagatgggatcctgaatgagcaggataactgtgtcctgattcataatgtggaccaaaggaacagcgataaagatatctttggggatgcctgtgataactgcctgagtgtcttaaataacgaccagaaagacaccgatggggatggaagaggagatgcctgtgatgatgacatggatggagatggaataaaaaacattctggacaactgcccaaaatttcccaatcgtgaccaacgggacaaggatggtgatggtgtgggggatgcctgtgacagttgtcctgatgtcagcaaccctaaccagtctgatgtggataatgatctggttggggactcctgtgacaccaatcaggacagtgatggagatgggcaccaggacagcacagacaactgccccaccgtcattaacagtgcccagctggacaccgataaggatggaattggtgacgagtgtgatgatgatgatgacaatgatggtatcccagacctggtgccccctggaccagacaactgccggctggtccccaacccagcccaggaggatagcaacagcgacggagtgggagacatctgtgagtctgactttgaccaggaccaggtcatcgatcggatcgacgtctgcccagagaacgcagaggtcaccctgaccgacttcagggcttaccagaccgtggtcctggatcctgaaggggatgcccagatcgatcccaactgggtggtcctgaaccagggcatggagattgtacagaccatgaacagtgatcctggcctggcagtggggtacacagcttttaatggagttgacttcgaagggaccttccatgtgaatacccagacagatgatgactatgcaggctttatctttggctaccaagatagctccagcttctacgtggtcatgtggaagcagacggagcagacatattggcaagccaccccattccgagcagttgcagaacctggcattcagctcaaggctgtgaagtctaagacaggtccaggggagcatctccggaactccctgtggcacacgggggacaccagtgaccaggtcaggctgctgtggaaggactccaggaatgtgggctggaaggacaaggtgtcctaccgctggttcctacagcacaggccccaggtgggctacatcagggtacgattttatgaaggctctgagttggtggctgactctggcgtcaccatagacaccacaatgcgtggaggccgacttggcgttttctgcttctctcaagaaaacatcatctggtccaacctcaagtatcgctgcaatgacaccatccctgaggacttccaagagtttcaaacccagaatttcgaccgcttcgataattaaaccaaggaagcaatctgtaactgcttttcggaacactaaaaccatatatattttaacttcaattttctttagcttttaccaacccaaatatatcaaaacgttttatgtgaatgtggcaataaaggagaagagatcatttttaaaaa

SEQ ID NO: 6314 - DNA, 1971 bp, Homo sapiens
atggccacagccgagtcccgtgcgctccagtttgccgagggcgccgcgtttccagcgtaccgggccccccacgccggcggggcgctcctgccgcccccgagccctgcggcagccctgctccctgcgccgcccgcgggccccggcccagcgacctttgcgggcttcctcggccgggaccccgggccggccccgccgccccccgccagcctgggctcgcctgcgccccccaaaggcgcggccgccccgtcggcgtcgcagcgccgcaagcgcacgtctttcagcgccgaacagctgcagctgctggagctcgtcttccgccggacccggtaccccgacatccacttgcgcgagcgcctggccgcgctcaccctgctccccgagtccaggatccaggtatggttccagaacaggcgtgccaagtctcggcgtcagagtgggaaatccttccaacctttggctaggccggagattatcctcaaccactgtgctcctggaactgaaacgaaatgtctgaagccccagctgcctcttgaggtagatgtgaactgcctgcccgaaccaaacggggttggagggggcatctctgactctagctcccaaggtcagaattttgaaacctgttcccctctctctgaagacattggttcaaagctggactcatgggaggaacacatcttttctgcctttggtaacttttgaggattctgggagaattcgggataagctctgaggagccatgactgacagcctgggagagacacatcagcatactgtcctttctgacttccatgctaaggacatgtccttgttaaccttgatgatggttttgacagcacctctcacatttgaaggtaccccgccactttgtcaatgacgttttaagcccacactcccaccccagagttcccgcattcgtttttacctgtgttctctccaagcctgcacattccattggtctgcatccctatgccttcttgccaggcctgtttttagtttttggactggttgttcagaactcattattttcttcacaagaatgcctcagcttgactcagtttccccttgtgtttgacagctgccattttctcctggtccctccaaggcttataatcttaaagtcactctaccccgtctcttcaaccctcatcctaggtttattactttttaaaattgggcctgtcatcttcacgttcaatcatagctccaatgactctgcatgcagattatttcgacagcccccttgcctctagcttctcaactacttaaaaaaaattaccctctgtgggccaggtgcagtggctcactcctgcaatctcagcactttgggaggccgagtgggtggatcacctgaagtcaggagttcaagaccagcctggccaatatggcgaaaccccatctctgctaaaaatataaaacttagctgggcacggtgacgggagcctgtagtcccagctactcaggaggctgaggcaggagaatcacttgagcctgggaggtggaggttgcagtgatctaagatcgtgccactgcacttcagcctgggagacagagggaggctctcaaaaaaaaaaaaaaaaaaaaaaaaaattactctatggttctgtggtagcctccagttgctaccaaattataaaaagctttcagttaccctcccagataactgatatcatccttagcctgcaggacagctatgcaaatctgaaggtcaactatccacaatatatgctttggtcttaaagtcactcctttcagttttgaaccaaattcataccttttgctttcaaaacactcgaggactccccacctgccttctgaagtctgaaattttctctaagtaatcctgattttgcacctgttacttcgatcactccattacccttagcacttgttattgtacttcctgtgcaagttttgtggattattaaatgtctttcacaaatgttccaatgtaatttctatttaaatgaattc

SEQ ID NO: 6315 - DNA, 17305 bp, Homo sapiens; identical to SEQ ID NO: 5009

SEQ ID NO: 6316 - DNA, 4173 bp, Homo sapiens
agtcttcggggaggagctgcattacacacaggcttcggaggcttccgtggagaagcttggaggtaatggctgtcgtaaatgctagttattttcagagagttctcgaagatttggaataaagccgagccccagaaagacaggtcaaccacagaagtgctgagccaggtaaagaccctgctggacaagcagctggagtgagaatcaagacagctggaccacaggaccagacccagcagtatccatgtaacacataggttaatatcagagaagcacatgacctgggcaatctgcatgtgatgccaaccaagccttggaaagacagtgcaaccacagaagtgccgagctgggtaaaggccctgctggacaagcagttggagtgagaatcaagacagccggaccacaggaccagacccaccaggatccacatgacagtggtatcttccggtatcatcctattcaaacaacgtgttcaagcatccttggaaaattgaggtggagaacaggccacacaagctgtaaaccctttgtagtcataagacgaaagaggatttgttaagagtattgttttgggtagaacttgcattagcagtgacaaagatagccacctcaacctttggtaataacccttggcacacaaatataaaccataatggagtctgagtatgtcctatgcaactggaaagaccagttgtggccagcaaaagttttgtccagatctgaaacttcatcaaacagtaagaggaaaaaggcattttctctagaagttcaaatactctcactagatgaaaaaattaaattggacagcacagaaacaaagatcctaaataaatctcaaattgaagccattgctgcctcattaggactacagtcagaggacagtgctccacctacagaggaaactgcctatggaagatcactaaaagtggcactgggtattctgaatgagagaacaaatttgagtcaagcaagcacttcagatgaagaggagatcactatgctgtctcaaaatgtaccacaaaaacagtccgattcaccccctcataaaaaataccggaaggatgaaggtgacttaccagggtgtcttgaggaaagggaaaactcagcatgcttgttagcatcttcagagagtgatgattccctgtatgatgataaatcacaagcacccacaatggtcgatactattccaagtgaagtggaaacaaagtcattacaaaactctagctggtgcgagactttcccttcactttcggaagataatgatgaaaaagagaacaagaataagattgatatctcagcagttatgtctgtgcattctgcagtcaaagaggaaagtgcatgtgttaaagatgaaaagtttgctccacctttgtcacctttgtcatcagatatgctcattatgcccaaagctttgaaagaagagagcgaggatacctgcctagagaccctggctgttccctctgaatgctctgctttctcagagaatattgaggatcctggagagggtccctcaaatccatgcttagataccagccagaatcaaccttccatggaatcagagatgggggctgcagcatgccctgggagttgttcaagggaatgcgaggtttcatttagtgcctctaaccctgtctgggattattcacatcttatgagtagtgaaagaaattttcagagactggattttgaagaacttgaggaagaaggtcaagcctctgacaagtcattgcttccaagtcgcattaatctttctctattagatgatgatgaggaagacgaagaacttccacgcttcattttacattatgagacacatccgtttgaaacaggaatgatagtctggtttaaatatcagaaatatccattttggccagcagtgataaaaagtatcagacgaaaagagaggaaagcaagtgtgctttttgttgaggcaaacatgaattctgaaaagaagggcattagagtaaattttagaagattaaagaaatttgattgtaaagagaaacaaatgctagtggacaaagccagggaggattatagtgagagtattgactggtgcatctcactaatttgtgactacagagttagaataggttgtggttctttcacgggctctttgcttgagtattatgctgctgatattagttacccagttaggaaagaaacaaaacaggatactttcaggaacaaatttccaaagctgcataatgaagatgccagggaaccgatggctgtaacttcccagaccaagaaaatgtccttccaaaaaattctccctgaccggatgaaggctgctcgggaccgagccaacaagaacctggtggacttcattgtgaatgcaaagggaacagagaaccatcttctggccattgtaaatggcacaaaaggatccagatggctgaaatcatttttgaatgcaaataggttcacaccctgtattgaaacatactttgaggatgaagatcagttggatgaagtggtgaaatatttacaagaagtctgcaatcaaatagatcaaataatgccaacttggataaaagatgataaaattaaatttatcctagaagttcttctgccagaagcaattatttgttcaatttctgctgttgatgggttagattacgaggcagctgaagcaaagtatctaaaaggaccatgtctaggctacagggaaagagaattatttgatgcaaaaataatatatgaaaagagacgaaaagcaccaacaaatgaagctcactaaatgtgctgaaagttgaaaccatgacagggagctctcatagatactagttgaaaaaagtctctgaacaattctctctaatacatattttctgcaaatgggagcatggataatgtgttcacttttttttgagatctctaggatctgtggttataattacatctttatttccttttcttgcgcttcttcaaagttaattttgtcaacatatttcagcagttctactttcccgtacattttttagaaagcataattcctaaatgattttgaagggaaagtactattttgttttatgacacttttgagtctatgctgtattgttaaatatattgtgcacaattattttaatgttaaaattgcactggtgttagatattaacgaagatgattggaaaaaagtctgaaagatacatcatttctatattccttgcttaatttttataaaatattgggttttcccttaagatagttgaagtatttttcttgccatgcctatttatttttgcaaaaaaattatctgctatatagaaccaaagatagattcgctttgctatatattataactatacttgcttttgcaataaaacaacttgtaattcaaaaatgaagattatctgcatatagtatttatgtgtgtgaataacatcttggcatgcagaaaataattttggctgctttgaacaggattgttcattctacacttccctgaaattccatttttgggagtgtctatccttcaatggctgaatagttccttaaatcagacaagctcctggctatcttcataaccagcagtgagtagatcttcttaatatagctgtctgaccacatgtggaaggcagctagacttattgtatttacagcctggccactctagacatatgaatccaggctgactgcttaagtgcccatctcgtttgatataaactgtagaaaaggcaagcactttgttctgagtcttttatctccaaatacatagttgtctcaaaccaagcaagctttatcaaaatggcttatttgcagaatagttccaatgatataaatgccaactggcaagtcattccaaactgcttgaaggagtagatgaaccagaatctgagaatttggaaataggtcacagaaaaagcctccatttggctaaatatgacaattatctgagtatggttaaatacatacaattaaatgtctgaagccaatgagttgtttattctaacttgaaatatatttttgtgagaataaatgttagaaaagttagtttattttggaaacctgccgtgaaaggaaattctaaaggcttaacatgaaactgtctgcatttctacctgttagacaatggttgctcttgggctcttgttatacagtcatatggctacacgtttatgtaaagtttgcaaaagtttggtgttttgatttataataaaactgttatattattca

SEQ ID NO: 6317 - DNA, 3942 bp, Homo sapiens
gggaatatcctctcaagccctgaggtgcagggctgggaaggagtgggtgagcggctgggtcgtggcaggttggtctggggaggctggggaggctggggaggcgggaggagaacggttggccccggcagcggcgtgtcggagggcggatggggctaggaggccgcccggggggtggggtctgcggcgggccggcccccgcgtgcgcgtcgcctcgccgggcatttcaaaagctcgccggcagggcgcggcgctagctccgtgtgcctcgcaggcgtggtgggcgcgtcctggcagccgcccgcttggttctcgcgggatccgggctccggctcgacgccggctctctttttgacgccccgccgccggggttgccatggttcatttcttgcacccgggccacacgccccggaacatcgtccctcctgacgctcagaaggatgccctgggctgctgcgtggtacaggaagaggcatctccctacactttggtcaacatctgcctgaatgtcctgattgctaacctggagaaattgtgttctgaaagacctgatggaacactgtgccttccggagcattggagtttccctcaggaagtagccgagcgatttctcagggtgatgacttggcaaggttgctggaggagccagtatgagtcagatttcagaagcactgagccgatacaggaacagatcatgttttgtgaaggaagccctccacaggctgttcacagagacattttcaatggaggtaaccatgcctgctattttaaagcttgtggctataggaatgaggaatcacccattggatttgcgagtgcagttcacagccagtgcttgcgctctcaacctaacacgccagggcctggccaaggggatgcctgttcgcctgttgtcagaggtcacctgtctacttttcaaggctctgaaaaatttcccccattaccagcagttacagaagaattgtcttctctccttaaccaattccaggattcttgtggatgttccatttgacaggtttgatgctgccaagtttgtcatgagatggctctgtaagcatgaaaaccccaagatgcaaacaatggcagtgagtgtcacctctattctggctctgcagctctcacctgagcaaacggcacagcttgaagagcttttcatggcagttaaggaacttctagcaatagtaaaacaaaagactactgagaatttagatgatgtcaccttcttgtttactttgaaagcactttggaatcttacagatgggtctccagctgcctgcaagcacttcattgaaaatcaaggattgcaaatcttcatccaagtcttggagaccttttcagagtcagcaatacaaagcaaagtacttggtcttttgaacaacatagcagaagtcagagagctctcttccaagctggtgaccgaagatgtgctgaagcatatcaacagtttactctgtagcagggaaatggaagtcagctattttgctgcaggtatcatagcccacctgacatctgacagacagctttggatatcccgtgacttccagaggcgtactcttctccaagatctgcatgcaaccatacagaattggccaagttcaagttgtaagatgacagcattggtgacctatagatctttcaagacatttttcccgctccttggcaacttctctcaaccagaggttcagctctgggcactatgggctatgtatcatgtctgcagtaaaaatcccagcaaatactgcaaaatgttagttgaagaagaaggattgcagcttttgtgtgatatccaggagcacagtgaggcaacccccaaagcacagcagattgcagcctccattctggatgacttcagaatgcatttcatgaattatcagaggcccactctgtgtcaaatgcccttctgaacctaaggaatttcagaggtgtgtgctcttcctcaatgtcaggtgttctgccctggcagtaattgcacatcagttgtcattggagtttgtgagttggctgtctcattggcctttgattgttgattttatatatgttacaaaaggttggatttgtatgatagctgtaatcccaagtcaagttggactcattctgcagcctttcagcagcaattttgaagactcaaaccgtggactctgggaaggcctgggagcttgtgttggaacagctatgcaagttacttttctctagccttggacaattttttccctttgggagcttgtcatgggagtgggacctgttcactagaagagaaaggaaacctacagggagactttgatatttatattaaatttcctttgttgttatcgtcatgtgaagctatgagaaaagcttgggaagcatatgcttcaaaatgtagtgtttagaaggcagaacccctgttggagagcggggaaaagaatttatttatttatttatttatctatggctgggtatggtggctcacgcctgtaatcccagcactttgggaggccaaggcaggtggattgtctgaactcaggagttcgagatcagccttgccaacgtggtaaaactccgtctctaccaaaaaatacaaaaattagctgagcgtggtggtgtgcacctttactcctagctacttggaggctgaggtgggaggaccacttgagcccaggaggcagaggttgcagtgagctgagattgcaccactgcactccagcctggatgacagagtgagacctcatctcaaatgaatagaggggtggagaaaagagaaatatatttttttacctttttttttttttttttttttgtgacggaatctcgctctgtcgcccaggctggagtgcagtggcacaatctcggctcactgcaacctctgcctcccaggttccagcaattctcctgcctcagcctcctgagtagctgggactacaggcacatgccgccacgcccggctaatttttgtattttttagtagagacagggtttcaccatattggtcaggctggtctcgacctcctgacctcgtgatccacccgtctcggcctcccaaagtgctgggattacaggtgtgagtcactgcacctggcctttttacaattttgggtgtctatctttggcatgtttcctgttatgtgagcatgacatgctgtgtatgtgagtgagcttgtagggcgtggtgggacttaggcatttgcagacagtgtttagatgaaagattacatgtaatgataaatctgaatccctccattttatttgggtggaaccatgaccaaaaatggtaggaagacgaaaggccagaaagagactttgccagagagttcacggagttttcttaccccgcatgctgactaaagaaaacatgggcttttctgaaaccagcttcaactacagtataaactatatcagaagcttacttgataagccttgcggagctgctctgaggaatagtgtgaattccttccttgccttattgttgactgttaatgaacatgttttgtcatttatctgtttaagtttttcagaaaataaaagtaaatttctgttagcacattttaggattagatttttgtgcttttggctggcttggttcagattcttaactagagtaccatgtactgtctttggaaatcaaatgaggaagaagctcattctcttactctaaaccatgttccaaactattaccagagtccaaccagataagcagaatttgtaaccttacttccttccatagtccttaaactgtactgtattttttcacactcttgcatgattccaaaaggatatcttcctgacctgggttctagtacctcagagcattgttatcagatgctagcttattctaatgtgaggatgtgttaggggaactagtgtgttaagtccaattctgtacaagacatcctttcaagttctgtgtcattcacaacaatcctcacgggtaggtgagttttattttcctcacttaacagatgagaaaaa

SEQ ID NO: 6318 - DNA, 565 bp, Homo sapiens
gcttcgctcgccgcctcgcgccgagactagaagcgctgcgggaagcagggacagtggagagggcgctgcgctcgggctacccaatgcgtggactatctgccgccgctgttcgtgcaatatgctggagctccagaacagctaaacggagtcgccacaccactgtttgtgctggatcgcagcgctgcctttccttatgaagaagacacaaggaaggccaaaaatccccctggagactccagcctacactgggcagccatggcattgccagcattgttttctcttataattggctttgcttttggagccttatactggaagaagagacagccaagtcttacaagggcagttgaaaatatacaaattaatgaagaggataatgagataagtatgttgcaagagaaagagagagagtttcaagaagtgtaattgtggcttgtatcaacactgttactttcgtacattggctggtaacagttcatgtttgcttcataaatgaagcagctttaaacaaattcatattctgtctggagtgacagaccacatctttatctgttcttgctaccca

SEQ ID NO: 6319 - DNA, 1700 bp, Homo sapiens
ggggcggggggcgggggccgcgaggggggaggcggtacgaaaagggcggcgcgcgcggcggcggcggcagctccccggcagcggcggtggagagcgcagcgcgcagcccggtgcagccctggctttcccctcgctgcgcgcccgcgccccctttcgcgtccgcaaccagaagcccagtgcggcgccaggagccggacccgcgcccgcaccgctcccgggaccgcgaccccggccgcccagagatgaccgcgaccgaagccctcctgcgcgtcctcttgctcctgctggctttcggccacagcacctatggggctgaatgcttcccggcctgcaacccccaaaatggattctgcgaggatgacaatgtttgcaggtgccagcctggctggcagggtcccctttgtgaccagtgcgtgacctctcccggctgccttcacggactctgtggagaacccgggcagtgcatttgcaccgacggctgggacggggagctctgtgatagagatgttcgggcctgctcctcggccccctgtgccaacaacaggacctgcgtgagcctggacgatggcctctatgaatgctcctgtgcccccgggtactcgggaaaggactgccagaaaaaggacgggccctgtgtgatcaacggctccccctgccagcacggaggcacctgcgtggatgatgagggccgggcctcccatgcctcctgcctgtgcccccctggcttctcaggcaatttctgcgagatcgtggccaacagctgcacccccaacccatgcgagaacgacggcgtctgcactgacattgggggcgacttccgctgccggtgcccagccggcttcatcgacaagacctgcagccgcccggtgaccaactgcgccagcagcccgtgccagaacgggggcacctgcctgcagcacacccaggtgagctacgagtgtctgtgcaagcccgagttcacaggtctcacctgtgtcaagaagcgcgcgctgagcccccagcaggtcacccgtctgcccagcggctatgggctggcctaccgcctgacccctggggtgcacgagctgccggtgcagcagccggagcaccgcatcctgaaggtgtccatgaaagagctcaacaagaaaacccctctcctcaccgagggccaggccatctgcttcaccatcctgggcgtgctcaccagcctggtggtgctgggcactgtgggtatcgtcttcctcaacaagtgcgagacctgggtgtccaacctgcgctacaaccacatgctgcggaagaagaagaacctgctgcttcagtacaacagcggggaggacctggccgtcaacatcatcttccccgagaagatcgacatgaccaccttcagcaaggaggccggcgacgaggagatctaagcagcgttcccacagccccctctagattcttggagttccgcagagcttactatacgcggtctgtcctaatctttgtggtgttcgctatctcttgtgtcaaatctggtgaacgctacgcttacatatattgtctttgtgctgctgtgtgacaaacgcaatgcaaaaacaatcctctttctctctcttaatgcatgatacagaataataataagaatttcatctttaaatgagtaagagaaataagtatgttattctaaaatctaaactcaaatgaaatttcaaaaaagaccaaaaaaaaacaaggca

SEQ ID NO: 6320 - DNA, 1797 bp, Homo sapiens
gtatttaaaactagttaagatcttctgatttacctgagcgggtggggaaacccaccccatgagcatcccctgggctcacccagtgcacagagggaggcctcccgtggctgggcccctctcagtcagcccatgtggctgccatgacctggagcaccacagccgggggcgcccaccagctcaacaccaccacattcacgtggcagcacctccctgcctggcaaccgctgctgttggccagcattaggctgcagctcttcttctacgtgggcctggccttcatcagcctggacctctattactcctccaccagcatcaaggagctggagtacaactacaccggcgacccgggcaccagcaactgctcggtgtgtgctgtggctggccagggctgtgtgccactgcccatctgctcatgcgcctggtacttctcactgcctgagctcttccagggccctgtgtacccctactacgtgctgaccaacttctaccaaaacaaccggcggtatggagtgtccgcgacaacgcgcagctgagcgggctgcccagcacgctgcaccatccagtcaatgagtgcacccactgcgccgcctgcccatcgtgcaccctgcaatgtcatcaccaacagcctcttcaacgactcctcgctgtggcaccagtgctggcccggcgagccctacgtggaggtgccgcgctaccgcactgcacctgcatcacccggtagaccaactaccccatcaagttctgcaacccaccactggtcaacggcagcctggcactggccttccatggcacagcacccctgcccaactggcgctggctggtctacgacaagctcagccccatccccaacaacaacggcttcatcaaccaggacttcgtggtgtggatgcgcatggcagcgctgcccacgttccgcaagctgttccgcaagctgtacgggcacatccgccagggcaactactcagctgggctgccgcggtgtgtctactgtgtcaacatcacctacaactacctggtaagaagcgcaattccacactctacataaccatgttactcattgttccagtcatcgtcgcaggtgcaatcatagtactcctgctttacctaaaaaggctcaagattattatattccctccaattcctgatcctggcaagatttttaaagaaatgtttggagaccagaatgatgatactctgcactggaagaagtacgacatctatgagaagcaaaccaaggaggaaaccgactctgtagtgctgatagaaaacctgaagaaagcctctcagtgatggagataatttatttttaccttcactgtgaccttgagaagattcttcccattctccatttgttatctgggaacttattaaatggaaactgaaactactgcaccatttaaaaacaggcagctcataagagccacaggtctttatgttgagtcgcgcaccgaaaaactaaaaataatgggcgctttggagaagagtgtggagtcattctcattgaattataaaagccagcaggcttcaaactaggggacaaagcaaaaagtgatgatagtggtggagttaatcttatcaagagttgtgacaacttcctgagggatctatacttgctttgtgttctttgtgtcaacatgaacaaattttatttgtaggggaactcatttggggtgcaaatgctaatgtcaaacttgagtcacaaagaacatgtagaaaacaaaatggataaaatctgatatgtattgtttgggatcctattgaaccatgtttgtggctattaaaactcttttaacagtc

SEQ ID NO: 6321 - DNA, 101515 bp, Homo sapiens
gcagtcgtgcattcccagcctcgcctcgggtgtagggattgcatagaaaagcaaaactacacagtcttgactgtgtagttttgtttttaggattagaggctcaccgattcatgtcggagatggtcagaaaaaccaactctccataggacgtcgtttcagaagcaaccttgggcttagtcccaccctttttaggcactcttgagaaatcagagtgcctagaaagatgacaactcaagcaccgacgtttacgcagccgttacaaagcgttgtggtactggagggtagtaccgcaacctttgaggctcacattagtggttttccagttcctgaggtgagctggtttagggatggccaggtgatttccacttccactctgcccggcgtgcagatctcctttagcgatggccgcgctaaactgacgatccccgccgtgactaaagccaacagtggacgatattccctgaaagccaccaatggatctggacaagcgactagtactgctgagcttctcgtgaaagctgagacagcaccacccaacttcgttcaacgactgcagagcatgaccgtgagacaaggaagccaagtgagactccaagtgagagtgactggaatccctacacctgtggtgaagttctaccgggatggagccgaaatccagagctcccttgatttccaaatttcacaagaaggcgacctctacagcttactgattgcagaagcataccctgaggactcagggacctattcagtaaatgccaccaatagcgttggaagagctacttcgactgctgaattactggttcaaggtgaagaagaagtacctgctaaaaagacaaagacaattgtttcgactgctcagatctcagaatcaagacaaacccgaattgaaaagaagattgaagcccactttgatgccagatcaattgcaacagttgagatggtcatagatggtgccgctgggcaacagctgccacataaaacacctcccaggattcctccgaagccaaagtcaagatccccaacaccaccgtctattgctgccaaagcacagctggctcggcagcagtccccatcgcccataagacactccccttccccggtcagacacgtgcgggcaccgaccccatctccggtcaggtccgtgtctccagcagcaagaatctccacatcccccatcaggtctgttaggtctccattgctcatgcgtaagactcaggcatccaccgtggccacaggtcctgaagtgcctcccccttggaagcaagagggctacgtggcctcctcatctgaggctgagatgagagagacaacgctgacaacctctactcagatcaggacagaagagagatgggaagggagatacggtgtccaggagcaagtgaccatcagtggtgctgcgggtgctgccgccagtgtgtcggccagtgctagctacgcagcagaggctgttgccactggtgctaaagaggtgaaacaagatgctgacaaaagtgcagctgttgcgactgttgttgctgccgttgatatggccagagtgagagaaccagtgatcagcgctgtagagcagactgctcagaggacaaccacgactgctgtgcacatccaacctgctcaagaacaggtaagaaaggaagcggagaagactgctgtaactaaggtagtagtggccgccgataaagccaaggaacaagaattaaaatcaagaaccaaagaagtaattaccacaaagcaagagcagatgcacgtaactcatgagcagataagaaaagaaactgaaaaaacatttgtaccaaaggtagtaatttccgcagctaaagccaaagaacaagaaactagaatttctgaagaaattactaagaaacagaaacaagtaactcaagaagcaataagacaggaaactgagataactgctgcatccatggtggtagttgccactgcaaagtccacaaaactagaaacagtcccgggagctcaagaagaaactaccacacaacaagatcaaatgcacctaagttatgaaaagataatgaaggaaactaggaaaacagttgtacctaaagtcatagttgccacacccaaagtcaaagaacaagatttagtatcaagaggtagagaaggcattactaccaaaagagaacaagtgcaaataactcaggagaagatgagaaaggaagccgagaaaactgccttgtctacaatagcagttgctactgctaaagccaaagaacaagaaacaatactgagaactagagaaactatggctactagacaagaacaaatccaagttacccatggaaaggtggacgttggaaaaaaggctgaagctgtagcaacagttgttgctgcagtagaccaggcccgagtcagagagcccagagagcctgggcatcttgaagaatcctatgctcagcagaccactttggagtacggatataaggaacgcatttccgccgcaaaggtagctgagcctccccaacgtccagcctcagaaccccacgttgtccctaaagcagtcaagcctagagtaatccaggctccttctgagactcatatcaaaactactgatcaaaagggaatgcacatatcatcacagatcaagaaaactacagatctaacaacggaaagattagtccatgtggataaacgcccccgcacagctagccctcactttactgtttcaaaaatttctgttcctaagacagaacatggatatgaggcatcaatagccggtagtgctattgccacattacaaaaagagttgtcagccacatcttctgctcagaagatcaccaaatcggtgaaggctcctactgtgaagcccagtgagactagagtaagggcagagcccacacccttgccacagttccccttcgctgacacaccagatacttacaagagtgaagctggcgttgaggtgaaaaaggaagtaggggtgagcatcactggcaccaccgtccgtgaagagcgctttgaagtactgcacggacgcgaagccaaggtaacagaaacagcaagagtaccagcacctgttgaaattcctgttactccaccaactttggtctcgggcttaaaaaatgtgactgtcatagaaggtgaatctgtcaccttggagtgccacatctctggatacccatccccgacagtgacatggtacagggaagactaccaaatcgaaagttccattgacttccagataaccttccagagtggaattgctcgtcttatgattcgcgaagcatttgcggaagacagcgggcgatttacttgcagtgctgtaaatgaggctggaaccgtcagcacatcctgctatctggctgtgcaggtgtcagaagaatttgaaaaggaaaccacagccgtgactgagaaatttactacagaagagaaacgctttgttgagtcaagagatgtggttatgactgatactagcctcacagaggaacaagcagggcctggagaacctgccgcgccttactttattacaaaaccagtggtccagaaactggtggaaggtgggagcgtggtgtttggatgccaagttggcggcaacccaaagccccatgtatactggaaaaaatctggtgttcctctaaccactggatacagatacaaagtgagttacaacaaacaaaccggtgaatgcaagctggtgatttctatgacttttgctgatgatgctggagaatacactattgttgttcgcaataagcatggagaaacttctgcatctgcttccttgcttgaagaagctgattatgagttactgatgaagtcccagcaagaaatgctttatcagacacaagtgactgcatttgttcaagaacctaaagttggagaaacagcacctggatttgtatactctgagtatgaaaaagagtatgaaaaagaacaagccttaattaggaagaaaatggccaaagatactgtagtggtcagaacttatgtagaagatcaggaattccatatttcttcctttgaagagagacttattaaagaaattgaatatagaataataaagactacattagaagaacttcttgaagaagatggagaagaaaagatggcagttgacatttctgaatctgaagctgttgaatcaggatttgattcaagaatcaagaattatagaattcttgaggggatgggtgtcacttttcattgcaagatgtctggatatccattaccaaagattgcttggtacaaagatggcaagcgcatcaaacatggagaaagataccaaatggactttctacaagatggcagagctagtctgcgtatacctgttgttcttccagaagatgaaggaatctacactgcatttgccagcaatattaaaggaaatgcaatttgctcagggaaattgtatgtggagcctgctgcaccacttggagctccgacttacattcccacactagagccagtgagcagaatcagatctctctctccacgttcagtgagcaggtctcctatacgcatgtctcctgcacggatgtcacctgcaaggatgtctcctgcacggatgtcccctgcaagaatgtcccctggacgtaggctggaggagacagatgagtcacaacttgagagactatataaaccagtctttgtgttaaaacctgtttctttcaaatgtttagaagggcaaactgccagatttgacttaaaggttgttggtagacctatgccagagacgttctggtttcatgatggccagcaaattgtcaatgactatacccataaagtagtcattaaagaagatggtactcaatcactaattattgtccctgccacacccagtgattctggggaatggactgtggttgcccaaaacagggcaggcagatcttcaatttcagtgattttaactgtggaagctgtggaacatcaggtaaaaccgatgtttgtagaaaaactgaaaaatgtcaatataaaggaaggttcccgacttgaaatgaaagtcagagctacgggtaaccccaaccctgacattgtatggttgaaaaacagtgacatcattgtgcctcataaatatcccaaaatcagaattgaaggaaccaagggagaagctgcccttaaaatcgattccactgtcagccaagattctgcctggtatactgcgactgctattaataaagctggcagagacactacaagatgcaaagtaaatgttgaagttgagtttgcagagcctgagccagagagaaagttaatcatcccacgggggacatatagagcaaaggagattgcagccccagaactggagcccctccatttgcgatatggccaagagcaatgggaagaaggtgatctctatgacaaagagaaacaacagaaaccatttttcaagaaaaaactcacttccttaagacttaagcgctttgggcctgcccactttgaatgcaggctaacacccattggtgacccaacgatggtggtggagtggctccatgatggaaagccacttgaagcagccaacaggctccgtatgatcaatgaatttgggtactgcagccttgattatggcgttgcatattctagagacagtggtatcattacttgcagagccactaacaaatatggaacagatcacacatctgctacccttattgttaaagatgagaaaagtcttgtggaagaatcccaattgcctgaggggaggaaaggcttacagagaattgaagaattagagagaatggctcatgaaggtgcacttacaggtgtaacaacagatcagaaagaaaagcaaaagccagacattgtcttgtacccagagccagttagagtacttgaaggggagactgcaaggttccgctgcagggtaacaggctaccctcagcccaaagtcaactggtacctcaatggacagctcatccgcaaaagcaaaaggttcagagttcgctatgatggtatccattacctggacatcgtggactgcaaatcatatgacacaggtgaagtgaaggtcaccgcggaaaatcctgaaggtgtgatagagcataaagtgaagcttgagattcaacagagggaagattttaggtctgtccttaggagagctcctgaaccaaggcctgagtttcacgtacatgaaccaggaaagcttcagtttgaagtacaaaaagtggatagacctgttgacaccactgaaaccaaagaagttgtgaagttgaaaagggctgaaagaattacccatgaaaaagtgcctgaagagtcggaagagctgcgcagtaaattcaagcgcagaacagaagagggctattatgaagccattaccgctgtggagctcaagtctcgaaagaaggatgaatcctatgaggaactcctcaggaagacaaaagatgaacttctccactggaccaaagagttaactgaagaggaaaagaaagctcttgccgaagaaggcaaaatcacgattccaacttttaaacctgacaagattgaactaagtcctagtatggaggctccaaaaatcttcgaaagaatccagagccaaacagtgggccaaggatctgatgcacacttccgggtcagagtcgtggggaaaccagaccccgaatgtgaatggtacaaaaatggtgtcaaaattgaacggtctgaccggatctactggtactggcccgaagacaatgtttgtgaattggtcataagagatgtgactgctgaggactctgccagcatcatggtaaaagccatcaacatagctggagaaacctccagtcacgcattcttacttgtccaagccaagcaattgatcactttcacacaggaattacaagatgttgttgctaaggaaaaagacactatggcaacctttgaatgtgaaacttcagaaccatttgtcaaagtgaaatggtataaagatggtatggaggttcatgagggagataaatacaggatgcactctgacagaaaggttcacttcctctccatactgaccattgatacgtctgatgctgaagattacagctgtgtacttgtggaagatgaaaatgtcaaaacgactgctaaacttattgttgaaggtgcagttgttgagtttgtgaaagaacttcaggacatagaagttccagaatcatattcaggagaattagagtgcattgtatccccagaaaatatagaaggaaaatggtatcataatgatgtggagcttaaatccaatggcaaatatacaattacatctcgtcgtggacgtcagaacctcacggtcaaggatgtaaccaaggaggaccagggagaatacagctttgtcatcgacgggaaaaagacaacctgtaaattaaagatgaaaccccgccccattgctatcctacaaggacttagtgaccaaaaagtctgtgagggtgacattgttcagcttgaagttaaagtctccttggaaagtgtggaaggcgtctggatgaaagacggccaagaagtgcagcccagtgacagggttcacattgtgatagacaaacaatctcatatgctgctcattgaagacatgactaaggaagatgctggaaattactctttcaccattccagcccttggcctctccaccagtgggcgtgtctctgtctatagtgtggacgtgataacacctctaaaagatgttaatgtgattgaaggcaccaaggctgtgcttgaatgtaaggtgtcagtccctgatgtgacttctgttaagtggtacttaaatgatgaacaaatcaagcctgatgaccgtgtacaggccattgtgaaaggtactaaacagcgactagtcattaaccgaactcatgcttcagacgaaggaccttacaagctgatagttggcagagttgaaaccaactgtaatctctctgtagaaaaaattaaaattatcagaggtcttcgtgaccttacctgtacagaaactcaaaatgtggtgtttgaggttgagctgtcccactctggaattgatgtcctgtggaattttaaggacaaggaaatcaagcccagttctaaatataaaattgaagcacatggaaaaatatataaattgacagttctaaatatgatgaaagatgatgaaggaaaatacacattttacgcgggagaaaatatgacatctggaaaacttactgtggcaggtggggccatctccaagccactcacagatcagaccgtagctgaatcccaggaagctgtgtttgaatgtgaagttgccaacccagattccaaaggcgaatggttgagggatggcaaacacctaccactgactaacaacatcagaagtgagtctgatggccacaaaaggagacttatcattgctgccaccaaattagatgacattggagaatatacctacaaggtggccacctccaaaacatctgccaaactcaaagttgaagctgtcaaaattaagaagactctgaagaacctcacagtgacagaaacacaggatgctgttttcactgtcgagcttacacaccctaatgtcaaaggtgtccagtggatcaaaaatggagttgtgctggaatccaatgaaaagtatgctatctctgtcaaaggaacaatttactctctgaggattaaaaactgtgccatcgtggatgagtctgtttatggcttcaggcttggaaggcttggagccagtgccagactgcacgtggagactgtcaagatcattaaaaagccaaaggatgtgacagccttggaaaatgccactgttgcctttgaagttagtgtttcccatgacactgttccagtaaaatggttccataagagtgtggaaattaagccaagtgacaaacacagactggtctcagaaaggaaagtccacaagctgatgctgcagaacatctccccctcagatgctggggaatacacagctgtggtcgggcaattggaatgcaaagcaaaactgtttgtggagacattacatattacaaaaaccatgaaaaatatcgaggtgcctgagaccaaaactgcctcttttgagtgtgaggtgtcccacttcaatgtcccttccatgtggctgaagaatggtgtggaaattgagatgagtgaaaagttcaagatagttgtgcagggaaaactccatcagctgatcatcatgaacaccagcacagaggactcggcagaatacacatttgtctgtggcaatgaccaagtcagtgccaccctgacagtcaccccaatcatgattacttccatgctgaaagacatcaacgctgaagaaaaagacactattacttttgaggtgacagtgaactatgaaggcatctcttacaaatggttaaagaatggtgtggaaatcaaatcaactgacaagtgccagatgagaaccaaaaagctcacacactcactgaacatcaggaatgttcactttggggatgctgctgactacacctttgtggctggaaaagcaacatcaacagccacactttatgtggaagctcgtcatatagaatttaggaaacacattaaggacattaaggtactggagaagaagcgagccatgtttgaatgtgaagtttctgaacctgacatcactgtacagtggatgaaagatgaccaggaactgcagatcacagacagaataaagattcagaaggagaaatatgtccaccgccttctgatcccatccacccggatgtctgatgctgggaagtacacagtggtggcaggaggcaacgtgtcaactgcaaaactctttgtagaaggcagagatgttcgcatccgaagtattaaaaaggaggttcaggtcattgagaaacagcgtgctgttgttgaatttgaggtcaatgaagacgatgttgatgcccactggtataaagatggcattgaaatcaatttccaagttcaagaacgacacaaatatgtagtggaaagaagaatccaccgaatgtttatctctgagaccagacagagcgatgcaggagaatacacctttgtggcaggaaggaacaggagttctgtcactctctatgtcaatgctcctgaaccgccccaagttctgcaggagctccagcctgtcactgtgcagtctggcaagcctgcccgcttctgtgccgtgatatccggaagaccacagcccaaaatttcctggtacaaggaagagcagctgctttccactggcttcaagtgcaaatttcttcatgatgggcaagaatacacgcttttgctaattgaagccttcccagaggatgcggcagtctatacctgtgaagccaagaatgactatggtgttgccacaacatcagcttcactctcagtggaagttccagaagttgtgtctcctgatcaggaaatgcctgtttatccacctgccatcatcaccccgcttcaggacactgtcacttctgaagggcagccagcccgttttcaatgccgggtttctggaacagatctaaaagtgtcgtggtacagcaaagacaagaaaatcaagccatctcggttctttagaatgactcaatttgaagacacttatcaactggaaattgccgaagcttatccagaagatgaaggaacttacacgtttgttgctagtaatgctgtaggccaagtatcaagcacagccaacctgagtctggaagctcctgaatcaattttgcatgagaggattgaacaagagattgagatggaaatgaaagctgccccagtgatcaagaggaaaatcgaacccctggaagtagcactgggccacctagccaaattcacctgtgagatccaaagtgctcccaatgtccggttccagtggtttaaagctggccgagaaatttatgagagtgacaagtgttctattcgatcttcaaagtatatctccagccttgaaatcctgagaacccaggtggttgactgcggcgagtatacatgcaaagcttccaatgagtatggcagtgtcagctgtacagccacactaactgtgacagaggcatatccaccaacctttctctccagacctaagtcccttacaacttttgtgggtaaggcagccaagttcatctgcacagtgacagggactcctgtgatagaaaccatttggcagaaagatggtgctgcactctcaccttcacctaactggaggatttccgacgcagaaaacaaacacattttagaactctcaaaccttaccattcaagatagaggagtttattcttgtaaggcttccaacaagtttggagcagacatctgccaagcagagttgatcatcattgataagccacatttcattaaagaattagagcctgtgcagtccgctatcaataagaaggtccaccttgagtgccaagtagatgaagacagaaaagtcacagttacgtggagcaaagatgggcaaaaactccccccagggaaagattataagatctgttttgaagataaaatagcaacacttgagattcctttggccaaactgaaagattcaggaacctatgtctgtacagcttcaaatgaggctggaagcagctcctgctcagccacagtcactgtcagagagccaccatccttcgtgaagaaggtggatccctcttatttaatgctcccaggtgaatcagcacgcctccattgcaagctgaaaggctcacctgtgatccaggttacttggtttaaaaataacaaagaactcagtgaaagtaacacagtccgaatgtattttgtcaattctgaggctatacttgatattacggatgtaaaagttgaagacagtgggagttactcatgtgaagcagtgaatgacgtcggcagtgatagctgcagtactgaaatagttatcaaagaacctccttctttcatcaaaactcttgagcctgcagacatagtgagaggaacaaatgctctacttcagtgtgaagtctcaggcactggaccatttgaaattagctggttcaaagacaagaaacaaattcgaagtagtaaaaaatacagattgttttctcagaagtctcttgtgtgtctggagatcttttcgtttaatagtgcagatgttggtgaatatgaatgtgttgttgctaatgaagtcggcaagtgtggctgcatggcaacccacttactcaaagaacctccaacctttgtaaagaaagtagatgatttgattgcactaggaggacaaaccgttaccctgcaagctgctgtgagagggtcagagcccatttctgtcacatggatgaaaggtcaagaggtcatcagagaagacggaaaaatcaaaatgagcttttccaatggtgttgcagtcttgataatccctgatgttcagattagttttggaggcaaatacacgtgcctggctgaaaatgaagctggaagccaaacatctgttggggaattaatagttaaagaacctgccaaaatcattgagcgagcagaactgatccaggtgacagcaggagatcccgccacactggagtacacagtggcaggcacgccagaactgaagcccaaatggtacaaagatgggagacccttggtcgccagtaaaaaataccgaataagttttaaaaacaatgttgcccagctcaaattttattcagctgagctgcacgacagtggccaatacacatttgagatttccaatgaagtgggcagcagctcctgtgagactacattcactgtattagatcgagacattgctccattttttaccaaacccttgcgcaacgtggatagtgttgttaatggtacctgcagactggactgcaaaattgcaggctccctccccatgagggtgtcctggtttaaggatggcaaagaaatagctgcttctgacagatacaggatagcatttgtggaaggcacagcctctttggagatcatcagagtagacatgaatgatgcagggaatttcacttgtcgagccacaaattccgtgggaagcaaagacagcagtggagccctgattgtgcaagaaccacccagttttgtaactaaacccggctcaaaggatgttctgcctggctcagcagtctgcctgaagagcactttccaaggatctactcctctcacaatcagatggtttaagggcaacaaagagctggtttctggtggaagctgctatattaccaaagaagctttagagagttccctggaactctatttagtaaaaacctctgattcgggcacgtacacatgtaaagtcagcaatgtcgctggaggggtggaatgcagtgcaaacttgtttgtaaaagaacctgccacatttgttgaaaagttagagccatcacagctgttaaagaagggagatgccacccagctagcctgcaaagtaactggtacccctccaattaaaataacatggtttgcaaatgatagagaaattaaggagagcagcaaacacagaatgtcttttgtggagtctactgcagttctaagactgacagatgttggcatcgaagacagtggtgaatatatgtgtgaggcccaaaatgaggctggcagtgaccactgcagtagcattgtaatagtcaaagagtcaccttattttaccaaggaatttaagccaattgaagtcttaaaggagtacgatgtcatgttgctggctgaggtggcaggcactcctccctttgagatcacttggttcaaagataacacaatcctgcgaagtggtagaaagtataagactttcattcaggatcatctggttagcctgcagatcctcaagtttgtagctgcagatgctggcgaataccagtgtcgggtgaccaatgaggtgggcagcagcatctgcagtgccagggtgactttaagagaacccccatccttcataaagaagatcgagagtaccagctccctccggggaggcacagctgccttccaggccactctgaagggctccttgccaattacggtgacttggctaaaagacagcgatgaaatcactgaagacgataatataagaatgacctttgagaacaatgtggccagtttgtacctcagtggcattgaagtcaagcatgatgggaaatatgtctgtcaggccaaaaatgatgcaggaatacaaagatgttctgcattactctcagtaaaagaacctgcaacaatcaccgaggaagctgtgtctatagatgtcacccaaggagacccagccactttgcaggttaaattttcagggactaaggagattacagccaaatggtttaaagatggccaagaactgaccctgggctcaaaatataaaatcagtgtcactgatacagtctcaatactgaagattatttctacagaaaagaaagatagtggagaatatactttcgaggtccaaaatgatgttgggaggagcagctgcaaggctagaattaatgtattagatcttatcatacctccttcattcaccaaaaagctgaagaaaatggacagcattaaaggttctttcattgatttagaatgtatagtggctgggtcacatcccataagcatccagtggttcaaagatgaccaagaaatatcagctagtgaaaagtacaaattctcttttcatgacaatactgccttcttggaaatcagccagctggaaggtacagacagtgggacatacacttgttctgccacaaataaggcagggcacaaccaatgcagtgggcatctgacagtcaaagaacccccttactttgtggaaaagccacagtcacaagatgtcaatcccaacacaagggtacagttaaaggctcttgtgggtggcactgcacccatgacaataaagtggtttaaagataacaaagagttacactcaggagcagcccgctcagtttggaaggatgacacctctaccagtctagagctctttgcagccaaagctaccgattctggaacctacatttgccaactaagcaatgatgttggcacagcaaccagcaaagccactctctttgtaaaagaacctcctcaattcattaagaagcccagtccagtcttagtgctgaggaatggacagtcaacaacatttgaatgccaaataacaggcactcctaaaatccgagtgtcttggtatctagacgggaatgaaataacagccattcagaaacatggcatttccttcattgatggtttagccactttccagatttctggtgccagggtagaaaatagtgggacttatgtgtgtgaagctcgaaatgacgcaggcacggcgagctgcagcattgaactcaaagtgaaagaaccccccacctttatcagagagctgaagcctgtggaggtagtaaaatatagtgacgtggagctggagtgtgaagttacgggaacacctccgtttgaagtcacttggctgaagaataacagggaaattcgaagcagcaaaaaatacacattgaccgacagagtgtctgtgtttaacctccatataaccaagtgtgacccttcagacactggggaataccagtgcattgtatccaatgaaggcggcagctgctcatgcagtactagagttgccctgaaagaaccaccatcattcattaagaagatagaaaataccactactgttttgaaaagttctgccacctttcagagtaccgtggcaggttctcctcctatttctataacctggctaaaggatgatcagattcttgatgaagatgataatgtctatatttcatttgtggacagtgtggccacacttcaaatcagaagtgtggataatggacacagtgggagatatacctgtcaagccaagaatgagtcaggagttgagaggtgttatgctttccttttagtacaagaaccagctcaaatcgtagagaaagctaaatcagttgatgttacggagaaagatcccatgaccttggaatgtgttgtggctggaacaccagaactcaaagtgaaatggcttaaagacgggaaacaaatagttcccagtagatacttttcaatgagttttgaaaataacgtggccagttttagaattcagtcagtaatgaagcaggacagcggtcagtacactttcaaggtggaaaatgacttcggaagcagtagctgtgatgcctacttaagagtgctagatcaaaatattcctccatcattcaccaaaaaattaaccaaaatggataaagttctgggctcttctattcatatggagtgcaaggtgtctggttcacttcccattagtgctcagtggtttaaggatggaaaagaaatatctacaagtgcaaaatacagacttgtgtgccatgagagatctgtgtctctggaagttaataatctggaattagaagatactgcaaattacacatgcaaagtgtcaaatgtagcaggagatgatgcatgcagtggcatcttaactgtgaaagaaccaccaagcttcctagtgaaacctgggcgacagcaagccatacctgattctacagtggaatttaaggcaatactaaaaggaacaccaccatttaaaataaaatggtttaaggatgatgtggaacttgtctcaggtcctaaatgtttcattggcttggaagggtcgactagcttcttaaatctctactcagtggatgcttctaagactggacagtatacttgccatgttaccaatgatgttggtagcgactcttgtactacgatgttgcttgtgacagaaccaccaaagtttgtaaagaaattagaagcctccaaaattgtgaaagcaggtgactcttcacgacttgaatgcaagatagctggatccccagaaatcagagttgtgtggttccgaaatgaacatgaacttccagccagtgataagtacagaatgactttcattgactcagtggccgtcatacagatgaacaatctcagtactgaggacagtggagatttcatttgtgaggctcagaatcccgctggcagcacaagctgcagtaccaaggttatagtaaaagagccacctgtttttagcagcttccctcctatagtagaaacccttaaaaatgctgaagtcagtcttgaatgtgaactttcgggaacaccaccgtttgaggtggtatggtacaaagacaagcggcaactcagaagcagcaagaaatacaagattgcatccaaaaacttccacacaagtattcacattctcaatgtggacacttcagacatcggtgaataccactgcaaagcacagaatgaagtgggaagtgatacttgtgtttgtactgtaaaattgaaagaaccaccaagatttgtctccaaactgaacagcctcactgttgtagccggagagcctgctgaattacaagcatccatagaaggcgcccagcctatttttgtccagtggcttaaagagaaggaagaagtgattagagaaagtgaaaacatcaggattacatttgtggaaaatgttgcaactctacagtttgcaaaagcagagccagctaatgctggaaagtatatctgccaaatcaagaatgatggtggaatgagggagaacatggccacactgatggtcttagagcccgcagtcattgttgagaaggcaggaccgatgacggtgactgtaggagaaacgtgcactctggagtgtaaggtggctggcactccggaactctctgttgaatggtacaaggatggaaagctgttgaccagcagccaaaaacacaaatttagcttctacaacaaaatctcttccttaaggattctctcagttgaaaggcaagatgcaggcacatacactttccaggttcaaaataatgttgggaaaagcagctgcacagctgtggttgatgtttcagaccgagcagttcctccctctttcacacgaagactgaaaaatactggtggggtgttaggtgcttcttgcatcttggaatgcaaagtagctggatcatcacctatttcagttgcctggtttcatgagaaaaccaagattgtcagtggagcaaagtaccaaaccacattttcagataatgtctgcacattgcagttgaattctctggattcctcagatatgggcaattacacatgcgtggctgctaatgtcgctgggtctgatgaatgtcgtgcagtgctaactgtacaagaaccaccctcttttgtgaaagaacctgaacctttggaagtactaccaggcaaaaatgtaaccttcacaagcgttattagaggaacccctccattcaaagtcaactggttcagaggtgccagagaactagtgaaaggagaccggtgcaacatctattttgaagacactgtggcagaactggaattatttaatattgacatatctcagagtggggaatacacctgtgtggtttctaacaacgctggccaagcatcttgcactacccgtctctttgtgaaagaaccagctgcatttttgaagagattaagtgatcattctgtagaaccagggaagtccataattctggagagcacctacactggaacacttccaatttctgtcacttggaaaaaggatggttttaacataactacctctgaaaaatgtaacatagtcacaacagagaaaacttgtatcctggaaattctgaatagcacaaaaagagatgcagggcagtattcctgcgagattgaaaatgaggcaggaagggatgtttgtggagctctggtatctacattagaaccgccttattttgttacggaactggaacctctggaggcagcagttggagattcggtttctttacaatgccaagttgctgggacaccagaaattacagtgtcttggtacaaaggagataccaaattacggccaactcctgaatacaggacctactttacaaacaatgtggccacacttgtttttaataaagtgaacatcaatgacagtggagagtacacatgcaaagcagaaaatagtataggaactgcttcttctaagactgtgttcagaattcaagagcgccaactcccaccttcttttgcaagacaattaaaggacattgaacaaactgtggggttacctgttacactcacttgtcgattaaatggctctgcacccatccaagtgtgctggtatagagatggagtacttttaagagacgatgaaaatctacagacttcatttgtagataatgtggcaactttaaaaattttgcaaactgacttgagtcactctggccagtactcttgctcagcttccaacccacttggaacagcatcttctagtgctagactcacagcaagagaacccaagaaatctcccttctttgacatcaagcctgtatctatagatgttattgctggagaaagtgctgattttgagtgtcatgttactggtgctcaaccgatgcgaatcacttggtcaaaagataacaaggagatccgtcctggaggaaactatacaatcacatgtgtgggaaacactcctcatttgagaattcttaaagtaggcaaaggagactctggtcaatatacttgccaagcaaccaatgatgttggcaaagacatgtgctcagctcagctcagtgtaaaagaacctccaaagtttgttaagaaattagaagcttcaaaagttgcaaagcagggagaatccattcaactggaatgtaaaataagtggctccccagaaatcaaagtttcatggttccgaaatgacagcgaacttcatgaaagttggaaatacaacatgtcattcattaattctgtggcattgcttacgatcaatgaagctagtgctgaagacagcggggactacatttgtgaggctcataatggtgttggtgacgccagctgcagcacagcgttgacagtgaaagcacctcctgttttcacccagaagccttctccagtaggagctcttaaaggttctgatgtgattctccaatgtgaaatttcgggaactcccccatttgaagtagtatgggttaaagatcgaaagcaggttagaaacagcaagaaatttaaaatcacttcaaaacattttgatacaagtcttcatatccttaatcttgaagcctccgatgtcggggaatatcactgcaaagctactaatgaggtgggaagtgacacgtgttcttgctctgtcaagttcaaagaacctccacgattcgtgaaaaagctaagtgacacctcaacccttattggggatgctgttgagttacgggccatagtggagggcttccagccaatttctgttgtctggctgaaagatagaggtgaagtcatcagagagagtgaaaataccaggatttcattcattgataacattgcaaccctccagctggggagtccagaagcatctaattctggaaaatatatatgccaaatcaaaaacgatgctggaatgagagaatgctctgcagtcttgactgtactagaaccagcaagaatcatagagaagcccgaacccatgactgtcactactggaaatccttttgcattagagtgtgtagtgactggaacaccagaactctcagccaagtggttcaaagatggaagagaattgtctgcagacagcaaacatcacattacattcatcaataaagtggcttcccttaaaatcccctgtgccgaaatgagtgacaaaggattatatagctttgaagtgaaaaacagtgttggcaaaagtaactgcactgtatccgtccatgtttctgatcggattgtgcctccttccttcatccgcaagctgaaagacgtgaatgccatcctgggggcctcagttgttttggagtgccgagtctctggctcagccccgatttcagttggctggtttcaggatggaaatgagattgttagtgggcccaaatgtcagtccagcttttcggaaaacgtctgtactttgaatctgagcttgttggagccctccgacacaggcatatacacgtgtgtggctgccaatgtagctggttccgatgagtgctcagcagtcctgactgtgcaagaaccaccatcttttgaacaaacccctgattctgtggaagttttgcctggaatgagcctcacattcaccagtgtcatcagaggcacccctcctttcaaggtcaagtggtttaaaggcagcagggaactggtgcctggggagtcatgcaacatctctctggaagattttgtcacagaactggagttgtttgaggtgcagccattagaaagtggagactattcttgcctcgttacaaatgatgctggcagtgcttcctgtaccacacatctttttgtgaaagaaccagccacctttgtgaaaagattggctgatttcagtgttgagacaggaagccccatagttctcgaggccacatacactggcacacctccaatctcagtgagctggataaaggacgagtatcttatttcacaatctgagagatgcagtattactatgacagaaaaatctaccatactggaaattcttgagagcacaatagaggattatgcacagtacagctgcctgatagaaaatgaggctggtcaagatatctgtgaagctctggtgtctgtcttagaaccaccgtactttattgaacctctggaacatgtggaagcagtcattggagaacctgcaactttacagtgtaaagtggatggaactccagaaattagaatttcttggtataaagaacacacaaagctacgatcagctcctgcatataaaatgcaattcaaaaataacgttgcttccttagtaatcaacaaagtggatcacagtgatgtgggagagtattcatgcaaggcagacaacagtgtgggggcagtcgcttcttcagctgtgcttgttatcaaagcgcgcaaacttccacctttctttgcaagaaaactgaaagacgttcatgagactctaggcttcccagttgcatttgaatgccgcatcaatggctcagaacctcttcaagtgtcttggtacaaggatggggttcttttgaaagatgatgctaatttgcagacatcttttgttcataatgtagcaactcttcagattttacaaactgaccagagccacatagggcagtataattgctctgcttctaatcctcttgggactgcttcatccagtgccaagctcattctctcagagcatgaagtgcctcctttctttgatctaaagcctgtatcagtagatcttgctcttggagaaagtggtacttttaaatgtcatgtaactgggactgcaccaatcaaaatcacttgggccaaagataaccgagagattcgccctggaggcaactacaagatgactttggtagaaaatactgccactctgacagttctcaaagtaggcaaaggcgatgccgggcagtacacctgctatgcaagcaacatcgctggaaaagactcttgttctgctcagctgggtgtacaagaaccacccaggttcattaagaagctagaaccttcaagaattgtgaaacaggatgaattcacaaggtatgaatgcaaaatcggtgggtctccagaaatcaaagttttatggtataaggacgagactgaaattcaagagagcagtaaattcagaatgtcattcgttgactcggtggctgtgctggaaatgcacaatctcagtgttgaagacagtggagactacacctgtgaggcccacaatgcagcaggcagtgccagcagcagcacatccttaaaagttaaagaaccacccattttccgcaaaaagcctcatcctatagagacactgaaaggagctgatgttcaccttgaatgtgagcttcagggcactcccccatttcacgtttcttggtataaagacaagagagaacttaggagcggcaagaagtacaagataatgtctgagaacttcctaaccagtatccacatcctgaatgtcgatgctgcagacattggggaatatcagtgtaaagccacaaatgatgtgggaagcgacacttgcgttggttccatcgctctcaaagcaccaccaagatttgtgaagaagctcagtgacatatctactgtcgttggtaaagaagttcagctgcagactaccattgaaggcgctgaacccatttcagtggtgtggttcaaagataagggagaaatcgttagagaaagtgacaacatatggatttcttattcagaaaacattgcaaccttacagttttcaagagtggaaccagccaatgctggaaaatacacttgtcagatcaaaaacgatgctgggatgcaagagtgcttcgccacgctatccgttctcgagcctgcaacaattgtagaaaagccagaatccataaaagttaccacgggagacacctgtaccttggagtgtacagtagctggcacccctgaactcagtactaagtggtttaaggatggaaaagagctaacaagtgacaacaaatacaaaataagcttcttcaacaaagtatccggccttaagatcatcaatgtagcaccgagtgacagtggggtatacagttttgaggtgcagaaccctgttggcaaagacagctgcacagcttcattgcaggtttcagaccgaaccgttcctccttcattcacaagaaaattgaaagagacaaatggtctatccggctcctcagttgtaatggagtgtaaagtctatgggtcacctccaatctctgtctcctggttccatgaaggaaatgagatcagtagtggaaggaaataccagaccaccctgacagataatacttgtgctttaactgtgaacatgctggaagaatcagacagtggtgactacacatgtatagctactaatatggctggttctgatgaatgtagtgctcctttgactgtgagagaaccaccatcttttgttcagaaacctgatcccatggatgttttaactgggaccaatgtaactttcacaagtatcgtaaaaggaacacctcctttcagtgttagctggttcaaaggtagcagtgaactagtaccaggtgacagatgcaacgtgtctttggaggattcagttgctgaactggagttgttcgatgtagatacatcacaaagtggagaatatacttgcatagttagcaatgaagctggcaaggcttcttgtacaacacatctctacataaaagccccagccaaatttgtgaagaggctgaatgattacagcatagagaaaggaaaacccctgatcctagagggtacattcactggaactcctcccatttcggttacctggaagaaaaatggcataaatgtaactccttctcagaggtgtaatataactacgactgaaaaatcggcaatcctggaaattccaagtagcacagtagaggatgcaggacaatacaactgctacattgaaaatgcctctggaaaagattcctgttcagcacaaatactcatactagaaccaccgtattttgtcaagcagttggagccggttaaggtgtctgttggagattctgcctctctacaatgccagcttgctggaacccctgaaattggggtatcctggtataaaggagatacaaaattgagacccactacgacttacaaaatgcattttaggaataatgttgctacactggttttcaaccaggttgatattaatgatagtggagaatatatctgcaaagctgaaaacagcgtgggagaagtttctgcatcaactttccttaccgttcaagagcaaaaacttccaccatcattttctcgacaattgagagatgttcaagaaacagttggactgccagttgtttttgattgtgccataagtggatcagaacctatctccgtgtcttggtataaagacggcaagccattgaaagacagcccaaatgtacaaacatcatttttagacaatacagccacactcaatatttttaaaactgaccggagccttgcaggccagtattcctgcacagctacaaaccctataggctctgcttcttccagtgccaggctcattctcacagaggggaagaacccacccttctttgacatccgtcttgcccctgtggatgctgtggtgggagaaagtgctgactttgagtgccacgtcacgggcacacaaccgataaaggtcagctgggccaaagacagcagagaaatacgaagtggcggaaagtaccagattagttatctggaaaacagcgcccacctgacagtcctcaaagtagacaaaggagattctggacaatatacctgctatgctgtgaatgaagtgggaaaagactcttgcacagctcagctgaatataaaagagcggctcatcccaccaagtttcactaaaagactctcagagacagtagaagaaacagaagggaattctttcaaacttgagggacgtgtggctggttcccaacctataactgttgcctggtacaaaaataatatagagatacaaccaacttctaactgtgaaataacattcaagaacaacacgttagtgctgcaagtcaggaaagcaggcatgaacgacgctggtttgtacacatgcaaagtgtccaatgatgcaggctctgctctgtgcacgtcttcaatcgtcatcaaagaacctaagaagccacctgtatttgatcagcaccttactccagtaacagtgagtgaaggagaatacgtgcagctcagctgccatgtccagggatctgagccaattaggatccagtggttgaaggctggcagggaaataaagccttcagacagatgcagcttcagctttgctagtgggacagctgtactggaactcagagatgtggctaaagcagattcgggagattatgtgtgtaaagcttcaaatgtggctggaagtgacactaccaaatcaaaagtgaccattaaagacaaaccagctgtggccccagcaaccaagaaagctgcggtagatggaagactcttttttgtgtcagaacctcagagtatcagagtcgtagaaaaaaccactgcgaccttcattgcaaaagttggaggtgacccaatcccaaatgttaaatggacaaaagggaagtggagacagctgaaccaaggaggtcgtgttttcatccaccaaaaaggcgatgaagcaaaactggagattagggacaccacaaaaactgattctgggttataccgatgcgtggcatttaacgaacatggtgaaattgaaagtaatgttaacttacaggtggatgaaaggaagaaacaagagaaaattgaaggcgatcttagagcaatgctgaaaaagactccaatcttaaagaaaggagctggagaagaagaggaaattgatatcatggaacttctcaaaaatgttgatcctaaagaatatgaaaaatatgcccgcatgtatggaatcactgacttccgaggtcttcttcaagcatttgaactgctcaagcaaagccaagaagaagagacacatagactggaaattgaggaaatagagaggtcagagagggacgaaaaggaatttgaggaacttgtatcatttattcagcaaagactgtcacagacagagcctgtcactctgatcaaggacattgaaaatcagacagttttgaaagataatgatgctgtctttgaaattgacattaaaattaattatccagaaatcaagctttcgtggtacaaaggaactgaaaaactggaacccagtgataaatttgaaataagcattgatggtgaccgacatacactcagagtcaaaaactgtcaacttaaagaccagggcaattatcgattggtttgtggtccacacatcgctagcgctaaactaactgtaattgagcctgcatgggaacggcatcttcaggatgtgactctgaaagaaggccagacttgcaccatgacatgccaattttctgtaccaaatgtaaaatctgaatggttcagaaatggcagaatccttaaaccccaaggtagacataaaacagaagtggaacacaaagtccataaattgaccattgcagatgttcgagcagaagaccagggtcagtacacctgcaaatatgaagaccttgaaacttcagcagaactcagaatcgaagctgaaccaattcagtttacaaagcgcatacagaacatcgtggtgagtgagcatcagtctgccacctttgagtgtgaagtgtcctttgatgatgccattgtaacatggtacaaaggaccaacagaactgacagagagccagaaatacaacttcaggaatgatggccgctgccattatatgaccatccacaatgtgaccccagacgatgaaggtgtctactcggtcatcgctcggctggagccaagaggtgaagcaagaagcacggcagagctgtacctaacgacgaaagaaatcaaacttgagctgaagcctcctgatattcctgactccagagttccaatcccaaccatgcctatcagagcagtgccaccagaagaaatccctcctgtggttgctcctcctatcccccttttgctaccaacacccgaagaaaagaaaccaccaccaaaacgtattgaagttaccaaaaaggctgtgaagaaagatgccaaaaaagttgttgcaaagcccaaagagatgacaccacgtgaagagattgtcaagaagcctccacctcctactaccttaattccagcaaaagctcctgaaatcattgatgtatcctctaaagctgaagaagtaaaaataatgactataaccagaaagaaagaggttcagaaagaaaaagaagctgtgtatgagaaaaagcaagcagtccacaaggagaagagagtcttcattgaatctttcgaagaaccttatgacgaactggaggtagaaccatacacagagccatttgaacaaccttattatgaagaaccagatgaagactatgaagagattaaggtagaagctaaaaaagaagttcacgaggaatgggaagaagattttgaagaagggcaagaatactatgaaagggaagaaggctatgacgaaggggaggaagagtgggaagaggcttaccaagaaagggaagtaattcaagttcaaaaggaggtctatgaagaatcacatgagagaaaagttccagccaaagtacctgaaaagaaagcaccaccacctcctaaagttataaagaagccagtaattgaaaaaattgaaaagacttctcgaagaatggaggaagaaaaagttcaagtcaccaaagtacctgaagtttcaaagaagattgttccacaaaaaccttcccggactccagtacaggaagaagttattgaagtgaaagtaccagctgtgcatacaaagaagatggttatttcagaagaaaagatgttctttgcttctcacacagaggaggaggtgtcagtcacagtccccgaggtacaaaaggaaattgttactgaagagaaaattcacgttgccatttccaaaagggttgaaccaccacctaaagtccctgagctacctgagaaaccagctccagaagaagtggcccctgttcctatccctaaaaaagtggagcccccagcaccaaaagttcctgaggttcccaagaaacccgtgccagaggagaaaaagccagttcctgtgcctaagaaggaacctgctgctcccccaaaagtcccagaggtgccaaagaaacctgtccctgaagaaaagattcccgttcctgttgcaaagaaaaaggaagctcccccagctaaagttcctgaagtacagaagggagttgtgacagaagaaaaaataaccattgtaactcaaagagaggaatctccaccaccagcagtgccagaaataccaaagaagaaagttcctgaagaaaggaaacctgttcctcggaaggaggaagaagttccaccaccaccaaaagtgccagctctgcctaagaaacccgtcccagaggagaaagttgcagtgccagttcctgtcgctaagaaagctcctcctccccgagctgaagtctctaagaaaactgttgtagaagaaaagagatttgttgctgaagaaaaactatccttcgcagttcctcaaagagtggaagtcacgcggcacgaagtatctgcagaggaggaatggagttactcagaagaggaggaaggtgtgtccatttcagtttatagagaagaagaaagagaggaggaggaagaagcagaggttacagaatatgaagtgatggaagagcctgaggaatatgttgtggaagaaaagctgcacattatttctaagagagtggaagctgagccagctgaagtgacagagaggcaggagaagaaaattgtactgaaaccaaaaattcctgctaaaatagaggagcctccaccggctaaagttcctgaagcacctaagaaaattgtgccagaaaagaaagttcctgctccagttcctaaaaaggaaaaggtgcccccacctaaagtgccagaagagccaaagaaaccagttccagaaaaaaaggttcctccaaaagtcattaagatggaagaacctctcccagccaaagtgactgagaggcacatgcaaattacccaggaagaaaaagttcttgttgctgtaactaaaaaagaggcgcctccaaaagcaagagtgccagaggaaccgaagagagctgtcccagaagaaaaagttctgaaactcaaacctaaaagagaggaggaaccaccagctaaagtgactgaattcagaaaaagagtggttaaagaagaaaaagtatcaattgaagctccaaaaagagaacctcaacccatcaaagaagtaactataatggaagagaaagaaagggcttataccctagaagaagaagctgtttcagtacaacgggaagaagaatatgaggaatatgaagaatatgattataaagaatttgaggagtatgaaccaacagaagaatatgaccaatatgaagaatacgaggagcgggagtatgaacgatatgaagagcatgaagaatacatcacagaaccagagaagcctatccctgtaaagcctgtcccagaagaaccagttcccacaaaaccaaaggccccaccggctaaagtgctgaagaaagctgtccctgaagaaaaagtaccagtgcccattcctaagaaactcaaacctccaccacccaaagtgcctgaagaaccaaagaaagtttttgaggaaaaaatacgtatttcaattaccaaacgtgaaaaagagcaggtgactgaacccgctgctaaagtgcccatgaagcccaagagggttgtcgcagaagaaaaagtacctgtccctagaaaagaagtagcaccacctgttagagtgccagaagtgcctaaagaacttgaaccagaagaggttgcctttgaagaggaagttgtaacccatgtagaagaatatcttgtagaagaagaagaagagtacattcatgaagaagaggagttcataactgaggaagaagtggtgccagtgataccagtcaaagtgcctgaggtacccaggaaacctgttccagaagagaagaaacctgttcctgttcccaagaagaaggaagctccaccggcaaaagtgcctgaggttcctaagaagccagaggagaaagttcctgtgcttattcctaaaaaggagaagcctccgccagcaaaagttcctgaagtgcccaagaaacctgtgccagaggagaaagtaccagtaccagttcctaaaaaggtggaagctccacctgccaaagtgccagaggtacccaagaagcctgtgcctgagaagaaggtgccagttcctgctcctaagaaagtggaggctccacctgcaaaagtgccagaggtgcccaagaagctcatcccagaagaaaagaaaccaacacctgttccgaaaaaagtggaagcaccaccacccaaagtgccaaagaaacgtgaaccagttccagttcctgtagctctacctcaggaagaggaagttctatttgaagaagaaattgttcctgaagaggaagttctacctgaggaagaggaagttctacctgaggaagaggaagttctacctgaagaagaggaagttctacctgaagaagaggaaattccacctgaggaagaggaagttcctcccgaagaagaatatgtacctgaggaagaagaatttgtacctgaagaagaagtccttccagaagttaaacctaaggtgccagtacctgcaccagtgcctgaaattaagaagaaagtgacagagaagaaagtggtcattcccaagaaagaggaggctccccctgccaaagttcctgaggtgcctaagaaggtggaagaaaaacgaatcattctccctaaagaagaggaagttctaccagttgaagtgactgaggagcctgaagaagagcctatttcagaagaagaaatcccagaagaaccacctagcatagaggaagttgaagaggtggcaccacctagagtgcctgaagtgattaagaaagcagtacctgaagcacctactcctgttcctaaaaaagtggaggcaccaccagctaaagtgtcaaagaaaattcctgaggaaaaagtacctgttcctgttcagaaaaaagaggcacccccagccaaagtgcctgaagtaccaaagaaagtcccagaaaagaaagtccttgtgcctaaaaaggaagctgttcccccagctaaagggagaactgtccttgaagaaaaagtatcagttgccttccgccaagaagtagtagtaaaagaaagactagaattagaagtagtagaagcagaagtggaagaaattccggaagaagaagagttccatgaagttgaagaatattttgaagaaggcgagtttcatgaagtagaagaattcatcaaattagaacaacatagagttgaagaagaacacagagttgaaaaagttcatagggtaatagaagtttttgaggctgaagaagtggaagtatttgaaaaaccaaaagctccacctaaagggcctgagatatctgagaaaatcatccctccaaaaaaaccgcccactaaagttgttcctcgaaaagagccaccagctaaagtaccggaggtgcctaagaaaattgtggtagaagaaaaagtacgtgttcctgaagagcccagagttccaccaactaaagtgcctgaagtgctgccaccgaaggaagtggtcccagaaaagaaagtaccggtgcctcctgccaaaaagccagaagctccacctcctaaagtgcctgaggctcccaaagaagttgttcctgaaaagaaagtgccagtgcctcctcctaaaaagcctgaagtgccacccacaaaagtcccagaggtgccaaaggcagctgtcccagaaaagaaggtgcctgaagctattcctcccaaaccggaaagtcctccccctgaagtgccagaggctccgaaagaagttgttcctgaaaagaaagtgccagcggctcctcctaaaaagcctgaagtcacacctgttaaagtgcctgaggctcccaaagaagttgttcctgaaaagaaagtgccagtgcctcctcctaaaaagcctgaagtgccacccacaaaagtcccagaggtgccaaaggtagctgtcccagaaaagaaggtgcctgaagctattcctcccaaaccggaaagtcctccccctgaagtgttcgaggagcctgaggaagttgccctagaagagcctcctgctgaagttgtggaagagccagagccagcggcgcctccacaagtgaccgtaccacctaagaaacctgtcccagaaaagaaagcacctgctgtcgttgccaaaaaacctgaactaccaccagtgaaagtgcccgaggtgcccaaggaggttgttcctgaaaagaaggtgcctctggtggttcccaaaaagccagaagccccacctgctaaagtgcctgaagttccaaaagaagttgttccagaaaagaaagtagctgttcccaaaaagccagaagtcccaccagcaaaagtgccagaagtgccaaagaaacctgtcttggaagagaaaccagctgttcctgttccagaaagagcggagtctcctcccccagaagtatatgaagaacctgaggaaattgctcctgaagaggaaattgctcctgaagaggaaaagccagttcctgttgcagaagaggaggaaccagaggttccacctccagcagtgcctgaagagcccaagaagacatcccagagaagaaagttcctgtcatcaaaaaaccagaagcaccgcctcctaaagaacctgaacctgaaaaggttattgagaagccaaaactcaaaccaagacccccacctcctccacctgctccacctaaggaagatgtgaaggagaaaatattccaacttaaagctattccaaagaagaaagttcctgaaaaacctcaggttccagaaaaagtggagcttacacctctgaaagtgcctggaggtgaaaagaaagttcgcaaattacttccggaacgtaaacctgaaccaaaggaagaagttgttctgaaaagcgttctaagaaaaagacctgaagaagaagaacctaaagtagaacctaaaaaactagaaaaagttaaaaaacctgcagtaccagaaccaccacctccaaaacctgttgaagaggttgaagtacctactgttacaaaaagggaaaggaagattcctgaaccaacaaaagtgcctgaaatcaagccagcaatacctctccctgcacctgaaccgaaaccaaagcccgaagcagaagtgaaaacaatcaaaccacctcctgtggaacctgaaccaacccccatcgctgccccagtaacagtgccagtggttggaaagaaagcagaagccaaagcacctaaggaagaggctgccaagccaaaaggtcctatcaaaggtgtacccaaaaagactccttcaccaatagaagccgaaaggagaaagttaaggccaggaagtggtggagagaaacctcctgatgaagccccgttcacctaccagctaaaggctgtgccactgaagtttgtgaaagaaatcaaagacatcatcttgacagaatcagagttcgttggctcttcagcaatctttgaatgtttggtctccccttccactgcaattacaacctggatgaaagacggtagcaatatccgtgagagtcccaagcacaggtttattgcagatggtaaagacagaaagctgcacatcattgatgttcaactttccgatgctggtgaatacacctgtgttttacgtttgggaaacaaagaaaagacctccacggctaaacttgttgtagaagaacttcctgtgcgttttgtaaaaacactggaagaggaagtcacagtggtcaaaggacagccattgtacttgagctgcgagttaaacaaagagcgtgacgtggtctggaggaaggatggcaagattgtggtggagaaacctggccgaattgtgccaggcgtcattggcttgatgcgggctctgaccatcaacgatgcagatgacacagatgctggaacatacacagttactgtggaaaacgccaacaacctggagtgttcatcttgcgtaaaagtagtagaagtcattagagattggctggtgaaacctatacgagaccagcatgtgaaacccaaggggacagctatttttgcctgtgatatagcaaaagatactccaaacattaagtggttcaaaggatatgatgaaatccctgcggaaccaaatgataagactgaaatactgagagatggaaatcatctgtacctcaaaattaagaatgctatgccagaagatattgctgagtatgcagtggaaattgaaggaaaaagataccctgcaaagctgacacttggagagcgtgaagttgaactgcttaaaccaatagaggacgttaccatttatgagaaagaaagtgcaagctttgatgcagaaatctcagaggcagacattcctggacaatggaaactgaaaggagaacttctaaggccctcacctacttgtgaaatcaaagcagaaggtggaaaacgcttcttaactttgcacaaagtcaaactggaccaagctggtgaagtcctctaccaggcccttaatgcaattacaactgccattttgacagtaaaagaaatcgaacttgactttgctgtgcccctgaaggatgtcactgttccagaaaggcgacaggctcgattcgaatgtgtcctcacccgagaggcaaatgttatatggtccaaaggacctgatataattaagtcatctgacaaatttgatatcatcgctgatggaaagaaacatattcttgttattaatgattctcaatttgatgatgaaggggtctatactgctgaggtggagggcaagaagacctcagctcggttgtttgtcacaggtataagactgaaattcatgtcacctcttgaagatcaaacagtaaaagaaggtgaaacagcaacttttgtttgtgaactttctcatgaaaaaatgcatgtagtctggttcaaaaatgatgccaaactccatacaagcagaacagtactcatctcttctgagggcaagactcacaaattggaaatgaaagaagtgacattggatgatatatctcagataaaagctcaagtcaaggagctgagctccacagcacagctgaaggtcttagaggccgatccctacttcactgtgaaattacatgacaaaactgcagtggagaaggatgagattactttgaagtgtgaagtgagcaaagatgtaccagtgaaatggttcaaagatggtgaagagattgtcccttcacccaaatattctatcaaggcagatggcctgcgccgcatcttaaaaatcaaaaaggcggaccttaaagataaaggcgaatatgtgtgtgactgtggcacagacaagaccaaggcaaatgttactgttgaggctcgactaataaaagtggaaaagcctctgtacggagtagaggtgtttgttggtgaaacagcccactttgaaattgaactttctgaacctgatgttcacggccagtggaagctgaaaggacagcctttgacagcttcccctgactgtgaaatcattgaggatggaaagaagcatattctgatccttcataactgtcagctgggtatgacaggagaggtttccttccaggctgctaatgccaaatctgcagccaatctgaaagtgaaagaattgcctcttatcttcatcacacctctcagtgatgttaaagtcttcgagaaagatgaggctaagtttgagtgtgaagtatccagggagcccaaaacattccgttggctaaaaggaacccaggaaatcacaggtgatgacagatttgagcttataaaggatggcactaagcattcaatggtgatcaagtcagctgcttttgaagatgaagcaaaatacatgtttgaagctgaagataagcacacaagtggcaaactgatcattgaaggaatccggctcaaattcctcacccctctcaaagatgtaactgccaaagagaaggaaagtgctgtatttactgtggagttatctcatgataacatccgagttaaatggttcaagaatgaccagcgcctacacaccaccaggtcggtctcaatgcaagacgaagggaaaactcattcgatcacattcaaagacctgtctattgatgacacctcccaaattagagtagaagctatggggatgagttcagaagctaaactcactgtgcttgagggagacccatattttacaggaaaacttcaagattatactggtgtagagaaagatgaagttattctacagtgtgaaattagcaaagcagatgcaccagtgaaatggtttaaggatgggaaggaaataaagccatccaaaaatgctgttattaaggcagatggcaagaaacgcatgctaatcctaaagaaagccttgaaatcagatattggacagtacacctgtgactgtgggacagataagacctcaggaaaacttgacattgaggatcgggaaattaaactggtgcgacccctgcacagtgtggaggtgatggagactgagacagcacgctttgaaaccgaaatctctgaagatgatatccacgccaactggaaactcaagggagaggccctactccaaacacctgattgtgaaattaaggaagaaggcaaaatacactcccttgttttgcacaactgtcgcctggaccagacgggtggggtggatttccaagctgccaatgttaaatctagtgcccacctccgagttaagccacgagtaattggtcttctgaggcctttaaaggatgtcaccgtgactgcaggggaaacagccaccttcgactgcgagctctcctacgaagatatcccagtggaatggtatctcaaagggaagaaactagagcccagcgataaggtggtcccacgttcagaaggaaaagttcatacacttactctgagggatgtaaagttagaagatgctggggaagtccaactaacagcaaaagatttcaaaactcacgccaacctctttgtgaaagaacccccagttgaattcactaagcctcttgaggaccagacggtcgaagagggagccactgcagtgctggagtgtgaagtctccagagaaaatgctaaggtgaaatggttcaaaaatgggacagaaatcctcaaaagcaagaagtatgaaattgttgctgatggcagggtcagaaaacttgttatacatgactgtaccccagaggatattaaaacatacacttgtgatgctaaggattttaagacttcctgtaacctgaatgtcgtgcctcctcatgtggaattcttaagaccactcaccgaccttcaagttagagaaaaagaaatggctcgatttgagtgtgaactttcccgagaaaatgctaaggttaagtggtttaaagatggtgctgaaattaaaaagggcaaaaaatatgacatcatatccaagggagcagtgcgcattcttgtcatcaacaaatgtctactggatgatgaagctgaatattcctgtgaagtaaggacagcgagaacttctggcatgctgacagttctggaagaagaagctgtctttaccaaaaatcttgccaacattgaagttagtgaaacagacactataaaactggtttgtgaagtctccaaacctggcgcagaagtgatttggtataaaggggatgaggagatcattgaaacaggaagatatgaaatactgactgaaggacggaagagaatcctggtcattcagaacgctcaccttgaggatgctggcaactacaactgtcgactcccaagctctcgaaccgatggcaaagtcaaagtacatgaactggctgctgaatttatctcaaagcctcaaaaccttgaaatacttgaaggagaaaaggctgaatttgtctgctctatatcaaaagaaagctttccagtccagtggaagagggatgataagacacttgaatctggagataaatatgacgttattgctgatggtaaaaagagggtcctagttgtgaaagatgccacattacaagatatgggcacttacgttgtcatggtaggggccgccagagcagcagctcacttgacagtcattgaaaaactcaggatcgtagttcctcttaaggacacccgggtgaaggaacaacaggaagttgtcttcaactgtgaagtcaatactgaaggtgccaaagccaaatggttcagaaatgaagaagctatatttgatagttcaaaatacatcattctccaaaaagacctagtctacaccctcagaattagagatgcacacttagatgaccaagccaactataatgtgtctttgaccaatcacagaggtgaaaatgttaaaagtgcagccaatctaatagtagaagaggaagaccttaggattgttgagcctcttaaagatattgaaacaatggagaagaaatctgtcacattctggtgcaaggtgaatcgtctcaatgtaacactgaagtggaccaaaaatggtgaagaagtgccttttgacaaccgtgtctcatacagagttgataagtacaagcacatgttaaccattaaagactgtggcttcccagatgaaggtgaatacattgtcactgctggacaagataaatctgttgctgagcttctcatcatagaagccccgacagaatttgtggaacacttggaagatcagacagtcactgagttcgatgacgctgtcttctcctgccagctctccagagagaaagccaatgtaaaatggtacagaaatgggagagaaatcaaagaaggcaaaaaatacaaatttgaaaaagatggaagtatacacagactcattataaaagattgcaggctggatgatgagtgtgaatatgcttgcggggtagaagacaggaagtctcgtgctagactttttgtggaagaaattcctgttgagatcatcaggcctccacaagatattcttgaagcccctggtgctgatgttgtctttttagcagaactcaataaagataaggtggaagtccaatggctaagaaataacatggttgttgtccagggtgataaacaccagatgatgagtgaaggaaagatacatcgactacagatttgtgatattaagccccgtgaccagggtgaatacagatttattgccaaagacaaagaagccagagctaagcttgaactggcagctgcaccaaaaatcaagacagctgaccaagaccttgtggttgatgttggcaagcctctgacaatggtggtgccatatgatgcctaccccaaagcagaagctgaatggtttaaagaaaatgaacctttatctacaaaaaccattgatactacggctgaacaaacttctttcagaattttagaagccaagaaaggagacaaagggaggtataaaattgtgcttcagaacaaacatggaaaagcagaaggattcatcaatttaaaagttattgatgttcctgggccagtacgtaacttagaagtgacagaaacatttgatggtgaagtgagccttgcttgggaagaacctttaactgatggtggaagcaaaatcataggttacgttgttgaaagacgtgacattaagagaaagacctgggttctggccacagaccgtgcagagagttgtgagtttactgtcactggtctacagaaaggaggagttgagtacctattccgtgtgagtgcaagaaacagagttggcactggtgagccagtagaaactgacaatcctgtagaagcaaggagtaaatatgatgttccaggccctcctttgaatgtaaccatcactgatgtgaatcgatttggtgtctcactgacatgggaaccaccagagtatgatggaggtgctgagatcacaaactacgtcattgaattaagagacaagacttctatcaggtgggatactgccatgactgtgagagctgaagacctgtctgcaactgttactgatgtggtagaaggacaggagtacagtttccgagtgagagcccaaaatcgaattggagttggaaaaccaagtgcagccacacccttcgtcaaagttgctgatccaattgagagaccaagtcctcctgtaaacctaacttcctcagatcagactcagtcatcagttcagctcaaatgggaacctcctctgaaagatggaggaagcccaatattaggctatataattgagcgatgcgaagaaggaaaagataattggattcgttgcaatatgaaacttgtccctgaactgacttacaaggttaccggattggaaaaaggaaataaatatttatatagagtatctgcagaaaataaagctggtgtttcagatccatctgaaattcttggtcctctcaccgctgacgatgcatttgttgaaccaacaatggatttaagtgcatttaaagatggtctggaagttattgtcccaaatcctatcacgatcctggttccaagtacaggctatccaaggccaactgcaacctggtgttttggagataaagtactagaaacaggggaccgggtgaaaatgaagaccttgtctgcctatgccgaacttgtcatttctccaagtgaacgttcagacaagggcatttatacactgaaattagaaaaccgtgtgaaaacaatttctggggaaattgatgtcaatgtaattgctcgcccaagtgcacccaaagaattgaaatttggtgatataaccaaggactcagtacatttgacttgggaaccacctgatgatgatggaggaagtccgttaactggatacgttgttgaaaaacgagaagtcagccggaaaacatggactaaagttatggactttgtgactgatctagaattcacagttcctgatcttgttcaaggaaaagagtacttatttaaagtttgtgctcgtaacaaatgtggccctggagaacctgcatatgttgatgaacctgtaaatatgtcaactcctgcaacggtacctgacccaccagagaatgttaaatggagagatcgaacagccaatagcatcttcttaacatgggatccacctaaaaatgatggtggttcacgcatcaaaggatatatagttgaaagatgtccacgtggttctgataaatgggttgcctgtggagaacctgttgcagaaacaaaaatggaagtgacaggtcttgaggaaggcaaatggtatgcctaccgcgtgaaggccttaaacaggcagggtgctagcaaaccaagcagacccacagaggaaatccaggctgtggacacacaagaggccccagaaatcttcctcgatgtgaagctccttgctggtctcactgtaaaagctgggaccaagattgaacttcctgccaccgtaaccggaaaacctgaacctaaaataacttggacaaaggctgatatgattctgaagcaggacaaaagaattaccattgaaaatgtccctaagaaatccacagtgactattgttgatagtaagagaagtgacactggcacatatatcattgaggctgtgaatgtgtgtggccgggccactgctgtggtggaagtgaacgtcttagataaacccggaccaccagctgcctttgacatcacagatgtaaccaatgagtcatgtcttctaacatggaacccaccacgcgatgatggtggatctaagatcacaaactatgttgtggagagacgagcaactgatagtgaagtgtggcacaagctctcatccaccgtcaaggatacaaacttcaaggccaccaaattaatccccaataaagagtacatcttcagagttgctgcagaaaacatgtatggtgttggtgaaccagttcaggcctctccaataacagccaaatatcagtttgatccacctggtcctccaactcgcctagaaccttctgatatcactaaagacgcagtgactctcacatggtgtgagccagatgatgatggtggcagcccaatcacaggatactgggttgaaagactggatcctgatacagataaatgggttagatgcaataagatgccagtaaaggacacaacatacagagtgaaaggtctcactaataagaaaaaatacagattccgtgtgttggctgaaaatcttgctggacctggaaaaccaagcaaatcaactgaaccaatcttaataaaggatcccatagatcctccatggccccctggaaaaccaactgtaaaagatgtaggcaaaacatcagtaaggttgaattggacaaaaccagaacatgatggaggtgcaaagattgagtcttatgtcattgaaatgctgaagactggaacagatgagtgggtcagagtggcggaaggggttcccaccactcagcacttgctcccagggctcatggaaggacaggaatactcattccgagttagagctgtgaataaggctggggaaagtgaacccagtgaacccagtgaccctgtgctttgccgggagaagctatatcctccatcaccaccacgctggcttgaagttattaatatcacaaaaaatacagcagacctaaaatggacagttcctgagaaagatggagggtcccccatcaccaactacattgtggaaaagagagacgtcaggcgaaaaggctggcaaacagtggataccactgtcaaggacaccaagtgcacagtcaccccactgactgagggctctttatatgtgttccgagttgctgcagaaaatgctataggacaaagcgactacaccgaaattgaggactctgtgctggccaaagacacctttaccactcctggaccaccctacgccctggcagtggttgatgtgacaaaacgacatgttgacctaaagtgggagccacctaaaaatgatggtggaagaccaatacagagatatgtcattgagaagaaagaaaggttaggtacccgttgggtgaaagctggaaagactgcaggacctgactgtaacttcagagtaactgatgtcatcgaaggaacagaggtccagtttcaggttcgggctgaaaatgaagctggagttggccacccaagtgaacccacagaaatcctatccattgaagatccaacaagtcctccctcaccaccccttgacctacatgtgactgatgctgggagaaaacacattgccattgcttggaagcctccagagaaaaatggtggaagtcctatcataggataccatgttgaaatgtgtccagtaggcactgagaaatggatgagagttaattctcgcccaataaaggacttgaaattcaaggttgaagaaggtgttgttcctgacaaagaatatgtcctgagagtgagagcagtcaatgctattggtgtcagcgagccatctgaaatctctgaaaatgtggttgccaaagacccagactgcaagccaacaattgacctggagactcatgacattattgttattgaaggtgaaaagttaagcattcctgttcccttcagagctgtcccagttccaactgttagttggcataaagatggcaaagaagttaaagcaagtgatagattaacaatgaagaatgatcacatctctgcacaccttgaagttcccaagagtgtccgtgcagatgccggaatttataccattacactggagaataagctcggctcagcaacagcctcaatcaatgtcaaagtcataggcctacctggaccatgcaaagatattaaagcaagtgacattaccaagagttcttgtaagttaacttgggaacctccagaatttgatggtggaaccccaattcttcattatgtcctggagcgcagagaagctgggaggagaacatatataccagtcatgtctggtgagaacaaactgtcatggactgtgaaggatctcataccaaatggtgaatacttcttccgtgttaaagcagtcaacaaggttggtggaggagaatatattgaactgaaaaatccagtcattgctcaagatccaaagcaaccccctgatccacctgtagatgtagaggttcataatcctacagcggaggcaatgactattacatggaagccacctttgtatgatggagggagcaagataatgggctacatcatagagaagattgctaagggtgaagaaaggtggaagagatgcaatgaacacctggtaccaatcctgacctatacagcaaaaggacttgaagaggggaaagagtaccaattccgtgtgcgagcagagaacgccgcgggtattagtgaaccttctcgggctactcctccaaccaaagctgtagatcccattgatgcccccaaagtcattctgagaacaagcctagaagtgaaacgaggtgatgaaatagcacttgatgcaagtatttctggatcaccttacccaactattacatggataaaggatgaaaatgttattgtaccagaggaaattaagaagcgtgcagcacccttggttaggagaaggaagggtgaagttcaagaagaagaaccatttgtcctgcctctgacacagcgtttgagtattgacaacagcaaaaagggagaatctcagctacgcgtccgagattctctccgacctgaccatggtctgtatatgatcaaagttgaaaatgaccacggtattgcaaaagctccttgtactgtcagtgtgttagatacaccgggaccaccaatcaactttgtatttgaagatatcagaaagacctcagtcctttgtaaatgggaaccaccccttgatgatggtggcagtgaaatcataaactacactttggaaaagaaagacaagacaaaacccgactcagaatggattgttgtcacttcaacacttagacattgcaaatattcagtaacaaaactgattgaaggaaaagagtacctcttccgtgtaagagctgaaaacagatttgggccaggtccaccatgtgtttcaaagccacttgtggctaaagatccatttggaccacctgatgcaccagataagcccattgtggaagatgttaccagcaacagtatgctagtgaaatggaatgaaccaaaagataatggaagccccattttgggttactggcttgaaaaacgtgaagttaacagtacacattggtctcgtgtcaacaaaagccttctgaatgccttgaaagccaatgtagatggcttattagaaggactcacctatgtcttcagagtatgtgctgaaaatgcagctggacctggaaagttcagtccaccttcagatcccaaaacagcacatgatccaatctctcctcctgggccacctatcccaagagtcactgacacaagctctacaactattgaactagaatgggaacccccagctttcaatggtggtggggaaattgttggctattttgttgataagcagttggttggcacaaatgaatggtcacgctgcacagagaagatgatcaaggtccgtcagtacaccgtcaaagaaatccgagagggtgctgattacaaacttcgggtgagtgctgtcaatgccgcaggggaaggaccgcctggagaaacacaacctgttactgtggctgaaccacaagagcctccagctgtggaactggatgtttctgtcaagggtggaatacaaataatggctgggaagactcttagaattccagctgtggtgactggtcgccctgtacctacaaaagtatggaccaaagaagaaggggagctggataaagaccgtgttgtaatagacaacgttggaaccaaatctgaactaattatcaaggatgcactgcgaaaagaccatggcagatatgtgattacagctacaaatagctgtggttccaaatttgcagcagccagggtagaagtttttgatgtccctggtccagttcttgacttaaaacctgttgtaacaaacagaaaaatgtgtctacttaactggtctgatccagaagatgatggaggaagtgaaataacaggctttatcattgaaagaaaagatgccaagatgcatacttggagacaaccaatagagactgagagatctaaatgtgacatcacaggtctgcttgagggacaagaatataagttccgtgttattgccaagaacaagtttggctgtggccctcctgttgaaataggaccaattcttgcagttgatccactaggtcctccaacatctccagagaggctcacatacactgaaaggacaaagtccactatcacacttgactggaaagagccccgcagtaatggtggcagtcccatccaaggatatatcattgaaaaacggcgtcatgacaaacctgactttgaaagagttaacaagcgactctgcccaaccacatcttttctggttgaaaatcttgatgaacaccaaatgtatgagttccgtgtcaaagctgtcaatgaaattggtgaaagtgaaccatccctacctcttaatgtagtcatacaagatgatgaagtgcctccaactattaagttgcgtctgagtgttcgaggagacactatcaaagttaaggcaggagagcctgtccacatccctgcagatgtgacaggccttccaatgcctaagattgaatggtccaaaaatgaaactgtaattgaaaaacccactgatgcacttcagataaccaaggaagaggtatcccgaagtgaggcaaaaactgagcttagcattcccaaagcggtccgggaggacaaaggcacttacacagttactgcttccaatcgccttggctcagtgttccgaaatgttcacgttgaagtatatgaccgcccatccccaccaagaaatcttgctgttactgacattaaagctgaatcttgctacttgacatgggatgcccctcttgataatggtggcagtgaaatcacccattatgttattgacaaacgtgatgcaagtaggaagaaagcagaatgggaggaagtcaccaacactgctgtagagaaaagatatgggatctggaaacttatccccaatggtcagtatgagttccgagtcagggcagtgaataaatatggaatcagtgatgagtgcaaatcagataaagtagtcattcaagatccttatcgccttcctggacctccaggaaaaccaaaagttttggcacgcaccaaaggatcaatgctagtgagctggactcctcctttggacaatggtggctctccaattactggctactggctggagaaaagagaagagggaagtccttattggtcacgtgttagccgagcaccaataaccaaagtgggattgaaaggcgtggaatttaatgttcctcgtttgcttgaaggcgttaaataccagttcagagccatggcaataaatgctgcaggaattggtcctcccagtgaaccatcagatccagaggttgcaggagatcccatatttccaccggggccaccttcttgcccagaagttaaagataaaacgaagtcaagcatctcactaggatggaaacctccagccaaagatggtggcagcccaatcaaaggatacattgtagaaatgcaagaagaaggtactactgactggaaaagagtaaatgaaccagacaaacttataactacctgtgaatgtgtggtgcctaatctgaaagagctcaggaagtacagattcagagtgaaagctgtcaatgaagctggtgaatctgaaccaagtgatacaactggggagatccctgccactgatattcaagaggaaccagaagttttcattgacattggagcacaggactgtctggtttgtaaagctggctcacagattaggattcctgctgtcatcaagggacgcccaacaccaaaatcatcttgggaatttgatggaaaggcaaagaaagcaatgaaggatggagttcatgacatacccgaagatgcacagctggagactgctgaaaactcctcagtaattattattccggagtgtaaacgatctcatacaggcaaatacagcatcacagccaagaataaagcaggacaaaagactgcaaattgcagagttaaagtcatggatgtaccaggcccacccaaagatctgaaagtcagtgatatcacaaggggtagttgcagactttcatggaagatgccagacgacgatggaggagacaggatcaaaggctatgttattgagaagaggactattgatggaaaagcctggaccaaagtcaatccagactgtggaagcaccacatttgtagtgcctgatctcctctctgaacagcaatatttcttccgtgtgcgagcagaaaaccgttttggtattggcccacctgtggaaaccattcagaggaccactgccagagatccgatatatcctcctgatcctcctattaaactcaagattggcctcatcacaaagaacacagtgcatctgtcatggaaacccccgaagaatgatgggggctcccctgttacccactatattgttgagtgccttgcatgggaccctactgggacaaagaaagaagcctggaggcagtgcaataagcgtgatgtggaagaactgcaatttactgttgaagacctagtagagggtggggaatatgaattccgagtcaaagctgtcaatgctgcaggagtcagcaagccttcagccactgttggccctgtgactgtcaaagaccagacatgcccaccatcaattgatctaaaagaattcatggaggttgaagaaggaaccaatgttaacattgtggccaaaattaaaggtgtgccattcccgacactaacctggtttaaagctcctccaaagaagcctgataacaaagaacctgttctctatgacacccatgtcaacaaactggtggtagatgatacttgcactttagttattccgcagtctcgcaggagtgacactggcttatataccatcacagctgtaaataatctgggaacagcatcaaaggagatgagactgaatgtcctgggtcgtcctggccctccagtgggacccataaaatttgaatctgtttcagcagatcaaatgacactatcttggtttccacctaaagatgatggtgggtctaagattacaaactatgtaattgagaaaagagaagctaacaggaagacatgggtccatgtctccagtgaacctaaggagtgcacgtacacgattcccaaattgctagaaggccatgaatatgtattccgaatcatggcccagaataaatatggcattggagaacctcttgacagtgaacctgaaacagcaagaaacctcttctctgtccctggagcaccagataaaccaacagttagcagcgtgactcgtaactccatgactgtcaactgggaagagccagaatatgatggaggctctcctgtgacagggtactggctggaaatgaaagacaccacttcaaagagatggaagagagttaaccgagatcctatcaaagccatgactttgggtgtttcttataaagtgactggtcttattgaaggttccgactatcaattccgggtatatgcaatcaatgctgctggcgtgggtccagcaagtctgccatcagacccagcgactgctagagatccaattgcccctcctggtcctccatttcccaaagtgacagattggactaaatcatctgcagatctggagtggtctcccccactaaaagatggtggatccaaagtaactggatacatcgttgaatataaagaagaaggaaaagaagaatgggaaaagggtaaagataaagaagtgagaggaacaaagcttgttgtgacaggattaaaggaaggagcattctacaaatttagagttagagcagtcaacattgctggcattggagaacctggagaggtcacagatgtcattgaaatgaaggacagacttgtttcacctgaccttcagctagatgccagtgtcagagatagaattgttgtccatgctggaggggtgatccgaatcattgcctatgtgtctggaaagcctcctccaaccgtcacctggaacatgaatgaaagaaccttacctcaagaagccaccattgagaccacagccattagctcatccatggtcatcaagaactgccagaggagccatcaaggcgtctattctcttcttgccaaaaatgaagccggagaaagaaagaagacaattattgttgatgtattagatgttccaggtcccgttggaacaccattcctagctcacaacctaaccaatgagtcctgcaaactgacatggttttctccagaagatgatggaggctctccaatcaccaattatgtcattgaaaagcgtgaatctgaccgcagagcatggaccccagtgacatatacagttacccgacaaaatgctactgtccagggtctcattcaaggaaaagcctactttttccgaattgcggctgaaaatagtattggcatgggtccatttgttgagacatcagaggcacttgttatcagagagccaataactgtaccagagcgtcctgaagacctggaagtcaaagaagttactaaaaatactgtaactttgacttggaatcctcctaagtatgatggtgggtcagaaattattaactatgtcctagaaagtcggctcattgggactgagaagttccacaaagttacaaatgacaacttgcttagcagaaaatacactgttaaaggcttaaaagaaggtgatacctatgagtaccgtgtcagtgctgtcaacattgttggacaaggcaaaccatcattttgcaccaaaccaattacttgcaaggatgagctggcacccccaacgcttcacctcgacttcagagataagctcacgattcgagttggtgaagcttttgccctcactggccgttactcaggcaaaccaaagcctaaggtttcctggttcaaagatgaagctgatgtgctggaagatgatcgcactcatataaagactacaccagcaacacttgctttagagaagatcaaggccaaacgttcagattccggcaaatactgtgtggttgtggagaacagtacaggctctaggaaaggtttctgtcaagttaatgttgttgaccgtcctggaccaccagtaggaccagttagttttgatgaggtgaccaaagattacatggttatctcttggaagcctcctttagatgatggaggcagtaaaatcaccaattatattattgagaagaaggaagtgggtaaagacgtctggatgccagtgacatctgcaagtgctaaaacaacatgcaaagtttctaaactacttgaaggaaaagattatattttccggatacatgctgaaaatctgtatggaataagtgatcctctggtgtctgattcaatgaaagccaaagatcgtttcagggttcctgatgcacctgatcagccaattgttacagaagttaccaaagactctgcattagtaacctggaataagccacatgatggaggaaaacccatcacaaactacatcctggaaaagagagaaactatgtctaaacgatgggctagagttaccaaagatcctattcatccatacactaaatttagggttcctgatcttctagaaggatgtcagtatgaattccgggtttctgcagaaaatgaaattggtattggagatccaagcccaccatccaaaccagtctttgctaaagatccaattgctaaaccaagtccacctgttaatcctgaagcaatagatacaacatgcaattcagtcgatctaacttggcagccaccacgtcatgatggtgggagcaagattctgggttatattgttgagtaccagaaagttggagatgaagagtggagaagagccaatcacacccctgagtcatgtcctgaaactaaatataaagtcaccggtcttcgggacggtcaaacctataagtttagagtgttagcagtcaatgcagctggtgaatcagatccagctcatgttccggagccagtcctagtaaaagacaggcttgaaccccctgagttgattcttgatgccaacatggcaagagaacaacacattaaagttggtgatactctaagacttagtgccatcatcaaaggagtgccattcccaaaagtaacttggaaaaaagaagacagagatgctccaactaaagcaagaattgatgtgactccagttggtagcaagcttgaaattcgtaatgctgcccatgaagatggtggaatttattctttaacagtggagaatccagctggttcaaaaactgtctcagtaaaagtacttgtattagataaacctgggccacctagagatctggaagtcagtgaaattaggaaagattcatgttaccttacttggaaagaaccactggatgatggtggttctgttattaccaattatgtggttgagaggagagatgttgccagcgcccagtggtcacctctctcagctacatcaaagaaaaagagtcacttcgctaagcatctgaatgaaggcaaccagtacctcttccgagtagctgcggagaaccagtatggacgtggtccttttgttgaaacaccaaaaccaatcaaggctttggatcctctccatcccccagggccacccaaggacctgcaccatgtagatgttgacaagactgaagtctccctagtctggaataagccggatcgtgatggtggttctccaatcactggatatttggtagaatatcaagaagaaggcacccaggactggattaaatttaagactgtgacaaacttagagtgtgtggttactggactacaacaaggaaagacctatagattccgtgtaaaagctgaaaacattgtgggtcttggtctccctgacacaactatcccgatagaatgtcaagaaaaactagtgcctccatccgtggagctagatgtgaaattaattgaaggtcttgtggtaaaggctggaaccacagtcagattccctgctattataagaggtgtgcctgttcctactgcaaagtggacaaccgatgggagtgagattaaaaccgatgagcactacacagttgaaacagacaacttctcatcagtacttaccattaagaactgcttaaggagagacactggggaatatcaaatcacagtttccaatgcagccggtagcaaaacagtagccgtacatcttactgttcttgatgttcctgggccaccaacaggtcctattaatattctggatgttactcctgaacacatgactatctcatggcagccacctaaggatgatggaggaagccctgtgataaattatattgttgagaaacaagatacaaggaaagacacgtggggtgttgtctcttccggaagcagtaagacaaagctgaaaatcccacatctgcagaagggctgtgaatatgttttccgagttagagcagagaataagataggtgttggtcctccccttgactccacacctactgttgctaagcataaatttagtcctccgtctcctcctggtaaaccagtggttactgacattactgaaaatgcagcaacagtgtcttggaccctgccaaaatctgatggtggcagtccaataactggctactatatggaacgtcgagaagtaactggcaaatgggtgagggtcaacaaaacacctatcgctgacctgaagttcagagtgactggactctatgaaggaaatacatatgagtttagagtttttgctgaaaatcttgcaggactaagcaaaccatccccaagttctgatccaataaaagcttgccggcccatcaaaccacctggaccacctattaatcctaaactgaaagacaagagcagagaaacagctgatttggtgtggacaaagcctctcagtgatggtggtagccccattctaggatatgtagtggaatgtcagaaacctggcacagcacaatggaacaggattaataaagatgaactcattaggcaatgtgcctttagggtacctggactaattgaaggaaatgagtacagattccgtataaaggcagctaatattgtaggagagggtgagccaagagaactagcagaatctgtgattgcaaaagatatccttcatcctccagaagtagaacttgatgttacttgtcgtgatgttattaccgtgagagtaggccaaactatccgcattctagctcgagtcaaaggcagacctgaaccagacataacttggactaaggaaggcaaagtattggtccgagaaaagagggtggaccttattcaggatctacctcgtgttgagttacaaattaaagaagctgttagagctgatcatggcaagtatatcatctcagctaagaacagcagtggacatgcccaaggttcagccatcgttaacgtccttgacagacctgggccttgccagaatttgaaggttaccaatgtaaccaaagagaactgtacaatttcttgggaaaacccactagataatggtggctcagaaataacaaacttcatagtagaatatcgcaaaccaaaccagaaaggctggtcaattgttgcatcagatgtcactaaacgattaatcaaggccaaccttttagccaacaatgaatactatttccgagtttgtgcagagaataaagtaggtgttgggccaaccatcgaaacaaaaactcccattctggctattaaccctattgacagaccaggtgagcctgaaaaccttcacattgcagataaaggaaagacatttgtctatctaaagtggcggaggcctgactatgatggtggcagtccaaatctgtcatatcatgttgagagaaggcttaagggctccgatgactgggaaagagtgcataaaggaagcattaaagaaactcactacatggttgacagatgtgttgaaaaccagatttatgagttcagagtgcaaacaaagaatgaaggtggggaaagtgactgggtgaagacagaggaagttgttgtgaaagaagacttacaaaaaccagtacttgatctgaaattaagtggggtcctaactgtcaaagcaggggacaccattaggcttgaggcaggggttagaggcaaaccattcccagaagttgcatggaccaaggacaaagacgctacagacttaacaagatcaccaagggtcaagattgatacccgtgctgattcatctaaattttctcttactaaagcaaagcgaagtgatgggggtaaatatgtagttacggcaactaacacggctggcagttttgtggcctatgccactgtcaatgttttagataagcctggtcctgtgagaaatctgaaaattgttgatgtgtccagtgataggtgtactgtttgctgggatccaccagaagatgatggtggctgtgaaatccaaaattatattctagaaaaatgtgagacaaagcgaatggtttggtctacctattctgctactgtcttgacacctggtactacagtaacacgtctcatagaaggaaatgaatatattttcagagtccgtgcagaaaataaaataggcacagggcctccaacagaaagtaaaccagtcatagccaaaaccaagtatgataaacctggtcgccctgatcccccagaagtcactaaagtaagcaaagaagagatgactgtggtttggaatccacctgaatatgatggtggaaagtctataactggatactttttggagaaaaaggaaaagcattcaacacgatgggtccctgtcaacaagagtgcaatccctgagagacgtatgaaagtacagaatctcctcccagaccatgaatatcagttccgtgtcaaggcagaaaatgaaattggaattggagaaccaagcttgccttcaagaccggtggtggcaaaagaccccatagagccacctggtccaccaaccaatttcagagtggttgatacaaccaaacattccataactcttgggtggggaaaaccagtctatgatggtggtgcaccgatcattggatatgttgtggaaatgagaccaaaaatagcagatgcgtctcctgatgaaggctggaaacggtgtaatgctgcagcacagcttgtacgcaaggaattcactgttaccagcttggatgaaaaccaggaatatgagttcagggtgtgtgcccaaaaccaagttggtattgggcgccctgcagagctaaaggaagctatcaaacctaaagaaatactagaacctccggagattgatttggatgccagcatgaggaaactggtcatagtgagagcaggatgccctattcgtctctttgctatagtgagaggacgaccagcccctaaagtcacttggcgaaaagttggcattgataatgtggtcagaaaaggacaagttgatctggttgacactatggccttccttgtcatccccaattctacccgtgatgactcaggaaaatattccttaacacttgtgaacccagcaggagaaaaggctgtattcgtaaatgtcagagtattagacactcctgggcctgtgtctgatttaaaagtttcagatgtcactaaaacatcatgccatgtgtcctgggcccctcctgaaaacgacggtgggagccaagtgacacattatatcgtggagaaacgtgaggcagacagaaagacatggtcgaccgttaccccagaagttaagaaaacaagcttccatgtaaccaatcttgtccctgggaatgagtattacttcagagtaactgctgtcaacgaatatggccctggcgtcccaacagatgtcccaaaaccagtgcttgcatcagatcctctaagtgagccggatcccccaaggaaattagaagtgactgaaatgaccaagaacagtgccaccttagcctggttacctcccctacgtgatggaggtgctaaaatcgatggctacatcactagttacagagaagaagagcagcctgcagatcgctggacagagtactcagtggtaaaagatctgagccttgttgtcactggcctaaaggaaggaaagaaatacaaatttagagtagcggccagaaatgctgttggagtcagtttgccaagagaagctgaaggagtgtatgaagccaaagaacaactgttgccaccaaagatccttatgccagagcaaataactatcaaagctgggaaaaaactccgaattgaagcccatgtgtatggaaagcctcatcccacctgtaaatggaaaaaaggagaagatgaagttgtcacatccagccacctggcagtgcataaagcagacagctcttcaattctgatcataaaagatgtgactaggaaagacagtggttactacagcctcacagcagagaacagttctgggacagacactcagaaaatcaaagttgtagtcatggatgcccccggcccccctcagcctccatttgacatttctgatatagacgctgatgcttgctccctgtcatggcacatccctctggaggacggaggcagtaacatcaccaattatatagtggagaagtgtgatgtaagccgaggtgactgggtcacggctctagcttcagtcacaaaaacttcctgcagggttggaaagctgatcccaggccaggagtacatcttccgggtccgtgctgaaaaccgatttggcatttcagagcctctcacatctccaaagatggttgcgcagttcccatttggtgttcctagtgaaccaaagaatgcacgagtcaccaaagtcaacaaggactgtatttttgttgcttgggacagaccagatagtgatggagggagccccattattggttatctgattgaacgcaaggaaagaaacagtttgctgtgggtgaaagccaatgatactcttgtccggtcaactgaatatccttgtgctggccttgtagaaggtcttgagtattcattcagaatctatgccctaaacaaagctggatccagcccacccagcaaacccacagaatatgtaactgcaagaatgccagttgatcctcctgggaaacctgaggttattgatgtcaccaagagtactgtatctctgatctgggctcgtccaaagcatgatggaggcagtaaaattattggctatttcgtagaagcttgcaaacttcctggtgataaatgggtacggtgcaatactgcacctcaccagattccccaggaagagtacacagctactggcctagaagagaaagctcagtatcaatttagagctattgccaggaccgcggtaaacattagcccaccttctgaaccttctgatccagtgactatcctcgcagaaaatgtccctcccaggatagacctgagtgtggctatgaaatctttgcttactgtgaaagctggaactaatgtctgcttggatgctactgtttttggtaaaccgatgccaacagtttcttggaaaaaagatggcacactgctaaaaccagcagaaggcataaagatggccatgcagcggaatctgtgcaccttggagctattcagcgtgaaccggaaggactcaggagactataccattactgctgaaaattcaagtggttctaaatcagccaccattaagcttaaagtgttagataaaccgggtcctccagcatctgttaaaatcaacaaaatgtattcagatcgtgctatgctttcttgggaaccgcctcttgaagatggaggctcagaaatcaccaactatattgttgacaaacgtgaaacaagcaggcccaactgggctcaagtctctgcaactgtgcctatcaccagctgcagcgtggagaaacttatagagggccatgagtatcagttccgtatttgtgctgaaaataaatatggagtaggcgatccagtcttcactgaaccagcaattgccaaaaacccatatgacccaccaggacgctgtgatcctcctgttattagcaacataaccaaagatcacatgacagtcagctggaagccaccagcagatgatgggggctcacccatcactggctatttgcttgaaaagcgggaaacccaggctgttaactggactaaggtcaacagaaaacctattatagaaagaacattaaaagcaacaggtcttcaagaaggtaccgaatatgagttccgtgttacagctataaataaagctggaccaggcaaacccagtgacgcatccaaggccgcttatgctcgggaccctcagtatcctcctggcccaccggctttccctaaagtatatgatacaactcgcagctctgtgagtctatcttggggcaagccagcctatgacggcggcagccctatcattggttatctcgttgaagtaaaacgggctgactccgataactgggtgaggtgcaacttaccacagaatctacagaaaacccgctttgaggttactggcctgatggaagacacacaatatcaattccgtgtgtatgccgttaataagattggatacagtgaccccagtgatgtgccagataaacactatcccaaggacatcttaattccacctgagggagaacttgatgcggacttaaggaagacactcatattacgtgctggagttactatgagactatatgtaccagtaaaaggacgcccacctccaaagattacttggtctaaaccaaatgtcaatctaagagacaggattggactggacataaagtcaactgactttgacactttcttgcgctgtgaaaatgtgaacaaatatgatgcaggaaaatatatcttaaccctggagaacagctgtggtaaaaaggaatataccattgttgtgaaagtgcttgatactcctgggccacctgtcaatgtgactgttaaggaaatatccaaagactctgcttatgttacctgggagcctcccattattgatggcggaagccccatcataaactatgtggtacaaaaacgtgatgcagagaggaaatcctggtctacagtgacaactgagtgctccaaaacaagcttcagagtagctaatttggaggagggaaaatcctacttcttccgagtgtttgctgaaaatgagtatggcattggtgatcccggtgaaactcgtgatgctgtcaaagcttcccaaactcctggaccagttgtggacctgaaagtgaggtctgtatctaagtcatcctgtagcattggctggaaaaagcctcacagtgatggtggaagtcggattattggatatgtagttgatttcctgactgaagaaaataagtggcaacgagttatgaaatccttaagcctacagtactctgcaaaagatttgactgaagggaaggaatataccttcagagtgagtgctgagaatgaaaatggagaaggaaccccaagcgaaatcactgttgtggcaagggatgatgttgtggctcctgatcttgacttaaagggtctacctgatttgtgctacttggctaaagaaaacagcaacttccggcttaagatccccataaaaggcaagccagctccatcagtctcctggaagaaaggggaagatcctctagcaactgacactagagtcagtgttgagtcatctgcggttaacacaactcttatagtgtacgattgccaaaaatctgatgctggaaaatacacaatcacacttaagaatgttgctggcaccaaggaaggaactatctccataaaggttgttggcaagcctggcatccccactggaccaatcaaatttgatgaagtcacagcagaagccatgaccttaaagtgggctcctccaaaggatgatggaggttctgaaatcaccaactatatcctagagaagagggattctgtgaacaacaagtgggtgacgtgcgcctcagctgtccagaaaaccacctttagagtaaccagacttcatgagggcatggaatataccttcagggtcagtgccgaaaataaatatggtgtaggggaaggcctgaaatcggagccaattgttgcgagacatccatttgatgtgcctgatgctcccccacctcccaatattgtggatgtcagacacgattcagtatctctaacttggactgaccccaagaaaactggtggttctccaattacagggtatcatctcgagttcaaggaaagaaacagccttttgtggaagagagctaacaagactccgataaggatgagagactttaaagtgacaggattaactgaaggtcttgaatatgaattccgagttatggcaatcaatttagcaggtgtgggcaagccaagcctaccatcagagcctgttgtggcactggacccaattgatcctcctggaaaacctgaggttattaacataacaaggaattcagtgactctcatttggactgaacctaaatatgacggtggtcataagttaactggatatatagtggagaagcgagatctaccttcgaagtcttggatgaaagccaaccatgttaatgtcccagaatgtgcctttactgtaactgaccttgttgagggtggaaaatatgaattcagaattagagcaaagaatacagcaggtgctatcagtgctccatcagaaagtacagaaaccattatttgcaaggatgaatacgaggcaccaacaattgtccttgatcccacaataaaagatgggctaacaattaaagcaggggataccattgttttgaatgccattagcattcttggcaaaccccttccaaaatcaagttggtccaaggcaggaaaagacattagaccatcagatatcactcagataacttcaaccccaacatcttccatgcttactatcaagtatgccactagaaaagatgcgggtgaatataccatcactgctaccaatccttttggcacgaaggtggaacatgtgaaggtaacagtccttgatgtacctggtcccccaggtcctgttgaaatcagtaatgtttctgctgaaaaagcaacacttacatggacacctcccttggaagatggcggctcaccaattaagtcctatatacttgaaaagagagaaaccagccgacttttgtggacagtggtttctgaagatattcagtcttgcaggcatgtggcaaccaaacttatccaaggaaatgagtacatcttccgggtctcagctgtaaaccactatggcaaaggagaacctgtacagtctgaacctgtcaaaatggtagacagatttggtccccctggccctcctgaaaaaccagaggtatcaaatgtcactaagaacactgccactgtcagctggaaaaggccagtggatgatggtggcagcgaaattacaggatatcatgtagaaaggagagaaaagaaaagcctgcgatgggtgagagcaataaaaacaccagtttccgatctcaggtgcaaagtaacaggactgcaagaaggaagcacctacgaattccgtgtcagtgcagaaaacagagcaggaattggtccacccagtgaggcttcagattctgttctgatgaaagatgcagcatatcctccaggaccaccttcaaatccgcatgtcactgatactaccaagaaatctgcttctttggcatggggcaagcctcattatgatggtggacttgaaatcactggctatgtcgtggagcatcaaaaagtaggagacgaggcctggataaaagataccacaggaaccgccctcagaatcactcagttcgttgttcctgatcttcagactaaagaaaaatacaacttcagaatcagtgccatcaacgatgcaggtgttggggagccagcggtgattccagatgttgaaatcgtagaacgggagatggctcctgattttgaactagatgccgagcttcgaagaacacttgttgttagagcaggactcagtattaggatatttgtgccaattaaaggtcgtcctgctcctgaagtgacatggaccaaagataacatcaacctgaaaaaccgagccaacattgaaaatacggaatcatttactcttctgattatcccagaatgtaacagatatgataccggtaaatttgtcatgaccattgaaaacccggctgggaagaaaagtggctttgtgaacgtcagagtcttggacacgccaggcccagtcctcaacctgcggcctacagacatcacaaaggacagtgtcaccctgcactgggacctccctctgatagatggaggctcacgtataacaaactacattgtagagaaacgtgaagcaacacggaaatcttattccacagccaccactaagtgccataaatgcacatataaagttaccggcttgtctgaagggtgtgaatatttcttcagagtgatggcagagaatgaatatggaattggtgagccaacagaaactacagagcccgtaaaagcctctgaagcaccatctccaccagacagccttaacatcatggacataactaagagcaccgtcagcctggcatggcctaagcccaaacacgatggtggcagcaagatcactggctatgtgattgaagcccaaagaaaaggctctgaccagtggacccacatcacaaccgtgaaagggttagaatgtgttgtgaggaatctaactgaaggagaggaatataccttccaagtgatggcagtgaacagcgcggggagaagtgcccctagagaaagcagacccgtcattgtcaaggagcagacaatgcttccagagctggatctccgtggcatctatcagaaactggtcattgccaaagctggtgacaacatcaaagttgaaattccagtgctcggtcgaccgaagcccacagtgacatggaaaaaaggagaccaaattcttaaacagacacagagagttaattttgaaaccacagcgacttcaaccattttaaatatcaatgagtgtgtcagaagtgatagtgggccctatccattaacagcaaggaacattgtaggagaggttggtgatgtcatcaccattcaagtccatgatatcccagggccacctactggaccaatcaaatttgatgaagtttcatctgattttgtaaccttctcttgggacccacctgagaacgatggtggtgtaccaataagcaactatgtagtggaaatgcggcagactgacagtactacctgggttgagttagcaaccaccgttatacgtactacctataaagccacccgccttactactggattagagtatcagttccgtgtaaaagctcagaatagatatggagttggaccaggcatcacatcagcatgcatagttgccaactatccatttaaggttcctggacctcctggtacccctcaggtaactgcagttaccaaggattcaatgacaattagctggcatgagccactttctgatggtggaagccccattttaggatatcatgttgaaagaaaagaacgaaatggtattctctggcagactgtgagcaaagctttagtaccaggcaacattttcaaatcaagtggacttacagatggtattgcttatgagttccgggtgattgcagaaaacatggcaggcaaaagtaagccaagcaagccatcagaacctatgttggctctggatcccattgacccacctggaaaaccagtacctctaaatattacaagacacacagtaacacttaaatgggctaagcctgaatatactgggggctttaaaattaccagttatatcgttgaaaagagagaccttcctaatggacggtggctgaaggccaacttcagcaacattttggagaatgaatttacagtcagtggcctaacagaagatgctgcatatgaattccgtgtgatcgccaaaaatgctgcaggtgccatcagtccaccatctgagccatctgatgctatcacttgcagggatgatgttgaggcaccaaagataaaggtggatgttaaatttaaggacacggttatattaaaagcaggtgaagcattcagactggaagctgatgtttcaggccgcccacctccaacaatggaatggagcaaagatggaaaagagctggaaggcacagcaaagttagaaataaaaattgcagatttctctactaatctggtaaacaaagattcaacaagaagggatagtggtgcctatacccttacagcgactaatcctggtggctttgctaaacacattttcaatgtcaaagttcttgacagaccaggcccacctgaaggacctttggctgtaactgaagtgacatcagaaaagtgtgtactatcatggttccctccactggatgatggaggtgccaaaattgatcattacatagtacagaaacgtgaaaccagcagattggcatggacaaatgtagcctcagaagtccaagtaacaaagctaaaggtcactaaactcttgaaaggcaatgaatacatattccgtgtcatggctgtaaataaatatggagtgggagagccactggaatcagagcctgtgcttgcagtgaatccttatggaccccctgatccgcccaaaaaccctgaagtgacaactattactaaagattcgatggttgtctgctggggacatcctgattctgatggtggaagtgaaatcatcaattatattgtggaacggcgtgataaagctggccaacgctggattaaatgcaacaaaaaaactcttactgatttaagatataaagtgtctggactgacagaaggacatgaatatgagttcaggattatggctgaaaatgctgctggaattagtgcaccaagtcctaccagtccattttacaaggcttgtgacactgtgtttaaacctggaccaccaggtaacccacgtgttctggtacaagcagatcatccatttcaatcgcttggaataaacctatctatgatggtggttcagaaatcactgggtatatggttgagattgccctgccagaggaagatgaatggcagattgtcactccaccagcaggactcaaggcaacttcgtatactatcactggcctcacagagaatcaggaatataagatccgcatctatgccatgaattccgaaggacttggggaacctgcccttgttcctggaactccaaaggctgaagacagaatgctgcctccagaaattgaactggatgctgacctgcgcaaagttgttactataagggcctgctgcaccctgagactttttgttcccatcaaaggaaggcctgcacctgaggtgaagtgggcccgggaccatggagaatctttagataaagctagcatcgaatccacaagctcttacaccctgcttattgttggaaatgtaaacagatttgacagtggcaaatatatactaactgtagaaaatagttcaggcagcaagtctgcatttgtcaatgttagagttctcgatacaccaggccccccacaggatctgaaggtaaaagaggtcactaagacatctgtcacactcacatgggacccacctctccttgatggaggttcaaaaatcaagaactatattgttgaaaagcgggaatcaacaagaaaagcatattcaactgttgcaacaaactgccacaagacttcctggaaggtagaccagcttcaagaaggctgtagctactatttcagggttctcgcagaaaatgaatatggcattgggctgcctgctgaaaccgcagaatctgtgaaagcatcagaacgacctcttcctccaggaaaaataactttgatggatgtcacaagaaatagtgtgtcactctcttgggagaaaccagagcatgatggaggcagccgaattctaggctacattgtggagatgcagaccaaaggcagtgacaaatgggccacgtgtgccacagtcaaggtcactgaagccactatcactggattaattcagggtgaagaatactctttccgtgtttcagctcagaatgaaaagggcatcagtgatcctagacaactgagtgtgccagtgatcgccaaagatcttgtcattccaccagccttcaaactcctgttcaatactttcactgtactggcaggtgaagacctaaaagttgatgttccattcattggccgccctaccccagctgtaacctggcataaagataatgtaccactgaagcagacaactagagtaaatgcagagagcacagaaaataattcactactgacaataaaggacgcctgccgagaagatgttggccattatgtggttaaactgactaactcagctggtgaagctattgaaacccttaatgttatcgttcttgacaaaccagggcctccaactggaccagttaaaatggatgaagtgacagctgatagtattactctttcctggggcccacccaagtatgatggtggaagttctatcaataattacattgttgagaaacgggacacttccacaaccacctggcaaattgtatcagctacagttgcaaggacaacaataaaggcttgcagactgaagactggatgtgaatatcagtttagaattgcagctgaaaacagatatgggaagagtacctacctcaattcagagcctactgtagcccaatatccattcaaagttcctggtcctcctggcactccagttgtcacactgtcctccagggacagcatggaagtacaatggaatgagccaatcagtgatggaggaagtagagtcattggctatcatctagaacgcaaggaaagaaatagcatcctctgggttaagttgaataaaacacctattcctcaaaccaagtttaagacaactggccttgaagaaggtgttgaatatgaatttagagtctctgcagagaacatcgtgggcattggcaagccgagtaaagtatcagaatgttatgtggctcgtgacccatgtgatccaccaggacggccagaggcaatcattgtcacaaggaattctgtgactcttcagtggaagaaacccacctatgacggtggaagcaagatcactggttatattgttgagaagaaagaattacctgagggccgttggatgaaagccagttttacaaatattattgacactcattttgaagtaactggcctagttgaagatcacagatatgagttccgggttatagcccgaaatgccgcaggagtgtttagtgagccttcagaaagcacaggagcaataacagctagagatgaggtagatccaccacgaataagtatggatccaaaatacaaagacacaatcgtggttcatgctggtgaatcattcaaggttgatgcagatatttatggcaaaccaataccaaccattcagtggataaaaggtgatcaggagctttcaaacacagctcgattagaaataaagagcaccgactttgccaccagtctcagtgtaaaagatgcagtacgtgtcgacagtggaaattacatactgaaggccaaaaatgttgcaggagaaagatcagttactgtgaatgtcaaggttcttgacagaccagggccacctgaaggacctgttgttatctcaggagttacagcagaaaaatgcacactagcttggaaacccccacttcaggatggtgggagtgacatcataaattatattgtggaaaggagagaaaccagccgcttagtttggactgtggttgatgccaatgtgcagactctcagctgcaaggttactaagcttcttgaaggcaatgaatatactttccgtataatggcagtaaacaaatatggtgttggtgaacctcttgaatctgagccagtagttgccaagaatccatttgtagtaccagatgcaccaaaagctccagaagtcacaacagtgaccaaggactcaatgattgttgtatgggaaagaccagcatctgatggtggtagtgaaattcttggatatgttcttgagaaacgggataaagaaggcattagatggacaagatgccataagcgtctgattggagagttgcgcctgagagtaactggactcatagaaaatcacgattatgagttcagagtttctgctgagaatgctgctggacttagtgaaccaagccctccttctgcttaccaaaaggcttgtgatcctatttataaaccaggacccccaaacaaccccaaagtcatagacataaccagatcttcagtattcctttcttggagcaaaccaatatatgatggtggctgtgaaattcaaggatacattgttgaaaaatgtgatgtgagtgttggtgaatggacaatgtgcactccaccaacaggaattaataaaacaaacatagaagtagagaagctgttggaaaagcatgaatacaacttccgtatctgtgctattaataaagctggagttggagaacatgctgacgtccctggacctattatagttgaagaaaaattagaagcaccagacattgatcttgacctagaactaaggaaaatcataaatataagggcaggtggctccttaaggttatttgttcctataaaaggtcgtcctacaccagaagttaaatggggaaaggtggatggtgaaatccgagatgcagctataattgatgtcactagcagtttcacctctcttgttcttgacaatgtcaaccgatatgatagtggaaaatatacgcttacattagaaaacagcagtggaacaaagtctgcctttgttactgtgagagttctggacacgccaagtccacctgttaacctgaaagtcacagaaatcaccaaagactcagtatcaattacatgggaacctcctttgttggatgggggatccaaaataaaaaattacattgttgagaaacgtgaagccacaagaaaatcatatgctgctgttgtaactaactgccataagaattcttggaaaatcgatcagctccaagaaggttgcagttattactttagagtcacagctgagaatgagtatggtattggccttcctgcccagactgctgatccaattaaggttgcagaagtgccacaacctcctggaaaaataactgtggatgatgtcaccagaaacagtgtctctctgagttggacaaaacctgaacatgatggtggcagtaaaatcattcagtatattgtggaaatgcaagctaaacacagtgagaaatggtcagagtgtgctcgagtaaagtctcttcaggcagtaattaccaacctaactcaaggggaagaatatctttttagagttgttgctgtaaatgaaaaggggagaagtgatcctcggtcccttgcagttccaatagttgccaaagatctggtaattgagccagatgtaaaacctgcattcagtagttacagtgtacaggttggccaagatttgaaaatagaagtgccaatttctggacgtcctaagccaaccattacctggactaaagatggtctcccactgaagcagaccacaagaatcaatgttaccgattcactggatctcaccacactcagtattaaagaaactcataaggatgatggtggacaatatggaatcacagttgccaatgttgttggtcagaagacagcatccatcgaaattgtaactctagataaacctgatcctccaaaaggacctgttaaatttgatgacgtcagtgctgaaagtattacattatcttggaaccctccattatatacagggggctgccaaatcaccaactacattgttcagaaaagagatacaaccaccacagtatgggatgttgtttctgctactgttgctagaactacactcaaagtgaccaaactgaaaactggtacagaataccaatttagaatatttgccgaaaacagatatggacaaagctttgccttagagtctgatccaattgtagctcaatatccctacaaagaaccaggccctccaggtacaccatttgccacagccatttccaaagactccatggtcatacagtggcatgaaccagtcaacaatggtggaagccccgtcataggttaccacctggagagaaaagaaagaaacagtattttgtggacaaaggtcaacaaaactattattcatgacacccaattcaaagcacagaatcttgaagaaggcattgaatatgaattcagagtgtatgctgaaaatattgttggtgtaggcaaagcaagcaagaattctgaatgctatgtagccagagatccctgtgacccaccaggaaccccagaaccaataatggttaaaagaaatgaaatcactttacagtggaccaaacctgtgtatgatggtggaagtatgattacaggctacattgtagagaaacgtgatttgcctgatggtcgttggatgaaagctagctttacaaatgtcattgaaactcaatttactgtgtcaggtcttactgaagatcaaagatatgaattcagagtcattgcaaagaatgcagctggtgcaataagtaaaccctctgacagtactggaccaataactgccaaggatgaggttgaactcccaagaatttcaatggatccaaaattcagagacacaattgtggtaaatgctggagaaacattcagacttgaggctgatgtccatggaaagcccctacctaccattgagtggttaagaggagataaggaaattgaagaatctgctagatgtgaaataaagaacacagatttcaaggctttacttattgtaaaagatgcaattagaattgatggtgggcagtatattttaagagcttccaatgttgcaggttctaagtcattcccagtaaatgtaaaagtattagatagaccaggacctccagaagggccagtccaggttactggagtcacttctgaaaaatgctctttaacatggtctccaccacttcaagatggtggcagtgacatttctcactatgttgttgaaaagcgagaaaccagtcgacttgcctggactgttgttgcttcagaagttgtgaccaattctctgaaagttaccaaactcttagaaggtaatgaatatgttttccgtataatggctgtcaacaaatatggtgttggagagcctttggaatctgcaccagtactaatgaaaaatccatttgtgcttcctggaccaccaaaaagcttggaagtcacaaatattgccaaagactccatgaccgtctgttggaaccgtccagatagtgatggtggaagtgagattattggttacattgtagagaaaagagacagaagtggcattcgatggataaaatgtaataaacgccgcattacagatttgcgtctaagagtgacaggattaacagaagatcatgagtatgaattcagggtctctgcagaaaatgctgctggagttggggaaccaagtccagctacagtttattataaagcctgtgatcctgtgttcaaacctggcccacctaccaatgcacacattgtagacaccactaaaaattcaatcacacttgcctggggtaaacccatctatgatggcggcagtgagatcttgggatatgtagtagaaatctgtaaagcagatgaagaagaatggcaaatagttactccacagactggcctgagagtcactcgatttgaaatttcaaaactcactgaacaccaagagtataaaatacgagtctgtgccctcaacaaagttggtttaggtgaggctacatcagttcctggtactgtgaaaccagaagataaacttgaagcacctgaacttgaccttgactccgaattaagaaaaggaattgttgtaagagctggtggatctgccagaattcacattccattcaaaggtcgtccaacgcctgagatcacttggtctcgagaggaaggtgaattcacagataaggtccaaattgaaaagggagtaaactatacccaactatcaatagataactgtgatagaaatgatgctggaaaatacattcttaagttggaaaacagcagtggatcaaagtctgcttttgtaactgtgaaagttcttgacactccaggaccaccacagaatttggcagtcaaagaagtgagaaaagattctgccttcctggtatgggagccacccatcattgatggaggggcaaaggtcaagaactatgtgattgacaaacgtgagtcaaccagaaaagcgtatgctaatgtgagtagtaaatgcagcaaaacaagttttaaagtggaaaaccttacagaaggagccatttattacttcagagtcatggctgaaaatgaatttggagttggtgttccagtggaaactgttgatgccgtgaaagctgctgaacctccttccccaccaggaaaggttacactcactgatgtgtcccagaccagtgcatcacttatgtgggagaaacctgaacatgatggcggtagcagagtcctggggtacgttgttgaaatgcagcccaaaggaactgaaaaatggagcattgtggctgaatccaaagtctgtaatgcagttgttactggtttgagttctggacaagaatatcagttccgtgtcaaggcttataatgagaaaggaaaaagcgatccaagagtgttgggtgttcctgtcatagccaaggacttgactatacagcctagtttaaagttaccatttaacacatatagtatccaagctggagaagatcttaaaatagaaattccagttataggccgaccaagacctaacatttcttgggtcaaagatggtgagcctcttaaacagacaacaagagtaaacgttgaagaaacagctacctcaactgttttgcacattaaagaaggtaacaaagatgactttggaaaatacaccgtaacggcaacaaatagtgcaggcacagcaacagaaaatctcagtgttatcgttttagaaaagcctggacctccagttggcccagttcggtttgatgaagttagtgcagactttgtagtcatatcttgggaacctccagcctatactggtggctgccaaataagcaactacattgtagagaagcgagatacaaccaccaccacttggcacatggtatcagcaacagttgcaagaacaacaattaaaataaccaaactgaaaacaggcacggagtaccagtttagaatttttgctgaaaacaggtatggaaaaagtgccccactggattctaaggcagttattgtacaatatccatttaaagaacctggaccacctggaactccttttgtgacatcaatctcaaaagatcagatgcttgtgcaatggcatgagccagtgaatgatggaggcaccaaaattattggctaccatcttgaacagaaagaaaagaacagtattttatgggtcaagttaaataagacccccattcaggacaccaaattcaaaacaactgggcttgatgagggccttgagtatgagttcaaagtttctgctgaaaatattgttggcattggcaagcctagcaaagtgtcagaatgctttgttgctcgtgatccatgtgacccacctggtcgccctgaagccattgttattacaagaaacaatgtcacactgaaatggaagaaacctgcctatgatggtggtagcaaaataacaggttatattgtagaaaagaaagatctacctgatggccgctggatgaaagccagctttaccaacgtattagaaactgaatttacagtgagtggacttgtagaagaccaaagatatgaatttagagtaattgcaagaaatgcagctggaaactttagtgaaccatctgatagtagtggtgccattactgcaagagatgaaattgatgcaccaaatgcctctctggatccaaaatataaagatgtcatcgttgttcatgcaggagagacttttgttcttgaagccgacatccgtggcaaacctatacctgatgttgtttggtcaaaagatggaaaagaacttgaagaaacagctgctagaatggaaattaaatctactattcagaaaacaactcttgttgtcaaagactgtatacggactgatggaggacaatatattctgaaactcagcaatgttggtggtacaaagtctatacccatcactgtaaaggtacttgacaggccagggcctcctgaagggcctctgaaagttactggagttactgcggaaaaatgttacctggcatggaacccacctttgcaagatggtggtgctaatatttcacattacatcattgaaaagagggagacaagccgactctcttggacccaggtttcaactgaggtacaggcccttaactacaaagttactaaacttcttcctggtaatgagtacattttccgtgtcatggctgtgaataaatatggaattggagagcccttggaatctgggcctgttacggcctgtaatccttataagccaccaggtcctccctcaacacctgaagtctcagcaatcaccaaagattctatggtagtaacatgggcacgcccagtagacgacggaggtaccgaaattgagggctacattcttgaaaaacgagataaggaaggcgttagatggaccaagtgcaacaagaaaacattaacggatctgcggctcagggtaactggtcttaccgaaggccattcctatgaattcagagttgctgctgaaaatgcagctggtgtgggagaacctagtgagccatctgttttctaccgtgcgtgtgatgccttgtatccaccaggtcccccaagcaatccaaaagtgacggacacttccagatcttctgtctccctggcatggagtaagccaatttatgatggtggcgcacctgttaaaggctatgttgtagaggtcaaagaagctgctgcggatgaatggacaacctgcactccaccaacaggattacaaggaaagcagttcacagtgaccaagcttaaagaaaacactgaatataacttccgtatttgtgccatcaattctgaaggtgtaggtgaacctgcaactctacctggctcagtggttgctcaggagaggatagagccaccagaaatagaactcgatgctgatctcagaaaggtggtcgttctgcgtgcaagtgctactttacgcttatttgtcactatcaaaggtcgaccagaacccgaagttaaatgggaaaaggcagaaggcattctcactgacagggctcagatagaggtgaccagctcatttacaatgttggtgattgataatgttaccagatttgacagtggtcggtataatctgacattagaaaataatagtggctccaaaacagcttttgttaacgtcagagttcttgactcaccaagtgcccctgtgaatttgaccataagagaagtgaagaaagactcagtgacgttgtcctgggaaccaccacttattgatggtggagctaagattacaaactacattgtcgaaaaacgagaaactacaagaaaagcctatgctaccattacaaataattgcactaaaactactttcagaattgaaaatctacaagaaggatgttcttactacttccgagtcttggcttccaatgaatatgggattggtttgccagctgaaacaacagaacccgttaaagtgtctgaaccacccctcccacctggaagagtaactcttgttgatgtgacccgtaatacagctacaattaagtgggagaaaccagaaagtgatggtggcagcaaaattactggttatgtggttgaaatgcagactaaagggagtgaaaagtggagcacctgcacacaagttaagactctagaagcaactatatctggcttaactgcaggagaagagtatgtcttcagggtagctgcagttaacgaaaagggaagaagtgatccaagacaacttggagtgccagtaattgcaagggatattgaaataaagccttcagttgagcttcctttccatactttcaatgtaaaggctagagaacaacttaagattgatgtgccattcaaaggaagacctcaagctactgtgaactggagaaaagatggtcagactcttaaagagacaactagagtcaatgtttcttcttcaaagactgtaacatcactatctattaaggaagcttcaaaggaagatgttggaacttatgaattatgtgtttcaaacagtgctggatccataacagttcctattactataattgtccttgacagaccaggacctccaggtcctatacgtattgatgaggttagttgtgacagcataaccatttcttggaatcctccagaatatgatggtggctgccaaattagcaattacattgttgaaaagaaagaaaccacctctacaacatggcacatagtttcacaagcagttgcaagaacatccattaaaatagttcgcctgacaacaggaagtgagtatcagttccgtgtttgtgcagaaaaccgctatggaaagagctcctacagtgaatcttcagctgttgttgcagagtatccattcagtcccccaggtcctcctggtactcctaaagttgtgcatgccacaaaatctaccatgcttgtaacctggcaagtgccagttaatgatggaggaagtcgagtaattggctatcatcttgagtataaagaaagaagcagcattctttggtcaaaagcaaataaaatcctcattgctgatactcaaatgaaagtctccggccttgatgaaggactgatgtatgagtatcgtgtatatgctgaaaatattgctggaattggtaaatgcagtaaatcttgtgaaccagtccctgcaagagatccttgtgaccctcctggacaacctgaagtcacaaatatcacaagaaaatcagtgtcacttaaatggtctaaaccacattatgatggtggagctaagatcacaggatacattgttgaacgcagagaactaccagatggccggtggctgaagtgcaattatactaatatacaagaaacatactttgaagtaactgaacttactgaagatcagcgttatgaattccgggtttttgcaaggaatgctgctgactcagttagtgagccatctgaatccactgggcctattatagttaaagatgatgttgagcctccaagagttatgatggatgtcaagttccgagacgttattgttgtcaaagctggagaggtccttaagataaatgcagacattgcagggcgacctctgccagtaatttcctgggccaaggatggtatagaaattgaagaaagagcaagaacagaaatcatctcaacagacaatcatactttgttaacagttaaagactgtataagacgagacactgggcaatatgtactaacactgaagaatgttgccggcactcggtctgtggccgttaattgcaaagtacttgataagcctggtccaccagcaggaccacttgaaataaatggcctcactgctgagaaatgctctctttcctggggacgtccccaagaagatggtggtgcagatatcgactattacatcgtagaaaaacgtgaaacaagccaccttgcatggacaatatgtgaaggagagttacagatgacatcctgtaaagtaaccaagttactcaaaggcaatgaatatatatttagagtaactggtgttaataaatatggtgttggtgagcccctagagagtgtagctataaaggcactagatccatttacagttccaagtccacccacgtctttggaaattacttctgtgaccaaagaatctatgacactttgctggtcaagacccgagagtgatggaggtagtgaaatatctggatatataattgaaaggcgagagaaaaatagcctaagatgggtgcgtgtaaacaaaaaaccagtttatgatctaagagtgaaatcaacaggacttcgggaaggatgtgaatatgaatatcgtgtttatgcagaaaatgctgctggcctaagtcttccaagtgaaacctctcccttaattagggcagaagatccagtgttcctaccatctcctccatccaaacccaaaattgtggactcaggcaagacaactataactattgcctgggttaagccgctgtttgatggtggggccccgataactggatatactgtagaatacaaaaaatctgatgacactgactggaaaacttccattcagagcttacgagggacagaatatacaataagcggactaacaacaggagctgaatatgttttcagagtaaaatctgtcaataaggttggtgctagtgaccccagtgatagctctgaccctcagatagcaaaggaaagagaagaagaacctttatttgatattgacagtgaaatgaggaagaccttgattgtcaaggctggtgcctcatttaccatgactgtgcctttccgaggaagaccagtacccaatgtcttgtggagtaagccagacactgacctccgtactagagcttatgttgataccacagactctcgtacatcactgaccattgaaaatgccaacagaaatgactctggaaagtacacattaacaattcagaatgttttgagtgctgcttcactgaccttagttgtcaaagttttagataccccaggtcctccaaccaacattactgtgcaagatgtaaccaaagagtctgcagtgttatcctgggatgttcctgaaaacgatggtggagcaccagtgaagaattaccacatagaaaaacgtgaggccagcaagaaagcatgggtctctgtgaccaacaactgtaaccgcctctcctacaaagttaccaatttacaagaaggagctatctattacttcagagtctctggagaaaatgagtttggtgttggtataccagctgaaacaaaggaaggagtaaaaataacagaaaaaccaagcccacctgaaaaacttggagtaacaagtatatccaaagacagtgtttccctgacctggctgaagcctgaacatgatggcggaagcagaattgtacactatgtcgttgaagcactagaaaaaggacagaaaaactgggttaaatgtgcagtggcaaagtcaacccatcacgttgtttccggtctgagagagaattctgaatactttttccgagtgtttgctgaaaatcaagctggcctgagtgacccgagagagcttctgcttcctgttcttattaaggagcaactagaaccacctgaaattgatatgaagaatttcccaagtcacactgtatatgttagagctggttcaaaccttaaagttgacattccaatctctggaaaaccacttcccaaagtgaccttatcaagagatggtgtcccccttaaggcaaccatgagatttaataccgaaattactgctgagaacctgaccatcaatctcaaagaaagtgttacagctgacgctgggagatatgaaatcactgctgccaactccagtggtacaaccaaagctttcattaacattgttgtgctagacaggcctggtcctccaactggccctgttgttattagtgatataactgaagaaagtgtgactctcaaatgggagccacctaagtatgacggtggaagtcaagttaccaactacattctactcaaaagagaaacaagtactgcagtgtggactgaagtgtctgcaacagttgcaagaaccatgatgaaagtcatgaaactgaccacaggagaagaataccaattccgcatcaaggcagaaaaccgctttggcatcagtgatcatatagattcagcttgtgtgactgtcaaactaccatacacaacacctggaccaccatctacaccatgggtcactaatgttactcgagaaagcatcactgtgggctggcatgaaccagtgtcaaatggaggcagtgcagtcgtaggctatcacctggaaatgaaagacagaaacagtattttatggcaaaaagccaacaaactggtcatccgcacaactcacttcaaagtcacaacaatcagtgctggacttatttatgaattcagggtgtatgcagaaaatgctgctggagttggaaaacctagccatccttctgaaccagtcttggcaattgatgcttgtgaacccccaagaaatgttcgtatcactgatatttcaaagaactctgtcagcctttcatggcaacaaccagctttcgatggaggtagcaagattacaggctacattgttgagagacgtgaccttccagatggcagatggaccaaggccagcttcaccaatgttactgaaactcaattcatcatctctggcttgactcagaattcccagtatgaattccgtgtctttgctaggaatgctgttggttccattagcaatccatctgaggttgtagggcccattacttgcatcgattcttatggtggtcctgtaattgatttgcctctagaatatacagaagttgtcaaatacagagcaggtacatctgtgaagctcagagctggcatttctggcaaacctgcgcctactattgagtggtataaagatgataaagaattacaaaccaatgcactggtgtgtgttgaaaataccacggacctcgcatctatactcatcaaagatgccgatcgccttaatagtggatgctatgaattaaaactaaggaatgccatgggctcagcctcagccaccatcagagtacagatccttgacaaaccaggcccacctggtggaccaattgaatttaagactgtaactgctgagaagatcacccttctctggcggcctccagctgatgatggtggtgcaaaaatcactcactacattgtggaaaagcgtgagacaagccgcgttgtgtggtctatggtgtctgaacatttggaagagtgcatcattacaaccaccaaaattatcaaaggaaatgaatacatcttccgggtccgagccgtgaacaaatatggaattggcgagccactggaatctgattccgttgtagccaagaacgcatttgttacacctgggccaccaggcataccagaagtgacaaagattaccaagaattcgatgactgttgtatggagcaggccaattgcagatggcggtagtgatataagtggctatttccttgaaaaacgagacaagaagagcctaggatggtttaaagtactaaaagagactatccgtgacaccagacaaaaagtaacaggactcacagaaaacagtgactatcaatacagagtttgtgctgtaaacgctgctggacagggtccattttctgaaccatctgaattctacaaagctgctgatcctattgatcctccaggtccacctgctaagataagaatcgcagattcaaccaagtcatccatcacccttggctggagtaagcctgtctatgatgggggcagtgctgttactgggtatgttgtcgagataagacaaggagaggaagaggaatggactactgtctctaccaaaggagaggtcagaactacagaatatgtggtatccaacctgaaacctggagtcaattactacttccgggtatctgctgtaaactgtgctggacaaggagaacctatagaaatgaatgaacctgtacaagctaaagatatacttgaggcaccagagattgacctggatgtggctctcagaacttctgttattgccaaagctggtgaagatgtacaagtgttgattccctttaaaggcagacctccacctactgtcacatggagaaaagatgagaagaatcttggcagtgatgccagatacagcattgaaaacactgattcatcctcattactcaccattcctcaagttactcgcaatgatacaggaaaatatattctcacaatagaaaatggagttggtgaacctaagtcttcaactgtgagtgttaaagtgcttgacacaccagctgcctgccagaaactacaggttaaacatgtttctcgaggcacagtcactttgctctgggatcctcctctcattgatggaggatctccaataattaattatgtcattgaaaagagagatgccaccaagagaacatggtctgtcgtgtcacacaaatgttctagcacatccttcaagctaatagatttgtcggagaagactccattcttcttcagagttcttgcagaaaatgaaattggaattggggaaccctgtgaaactacagagccagtgaaggctgctgaagtaccagctcctatacgtgatctctcaatgaaagactcaacaaagacatctgtcatcctcagctggaccaaacctgactttgatggtggtagcgtcatcacagaatatgttgtagaaaggaaaggtaaaggtgaacagacgtggtcccacgctggcataagtaagacatgtgaaattgaggttagccaacttaaggagcagtcagtcctggagttcagagtgtttgccaaaaatgagaaaggactgagtgatcctgtcactattgggccaattacagtgaaagaacttattattacacctgaagttgacctgtcagatatccctggggcacaagtcactgtgagaattgggcacaatgtgcaccttgaattaccttataagggaaaacccaaaccatccatcagttggctgaaagatggcttgccactgaaagaaagtgaatttgttcgcttcagtaaaactgaaaacaaaattactttgagtattaagaatgccaagaaggagcatggaggaaaatacactgttattcttgataatgcagtgtgtagaattgcagtccccattacagtcatcacccttggcccaccatcaaagcccaaaggacccattcgatttgatgaaatcaaggctgatagtgtcatcctgtcatgggatgtacctgaagataatggaggaggagaaattacttgttacagcatcgagaagcgggaaacttcacaaactaactggaagatggtgtgttcaagtgttgccagaacgactttcaaagttcctaatctagtcaaagatgctgagtaccagtttagagtgagagcagaaaacagatacggagtcagccaaccacttgtctcaagcattattgtggcaaaacaccagttcaggattcctggtcccccaggaaagccagttatatacaatgtgacttctgatggcatgtcactaacttgggatgctccagtttatgatggtggttcagaagttactggattccatgttgaaaagaaagaaagaaatagcatcctctggcaaaaagttaatacatcaccaatctctggaagagaatatagagccactggactggtagaaggtctggattaccaattccgtgtatatgctgaaaattctgctggcctaagctcacctagtgacccaagcaaatttaccttagctgtttctccagtagacccacctggcactcctgactacattgatgtcacccgggaaaccatcacacttaaatggaacccaccattgcgtgatggaggcagtaagattgtgggctatagcattgagaaacggcaaggaaatgaacgctgggtgagatgcaactttactgacgtcagtgaatgtcagtacacagttacaggactcagtcctggggatcgctatgagttcagaataattgcaagaaatgctgttggaactataagcccgccctcacagtcttctggcattattatgacaagagatgaaaatgttccaccaatagtagagtttggccctgaatactttgatggtctcattattaagtccggagagagccttagaattaaagctttggtacaaggaagaccagtgcctcgagtaacttggttcaaagatggagtggaaatcgaaaagaggatgaatatggaaataaccgacgtacttggatccaccagcctatttgttagagatgctactcgggaccatcgtggtgtatacacagtggaagccaaaaatgcatctggttctgcaaaagcagaaattaaagtgaaagtacaagatacaccaggaaaagtagttgggccaataagattcaccaatattactggggagaagatgactctgtggtgggatgccccactcaatgacggttgtgctcccataacccactacatcattgaaaaacgggaaaccagcagacttgcctgggcactaattgaggataaatgtgaagcccaaagttacactgccattaaactaataaacggcaatgaataccaattccgtgtttctgcagttaacaagtttggtgttggcaggccacttgattctgatccagtggttgctcaaatacaatatactgttcctgatgcccctggcattccagaacctagcaacataacaggcaacagcattaccctgacatgggcaaggccagaatcagatggtggcagtgaaattcaacagtatatccttgaaagaagagaaaagaaaagcacaagatgggtaaaagtgatcagcaaacgaccaatctctgaaacaagattcaaagtcactggtctgacagaaggcaatgagtatgaattccatgtcatggctgaaaatgctgcaggagttggacctgcaagtggcatctcaagactcattaaatgtagagagcccgtcaacccaccaggtcctcccacagtggtcaaagtaacagacacatcaaagacaactgtgagcttagaatggtccaaaccagtgtttgatggtggcatggaaataattgggtatattattgaaatgtgtaaggccgacttaggagactggcacaaggtgaatgcagaggcatgtgtgaaaacaagatatacagtcactgatctacaagcaggtgaagaatacaaattccgagttagtgctatcaatggtgctggaaaaggcgacagctgtgaagtgactggcacaattaaagcagttgaccggttaacagctcctgagttagacatagatgcaaacttcaaacagactcatgttgttagagctggggccagtattcgcctcttcattgcctaccaaggtagacctactcctacagctgtgtggagcaaaccagactctaaccttagccttcgggctgatatccatacaacagattccttcagcaccctcactgtggaaaactgcaacagaaatgatgcagggaaatatacccttactgtggaaaacaacagtggtagtaagtcaatcacattcaccgtgaaagtgctagacactccaggcccacctggcccaattaccttcaaagatgtgacccggggatctgctacattgatgtgggatgcccctcttcttgacggtggtgcccgaatccatcattatgtggtagagaaacgagaggcaagtcgccgtagttggcaggttatcagtgaaaaatgcactcgtcagatcttcaaggtcaatgacctggccgaaggtgttccgtactatttccgtgtttctgcagtaaatgagtatggtgttggtgagccctatgaaatgccagaaccaattgtagccacagaacagcctgctccacctaggagacttgatgttgttgatactagcaaatcctccgcagtcttagcttggcttaaacctgaccacgatggaggcagccggatcactggctacctgcttgaaatgagacaaaagggatctgacttctgggttgaagctggtcacaccaaacagctaactttcacagtagagcgtcttgttgagaaaactgaatatgaattccgtgtgaaggccaagaatgatgctggctatagtgaacccagagaagccttctcttctgtcatcattaaggagcctcaaatcgagcccactgctgacctcactggaattaccaatcagcttataacttgcaaagcaggaagcccatttaccattgacgtaccaatcagtggtcgtcctgcccccaaagtaacatggaaactggaagaaatgagacttaaagagacagatcgagtgagcattacaacaacaaaagacagaaccacactgactgtaaaggacagcatgagaggtgactctggaagatacttcttgaccctggaaaatacagctggtgttaaaacatttagcgtcacagttgtggtcattggaaggccaggtccagtaaccggccccattgaggtctcatctgtctcagctgaatcgtgtgtcctgtcatggggagaacctaaagatggaggaggcactgaaattactaattacatagttgaaaagcgtgaatcgggtacaacagcttggcagcttgtcaattccagtgtcaagcgcactcaaattaaagtcactcatctcacaaaatacatggaatattctttccgtgtcagttcagagaacagatttggtgtcagcaaacctctagaatcagcaccaataattgctgaacatccatttgtcccaccaagcgctcctaccagacctgaggtctaccatgtgtctgccaatgccatgtctattcgttgggaagaaccctaccacgatggtggcagtaaaatcattggctactgggttgagaagaaagaacgtaatacaattctttgggtgaaagaaaacaaagtgccatgcttagagtgcaactacaaagtaactggtttagtagaaggactggaatatcagttcagaacttatgcactcaatgctgcaggtgttagcaaggccagcgaagcttcaagacctataatggctcaaaatccagttgatgcaccaggcagaccagaggtgacagatgtcacaagatcaacagtatcactgatttggtctgccccagcgtatgatggaggcagcaaggttgtgggctacatcatagagcgtaagccagtcagtgaggtaggagatggtcgctggctgaagtgcaactacaccattgtatctgacaatttcttcaccgtgactgctctcagtgaaggagacacttatgagttccgtgtgttagccaagaatgcagcaggcgtaattagcaaagggtctgaatctacaggccctgtcacttgccgagatgaatacgctccacccaaagccgaactggatgcccgattacacggtgatctggttaccatcagagcaggttctgatcttgttctggatgctgcagttggtggcaaacctgaacccaaaattatctggaccaaaggagacaaggagctagatctctgtgaaaaagtctctttgcagtatactggcaaacgagcaactgctgtgatcaagttctgtgacagaagtgacagtggaaaatacactttaacagtgaaaaatgccagcgggaccaaggccgtgtctgtcatggtcaaagtgcttgattcccctggcccatgtggaaagctcaccgtcagcagagtaacacaggagaagtgcactttagcctggagccttccgcaggaagacggaggagcagaaatcactcactacatcgtggaaagacgcgagactagcaggctcaactgggtgattgttgaaggcgaatgcccaaccctatcctatgtcgttaccaggctcatcaagaacaatgagtacatattccgagtgagggcagtaaacaaatatggccctggtgtgcctgttgaatcagagccaattgtagccagaaactcattcactattccatcaccacccggcatacctgaagaagttgggactggcaaagagcatatcatcattcagtggacaaaacctgaatctgatggtggcaatgaaatcagcaactacctagtagacaaacgtgagaagaagagcctgcgctggacacgtgtcaacaaagactatgtggtgtatgataccaggctgaaggtgaccagcctgatggagggttgtgattaccagttccgggtgaccgcagtgaatgcagctggtaacagtgagcccagcgaagcttccaacttcatctcatgcagagaaccatcatatacccctggaccaccttctgctccaagagttgtggataccaccaaacacagcattagtttggcatggaccaaacccatgtacgatggtggtactgacattgtaggatatgttctggaaatgcaagagaaggacactgatcagtggtaccgagtgcataccaatgccacaataagaaatactgaattcactgtgccagaccttaaaatgggccagaaatattccttcagagttgctgccgtgaacgtgaagggtatgagcgaatacagcgaatcaattgctgaaattgagcccgtggaaagaatagaaataccagatcttgagcttgcagatgatctaaagaagactgtgaccatcagggctggggcctccttgcgcttgatggtgtctgtatctggaagaccacctcctgtcataacgtggagcaagcagggcattgaccttgcaagccgggcaattattgacaccactgagagctactcattgctaatagtggacaaagttaatcggtacgatgctggaaaatacacaattgaagctgaaaaccaatctggcaagaaatcagcaacagtccttgttaaagtctatgatactcctggtccctgtccttcagtgaaagttaaggaagtatcaagagattctgtgactataacttgggaaattcccacgattgatggtggagctccagtcaacaattacatcgttgagaagcgtgaagctgctatgagagcattcaaaacagtaactaccaaatgcagcaagacactttacagaatttctggacttgtagaaggaaccatgtactatttcagagtgctgccagaaaatatttatggcattggagaaccttgtgaaacatctgatgcagtactggtctcagaagtgcctttggtgcctgcaaagctagaagtggtcgatgtcaccaaatccactgttacccttgcctgggaaaaaccactctacgatggtggtagccgactcactggatatgttctcgaggcctgcaaagctggcacagagagatggatgaaggttgtcaccttaaaacccacagtcctagagcacactgttacttccttaaatgaaggtgaacaatacttatttagaataagggcacaaaatgagaaaggtgtgtcagaaccaagagagactgtcacagccgtgactgtacaagacctcagagtgttgccaacaatcgatctttctacaatgcctcagaagaccatccatgtcccagctggcagaccagtagagctggtgatacctattgctggccgtccacctcctgctgcttcctggttctttgctggttctaaactgagagaatcagagcgtgtcacagttgaaactcacactaaagtagctaaattaaccatccgtgaaaccactatcagagatactggagaatacacacttgaattgaagaatgttaccggaactacttcagaaaccattaaagttatcattcttgacaagcctggtccaccaacaggacctattaagattgatgaaattgatgctacatcaattaccatttcctgggaaccacctgaattggacggtggtgctccactgagtggttatgtggtagaacaacgtgacgctcatcgtccaggatggctgcccgtttctgaatcagtgactaggtccacgtttaagtttaccagactcaccgaaggaaatgagtatgtgttccgtgtggctgcaacaaaccgcttcgggattggctcttacttgcagtctgaggtcatagagtgtcgcagcagcatccgtattcctggacccccagaaacattacagatatttgatgtttcccgtgatggcatgacacttacttggtacccaccagaggatgacggtggctcccaagtgactggatatattgtggagcgcaaagaagtgagagcagatcgatgggtccgtgtaaataaagtacctgtgacaatgacacggtaccgctccactggccttactgaaggcttagaatatgaacaccgtgtcacagccattaatgcaagagggtctgggaaaccaagtcgtccttccaaacccatcgttgccatggatccaattgctcctccaggaaagccacaaaacccaagagttactgatacaacaaggacatcagtctccctggcctggagtgttccagaagatgaaggaggatctaaagtcacaggctacttgattgaaatgcaaaaagtagatcaacatgaatggaccaagtgtaacaccactccaaccaagattcgagagtatactctaacacacctacctcagggtgcagaatacaggttccgcgtcctagcttgtaatgctggtggacctggtgagcctgctgaggtaccaggaacagtcaaagtcactgaaatgcttgaatatcctgattatgaacttgatgaaagataccaagaaggtatctttgtaaggcaaggtggcgtcatcagacttaccataccaatcaaaggaaaaccattcccaatatgtaaatggaccaaggaaggccaggatattagtaagcgtgccatgattgcaacatctgaaacacacactgagcttgtgatcaaagaagcagacaggggtgattctggcacttatgacctggttctggaaaataaatgtggcaagaaggctgtctacatcaaggtcagggtgataggaagtcccaacagtccagaagggccactggaatatgatgacatccaagtccgctctgtgagggtcagctggagacctcctgctgatgatggtggtgctgacatcttaggctacatcctcgagagacgagaagtgcctaaagccgcctggtataccattgattccagagtccgaggtacatctctggtggtaaaaggcctcaaagagaatgtagaataccatttccgtgtttcagcagaaaaccagtttggcataagcaaacccttgaaatctgaggaaccagtcacaccaaaaacaccattgaatcctccagaacctccaagcaatcctccagaagtactcgatgtaaccaagagttctgttagcttgtcctggtcccggcccaaagatgatggtggttctagagtcacaggctactacatcgaacgcaaagagacatccactgacaagtgggtcagacacaacaagactcagatcaccaccacaatgtacactgtcacagggcttgttcccgatgctgagtatcagttccgcatcatcgcacagaatgatgttggcctgagtgagaccagccctgcttctgaaccagttgtttgcaaagatccatttgataaaccaagccaaccaggagaacttgagattctttcaatatccaaagatagtgtcactctacagtgggagaaacctgaatgtgatggtggtaaagaaattcttggatactgggttgaatatagacagtctggagacagtgcctggaagaagagcaataaggaacgtattaaggacaagcaattcacaataggaggtttgctggaagctactgagtatgaattcagggtttttgctgagaatgagactgggctgagcagacctcgcagaactgctatgtctataaagactaaactcacatctggagaggccccaggaatacgcaaagaaatgaaggatgttaccacaaaattgggtgaagctgctcaactctcatgccagattgttggaaggcctcttcctgacattaaatggtacagatttggtaaagagctcatacaaagccggaaatacaaaatgtcttcagatggacgcacacacactcttacagtaatgacagaggaacaggaagatgaaggtgtttatacctgcatagccaccaatgaggttggagaagtagaaaccagtagtaagcttctcctgcaagcaacaccgcagttccatcctggttacccactgaaagagaaatattatggagctgtgggttccacacttcggcttcatgttatgtacattggtcgtccagtacctgccatgacttggttccatggtcagaaacttttgcaaaactcagaaaacattactattgaaaacactgagcactatactcatcttgtcatgaagaatgtccaacgtaagactcatgctgggaaatacaaagtccagctcagcaatgtttttggaacagttgatgccatccttgatgtggaaatacaagataaaccagacaaacctacaggaccaattgtgatcgaagctctattgaagaactccgcagtgatcagctggaaaccacccgcagatgacggaggctcctggatcaccaactatgtggtggaaaaatgtgaggccaaggagggggctgaatggcaattggtgtcttcagccatctcagtgacaacctgtagaattgtgaacctcacagaaaatgctggctattacttccgggtttcagctcagaacactttcggcatcagtgaccctctagaagtgtcctcagttgtgatcattaagagtccatttgaaaagccaggtgctcctggcaaaccaactattactgctgtcacaaaagattcttgtgttgtggcctggaagccacctgccagtgatggaggtgcaaagattagaaattactaccttgagaagcgtgagaagaagcagaataaatggatttctgtgacaacagaagaaattcgagaaactgtcttttcagtgaaaaaccttattgaaggtcttgaatacgagtttcgtgtgaaatgtgaaaatctaggtggggaaagtgaatggagtgaaatatcagaacccatcactcccaaatctgatgtcccaattcaggcaccacactttaaagaggaactgagaaatctaaatgtcagatatcagagcaatgctaccttggtctgcaaagtgactggtcatccaaaacctatcgtcaaatggtacagacaaggcaaagaaatcattgcagatggattaaaatataggattcaagaatttaagggtggctaccaccagctcatcattgcaagtgtcacagatgatgatgccacagtttaccaagtcagagctaccaaccaagggggatctgtgtctggcactgcctccttggaagtggaagttccagctaagatacacttacctaaaactcttgaaggcatgggagcagttcatgctctccgaggtgaagtggtcagcatcaagattcctttcagtggcaaaccagatcctgtgatcacctggcagaaaggacaagatctcattgacaataatggccactaccaagttattgtcacaagatccttcacatcacttgttttccccaatggggtagagagaaaagatgctggtttctatgtggtctgtgctaaaaacagatttggaattgatcagaagacagttgaactggatgtggctgatgttcctgacccacccagaggagtcaaagttagtgatgtctcacgagattctgtcaacttaacatggactgagccagcctctgatggtggcagcaaaatcaccaactacattgttgaaaaatgtgcaactactgcagaaagatggctccgtgtaggacaggcccgagaaacacgttataccgtgatcaacttatttggaaaaacaagttaccagttccgggtaatagctgaaaataaatttggtctgagcaagccttcagagccttcagaaccaaccataaccaaagaagataagaccagagctatgaactatgatgaagaggtagatgaaaccagggaagtctccatgactaaagcatctcactcttcaaccaaggaactctatgagaaatatatgattgctgaagatcttgggcgtggtgagtttggaattgtccatcgttgtgttgaaacatcctcaaagaagacatacatggccaaatttgttaaagtcaaagggactgatcaggttttggtaaagaaggaaatttccattctgaatattgctaggcatagaaacatcttacacctccatgaatcatttgaaagcatggaagaattagttatgatctttgagtttatatcaggacttgacatatttgagcgcattaacacaagtgcttttgaacttaatgaaagagaaattgtaagttatgttcaccaggtctgtgaagcacttcagtttttacacagtcataatattggacactttgacattagaccagaaaatatcatttaccaaaccagaagaagctctaccattaaaatcatagaatttggtcaagcccgtcagctgaaaccaggggacaacttcaggcttctattcactgccccagaatactatgcacctgaagtccaccagcatgatgttgtcagcacagccacagacatgtggtcacttggaacactggtatatgtgctattgagtggtatcaacccattcctggctgaaactaaccaacagatcattgagaatatcatgaatgctgaatatactttcgatgaggaagcattcaaagagattagcattgaagccatggattttgttgaccggttgttagtgaaagagaggaaatctcgcatgacagcatcggaggctctccagcacccatggttgaagcagaagatagaaagagtcagtactaaagttatcagaacattaaaacaccggcgttattaccacaccctgatcaagaaagacctcaacatggttgtgtcagcagcccggatctcctgtggtggtgcaattcgatctcagaagggagtgagtgttgctaaagttaaagtggcatccattgaaattggcccagtttctgggcagataatgcatgcagttggtgaagaaggaggacatgtcaaatatgtatgcaaaattgaaaattatgatcagtctacccaagtgacttggtactttggcgtccgacagctggagaacagtgagaaatacgaaatcacctacgaagatggagtggccatcctctatgtcaaagacattaccaaattagatgatggtacctacagatgcaaagtagtcaatgactatggtgaagacagttcttatgcagagctatttgttaaaggtgtgagagaagtctatgactattactgccgtagaaccatgaagaaaattaagcgcagaacagacacaatgagactcctggaaaggccaccagaatttaccctgcctctctataataagacagcttatgtaggtgaaaatgtccggtttggagtaactataactgtccacccagagcctcatgtaacatggtataaatcaggtcagaaaatcaaaccaggtgacaatgacaagaagtacacatttgagtcagacaagggtctttaccaattaacaatcaacagtgtcactacagatgatgacgctgaatatactgttgtggcaaggaacaaatatggtgaagacagctgtaaagcaaagctgacagtaaccctacacccacctccaacagatagtaccttaagacccatgttcaaaaggttactggcaaatgcagaatgccaagaaggccaaagtgtctgctttgagatcagagtgtctggcatccccccaccaacattaaaatgggagaaagatggtcagccactgtccctcgggcctaacattgaaattatccatgaaggcttggattattatgctctgcacatcagggacactttgcctgaagacacgggttattatagagtcacagccactaacacagctgggtccaccagctgccaggctcacctacaagtggaacgcctgaggtacaagaaacaggaattcaagagtaaggaggagcatgagcgacacgtacaaaaacaaattgacaaaaccctcagaatggctgaaattctttctggaactgaaagtgtaccactgacacaggtagctaaagaggctctgagagaagctgctgtcctttataaaccggctgtaagcaccaagactgtaaaaggggaattcagacttgagatagaagaaaagaaggaggagagaaaactccggatgccttatgatgtaccagagccacgcaagtataagcagactaccatagaagaagaccaacgcatcaagcagttcgtgcccatgtctgacatgaagtggtataaaaagatacgtgatcagtatgaaatgcctgggaaacttgacagagttgtacagaaacgacccaagcgcatccgcctttcaagatgggaacagttctatgtgatgcctcttccacgcattacagatcaatacagacctaaatggcgtattcctaaactgtcccaagatgatcttgagatagtgagaccagcccgccggcgtacaccttctcctgattatgacttttactaccgacctagaagacgttctcttggggacatctctgatgaagaattactcctccccattgatgactacttagcaatgaaaagaacagaggaagagaggctgcgtcttgaagaagagcttgagttaggtttttcagcttcacccccaagtcgaagccctccacactttgagctttctagcctacgttactcttcaccacaagctcatgtcaaggtggaggaaacaagaaaagacttcaggtattcaacctatcacatcccaacgaaggctgaagctagtacaagttatgcagaactgagggaacggcatgcccaggctgcgtacagacagccaaagcaacggcaaagaatcatggctgagagggaggatgaagagttgcttcgcccagttacgaccacccagcatctctcagaatacaaaagcgaacttgacttcatgtcaaaggaggaaaagtctagaaagaaatcaaggcgacaaagagaagtgacagaaataacagaaattgaggaagaatacgaaatctcaaaacatgctcaaagagaatcatcctcatctgcgtctagactactgagacgacggcgctccctgtctccaacttatattgagttaatgaggccagtgtctgagctgatccggtcacgtccacaaccggctgaggaatacgaagatgacacagaaagaaggtcacctactccagagagaactcgcccacgatcccccagccctgtgtctagtgagagatcactctcgagatttgagaggtctgcaagatttgatatcttttccaggtatgagtccatgaaagctgctttaaaaactcagaagacatcagaaaggaagtatgaagttttgagtcagcagcctttcacactggaccatgcccctcgaatcacactgagaatgcgctcgcacagggtaccatgtggccaaaatacacgttttattttaaatgttcagtctaagccaactgccgaggttaaatggtaccacaatggtgtggaactccaagaaagcagtaagattcattacaccaacacgagtggagtcctcaccctggaaattctggactgtcatactgatgacagtggaacctaccgtgctgtgtgcaccaactacaagggcgaagcttctgactatgcaacgttggacgtgacaggaggggattataccacctatgcttcccaacgcagagatgaagaggtccccagatctgttttccctgagctgacaagaacagaggcgtatgctgtttcatcatttaagaaaacatctgagatggaagcttcgtcttctgtcagggaagtgaaatcacagatgacggagacaagggaaagtctctcctcatatgaacactctgcatctgcagaaatgaaaagtgctgcattagaagaaaagtcactggaagaaaaatccacaaccagaaagatcaagacgactttggcagcaagaattctaacaaagccacggtccatgaccgtctacgagggcgagtctgcaaggttttcttgtgacaccgatggtgagccggtaccaactgtgacctggctgcgtaaaggacaagtgctaagtacttctgcccgccaccaagtgaccaccacaaagtacaaatcaacctttgagatctcttcagtccaggcttccgatgagggcaattacagcgtggtggtagaaaacagtgaagggaaacaagaagcagagttcactctgactattcaaaaggccagggtaactgaaaaggctgtgacatcaccaccaagagtcaaatccccagagcctcgggtgaaatccccagaagcagttaagtctccaaaacgagtgaatctccagaaccttctcacccgaaagccgtatcacccacagagacaaaaccaacaccaacagagaaagttcagcacctcccagtctctgccccaccaaagattactcagttcctgaaagcagaagcttctaaagagattgcaaaactgacctgtgtggttgaaagcagtgtattaagggcaaaagaggtcacctggtataaagatggcaagaaactgaaggaaaatgggcatttccagtttcattattcagcagatggtacctatgagctcaaaatcaataacctcactgaatctgatcaaggagaatatgtttgtgagatttctggtgaaggtggaacgtctaaaaccaacttacaatttatggggcaagcctttaagagtatccatgagaaggtatcaaaaatatcagaaactaagaaatcagatcagaaaaccactgagtcaacagtaaccagaaaaactgaaccaaaagctcctgaaccaatttcctcaaaaccagtaattgttactgggttgcaggatacaactgtttcttcagacagtgttgctaaatttgcagttaaggctactggagaaccccggccaactgccatctggacaaaagatggaaaggccattacacaaggaggtaaatataaactctctgaagacaagggagggttcttcttagaaattcataagactgatacttctgacagtggactttatacttgtacagtaaaaaattcagctggatctgtgtcctctagctgcaaattaacaataaaagctataaaagatactgaggcacagaaagtctctacacaaaagacttctgaaattacacctcagaagaaagctgttgtccaagaggaaatttcccaaaaagccctaaggtctgaagaaattaagatgtcagaggcaaaatctcaagaaaagttagccctcaaagaggaagcttcaaaggttctgatttctgaagaagtcaagaaatcagcagcaacctccctggaaaaatccattgtccatgaggaaatcactaaaacatcacaggcatcagaagaagtcagaactcatgctgagattaaagcattttctactcagatgagcataaacgaaggtcaaagactggttttaaaagccaacattgctggtgccactgatgtgaaatgggtactgaatggcgtagagcttaccaactctgaggagtaccgatatggtgtctcaggcagcgatcagaccctaaccatcaagcaagccagtcacagagatgaaggaatcctcacctgcataagcaaaaccaaggaaggaatcgtcaagtgtcagtatgatttgacactgagcaaagaactctcagatgctccagccttcatctcacagcctagatctcaaaatattaatgaaggacaaaatgttctctttacttgtgaaatcagtggcgagccatcccctgaaatcgaatggtttaaaaacaacctgccaatttctatttcttcaaatgtcagcataagccgctccagaaatgtatactcccttgaaatccgaaatgcatcagtcagcgacagtggaaagtacacaattaaggccaaaaatttccgtggccagtgttcagctacagcttccttaatggtccttcctctagttgaagaaccttccagagaggtagtattgagaacaagtggtgacacaagcttgcaaggaagcttctcgtctcagtcagtccaaatgtctgcctccaagcaggaggcctccttcagcagtttcagcagcagcagtgctagcagcatgactgagatgaaatttgcaagcatgtctgcccaaagcatgtcctccatgcaagagtcctttgtagaaatgagttccagcagctttatgggaatatctaatatgacacaactggaaagctcaactagtaaaatgcttaaagcaggcataagaggaattccgcctaaaattgaagctcttccatctgatatcagcattgatgaaggcaaagttctaacagtagcctgtgctttcacgggtgagcctaccccagaagtaacatggtcctgtggtggaagaaaaatccacagtcaagaacaggggaggttccacattgaaaacacagatgacctgacaaccctgatcatcatggacgtacagaaacaagatggtggactttataccctgagtttagggaatgaatttggatctgactctgccactgtgaatatacatattcgatccatttaagagggcctgtgcccttatactctacactcattcttaacttttcgcaaacgtttcacacggactaatctttctgaactgtaaatatttaaagaaaaaaaagtagttttgtatcaacctaaatgagtcaaagttcaaaaatattcatttcaatcttttcataattgttgacctaagaatataatacatttgctagtgacatgtacatactgtatatagccggattaacggttataaagttttgtaccatttattttatgacattttacaatgtaagttttgaaactaactgttggtaggagaaagtttcttatggaacgaataccctgctcaacatttaatcaatctttgtgcctcaacatactgttgatgtctaagtatgcctcagtgggttgagaaaatccccattgaagatgtcctgtccacctaaaagagaatgatgctgtgcatatcacttgatatgtgcaccaatacctactgaatcagaaatgtaaggcattggtgatgtttgcatttaccctcctgtaagcaacactttaacgtcttacattttctctgatgatgtcacacaaaattatcatgacaaatattaccagagcaaagtgtaacggccaacactttgttcgctcattttacgctgtctctgacataaggagtgcctgaatagcttggaaaagtaacatctcctggccatcccttcatttaaccaagctattcaagtattcctatgccagagcagtgccaactcttggaggtcccagagtgcagccaatgcctttgtgtggtagttctaaattttaattgcacctgaaaaacctgggcacctaagcaatgagccacagcaaaaagtaaagaacaacaacaaaataaagctgttgttaaattttaaacaatattactaattgcccaaaatgtcaatttgatgtagttcttttcatgcaagtataaattcaattgttagttataattgttggacctccttgagatagtaacaacaaaataaagcaagctatctgcacctcaaaa

SEQ ID NO: 6322 - DNA, 4897 bp, Homo sapiens
gagctgcagtcagatccggggatggagggagccggagaagaggagtgagaaggccggggaggcaggccctgctgtcttcctgcaggccggcagcctgctggcagtggaggaccaggccgtccaggaaaggaaggggtcaggaggtcgggcagggcctcagcaggttcagacaagtccccagaagggagctgcaggcgccctcgagtccaggccccaagcctggctccggttgtccaaagagggcctaggccaggcctctggtgcggaaactgagtcacagccagacctcagggcacggcctagacgcttacgagccaaagttaggggtagagagcagagacctccggggggtctcagggagtagggggcttcagggcctcccagtctagagccggattggcgagttagacgcttgtagatccaaggttggattggggtggggtctctgggacgttggatcgctacgcaaggattggggggattcaagtgcttagagatcgaagtctgccctgggtagggggagtcagacaattggaaagcctaggtagttatttggggaggggtctctacgccttggcgaagcgcacagctgcatctttttggcttgaggcctgaggccttgtcgagaagcttccgtgaaagggtgggccagccgggccacgagaaagaaagtgaataaatcaggaatataagtgggcggggggcccctgagaggggggtcgcaaagggtgagacatggccaccaggcgtttaaccgacgctttcttgttgttgcggaataattccatccaaaaccggcagctgttagccgagcaacagttatcaaaacttgctgatgaccgtatggcactggtgtcaggcatcagcttagatccagaagcagcgattggtgtgacaaaacggccacctcctaagtgggtggatggagtggatgaaattcagtatgatgttggccggattaagcagaagatgaaagaattggccagccttcatgacaagcatttaaacagacccaccctggatgacagcagcgaagaggaacatgccattgagataactacccaagagatcactcagctcttccacaggtgccagcgtgccgtgcaggccctgccgagccgggcccgggcctgctccgagcaggaggggcggctgcttgggaacgtggtggcctcgctggcgcaggccctgcaggaactctccaccagcttccggcacgcacagtcaggctacctcaaacgcatgaagaatcgagaggaaagatcccagcattttttcgacacatcagtaccactaatggatgatggagacgataacactctttaccatcggggttttacagaggaccagttagttctggtggagcagaacacactgatggtggaagagcgggaacgagagattcgccagattgtacagtccatttctgacctgaatgaaatattcagggacttaggggcgatgattgtagaacagggtacagtccttgacagaattgactataacgttgaacagtcctgtatcaaaactgaagatggtttgaaacagcttcacaaggcagaacagtatcaaaagaagaatcggaagatgcttgtgattttaatattatttgtcatcatcattgtgctcattgttgtcctcgttggcgtgaagtctcgataagtggcattgggttttcgtgtgtgccgcgcgtgtggatctcccgggtgtgaggggcttggcctgcgccccgccagctgcccgcagaggtgcagcctcgaggaatctgagggcgtcggggcagcgaacctttgcatccacggactcctccttccctagtcctgctcaagcggtccggggaatgggtttttgtttttccttcattgttgagaatttaaggacctttgatactgctgcacaatagagattgagttctgggatcagttataatatatattttttttagaaagagaaaatgagctgagagtttacaggcactgcagaagctgttcagtattatatgtgtatatgctatttttttagcagccatgtctgagcagaatgttaacataatttttggaaaaattttctttaaaccatctggtttttaagaaatttggtaccaaaaattgatgagtagaggcaaaaatgccccttcatctttctctatatattttccagttgaaaacaaactaagaagtcctttaagaatttataatccgttccccattaacttaatttagcttttccatcactgttaatgatcagagtaacaaagtgtgaaaaataagaaaccatcattgatgttaattaacacatttagatgggccagttaaaacagcttcataagttttaaattaattgtaaatggaatattcctcatttaaaatttttgcactgcattttctactgtaaaccaaaagaggttactaagcaaaaccacctaaatttaagttggtgatttaaatgaatctcacattaaaagaaagcttgacagtgttatgaaagccaccagactcagccagtgtgtccccatgggtatccccagccatccttgctcaatccattacttatatactaactacataatgacctgttcaaaccagactctatttaatgaactgtgaatttacacagaggccattttaaatgggtcaccccatttaggattagtggatctcaaattattaaccaaacatcactccatttcaaagtaaaatattccaccagcgatttgatttattggctcttccattgccactgagcaatgcccaggaagcaggcacattgccaaggactgggggcatcttgactaggaagctcctcgtttgtgtgagcgtgggtcagaccgccaaagtaggacttcatcgtttacctacctattatcaatatggtgcttgaatatattcctataactgtagaacagtgtggaaagtgatggtaactttgaagttgttcatgttttattggctttgttttaattgacactagtagagttttaatggtctttgtgtaaattttaatggcttttccattgtttttgcttctcttaaaaagtttaagaagaatatgacctcattaaatgtgctgttttatttggaccagtcacacaaaatgtctctctagagttgactttaaagttgtttacagaaatttaaactcaattccagagattgaagttgtccaaacagctcatgggcttagtgtccaaacccctgcccagccttccctttccaagttggtgccacctccaggtagccattggtggttttcctattactgatgtggctgtggaatgataaggtcctagaggggccctggcatttcaggaagcggacctggtattccctgacaaacattgcttaggaaagagggccggagaataagaagccagcacctcatcagtcagccctgcaatgtgagacttccgtagctgttgagagtcactgcaggtgttctttcatcccatctgattttaacccatggttgagacgttccaagttagatctgctgctcttaggtgtggggctgtccacattagggaacttgcctcaaaaacagtccacagtggcaataccggacttctgttcaagctttttaaagtgctgagccttacaaacccctgaaggaaagtgaccctttaagagaggatcatctttttttatatttattttcaccaaatagggtgatgagggttggtttttgttccctcaacccatttgggtaaaataacggatctgattagaaactgttttaaggaggggctgggctcggtggctcacgcctgtaatcccagactttgagaggccaaggcggtcacgaggtcaggagttcgagaccagcctagccaacatggtgaaaccccgtctctacaaaaaatacaaaaattagccgggtgggacacgcctgtaatcccagctactcaagaggctgaggcaggagaatagcttgaacccgggaggcagaggttgcagtgagccgagatcacaccactgcactccagcctgggtgacagagcgaggctccgtctcaaaaaaaaaaaaaaaaaattgttttagcgctgggtttcccaaggtgggagagacagacccagcctggagctggcccctggcctgtgtgctgacttcttggggtcctcaaaccactgtatttttctgttgagcctgtacttggggagagatcagtagcatttgaggaagtaagagaaaagaatcatggtacctcagggtttctttccctttactcgctggcagccattgtctgtgggcacctcatgtttttccacactctactgggccgtggaggtaacgatcacccaggccagtctcctctgcctgggatgcgccctctgagaggaggcctagcagggcaggctccctctgggcatccctggatgcagcctctggacacatgcctcctttaaagtgtccgggtgcagctcaggttgagtggaggtagaaggagaaacagacatgtttaccacgcgttttccaaagctcctgatctttcccaagattgtaactgaaaactgctgtctcttgttttgttcgttttgggggtggtggtgctggctgggccatgcttgtgaagtgatgtgtgtctctgatttaacggattcactgttttctctgctaattgagagagcgttatttacattatttatttgttttgacacaagtgctttcagtgttttatcctagctaatggcttcttaaaggtaataaaacccttccaacgtaattggtcagataaaactttttttcttgtatgcttaaataaagcaattagtgaagcacttctatccaaaatgacttttttgtccttttttaaaaccaatttactgttactggaaactttttgtacaataaagcaatcacgcagattaaagaacatcctgcaatcctagtattaattttaa

SEQ ID NO: 6323 - DNA, 2186 bp, Homo sapiens
gtgtgctaaaggaaaccaacagcggcctaggggtgaaaggacagccagggttagatgttctgaggaggcgggagcaaccgagagagcacgtgagcatctgtcctttctacccgttcctctttatctttagtgttcagtagcagcggggatagcccggggcccggtgtatggccacggagttacagtgtccggactccatgccctgtcacaaccagcaagtaaactctgcctcaaccccaagtcccgagcagctgcgacctggcgatctgatcctggaccacgcagggggaaacagagcctccagggccaaggtgattctcctcacggggtacgcccattctagcctgccggccgagctggactctggggcctgcggcggctccagcctcaactcagagggcaacagtggtagtggtgacagtagcagctatgacgcaccagctggcaactccttcctagaggactgcgaactctcccggcagatcggggcgcagcttaagctgctgcctatgaatgatcagatacgggagctacagaccatcatccgtgacaagacagccagtagaggtgacttcatgttttctgcggatcgtttgatcagacttgttgtggaagagggattgaatcagctgccatataaagaatgcatggtgaccactccaacagggtacaagtatgaaggagtgaaatttgagaagggaaattgtggggtcagcataatgagaagcggtgaggcaatggaacaaggtttacgagactgctgtcgatccatacgaattggaaagatcctgattcagagtgatgaggagacacaaagagccaaagtatattatgccaaattccccccagacatttaccggagaaaagtccttctgatgtatccaattctcagcactggaaatactgtaattgaagctgtaaaggttcttatagaacatggagttcaacccagtgttatcatcctactcagtctgttctccactcctcatggtgccaaatcaatcattcaggagtttccagagatcacaattttaactactgaagttcatcctgttgcacctacacattttggacagaaatactttggaacagactaagttatttaagtaaaataattatcttatgtaatattacaatcatgttttgattttctatttgttttactgattcacttgagggtggcagagaaaaatgtgttaaaatgctttttagttttggaagtgggtatatttgaggttatatctcatttagttatttgtttactgttggcaccgaattcaacaatgaagtatatgcaactcttacaaaacataaattttaataatattctaatgcaaattactgaaccctcagtgcattaaaattatttcctaatttatgagcctcttagtttggaggttgcttgaagccacaaataaaactcaaatgagagtcagttctttgtcccactgtagtttgcattttgtttagtttggttttagctctactaaggtttcacatatgtggctattgccacattcctctactgttttctttctgatactggacatgctagtaacttggagaggagaataaaagaatgtctcctggaattttacattcccattaatgtcctcattcagttggcagacctaggatgtatggttaactctcaggccattatgtttttcatggctcatttcccaaactgcattgttggtaggtgccttgctaagctgtaatgcagtgaagaagatggtggggcatttttagtaattggaactgtaacattaatttacaagattgaaccggggatgtctggatgctgacaagggagagccaagtactgttaatgccatcaatcctctaggaaggaattggtggtttttctgaagtgtgggggaaagggtggtttcttgctggatttcatggccagtaagtaaatttaaatgcttcatttttaatttggatgtttctgctagagacctttgatttggaaattagttattttgcatgtttgtcaactgtatatgtatgaaaatagaaaaaaaccatgctttttgtaaaaacccctaagatttgtatatgttcatctttaggcttctgaaagggagagaaatcatattggaaatcagtgttggtgttctgaaatctgcttgtaaaactctcatctcattttacattgatattaaaacattttaacagtg

SEQ ID NO: 6324 - DNA, 7846 bp, Homo sapiens
gcccgcgccggctgtgctgcacagggggaggagagggaaccccaggcgcgagcgggaagaggggacctgcagccacaacttctctggtcctctgcatcccttctgtccctccacccgtccccttccccaccctctggcccccaccttcttggaggcgacaacccccgggaggcattagaagggatttttcccgcaggttgcgaagggaagcaaacttggtggcaacttgcctcccggtgcgggcgtctctcccccaccgtctcaacatgcttaggggtccggggcccgggctgctgctgctggccgtccagtgcctggggacagcggtgccctccacgggagcctcgaagagcaagaggcaggctcagcaaatggttcagccccagtccccggtggctgtcagtcaaagcaagcccggttgttatgacaatggaaaacactatcagataaatcaacagtgggagcggacctacctaggcaatgcgttggtttgtacttgttatggaggaagccgaggttttaactgcgagagtaaacctgaagctgaagagacttgctttgacaagtacactgggaacacttaccgagtgggtgacacttatgagcgtcctaaagactccatgatctgggactgtacctgcatcggggctgggcgagggagaataagctgtaccatcgcaaaccgctgccatgaagggggtcagtcctacaagattggtgacacctggaggagaccacatgagactggtggttacatgttagagtgtgtgtgtcttggtaatggaaaaggagaatggacctgcaagcccatagctgagaagtgttttgatcatgctgctgggacttcctatgtggtcggagaaacgtgggagaagccctaccaaggctggatgatggtagattgtacttgcctgggagaaggcagcggacgcatcacttgcacttctagaaatagatgcaacgatcaggacacaaggacatcctatagaattggagacacctggagcaagaaggataatcgaggaaacctgctccagtgcatctgcacaggcaacggccgaggagagtggaagtgtgagaggcacacctctgtgcagaccacatcgagcggatctggccccttcaccgatgttcgtgcagctgtttaccaaccgcagcctcacccccagcctcctccctatggccactgtgtcacagacagtggtgtggtctactctgtggggatgcagtggctgaagacacaaggaaataagcaaatgctttgcacgtgcctgggcaacggagtcagctgccaagagacagctgtaacccagacttacggtggcaactcaaatggagagccatgtgtcttaccattcacctacaatggcaggacgttctactcctgcaccacagaagggcgacaggacggacatctttggtgcagcacaacttcgaattatgagcaggaccagaaatactctttctgcacagaccacactgttttggttcagactcgaggaggaaattccaatggtgccttgtgccacttccccttcctatacaacaaccacaattacactgattgcacttctgagggcagaagagacaacatgaagtggtgtgggaccacacagaactatgatgccgaccagaagtttgggttctgccccatggctgcccacgaggaaatctgcacaaccaatgaaggggtcatgtaccgcattggagatcagtgggataagcagcatgacatgggtcacatgatgaggtgcacgtgtgttgggaatggtcgtggggaatggacatgcattgcctactcgcagcttcgagatcagtgcattgttgatgacatcacttacaatgtgaacgacacattccacaagcgtcatgaagaggggcacatgctgaactgtacatgcttcggtcagggtcggggcaggtggaagtgtgatcccgtcgaccaatgccaggattcagagactgggacgttttatcaaattggagattcatgggagaagtatgtgcatggtgtcagataccagtgctactgctatggccgtggcattggggagtggcattgccaacctttacagacctatccaagctcaagtggtcctgtcgaagtatttatcactgagactccgagtcagcccaactcccaccccatccagtggaatgcaccacagccatctcacatttccaagtacattctcaggtggagacctaaaaattctgtaggccgttggaaggaagctaccataccaggccacttaaactcctacaccatcaaaggcctgaagcctggtgtggtatacgagggccagctcatcagcatccagcagtacggccaccaagaagtgactcgctttgacttcaccaccaccagcaccagcacacctgtgaccagcaacaccgtgacaggagagacgactcccttttctcctcttgtggccacttctgaatctgtgaccgaaatcacagccagtagctttgtggtctcctgggtctcagcttccgacaccgtgtcgggattccgggtggaatatgagctgagtgaggagggagatgagccacagtacctggatcttccaagcacagccacttctgtgaacatccctgacctgcttcctggccgaaaatacattgtaaatgtctatcagatatctgaggatggggagcagagtttgatcctgtctacttcacaaacaacagcgcctgatgcccctcctgacacgactgtggaccaagttgatgacacctcaattgttgttcgctggagcagaccccaggctcccatcacagggtacagaatagtctattcgccatcagtagaaggtagcagcacagaactcaaccttcctgaaactgcaaactccgtcaccctcagtgacttgcaacctggtgttcagtataacatcactatctatgctgtggaagaaaatcaagaaagtacacctgttgtcattcaacaagaaaccactggcaccccacgctcagatacagtgccctctcccagggacctgcagtttgtggaagtgacagacgtgaaggtcaccatcatgtggacaccgcctgagagtgcagtgaccggctaccgtgtggatgtgatccccgtcaacctgcctggcgagcacgggcagaggctgcccatcagcaggaacacctttgcagaagtcaccgggctgtcccctggggtcacctattacttcaaagtctttgcagtgagccatgggagggagagcaagcctctgactgctcaacagacaaccaaactggatgctcccactaacctccagtttgtcaatgaaactgattctactgtcctggtgagatggactccacctcgggcccagataacaggataccgactgaccgtgggccttacccgaagaggacagcccaggcagtacaatgtgggtccctctgtctccaagtacccactgaggaatctgcagcctgcatctgagtacaccgtatccctcgtggccataaagggcaaccaagagagccccaaagccactggagtctttaccacactgcagcctgggagctctattccaccttacaacaccgaggtgactgagaccaccattgtgatcacatggacgcctgctccaagaattggttttaagctgggtgtacgaccaagccagggaggagaggcaccacgagaagtgacttcagactcaggaagcatcgttgtgtccggcttgactccaggagtagaatacgtctacaccatccaagtcctgagagatggacaggaaagagatgcgccaattgtaaacaaagtggtgacaccattgtctccaccaacaaacttgcatctggaggcaaaccctgacactggagtgctcacagtctcctgggagaggagcaccaccccagacattactggttatagaattaccacaacccctacaaacggccagcagggaaattctttggaagaagtggtccatgctgatcagagctcctgcacttttgataacctgagtcccggcctggagtacaatgtcagtgtttacactgtcaaggatgacaaggaaagtgtccctatctctgataccatcatcccagctgttcctcctcccactgacctgcgattcaccaacattggtccagacaccatgcgtgtcacctgggctccacccccatccattgatttaaccaacttcctggtgcgttactcacctgtgaaaaatgaggaagatgttgcagagttgtcaatttctccttcagacaatgcagtggtcttaacaaatctcctgcctggtacagaatatgtagtgagtgtctccagtgtctacgaacaacatgagagcacacctcttagaggaagacagaaaacaggtcttgattccccaactggcattgacttttctgatattactgccaactcttttactgtgcactggattgctcctcgagccaccatcactggctacaggatccgccatcatcccgagcacttcagtgggagacctcgagaagatcgggtgccccactctcggaattccatcaccctcaccaacctcactccaggcacagagtatgtggtcagcatcgttgctcttaatggcagagaggaaagtcccttattgattggccaacaatcaacagtttctgatgttccgagggacctggaagttgttgctgcgacccccaccagcctactgatcagctgggatgctcctgctgtcacagtgagatattacaggatcacttacggagagacaggaggaaatagccctgtccaggagttcactgtgcctgggagcaagtctacagctaccatcagcggccttaaacctggagttgattataccatcactgtgtatgctgtcactggccgtggagacagccccgcaagcagcaagccaatttccattaattaccgaacagaaattgacaaaccatcccagatgcaagtgaccgatgttcaggacaacagcattagtgtcaagtggctgccttcaagttcccctgttactggttacagagtaaccaccactcccaaaaatggaccaggaccaacaaaaactaaaactgcaggtccagatcaaacagaaatgactattgaaggcttgcagcccacagtggagtatgtggttagtgtctatgctcagaatccaagcggagagagtcagcctctggttcagactgcagtaaccactattcctgcaccaactgacctgaagttcactcaggtcacacccacaagcctgagcgcccagtggacaccacccaatgttcagctcactggatatcgagtgcgggtgacccccaaggagaagaccggaccaatgaaagaaatcaaccttgctcctgacagctcatccgtggttgtatcaggacttatggtggccaccaaatatgaagtgagtgtctatgctcttaaggacactttgacaagcagaccagctcagggagttgtcaccactctggagaatgtcagcccaccaagaagggctcgtgtgacagatgctactgagaccaccatcaccattagctggagaaccaagactgagacgatcactggcttccaagttgatgccgttccagccaatggccagactccaatccagagaaccatcaagccagatgtcagaagctacaccatcacaggtttacaaccaggcactgactacaagatctacctgtacaccttgaatgacaatgctcggagctcccctgtggtcatcgacgcctccactgccattgatgcaccatccaacctgcgtttcctggccaccacacccaattccttgctggtatcatggcagccgccacgtgccaggattaccggctacatcatcaagtatgagaagcctgggtctcctcccagagaagtggtccctcggccccgccctggtgtcacagaggctactattactggcctggaaccgggaaccgaatatacaatttatgtcattgccctgaagaataatcagaagagcgagcccctgattggaaggaaaaagacagacgagcttccccaactggtaacccttccacaccccaatcttcatggaccagagatcttggatgttccttccacagttcaaaagacccctttcgtcacccaccctgggtatgacactggaaatggtattcagcttcctggcacttctggtcagcaacccagtgttgggcaacaaatgatctttgaggaacatggttttaggcggaccacaccgcccacaacggccacccccataaggcataggccaagaccatacccgccgaatgtaggtgaggaaatccaaattggtcacatccccagggaagatgtagactatcacctgtacccacacggtccgggactcaatccaaatgcctctacaggacaagaagctctctctcagacaaccatctcatgggccccattccaggacacttctgagtacatcatttcatgtcatcctgttggcactgatgaagaacccttacagttcagggttcctggaacttctaccagtgccactctgacaggcctcaccagaggtgccacctacaacgtcatagtggaggcactgaaagaccagcagaggcataaggttcgggaagaggttgttaccgtgggcaactctgtcaacgaaggcttgaaccaacctacggatgactcgtgctttgacccctacacagtttcccattatgccgttggagatgagtgggaacgaatgtctgaatcaggctttaaactgttgtgccagtgcttaggctttggaagtggtcatttcagatgtgattcatctagatggtgccatgacaatggtgtgaactacaagattggagagaagtgggaccgtcagggagaaaatggccagatgatgagctgcacatgtcttgggaacggaaaaggagaattcaagtgtgaccctcatgaggcaacgtgttatgatgatgggaagacataccacgtaggagaacagtggcagaaggaatatctcggtgccatttgctcctgcacatgctttggaggccagcggggctggcgctgtgacaactgccgcagacctgggggtgaacccagtcccgaaggcactactggccagtcctacaaccagtattctcagagataccatcagagaacaaacactaatgttaattgcccaattgagtgcttcatgcctttagatgtacaggctgacagagaagattcccgagagtaaatcatctttccaatccagaggaacaagcatgtctctctgccaagatccatctaaactggagtgatgttagcagacccagcttagagttcttctttctttcttaagccctttgctctggaggaagttctccagcttcagctcaactcacagcttctccaagcatcaccctgggagtttcctgagggttttctcataaatgagggctgcacattgcctgttctgcttcgaagtattcaataccgctcagtattttaaatgaagtgattctaagatttggtttgggatcaataggaaagcatatgcagccaaccaagatgcaaatgttttgaaatgatatgaccaaaattttaagtaggaaagtcacccaaacacttctgctttcacttaagtgtctggcccgcaatactgtaggaacaagcatgatcttgttactgtgatattttaaatatccacagtactcactttttccaaatgatcctagtaattgcctagaaatatctttctcttacctgttatttatcaatttttcccagtatttttatacggaaaaaattgtattgaaaacacttagtatgcagttgataagaggaatttggtataattatggtgggtgattattttttatactgtatgtgccaaagctttactactgtggaaagacaactgttttaataaaagatttacattcc

SEQ ID NO: 6325 - DNA, 1041 bp, Homo sapiens
ggttgccgggaatctggacctgagcgagaagcacgatccccggccgcccccgctcttgcatccccctggtcctactgctgtgcttgctggcgacggttcgttccggaagtcagtcccaggacatcaaagctctgcagaaagaactcgagcaatttgccaagctcctgaagcagaagaggatcaccctgggatatacacaggccgatgtggggctcaccctgggggttctatttgggaaggtattcagccaaacgaccatctgccgctttgaggctctgcagcttagcttcaagaacatgtgtaagctgcggcccttgctgcagaagtgggtggaggaagctgacaacaatgaaaatcttcaggagatatgcaaagcagaaaccctcgtgcaggcccgaaagagaaagcgaaccagtatcgagaaccgagtgagaggcaacctggagaatttgttcctgcagtgcccgaaacccacactgcagcagatcagccacatcgcccagcagcttgggctcgagaaggatgtggtccgagtgtggttctgtaaccggcgccagaagggcaagcgatcaagcagcgactatgcacaacgagaggattttgaggctgctgggtctcctttctcagggggaccagtgtcctttcctctggccccagggccccattttggtaccccaggctatgggagccctcacttcactgcactgtactcctcggtccctttccctgagggggaagcctttccccctgtctccgtcaccactctgggctctcccatgcattcaaactgaggtgcctgcccttctaggaatgggggacagggggaggggaggagctagggaaagaaaacctggagtttgtgccagggtttttgggattaagttcttcattcactaaggaaggaattgggaacacaaagggtgggggcaggggagtttggggcaactggttggagggaaggtgaagttcaatgatgctcttgattttaatcccacatcatgtatcacttttttcttaaataaagaagcctgggacacagta

SEQ ID NO: 6326 - DNA, 10664 bp, Homo sapiens
atgtgggggcttttgatctggacactgctagctctgcatcagatccgcgcggccagagcccaagatgatgtgtccccgtatttcaagacagagcctgtgcggacacaggtgcacttggaaggaaaccgcctggtgcttacatgcatggccgagggcagctggccactggagttcaagtggctccacaacaacagggagctgaccaagttctccctggaatacagatacatgatcaccagcctggaccgcacccacgctggcttttaccgttgcatcgtgcggaaccgaatgggggccctgctgcagcggcaaaccgaggtccaggtggcctacatggggagctttgaggaaggtgagaagcaccagagcgtctcccacggagaagcagctgtcatccgtgccccgcgcatcgccagcttcccccagccacaggtgacctggttccgggacggccgcaagatcccgcccagcagccgcatagccatcacgctggagaacacccttgtcatcctgtcaacggtggcccctgacgcaggtcgctactatgtgcaggctgttaacgacaaaaacggggataacaagaccagccagcccatcacgctcaccgtggagaatgtaggggggcctgcagaccccatcgcacccaccatcatcatcccacctaaaaacaccagcgtggtggccggcacctcagaggttaccttggagtgtgtggccaatgccaggcccctgatcaagctacatatcatttggaagaaggacggggtattgctgtcgggcggcatcagtgaccacaaccgccggctcaccatccccaaccccaccggcagtgacgccggctactacgagtgtgaggctgtcctgcgcagcagcagcgtcccctctgttgtccggggcgcctacctctcagtgctggaaccgcctcagtttgtcaaggagccagaaagacacatcactgcggagatggagaaggtggtggacatcccctgtcaggccaaaggtgtgccgccgccctccatcacctggtacaaggacgcagccgtggtggaggtggagaagttgacccgcttccggcagcgcaacgacgggggcctgcagatcagcggcctggtgcccgatgataccggcatgttccagtgcttcgcccgcaatgcagccggcgaggtgcaaacttccacctacctggctgtcaccagcatcgcccctaacatcaccagaggccccctggacagcacggtgatcgatggcatgtcagtggtgctagcatgtgagacctcgggggcgccccgaccagctatcacttggcagaaaggggagcgcatcttggccagtggctctgtgcagctgcctcgcttcacacccctggagtcgggcagcctcctcatcagccccacacacatctccgatgcggggacctacacctgcctggccaccaactctcggggggtcgatgaggcctcagcagacctagtcgtttgggctcggacccgcatcaccaagcccccccaggatcagagtgtcatcaagggcacccaggcctccatggtgtgcggagtgacccacgacccccgagtaaccatcaggtacatctgggagaaggacggggccaccctgggcacggagagccatcctcgtatccgcctggacagaaacggctccctgcacatctcacagacgtggtcgggagacatcggcacgtacacctgccgggtgatctcagcaggaggcaacgactctcgcagtgcccacctgcgagtcaggcaactgccccacgcgcccgagcacccagtggccactctcagcaccgtggaaaggcgagccatcaacctgacgtggaccaagccctttgatggcaacagccccctgatccgctacattctggagatgtcggagaacaatgccccctggactgtactcctggccagtgtggaccccaaagctacctcagtgacagtcaagggcctggttcctgcacgctcctaccagttccgtctttgtgccgtcaacgacgtggggaaaggacagttcagcaaagacaccgagagggtctccctccccgaggagccccccacggcccctccacagaacgtcatcgccagcggtcgaaccaaccagtccatcatgatccagtggcagccgcctcctgagagccaccagaatggaattctcaagggttacatcatcaggtactgcctggccgggctgcccgtggggtaccagtttaagaacatcacggatgctgatgtgaacaacctgctgctggaggatctcatcatttggaccaactacgagatcgaggtggctgcttacaacagcgctgggctgggggtctacagcagtaaagtcaccgagtggacgctgcagggagttcccacggtccctccgggcaatgtgcacgcggaagccaccaattccacgaccatccgcttcacctggaacgcccccagcccccagttcatcaacggcatcaaccagggctacaagctgatcgcctgggagccggaacaggaagaggaggttaccatggtgaccgcccggcctaactttcaagacagcatccacgtgggcttcgtgtctggcctgaagaagttcaccgagtacttcacctcagtgctgtgtttcaccacccccggggacgggccacgcagcaccccgcagctggtgcgcacccatgaggatgtgcctgggcccgtgggacacctgagcttcagtgagatcctggacacatcgctgaaggtcagctggcaagagccgggagagaaaaatggcatcctcacagggtaccggatctcctgggaggagtacaatcgaaccaacacccgtgtgacccactacctgcccaacgtgaccctggagtaccgtgtcacgggcctcaccgcgctcaccacctacaccatcgaggtggccgccatgacctcaaagggccagggccaagtgtccgcctccaccatctcctctggggtgcccccagaactcccagggccccccaccaacctgggcatttccaacatcggcccccgctctgtgaccttgcagttcaggccaggctacgatgggaaaacctccatctcccgctggctggtggaagcccaggtaggcgtggttggggagggagaggagtggttgctgatccaccagctctccaatgagcccgatgcccgctccatggaggtgcccgacctcaaccccttcacctgctacagcttccgcatgcgccaggtgaacatcgtgggcaccagcccccccagtcagccttctagaaagatccagaccctgcaggcaccccctgacatggccccagccaatgtgtctctgcgcacagccagtgagaccagcctgtggctgcgctggatgcctctcccggagatggaatacaatgggaaccctgagtccgtgggctataagatcaagtacagccggtcagacgggcatggcaagacgctgagccacgtggtgcaggaccgtgtggagcgggactacaccatcgaggacctggaggagtggacagagtaccgcgtccaggtccaggccttcaacgccatcgggagcgggccctggagccagacggtggtgggcaggacccgggagtcagttccctcttccggccccaccaatgtgtctgcactggccaccacctccagcagcatgctggtgcgctggagcgaggtccccgaggctgatcgcaacgggctcgtgctgggctataaggtgatgtataaggagaaggactcggacacccagccccgattctggctggtggaaggcaactcgtctcgcagtgcccagctcaccggcttgggcaaatacgtgctctatgaagtccaggtgctggccttcacacgcatcggggacggcagccccagccaccctcccatcctggagcggacgctggatgatgtcccaggaccacccatgggcatcctgttcccagaggtgcggaccacgtctgtgcggctgatctggcagccccctgccgcccccaatggcatcattcttgcttaccagatcacacaccggctcaacaccaccacggccaacaccgccactgtggaggtgctggcacccagcgcccggcagtacacagccacgggcctcaagccagagtctgtctacctgttccgcatcacggcccagacccgcaagggctggggagaagctgccgaggccttggtggtgaccaccgagaagagagaccgtccgcagccccccagcaggccgatggtgcagcaggaggatgtgagagcacgcagcgtgctgctgtcctgggagccagggagcgacgggctctcccctgtgcgctactacaccatccagacccgcgagctgcccagcggcaggtgggcactgcactcggcctccgtgagccacaatgcctccagcttcattgtggacaggctgaagcccttcacgtcctacaagttccgagtgaaggcgaccaatgacattggcgacagcgagttcagcgaggagtcggagtcactgaccaccctgcaggctgcccccgatgaagcacccaccatcctctccgtgacgccccacaccaccacctccgtgctaatccgatggcagccgccagcagaggacaagatcaatggcatcctcctgggcttccggatccgataccgggagctgctctatgaaggactgaggggcttcacgcttcgaggcatcaacaacccaggggccacatgggctgagcttacctacctgaacaagcacaggcggtacgagatacggatgagcgtgtacaacgctgtgggtgaggggccctccagccccccgcaggaggtctttgttggggaggcagtgcccacagcagcacctcgtaacgtggtcgtccacggcgccacggccacacagctggacgtgacttgggagccacctccgctggacagccagaatggagacatccaggggtacaagatttatttctgggaagcccagcgggggaacctcacagagcgagtgaagacgcttttcctggctgagaacagcgtgaagctcaagaacttgactggctacacggcctacatggtcagcgtggccgccttcaacgccgctggggatgggcctcggagcacccccacccaaggccagacccagcaagcagcccccagcgctcccagctcggtcaagttcagtgagctgaccacaacctcagtgaatgtgtcctgggaagccccgcagttccccaatggcatcctggagggctacaggctggtgtacgagccctgcagccccgtggatggagtcagcaagatcgtgaccgtggacgtgaaggggaacagccccctgtggctgaaggtgaaggacctggcggagggggtgacctacaggttccgcatcagagccaagaccttcacctacgggccggagatcgaagccaacgtcaccacgggccccggagaaggtgccccaggaccgcctggcgtgcccatcatcgtgcggtacagctctgccatcgccattcactggtccagcggagacccgggcaaagggcccatcacccgctacgtcatcgaggccagaccttcagacgagggactatgggacatcctcatcaaagacatccccaaggaggtgagctcctacacgttcagcatggacatcctgaagccgggcgtgagctatgacttccgggtcatcgcggtcaacgactatggtttcggcacccccagcagcccctcccagtctgtgccagcccagaaagccaaccccttctatgaggagtggtggttcttggtggtcattgccctggtcggcctcatcttcatcctgcttctggtcttcgtgctcatcatccggggccagagcaagaagtacgccaagaagacagactcggggaacagtgccaagtctggagccctaggccacagcgagatgatgagcttggatgaaagcagcttccctgccctggaactcaacaacaggcggctctccgtcaagaactctttctgccgaaagaacggcctgtacaccaggtctccccccaggcccagcccaggcagcctgcactactcggatgaggatgtcaccaaatacaacgacctcatccctgcagagagcagcagcctgacggagaagccctcagaaatctccgactctcagggaagtgacagcgagtacgaggtcgactcaaaccaccagaaggcccactcctttgtcaaccactacatcagtgaccccacatactacaactcgtggcggcgacagcagaagggcatctcgagggcacaggcctacagctacacggagagcgactcgggtgagccagaccacaccaccgtcaccaacagcaccagcacccagcagggcagcctctttcggcccaaggccagtcggactccaacgccccagaacccccctaaccccccaagtcagcagagcaccctctaccgtccccccagcagcctggccccaggctcccgggctcccatagcaggattttcatcatttgtttgacatcagaagaggaaaaagcagaaagagaaatggcaccaaactcctccttcacccctcctctcactgcctgccagaaaacaaaaacaccaagaaaccaagtcaacttttcacctcctgagtttatttttccagagattccagggccagcaaagccggcgttcagaaggagggagaaaaccgtgagaggatgtgtgtggccagcagctcttcagctttgagatggtggggttcactgctcccttgggaattacacggagctggggaagtggctgtgtcactgctatggacacggagtggggcgggcatctggagagagagagggagcggaggctaaggactggaggccgccaggcaggcgtggccgagggaagaaaaagcttctggatgtccagccagctgcccccttccagcccctccaggacccctggacccactgccgctgctctctgcaaaaagaatgggcatcccggaggccacgcctatcttctctctctgctcctccttccctccatgcaccatcactgtggctggcaggcatcggacagcctcatccagaccccctgccctgtcttggcaacctctactgcccatctcccctgctcaacttctccaccaagcatttggtttatttagaaaaaggaagaaaaacaaaaaacaaaaaactaaagggtgagaatttgcttagcgccttccttgttcctgcatattttttaaaatattgaatccaaggaagagagcccaagggtaggggagaaaccccccacaactgacccctgcctccctgtgctggaattgactttcctgagcatggacaaggaaaggtgaagtctggggagcagaggtgtaaataaggcgactggccttggcactgtgggatgattaggtttaacgcattgtgggcaagataagaatgacactttgactgttctctttcttccaatccaggttccatccgtcctctctttaaaggggtagtcagcttcccaaggctggggagtggggcacagctgagggatctccctctgggcagacacgtcactctccactggatagatcctcaccacacacacacacacacacacatctcccatgcacttacaaggaacagggtctagggatcctctccagaacaaactcatctgggccctcctagccagacagcacactcactttcagatctgtgtccctctcactgccacccggcagcctcctaagcacagaggcacaggagcccagaggggtggcccaagtccctggtccagaggctggaatacccagagtttgctcagtcagcctagcacccagtttacaggcaaaaaggcaaagacaccctaacccccagtaacagcttccaggctgggctccgcctggccagggcggggaggggaaggggcaggtcaggaagctcagtccaaagtggacccagcatttgaattgcacgcccagcaggggcaggtcagatgggaccaagtgacaagaatagctgatgggagggaatgcttttacacacacacacacacacacacacacacatacacatacacaatctgctccaaggagtgttctgcaaaaagccacatccagtggccaggatcttcccgtccacttggtacttacggatgccagggtttagggagaagcctttctatctaactccatacattgtccaaggccctctgtgccctcagccagccctgtaaggccagcccaacacctgccccaccgctgagatgggtggcagatggcccacaggggcctgtctgattcagcgtgagccccttcgtggagcagggctccctctgtgcactgtgtacaggcgctgctggccctgcccaagagatgatgctctgttggggtgggtgagcagagttcaaggaagcccaagtaggagatttgggaaacatgccaaggtaagagagagcctggaccactctcctacagccccaagtcagtcactgtgctaatggtgaccgggaagggaagtcagggtctggggcccaaagaacgggcacacccagccatgagtttttcctgaagcacttgacccctgggaaatgtgaacggggagatgctggaagatggctcagcagacaggccagcccagctccagtgtccaaaaagcggtttctccaataaggaggcctgggaagggaagcacaatcttccccaaaggagaaccaagggctgaggttctgcccctccaggaagtaaggtgctctcggggcctccttggacttgtctgggggctgcagtggagtcagctggacacctgctccacccctgccacctccgcccccaccctctgcagcatctggcatctccatggcagcacatctgcagctgccggcctgtgatcgtgccgcacagctttcttttctttcctctcatcttttttttttttttttttttaaataacttcatccctttccctctctgctgagcatttaaccatttaaggaagttcccagtttgcattagggaattatttaagcccagcccagtgagggattatttgggaggaagcaggagtgagtaaaaacattgtgtctgtgtatatattgcacatgaggtcaattttcctttgcctttaatgaatcacctggtgcactaagatattccacccccccactccccacacgctcattcgcacccatgctgacacctacgtgtacatgcgggatggtgcccatgcacgcctgtgcttacacacatgcacacacaaatatgcacagaacacacatctgtatgtgtgttagcaaagagactcctgaactccctctgatggctgaagccatctctcccctgtgaggcacaggtggcctgggttgcttgcacttggggcgtggctgggatctattgtctgagagggtgaggacaccacgcaaatttagacaagcccatgagatcaggctgggcccatggtgaaagtcccacacttagtcaatacccactcatctggaatattgtctccacagccccagccacagctggaagcccaggcctgcagctgtggaactctagattttttcaggacacgtctctttgcccttgtttacatatctactggcacagccgaggctcccaaccgtcctcccagaaacctggccacattagaaaggggtggtgggccctgccctttgtagaaagagtgggaccctttctggcctgtgattttccgtgccagtgatgccagggcccctgcctgtgggactccacccaaagcaggttcacaccaggacacacctggcacctttggcattgcctccttgtgccctaagcaatctcccagtgttgcacccaggagcccatgctgggcacaccagggctttccccttcctggctgcgcctccagagttgacgtcagctccacacccacactgccaagacaaaccaaaaagatgctctgggctccagaaccaccatcctcctagggctccagagagtttgcaaacccaggctgcctccccttctgtccatccctcaccccccggcccccaaaactcctacccccaaacctggcactgccgtgatttagaggaaacaaggacacagcgggggctgcccccacctggtgcacgctgcctcaaggccttctgttgctgcccacgcctccctgggcagtgcttctaaaggtgccagagcctcaccacagtgccactctggctgggcaggggcttccctcagcttcccagagtgcacatctgaaggtgcctaccctgggtgaggggctggtgggcaggaaggtaaaggggagaccatctgagcagccgccacccgctccccagtgcctctgtatggccctatccagggacacccatgggcatgcgcacatggcaatcctgaccaccacctgagcacaggtgccccctcgggaccaccccccttctctttgtttccatcagaataaccaaaagcatttaaacgtgttacctttctccatccatctagactccagaaacaaaaatcaacacaaatctttattttttgatttaaaagatataacaaaaaattatggggagagtattcattatggcaggtgtctgtctgtaagaaaaaaatatatatctctatgtcatatagcgtgttagcaggtttattttttaaatgaaaggtaagaaagaaattgatttgaaatatataccacaagaagtcccgtgtcctgtcaaactgtcagtattttataaataaacttttttttttgg

SEQ ID NO: 6327 - DNA, 800 bp, Homo sapiens
agtgtgaaatcttcagagaagaatttctctttagttctttgcaagaaggtagagataaagacactttttcaaaaatggcaatggtatcagaattcctcaagcaggcctggtttattgaaaatgaagagcaggaatatgttcaaactgtgaagtcatccaaaggtggtcccggatcagcggtgagcccctatcctaccttcaatccatcctcggatgtcgctgccttgcataaggccataatggttaaaggtgtggatgaagcaaccatcattgacattctaactaagcgaaacaatgcacagcgtcaacagatcaaagcagcatatctccaggaaacaggaaaggtaagttagagtggtaaatttagatatttaatttcagcatagttatacttaaccatggattcggaagcacagttacctagttctttaaggttctaaccactgttttctcattacatctatgattgggattgcagtgtttatccactttgttgcaatttaatcaattttatcaaatttcctatttttatacattagtcatcttggtgtatattgtttgcagatgtggtgctctggggacaaatttttaatttgaacgtaaacatcgagattgctgctgtcaataaagaatatggtctgattgaaatgtactaatatttaaactgaactgtttaatgcctaaattttatatataattctactttaaaaataagccttatgtcttttataccaaatatgagtagttttctaaagcaatgaaattagaaaactatataatttcagtatctgattatactg

SEQ ID NO: 6328 - DNA, 714 bp, Homo sapiens
atgcgtgtcacacttgctacaatagcctggatggtttcttttgtctccaattattcacacacagcaaatattttgccagatatcgaaaatgaagatttcatcaaagactgcgttcgaatccataacaagttccgatcagaggtgaaaccaacagccagtgatatgctatacatgacttgggacccagcactagcccaaattgcaaaagcatgggccagcaattgccagttttcacataatacacggctgaagccaccccacaagctgcacccaaacttcacttcactgggagagaacatctggactgggtctgtgcccattttttctgtgtcttccgccatcacaaactggtatgacgaaatccaggactatgacttcaagactcggatatgcaaaaaagtctgtggccactacactcaggtgtcacaggaaaggggtcgggatccaaaccccaagagagggttcttgaatctcgcgcgagaaaatccagggttgtttgggcagatagttacaaagttggctgcgcagttcaattttgccctaaagtttctggctttgacgctctttccaatggagcacattttatatgcaactacggaccaggagggaattacccaacttggccatataagagaggagccacctgcagtgcctgccccaataatgacaagtgtttggacaatctctgtgttaaccgacagcgagaccaagtca

SEQ ID NO: 6329 - DNA, 2660 bp, Homo sapiens
gggaacactggtagttctttaggtggcgtttgttgctgtgaaaggcagagaatgcagcaagtgcccttctaaagcacttcagactggggcttcttttgtaaaagctccccaacctgaatgaccaaatgcgggctgccaaggttatttcttccttgaggcagaaaaaaagaaaactgtgattgaagaggacaagtcgtacaatggtggaggaataggttcttcaaataggatcatggacttcttggaggagccaatccctggtgtagggacctatgatgatttcaatacaattgattgggtgagagagaagtctcgagaccgggataggcaccgagagattaccaataaaagcaaagagtcaacatgggccttaattcacagtgtgagtgatgctttttccggctggttgttgatgctccttattgggcttttatcaggttcgttagctggtttgatagacatctctgctcattggatgacagacttaaaagaaggtatatgcacagggggattctggtttaaccatgaacattgttgctggaactctgagcatgtcacctttgaagagagagacaaatgtccagagtggaatagttggtcccagcttatcatcagcacagatgagggagcctttgcctacatagtcaattatttcatgtacgtcctctgggctctcctatttgccttccttgccgtatctcttgtcaaggtgtttgcgccttatgcctgtggctctggaatccctgagataaaaactatcttgagtggtttcattattaggggctatttgggtaagtggactctggttatcaaaaccatcaccttggtgctggcagtgtcgtctggcttgagcctgggcaaagagggccctctagtgcacgtggcttgctgctgtgggaacatcctgtgccactgcttcaacaaatacaggaagaatgaagccaagcgcagagaggtcttgtcggctgcagcagcagctggtgtatctgtagcctttggagcacctataggtggagtattattcagccttgaagaggtcagctactattttcccctcaaaacattgtggcgttcattctttgctgccttggtggcagcattcactctacgctccatcaatccatttgggaacagccgcctggtactattttatgtggagtttcacaccccatggcatctctttgagctcgtgccattcattctgctgggcatatttggtggtctgtggggagcactgtttatccgcacaaacattgcctggtgtcggaagcgaaagaccacccagttgggcaagtatcctgttatagaggtactcgtcgtgacagccatcactgccatcctggctttccccaatgaatacactcggatgagcacaagtgagctcatttctgagctgtttaatgactgtggccttctggactcctccaagctctgtgattatgagaaccgtttcaacacaagcaaagggggtgaactgcctgacagaccggctggcgtgggagtctacagtgcaatgtggcagctggctttaacactcatactgaaaattgtcattactatattcacctttggcatgaagatcccttctggcctctttatccctagcatggctgttggtgctatagcaggtcgacttctaggagtaggaatggaacagctggcttattaccaccaggaatggaccgtcttcaatagctggtgtagtcagggagctgattgcatcacccccggcctttatgcaatggttggggctgcagcctgcttaggtggggtgactcggatgactgtttctcttgttgtcataatgtttgaactgactggtggcttagaatacatcgtgcctctgatggctgcagccatgacaagcaagtgggtggcagatgctcttgggcgggagggcatctatgatgcccacatccgtctcaatggatacccctttcttgaagccaaagaagagtttgctcataagaccctggcaatggatgtgatgaaaccccggagaaatgatcctttgttgactgtccttactcaggacagtatgactgtggaagatgtagagaccataatcagtgaaaccacttacagtggcttcccagtggtggtatcccgggagtcccaaagacttgtgggctttgtcctccgaagagatctcattatttcaattgaaaatgctcgaaagaaacaggatggggttgttagcacttccatcatttatttcacggagcattctcctccattgccaccatacactccacccactctaaagcttcggaacatcctcgatctcagccccttcactgtgactgaccttacacccatggagatcgtagtggatattttccgaaagctgggactgcggcagtgcctggttacacacaacgggcgattgcttggaatcattaccaaaaaggatgtgttaaagcatatagcacagatggcgaaccaagatcctgattccattctcttcaactagaatcatagagttctggatgtaaagcgggaaggacattacagaccatggatatgttgtattaactgggtacccaaaacacattttccatatttggatggtgaagtcacattagtgtgttgtctctttcctacaagttaaccagttgcactacataatctctggaaattaattttctctttaggagaaa

SEQ ID NO: 6330 - DNA, 1235 bp, Homo sapiens
taagatgcggaggagggtgacgcactagctctccagttcgcccgttcctggcctgacccccaccaaggcccataccgcagtaggctcctcgggctgcccctcggttgacaatggtctccaggatggtctctaccatgctatctggcctactgttttggctggcatctggatggactccagcatttgcttacagcccccggacccctgaccgggtctcagaagcagatatccagaggctgcttcatggtgttatggagcaattgggcattgccaggccccgagtggaatatccagctcaccaggccatgaatcttgtgggcccccagagcattgaaggtggagctcatgaaggacttcagcatttgggtccttttggcaacatccccaacatcgtggcagagttgactggagacaacattcctaaggactttagtgaggatcaggggtacccagaccctccaaatccctgtcctgttggaaaaacagatgatggatgtctagaaaacacccctgacactgcagagttcagtcgagagttccagttgcaccagcatctctttgatccggaacatgactatccaggcttgggcaagtggaacaagaaactcctttacgagaagatgaagggaggagagagacgaaagcggaggagtgtcaatccatatctacaaggacagagactggataatgttgttgcaaagaagtctgtcccccatttttcagatgaggataaggatccagagtaaagagaagatgctagacgaaaacccacattacctgttaggcctcagcatggcttatgtgcacgtgtaaatggagtccctgtgaatgacagcatgtttcttacatagataattatggatacaaagcagctgtatgtagatagtgtattgtcttcacaccgatgattctgctttttgctaaattagaataagagcttttttgtttcttgggtttttaaaatgtgaatctgcaatgatcataaaaattaaaatgtgaatgtcaacaataaaaagcaagactatgaaaggctcagatttcttgcagtttaaaatggtgtctgaggttgtactattttggccaagtctgtagaaagctgtcatttgattttgattatgtagttcatccagcccttgggcattgttatacaccagtaaagaaggctgtactcaagaggaggagctgacacatttcacttggctgcgtcttaataaacatgaatgcaagcattggca

SEQ ID NO: 6331 - DNA, 7032 bp, Homo sapiens
agcgtgagtagggagccccggctggtggacgccgagcctctcggctccttggccgccccatccccgaggtgcagctgcacctccgcgtggcgccccgagccctgcgagccggctgcggacgcgctgaggacggagcccccatcctctgcgtttcccgctgccccttaacgccccgcgaccctcccgcagcctgcctttccttccccctcggaaaatggttcccactgccgggcgagatgtgtatatctcatgattgatatggagaaactagtcatgggccaaaggtcaagatacttctctgggaaatgttgctgctgatgctgctttacaaagtcatacaatgagtgtttggtttaagaaagattttcatacttaaaagattttcatcttggaaatacatcaagtgaaaattaaattcttttgggaaacattttccttctgatatattatacttgtaatgggcgacatggcaaacaactcagttgcttacagtggtgtgaaaaactctttgaaggaagctaatcatgatggagactttggaattacgctcgcagagctgcgggctctcatggagctcaggtccacagatgcattacgaaaaatacaggaaagctatggagatgtctatggaatttgcaccaaattgaaaacatctcccaatgaaggtttaagtggaaaccctgcagatttagaaagaagagaagcagtgtttggaaagaattttatacctcctaaaaagccaaaaacctttcttcaattagtatgggaagcattacaagatgtcactttaattatattagaaattgcagccatagtatcattgggcctttctttttatcagcctccagaaggggataatgcactttgtggagaagtttctgttggggaggaagaaggtgaaggtgaaactggttggattgaaggagctgcaatcctcttgtctgtagtgtgtgtggtgttagtaacagctttcaatgactggagtaaggaaaaacagtttagaggtttgcagagccgaattgaacaagaacagaagttcactgtcatcaggggtggtcaggtcattcagatacctgtagctgacattactgttggagatattgctcaagtgaaatatggtgatcttcttccagctgacggcatacttattcaaggcaacgatcttaaaattgatgaaagctcattgactggtgaatcagatcatgttaaaaagtctttagataaggatcccttacttctatcaggtactcatgtaatggaaggctctggaagaatggtagttacagctgtaggtgtaaattctcaaactggaattatctttaccttacttggagctggaggtgaagaggaagagaagaaagatgagaagaaaaaggaaaagaaaaataagaaacaagatggagctattgagaatcgcaacaaagcaaaagcccaggatggtgcagccatggaaatgcagccattgaagagtgaagaaggtggagatggtgatgaaaaagataaaaagaaagcaaatttgccaaaaaaggaaaaatctgttttacaagggaaacttacaaaactggctgttcagattggcaaagcaggtctgttgatgtctgccatcacagttatcattctagtattatattttgtcattgacaccttctgggttcagaaaagaccatggcttgctgagtgcacaccaatttatatacaatactttgtgaagttcttcattattggagttacagttttagtggtcgcagtgccagaaggtcttccacttgcagtcacgatctcactggcttattcagtcaaaaaaatgatgaaagataataacttagtaaggcatctggatgcttgtgaaaccatgggaaatgctacagctatttgttcagataaaacaggaactttgacaatgaacagaatgacagtcgttcaagcttacataaatgaaaaacattataaaaaggttcctgaaccagaagctattccaccaaatattttgtcctatcttgtaacaggaatttctgtgaattgtgcttatacatcaaaaatattgccaccagagaaagagggtggattacctcgtcacgttggtaataaaactgaatgtgccttgttgggacttcttttggatttaaaacgggattatcaggatgttagaaatgaaataccagaagaagcactgtacaaagtctacaccttcaattctgttaggaagtccatgagtactgtcctgaaaaattcagatggaagttatcgaatattcagcaagggtgcatctgagataattctgaaaaagtgtttcaaaatcttgagtgctaatggtgaggcaaaagtattcagaccaagggaccgtgatgatattgtaaaaactgtgattgaaccgatggcatcagaaggcttgagaaccatatgtcttgcattcagagattttccagcaggagaaccagaaccagagtgggataatgaaaatgatattgtcaccggccttacatgcattgctgttgtggggattgaagatcctgtgagacctgaggtgccagatgcaattaaaaagtgtcagagggctggaattactgtgcggatggtcactggtgataatattaatactgctcgggccattgctaccaaatgtggtattttacatcctggggaagattttctgtgcctagaaggtaaagattttaacagaagaatacgaaatgaaaaaggagagattgagcaagagaggatagacaagatttggccaaaacttcgagtacttgcaagatcatctcctactgataagcatacactggttaaaggtataattgacagcactgtctcagaccaacgccaggttgtagctgtaactggtgatggtacaaatgatggcccagcactaaagaaagcagatgttggatttgcaatgggtattgctggaactgatgtagctaaagaagcatccgatattattctcacagatgacaactttacaagcattgttaaagcagttatgtggggacgaaatgtctatgacagcatctcaaaattccttcagttccaacttactgttaatgtagtagcagtgattgttgcttttacgggcgcctgcattactcaagactcaccgcttaaggctgtgcagatgctgtgggtaaacctcataatggatacactcgcttccctggctctggcaacggaaccacccactgagtctctcttgcttcggaaaccttatggtagaaataagcctctcatctcacgtacaatgatgaagaatattttgggtcatgcattctatcaacttgtagtagtctttacactcttatttgctggagaaaagttttttgacattgatagtggaagaaatgctcctttgcatgctcctccttcagaacattatactattgtttttaatacctttgtgctgatgcaacttttcaacgaaataaatgcccggaaaattcatggtgaaagaaatgtattcgaaggaatctttaacaatgccatcttctgcacaattgttttaggcacttttgtggtacagataataattgtgcagtttggtggaaaacctttcagttgttcagaactttcaatagaacagtggctatggtcaatattcctaggaatgggaacattactctggggccagcttatttcaacaattccaactagccgtttaaaattcctcaaagaagctggtcatggaacacaaaaggaagaaatacctgaggaggaattagcagaggatgttgaagagattgatcacgctgaaagggagttgcggcgtggccaaatcttgtggtttagaggtctgaacagaatccaaacacagattcgagtggtgaatgcatttcgtagttctttatatgaagggttagaaaaaccggaatcaagaagttcgattcacaactttatgacacatcctgagtttaggatagaagattcagagcctcatatcccccttattgatgacactgatgccgaagatgatgctcctacaaaacgtaactccagtcctccaccctctcccaacaaaaataacaatgctgttgacagtggaattcaccttacaatagaaatgaacaagtctgctacctcttcatccccaggaagcccactacatagtttggaaacatcactctgattgtaagctgaatgttaacacactagctgcattgtaaagaaacaaattgaaactgggtcttttcacatattgtgatggacaagctagtattcttgtctttggacttcaacagaagacacacttgtacgaatgtagatttatttttttaaaaaaaaaaaagcaaagctttctgccagactgagggtgctttttggggggtgggagaaatgaactgacagataaacagtaactcagcgtaagtgacctgtggatcatcagtagtacccaagcatggtcctgaacagtgtattagcagagctttagtttatctcagtcctggatgggagagagagggaggagtaaaactgggcaagacaaagagccctggatcgttgaattgatagtttaatttctgctgttggctgttaataatttggattatttatgtttataaatgatacagatctgtttacaaggtttgtagatactttttttgttcctgttcatagatgggaagcttccttataactgatgcagagaaaaattagtccttcaaatactgctgtattttcaggaaaaaaaaaaaaaggggtgtttctattgaaactgtactaaatttttgcctacaatttaccttgttaaatattgtagataaattgctaatactaatagccaaatagataacactaatgctttgtttaaaaaaacgaaaaaaacaaaacaaaacaaaaaaacatgagcagtggtgttctaatgaagttatgacatctgtcctaattagtttcttaaatacatttactacttaatggttttgaagcaactgtttaatttttaaaatttttgaaaacttgctaataaccttttgttcagaatttagtagattgtttaatgcaggacatcaactacataatgaaagatgcttgaaatgcttttgttatttcaggcaaatcaaattaaatcagactatcaaactacaagagaaccttagtcttttttgtttttgtctaaacatgttagtttagtgatgtcttggtgaactgtgagtgaactgtattgatttttctaatctttagagaccttcacacagcatgagggctgttggcattttgaaaaaggttaataagtagaagcatacatgttttccttttgtttttgaaacttgtttgtaaacataaataaatatgcccttttattaaataaattcatggcaatgtttttttaaaagacatttcagcttctttactcagttctgcatatacagtgcatcagtctgttctctttgaccacaattggaatacatttcaagatggtaacagccccatgaagtaccgctttaattccttgctggtaatctaatagaatcagattaagaaaattaacacaattttaccatttgacatactcttcattgaatttagtttgtctaaaatagtctcacaggtaaaaaacataacaacaatgaccaccattgtctttgatacatttattttaattcttaagtggccaaataacagattaggtaaaatgagattacatgaaaaggttctaaaatgatatatttagatgcaataattaaccatatgctagaatgcccacctctaagccaattggattctttagctctctttttctttccttcatctaccttcttctcttttttgcctctgtctttaccctttagaaactggcatgtgttagggcccagatttcaccagatacacaatcctcaggctgacataaagtttacgaggactgctactataactgagagtgctgaccaagcaaagaaacatttagttgatggtgcttgatatttttggtgggtgggggaaatctttttctcaccatcaaatctttgcagtaatcctctgcaggtcttagaaacacattggctctgtcagcatttgtaattgtacatttattcatcaggtatttatagtgaatcatactgtaaaaaagaggtagcatgatatgctggaaagcatattagactaggagtcaagacctggtttctagtcttggttttgccattaatgtgctgcatgatcttgggaaaatcatttaccctaaataagggtggtggactatcttgaagaaccctttcaactctaaaaattgaccctatcaactggagagcccacaaggcatagggaatagagaaaagggaaatgttttcagttttcttttttattttggttatgcttaaatatgaatgtaattaccaaaagatttagaagtgcatgtgctttggaggatttgtattgagcttttacagtattcatttttcaactcaaggcaatggctttctacaccaactctaatccataaacgggtcttatgacatctatgaagtagtagcaagacatgcttagtgtgtatttctctctttgagacactgtaatttctaccagaaatttccagagcattatgtaggtagaaaaaaatgcaagcaagctgttaaagatcttggatcccattatatagtatgtatagctgaaatctgtaattcaatcactttttctcttttatcctctaaccaaaaaattgtttaattttgcatcccaaatgtttttaatctttgtatattttttaaaaatccttttctcctcatcattgccttttttgtggttgtaaatagacttacttgcactttgaagatgagttactccttgtcatcttacaaatatgtgatatggtaattttcataacagatgtcagttttgaaccaagaattggtgatttgtttataagaaaaaaactggcttcatttctgtgaaattgctctttgaaaatttctttttacacgtgtaagccaactgagataccgtgatggtgttgatttctttcaatgatgcttaccatctattttagccactgagccttttattatttgtctatttgtaaagtttatttgtcttaactcatttaataaa

SEQ ID NO: 6332 - DNA, 462 bp, Homo sapiens
cctgaggctgggctggcaagaagcccctcagccttgtcgggaaccctggcgtatgcatctggcaaggctggcgccacgtgacccagcttctgggctttgtctgtggctgccaggtggtcagcgtgtttacggaggaagaggacagctttgatttcattggtggatttgatccatttcctctctaccatgtcaatgaaaagccatccagtctcttgtccaagcaggtgtacttgcctgcgtaagtgaggaaacagctgatcctgctcctgtggcctccagcctcagcgaccgaccagtgacaatgacaggagctcccaggccttgggacgcgcccccacccagcaccccccaggcggccggcagcacctgccctgggttctaagtactggacaccagccagggcggcagggcagtgccacggctggctgcagcgtcaagagagtttgtaatttcctttctctt

SEQ ID NO: 6333 - DNA, 1351 bp, Homo sapiens
gaagaggcggggtttagaggcgtgaaactccgcagtgctcagccaagcagggagcaacgctaggaagggcgggcagaaagggcacgctcttgtgggtgactacaggttaggagaccgttgaacctggaggggccctaggatggaccccgtggaaagattcagagactgcgccctctccctggcgccgccttcccctacacgcggcgggtatattctgttgcagttggcccaggacctgtttccaagactctgccccctcgcacttccgtccctcctggttttgtaaagtgatgctcataggaacccccaccccgcgtgacactactcccagctcctggctgacttctagtcttctggttgaagctgcgcctttagatgacacgaccctacccacccctgtttccagcggatgcccgggcctggagcccacagaattcttccagtccctgggtggggacggagaaaggaacgttcagattgagatggcccatggcaccaccacgctcgccttcaagttccagcatggagtgattgcagcagtggattctcgggcctcagctgggtcctacattagtgccttacgggtgaacaaggtgattgagattaacccttacctgcttggcaccatgtctggctgtgcagcagactgtcagtactgggagcgcctgctggccaaggaatgcaggctgtactatctgcgaaatggagaacgtatttcagtgtcggcagcctccaagctgctgtccaacatgatgtgccagtaccggggcatgggcctctctatgggcagtatgatctgtggctgggataagaagggtcctggactctactacgtggatgaacatgggactcggctctcaggaaatatgttctccacgggtagtgggaacacttatgcctacggggtcatggacagtggctatcggcctaatcttagccctgaagaggcctatgaccttggccgcagggctattgcttatgccactcacagagacagctattctggaggcgttgtcaatatgtaccacatgaaggaagatggttgggtgaaagtagaaagtacagatgtcagtgacctgctgcaccagtaccgggaagccaatcaataatggtggtggtggcagctgggcaggtctcctctgggaggtcttggccgactcagggacctaagccacgttaagtccaaggagaagaagaggcctagcctgagccaaagagagagtacgggctcagcagccagaggaggccggtgaagtgcatcttctgcgtgttctctatttgaacaagcatttcccccagggaagtttctgggtgccccactaagtagaataaagaaaaacggttataaata

SEQ ID NO: 6334 - DNA, 1254 bp, Homo sapiens
ccctctctctccagccgttttggggaggggctctccacgctccggatagttcccgagggtcatccgcgccgcactcgcctttccgtttcgccttcacctggatataatttccgagcgaagctgcccccaggatgaccacgctggccggcgctgtgcccaggatgatgcggccgggcccggggcagaactacccgcgtagcgggttcccgctggaagtgtccactcccctcggccagggccgcgtcaaccagctcggcggtgtttttatcaacggcaggccgctgcccaaccacatccgccacaagatcgtggagatggcccaccacggcatccggccctgcgtcatctcgcgccagctgcgcgtgtcccacggctgcgtctccaagatcctgtgcaggtaccaggagactggctccatacgtcctggtgccatcggcggcagcaagcccaagcaggtgacaacgcctgacgtggagaagaaaattgaggaatacaaaagagagaacccgggcatgttcagctgggaaatccgagacaaattactcaaggacgcggtctgtgatcgaaacaccgtgccgtcagtgagttccatcagccgcatcctgagaagtaaattcgggaaaggtgaagaggaggaggccgacttggagaggaaggaggcagaggaaagcgagaagaaggccaaacacagcatcgacggcatcctgagcgagcgaggtaagcggtggcgccttgggcggcgcacttgctgggtgacttggagggcatcggctagctgacattggtgatctgacggcagccaagcccagctcggatcaaggtcccttcatgcgcggtgtctctgcgcctgagtaacgacatggaactgaaagaccagagggacactaggaatcaaaacaaacatttctattctgcttagtttttctgttttgtaaatctttctttcttaaccactttcagcccctgggattctagaactgtgaattgtgctctgttgtagggggcaggggaagctctcactctgttgccattaaatgtatgagactgggcatctctgagcaattgtagggccggggatagagggtacttgaatcttcagaagttgaagtagcttttatgccctcaggaaaggccctggtctccggagtttcctcgcattaaaggagagagagagagagtactcttttgggcaacggccctccaaaattgcccccacattggctgccttataaatatgtctgtgtgttgactggt

SEQ ID NO: 6335 - DNA, 786 bp, Homo sapiens
agtcttctatgccagggctaggaaagctgccttccaaaatttggtctgggaagacattatcctgggaatgagaagcaaagcctcagctctagaagcccaaataatagcagatgacccaggctttcactggcacccagtacaggcagcaggctgcaccaagaaggctggcagtgcctcttgaggaatcccttggcagtgcaggagcctagctggactcaagaatattttgccaagggcacccagcagaaccaatggaagcagaatcacagaaataggagaagaggacaaagatactcagagagaaaaagtaaaagaccgaagaaggaggctggagagaccaggatccttccagctgaacaaagtcagccacaaagcagactagccagccggctacaattggagtcagagtcccaaagacatgggcttgttagagtgctgtgcaagatgtctggtaggggccccctttgcttccctggtggccactggattgtgtttctttggggtggcactgttctgtggctgtggacatgaagccctcactggcacagaaaagctaattgagacctatttctccaaaaactaccaagactatgagtatctcatcaatgtgatccatgccttccagtatgtcatctatggaactgcctctttcttcttcctttatggggccctcctgctggctgagggcttctacaccaccggcgcagtcaggcagatctttggcgactacaagaccaccatctgcggcaagggcctgagcgcaacggtaacagggggccagaaggg

SEQ ID NO: 6336 - DNA, 1456 bp, Homo sapiens
gctaatgaatgaatgtgatcatttaaaagaaagtctctttcagtatgagagagagaaaacagaaggagtagtggttgtgagacaacttcaacaagaagtggctgacagcgtaaaaaaattaacgacgttagagtctccactggaaggtatatcacgttgtcacattaatttggatgagacacaggcctcaaataagaaattatttcaagtgaaaagtcaaatataagaaactcctggaaatgacaataaatatgttaaatgtatttggaaatgaagactttgattgccatggagacttaaaaacagatcaactgaaaatggatattctgattaagaagctaaaacagaagtttgatgatcttacggcagagaaggaagctttatcttcaaaatgtgtcaatttggctaaagacaatcaagttcttcaacaggagtttttatctatgaaaaaagtacaacagcaatgtgagaaacttgaggaggataaaaagatgttgaaagaagaaatattaaatcttaagacacatatggaaaacaatagggtagaacttagtaaactacaagaatataaattggagctagatgaaaaggcagtgcaggcagtagaaaaattagaagaaatccatttacaggaacaagcacaatatgaaaaacaattagagcagttaaacaaggataatatggcttcactaaataaaaaggaactcacacttaaagatgtggaatgtaaattctcagaaatgaaaactgcttatgaagaggttacaaccgaattagaagaatataaggaagcctttgcagcagcattgaaagctaacaattccatgtcaaaaaaattaacaaaatcaaataagaaaatagcagtgatcagcatgaagctccttatggagaaagagcagatgaaatattttctcagtgctcttcctacaaggcgagacccagagtcaccttgtgttgaaaatcttactagtataggactcaacagaaaatatattccccaaacacccataagaattcctatttcaagcccacagacttcaaataactgcaagaactcctagactgtgatggagctggactgtgtagaacaaataactagagaaacaaagagaattgttgctgtgttgaacacttgctcccgtctacttacttctctataatccactgccatggaatgagtgatttttcttagaagcagaggtggagccactgaggaagcacaggcgagccctccccagcacgtgctcactggtccccaacagaacaaccgctgccacatccatgaggctcccattgtggtgggttgtgtcaccccacaatgtcactgttgctgagcccccatcgcctctgtgttgtggagcagttagagacacactgtggtgtctgagtggctctgcgtgaaggaccgttttctaggtgagaggcacatctcaacacagctgactgatcagactca

SEQ ID NO: 6337 - DNA, 812 bp, Homo sapiens
atggccaccaggcgtttaaccgacgctttcttgttgttgcggaataattccatccaaaaccggcagctgttagccgagcaagagctggacgagcttgctgatgaccgtatggcactggtgtcaggcatcagcttagatccagaagcagcgattggtgtgacaaaacggccacctcctaagtgggtggatggagtggatgaaattcagtatgatgttggccggattaagcagaagatgaaagaattggccagccttcatgacaagcatttaaacagacccaccctggatgacagcagcgaagaggaacatgccattgagataactacccaagagatcactcagctcttccacaggtgccagcgtgccgtgcaggccctgccgagccgggcccgggcctgctccgagcaggaggggcggctgcttgggaacgtggtggcctcgctggcgcaggccctgcaggaactctccaccagcttccggcacgcacagtcaggctacctcaaacgcatgaagaatcgagaggaaagatcccagcattttttcgacacatcagtaccactaatggatgatggagacgataacactctttaccatcggaggaccagttagttctggtggagcagaacacactgatggtggaagagcgggaacgagagattcgccagattgtacagtccatttctgacctgaatgaaatattcagggacttaggggcgatgattgtagaacagggtacagtccttgacagaattgactataacgttgaacagtcctgtatcaaaactgaagatggtttgaaacagcttcacaag

SEQ ID NO: 6338 - DNA, 2969 bp, Homo sapiens
ggcgacggcagcgcctcctccgccaccaaactcctggggctccgcgggggcttggggccacctcctcctgagcccggaggaaccctctcccgataggttccagcgtgactccctcccactccacccttttcctttcttcttcctcttttttttttttttttttaaacacatttttttcctggcttcggacctcagactgctgcagccctaaccttcccagggctcagctctttggagctgcccattcctccggctgcgagaaaggacgcgcgccctgcgtcgggcgaagaaaagaagcaaaacttgtcgggagggtttcgtcatcaacctccttcccgcaaacctaaacctcctgccggggccatccctagacagaggaaagttcctgcagagccgaccagccctagtggatctggggcaggcagcggcgctggctgtggaattagatctgttttgaacccagtggagcgcatcgctggggctcggaagtcaccgtccgcgggcaccgggttggcgctgcccgagtggaaccgacagtttgcgagcctcggctgcaagtggcctctcctccccgcggttgttgttcagtgtcgggtgagggctgcgagtgtggcaagttgcaaagagagcctcagaggtccgaagagcgctgcgctcctactcgcgttcgcttcttcctcttctcggttccctactgtgaaatcgcagcgacatttacaaaggcctccgggtcctaccgagaccgatccgcagcgtttggcccggtcgtgcctattgcatcgggagcccccgagcaccggcgaaggactggcgggtggggtagggaggtggcggcggcggcatggcgaggttcccgaaggccgacctggccgctgcaggagttatgttactttgccacttcttcacggaccagtttcagttcgccgatgggaaacccggagaccaaatccttgattggcagtatggagttactcaggccttccctcacacagaggaggaggtggaagttgattcacacgcgtacagccacaggtggaaaagaaacttggactttctcaaggcggtagacacgaaccgagcaagcgtcggccaagactctcctgagcccagaagcttcacagacctgctgctggatgatgggcaggacaataacactcagatcgaggaggatacagaccacaattactatatatctcgaatatatggtccatctgattctgccagccgggatttatgggtgaacatagaccaaatggaaaaagataaagtgaagattcatggaatattgtccaatactcatcggcaagctgcaagagtgaatctgtccttcgattttccattttatggccacttcctacgtgaaatcactgtggcaaccgggggtttcatatacactggagaagtcgtacatcgaatgctaacagccacacagtacatagcacctttaatggcaaatttcgatcccagtgtatccagaaattcaactgtcagatattttgataatggcacagcacttgtggtccagtgggaccatgtacatctccaggataattataacctgggaagcttcacattccaggcaaccctgctcatggatggacgaatcatctttggatacaaagaaattcctgtcttggtcacacagataagttcaaccaatcatccagtgaaagtcggactgtccgatgcatttgtcgttgtccacaggatccaacaaattcccaatgttcgaagaagaacaatttatgaataccaccgagtagagctacaaatgtcaaaaattaccaacatttcggctgtggagatgaccccattacccacatgcctccagtttaacagatgtggcccctgtgtatcttctcagattggcttcaactgcagttggtgtagtaaacttcaaagatgttccagtggatttgatcgtcatcggcaggactgggtggacagtggatgccctgaagagtcaaaagagaagatgtgtgagaatacagaaccagtggaaacttcttctcgaaccaccacaaccgtaggagcgacaaccacccagttcagggtcctaactaccaccagaagagcagtgacttctcagtttcccaccagcctccctacagaagatgataccaagatagcactacatctaaaagataatggagcttctacagatgacagtgcagctgagaagaaagggggaaccctccacgctggcctcatcattggaatcctcatcctggtcctcattgtagccacagccattcttgtgacagtctatatgtatcaccacccaacatcagcagccagcatcttctttattgagagacgcccaagcagatggcctgcgatgaagtttagaagaggctctggacatcctgcctatgctgaagttgaaccagttggagagaaagaaggctttattgtatcagagcagtgctaaaatttctaggacagaacaacaccagtactggtttacaggtgttaagactaaaattttgcctatacctttaagacaaacaaacaaacacacacacaaacaagctctaagctgctgtagcctgaagaagacaagatttctggacaagctcagcccaggaaacaaagggtaaacaaaaaactaaaacttatacaagataccatttacactgaacatagaattccctagtggaatgtcatctatagttcactcggaacatctcccgtggacttatctgaagtatgacaagattataatgcttttggcttaggtgcagggttgcaaagggatcagaaaaaaaaaatcataataaagctttagttcatgagggatcgacacctttggttcaaatgttctctgatgtctcaaagataactgttttccaaagcctgaaccctttcactcaaaagagcaatgatgaatgtctcaagattgctaagaaaaacagcccatgcaagagtgagaacaaacacaaaataagagattttctacattttcaaaa

SEQ ID NO: 6339 - DNA, 825 bp, Homo sapiens
tgtcttttgaatgacactggggttgggaaatcaagcatcgtgtgtcgatttgtccaggatcactttgaccacaacatcagccctactattggggcatcttttatgaccaaaactgtgccttgtggaaatgaacttcacaagttcctcatctgggacactgctggtcaggaacggtttcattcattggctcccatgtactatcgaggctcagctgcagctgttatcgtgtatgatattaccaagcaggattcattttataccttgaagaaatgggtcaaggagctgaaagaacatggtccagaaaacattgtaatggccatcgctggaaacaagtgcgacctctcagatattagggaggttcccctgaaggatgctaaggaatacgctgaatccataggtgccatcgtggttgagacaagtgcaaaaaatgctattaatatcgaagagctctttcaaggaatcagccgccagatcccacccttggacccccatgaaaatggaaacaatggaacaatcaaagttgagaagccaaccatgcaagccagccgccggtgctgttgacccaagggccgtggtccacggtacttgaagaagccagagcccacatcctgtgcactgctgaaggaccctacgctcggtggcctggcacctcactttgagaagagtgagcacactggctttgcatcctggaagacctgcagggggcggggcaggaaatgtacctgaaaaggattttagaaaaccctgggaaaacccaccacaccaccacaaaatggcctttagtgtatgaaatgcacatggaggggatgtagttgcatttttgct

SEQ ID NO: 6340 - DNA, 1123 bp, Homo sapiens
actcccaacagagcgcccaagaagaaaatggccataagtggagtccctgtgctaggatttttcatcatagctgtgctgatgagcgctcaggaatcatgggctatcaaagaagaacatgtgatcatccaggccgagttctatctgaatcctgaccaatcaggcgagtttatgtttgactttgatggtgatgagattttccatgtggatatggcaaagaaggagacggtctggcggcttgaagaatttggacgatttgccagctttgaggctcaaggtgcattggccaacatagctgtggacaaagccaacctggaaatcatgacaaagcgctccaactatactccgatcaccaatgacaagttcaccccaccagtggtcaatgtcacgtggcttcgaaatggaaaacctgtcaccacaggagtgtcagagacagtcttcctgcccagggaagaccaccttttccgcaagttccactatctccccttcctgccctcaactgaggacgtttacgactgcagggtggagcactggggcttggatgagcctcttctcaagcactgggagtttgatgctccaagccctctcccagagactacagagaacgtggtgtgtgccctgggcctgactgtgggtctggtgggcatcattattgggaccatcttcatcatcaagggattgcgcaaaagcaatgcagcagaacgcagggggcctctgtaaggcacatggaggtgatggtgtttcttagagagaagatcactgaagaaacttctgctttaatggctttacaaagctggcaatattacaatccttgacctcagtgaaagcagtcatcttcagcattttccagccctatagccaccccaagagtggttatgcctcctcgattgctccatactctaacatctagctggcttccctgtctattgccttttcctgtatctattttcctctatttcctatcattttattatcaccatgcaatgcctctggaataaaacatacaggagtctgtctctgctatggaatgccccatggggcatctcttgtgtacttattgtttaaggtttcctcaaactgtgatttttctgaacacaataaactattttgaagatcttgggtggaa

SEQ ID NO: 6341 - DNA, 4032 bp, Homo sapiens
acttctaagtttgcggcggagagaataaagcagaaagacaggaagaggaggtggagttctacagctctccaggaggccggggggcccactccgcctatcgctcccctcggctacgctgccacttcaatgccccgcaggtcgcgagctgctgttctttcgaaggcgtcggagaaccaggggcgtcccgcgccacctctgactcggagcagcgccgagcactgacgctcccgcccttgggcaaggacgccagtgcgcccgcgcgcgtccctctgcgcggcagcccgtcgcgggccctcaaggggaagcccaggccaggatggccccgggtcgcgcggtggccgggctcctgttgctggcggccgccggcctcggaggagtggcggaggggccagggctagccttcagcgaggatgtgctgagcgtgttcggcgcgaatctgagcctgtcggcggcgcagctccagcacttgctggagcagatgggagccgcctcccgcgtgggcgtcccggagcctggccagctgcacttcaaccagtgtttaactgctgaagagatcttttcccttcatggcttttcaaatgctacccaaataaccagctccaaattctctgtcatctgtccagcagtcttacagcaattgaactttcacccatgtgaggatcggcccaagcacaaaacaagaccaagtcattcagaagtttggggatatggattcctgtcagtgacgattattaatctggcatctctcctcggattgattttgactccactgataaagaaatcttatttcccaaagattttgaccttttttgtggggctggctattgggactcttttttcaaatgcaattttccaacttattccagaggcatttggatttgatcccaaagtcgacagttatgttgagaaggcagttgctgtgtttggtggattttacctacttttcttttttgaaagaatgctaaagatgttattaaagacatatggtcagaatggtcatacccactttggaaatgataactttggtcctcaagaaaaaactcatcaacctaaagcattacctgccatcaatggtgtgacatgctatgcaaatcctgctgtcacagaagctaatggacatatccattttgataatgtcagtgtggtatctctacaggatggaaaaaaagagccaagttcatgtacctgtttgaaggggcccaaactgtcagaaatagggacgattgcctggatgataacgctctgcgatgccctccacaatttcatcgatggcctggcgattggggcttcctgcaccttgtctctccttcagggactcagtacttccatagcaatcctatgtgaggagtttccccacgagttaggagactttgtgatcctactcaatgcagggatgagcactcgacaagccttgctattcaacttcctttctgcatgttcctgctatgttgggctagcttttggcattttggtgggcaacaatttcgctccaaatattatatttgcacttgctggaggcatgttcctctatatttctctggcagatatgtttccagagatgaatgatatgctgagagaaaagataatcaaatgggctactgatgacatcaaatctcaacttcatttactttggatatatacggcaaggtagtaatttcattatctggagtatttcacctccacatctctgcaataccagcaccttcaacagtgattggttagaggttggcatatgacatagttatgaccattgagacgtgatgctgtgtgtgctgtgaagtttctcaaaaggagtaaggaagatacagcctcttctttctagggactttgtttgtaggtgtgacacctggagcagccattttgctactgttttgtttctaattgtgttccccgccgccctccccgctcgccccgaaaaacgacatgtttgagttctaatccccagtatttcagaatgtgaccttatttggaaatagagtcattgcaaatgtaatttgttaagatgagctcatactggagtagagtgggttcctgatctagtatgactggtattcttattaaaaagagaaatttgaatactagctacaccatgtaaagatgaaggcagagatcgtggtgatgcatctacaatgtcaacaattgccagcaaatcatcagaatctgggagagaggtatggaatgaattctctctcgcagccctaagaaggaaccaatcctgtgcacacctgaatcttggacttccagcctccacaactgtgagacaatacatttttgttatttaagctacccagttgtggcactttattactgcagttctagccgactaatacagctaccttgagaggaaatagcatggggatgaaggtgatgtgctgaagaagcacagcagaaagtggaaagatggtccatgaggacatccttagccactgaattgacaagcctcttccctggagtccctcttccttgggattttttttggtgtgtgtaataatcacttttcctaatggtgcaaaccattgtgagttgctctttgactgctagtaattaaagcaaactaaccaagtcagccctccccagtgttcctttttgcaatctaaattctgatgtccaactcctccctgggccactccctgtccccagatgtctctttgtatatctaaagaagaaaaagaaggataaatcctttttctcccaagagatctccctgcttttgtgaaaagcacaaagaagggcattatctaacttttctcatcattagaagtcaagcctggccgtgactcccgttatgacattttgatggccacattttatgagaaaagcccaaacagacagacctgtctgtaaattctttcatcctttgcattctttctttgactgtaccttagagagtgtttgattattgcaggggagatggaaaagaagcaggttctggcctatgctctagttcctcactttctggagttatcttttgggcctggagtctcttggagtgaggaaaggaagccatttttatactttacttatggtagagttaaacttcgtactcttaggaggctacatgcaatctccaagaggaagagagtgaagaggttaagaattatgccatcaaaatgtgctgctctggcatattgactatttgaattacagatattttaaaaacatcagatatgaagaggtcactctgatcttaattctgtgtcttaacagcaggagatgaaattcccacatgggagatggcctccctgtcacagaaggaataccattctccctatcaatgatgagaaattggaactgagagaattctgtatagaccttgttcaagtaattcttctattttaaacctccccacataatttagctgccttttcaaaactactgtcctttgtgcaaccagtatagaagcgattgactctcactgcatccttgggtcttcttttccctatatgggctcttttcccatatgggctcttatgtcctgtaaaacatgtattaaataaatttgtatgcttttctcccgttaacctgtcttacatcaatttaattcttgggcccaggtaggaccctaagaggacagaggtcgagttttgccacctctgcaagagaaaagagagatgcccagaccaccaggcctgggaaatctttgatttcccaggctttgaagtgggcactgtgtctgaacctggccctctgaaacttcctgttcctggacatcccagctgctaatgtgagttgcccttgcactggctcagggctgggacattaaaggaatttcccttttgttgacataacagtaggatggctatagctaacaataatatattatttagtttcaagtagctagaaggaacatatgaatgttcccaacacaaagaaatgacaactatttgagatgatggatatgctaataaccttaatctgattcctatacattatatgcatcacatatacatacattatatgtataacatcactatgtaccccataaatatgtgcaattattgtcaattaaacaaataaatttaaacaaacatt

SEQ ID NO: 6342 - DNA, 677 bp, Homo sapiens
gagcatggaaatgacccagctgccctgctgttgaaacagaatcctatttggaaggcagacatgtggcccatctctgtagccatcactgagaaatctggattttcaagcaatgattttcaacaattataaaatggaagttgtagactggataagagatgctcagctaagggagttcctggatggtctttagattgatacaccaatcctctgaaattgcatgcaaaaatggcctttctctctgttgcccaggctggagtttagcgactcaatcatggctcactgactgcagcatcgacctccggggctcaagtgatcctttcatctcagcctcctcagtagctgagactacaggtgacttcccaagtatgcctggccacaatacctccaggaattcctcttgcgatcctatagtgacaccccacttaatcagcctctacttcatagtgcttattggcgggctggtgggtgtcatttccattcttttcctcctggtgaaaatgaacacccggtcagtgaccaccatggcggtcattaacttggtggtggtccacagcgtttttctgctgacagtgccatttcgcttgacctacctcatcaagaagacttggatgtttgggctgcccttctgcaaatttgtgagtgccatgctgcacatccacatgtacctcacgttccta

SEQ ID NO: 6343 - DNA, 1552 bp, Homo sapiens
tttctcagcatttcttattgccgtgactgttaatgatccatgcgtagctacaggaatatctgttcacatgtccatttgctatgtgtgcagaggatggagactccaaattttccatgtcaatctccatgaattcaccttttttagaaatattacatcttgagaattgtaactacgcggtagaattggggaagaatcaagcgaagttctccctggttggcatcggtggacaagatctcaatgaaggaaaccgcactctcacactggccttgatttggcagctaatgagaaggtatacactgaatatcctcgaagaaattggtggtggccagaaggtcaatgatgacattattgtcaactgggtgaatgaaacattgagggaagcaaagaaaagttcatccatctctagtttcaaggacccgaagattagtacaagtctgcctgttctggacctcatcgatgccatccaaccaggttccattaactatgaccttctgaagacagaaaatctgaatgatgatgagaaactcaacaatgcaaaatatgccatctctatggcccgaaaaattggagcaagagtgtatgccctgccagaagacctggttgaagtgaaccccaaaatggtcatgaccgtgtttgcctgcctcatggggaaaggaatgaagagggtgtgaggcccaatggggctgggtgggaggcggtgcactcactcctgactgcccggcacagatgctccagggatgattcaagccattccaaagttcaacttggtgacactctataagattccaaaaagcacatattagtgcagccaagtagcctctcctgtatttaacaaaaagtgcttcattctttgcaggaggcccaacctcctatatataggtttctattcttgatttatttgcttcttcgaaaatctagaggaaaagaaagaagttattttccaggtacccttctcgcttttgccattagccaaggatagaagctgcagtggtattaattttgatataatctttcaaaccagcttcatgtggcttcccttttctttgttcaagatgagggccaggaggggaaacatcacacctgccctaaaccctgttcctggaggtcagcatttgatctgttgcaagcccctctttctgtcccctcttcctaccctgcctcccttgactttgctcctcacacttttggaaccatgccttccgggggggcccatctcttctggccgtccttgtctctgggccacttggagtgtgtgataaatcagtcaagctgttgaagtctcaggagtctctggtagcctgcagaagtaagcctcatcatcagagcctttcctcaaaactggagtcccaaatgtcatcaggttttgttttttttcagccactaagaacccctctgcttttaactctagaatttgggcttggaccagatctaacatcttgaatactctgccctctagagccttcagccttaatggaaggttggatccaaggagggtgtaatggagcatcaagccactcggcggcagcatggagctataactaagcatccttta

SEQ ID NO: 6344 - DNA, 1833 bp, Homo sapiens
aagaggcaagaggtagcaacagcgagcgtgccggtcgctagtcgcgggtccccgagtgagcacgccagggagcaggagaccaaacgacgggggtcggagtcagagtcgcagtgggagtccccggaccggagcacgagcctgagcgggagagcgccgctcgcacgcccgtcgccacccgcgtacccggcgcagccagagccaccagcgcagcgctgccatggagcccagcagcaagaagctgacgggtcgcctcatgctggccgtgggaggagcagtgcttggctccctgcagtttggctacaacactggagtcatcaatgccccccagaaggtgatcgaggagttctacaaccagacatgggtccaccgctatggggagagcatcctgcccaccacgctcaccacgctctggtccctctcagtggccatcttttctgttgggggcatgattggctccttctctgtgggccttttcgttaaccgctttggccggcggaattcaatgctgatgatgaacctgctggccttcgtgcccatgtatgtgggtgaagtgtcacccacagcccttcgtggggccctgggcaccctgcaccagctgggcatcgtcgtcggcatcatcatcttcatcccggccctgctgcagtgcatcgtgctgcccttctgccccgagagtccccgcttcctgctcatcaaccgcaacgaggagaaccgggccaagagtgtgctaaagaagctgcgcgggacagctgacgtgacccatgacctgcaggagatgaaggaagagagtcggcagatgatgcgggagaagaaggtcaccatcctggagctgttccgctcccccgcctaccgccagcccatcctcatcgctgtggtgctgcagctgtcccagcagctgtctggcatcaacgctgtcttctattactccacgagcatcttcgagaaggcgggggtgcagcagcctgtgtatgccaccattggctccggtatcgtcaacacggccttcactgtcgtgtcgctgtttgtggtggagcgagcaggccggcggaccctgcacctcataggcctcgctggcatggcgggttgtgccatactcatgaccatcgcgctagcactgctggagcagctaccctggatgtcctatctgagcatcgtggccatctttggctttgtggccttctttgaagtgggtcctggccccatcccatggttcatcgtggctgaactcttcagccagggtccacgtccagctgccattgccgttgcaggcttctccaactggacctcaaatttcattgtgggcatgtgcttccagtatgtggagcaactgtgtggtccctacgtcttcatcatcttcactgtgctcctggttctgttcttcatcttcacctacttcaaagttcctgagactaaaggccggaccttcgatgagatcgcttccggcttccggcaggggggagccagccaaagtgacaagacacccgaggagctgttccatcccctgggggctgattcccaagtgtgagtcgccccagatcaccagcccggcctgctcccagcagccctaaggatctctcaggagcacaggcagctggatgagacttccaaacctgacagatgtcagccgagccgggcctggggctcctttctccagccagcaatgatgtccagaagaatattcaggacttaacggctccaggattttaacaaaagcaagactgttgctcaaatctattcagacaagcaacaggttttataatttttttattactgattttgttatttttatatcagcctgagtctcctgtgcccacatcccaggcttcaccctgaatg

SEQ ID NO: 6345 - DNA, 2344 bp, Homo sapiens; identical to SEQ ID NO: 1966

SEQ ID NO: 6346 - DNA, 779 bp, Homo sapiens
ctggaaattgatgagaaaacagcttctgcatagtagctaatgcttatgtccatgtgtggttcttttgtagcgtgattggactcccaggagaagaagactggcctagagatgttgcccttcccaggcaggcttttcattcaaaatctgcccaaccaattgagaagtttgtaacagatatcgatgaactaggcaaagacctacttctgaagtgtttgacatttaacccagccaaaagaatatctgcctacagtgccctgtctcacccatacttccaggacctggaaaggtgcaaagaaaacctggattcccacctgccgcccagccagaacacctcggagctgaatacagcctgaggcctcagcagccgccttaagctgatcctgcggagaacacccttggtggcttatgggtccccctcagcaagccctacagagctgtggaggattgctatctggaggccttccagctgctgtcttctggacaggctctgcttctccaaggaaaccgcctagtttactgttttgaaatcaatgcaagagtgattgcagctttatgttcatttgtttgtttgtttgtctgtttgtttcaagaacctggaaaaattccagaagaagagaagctgctgaccaattgtgctgccatttgatttttctaaccttgaatgctgccagtgtggagtgggtaatccaggcacagctgagttatgatgtaatctctctgcagctgccgggcctgatttggtacttttgagtgtgtgtgtgcatgtgtgtgtgtgtgtg

SEQ ID NO: 6347 - DNA, 753 bp, Homo sapiens
ggcgggcgccgggaggggcaggcccagcccacggtgcagcgcgcgcggagccctcgccttcctccgacgcactgtggggctgcaggggaagctgcgggccgtgggggccggaggagaagccggctccacgcgcagctgctggcgaatgaggaaagatccagctctgacagaataatgagttgtgcaaagtgaaggccaaatgacatcaccggagatagcagtagttcaaagaaagcaaagcagaggaattgaactgctgcaaaatgcacgagtctcaaacattgtctcagcagcagcatcatatcttacaaaagttgaggaaatactgtatttccagcttaggaaactgaagattcctccggcctcagatgaccaggcaccactagatacagaacactgtgctttccttctccaagtcacttcctgccttgtgaccacacacccaggcttgacaaagctgttctgcagatcagaaagaaggggttcctggtcatacaccagtactaccaaggacagcttttttcctgcaagatctgttacctaaagcaataaaaaatggccagaggatcagtgtccgatgaggaaatgatggagctcagagaagcttttgccaaagttgatactgatggcaatggatacatcagcttcaatgagttgaatgacttgttcaaggctgcttgcttgcctttgcctgggtatagagtacgagaaattacagaaaacctgatggctacaggtgatctggaccaagat

SEQ ID NO: 6348 - DNA, 608 bp, Homo sapiens
agatgtctctgcagcaaagcgaaattccaggcaagccttagggaaaaaaggaaaaacaaagaaaatgaaacaattggcagtgaaaggcagaaagagaagatggagcccttagagaagggagtatccctgagagaagaggacaaagatactcagagagaaaaagtaaaagaccgaagaaggaggctggagagaccaggatccttccagctgaacaaagtcagccacaaagcagactagccagccggctacaattggagtcagagtcccaaagacatgggcttgttagagtgctgtgcaagatgtctggtaggggccccctttgcttccctggtggccactggattgtgtttctttggggtggcactgttctgtggctgtggacatgaagccctcactggcacagaaaagctaattgagacctatttctccaaaaactaccaagactatgagtatctcatcaatgtgatccatgccttccagtatgtcatctatggaactgcctctttcttcttcctttatggggccctcctgctggctgagggcttctacaccaccggcgcagtcaggcagatctttggcgactacaagaccaccatctgcggcaaggg

SEQ ID NO: 6349 - DNA, 5518 bp, Homo sapiens; identical to SEQ ID NO: 334

SEQ ID NO: 6350 - DNA, 4821 bp, Homo sapiens; identical to SEQ ID NO: 4811

SEQ ID NO: 6351 - DNA, 5239 bp, Homo sapiens; identical to SEQ ID NO: 1776

SEQ ID NO: 6352 - DNA, 3005 bp, Homo sapiens
agactgcgctccggccgcggccctcgccccgcggagccctcctaccccggcccgacgctcggcccgcgacctgccccgagccctctccatggaggcagcccgcccctccggctcctggaacggagccctctgccggctgctcctgctgaccctcgcgatcttaatatttgccagtgatgcctgcaaaaatgtgacattacatgttccctccaaactagatgccgagaaacttgttggtagagttaacctgaaagagtgctttacagctgcaaatctaattcattcaagtgatcctgacttccaaattttggaggatggttcagtctatacaacaaatactattctattgtcctcggagaagagaagttttaccatattactttccaacactgagaaccaagaaaagaagaaaatatttgtctttttggagcatcaaacaaagatctctctgttggttccctggctctgcctagttgctgaggtcctaaagaaaagacatactaaagaaaaagttctaaggcgcgccaagagaagatgggctccaattccttgttcgatgctagaaaactccttgggtccttttccacttttccttcaacaggttcaatctgacacggcccaaaactataccatatactattccataagaggtcctggagttgaccaagaacctcggaatttattttatgtggagagagacactggaaacttgtattgtactcgtcctgtagatcgtgagcagtatgaatcttttgagataattgcctttgcaacaactccagatgggtatactccagaacttccactgcccctaataatcaaaatagaggatgaaaatgataactacccaatttttacagaagaaacttatacttttacaatttttgaaaattgcagagtgggcactactgtgggacaagtgtgtgctactgacaaagatgagcctgacacgatgcacacacgcctgaagtactccatcattgggcaggtgccaccatcacccaccctattttctatgcatccaactacaggcgtgatcaccacaacatcatctcagctagacagagagttaattgacaagtaccagttgaaaataaaagtacaagacatggatggtcagtattttggtctacagacaacttcaacttgtatcattaacattgatgatgtaaatgaccacttgccaacatttactcgtacttcttatgtgacatcagtggaagaaaatacagttgatgtggaaatcttacgagttactgttgaggataaggacttagtgaatactgctaactggagagctaattataccattttaaagggcaatgaaaatggcaattttaaaattgtaacagatgccaaaaccaatgaaggagttctttgtgtagttaagcctttgaattatgaagaaaagcaacagatgatcttgcaaattggtgtagttaatgaagctccattttccagagaggctagtccaagatcagccatgagcacagcaacagttactgttaatgtagaagatcaggatgagggccctgagtgtaaccctccaatacagactgttcgcatgaaagaaaatgcagaagtgggaacaacaagcaatggatataaagcatatgacccagaaacaagaagtagcagtggcataaggtataagaaattaactgatccaacagggtgggtcaccattgatgaaaatacaggatcaatcaaagttttcagaagcctggatagagaggcagagaccatcaaaaatggcatatataatattacagtccttgcatcagaccaaggagggagaacatgtacggggacactgggcattatacttcaagacgtgaatgataacagcccattcatacctaaaaagacagtgatcatctgcaaacccaccatgtcatctgcggagattgttgcggttgatcctgatgagcctatccatggcccaccctttgactttagtctggagagttctacttcagaagtacagagaatgtggagactgaaagcaattaatgatacagcagcacgtctttcctatcagaatgatcctccatttggctcatatgtagtacctataacagtgagagatagacttggcatgtctagtgtcacttcattggatgttacactgtgtgactgcattaccgaaaatgactgcacacatcgtgtagatccaaggattggcggtggaggagtacaacttggaaagtgggccatccttgcaatattgttgggcatagcattgctcttttgcatcctgtttacgctggtctgtggggcttctgggacgtctaaacaaccaaaagtaattcctgatgatttagcccagcagaacctaattgtatcaaacacagaagctcctggagatgacaaagtgtattctgcgaatggcttcacaacccaaactgtgggcgcttctgctcagggagtttgtggcaccgtgggatcaggaatcaaaaacggaggtcaggagaccatcgaaatggtgaaaggaggacaccagacctcggaatcctgccggggggctggccaccatcacaccctggactcctgcaggggaggacacacggaggtggacaactgcagatacacttactcggagtggcacagttttactcagccccgtcttggtgaaaaagtgtatctgtgtaatcaagatgaaaatcacaagcatgcccaagactatgtcctgacatataactatgaaggaagaggatcggtggctgggtctgtaggttgttgcagtgaacgacaagaagaagatgggcttgaatttttggataatttggagcccaaatttaggacactagcagaagcatgcatgaagagatgagtgtgttctaataagtctctgaaagccagtggctttatgacttttaaaaaaaattacaaaccaagaattttttaaagcagaagatgctatttgtgggggtttttctctcattatttggatggaatctctttggtcaaatgcacatttacagagagacactataaacaagtac

SEQ ID NO: 6353 - DNA, 1643 bp, Homo sapiens
agcccagttgcacccaagtaaaataaacagtcttgttgctcacacaaagcctgttggtggactctcttcatatggactcatgtgacatttggtgccgaagacctgagacaggaggactcctttgggagaccggtcccctgtcctcgccctctctccatgagatccacccatgacctcgggtcctcagcccagccgaaggaacttctcaccaattttaaatcggggacgcaaagccaacaagaatgaagaagtggccaggaaattaaagcaatgtgaacaccctctggccagcctgttggagggtgagagaccacatggaggagacagagccctgatgtcccagctgaggacatcccagaaaagcctatttccagacaactgaggacaggtgaatgagttctttgtagatgaaccagaatccagtctatctacctgctgagcacagacatgtgagcaacccccccatcaaggtcaactgagcctggcccagatcaacagaatcacgagatgacctatggactcaggagcaatcatgatgtggttgttccatgacactgaatgtagaggtcgttgattctgcagcaccagcaaactgacacataacaccgtgtttaatattgggttctgggctttggggtccctgcagagttcctgatttcagccccaagggctcattcacaaatttattactcagattctaccctgtcaacccaggacgtgttacttacacatttcccagtgtgggcagcaagccacccaggtgccgaggcaagagaccgagggcacaagctgttccagtataataaagaaaacatataaaataagaatagttatactagatatagatcgtagatatgattatatatgaatattactaatcattagtctgtagcaattactctttattccattataataataatcttctctctacaattataacttaagagaaaccaggccatacagagataggagctgaacggacacagtgagaaatgaccagaagacaagagtgtgagccttctattatgccccgacagggccactagagggctccttagtctagcgttaatgccagtgcccgggaagatgcccgttacctagccgactttggtctagcggtagcgtcagtgcccaggaaaagcacccactacttagcagactgggaaaaggagtgtccctttccccgggggagttagagaagactctgctccaccacctcttgtggagggcctgacatccgtcaggcctgcccgcagttatccagaggcctgtctccctgtgatgctgtgcttcagagcagtcacgctcctggtccgcttacatgttccatcctgtacacctggctctgccttctaggtagtagcagaattagtgaaagtactaaaagtctctgaaatgcaaaaataaaggcataagctgtctcctttctctccacctcagctgccaaacagggaagggccgcctgtccagtggatacatgacccacatgaccttacctatcattggagatggctcacactgctcaccctgcccccttgtcttgtatccaataaataacagcgcagcctggcattcggggccactactggtcactgtgtcttggtggtagtggttccccgggcccagctgttttttctttt

SEQ ID NO: 6354 - DNA, 1163 bp, Homo sapiens
gtagtcctttgttacatgcatgagtcagtgaacagggaatgggtgaatgacatttgtgggtaggttatttctagaagttaggtgggcagcttggaaggcagatgcacttctacagactattccttggggccacacgtaggttcttgaatcccgaatggaaaggggagattgataactggtgtgtttatgttcttacaagtcttctgccttttaaaatccagtcccaggacatcaaagctctgcagaaagaactcgagcaatttgccaagctcctgaagcagaagaggatcaccctgggatatacacaggccgatgtggggctcaccctgggggttctatttgggaaggtattcagccaaacgaccatctgccgctttgaggctctgcagcttagcttcaagaacatgtgtaagctgcggcccttgctgcagaagtgggtggaggaagctgacaacaatgaaaatcttcaggagatatgcaaagcagaaaccctcgtgcaggcccgaaagagaaagcgaaccagtatcgagaaccgagtgagaggcaacctggagaatttgttcctgcagtgcccgaaacccacactgcagcagatcagccacatcgcccagcagcttgggctcgagaaggatgtggtccgagtgtggttctgtaaccggcgccagaagggcaagcgatcaagcagcgactatgcacaacgagaggattttgaggctgctgggtctcctttctcagggggaccagtgtcctttcctctggccccagggccccattttggtaccccaggctatgggagccctcacttcactgcactgtactcctcggtccctttccctgagggggaagcctttccccctgtctctgtcaccactctgggctctcccatgcattcaaactgaggtgcctgcccttctaggaatgggggacagggggaggggaggagctagggaaagaaaacctggagtttgtgccagggtttttgggattaagttcttcattcactaaggaaggaattgggaacacaaagggtgggggcaggggagtttggggcaactggttggagggaaggtgaagttcaatgatgctcttgattttaatcccacatcatgtatcacttttttcttaaataaagaagcttgggacacagtagatagacacactta

SEQ ID NO: 6355 - DNA, 1379 bp, Homo sapiens
agtctccgctccgcgaatctcctccggccactgccgccgcggtcgcctctcacccgcccggccgctccagcccgaggcgccccgaccccgcgccactccgcgcccggccagccgcccgcagccatggggctcctgcccaagctcggcgcgtcccagggcagcgacacctctactagccgagccggccgctgtgcccgctcggtcttcggcaacattaaggatctggaagaatcggtgaattcactggtcggtggagaaatgtctgtagacccactctggtggttgcaagaatttgccatcagcagagaaggcagggcgccattctgcacgacagcttcgagaggaaggagaggaaaaggtgtttgtgctctgccaaggcctcctgcagctctgccaactcctgtacagcgcctacttcaagagcagcctcaccaccattgagaagcgctttgggctctccagttcttcatcgggtctcatttccagcttgaatgagatcagcaatgccatcctcatcatctttgtcagctactttggcagccgggtgcaccgtccacgtctgattggcatcggaggtctcttcctggctgcaggtgccttcatcctcaccctcccacacttcctctccgagccctaccagtacaccttggccagcactgggaacaacagccgcttgcaggccgagctctgccagaagcattggcaggacctgcctcccagtaagtgccacagcaccacccagaacccccagaaggagaccagcagcatgtggggcctgatggtggttgcccagctgctggctggcatcgggacagtgcctattcagccatttgggatctcctatgtggatgacttctcagagcccagcaactcgcccctgtacatctccatcttatttgccatctctgtatttggaccggctttcgggtacctgctgggctctgtcatgctgcagatctttgtggactatggcagggtcaacacagctgcagttaacttggtcccgggtgacccccgatggattggagcctggtggctaggcctgctcatttcttcagctttattggttctcacctctttccccttttttttcttccctcgagcaatgcccataggagcaaaggtaaggttccaagagcccatgactctacctgatggagttgaagaaagggatgtgggggtagaaaataaatagagctaaaaagctgcagcatgttaagcaaattcagggtgaaatctaaacaaatttcatgatgcaggacttcccagaggctttaagaggtgagggtgttggtgaatttccaaaaggtggtatctcctatgtgttcccgtaccatgttagcatgtcaaggatcaggagacctccagggaacagtttg

SEQ ID NO: 6356 - DNA, 372 bp, Homo sapiens
cagcctacttcattatcaagttatactattttattcttgcagtttgatgatcttatggcggagaaggaagctgtatcttcaaaatgtgtcaatttggctaaagagaatcaagtttttcaacaggagttattatctatgaaaaaagtacaacaggaatgtgaaaaacttgaggaagataaaaagatgttggaagaagaaatattaaatcttaagacacatatggaaaacagtatggtagaacttagtaaactacaagaatataaatcagagctagatgaaagggcaatgcaggcagtagaaaaattagaagaaatccatttacagtaatgattctcattatggagtcatttgatgattaagaccagttggcat

SEQ ID NO: 6357 - DNA, 9138 bp, Homo sapiens
gtctctccaagggaatgaaaggtgaggggagcgtgagtgcaggcatgatgggaatctccgtgacttgtgaaccaaggactgggttttgctctggaagcctgtcctgattgcttctgtaatctggcgctatgcatccggatcttggacccttatgtacactgctgtatgttactcttacaattctgtgctcttctgtgagttcagacttggcaccttattttacttctgagccgctctctgctgtccagaaacttggtggacctgtagtactgcattgttctgctcaacctgtgaccactcgtatctcatggctgcataacggaaaaacattggatggaaacctggaacatgttaagattcatcaggggactctgacaattctttctctcaactcctctcttttgggttactaccagtgccttgccaacaatagcatcggtgccattgtgagtggccctgcgacagtatctgtggcagttcttggtgattttggttcatccacaaagcatgttattacagcagaagaaaaaagtgctggtttcattggctgcagggtaccggagagtaaccccaaagctgaggtgcgctataaaatccggggaaaatggctggaacattccacagagaattacttaatccttccatcaggaaatcttcagattttgaatgtatccttagaggacaagggatcatacaaatgtgcagcttataatcctgtcacacatcaattaaaagttgaacctattggccgaaagctccttgtgagtcgtccttcttcagatgatgttcacattcttcaccccacccattcacaggcattagctgttctttctcgtagccctgtaaccttggagtgtgtggtgagtggggtcccggctcctcaagtgtattggctaaaggacgggcaggacattgcaccaggaagcaactggagaaggttgtattctcatcttgccactgatagcgttgacccggcggactccggaaactattcctgcatggcgggaaacaagtctggagatgtaaaatatgtgacttacatggttaatgtacttgaacatgcttccatttctaaaggactacaggatcagatagtgtctctgggtgccacagtacactttacctgcgacgttcatgggaacccagcccccaactgtacctggtttcacaatgcacagcctattcatccttctgcacgacatctaactgcaggaaacggactgaaaatcagtggggttactgtggaagatgttgggatgtatcagtgtgtagcagataatgggattggatttatgcactctactggaagacttgaaattgaaaatgacggtggattcaagccagttataattacggcaccagtaagtgcaaaggttgcagacggagactttgttactctgtcctgcaatgccagtgggctgccggttccggtcattcgttggtatgacagccatggattgataaccagccatccatctcaagtcctgagatcgaaatcccgaaaatcacagttatcaagacctgagggcttgaacctggagcctgtgtacttcgtcctgtcccaagctggtgcaagctctctccatattcaggctgtgactcaggaacatgcggggaaatacatctgcgaagctgcaaatgaacatggtaccacacaggcagaagcatctctcatggttgttccttttgaaacaaatacaaaagcagagacagtcacacttcctgatgctgctcagaatgatgacagaagtaagagagatggttcagaaactgggttactgagctcatttccggtgaaggtccatcccagtgcagtggaatcagcaccagagaaaaacgccagcggcatctctgttcctgatgcccccatcatactgagccccccacagacccacacaccagacacgtacaacctggtgtggagggcaggcaaggatggtgggctgcccatcaatgcttactttgtgaagtatcgaaagctggatgatggggttggcatgctgggaagctggcacacggttcgagtcccaggaagtgaaaatgagctccatttagctgagctggagccatctagtctttatgaagtcttgatggtagcaagaagcgcagcaggtgaaggccaacctgccatgcttaccttccgaaccagcaaagaaaaaacagcgtcatcaaaaaacacccaggcatcctctccacccgtgggcatccctaagtatcccgttgtttcagaggctgcaaacaacaattttggagtggtacttacagattcctctaggcacagtggagttccagaggcaccagatcggcctaccatctccactgcatcagagacatcagtctatgtcacttggattcctcgggcaaacgggggttctccaatcactgccttcaaagtcgaatataaacggatgaggaccagcaattggctggtggcagctgaagacatccctccttccaaactttcagtggaagttcgtagtttagaaccaggttcaacatacaaatttagggtcattgccatcaaccattatggtgagagttttcggagttcagcatctcgtccttatcaagtggttgggttccccaatcgcttttccagccgtccaataactggacctcacattgcatacacagaggctgtcagcgatactcagatcatgctaaagtggacgtacattccatcaagtaacaataacactcccattcaaggattttatatctattaccgaccaacagatagtgacaatgacagtgattacaagagggatgttgtagaaggttcaaagcagtggcacatgattggccacctgcagccagaaacctcctatgacattaaaatgcaatgcttcaatgaaggaggagaaagtgaatttagcaatgtgatgatctgcgagactaaagtgaaacgtgttcctggagcttctgaatatcctgtcaaagacttgagtacccctccaaattctttgggaagtggaggaaatgtggggcctgcaaccagccctgccagaagcagtgacatgttatatctgatcgttggctgtgtgctgggcgtcatggtcctcattctgatggttttcattgcaatgtgcctgtggaagaatcgccagcagaataccatacaaaaatatgacccaccaggatatctctaccaaggatcagatatgaacgggcagatggtggactacaccactctctcaggagcaagtcagataaatggaaatgttcacggaggcttcctaaccaatggcggtctcagcagtggctattcccaccttcaccataaggtccccaatgcagtcaatggaattgtgaatgggagcctaaatggagggctttactccgggcacagcaactctctaaccaggacacacgtggattttgaacatcctcatcatctagtgaatggtggtggaatgtacacggccgtgcctcagattgaccctctggagtgtgttaactgccgaaattgtcgaaacaacaataggtgtttcaccaaaaccaacagcactttcagcagcagccctcctcctgtggtccctgtggtagcaccttatcctcaggatggtttggaaatgaagcccctcagtcacgtgaaggtgcctgtatgcctgacttccgcagtccctgattgtggccagttgccggaggagagcgtcaaggacaatgtggaaccagtccctactcagcgtacctgctgtcaggacattgtaaatgacgtcagctctgatggctcagaagatccagcagagttcagcagaggtcaggaaggcatgatcaaccttaggattccagatcatcttcagttagctaagagctgtgtatgggaaggagacagctgtgcccattcagaaacagagatcaacattgtaagttggaatgctcttattttgccacctgtccccgagggctgtgctgagaagacaatgtggtctccacctggcattcctttagacagcccgacagaggtccttcagcagccccgggaaacctgaggacatgcaaacaaccagtcatgttccaacttcaagccggtaactgcacacaacaggcctgggagcgaactgtgtgaaggaccttaattcaaatcagagaaaatcattatttatttttttgtagtagtaatgtcatatgaatgtatcttaaaacgtgtgcccttttatattatttatgccttaaatgttttcttccccattccttcctccccctcggtaggaaacaaccttgttttgcatagtattcagtcacctggagggcagaggggtccttccatgttttctaacagctatagtgacagcaagagctcctcatgcaaaggatcccatctcttggctgcttcggctaggagggaatgcaggggcccgttgaaggttgccaccagctgggttttcaggtggaaaatggtctttcaatagtgtattctcagacttttttttgtttgttttttgagatggagtcttgctgtcatccaggctggagtgcaatggctcgatcttggctcactgcaacctccgcctcccaggttcaagcaattctcccgcctcagcctcctgagtagctgggactacaggcacctgccaccacgtccagctaattgtcttgtatttttattagagacaaggtttcaggctggttttgaactcctgacctcaagtgatccacccgcctccgcctcccaaagtgcgaggattacaggcgtgagccaccacgtctggcctgtattatcagacttcctgagaacactttgaaatcaactgcagttgtgacccatgtttataataacagacctggctgacggattttacaagagtgccttccacagaagtggtaatgtgacctgttgactttgtatctgcacgtgggcacgagtgatgttcagtttgctaggcactagtcatagtgttatggacgtggtggagtgtaaggtcttgatgaattacggcagtatgcagaaaaggaaccaaggccagagagacaaataatgcctcatgtcccactgctttaaaattacattaatttataaaatggccactatgggctctttttgactgtttctcggagtaggaacaaaataagacattaaatggtggcttgaagagaaagatacacattttcagaagaaagaaaggggagggctgcagggagcctgtcttggcgggagctctccagtctgttggattagcacagggacacgcttatggtgccatgacgccgaaactagtcatcccccatctccagcataggcaacggcctgcaggggtgagtgtcagaaaagacttactttggaagaaaagggtttttttttgtttgtttgttttttgtttttttttgtttgtttgttttgggtttttttcctgaaatttcctgatacctttttcagaatgtcacccttgtaaataggcacctaaagccaagttggtcagcagagctcctgaccacggctgcctctgcgtgacaaggacatttgcagctgcctttggaaggctcttcacattaaaaaacaataattatgtaagtgtgtttcatagcttgagtcaagctttcaaggatcactgctcctttgtgcattgtgcatccctttggggaaagaaacagaaaattattctctttctatagagtcaagcaattccagcagaagtgaagaaatgttagtttcccagaaatcgcagtggaatagaatacaatactgtgttaaccaactttctgtataaatgcatcagtattcccttacatatgtctatatattttataatagaactgttagtgaaaatgtgcttgtttaagctgggtcactatgcaagagttacttccagtagaatgtagtgaatgtaattccctagtcggatattagggatgctgtagacccaagttctacattccagatgtccgtgcctatagtatactggatttattcttcatgttgcttaaatgcagttagctctggagggggatagctgcatcccttacttctgtgactagcaaaggacaaagtcccagcgcacagaatatgaaaacataccctgtgttagccaatcaagttacagcaatgctgtcacaaagggagttttagaaaactggggagtcattgtccgtagacagccattttgatttaggaaacaggtgtattagcatgagccttaggtcatgaactgcttttaaagattgagtttgaatatgggatctgtccacgaggaagagaaaatggctttacctttaggacaatctcattgtggactgctttatttatattattagtaacgctgttttaagtgttattctttttattgtattttatttataaaaaatgcctttatatattgaaatatataaatatatatatataaacacacacacacacacacacacacacatatatatatatatatataattgcctttatatttaggcggtatgagttctccctaagcgtgagttggctctgccctgcacaggcacccaaacagtcctacctaatgtcacttcaccaggaaatgagaggacatggtacagtgtgggagacagcactaacacgtgctgaataactactgtgtaccaggcactgtgctcggtgcttgttactgttaactcatttaacccccacaactcatctacaaagttggcattaaaatccccaagtcactcagtgagccatgggacctgaatccgaacctagtttatctggagccataatctgggctcctcccatttttccatactgctttccaaaagcattgtggttcactctttggatggaaccagtcccgttccgtatgctgtgatctatccctgccgtggaattcctccgaggctccaactccgcagccagagaagctgctctctggcctccgcgggcagagctctgcttatgacttcgtcttccagaggtccacatttctccccttgacgccccctgtctaccacctccacctggaaatttgatctttactgtgctcagtgatcacgaaattggtcaagcctattcatgttccttctcatctagaattctgtgtgattgttttagcataaactgccccgctcccactgtatcatttcacgatctccttttaatgtttttctttcagttttgcactgacagtctggtgacaggtgctgccagggtgcaagttacattgcaatgttctaaaccttttgaagtgttcttagcaaaagcctttctttctgggtgtttttgtcgaatgagtctatgaagactcaatgcatccatcttgggctgatcatgccacagatctcattccagctatagtactgccaagaagtgaagtttatcattgaattttacctgtgttgctctcttttaaagtaatgactttgagatgcatgctttgtatcatattgaaaagtatgttttattttccttaaagttgtaatattgtgtgtgaaactgtacatattttaaatgatgtagctttggcaggttttatttggttgatatgattttatattaaaagagaaggctgctttcatatagcatagcccctgaaggtgggaatactccctgtttgtacaacgctgcttatagtttgtgattggggtgggcgaatgtcttcctctgaaattctttggaaccccccacccctgtcctcccctgaaactcccctgtgcacacccctctgttctgactgcagagatcaaggccctgaaggagcaggatcttgggcaagtgttttaggggacgctgagaacatacctgaccctgggggcgatgtggaggcaggcccacctcctcggggcaactttgcgtttccttggagggaagggaggtgggtaggagaggagcttgggaggatgaggaggagcggtcccgcctcacacattgtctatttttaccattaaccgagcgccacatgtttatgaacttcaggatagaaatttagcctccttgtgaaaacgttttgttttactgccctaagaaaatacacatctctaggcttgtctgaccagaaagccagcaaagtcttttgcatcgggtgtggcccttttgtattttatttcccatatttaaataagccttccttaaaccctagccccagtcctgagagctttgagggtagccgaaaccccttatctaataaagtctaactctgtgagaaccacagaatcttcttaagcttctcaattttctgtctcctttcaggcgccacgtcccttgtgctggcgggtcccccgttggctttcttgccgtttcttctcatctgtgtctcctgcagaggcggctcggagtcccgagtcttctagtcagttgaacaagcattcatttgtgttttcacccagattacagacacacacacaaacagacacacacacttggagctagtgagtcatgctggcagctgacattgtgactctggaacagccccggtgctctgtgggccagctcccccagcctgggggcgggaagctacatctgcagtacctctgctccgtatcttgtgggctgcgactcctggagtcggaccactgcagcgtcagtgatgttcgtaagctatggttgagcaaaggaacacacacctacacaccttgcttcttcccactagccaaacctgggacccagccatcagcctgtctctgtgggagtcgcaatggaagtagccctctattggcgtgaacatcagctctgatttatttaggaattgctccatccacagactttttttctggaagcagctagcttgctcatacttctatagcaccacagatccttcccagtaccatggctttcacttgccctcagacacccagagatccctgtctccccattgtgggtcctcttccttgtcctgccacctctgtcttccacaaggtgggccagggcttctcttgtaaccatgtcacttagggacactgcagctgggccttgtaccagttgtgaagactgggtattaagtgaaagtggtagttggtgtcttagctacgttggttttatgaccaaagtctgacagaagggctcttcccaaatcccacctgccctccctaagcctatttgcatcttcctctttgggccttatggtgttgcagtcactgtgatggtgacattcactggagaatccgtggtttcttgtgcaggatccaaacctggggtggtggttggtgtttcaaggcctatgaagagcatatgtgggc

SEQ ID NO: 6358 - DNA, 5591 bp, Homo sapiens
cccagatcgaggctgctcgggtcctttctccccccgcctccctctagcgccgcgccccctggcccccagccccagcctgcggcgggacctccggggtcgaaggttctggcccgctcgcgcccctcgccgcccccgcgcgcccccagcgctcctccagccggctcgggccgctcggctatggatcgcctgctcgccgggcgctgaaggcatccccgggatccggagcgcagcccgggaaagaaatgcacagcggtattgatgagtagatccttggattcagaggttggctgaaacgcaccatgcctgcttccatcttttgctctgtaaagttgtgaattgctcatgcctatagggaggaaggatggcacatgggattccttctcaaggcaaagttaccataacggtggatgagtacagctcaaaccccacccaggcattcacgcactacaacatcaaccagagcagattccagcctccacatgtacatatggtcgaccccatcccatatgacactccaaaaccagcgggccacacgcggtttgtctgcatctcagacacacactccagaacagatggtatccagatgccttatggggacatccttctccacacaggcgatttcaccgagctgggactgccctcagaggttaagaagtttaatgactggttaggaaacctgccatatgaatataaaatagtgattgctgggaatcatgaactgacatttgataaggaattcatggcagaccttgttaaacaggactactaccgtttcccctctgtgtccaaattgaaaccagaggactttgacaatgttcagtccctcctgacaaacagtatttacttacaagattcggaggtaacagtgaagggattcaggatatacggtgcaccttggaccccgtggtttaatggatggggctttaacctacccagaggtcagtctctgctggacaagtggaacctcatccctgagggcattgacatactcatgacacatggacctcctctaggttttcgagactgggttccaaaggagcttcaaagagtgggctgtgtggagctgttaaacacggttcagaggcgagtccggcccaagctccatgtgtttggtggaatccatgaagtaaaccctgtgagcatctccaaggcactgaggacaaaaatatgttctctgccttcaaaaacttcctagtctagaggaaactggcatagacacaattaattgatgatctgatgaattagcattgtgtgagctacaatcctggcatgaatcaagaactagagaggcacacaggaaggaaggaagatgcctctccttggtgaagacaaagaaggcatgaggaggaggcgacagggaagctcacctggtggacaacaggaaagactgcggaggagggctctgctggaagaggaaacagactggggaggtggggccagtgcataaagggccactgcaggaaggggttgtaggagaaaaggaaagacagatcagtcactgatgaccccctccaccccaggtctgcagacagagctgattccttctctaagcctcggcatcccctaccaacagtccctcctgctccttctctcccaagtcctctaaacagcttcatgcccaaaccacaaagagaacattctcaggcctaaggcaggccttcccagcacagaatgtttggagccctctgtgggagagcggctggcccccttaactgtcccccttccctccgggagccaaggcaggcactgtgcacctgcccctgaattgtgtgcggcagttgccggcctggagctgagtgacacagcaggtgcctccagcctgaagacaattccatatttcaatggagcgtcgccaccaaagcttattatctagggcaataaagtttaggattagggggattcaggatgattgtgtgattctccacaaagcttatcttctaatagaccagctgctttattaggccgcccccacccgcaccaggcccttcccaaagcatcccaagtcccaggcagccgacgggggccttgaaggcggcagtggtagacagctgggggtatcatatcaccctcagtctccatctgcgattattaaattacgggcggcttccagctgggcacaccccagctcccaccttcctcctacaaagccagcatcatcgtcaggcatctgccaaggacacgatgtggctgcctctcccctgctgatccctactgttgaactctaaaagggccaggtctgggtatttacttgctattagggctgtcactgtcacagtgtggaatgcagtggagtggaggcctggagagagggggggaccatggaaatttctgttgcaaatggggctttgctgggactgttcactataaacaaaaaaagaagatggaatcatgcaccacagaacctcaaagaagctggcatgcttaccaagctcccacatatttctcccaaaatgaaattcattaacgttgagtgttctagggaccacctccacatgctccctgatcccattgctccgttccttttctgatgggagcagagcatgggatggtgtctctccaaccccgtgtggtcagcagcactgaggctactctcgtttcctatccctccctgacagtctcctttatcctcagcccctgacagactatctgttcagagtaggaatttatcaataagtactgataagcatgctgaaaggaatatgggggactgggaatatgcctgaaacataatgaatgtttcaaagaaatgaaacgttctgaaaatggaattttcaaagattctgacaagcacacagcatctgcttgcagattttaggaaaacttagtcatagaattattcagagttcacatttcagccatggggatgttgtgtgcctgttgacagcagaggtccctgtagacgtttgttttttactgtgtctatgtgtgattcactaatgagagagtggcttagatgctcagagtaattaattgtagtattgagataatagtggctttgaaatccagctgtgcttatatgcgtgcacgctgtgcagttagatgctcccaggttcagatctgcttccatcactactaactatgtggccttgttttctgatctgcaagccatggattgtattgcttactttgcgggactgtggtaaacgttaggcatatatgaggcaagtgcaatgcccaacatttggcagatgcttaataagtgttggctattattattactactactactactattgcttttgctattgctattatgtgtgacctgtataataatcctactaatatgagtgaaggcaagaatcatggactatgcacccagcataatcaggagggtttgactgttgtgaatgaattcaagggcaggacaagcagcgacaagagttactgaagttcatctgatttgagttctgttcattcatttatttgggatccaaattctgaaccccagctctgtgctagacactgttctaggtgctgggaaaacagtcatgtgttagtctgtttttgctgccataaaggaatccctgagactgggtattttataaagaaaagaggtttatttaaatcacagttctgcaagcctaacacctggtggaagctgccaaggcttacagcttataccctctcaagcagcaccctaatctataccttgagccaagactggaattggagctgccatgatgcaggaagcagtgtcccaaggatgtgcagagcagtggggtcctgaatgtggccccccaaaccattcttttctcctaggcctctaggcctgtgatgggggggtggccttgaaaatctctgaaatgccttcaaggcctttttcccattgtcttggttattagcacttggctcccctttagccatgctaatctgtctagcaagtggttgctccacagcctgctcatatttcactcctgaaaatgttctttccttctccaccacacaaccagtttgtgaattttccaaacttttatgctctgcttcccttttaattatcaatttcccagcctcagatattcctttatagtaatgcaaatggactaacagaagcaatgaataagaaggggtcctggcccctctacaactcatcttctattgagaaagaaagaagaaaaaatgaaaataagttaaaaaaactcaaattttgataaaccctatgaagaaaataagaaatgggatagaagttagctggcatggcagggtggagtgggtgagtgacattaaggagggtgacaacagagaaactttctgataaaaaacccagtaagtaaaggtctaagtgatgtggatgaggcagccacttgaagacctgggacaaaagtgttcaggcagagaatatagcaggtacagagctttttgtataagaaggtagcaaaaaggccagtatagccagagaacagaggaggtaaggagaaagataggggatgaggcaggtgctaactcatcaacatccttgcaggccttgatgagagttaagatttcattataattgcaataagaagacagtggaaggttttttggcgggggtgggggtggtcaatgacatgattggattgatatgttggaaaagcccatctggcgactgtgttcagtaacagtgtgcttgcatgaagatccctcacagcagcagacaacacaaatgccccctcccacccatcatgaaaatttggaaagccaagccaataggaaactgaagctacaaagacccagcccctagaaagcaatataaacaagaccagaaaaagcatgtgttcaggacaagttcacattgaagtaaaaccatattgacattgattgcattccctacctgcttaggggttttgcttcacctaaactagtaccttgagaatctgtaaaagcttacaatttgagaaaagcaagagatgacacctgattatcctttgaattggcttccatgtctgtggctgttttccctaagttcctgtcccttacacacacgttacaaaactttgtctcaattctttgcttttaaaggatttgactttaacaaattcacattgggtacttgcttagtaggaaaggaaataatgactctcaccccctatgttataaaacttttaggagtattacacacaggcacatacagggcacactggtatggcttgtcattttgtgacaaattcttgtcagtttgtggtctggtggaaagcatatggaattagcaatcaagaaaggtgagatttagttctggctctgcttctaactagcaatgcaatcttggacaagagatttattctttcaagtctcagtttcatcttgtcatatggacatagagtgatacttccttttaaaagaacctgggtatcctggccaggcgcggtggctcatgcctcccagcactttgggaggccgaggcgggtggatcacaaggtcaggagatcgagaccatcctggccaacatggtgaaaccccgtctctactaaaaatacaaaaattagttgggcgtggtagtcccagctactcgggagactgaggcaggagaatttcttgaaccctggaggcggaggtagcagtgagccccgaggtcgtgccactgaactccagcctggcaacagagcgagactctgtct

SEQ ID NO: 6359 - DNA, 843 bp, Homo sapiens
tagatccagaagcagcgattggtgtgacaaaacggccacctcctaagtgggtggatggagtggatgaaattcagtatgatgttggccggattaagcagaagatgaaagaattggccagccttcatgacaagcatttaaacagacccaccctggatgacagcagcgaagaggaacatgccattgagataactacccaagagatcactcaggcatgaagaatcgagaggaaagatcccagcattttttcgacacatcagtaccactaatggatgatggagacgataacactctttaccatcggggttttacagaggaccagttagttctggtggagcagaacacactgatggtggaagagcgggaacgagagattcgccagattgtacagtccatttctgacctgaatgaaatattcagggacttaggggcgatgattgtagaacagggtacagtccttgacagaattgactataacgttgaacagtcctgtatcaaaactgaagatggtttgaaacagcttcacaaggcagaacagtatcaaaagaagaatcggaagatgcttgtgattttaatattatttgtcatcatcattgtgctcattgttgtcctcgttggcgtgaagtctcgataagtggcattgggttttcgtgtgtgccgcgcgtgtggatctcccgggtgtgaggggcttggcctgcgccccgccagctgcccgcagaggtgcagcctcgaggaatctgagggcgtcggggcagcgaacctttgcatccacggactcctccttccctagtcctgctcaagcggtccggggaatgggtttttgtttttccttcattgttgagaatt

SEQ ID NO: 6360 - DNA, 2775 bp, Homo sapiens
gtgacagaagtagtaggaagtgagctgttcagaggcaggagggtctattctttgccaaaggggggaccagaattcccccatgcgagctgtttgaggactgggatgccgagaacgcgagcgatccgagcagggtttgtctgggcaccgtcggggtaggatccggaacgcattcggaaggctttttgcaagcatttacttggaaggagaacttgggatctttctgggaaccccccgccccggctggattggccgagcaagcctggaaaatgcaattgaaacacagagcaccagctctgaggaactcgtcccaagccccccatctccacttcctccccctcgagtgtacaaaccctgcttcgtctgccaggacaaatcatcagggtaccactatggggtcagcgcctgtgagggatgtaagggctttttccgcagaagtattcagaagaatatgatttacacttgtcaccgagataagaactgtgttattaataaagtcaccaggaatcgatgccaatactgtcgactccagaagtgctttgaagtgggaatgtccaaagaatctgtcaggaatgacaggaacaagaaaaagaaggagacttcgaagcaagaatgcacagagagctatgaaatgacagctgagttggacgatctcacagagaagatccgaaaagctcaccaggaaactttcccttcactctgccagctgggtaaatacaccacgaattccagtgctgaccatcgagtccgactggacctgggcctctgggacaaattcagtgaactggccaccaagtgcattattaagatcgtggagtttgctaaacgtctgcctggtttcactggcttgaccatcgcagaccaaattaccctgctgaaggccgcctgcctggacatcctgattcttagaatttgcaccaggtataccccagaacaagacaccatgactttctcagacggccttaccctaaatcgaactcagatgcacaatgctggatttggtcctctgactgaccttgtgttcacctttgccaaccagctcctgcctttggaaatggatgacacagaaacaggccttctcagtgccatctgcttaatctgtggagaccgccaggaccttgaggaaccgacaaaagtagataagctacaagaaccattgctggaagcactaaaaatttatatcagaaaaagacgacccagcaagcctcacatgtttccaaagatcttaatgaaaatcacagatctccgtagcatcagtgctaaaggtgcagagcgtgtaattaccttgaaaatggaaattcctggatcaatgccacctctcattcaagaaatgctggagaattctgaaggacatgaacccttgaccccaagttcaagtgggaacacagcagagcacagtcctagcatctcacccagctcagtggaaaacagtggggtcagtcagtcaccactcgtgcaataagacattttctagctacttcaaacattccccagtaccttcagttccaggatttaaaatgcaagaaaaaacatttttactgctgcttagtttttggactgaaaagatattaaaactcaagaaggaccaagaagttttcatatgtatcaatatatatactcctcactgtgtaacttacctagaaatacaaacttttccaattttaaaaaatcagccatttcatgcaaccagaaactagttaaaagcttctattttcctctttgaacactcaagattgcatggcaaagacccagtcaaaatgatttacccctggttaagtttctgaagactttgtacatacagaagtatggctctgttctttctatactgtatgtttggtgctttccttttgtcttgcatactcaaaataaccatgacaccaaggttatgaaatagactactgtacacgtctacctaggttcaaaaagataactgtcttgctttcatggaatagtcaagacatcaaggtaaggaaacaggactattgacaggactattgtacagtatgacaagataaggctgaagatattctactttagttagtatggaagcttgtctttgctctttctgatgctctcaaactgcatcttttatttcatgttgcccagtaaaagtatacaaattccctgcactagcagaagagaattctgtatcagtgtaactgccagttcagttaatcaaatgtcatttgttcaattgttaatgtcactttaaattaaaagtggtttattacttgtttaatgacataactacacagttagttaaaaaaaatttttttacagtaatgatagcctccaaggcagaaacacttttcagtgttaagtttttgtttacttgttcacaagccattagggaaatttcatgggataattagcaggctggtctaccacctggaccatgtaactctagtgtccttcctgattcatgcctgatattgggatttttttttccagccttcttgatgccaaggggctaattaatattaacaactcccaaagaaacaggcatagaatctgcctcctttgaccttgttcaatcactatgaagcagagtgaaagctgtggtagagtggttaacagatacaagtgtcagtttcttagttctcatttaagcactagtggaattttttttttttgatatattagcaagtctgtgatgtactttcactggctctgtttgtacattgagattgtttgtttaacaatgctttctatgttcatatactgtttacctttttccatggagtctcctggcaaagaataaaatatatttattttaaa

SEQ ID NO: 6361 - DNA, 3195 bp, Homo sapiens
atgaagccaggagcgcctcaaagtccagcctgctgttgaccaacactaacagatgagcaaggagctggcagcaatggggcctggagcttcaggggacggggtcaggactgagacagctccacacatagcactggactccagagttggtctgcacgcctacgacatcagcgtggtggtcatctactttgtcttcgtcattgctgtggggatctggtcgtccatccgtgcaagtcgagggaccattggcggctatttcctggccgggaggtccatgagctggtggccaattggagcatctctgatgtccagcaatgtgggcagtggcttgttcatcggcctggctgggacaggggctgccggaggccttgccgtaggtggcttcgagtggaacgcaacctggctgctcctggcccttggctgggtcttcgtccctgtgtacatcgcagcaggtgtggtcacaatgccgcagtatctgaagaagcgatttgggggccagaggatccaggtgtacatgtctgtcctgtctctcatcctctacatcttcaccaagatctcgactgacatcttctctggagccctcttcatccagatggcattgggctggaacctgtacctctccacagggatcctgctggtggtgactgccgtctacaccattgcaggtggcctcatggccgtgatctacacagatgctctgcagacggtgatcatggtagggggagccctggtcctcatgtttctgggctttcaggacgtgggctggtacccaggcctggagcagcggtacaggcaggccatccctaatgtcacagtccccaacaccacctgtcacctcccacggcccgatgctttccacattcttcgggaccctgtgagcggggacatcccttggccaggtctcattttcgggctcacagtgctggccacctggtgttggtgcacagaccaggtcattgtgcagcggtctctctcggccaagagtctgtctcatgccaagggaggctccgtgctggggggctacctgaagatcctccccatgttcttcatcgtcatgcctggcatgatcagccgggccctgttcccagacgaggtgggctgcgtggaccctgatgtctgccaaagaatctgtggggcccgagtgggatgttccaacattgcctaccctaagttggtcatggccctcatgcctgttggtctgcgggggctgatgattgccgtgatcatggccgctctcatgagctcactcacctccatcttcaacagcagcagcaccctgttcaccattgatgtgtggcagcgcttccgcaggaagtcaacagagcaggagctgatggtggtgggcagagtgtttgtggtgttcctggttgtcatcagcatcctctggatccccatcatccaaagctccaacagtgggcagctcttcgactacatccaggctgtcaccagttacctggccccacccatcaccgctctcttcctgctggccatcttctgcaagagggtcacagagcccggagctttctggggcctcgtgtttggcctgggagtggggcttctgcgtatgatcctggagttctcatacccagcgccagcctgtggggaggtggaccggaggccagcagtgctgaaggacttccactacctgtactttgcaatcctcctctgcgggctcactgccatcgtcattgtcattgtcagcctctgtacaactcccatccctgaggaacagctcacacgcctcacatggtggactcggaactgccccctctctgagctggagaaggaggcccacgagagcacaccggagatatccgagaggccagccggggagtgccctgcaggaggtggagcggcagagaactcgagcctgggccaggagcagcctgaagccccaagcaggtcctggggaaagttgctctggagctggttctgtgggctctctggaacaccggagcaggccctgagcccagcagagaaggctgcgctagaacagaagctgacaagcattgaggaggagccactctggagacatgtctgcaacatcaatgctgtccttttgctggccatcaacatcttcctctggggctattttgcgtgattccacagacctggcttcagtgtagacagattaaacaaagcccaagcctgtcagccacagaaacaggctctcctcttactttgctgtctaaactggagatcacagaagtcaagactgcaagctcccctgaagagaatccaactcaacctgcacacttgacaagtggagaaacagaagcccagagagagcactgggtttgttcaggaccacccagaaggtgtcacacggggtttccccactctttctgatatattgccttacagacctacctcaaacacactgtttccaccctcttcttgaatgtattcagtagcctttactgaatgtgtgtcttgagagtagaaaaatggaggatacaagaaaaggagcaggaagaaatttgcaaaaatccaagagcacctttgctcccccttatcctccttcctcttcccctttctagttcccctacctctctatctttctattctcaccaataatctctttgttgcatgaatttacccaggagagtcctatatttccattggtggctccacagtggtggctgtcagacccgaaggggtggggagccaagggtggactttaagcatggtgacagatggtattttgggcagaaagctcttagacaatggactatccaaagcactatttaaattctgcctcttcctactctctaacccaaatatgcacaaactctctatggccttgagaagcagttggagagacatgacttgttaaaacctcaaggaatcaagacatgttactctgtatttaagggtaagccccacagcgggcagcacaaacagcctgggagccactgtgcctgtgcttctctgtccttctccctttgcttgccatgaatccgcataccttggaatacactgtgaccccagttaagtgtcccttcgccaggaagctgccgcaacgtccagacctgggtcaagttcccactcctgctcccatagccttgacctgcttctgtcacagcactgatcacactgagatggaagactccagggggcaaggaccaagggccatatcccaagtgactttgtacccagaaaataacagctgttcaataaatgtgtattgagttaatt

SEQ ID NO: 6362 - DNA, 5326 bp, Homo sapiens
atggcggtgccggctcggacctgcggcgcctctcggcccggcccagcgcggactgcgcgcccctggcccggctgcggcccccaccctggccccggcacccggcgcccgacgtccgggcccccgcgcccgctgtggctgctgctgccgcttctaccgctgctcgccgcccccggcgcctctgcctacagcttcccccagcagcacacgatgcagcactgggcccggcgtctggagcaggaggtcgacggcgtgatgcggatttttggaggcgtccagcagctccgtgagatttacaaggacaaccggaacctgttcgaggtacaggagaatgagcctcagaagttggtggagaaggtggcaggggacattgagagccttctggacaggaaggtgcaggccctgaagagactggctgatgctgcagagaacttccagaaagcacaccgctggcaggacaacatcaaggaggaagacatcgtgtactatgacgccaaggctgacgctgagctggacgaccctgagagtgaggatgtggaaagggggtctaaggccagcaccctaaggctggacttcatcgaggacccaaacttcaagaacaaggtcaactattcatacgcggctgtacagatccctacggacatctacaaaggctccactgtcatcctcaatgagctcaactggacagaggccctggagaatgtgttcatggaaaaccgcagacaagaccccacactgctgtggcaggtcttcggcagcgccacaggagtcactcgctactacccggccaccccgtggcgagcccccaagaagatcgacctgtacgatgtccgaaggagaccctggtatatccagggggcctcgtcacccaaagacatggtcatcatcgtggatgtgagtggcagtgtgagcggcctgaccctgaagctgatgaagacatctgtctgcgagatgctggacacgctgtctgatgatgactatgtgaatgtggcctcgttcaacgagaaggcacagcctgtgtcatgcttcacacacctggtgcaggccaatgtgcgcaacaagaaggtgttcaaggaagctgtgcagggcatggtggccaagggcaccacaggctacaaggccggctttgagtatgcctttgaccagctgcagaactccaacatcactcgggccaactgcaacaagatgatcatgatgttcacggatggtggtgaggaccgcgtgcaggacgtctttgagaagtacaattggccaaaccggacggtgcgcgtgtttactttctccgtggggcagcataactatgacgtcacaccgctgcagtggatggcctgtgccaacaaaggctactattttgagatcccttccatcggagccatccgcatcaacacacaggaatatctagatgtgttgggcaggcccatggtgctggcaggcaaggaggccaagcaggtgcagtggaccaacgtgtatgaggatgcactgggactggggttggtggtaacagggaccctccctgttttcaacctgacacaggatggccctggggaaaagaagaaccagctgatcctgggcgtgatgggcattgacgtggctctgaatgacatcaagaggctgacccccaactacacgcttggagccaacggctatgtgtttgccattgacctgaacggctacgtgttgctgcaccccaatctcaagccccagaccaccaacttccgggagcctgtgactctggacttcctggatgcggagctagaggatgagaacaaggaagagatccgtcggagcatgattgatggcaacaagggccacaagcagatcagaacgttggtcaagtccctggatgagaggtacatagatgaggtgacacggaactacacctgggtgcctataaggagcactaactacagcctggggctggtgctcccaccctacagcaccttctacctccaagccaatctcagtgaccagatcctgcaggtcaagttgccaatcagcaaactgaaggattttgagttcctgctccccagcagctttgagtctgaaggacacgttttcattgctcccagagagtactgcaaggacctgaatgcctcagacaacaacaccgagttcctgaaaaactttattgagctcatggagaaagtgactccagactccaagcagtgcaacaacttccttctgcacaacctgatcttggacacgggcatcacgcagcagctggtagagcgtgtgtggagggaccaggatctcaacacgtacagcctactggccgtgttcgctgccacagacggtggcatcacccgagtcttccccaacaaggcagctgaggactggacagagaaccctgagcccttcaatgccagcttctaccgccgcagcctggataaccacggttatgtcttcaagcccccacaccaggatgccctgttaaggccgctggagctggagaatgacactgtgggcatcctcgtcagcacagctgtggagctcagcctaggcaggcgcacactgaggccagcagtggtgggcgtcaagctggacctagaggcttgggctgagaagttcaaggtgctagccagcaaccgtacccaccaagaccagcctcagaagcagtgcggccccaacagccactgtgagatggactgcgaggttaacaatgaggacttactctgtgtcctcattgatgatggaggattcctggtgctgtcaaaccagaaccatcagtgggaccaggtgggcaggttcttcagtgaggtggatgccaacctgatgctggcactctacaataactccttctacacccgcaaggagtcctatgactatcaggcagcctgtgcccctcagccccctggcaacctgggtgctgcaccccggggtgtctttgtgcccaccgttgcagatttccttaacctggcctggtggacctctgctgccgcctggtccctgttccagcagcttctctacggcctcatctaccacagctggttccaagcagaccccgcggaggccgaggggagccccgagacgcgcgagagcagctgcgtcatgaaacagacccagtactacttcggctcggtaaacgcctcctacaacgccatcatcgactgcggaaactgctccaggctgttccacgcgcagagactgaccaacaccaatcttctctttgtggtggccgagaagccgctgtgcagccagtgcgaggctggccggctgctgcagaaggagacgcactgcccagcggacggcccggagcagtgtgagctagtgcagagaccgcgataccggagaggcccgcacatctgcttcgactacaacgcgacagaagatacctcagactgtggccgcggggcctccttcccgccgtcgctgggcgtcctggtctccctgcaactgctgctcctcctgggcctgccgccccggccgcagcctcaagtcctcgtccacgcctctcgccgcctctgagcaccctgccccaccccacctccactcccacctcacccggcctcttcgcctttcccaccctcctgccccacactccccgccttagagcctcgtccctccctcactgaaggacctgagctggccaggccctgagagtctggtctgcgccttgggatggggagtcccaaagcgggacgccgcaggtgtttggcacccaaatcacatctcacctccgaactgttcaagtgtccccagacccttcttgcctgctgggctccccccagtgggatgggacagggaggccacacgcactggtgccaaaaccaggcctctgctgccgcccttcctggaggctgcctatgttgggggggaccctgcctcagctgacccggcctctctgccccacccaagcccaaacttggtttctgtgagaatagtggaggaaggtgagatggccagtttgaagcctgtgcctcccagcttaaatcctagcaggagagaggctctggggcagcccccatgggctcctgcccctttcaggcctacagccacatccccaagcccaccaggtgtcaggatagtcacagtgataccagttcagacactaccccatatacacctggaacattgaggatggaaactggactcacattcgacataccccactgggcacacgcacaaacacacacactatggggtggggtgggtgtaggggcttacaaagccttacacagggcgaggggttggtgggagggttggcacctgcacactccatctcctgctcaccacctgcctctaatctgagctgcagcctggctggtcctcccatttctaaagctgaatgtcaaacagtgccaaatgctggggcagggggtgaagaaccctctgtcccacccctagccaccagtgtcctccaagtgccccctcacctctccaggtgctcattgtaaccatttctcactagtgtcaggcccccagtgggaccacatgccactgcctgcacctttcggcagaggaacccccaccagacatcaccctttgccttagcaggggtgactttgtctctcctggctgggccatccttccgccaatctggcccttacacactcaggcctgtgcccactccctatctccttcccacccctacacacacactccctgcttgcaggaggccaaactgtccctcccttgctgaacacacacacacacacacacacacaggtggggactgggcacagctcttcacaccattcattctggtcatttcccccaaaggcatcccagcctgggggccagtggggaactgagggcaaggggatatagtgatggggctcagatggactgggaggagggggagggtgatgcattaattaatggcttcgttaattaatgtcatgttgcttgtcgctttctcagtgtgtgtgtgtggtccatgcccactgctggtgccagggtgggtgtccatgtgcacccggcctggatgccagctgtgtccttcgggggcgtgcgtgtaactgtagtgtagtcaggtgctcaatggagaatataaacatatacagaaaaatatatattttaagtttaaaaaacagaaaaacagacaaaacaatccccatcaggtagctgtctaacccccagctgggtctaatccttctcattacccacccgacctggctgcccctcaccttgggctgggggactggggggccatttccttttctctgccctttttttgttgttctattttgtacagacaagttggaaaaacaacagcgacaaaaaagtcaagaaactttgtaaaatatcgtgtgtgtgattccttgtaaaatattttcaaatggtttattacagaagatcagttattaaataatgttcatattttcacttc

SEQ ID NO: 6363 - DNA, 1188 bp, Homo sapiens; identical to SEQ ID NO: 995

SEQ ID NO: 6364 - DNA, 467 bp, Homo sapiens
gaggtagcaacagcgagcgtgccggtcgctagtcgcgggtccccgagtgagcacgccagggagcaggagaccaaacgacgggggtcggagtcagagtcgcagtgggagtccccggaccggagcacgagcctgagcgggagagcgccgctcgcacgcccgtcgccacccgcgtacccggcgcagccagagccaccagcgcagcgctgccatggagcccagcagcaaggtttatttatggaagattggacctgttcatacatctgtggggcagccctccatctcccagctatataaagtctctaaccacagtgttgcattgtggggttaccatgtggtctgacacttccttgcatgaactaccctcactccagccctggacagtccagggcctagcaggcagtgtgtggggcctaccaggtcctggcatccaagctgtgtccaataaagttcttagatgtgactggaaa

SEQ ID NO: 6365 - DNA, 713 bp, Homo sapiens
cccttctgagcaatggagcttaccatctttatcctgagactggccatttacatcctgacatttcccttgtacctgctgaactttctgggcttgtggagctggatatgcaaaaaatggttcccctacttcttggtgaggttcactgtgatatacaacgaacagatggcaagcaagaagcgggagctcttcagtaacctgcaggagtttgcgggcccctccgggaaactctccctgctggaagtgggctgtggcacgggggccaacttcaagttctacccacctgggtgcagagtgctgagaccgggaggggctttctatttcatggagcatgtggcagctgagtgttcgacttggaattacttctggcaacaagtcctggatcctgcctggcaccttctgtttgatgggtgcaacctgaccagagagagctggaaggccctggagcgggccagcttctctaagctgaagctgcagcacatccaggccccactgtcctgggagttggtgcgccctcatatctatggatatgctgtgaaatagtgtgagctggcagttaagagctgaatggctcaaagaatttaaagcttcagttttacatttaaaatgctaagtgggagaagagaaaccttttttttggggggcggtttttttggtttgttgttggttttttttttttttttggcgggaagaaagagttttgctcttgttgccca

SEQ ID NO: 6366 - DNA, 1025 bp, Homo sapiens
cagatctctgggtgctgggcggtcatggcgctactagatgtatgcggagccccccgagggcagcggccggaatcggctctcccggttgcgggaagcgggcgtcgctcggacccaggacactacagtttctctatgcgatctccagagctcgctttaccccggggaatgaagcccacagaattcttccagtccctgggtggggacggagaaaggaacgttcagattgagatggcccatggcaccaccacgctcgccttcaagttccagcatggagtgattgcagcagtggattctcgggcctcagctgggtcctacattaactgtcagtactgggagcgcctgctggccaaggaatgcaggctgtactatctgcgaaatggagaacgtatttcagtgtcggcagcctccaagctgctgtccaacatgatgtgccagtaccggggcatgggcctctctatgggcagtatgatctgtggctgggataagaagggtcctggactctactacgtggatgaacatgggactcggctctcaggaaatatgttctccacgggtagtgggaacacttatgcctacggggtcatggacagtggctatcggcctaatcttagccctgaagaggcctatgaccttggccgcagggctattgcttatgccactcacagagacagctattctggaggcgttgtcaatatgtaccacatgaaggaagatggttgggtgaaagtagaaagtacagatgtcagtgacctgctgcaccagtaccgggaagccaatcaataatggtggtggtggcagctgggcaggtctcctctgggaggtcttggccgactcagggacctaagccacgttaagtccaaggagaagaagaggcctagcctgagccaaagagagagtacgggctcagcagccagaggaggccggtgaagtgcatcttctgcgtgttctctatttgaacaagcatttcccccagggaagtttctgggtgccccactaagtagaataaagaaaaacggttataaata

SEQ ID NO: 6367 - DNA, 3437 bp, Homo sapiens
gcttccggccgcggccctggcgcgtggtctgcgcgcgcccggccgtgcgtgcggatgcggggaggctgcgtgtgtgcgcagggagagaacgccggccaccttcccgcttccgagctgggtgcgcgccgagcacaggagattgcctgcgtttaggaggtggctgcgttgtgggaaaagctatcaaggaagaaattgccaaaccatgtctttttttctgttttcagagtagttcacaacagatctgagtgttttaattaagcatggaatacagaaaacaacaaaaaacttaagctttaatttcatctggaattccacagttttcttagctccctggacccggttgacctgttggctcttcccgctggctgctctatcacgtggtgctctccgactactcaccccgagtgtaaagtcttgctgctctgttgcccaggctggagtacagtggcaggatctcagctcactgcaatctccgtctctcaggtttaagcagttctcctgcctcagcctcccaagtaggtgggactacagaaccttcggctcgcgtgcttctgagctgctgtggatggcctcggctctctggactgtccttccgagtaggatgtcactgagatccctcaaatggagcctcctgctgctgtcactcctgagtttctttgtgatgtggtacctcagccttccccactacaatgtgatagaacgcgtgaactggatgtacttctatgagtatgagccgatttacagacaagactttcacttcacacttcgagagcattcaaactgctctcatcaaaatccatttctggtcattctggtgacctcccacccttcagatgtgaaagccaggcaggccattagagttacttggggtgaaaaaaagtcttggtggggatatgaggttcttacatttttcttattaggccaagaggctgaaaaggaagacaaaatgttggcattgtccttagaggatgaacaccttctttatggtgacataatccgacaagattttttagacacatataataacctgaccttgaaaaccattatggcattcaggtgggtaactgagttttgccccaatgccaagtacgtaatgaagacagacactgatgttttcatcaatactggcaatttagtgaagtatcttttaaacctaaaccactcagagaagtttttcacaggttatcctctaattgataattattcctatagaggattttaccaaaaaacccatatttcttaccaggagtatcctttcaaggtgttccctccatactgcagtgggttgggttatataatgtccagagatttggtgccaaggatctatgaaatgatgggtcacgtaaaacccatcaagtttgaagatgtttatgtcgggatctgtttgaatttattaaaagtgaacattcatattccagaagacacaaatcttttctttctatatagaatccatttggatgtctgtcaactgagacgtgtgattgcagcccatggcttttcttccaaggagatcatcactttttggcaggtcatgctaaggaacaccacatgccattattaacttcacattctacaaaaagcctagaaggacaggatactttgtggaaagtgttaaataaagtaggtactgtggaaaattcatggggaggtcagtgtgctggcttacactgaactgaaactcatgaaaaacccagactggagactggagggttacacttgtgatttattagtcaggcccttcaaagatgatatgtggaggaattaaatataaaggaattggaggtttttgctaaagaaattaataggaccaaacaatttggacatgtcattctgtagactagaatttcttaaaagggtgttactgagttataagctcactaggctgtaaaaacaaaacaatgtagagttttatttattgaacaatgtagtcacttgaaggttttgtgtatatcttatgtggattaccaatttaaaaatatatgtagttctgtgtcaaaaaacttcttcactgaagttatactgaacaaaattttacctgtttttggtcatttataaagtacttcaagatgttgcagtatttcacagttattattatttaaaattacttcaactttgtgtttttaaatgttttgacgatttcaatacaagataaaaaggatagtgaatcattctttacatgcaaacattttccagttacttaactgatcagtttattattgatacatcactccattaatgtaaagtcataggtcattattgcatatcagtaatctcttggactttgttaaatattttactgtggtaatatagagaagaattaaagcaagaaaatctgaagtattgtcttgtttttaaaaaatacagttcctagtgtttttagaagtcacttaatttgtctcatttttccacctggaaattaggaataatgtagaatgcaaggcagtaatttccttttggaaaggactctgaaggcagaaaagaagggagagaacctcatgggcagaatattataaaaagagtgtcatattccagcatttgaattggaaagagaagagtgaagatccaagttgcattattaatctgccctgtgttttttccttttaacaatcagtttgagctgctgctgttatgagtttctcatcaagatgaaagccctaatatgtaaagtcaaatccgatttaaattttgtgcttttatagaaagaaatttcttcatagacgtggtgatatatcatttgttggacctgctaatagtaggtcaaaggggagcactccttgccccctgttcctgggtttatgcagttttctttttagagtttatatagggcaagtggttctttttctctgaattacaggatggaaaaaggtcatatcctttgtcaggaaatataaacttgaaagtatgtagtcagctcttgtaatactcatatttatgattgtcctatatgaaaaacaacttcagttaaaactataatgtgtgattctgtataacaaggtgatgtctgtttcccagggctcagacctaatccagttataataaaatcaattaaatgaaatattctatagaatcgatctatgcccttgttaatctccatccatataggagtcacgttctttaagacagatggtggtagttatttttgtggcatggttagatttgactggttttgcagaagattacagttatgtactgcataatgacatatacaatagtggtcccataaaattataatggagcagaaaatctattgcctcatgatgttttagccgttttaatgtcatagcctagtgcattactcacgtgtctgtggagatgctggtgtaaacaaacctactacactgccagttgtataaaagtacagcacattcagttatgtacagtatgtaatactgataatgacaataaatgacaccggtttgtgtatttactttttataa

SEQ ID NO: 6368 - DNA, 2597 bp, Homo sapiens
ataggctcagacacaaggagaggcttggagagagcagacgccttctggattcaagaagacgaggctcacctgttactcggcctcccagaaagatggataggagaaatgactacggatatagggtgcctctatttcagggccctctgcctcccccggggagcctggggcttcccttccctccagatatacagactgagaccacagaagaggacagtgtcctgctgatgcataccctgttggcggcaaccaaggactccctggccatggacccaccagttgtcaaccggcctaagaaaagcaagaccaagaaggcccctataaagactattactaaggctgcacctgctgcccctccagtcccagctgccaatgagattgccaccaacaagcccaaaataacttggcaggctttaaacctgccagtcattacccagatcagccaggctttacctaccactgaggtaaccaatactcaggcttcttcagtcactgctcagcctaagaaagccaacaagatgaagagagttactgccaaggcagcccaaggctcccaatccccaactggccatgagggtggcactatacagctgaagtcacccttgcaggtcctaaagctaccagtcatctcacagaatattcacgctccaattgccaatgagtcagccagttcccaagccttgataacctctatcaagcctaagaaagcttccaaggctaagaaggctgcaaataaggccatagctagtgccaccgaggtctcgctggctgcaactgccacccatacagctaccacccaaggccaaattaccaatgagacagccagtatccacaccacagcagcctccatccgaaccaagaaagcctccaaagccaggaagacaattgctaaggtcataaatactgacactgagcatatagaggctctaaatgtcactgacgcagctaccaggcagattgaggcctcagtagtggctatcaggcccaaaaaatccaagggcaagaaggctgccagcaggggcccaaattctgtctctgagatctctgaggccccacttgccactcagatagtcacaaaccaagccctggcagccaccctgcgggtcaagagagggtctagggctcggaaggctgccactaaggctcgggcaactgaaagccagactccaaatgctgaccaaggggcccaggccaagatagcctctgctcagaccaacgtaagtgcccttgagactcaggttgctgctgctgtccaggccctggcagatgactatctggctcagttgagcctggagcccacaaccaggacccggggcaaaagaaaccgaaagtccaagcatctgaatggggatgagagaagtggcagtaattacaggcggatcccatggggccggaggcctgcaccaccgcgagatgtggccattttacaagaaagggctaataagttggtgaaatacctgttggttaaggaccagacaaagatccccatcaaacgctcagacatgctgagggatgtcatccaagaatatgatgaatatttcccagaaatcattgaacgagcaagctacactctggagaagatgtttcgagtcaatctgaaagaaattgataagcaaagtagcttgtatattctcatcagcactcaggaatcctctgcaggcatactgggaacgaccaaggacacacccaagctgggtctcctcatggtgattctgagtgtcatttttatgaatggcaacaaggccagtgaggctgtcatctgggaggtgctgcgcaagttggggctgcgccctggggtgaggcattcactctttggggaagtgaggaagctcatcacagacgagtttgtgaagcagaagtacctggagtacaagagggtccctaacagcagaccacctgaatatgagttcttctggggcttgcgctcctaccacgagactagcaagatgaaagtcctcaagtttgcatgcagggtgcagaagaaagaccccaaggactgggctgtgcagtaccgcgaggcagtggagatggaagtccaagctgcagctgtggctgtggctgaggctgaagccagggctgagtggttccaacaccagcactggctttactggcgaacccagcaccagcacgggcttcagtagtggacccagttctattgttggcttcagcggtggaccaagcactggtgttggcttctgcagtggaccaagcaccagtggcttcagcggtggaccgagcacaggagctggcttcggcggtggaccaaacactggtgctggctttggtggtggaccgagcaccagtgctggctttggcagtggagccgccagtcttggtgcctgtggcttctcgtatggctagtgaggtttcagatttattccccatgtttacagataccgctaataaattgcagtagtccttcccatggagccaaagtacatccttggaatctttgtccacacagcagtcaaggcagttatggccaatcagctgagggtgtcatgtgatggaaaaatctgtttgctgttcctgctttattgtttgctttctgtgtgctgtcatattttggtatcagagttacattaaatttgcaaaatgaa

SEQ ID NO: 6369 - DNA, 543 bp, Homo sapiens
tcggacagctcggggtcagtcgacggagcacaccgggcgcccgaatccgccgggtcccactcacgcccgccggccgccggtgctgtaaactgcaaaccataatcctgtcttaatactgcaaacaaatcatagtggaactaaggggaacttaatttactgtttccaggttaactaaggtctcagctgtaaaccaaaagtgagaggagacattaagattttcattcttaccgggttgtcttcttcctgaagagcaatggagccgcttttacttggaagaggactaatcgtatatctaatgttcctcctgttaaaattctcaaaagcaattgaaataccatcttcagttcaacaggttccaacaatcataaaacagtcaaaagtccaagttgcctttcccttcgatgagtattttcaaattgaatgtgaagctaaaggaaatccagaaccaacattttcgtggactaaggatggcaaccctttttatttcactgaccatcggataattccatcgaacaattcaggaacattcaggatcccaaacga

SEQ ID NO: 6370 - DNA, 2567 bp, Homo sapiens
ctcctggcctcaagcgaaccttacactttggcctcccaaagtgctgggattataggtgcatgccgctgcacctggcacttctgagcagtgcttggaagccgcctcctgatgggggctgagggtcagagtggccagctgaatgctgggccatcagggtgaggggcgtcttctcctcgtccattgcctgttctcccagggcaggtggaaggggaaggccctgcattggggtggcgtgaaacaagatgagatggtaagatctgctttcactttaaaggaacatttctggttgttgcttggaaagaagtgtcaggggcaagaatgctgcaggagggctggcctggaggacagggtgggactgcgggctggctgcacgggggcaggagcctgcgcttgcgtcagaggttcctgagagactcggtctctggggcagaggcctgagcaaggggacctcgctggggtgtctctgtcttagccacgctcggtgtttctgggtcctgtgacccacgtgtgagcagcctgtggtgctggtggcacagggaaggaaaccgaggcagggagcctgtgggggctgcttggcaggggacaggcagctcctgtgcccactgctgtcccacacctgcatggaaacagaaaccccgccacggagccccctcccatctccacagggcctctagagcgccatgtgcaaggacttcatgggcggggtggggtggggtcaggagcctgctgtgggctggccaggccctggccctccctgtcgcaccctgcgctgcctccatgcacctctcagggctgtcatggcttttcctgtggcttctgacaggtagagtcagcgatgacggcttcatagccattaagctcacagcactggggagaccccagtttctggtaagtgctagaaccttccacctgcagagtctggtgctgtgcgagatctcagggcagctgtgggcatccaccaaaaacacaggtgcccatgccttagaggcctgagctggccacaggggctgtgtgggggactggggtgggcaggggcgtgtgcagatggcattcaggcctgcgtttgcagctgcagttctcagaggtgctggccaagtggaggtgcttctttcaccaaatggctgtggagcaagggcaggcgggcctggctgccatggacaccaagctggaggtggcggtgctgcaggaaagtgtcgcaaagttgggcatcgcatccagggctgagattgaggactggttcacggcagagaccctgggagtgtctggcaccatggacctgctggactggagcagcctcatcgacagcaggaccaagctgtccaagcacttggtagtccccaacgcacagacaggacagctggagcccctgctgtcccggttcactgaggaggaggagctacagatgaccaggatgctacagcggatggatgtcctggccaagttgctcccactctcccaccccctgcgcctctcagaaagccacagagatgggcgtgcggctgatggtggatgccgagcagacctacttccagccggccatcagccgcctgacgctggagatgcagcggaagttcaatgtggagaagccgctcatcttcaacacataccagtgctacctcaaggatgcctatgacaatgtgaccctggacgtggagctggctcgccgtgagggctggtgttttggggccaagctggtgcggggcgcatacctggcccaggagcgagcccgtgcggcagagatcggctatgaggaccccatcaaccccacgtacgaggccaccaacgccatgtaccacaggtgcctggactacgtgttggaggagctgaagcacaacgccaaggccaaggtgatggtggcctcccacaatgaggacacagtgcgctttgcactgcgcaggatggaggagctgggcctgcatcctgctgaccaccgggtgtactttggacagctgctaggcatgtgtgaccagatcagcttcccgctgggccaggccggctaccccgtgtacaagtacgtgccctatggccccgtgatggaggtgctgccctacttgtcccgccgtgccctggagaacagcagcctcatgaagggcacccatcgggagcggcagctgctgtggctggagctcttgaggcggctccgaactggcaacctcttccatcgccctgcctagcacccgccagcacacccttagcctccagcaccccccgcccccgcccaggccatcaccacagctgcagccaaccccatcctcacacagattcaccttttttcaccccacacttgcagagctgctggaggtgaggtcaggtgcctcccagccctgcccagagtatgggcactcaggtgtgggccgaacctgatacctgcctgggacagccactggaaacttttgggaactctcctcgaatgtgtgggcccaaggcccccacctctgtgacccccatgtccttggacctagaggattgtccaccttctgccaaggccagcccacacagcccgagccccttggggagcagtggccgggctggggaggcctgcctggtcaataaaccactgttcctgc

SEQ ID NO: 6371 - DNA, 910 bp, Homo sapiens
gtttcacacagaagaaaactgaggttggcactcatcatgagcccctgttctcattctgcaaatggtgaagctctctattgtcctgaccccacagttcctgtcccatgaccagggccagctcaccaaggagctgcagcagcatgtaaagtcagtgacatgcccatgcgagtacctgaggaagtgaccttgaggaaccctgggagctcaggaaggaaggagcgcccagaagcagggacagggagctggttggggaggaccagaaatcaggttatcaatactctggctgaccatcatcatcgtgggactgactttggtggaagtccttggttacatgtcattattgcgtttccgacaagttataaagttgtcattaccctctggatagtttacctttgggtgtctctcctgaagactatcttctggtctcgaaatggacatgatggatccacggatgtacagcagagagcctggaggtccaaccgccgtagacaggaagggctgaggtccatttgtatgcacacaaagaaaagagtttcttcctttcgaggaaataaaattggcctgaaagacgtcattactctacggagacatgtggaaacaaaagttagagctaaaatccgtaagaggaaggtgacaacgaaaatcaaccatcatgacaaaatcaatggaaagaggaagaccgccagaaaacagaaaatgtttcaacgtgcgcaagagttgcggcggcgagcagaggactaccacaaatgcaaaatccccccttctgcaagaaaggctctttgcaactgggtcagaatggcggcagcggagcatcgtcattcttcaggattgccctactggccctacctcacagctgaaactttaaaaaacaggatgggccaccagccacctcctccaactcaacaacatt

SEQ ID NO: 6372 - DNA, 590 bp, Homo sapiens
aacctccaccgagttttcaggattctcctcctctcctgcctgcctccgaggtcccccttctccaagttttgacagtttcaactgaaaaaatgcagcgcctctctcgatttttagatcgagcctgcgtgctgccgaagcagggcgccgagtccatgcgaactgccatctgatccgctcttatcaatgaagcagccgatcatggcggatggcccccggtgcaagaggcgcaaacaagccaatcccaggaggaaaaacgtggtgaactatgacaatgtagtggacacaggttctgaaacagatgaggaagacaagcttcatattgctgaggatgacggtattgccaaccctctggaccaggagacgagtccagctagtgtgcccaaccatgagtcctccccacacgtgagccaagctctgttgccaagagaggaagaggaagatgaaataagggagggtggagtggaacacccctggcacaacaacgagattctacaagcctctgtagatggtccagaagaaatgaaggaagactatgacactatggggccagaagccacgatccagaccgcaattaacaatggtacaggtga

SEQ ID NO: 6373 - DNA, 1034 bp, Homo sapiens
acaattgcattcccgggctggatgccggttgttaagcgcgctgttgctttgtaaaaatgcgtgtgttctggtgttttggctggggcagggaggggacaccccacgaggtctggggctgttgcccttgtgtcatccccccgccttttaactgcaaaggtcaccatggctgaccgggctgctgccgaaagggcctgcaaggatcccaatcccatcattgatggcagaaaggccaacgtgaacctggcatacttaggagcaaaaccaaggatcatgcaaccaggttttgcctttggtgttcaacaacttcatccagcccttatacaaagacctttcgggatacctgcccactatgtctatccgcaggcttttgtgcagccgggagtggtcattccacacgtccagccgacagcagctgccgcctccaccaccccttacattgattacactggagctgcatacgcacaatactcagcagctgctgctgctgccgccgccgctgctgcctatgaccagtacccctatgcagcctctccagctgctgcaggatatgttactgctgggggctatggctacgcagtccagcagccaatcaccgcagcggcacctgggacagctgccgccgccgctgcagcagctgctgccgctgcagcatttggccagtaccagcctcagcagctgcagacagaccgaatgcaatagaccagccatctgatcaaagttgaattgttttctctttccctcccaattttccaatttttagtagctaataagagagttaacattgacttaacagctttaaaaaaaaaaacagccatgctattgtgaagcagagttattattttttttatactccaggtagtgttctagatgagaaagaggtaagaatgaggggaatgggcacaattttggaaatcaatcccaaagagcctgagtaaatgaaaggccactacgaaatgacgccaggagtaacaacggaacttcacttttgtaacgggatttttatttttgctctttttatagtatcagggaagcaa

SEQ ID NO: 6374 - DNA, 474 bp, Homo sapiens
ggggcaaggctactcaaggagagtaggaggaggctaggtcaggaagggcaagcactggtggcctacccaggacttggcccaaccctctgggtcaggtcaccctcgtcggagtgagcggaccccgctggaattggagcccagtaaggtctatgagtttggtgttttgatcctggctacccatcccttccatcccaggggtggttcaccaggctgagtggagccttatactagggagagaggaagctgaagaactgggctccaggaaagcctcaagtgggaggagaaatgcaaatcccctactgatgatggcgtcagcggctttctcctagggactgtgaggggcgcttctgactttggacttgagcactgcctgggacctgtgctgagagagcgctagcatgtctcagtggaatcaagtccaacagttagaaatcaagtttttggagcaggtggatcaattctatgatgacaact

SEQ ID NO: 6375 - DNA, 3393 bp, Homo sapiens
gagagaaaggccgagacggagggagccagcggcggccgaggggctggtccaggcgcggccgctaagaggagaccaagaggcgggggctgcacttgacaaccagcatgccgagatggcacaccttgggcccaccccacctccacatagccttaattacaaatcagaggacaggcttagtgagcaagactggccagcatatttcaaggtcccatgttgtggggttgatacatctcaaattgaggccatccgttgcacactggtaaactgcacatgtgaatgttttcagccagggaagattaacctgaggacttgtgatcagtgtaaacatggctgggtggcacatgccttggataagctcagcacgcagcacctgtaccaccccacccaagtggagattgtgcagtccaacgtcgtgtttgacatcagcagcctgatgctctatgggacacaagcagtgcctgtgcggctaaagatcctgctggaccgtctcttcagcgtcctgaagcaagaggaggtactgcacatactgcacggccttggctggactctgcgggactatgtccgaggatacatccttcaggatgctgctggcaaggtgctggaccgctgggccatcatgtctcgagaagaggaaatcatcacccttcagcagtttctgcggtttggagaaaccaaatccattgtggagctgatggcaattcaggagaaagaagggcaggccgtggctgtaccatcttcaaagacagactcagatataaggactttcattgagagcaataatcgcaccaggagtcccagcctccttgctcacttagagaacagcaatccttccagcattcatcacttcgaaaacatcccaaacagccttgcatttctgcttccattccagtacataaaccctgtctcagcaccactgctagggttgcctccaaatgggctactgttagagcaaccagggttgaggctgcgggaacccagcctttcaactcagaatgaatataatgagagcagcgaatccgaagtttctcccacaccttataagaatgatcaaacacccaatagaaatgccctgaccagcattactaatgtggagcccaaaaccgagccagcctgtgtctctcccattcagaattctgccccagtcagtgatctaaccaaaactgaacacccaaaaagctcattccggattcatcggatgagaaggatggggtcagcctctaggaaaggaagagtgttctgtaatgcatgtgggaagacattctatgacaaaggtactctcaaaattcattacaatgctgttcacctgaagatcaaacatcgatgcaccattgaaggttgcaacatggtctttagctccctccgaagtcgtaatcgccacagtgcaaaccccaatcctcgccttcacatgcctatgctaaggaataaccgagataaagatttaattcgggccacctcaggagctgccacccctgtcatagcaagtacaaaatcaaatctggcactcacaagccctggccgacccccaatgggttttaccactccccctctagaccctgtcttgcaaaatcctctccctagccagctagtattttctgggctaaagactgtacaaccagttcctccattttatagaagtttactcactccaggggaaatggtgagtcctccaacctccctcccaaccagtcccatcattccaaccagtggtaccatagagcagcaccccccgccaccctctgagccagtagtgccagcagtgatgatggccacccatgagcccagtgctgacctggcacccaagaaaaagcccaggaagtcaagcatgcctgtgaagattgagaaggaaattattgataccgccgatgagtttgatgatgaagatgatgaccccaatgatggtggagctgtggtcaatgacatgagccatgacaatcattgtcactcccaagaggagatgagcccaggcatgtctgtgaaggacttttctaagcataacaggacccggtgcatttcaaggactgaaataaggagggccgacagcatgacttctgaagaccaagaacctgagcgggactatgagaacgagtctgagtcttcggagcccaaactgggcgaggaatccatggaaggggatgagcacattcacagcgaagtgagtgaaaaagtcctgatgaatagtgagaggcctgatgagaaccacagtgagccctctcaccaggacgtcatcaaggtgaaggaagaatttacagaccccacttacgacatgttttacatgagccagtatggactgtacaatggtgggggtgccagcatggccgccttgcatgagagctttacatcgtctctgaattatggcagccctcaaaagttctccccagaaggtgacctatgttctagcccagaccccaaaatctgttatgtgtgcaagaagagtttcaaaagctcctacagtgtgaaacttcactacaggaacgttcacttgaaagagatgcacgtctgcacagtggctggttgcaatgctgcattcccctctcgccgaagccgagacagacacagtgccaacataaacctacatcgtaaactgttgaccaaagaactcgatgacatgggcctggactcgtcgcagccctcccttagcaaggacctccgcgatgaatttttggtgaagatatatggtgcccagcaccccatggggctcgatgtcagggaagacgcctcctctcccgcagggactgaagactcccacctgaacgggtatgggagaggcatggcagaggactacatggtccttgacttgagcaccacctccagcctccagtccagcagcagtatccattcctccagagaatccgacgcaggcagcgatgaggggattcttctcgatgacattgacggggcgagtgacagtggggagtcggcacacaaggccgaggcccctgccctccctggcagcctaggggctgaagtttcaggatctcttatgttcagcagcttgtctgggagcaatggtgggatcatgtgcaacatttgccacaaaatgtacagcaacaaggggaccctgagagtgcactacaaaactgtgcatttgagagaaatgcacaagtgcaaagtcccaggttgcaatatgatgttttcctctgtacgaagccgaaatcggcacagtcagaaccctaatctccacaaaaacattcccttcacttcagtagattagtctcagaatggacactacaaatgccagctctcaccagatggcctacgtgtttgaactgccatagtcagtgtgcgcttatgtacttggggtgtgtgtgtgtgtgtgtgtgtgtgtgcatttatgtatgctctgtggctacatatacacacacgtatttccttgagataaacaagataaacact

SEQ ID NO: 6376 - DNA, 521 bp, Homo sapiens
cttcaagattccgtctaatcctagatatggtatgtggacgatcaaggctaaatataaagaggacttttcaacaactggaaccgcatattttgaagttaaagaatatgtcttgccacatttttctgtctcaatcgagccagaatataatttcattggttacaagaactttaagaattttgaaattactataaaagcaagatatttttataataaagtagtcactgaggctgacgtttatatcacatttggaataagagaagacttaaaagatgatcaaaaagaaatgatgcaaacagcaatgcaaaacacaatgttaagggcggaagtacgctgagaggcctataaagatgaatgatgacgcaggaattggaagaagtcgtgtttgtcagctattaccaaaaagacctgttggaccatgtgatgttcaagacccttctacttctataattctatacaaataattagaaaataacatcctgggcttaatcgtggactcggttatctactttacttttgacact

SEQ ID NO: 6377 - DNA, 594 bp, Homo sapiens
cctctggggttttatattgctctggtattcatgccaaagacacaccagccctcagtcactgggagaagaacctctcataccctcggtgctccagtccccagctcactcagccacacacaccatgtgtgaagaggagaccaccgcgctcgtgtgtgacaatggctctggcctgtgcaaggcaggcttcgcaggagatgatgccccccgggctgtcttcccctccattgtgggccgccctcgccaccaggtgcgtgctcatctggataccaccaggctttgagccactaggaatctggcaccactccttctacaatgagctgcgtgtagcacctgaagagcaccccaccctgctcacagaggctcccctaaatcccaaggccaacagggaaaagatgacccagatcatgtttgaaaccttcaatgtccctgccatgtacgtcgccattcaagctgtgctctccctctatgcctctggccgcacgacaggcatcgtcctggattcaggtgatggcgtcacccacaatgtccccatctatgaaggctatgccctgccccatgccatcatgcgcctggacttggctggccgtgacctca

SEQ ID NO: 6378 - DNA, 2436 bp, Homo sapiens
agtagcgcagcgagaaggatcgccatcacacggcgcactggtgcggcttctcccccgagtggatgaacatgtgcttggtgtcgtttttccttgagctgaacgtcttgcaacagtggccgcacgcatagctgccccagatcccggaagaaaatctctcccacaccactgtagtcagagaggccagtgggtgcatggaactcctcgcacgcgctgtcagcagcagcagtgaggaagccggcagcacagtctgggaaggaaggaggtgcttggctctctcccgggccgccaccttcgccgtcctcgccatcggtctcatcgtcagtttcctcgtcatcgttgtcacctcggtcgtcaggggccgcggacagtgaggggtaggcaccaagcccctcggctttggcaggtgtcgggggcgcaggcagctgcaaactcgcgggccggcgctgcttaccgctgtgcgcggcaccggggtgccccgggggtgcgcagccagcaggtggcgcaggcggtgacgcagctgctcaggtgcgagtggcgggggcacaggggtgggcaggggcgcgggtgcagaggtgctcgcgggtgcagaggagcgcgtgcgataatctgcgtgcattcgtcgataactgtctatgcgaagcaccgacgcagccatgagtacctgcggggcttcactctgtgccacaacgagcgaaccgctgtacaggagctcgactagctgtcgcaccgtctgcacaggcaccaccgaaggcacacggatctcagaggggccgagcagcagcttgtcttggaaggagggcgagccgattgccagcccgcagcggtgcgcacgcagcgaagcttcatgaatgcacacagtcacgtcgcagaagtgcccacccagcttctgcccattgagggtctcaagcagagagcgtgagaagttctgcagatgtatgtggcgcacagcctctacagccgccgactccgactcctcttcaggcaccaggcctggccgtggccgccttctcaccgactccaaggcagcacttccgggcgcttctctttatttttatacagttttattgagatataatttacatgctatccagcccatctatttcaagtgtaccatgcaaggggtttgtatatattcacagagttgtgtatccatcaccatcgttttagaacattcatcactccagaagaaactacgtacccatcagcagccactgcccatttccctgatctgccccgccctaggaaatccgtaatcactttcagtctatggatttgcctattctagaccattcatataaatgaagtcacacaacactgggtcttatgtgactggcttctatcaaagtttgcaaggttcatttatgttcatgctgatgatataaactggctcatttgatgccaagactgaccatcaccaccataccaaggtcatcactgatcagaggcctaacccaaggagggggtcatgtgcagacccagctgtggggaggaaagatgctgcagaggagacggatgcccacagaggcccctgagtggatacaatgctcactaagtgggctgaccccacattggacaccgctgcatccatgtccatcacacaacacagctgccgtttcttctgcctgcttatgggaaagtcccctcttctcctccgttttcttctcttcctgccctatcacaccgtgcacttctccctttccttaaagaaccaccatcaactttaggaggagggaaaggggtggctctggcaggaaaagccagaatcccctctagccagcagagagagagaggaatggctgcatgttttctcccccagtccaaggcactgggtcttggctgggttgaaggttccaagctgctctcctgctgtgtcggtgagttctggtcaacctgcaacctcctgatatggccattgcagttcatcgagtcttcagggactccccatggcctggagtactttgccttgcttacacgggagaggagaatggatttatagagaacatcatctaaatccaacttgaccattgtgtggccacacttgctagattgctatagtctaaatctagcattgtagaaagacgggggagcttggagctgcacaaacccaggtctggaactggctccttaccttggaaggtgaatgatcctgccaggactcttagcctccctgggtctcaatttctttatctgtttcatgggaatgaggatctctgctgggtggttgggtgatgtgggggctgtgtgaaaacagcttgtcaatacaagccaaaatagaaatatttctccacagagtatgaaggtcaaatgagagaatacatttaaattaaatggaaaattaaaatggtaaaaaatgcaaagctgtattgaaagttccgagcttctctataaggagctttttgactatggaagaatcctgtactcgttccccctaaatat

SEQ ID NO: 6379 - DNA, 11961 bp, Homo sapiens
gacaggggctctgggcggccggggagcatgcccgcgcggctacgctgaatggcgcctcctctgcgacccctcgcccggctgcgaccgccggggatgctgctccgcgcgctcctgctcctgctgctgctcagtcctttgccaggagtgtggtgctttagcgaactgtcttttgtaaaagaaccacaggatgtaactgtcacaagaaaggacccagtcgttttagattgccaggctcacggagaagttcctattaaggtcacatggttgaaaaatggagcaaaaatgtctgaaaataaacggatcgaggttctttctaacggctctttatacatcagtgaggtggaaggcaggcgaggagagcagtccgatgaaggattttatcagtgcttggcaatgaacaaatatggagccattcttagtcaaaaagctcatcttgccttatcaactatttctgcatttgaagtccagccaatttccactgaggtccacgaaggtggagttgctcgatttgcatgcaagatttcatcccaccctcctgcagtcataacatgggagttcaatcggacaactctacctatgactatggacaggataactgccctaccaacaggagtattgcagatctatgatgtcagccaaagggattctggaaattatcgttgtattgctgccactgtagcccaccgacgtaaaagtatggaggcctcgctaactgtgattccagctaaggagtcaaaatccttccacacaccaacaattatagcaggtccacagaacataacaacatctcttcatcagactgtagttttggaatgcatggccacaggaaatcccaaaccaatcatttcttggagccgccttgatcacaaatccattgatgtctttaatactcgggtacttggaaatggtaatctcatgatatctgatgtcaggctacaacatgctggagtatatgtttgtcgggccactacccctggcacacgcaactttacagttgctatggcaactttaactgtattagctcctccttcatttgttgaatggccagaaagtttaacaaggcctcgagctggcactgctcgatttgtgtgtcaggcagaaggaatcccctctcccaagatgtcatggttgaaaaatggaaggaagatacattcgaatggtagaattaaaatgtacaacagtaaattggtaattaaccagattattcctgaagatgatgctatttatcagtgcatggctgagaatagccaaggatctattttatctagagccagactgactgtagtgatgtcagaagacagacccagtgctccctataatgtacatgctgaaaccatgtcaagctcagccattcttttagcctgggagaggccactttataattcagacaaagtcattgcctattctgtacactacatgaaagcagaaggtttaaataatgaagagtatcaagtagtcatcggaaatgacacaactcattatattattgatgacttagagcctgccagcaattatactttctacattgtagcatatatgccaatgggagccagccagatgtctgaccatgtgacacagaatactctagaggatgttcccctgagacctcctgaaattagtttgacaagtcgaagtcccactgatattctcatctcctggctgccaatcccagccaaatatcggcggggccaagtggtgctgtatcgcttgtctttccgcctaagtactgagaattcaatccaagttctggagctcccggggaccacgcatgagtaccttttggaaggcctgaaacctgacagtgtctacctggttcggattactgctgccaccagagtggggctgggagagtcatcagtatggacttcacataggacgcccaaagctacaagcgtgaaagcccctaagtctccagagttgcatttggagcctctgaactgtaccaccatttctgtgaggtggcagcaagatgtagaggacacagctgctattcagggctacaagctgtactacaaggaagaagggcagcaggagaatgggcccattttcttggataccaaggacctactctatactctcagtggcttagaccccagaagaaaatatcatgtgagactcctggcttacaacaacatagacgatggctatcaggcagatcagactgtcagcactccaggatgcgtgtctgttcgtgatcgcatggtccctcctccaccaccaccccaccatctctatgcgaaggctaacacctcatcttccatcttcctgcactggaggaggcctgcattcaccgctgcacaaatcattaactacaccatccgctgtaatcctgttggcctgcagaatgcttctttggttctgtaccttcaaacatcagaaactcacatgttggttcaaggtctagaaccaaacaccaaatacgaatttgccgttcgattacatgtggatcagctttccagtccttggagccctgtagtctaccattctactcttccagaagcaccagcaggcccaccagttggagtaaaagtgacattaatagaggatgacactgccctggtttcttggaaaccccctgatggcccagaaacagttgtgacccgctatactatcttatatgcatctaggaaggcctggattgcaggagagtggcaggtcttacaccgtgaaggggcaataaccatggctttgctagaaaacttggtagcaggaaatgtgtacattgtcaagatatctgcatccaatgaggtgggagaaggacccttttcaaattctgtggagctggcagtacttccaaaggaaacctctgaatcaaatcagaggcccaagcgtttagattctgctgatgccaaagtttattcaggatattaccatctggaccaaaaatcaatgactggcattgctgtaggtgttggcatagccttgacctgcatcctcatctgtgttctcatcttgatataccgaagtaaagccaggaaatcatctgcttccaagacggcacagaatggaactcaacagttacctcgtaccagtgcctccttagctagtggaaatgaggtaggaaagaacctggaaggagctgtaggaaatgaagaatctttaatgccaatgatcatgccaaacagcttcattgatgcaaagggaggaactgacctgataattaatagctatggtcctataattaaaaacaactctaagaaaaagtggttttttttccaagactcaaagaagatacaagttgagcagcctcaaagaagatttactccagcggtctgcttttaccagccaggcaccactgtattaatcagtgatgaagactcccctagctccccaggtcagacaaccagcttctcaagaccctttggtgttgcagctgatacagaacattcagcaaatagtgaaggcagccatgagactggggattctgggcggttttctcatgagtccaacgatgagatacatctgtcctcagttataagtaccacaccccccaacctctgattctttcactggcagtgattcaggtggagattccgcattgaggaagtgtgaagaccctgctgtgtcatctgttagtgagcagacttcctccttagttctgcagccgccatctgccatgctatgctttgataaaaatgattttccaatctagacggccatgctcaggtattctcaccattaaatctgttcgaaggacaatgaacagggaaccaaagccttttgtgaaaatcttaatatctttatggggtattttagctttttttgaatgtgttttgttttttatttttaaacttgtgtaatttgaatgtttcattgtcagcaatgtgaaagaacggtcgagatgtttgactggattataaaatatatcactggagcaaagggaagacttttgaaagcccctttgctgactatctacctcagtttgcctcccggcaaactctgaagacaactttgttacctcatttgttgttatagtttatctcagctacataaccaatgatacttcctagtagtattgtgttttcattgctgtacgtgtaatgtgtgtgatcaaaggagtcatataggtagatgagtaagaatgtttatctgaagctctgatttttttaaaaaaagaaactatgacatctgcatggtttggataagttcatacctctggctgtgaggaccgttaaaccactgagaagaggaaaagtggggctatttcttctaacgatgaccaaaacaagaaagtatatttcttttgagaacagaactattcaataccaggtagggatcattttgcttaaaaggcctttatgttttgggcattagagtctgagtgctttatctcctatatcccaaacctcaagctgcccagaactgtgccttttctaccttcccctttgcctgacggttggccaaaggctgcactgtctagtttgcaaagcatcctcaactttgccagtattagttgcaaaaccccatgcagaatatggatttttaaagaaaatgggttaaggtggttttttttctttttttaaatcccagtttggcttaaaggagtgaagacatttcatgaactattaagaatgaaggtaaatgcaacagtagacagtaaaatgaactcgaagttattatggtaacagtgcctttcagtataatgaaattctttgccttatacctttttaatattcatgaaattgtttaggaacaggagtacaaaaagttgccttaagagtttcttggattttatcagtaactattttgatgtatagtatcttaccaaggcattttttttaagtgcaggttttgtttagggataaatattcagagttctaccaccctacttgtgttttcttgaattctttagagaatatggtatctacttaatcttccttcagtgtcagtgctgtgaatgaggaatgctaactccaggagtgagttaatcctcttgcaggtttgaaatcagcaaattgtttactcagctacataacataggccttttctccgtcatgagacagttacctaggtgccgagcagtgggagaggataaagaactaaacgcgtgtagagaaggggtcccatatccttttaaaagtattttttcaaattttctggaagtgacttttgattctcattttaaaaggaatcataatgggtttacacttgaaatgctttgttcctagaggaggcagggtcatgttcactgatgttctaaaatcaaaggaatattagcagataatagtcccagcatcatctgctagtctaatgactgtagatataacatttttaatttttttaaatctgtaattttgtgccaaactggatgtgattaagactaaagttcaatgccagcaaccacttctgaactaaactcagagtcccccagttagttatctaagtacggaattcatcgcaaaacaaacaaaaaagcagagctttaggtgaacagtctgcagcaaggaaaaatgctgctcctgcctttatagctcctgttttatactacctccttttaaagttattctagtgttattttttttcctgtactcagggaacgttttgttacttttgagctgcctcatggaagcataggcagattgacagggtatagcgctttgtggttggtaagtagaagtatatagggccaacttttatcagtatctaaaattaagtacagtgagatcattttatttttaagctttcattaaaaggcaaacaaaatctaaagctgaaacatcatccatcatggttatggaagatgtgtctaggactacatgaattcgagtggttttaaatggctaaaaagacgagctaaagtccttgaggaaagtattttgtttgtttggtttttgatgaataggcttatagttacaatagaactttaggctataactatttgataattatttaacagtacattttttaccttttcattttgttcttatacggactttttcataataattctgttaccaaagaattttcagtagaaaataaaattttgattataattccccccaaattgaattaactagaagcatttatagatatgaaacttacacaagtagttactaacccaaaacaatagggtttatattgattgttgtagttaaatagattagtaatgttaactaccttattgttaccagagcatttaaaataagttgtaatactttctttaccagcagatcgttccaaagaatttcaggtatagttttttcttcagcaagtaaatcttcaactatacagtattaaagtatttttatattgttgaaactacttgttggagagaaaattttttttttttaccaaaaataaatactttggtctcattgaataagatatttagtaatacagcaaagacttctttttacttgaccaaatcaagcttctttgaagtcttaagtatgaaattgtaattaaaatgtgaagattttcactcatttttcatagtggtattacttcatggtattgtacttcaaaggggctaatatgcaaatggtaactattttcttttccaaagatgtatttgctgtaagtactgatacctgcatgtcatttttatgccaaatattacaagatactgctcatcagtattttcataccaaagaccattaagatgtataggttagcctgtaagtaagtaaagatgagcagatttgaaataaatttatttagaggccgatagagaatctagctttagtagcaaaaaatatcaaagggctaagtttacataattaaaagcaatacaattatattggtatttatcagtgtttttattcaagtactttttatcagcaaattaaaaagaaaaaaaccaaagatatttaaggttacctccgcatataggcaaatatagttgtacattaaactgttgtttcttgtttttatgttaaaccaaacatgtctcttcggaacacagtctgtatacaaataacatgcatgaggactttccatttaatctgtgattcagccacatgatgtttttgccaaatgatgtgatactttccaaagcaccttgagtgtgaaatgtcaacagaaatatcagcaagcttttatgttgcagagtattatggtacctctgaattagcctgtatagttctcttcctgctttaagcattacctggttagctcagacggcttgaggcagtcccttaataatagggatgcttttcatctctaaggatgtaagaggcaaacaaatcatgtcattctttaagtgggctatgctttgatagatgtgctctttaaaggtgtgagattggaatttagagttgttaaattgaaatgtttgcattgcaccaaaggagctcagttttcaaactttaatggaaccttgggtaaagggaaaaaatttttaatgaaatctggggttttatattttgattagcctaaaagtaaaaatacagctttatccattaagtgacttttaaaaatcagttttgccataccaaagaaattagattcttagtgtcacatgctatacttttgtctgtgcttgaaacgagcaatgccaacattgggaacaatgacagaggtttgcatcagtttgtcttggctttgttaaggacttctgccagaaatgtgctcgtggttgacaacccaggatcattgttcaagttcttatgcagacacctttgaaaacaattcagatcgtgtcacaagaatttggaattgaaaatatcatttattttttaatgcaagaatacccagatgtggtttcacttcagcagtagctatagtggttcacttatatacatttctgtttcactgaatgtaaattttgaatactgaatgtaaaaaaaaaactccagttatattgaaacagtcactaagactgcacatgtgttttgcagactttcttcctgaccatttgccacatgggtctctgataagattctgttggtttaatagtcaaaataatctttgcagtttgtgagcactgagtagcaggttctggagactaccatatacaaccagttgtctaattgtgatttttttattgatgtttagaagaatgtaaccgtagagttctgtgttaagttgatttatgctcaggacataagatcacaggctaatgcaatgtgtatgtttcaggctttaatcttctcaatttccctttttaagccgttgatggtgtttaagattaacatgacagtcttgtatttttaccagatactgtattatttttcctattgctgctgtaacacattaccatgaaggtggtggcttaaaataacacaaatttttcttaagttctgcagatcagaagtctaacacaggtctccctgggacaaaatcaaggcgcttgcagggctgtttctttttgaggctttagggaaaaatctatttccttttctagttttttaaggctgggaacccctccttccatcttcaaagccagccatgtagcatctctctgaagctccttccgttatcatttctctttgtccaaccccagctgatacaggttatctaggtttaaggattccagtgatcacattgagcccacctaaataatccaggataatctccccaactgaagttcctcaacttaatcacatctacagagttccttttgctatgtttggtaacatattcactggttccagggatttgggcatggacttctgtaggtggccagtattttgcccacaacaggtacattctttctgtggaattctgatccctgtaaaatgtctgtagcattaaagagattggaaatctgaggtcatgtgccccttggggatctttaaagattaaaagcatgaaaactttgacttgtagcctaccaaaattatacactaaactttctctccaaaatacttgtgaaacaatttatctttaaagtttctgaatatgtgcttcataaaataacatctcatgtttatcagcaagtgtcctaaatatttgcgtctaactttatggaatttattcagaaaaagaattgaaaactcttcttatagttaccctttctccttttctcttcagtggttatgttgctggggaagagttgggggaagacctcaaaacacaggaactcagagtgatgaacaggaccatgctcaagtttattctttgttttcttttaatgacatattcacaacattcacaactttctgcctttaaatctggttcctctcttcagcttcaccaagccactgaatgcttttcagttttattaaccctcacattccccatccttctcagcaagagcctctccttatgccatcagcatgtatatacatttcctaggaaatttgatctttcttgtcattcttttttggttccaatcggccttttcctggttctcaaagctctagtttcttctaatttctggatcatcgcaagtctggccctctttgaactttaaaacataatgtctaattccaccccaattttcagcatttcttcaactaaatcgataaagctgtctccattatgagaaaggccagaataatactccgagtaagcataagaaagctggtcattttacaacttctcccgactctaggaagtaatatgatgccatttgttgagcatctacagtgtgccaagcacatggttcatctctgcaaactgctgctacattctgtaaagcaagtattatccgcattttagggattaggaacagcttcctgatctcttgccaaaagtcacagctagtgagtggtttaggcaagatacaaaccctagttagttaatccttactcagaagtgtataggactatgatacattgtctcagcttaaaaaaaaaaaaaaaaaaaaaaggtatttaatcacccagggtcatagtgccttccatagtgtgaccagatacaactgttttttccttgtatccacaaaagccaggttgtgtcagaacaacctttctacagagtaataaccaatcgaaaaagagaagactaccttatttaaatccacttattcacaggagggattaaggcggctgtaactcatcccttatcatctcctaatttctctcctccaaaaccttccatttatctcagctaaaattgtgtctgaaggctgtttgtacttagagttacattacaaataaggtaggcatggtttctagagtccttttctagtcaagcatttccttattcgacaatgtcttcagaattgcattttatcttttgtaattttctgtagctcccatattccaaacaggaattcattgacttgaaaaagtcaggtgtgtaaacagtaatcctttcttgttaggtctgaagagttcatgattttttatgaatataaactaatttattatttgcattaatgtaggagacagcaaagttaacggagagtcataaaacagaacaagtataagttaggctttggagcacctaagttctaatcttgacaattttgagaatcgtttggtacaaaaattcttaaactgtttctgtgccttctccatccatgaaatgaggataatttttttgtgcaaaatgaaacaatagtactttgaaaacttaagagaaaattcaagtgtaaataatcataatctgaaactcatttgtatgaggctgtgaaagattttacagactctttcttttcaagtcagcctttgcaattatattttgcctttgttgaaatgaaaaatgtttgcatctcccgtacgcatacacaaaaccaatagaagaaagtggttggtaaaagatatagctgaaatggaaacactcatatgttaggtggataaaatcataagagaaaatgggaattgactgtactttcaaagtactaaatttgaagtcatcttactccaatttaagtcatatatatatatatatatatatatatatatatatatatatatatatatatattggcttttaaagagttaaagagagaatcagatctgtccagcaggatagatgggtgaggagaaaagtacatatttaggatttttctctaaaagatctttttcaagattatggagtattttaatatttctgcaaactattccaaatgaatgcattttatatagggcaacacatactggcacctgattctggtttattcgagttcatatgtagggtttgttgggaagaattatatgattggcttctttttttagaggaaatattttcccttttttcttatccatatactattctgaacagctttgcagatttccttaagttcatagcttgtaagtagttcatggtatatagacatagtcttgacttacaactgaaaaaaaatttatgttacagaagtttattttttctatggaactgtctttaaaaacaaaaatattacaaatcttgaccttgaaatattctgtttcctgttatcacattctggatatctattttgtttgcaaatgaaaattattactgatgattagcaacttgagcctgttaataggaaattgcaaagcctgaatacacacacattgccttagcctatcagtagagtagaggacatatgttaagaaaatgtgtctgcttgttgctgttgttggacaaaattttatgtctgtgtgtatgatttttttttttctattttcttcaaagatgtgaattaaatgaaagtgtgggagccagttaaattattttgtattatgggtgttctggatcctttcactccgtataccattttcttgtaagggcagcatttgtagacttgctaatggactgtagagctgagctatattaattttatacttgactcaggggatcagttctgtgaatgccattgcacgaagaaagcaaatgtttgccttgattttgaatgtatctttttaatgtcttcttaaaacatatttgtttaataatgtagatttgtttttttttttctagtatcatagtaaatattgcttagtacttgcccccaccccactgggtagtttatatactaccctataggtcatgccaaaaatgaataaaagtttaaatgccaaaatgtttatgaaactgctgtctaaatactgattgattgcacaatttaaataaaagctttccttagtt

SEQ ID NO: 6380 - DNA, 4776 bp, Homo sapiens
agtaaactggaatgctctccctcgctcactcctcagtgtaggagtgatctgaagcaggacaagctcagcctgcagctgccgtgggctttgtgtggactggacgcagagcttgggagacgggggagggctattactccaattcactgtcaatggaattacagctatagcggcagtgtatataggattgctttttctcgtcttcctgggttctgaagtaacggaagctaccttgtataaagacctcaacactgctgaccatgatcagcgcagcctggagcatcttcctcatcgggactaaaattgggctgttccttcaagtagcacctctatcagttatggctaaatcctgtccatctgtgtgtcgctgcgatgcgggtttcatttactgtaatgatcgctttctgacatccattccaacaggaataccagaggatgctacaactctctaccttcagaacaaccaaataaataatgctgggattccttcagatttgaaaaacttgctgaaagtagaaagaatatacctataccacaacagtttagatgaatttcctaccaacctcccaaagtatgtaaaagagttacatttgcaagaaaataacataaggactatcacttatgattcactttcaaaaattccctatctggaagaattacatttagatgacaactctgtctctgcagttagcatagaagagggagcattccgagacagcaactatctccgactgcttttcctgtcccgtaatcaccttagcacaattccctggggtttgcccaggactatagaagaactacgcttggatgataatcgcatatccactatttcatcaccatctcttcaaggtctcactagtctaaaacgcctggttctagatggaaacctgttgaacaatcatggtttaggtgacaaagttttcttcaacctagttaatttgacagagctgtccctggtgcggaattccctgactgctgcaccagtaaaccttccaggcacaaacctgaggaagctttatcttcaagataaccacatcaatcgggtgcccccaaatgctttttcttatctaaggcagctctatcgactggatatgtccaataataacctaagtaatttacctcagggtatctttgatgatttggacaatataacacaactgattcttcgcaacaatccctggtattgcgggtgcaagatgaaatgggtacgtgactggttacaatcactacctgtgaaggtcaacgtgcgtgggctcatgtgccaagccccagaaaaggttcgtgggatggctattaaggatctcaatgcagaactgtttgattgtaaggacagtgggattgtaagcaccattcagataaccactgcaatacccaacacagtgtatcctgcccaaggacagtggccagctccagtgaccaaacagccagatattaagaaccccaagctcactaaggatcaccaaaccacagggagtccctcaagaaaaacaattacaattactgtgaagtctgtcacctctgataccattcatatctcttggaaacttgctctacctatgactgctttgagactcagctggcttaaactgggccatagcccggcatttggatctataacagaaacaattgtaacaggggaacgcagtgagtacttggtcacagccctggagcctgattcaccctataaagtatgcatggttcccatggaaaccagcaacctctacctatttgatgaaactcctgtttgtattgagactgaaactgcaccccttcgaatgtacaaccctacaaccaccctcaatcgagagcaagagaaagaaccttacaaaaaccccaatttacctttggctgccatcattggtggggctgtggccctggttaccattgcccttcttgctttagtgtgttggtatgttcataggaatggatcgctcttctcaaggaactgtgcatatagcaaagggaggagaagaaaggatgactatgcagaagctggcactaagaaggacaactctatcctggaaatcagggaaacttcttttcagatgttaccaataagcaatgaacccatctcgaaggaggagtttgtaatacacaccatatttcctcctaatggaatgaatctgtacaaaaacaatcacagtgaaagcagtagtaaccgaagctacagagacagtggtattccagactcagatcactcacactcatgatgctgaaggactcacagcagacttgtgttttgggttttttaaacctaagggaggtgatggtaggaaccctgttctactgcaaaacactggaaaaagagactgaaaaaaagcaatgtactgtacatttgccatataatttatatttaagaactttttattaaaagtttcaaatttcaggttactgctgcgattgatgtagtggagatgcctgaacacaattctatattttagtattttttagtaatttgtactgtattttccttgcaaatattggagttataaaccatttactttgtgttctactgagtaagatgacttgttgactgtgaaagtgaattttcttgctgtgtcgaacaatcaggactgcattcatatgagatccttgtagtataagcacaggccatttttcactttggtattaataaaatgtaaaaaaaaaaaactggctgaatggctgaatgagataaaatttaattttaaaaaatggttatgaaataatgttccaattattaaatttgtattatcccagtggtattcaataaatcaaaatgtgtgaagtaatgggcaatatcaaacttcctgcatatctccatttttgctctaggcaaattaattatccttaaaaaagttaagcatatcttctgaactgaatacatcagctggcataaaaggagcatgaagtctgttaaagccattgtcagcaaagctttgaaaataaaggacttcacaaaaacggtaatgtaaatgtgcttccaagttggggggaaaatgtgtacttaggaaaacatggaaacttagacttgtatagtgtaatgaacacaaataccaaaactgcattttggttttgcctataccatcctgatttttgaaaagtgaattataaacacaaaattgttagtgtttatgatgtttttatcataaaggatgtcagagaaactttatgcatattaaaaatgtaatgtaattataagcgattcccctcaacaatccagagaaagtagttctttaaataagagataatttaaagaaaaataaatactagacatcaaatttagatctggtttatgtcaaaggttttaacactgtacataaatgttcaatttacttttacaaagatcaagaatactgcccattactgtcacaattttccagatattatataatgaactcgtaatgtaacatttccttctagcttcctactgaattgtgagctgttacttgttgaaaaaccatatcacttttctgttgccatgattttttttttttcaacaaaaaaccaaagtgcattgtacgccctttggccagtcttgtatgtgccttgatccaacgctacatgtattcagcttttaaaactccacaaatttttcatactccttaaatatgaaaaattatggtcttattgctgaataaaacttttaaaaagtacagaataattgtgcttgctttttcaggattgtgttactatcactaagtagcaaattgcccagcacattagtcctaaacgtcccatgtatttttctaggcataaaaataaaagttggctaaaaattttaaaaaatcaacatcttgaggttgtgtatcattttacttcaaagagttcagtgtttcatgtataaatgtatttcctcttacttatacactgtatagatggaaaatttaagaaatggtttcaaagcctttctctcttaggcgcactgctgccactgtcctgatactttttaaggtggtctttgaaaaactgtttttttaaaatagccttttagtagagtgagttggcatttgtgatactgtgaaatacacactttctctttgtccctgtttctggcatacaactcctaaaatccttgcaatcttcaaagtgatatattttcatatgctaatgagttcactgatagctggcaggccctaggtagcttcaagataaagtctgatcattgaaaagaccaagacatgattatagggttgggacttacaaccccaaaccctaacctccagagagggcgaagtggatgaagattaagttgatcaccagtgaccagtggtttaatcaagcatgcctatgtaatcaagcctccataaaaaaacaaaaggtcaagatttggagagcttccagattgctgaacatgtggtggttcctgcaggatggcatgcctggagagggcatggaagctctgtgcccacctagacctcaccttatgtttcctgccatctggatcctttgtaacatcctttataatacgtcagtaaatctgtttccttgcattttgtgagctgttgtagcaaattaatagaacacaaaaaggggatcctgggaaaccaaacttgaagctgactagtcttgcaactggtgtctgaagaggaggcagttttgtgggaataagccctcaacctgtgggatatgacacaatttccaggtagacagtgttgggattaaactgaattggaggacacccagctggtatctgctgaagaactgattgcttgcgtggtgtatggggcaaaacttgttaagacaagtcttctatgttgattattgttgaatgagagaattaaacacacatacacactt

SEQ ID NO: 6381 - DNA, 872 bp, Homo sapiens
ggacgcagcagccaccgccgcgtccctctctccacgaggctgccggcttaggacccccagctccgacatgtcgccctctggtcgcctgtgtcttctcaccatcgttggcctgattctccccaccagaggacagacgttgaaagataccacgtccagttcttcagcagactcaactatcatggacattcaggtcccgacacgagccccagatgcagtctacacagaactccagcccacctctccaaccccaacctggcctgctgatgaaacaccacaaccccagacccagacccagcaactggaaggaacggatgggcctctagtgacagatccagagacacacaagagcaccaaagcagctcatcccactgatgacaccacgacgctctctgagagaccatccccaagcacagacgtccagacagacccccagaccctcaagccatctggttttcatgaggatgaccccttcttctatgatgaacacaccctccggaaacgggggctgttggtcgcagctgtgctgttcatcacaggcatcatcatcctcaccagtggcaagtgcaggcagctgtcccggttatgccggaatcgttgcaggtgagtccatcagaaacaggagctgacaacctgctgggcacccgaagaccaagccccctgccagctcaccgtgcccagcctcctgcatcccctcgaagagcctggccagagagggaagacacagatgatgaagctggagccagggctgccggtccgagtctcctacctcccccaaccctgcccgcccctgaaggctacctggcgccttgggggctgtccctcaagttatctcctctgctaagacaaaaagtaaagcactgtggtctttgccc

SEQ ID NO: 6382 - DNA, 1357 bp, Homo sapiens
atggtccgcgcgaggcaccagccgggtgggctttgcctcctgctgctgctgctctgccagttcatggaggaccgcagtgcccaggctgggaactgctggctccgtcaagcgaagaacggccgctgccaggtcctgtacaagaccgaactgagcaaggaggagtgctgcagcaccggccggctgagcacctcgtggaccgaggaggacgtgaatgacaacacactcttcaagtggatgattttcaacgggggcgcccccaactgcatcccctgtaaagaaacgtgtgagaacgtggactgtggacctgggaaaaaatgccgaatgaacaagaagaacaaaccccgctgcgtctgcgccccggattgttccaacatcacctggaagggtccagtctgcgggctggatgggaaaacctaccgcaatgaatgtgcactcctaaaggcaagatgtaaagagcagccagaactggaagtccagtaccaaggcagatgtaaaaagacttgtcgggatgttttctgtccaggcagctccacatgtgtggtggaccagaccaataatgcctactgtgtgacctgtaatcggatttgcccagagcctgcttcctctgagcaatatctctgtgggaatgatggagtcacctactccagtgcctgccacctgagaaaggctacctgcctgctgggcagatctattggattagcctatgagggaaagtgtatcaaagcaaagtcctgtgaagatatccagtgcactggtgggaaaaaatgtttatgggatttcaaggttgggagaggccggtgttccctctgtgatgagctgtgccctgacagtaagtcggatgagcctgtctgtgccagtgacaatgccacttatgccagcgagtgtgccatgaaggaagctgcctgctcctcaggtgtgctactggaagtaaagcactccggatcttgcaactgaatctgcccgtaaaacctgagccattgattcttcagaactttctgcagtttttgacttcatagattatgctttaaaaaaatttttttaacttattgcataacagcagatgccaaaaacaaaaaaagcatctcactgcaagtcacataaaaatgcaacgctgtaatatggctgtatcagagggctttgaaaacatacactgagctgcttctgcgctgttgttgtccgtatttaaacaacagctcccctgtattcccccatctagccatttcggaagacaccgaggaagaggaggaagatgaagaccaggactacagctttcctatatcttctattctagagtggtaaactctctataagtgttcagtgttgacatagcctttgtgcaaaaaaaaaaaaaaaaaaa

SEQ ID NO: 6383 - DNA, 5551 bp, Homo sapiens
aggttacttgactgggagttctcagacctccagtttcagccctgccctcagcctccaatccgtaagagacacccagccccagcaattggattgggcagcccgtcttgacacaccactgtgctgagtgcttgaggacgtgtttcaacagatggttggggttagtgtgtgtcatcacattcgagtggggattaagagaaggaaggctgccttgctggagctgtgtggtcttctccaagtgagagtcgcaggcaatagaactactttgcttttggaggaaaaggaggaattcattttcagcagacacaagaaaagcagtttttttttcaggtgctgacggccacccaccatcatctaaagaagataaacttggcaaatgacatgcaggttcttcaaggcagaataattgcagaaaatcttcaaaggaccctatctgcagatgttctgaatacctctgagaatagagattgattattcaaccaggatacctaattcaagaactccagaaatcaggagacggagacattttgtcagttttgcaacattggaccaaatacaatgaagtattcttgctgtgctctggttttggctgtcctgggcacagaattgctgggaagcctctgttcgactgtcagatccccgaggttcagaggacggatacagcaggaacgaaaaaacatccgacccaacattattcttgtgcttaccgatgatcaagatgtggagctggggtccctgcaagtcatgaacaaaacgagaaagattatggaacatgggggggccaccttcatcaatgcctttgtgactacacccatgtgctgcccgtcacggtcctccatgctcaccgggaagtatgtgcacaatcacaatgtctacaccaacaacgagaactgctcttccccctcgtggcaggccatgcatgagcctcggacttttgctgtatatcttaacaacactggctacagaacagccttttttggaaaatacctcaatgaatataatggcagctacatcccccctgggtggcgagaatggcttggattaatcaagaattctcgcttctataattacactgtttgtcgcaatggcatcaaagaaaagcatggatttgattatgcaaaggactacttcacagacttaatcactaacgagagcattaattacttcaaaatgtctaagagaatgtatccccataggcccgttatgatggtgatcagccacgctgcgccccacggccccgaggactcagccccacagttttctaaactgtaccccaatgcttcccaacacataactcctagttataactatgcaccaaatatggataaacactggattatgcagtacacaggaccaatgctgcccatccacatggaatttacaaacattctacagcgcaaaaggctccagactttgatgtcagtggatgattctgtggagaggctgtataacatgctcgtggagacgggggagctggagaatacttacatcatttacaccgccgaccatggttaccatattgggcagtttggactggtcaaggggaaatccatgccatatgactttgatattcgtgtgcctttttttattcgtggtccaagtgtagaaccaggatcaatagtcccacagatcgttctcaacattgacttggcccccacgatcctggatattgctgggctcgacacacctcctgatgtggacggcaagtctgtcctcaaacttctggacccagaaaagccaggtaacaggtttcgaacaaacaagaaggccaaaatttggcgtgatacattcctagtggaaagaggcaaatttctacgtaagaaggaagaatccagcaagaatatccaacagtcaaatcacttgcccaaatatgaacgggtcaaagaactatgccagcaggccaggtaccagacagcctgtgaacaaccggggcagaagtggcaatgcattgaggatacatctggcaagcttcgaattcacaagtgtaaaggacccagtgacctgctcacagtccggcagagcacgcggaacctctacgctcgcggcttccatgacaaagacaaagagtgcagttgtagggagtctggttaccgtgccagcagaagccaaagaaagagtcaacggcaattcttgagaaaccaggggactccaaagtacaagcccagatttgtccatactcggcagacacgttccttgtccgtcgaatttgaaggtgaaatatatgacataaatctggaagaagaagaagaattgcaagtgttgcaaccaagaaacattgctaagcgtcatgatgaaggccacaaggggccaagagatctccaggcttccagtggtggcaacaggggcaggatgctggcagatagcagcaacgccgtgggcccacctaccactgtccgagtgacacacaagtgttttattcttcccaatgactctatccattgtgagagagaactgtaccaatcggccagagcgtggaaggaccataaggcatacattgacaaagagattgaagctctgcaagataaaattaagaatttaagagaagtgagaggacatctgaagagaaggaagcctgaggaatgtagctgcagtaaacaaagctattacaataaagagaaaggtgtaaaaaagcaagagaaattaaagagccatcttcacccattcaaggaggctgctcaggaagtagatagcaaactgcaacttttcaaggagaacaaccgtaggaggaagaaggagaggaaggagaagagacggcagaggaagggggaagagtgcagcctgcctggcctcacttgcttcacgcatgacaacaaccactggcagacagccccgttctggaacctgggatctttctgtgcttgcacgagttctaacaataacacctactggtgtttgcgtacagttaatgagacgcataattttcttttctgtgagtttgctactggctttttggagtattttgatatgaatacagatccttatcagctcacaaatacagtgcacacggtagaacgaggcattttgaatcagctacacgtacaactaatggagctcagaagctgtcaaggatataagcagtgcaacccaagacctaagaatcttgatgttggaaataaagatggaggaagctatgacctacacagaggacagttatgggatggatgggaaggttaatcagccccgtctcactgcagacatcaactggcaaggcctagaggagctacacagtgtgaatgaaaacatctatgagtacagacaaaactacagacttagtctggtggactggactaattacttgaaggatttagatagagtatttgcactgctgaagagtcactatgagcaaaataaaacaaataagactcaaactgctcaaagtgacgggttcttggttgtctctgctgagcacgctgtgtcaatggagatggcctctgctgactcagatgaagacccaaggcataaggttgggaaaacacctcatttgaccttgccagctgaccttcaaaccctgcatttgaaccgaccaacattaagtccagagagtaaacttgaatggaataacgacattccagaagttaatcatttgaattctgaacactggagaaaaaccgaaaaatggacggggcatgaagagactaatcatctggaaaccgatttcagtggcgatggcatgacagagctagagctcgggcccagccccaggctgcagcccattcgcaggcacccgaaagaacttccccagtatggtggtcctggaaaggacatttttgaagatcaactatatcttcctgtgcattccgatggaatttcagttcatcagatgttcaccatggccaccgcagaacaccgaagtaattccagcatagcggggaagatgttgaccaaggtggagaagaatcacgaaaaggagaagtcacagcacctagaaggcagcgcctcctcttcactctcctctgattagatgaaactgttaccttaccctaaacacagtatttctttttaacttttttatttgtaaactaataaaggtaatcacagccaccaacattccaagctaccctgggtacctttgtgcagtagaagctagtgagcatgtgagcaagcggtgtgcacacggagactcatcgttataatttactatctgccaagagtagaaagaaaggctggggatatttgggttggcttggttttgattttttgcttgtttgtttgttttgtactaaaacagtattatcttttgaatatcgtagggacataagtatatacatgttatccaatcaagatggctagaatggtgcctttctgagtgtctaaaacttgacacccctggtaaatctttcaacacacttccactgcctgcgtaatgaagttttgattcatttttaaccactggaatttttcaatgccgtcattttcagttagatgattttgcactttgagattaaaatgccatgtctatttgattagtcttatttttttatttttacaggcttatcagtctcactgttggctgtcattgtgacaaagtcaaataaacccccaaggacgacacacagtatggatcacatattgtttgacattaagcttttgccagaaaatgttgcatgtgttttacctcgacttgctaaaatcgattagcagaaaggcatggctaataatgttggtggtgaaaataaataaataagtaaacaaaatgaagattgcctgctctctctgtgcctagcctcaaagcgttcatcatacatcatacctttaagattgctatattttgggttattttcttgacaggagaaaaagatctaaagatcttttattttcatcttttttggttttcttggcatgactaagaagcttaaatgttgataaaatatgactagttttgaatttacaccaagaacttctcaataaaagaaaatcatgaatgctccacaatttcaacataccacaagagaagttaatttcttaacattgtgttctatgattatttgtaagaccttcaccaagttctgatatcttttaaagacatagttcaaaattgcttttgaaaatctgtattcttgaaaatatccttgttgtgtattaggtttttaaataccagctaaaggattacctcactgagtcatcagtaccctcctattcagctccccaagatgatgtgtttttgcttaccctaagagaggttttcttcttatttttagataattcaagtgcttagataaattatgttttctttaagtgtttatggtaaactcttttaaagaaaatttaatatgttatagctgaatctttttggtaactttaaatctttatcatagactctgtacatatgttcaaattagctgcttgcctgatgtgtgtatcatcggtgggatgacagaacaaacatatttatgatcatgaataatgtgctttgtaaaaagatttcaagttattaggaagcatactctgttttttaatcatgtataatattccatgatacttttatagaacaattctggcttcaggaaagtctagaagcaatatttcttcaaataaaaggtgtttaaactttttt

SEQ ID NO: 6384 - DNA, 950 bp, Homo sapiens
ggctctgagaacaagagcttgaggggaagactgttaaccccatccacgccaccagaattagctctttcccttttggtttgcaagcactgcctgtaaagccctcgcatgagaggccagcctgctagggaaatccaggaatctgcaacaaaaacgatgacagtctgaaatactctctggtgccaacctccaaattctcgtctgtcacttcagacccccactagttgacagagcagcagaatttcaactccagtagacttgaatatgcctctgggcaaagaagcagagctaacgaggaaagggatttaaagagtttttcttgggtgtttgtcaaacttttattccctgtctgtgtgcagaggggattcaacttcaatttttctgcagtggctctgggtccagccccttacttaaaggccataagatgttttattgaaagaaactttcaatatcaagtaatccaaccaaccttctaagataagccttttccttcaacacaaagaagtgcattttgccaaatctggaaagcatgaagactgggctttttttcctatgtctcttgggaactgcagctgcaatcccgacaaatgcaagattattatctgatcattccaaaccaactgctgaaacggtagcacctgacaacactgcaatccccagtttaagggctgaagctgaagaaaatgaaaaagaaacagcagtatccacagaagacgattcccaccataaggctgaaaaatcatcagtactaaagtcaaaagaggaaagccatgaacagtcagcagaacagggcaagagttctagccaagagctgggattgaaggatcaagaggacagtgatggtcacttaagtgtgaatttggagtatgcaccaactgaaggtacattggacataaaagaagatatgagtgagcctcaggagaaaaaactctcagagaacactgattttttgg

SEQ ID NO: 6385 - DNA, 653 bp, Homo sapiens
ggttttacaactgcctacagcatgctttggaaagggaaacgatgactaacttacatcccaagatcaaagagaaaaataactcatcatatattcataagaaaaaaagaaacccagaaaaaacacgtgcccagtgtattactaaagaaagtgatgaagaacttgaaaatgatgatgatgatgatctaggaatcaatgttaccatcttccctgaagattactaagctttggttctgatgtgtcttggccgtaatgtttctacttctgacaggtccttcaggaagtactccagaagaaggcattgttatcatagaaggtgacagcttcatgtgtgttattgcccctgaagaccttccagtggtacaagatgtggaggaggaagacagtgatactgaggattctgaccctgtgtaggcttaggctaatgtgtgtgtttatatcttagtttttcacaaaaaggtttttccaatgttaaaaaaaatatataaaaaagcttatagaataaggatataaagaaatattttgtacagctgtacaataagctaagcattattaccaaagagtcaaaaagttttaagaaattaaagtttataaaccaaatgttcattgtgagccaaggttaatttattgaagaaataaaacatttttaatgaaat

SEQ ID NO: 6386 - DNA, 1867 bp, Homo sapiens
aacggctagcctgaggagctgctgcgacagtccactacctttttcgagagtgactcccgttgtcccaaggcttcccagagcgaacctgtgcggctgcaggcaccggcgcgtcgagtttccggcgtccggaaggaccgagctcttctcgcggatccagtgttccgtttccagcccccaatctcagagcggagccgacagagagcagggaaccggcatggccaaagccgcggcgatcggcatcgacctgggcaccacctactcctgcgtgggggtgttccaacacggcaaggtgcagatctcgtccatggtgctgaccaagatgaaggagatcgccgaggcgtacctgggctacccggtgaccaacgcggtgatcaccgtgccggcctacttcaacgactcgcagcgccaggccaccaaggatgcgggtgtgatcgcggggctcaacgtgctgcggatcatcaacgagcccacggccgccgccatcgcctacggcctggacagaacgggcaagggggagcgcaacgtgctcatctttgacctgggcgggggcaccttcgacgtgtccatcctgacgatcgacgacggcatcttcgaggtgaaggccacggccggggacacccacctgggtggggaggactttgacaacaggctggtgaaccacttcgtggaggagttcaagagaaaacacaagaaggacatcagccagaacaagcgagccgtgaggcggctgcgcaccgcctgcgagagggccaagaggaccctgtcgtccagcacccaggccagcctggagatcgactccctgtttgagggcatcgacttctacacgtccatcaccagggcgaggttcgaggagctgtgctccgacctgttccgaagcaccctggagcccgtggagaaggctctgcgcgacgccaagctggacaaggcccagattcacgacctggtcctggtcgggggctccacccgcatccccaaggtgcagaagctgctgcaggacttcttcaacgggcgcgacctgaacaagagcatcaaccccgacgaggctgtggcctacggggcggcggtgcaggcggccatcctgatgggggacaagtccgagaacgtgcaggacctgctgctgctggacgtggctcccctgtcgctggggctggagacggccggaggcgtgatgactgccctgatcaagcgcaactccaccatccccaccaagcagacgcagatcttcaccacctactccgacaaccaacccggggtgctgatccaggtgtacgagggcgagagggccatgacgaaagacaacaatctgttggggcgcttcgagctgagcggcatccctccggcccccaggggcgtgccccagatcgaggtgaccttcgacatcgatgccaacggcatcctgaacgtcacggccacggacaagagcaccggcaaggccaacaagatcaccatcaccaacgacaagggccgcctgagcaaggaggagatcgagcgcatggtgcaggaggcggagaagtacaaagcggaggacgaggtgcagcgcgagagggtgtcagccaagaacgccctggagtcctacgccttcaacatgaagagcgccgtggaggatgaggggctcaagggcaagatcagcgaggcggacaagaagaaggtgctggacaagtgtcaagaggtcatctcgtggctggacgccaacaccttggccgagaaggacgagtttgagcacaagaggaaggagctggagcaggtgtgtaaccccatcatcagcggactgtaccagggtgccggtggtcccgggcctgggggcttcggggctcagggtcccaagggagggtctgggtcaggccccaccattgaggaggtagattag

SEQ ID NO: 6387 - DNA, 2269 bp, Homo sapiens
agggaggcctgctgaagcctgccaccaccaccaggttttctgtaattggatctgcacaggggcctcagggagtgcagtatgaaaacacccatttccatgcactcccaaccaacacgctgaacaatctgtactcttggtgagaaagacccatgagggactgaaaattctttttctacgtgacactgagaagacagtcacatggtttgggtggctttctagaagatgaccatagaggaccttccagattttccattagaaggaaatcctttgtttggaagatacccatttatattttctgcttctgataccccagttatcttttccatttctgcagcaccaatgccttcagactgtgaattttctttctttgatcctaatgatgcatcatgccaggaaattctttttgatcccaaaacttcagtttcagaattatttgccattttgagacagtgggttcctcaggtccaacaaaacattgacattattggaaatgagattcttaagagaggttgcaatgtgaatgatagagatggattgacagatatgactcttttacattatacctgcaaatctggagctcatggtattggtgatgtggaaacagctgtaaaatttgcaactcagcttattgacctgggagcagacattagtttgcggagtcgctggacaaacatgaatgctttgcattatgctgcttattttgatgtccctgaacttataagagtgattttgaaaacatcgaaaccaaaagatgtggatgccacttgcagtgattttaattttggaacagctttgcatattgcagcatacaacttgtgtgcaggtgctgtgaagtgcctcttggagcagggagcaaatcctgcatttaggaatgacaaaggacagatccctgctgatgttgttccagacccagtagatatgccgttagagatggctgacgccgcagccactgctaaggaaatcaagcagatgcttctagatgcggtgcctctgtcatgtaacatctcaaaggccatgctcccaaattatgatcatgtcactggcaaggcaatgcttacgtcacttggcctgaagttgggggatcgtgttgttattgcaggacagaaggttggtacattaagattttgtggaacaactgaatttgcaagtgggcagtgggctggcattgaactggatgaaccagaaggaaaaaataatggaagtgttggaaaagtccagtactttaaatgtgcccccaagtatggtatttttgcacctctttcaaagataagtaaagcaaaaggtcgaaggaagaatataacacacactccttctacaaaagctgctgtacctctcatcaggtcccagaaaattgacgtagctcatgtgacgtcaaaagtaaatactggattaatgacatcaaaaaaagatagtgcttctgagtcaacactttcattgcctcctggtgaagaacttaaaactgtgacagagaaagatgttgccctgcttggatctgtcagcagctgctcctctacatcttctttggaacacagacagagctaccccaagaaacagaatgcaatcagcagtaacaagaagacaatgagcaaaagcccttccctttcatccagagccagtgctggtatctatggctttttcaaccaggctttcttggtgttttttatcttggtttgtttgtttgaattcctcagcaacatctacagcaaataatagccgttgcgagggggaactccgcctcggagagagagtgttagtggtaggacagagactgggcaccattaggttctttgggacaacaaacttcgctccaggatattggtatggtatagagcttgaaaaaccccatggcaagaatgatggttcagttggaggtgtgcagtattttagctgttctccaagatatggaatatttgctcccccatccagggtgcaaagagtaacagattccctggataccctttcagaaatttcttcaaataaacagaaccattcttatcctggttttaggagaagttttagcacaacttctgcttcttcccaaaaggagattaacagaagaaatgctttttccaagtgagtattaagaagatttagaaaaacacctttcaagatgaacatgatgggattctgtgaagaaagaaaagtggagtgctgtatcttttgcattgcttggtagagttttaacacgtaggagaaaaggtgtgataagtgtattgagaagcgttcttcctccctcctttgcaagcgcaattaaaaatgtcaccagtga

SEQ ID NO: 6388 - DNA, 694 bp, Homo sapiens
gcaggctgagggcaggtgggaagcaaacccggacgcatcgcagcagcagcagcagcagcagaagcagcagcagcagcctccgcagtccctccagagacatggatccccagacagcaccttcccgggcgctcctgctcctgctcttcttgcatctggctttcctgggaggtcgttcccacccgctgggcagccccggttcagcctcggacttggaaacgtccgggttacaggagcagcgcaaccatttgcagggcaaactgtcggagctgcaggtggagcagacatccctggagcccctccaggagagcccccgtcccacaggtgtctggaagtcccgggaggtagccaccgagggcatccgtgggcaccgcaaaatggtcctctacaccctgcgggcaccacgaagccccaagatggtgcaagggtctggctgctttgggaggaagatggaccggatcagctcctccagtggcctgggctgcaaagtgctgaggcggcattaagaggaagtcctggctgcagacacctgcttctgattccacaaggggctttttcctcaaccctgtggccgcctttgaagtgactcatttttttaatgtatttatgtatttatttgattgttttatataagatggtttcttacctttgagcacaaaatttccacggtgaaataaagtcaacattataagcttta

SEQ ID NO: 6389 - DNA, 576 bp, Homo sapiens
agtgcatacagaaggcgcttggctcagggtacacagggcaagaagcctcggatcccagctccctttaacacacattttttcaacgccgttctggaccgagactgtccggggcactgggtgctgcaggacccggctcccagtactcctagcagaagaccctctgatgaaatggcccatgacaaaatgaccaccataaccgttccttcagtaagccaggcaggatggggaagcagaatagcaaactggcccctgaagtgatggaggacctggtgaagagcacagagtttaatgagcatgaactcaagcagtggtacaaaggatttctcaaggactgtccaagtgggaggctaaatctcgaggaatttcagcagctctatgtgaagttctttccttatggagacgcctccaagtttgcccagcatgccttccgaaccttcgacaagaatggggacggcaccattgacttccgagagttcatctgcgctctgtccatcacctccaggggcagctttgagcagaagctgaactgggccttcaatatgtatgacctggatggtgatggcaagatcacccgag

SEQ ID NO: 6390 - DNA, 1340 bp, Homo sapiens
actacggagagagaagccaagggagaggaggaggaggaaactaacgattccctgcccacccccacacccagcaccaccaacaggtgggcaagcttgccgagaaaacgcagagggcatcctgtgagcagcaaacacatctgagcctggaaaagacgcagagaagtaaaagatcaaagtctgattggcaccggctcccattccggctccagcctccaatccgacccccatttcggctgcagcctcggacctagctccggccctcggtctatccggttgcatcctccctccctgttccggatcttatcttgcgccagcgcctactccaggatcccgtagccagacctcaagccatggctggtcccttctcccgtctgctgtccgcccgcccgggactcaggctcctggctttggccggagcggggtctctagccgctgggtttctgctccgaccggaacctgtacgagctgccagtgaacgacggaggctgtatcccccgagccagacatggccaactggacagctcccaggtaactgcactaggtctaggcgtctgtgccctccctccatggttactgggtaccccctccccagcgctgagtacccagacctccgaaagcacaacaactgcatggccagtcacctgaccccagcagtctatgcacggctctgcgacaagaccacacccactggttggacgctagatcagtgtatccagactggcgtggacaaccctggccaccccttcatcaagactgtgggcatggtggctggagatgaggagacctatgaggtatttgctgacctgtttgaccctgtgatccaagagcgacacaatggatatgacccccggacaatgaagcacaccacggatctagatgccagtaaaatccgttctggctactttgatgagaggtatgtattgtcctctagagtcagaactggccgaagcatccgaggactcagtctgcctccagcttgcactcgagcagagcgacgagaggtggaacgtgttgtggtggatgcactgagtggcctgaagggtgacctggctggacgttactataggctcagtgagatgacagaggctgaacagcagcagcttattgatgaccactttctgtttgataagcctgtgtccccgttgctgactgcagcaggaatggctcgagactggccagatgctcgtggaatttggcacaacaatgagaagagcttcctgatctgggtgaatgaggaggatcatacacgggtgatctccatggagaagggtggtaacatgaagagagtgtttgaaagattctgccgaggcctcaaagaggttgttgtggggattaagtga

SEQ ID NO: 6391 - DNA, 450 bp, Homo sapiens
ggccctcttcccggactataaagagagccgccggcttctgggctccaccacgcttttcatctgtcccgctgcgtgttttcctcttgatcgggaactcctgcttctccttgcctcgaaatggaccccaactgctcctgctcgcctgttggctcctgtgcctgtgccggctcctgcaaatgcaaagagtgcaaatgcacctcctgcaagaagagctgctgctcctgctgccctgtgggctgtgccaagtgtgcccagggctgcatctgcaaagggacgtcagacaagtgcagctgctgtgcctgatgccaggacagctgtgctctcagatgtaaatagagcaacctatataaacctggattttttttttttttttttttgtacaaccctgacccgtttgctacatctttttttctatgaaatatgtgaatggcaataaattcatctagacta

SEQ ID NO: 6392 - DNA, 120 bp, Homo sapiens
atggaccccaactgctcctgcaccactggtggctcctgcacgtgcgccggctcctgcaagtgcaaagagtgcaaatgcacctcctgcaagaagagctgctgctcctgctgccccatgggc

SEQ ID NO: 6393 - DNA, 4096 bp, Homo sapiens
agccagcccttgccgtggccggagccgagcggcgcatccgggccggagaagaggacgacgacgaggtcctcgaagtggacccgtttgcgaagcgccagggagaaggaggagcggacgcatcgtagaaaggggtggtggcgcccgaccccgcgccccggcccgaagctctgagggcttcccggcccccactgcctgcggcatggcccggggctcggcgctcccgcggcggccgctgctgtgcatcccggccgtctgggcggccgccgcgcttctgctctcagtgtcccggacttcaggtgaagtggaggttctggatccgaacgaccctttaggaccccttgatgggcaggacggcccgattccaactctgaaaggttactttctgaattttctggagccagtaaacaatatcaccattgtccaaggccagacggcaattctgcactgcaaggtggcaggaaacccaccccctaacgtgcggtggctaaagaatgatgccccggtggtgcaggagccgcggcggatcatcatccggaagacagaatatggttcacgactgcgaatccaggacctggacacgacagacactggctactaccagtgcgtggccaccaacgggatgaagaccattaccgccactggcgtcctgtttgtgcggctgggtccaacgcacagcccaaatcataactttcaggatgattaccacgaggatgggttctgccagccttaccggggaattgcctgtgcacgcttcattggcaaccggaccatttatgtggactcgcttcagatgcagggggagattgaaaaccgaatcacagcggccttcaccatgatcggcacgtctacgcacctgtcggaccagtgctcacagttcgccatcccatccttctgccacttcgtgtttcctctgtgcgacgcgcgctcccggacacccaagccgcgtgagctgtgccgcgacgagtgcgaggtgctggagagcgacctgtgccgccaggagtacaccatcgcccgctccaacccgctcatcctcatgcggcttcagctgcccaagtgtgaggcgctgcccatgcctgagagccccgacgctgccaactgcatgcgcattggcatcccagccgagaggctgggccgctaccatcagtgctataacggctcaggcatggattacagaggaacggcaagcaccaccaagtcaggccaccagtgccagccgtgggccctgcagcacccccacagccaccacctgtccagcacagacttccctgagcttggaggggggcacgcctactgccggaaccccggaggccagatggagggcccctggtgctttacgcagaataaaaacgtacgcatggaactgtgtgacgtaccctcgtgtagtccccgagacagcagcaagatggggattctgtacatcttggtccccagcatcgcaattccactggtcatcgcttgccttttcttcttggtttgcatgtgccggaataagcagaaggcatctgcgtccacaccgcagcggcgacagctgatggcctcgcccagccaagacatggaaatgcccctcattaaccagcacaaacaggccaaactcaaagagatcagcctgtctgcggtgaggttcatggaggagctgggagaggaccggtttgggaaagtctacaaaggtcacctgttcggccctgccccgggggagcagacccaggctgtggccatcaaaacgctgaaggacaaagcggaggggcccctgcgggaggagttccggcatgaggctatgctgcgagcacggctgcaacaccccaacgtcgtctgcctgctgggcgtggtgaccaaggaccagcccctgagcatgatcttcagctactgttcgcacggcgacctccacgaattcctggtcatgcgctcgccgcactcggacgtgggcagcaccgatgatgaccgcacggtgaagtccgccctggagccccccgacttcgtgcaccttgtggcacagatcgcggcggggatggagtacctatccagccaccacgtggttcacaaggacctggccacccgcaatgtgctagtgtacgacaagctgaacgtgaagatctcagacttgggcctcttccgagaggtgtatgccgccgattactacaagctgctggggaactcgctgctgcctatccgctggatggccccagaggccatcatgtacggcaagttctccatcgactcagacatctggtcctacggtgtggtcctgtgggaggtcttcagctacggcctgcagccctactgcgggtactccaaccaggatgtggtggagatgatccggaaccggcaggtgctgccttgccccgatgactgtcccgcctgggtgtatgccctcatgatcgagtgctggaacgagttccccagccggcggccccgcttcaaggacatccacagccggctccgagcctggggcaacctttccaactacaacagctcggcgcagacctcgggggccagcaacaccacgcagaccagctccctgagcaccagcccagtgagcaatgtgagcaacgcccgctacgtggggcccaagcagaaggccccgcccttcccacagccccagttcatccccatgaagggccagatcagacccatggtgcccccgccgcagctctacgtccccgtcaacggctaccagccggtgccggcctatggggcctacctgcccaacttctacccggtgcagatcccaatgcagatggccccgcagcaggtgcctcctcagatggtccccaagcccagctcacaccacagtggcagtggctccaccagcacaggctacgtcaccacggccccctccaacacatccatggcagacagggcagccctgctctcagagggcgctgatgacacacagaacgccccagaagatggggcccagagcaccgtgcaggaagcagaggaggaggaggaaggctctgtcccagagactgagctgctgggggactgtgacactctgcaggtggacgaggcccaagtccagctggaagcttgagtggcaccagggcccggggttcggggatagaagccccgccgagaccccacagggacctcagtcacctttgagaagacaccatactcagcaatcacaagagcccgccggccagtgggcttgtttgcagactgggtgaggtggagccctgctcctctctgtcctctgacacagagagctgccctgcctaggagcacccaagccaggcagggggtctggcagcacggcgtcctggggagcaggacacatggtcatccccagggctgtatacattgattctggtggtagactggtagtgagcagcaaatgcctttcaagaaaataggtggcagcttcactccatgtcatatatggagtgaatatttcaaaacgttgggaataagggcctgcaaaaggcagcgaggaggcacctcgggtcttgaggttcctgacaaccgatctggtctgttggtttgaggatgaaggggctccatttctgctgcctccctgctgagaatattctccctttagcagccaaagattcgctggaacggaggctgccctctgctgcctgttggggtcggaagacaaggggcttctgaaatgggagttcctgagatacaacaaaatgtgtgccttcaaagaaactgacagctttgtatttggtgaaatggttttaattatactccatgtgtattttgcccactttttttgggaattcaagggaaagtgtttcttgggtttggaatgttcagaggaagcagtattgtacagaacacggtattgttatttttgttaagaatcatgtacagagcttaaatgtaatttatatgtttttaatatgccattttcattgaagtattttggtcttaagatgactttagtaatttaactgtttatgttacccacgttgggatccagttggtcttggtttgcttctctctgtaccacgtgcacatgaggtccattcattttacagcccctgttacacacagacccacaggcagccgtctgtgccccgcacacattgttggtcctatttgtaaatcccacacccggtgtatccaataaagtgaaacaaagcatgtg

SEQ ID NO: 6394 - DNA, 784 bp, Homo sapiens
aaattaccaggagaaattgcttccagctcacaatcacatctgcttttggcaagaactaatgcaccaagacttcaagttctaagcctctgttcagattttaattgcaattgatcaggtttatattattgtacctccagagacctcctagagccagaacccggctggcttgctgtttcctttagagcagcgcatatcattatttggtgttctggtggaggacttttctgatggcagaaattagtttctctgggttcatcaggacgggatgcttcaagatttaagtgcaagtgtcttctttccaccttgttcacaacacagaacgttagctcaggtacctgacaatgatgagcagtttgtaccagactatcaggctgaaagtttggcttttcatggcctgccactgaaaatcaagaaagaaccccacagtccatgttcagaaatcagctctgcctgcagtcaagaacagccctttaaattcagctatggagaaaagtgcctgtacaatgtcagatttcgccgccagctttctgaaccctgtaactcctttcctcctttgccgacgatgccaagggaaggacgtcctatgtaccaacgccagatgtctgagccaaacatccccttcccaccacaaggctttaagcaggagtaccacgacccagtgtatgaacacaacaccatggttggcagtgcggccagccaaagctttccccctcctctgatgattaaacaggaacccagagattttgcatatgactcagaagtgcctagctgccactccatttat

SEQ ID NO: 6395 - DNA, 4318 bp, Homo sapiens
atatgacactggcagattaaaacgctctgatggggaagggcttaaaggctgagtcaaaagccaagaagtctctttatttacgcctacctcccagcccttggcaatctgactaataacaaactgagctaacaagaaatactagaaaaggaggaaggagaacattgctgtagcttggatctacaacctaagaaagcaagagtgatcaatctcagctctgttaaacatcttgtttacttactgcattcagcagcttgcaaatggttaactatatgcaaaaaagtcagcatagctgtgaagtatgccgtgaattttaattgagggaaaaagggacaattgcttcaggatgctctagtatgcactctgcttgaaatattttcaatgaaatgctcagtattctatctttgaccagaggttttaactttatgaagctatgggacttgacaaaaagtgatatttgagaagaaagtacgcagtggttggtgttttcttttttttaataaaggaattgaattactttgaacacctcttccagctgtgcattacagataacgtcaggaagagtctctgctttacagaatcggatttcatcacatgacaacatgaagctgtggattcatctcttttattcatctctccttgcctgtatatctttacactcccaaactccagtgctctcatccagaggctcttgtgattctctttgcaattgtgaggaaaaagatggcacaatgctaataaattgtgaagcaaaaggtatcaagatggtatctgaaataagtgtgccaccatcacgacctttccaactaagcttattaaataacggcttgacgatgcttcacacaaatgacttttctgggcttaccaatgctatttcaatacaccttggatttaacaatattgcagatattgagataggtgcatttaatggccttggcctcctgaaacaacttcatatcaatcacaattctttagaaattcttaaagaggatactttccatggactggaaaacctggaattcctgcaagcagataacaattttatcacagtgattgaaccaagtgcctttagcaagctcaacagactcaaagtgttaattttaaatgacaatgctattgagagtcttcctccaaacatcttccgatttgttcctttaacccatctagatcttcgtggaaatcaattacaaacattgccttatgttggttttctcgaacacattggccgaatattggatcttcagttggaggacaacaaatgggcctgcaattgtgacttattgcagttaaaaacttggttggagaacatgcctccacagtctataattggtgatgttgtctgcaacagccctccattttttaaaggaagtatactcagtagactaaagaaggaatctatttgccctactccaccagtgtatgaagaacatgaggatccttcaggatcattacatctggcagcaacatcttcaataaatgatagtcgcatgtcaactaagaccacgtccattctaaaactacccaccaaagcaccaggtttgataccttatattacaaagccatccactcaacttccaggaccttactgccctattccttgtaactgcaaagtcctatccccatcaggacttctaatacattgtcaggagcgcaacattgaaagcttatcagatctgagacctcctccgcaaaatcctagaaagctcattctagcgggaaatattattcacagtttaatgaagtctgatctagtggaatatttcactttggaaatgcttcacttgggaaacaatcgtattgaagttcttgaagaaggatcgtttatgaacctaacgagattacaaaaactctatctaaatggtaaccacctgaccaaattaagtaaaggcatgttccttggtctccataatcttgaatacttatatcttgaatacaatgccattaaggaaatactgccaggaacctttaatccaatgcctaaacttaaagtcctgtatttaaataacaacctcctccaagttttaccaccacatattttttcaggggttcctctaactaaggtaaatcttaaaacaaaccagtttacccatctacctgtaagtaatattttggatgatcttgatttgctaacccagattgaccttgaggataacccctgggactgctcctgtgacctggttggactgcagcaatggatacaaaagttaagcaagaacacagtgacagatgacatcctctgcacttcccccgggcatctcgacaaaaaggaattgaaagccctaaatagtgaaattctctgtccaggtttagtaaataacccatccatgccaacacagactagttaccttatggtcaccactcctgcaacaacaacaaatacggctgatactattttacgatctcttacggacgctgtgccactgtctgttctaatattgggacttctgattatgttcatcactattgttttctgtgctgcagggatagtggttcttgttcttcaccgcaggagaagatacaaaaagaaacaagtagatgagcaaatgagagacaacagtcctgtgcatcttcagtacagcatgtatggccataaaaccactcatcacactactgaaagaccctctgcctcactctatgaacagcacatggtgagccccatggttcatgtctatagaagtccatcctttggtccaaagcatctggaagaggaagaagagaggaatgagaaagaaggaagtgatgcaaaacatctccaaagaagtcttttggaacaggaaaatcattcaccactcacagggtcaaatatgaaatacaaaaccacgaaccaatcaacagaatttttatccttccaagatgccagctcattgtacagaaacattttagaaaaagaaagggaacttcagcaactgggaatcacagaatacctaaggaaaaacattgctcagctccagcctgatatggaggcacattatcctggagcccacgaagagctgaagttaatggaaacattaatgtactcacgtccaaggaaggtattagtggaacagacaaaaaatgagtattttgaacttaaagctaatttacatgctgaacctgactatttagaagtcctggagcagcaaacatagatggagagtttgagggctttcgcagaaatgctgtgattctgttttaagtccataccttgtaaataagtgccttacgtgagtgtgtcatcaatcagaacctaagcacagcagtaaactatggggaaaaaaaaagaagaagaaaaagaaactcagggatcactgggagaagccatggcattatcttcaggcaatttagtctgtcccaaataaaataaatccttgcatgtaaatcattcaaggattatagtaatatttcatatactgaaaagtgtctcataggagtcctcttgcacatctaaaaaggctgaacatttaagtatcccgaattttcttgaattgctttccctatagattaattacaattggatttcatcatttaaaaaccatacttgtatatgtagttataatatgtaaggaatacattgtttataaccagtatgtacttcaaaaatgtgtattgtcaaacatacctaactttcttgcaataaatgcaaaagaaactggaacttgacaattataaatagtaatagtgaagaaaaaatagaaaggttgcaattatataggccatgggtggctcaaaactttgaacatttgagcttaaacaaatgccactctcatgcattctaaattaaaaagttaaaatgattaatagttcaggtggaagaaataagcatactttttgggttttctacacattttgtgtagacaattttaatgtcagtgctgctgtgaactaaagtatgtcatttatgctcaaagtttaattcttcttcttgggatattttaaaaatgctactgagattctgctgtaaatatgactagagaatatattgggtttgctttatttcataggcttaattctttgtaaatctgaatgaccataatagaaatacatttcttgtggcaagtaattcacagttgtaaagtaaataggaaaaattattttatttttattgatgtacattgatagatgccataaatcagtagcaaaaggcacttctaaaggtaagtggtttaagttgcctcaagagagggacaatgtagctttattttacaagaaggcatagttagatttctatgaaatatttattctgtacagttttatatagttttggttcacaaaagtaattattcttgggtgcctttcaagaaaattaaaaatactactcactacaataaaactaaaatgaaaa

SEQ ID NO: 6396 - DNA, 573 bp, Homo sapiens
cacaggtctgagggcctgatgtgtgtgaaaccattctgcagagctgggaacgggtcaggaggtggttgtgtgtgtgtgtgtgtgtgtgtgtgtgcattgctggagggcactccttgtgtgctctgagtgtgacagaggaagtcaccctggacttaggttggatgggagagcatgtctgtgtgtctcagagccaccaaggaggagcaggggagcgacggccggggcagaagttgagaccacccagcagaggagctaggccagtccatctgcatttgtcacccaagaactcttaccatgaagaccctcctactgttggcagtgatcatgatctttgaatgatcaagttgacgacaggaaaggaagccgcactcagttatggcttctacggctgccactgtggcgtgggtggcagaggatcccccaaggatgcaacggatcggtgaggccacctatccctccctaccctcctagactctggcccaggcagggctgggagctgcaaagacagtgccggttcctgatgggcgcagaggtctcaggatggcctggctggaaaagcagccggcatgttgg

SEQ ID NO: 6397 - DNA, 936 bp, Homo sapiens
agttctcaagtcagatctcttctcataagggcactgtgtggagcttctgagatctgtggaggtttttctctgcaaatgcaggaagaaatcaggtggatggatgcataattatggccctgctcctggtctctttgctggcattcctgagcttgggctcaggatgtcatcatcggatctgtcactgctctaacagggtttttctctgccaagagagcaaggtgacagagattccttctgacctcccgaggaatgccattgaactgaggtttgtcctcaccaagcttcgagtcatccaaaaaggtgcattttcaggatttggggacctggagaaaatagagatctctcagaatgatgtcttggaggtgatagaggcagatgtgttctccaaccttcccaaattacatgaaattagaattgaaaaggccaacaacctgctctacatcaaccctgaggccttccagaaccttcccaaccttcaatatctatccttctcttcttttgttttggagaatgccaaagtggaaaatggggatcatagagccttcagtgacagaacaaatgctctctaggacatgaagaggcatccccagagacactttcattcataaactatcacatatggctaatgcaaagcactcctgccaaggacaaacccaagaagaaaaccagctcttcacatagatatccctagcccatgataataatagcatatctgaaaatgcggattggaaacaggttaatatccaacacaggtattaagcaccttccagatgttcacaagattcattctctccaaaaagttttacttgacattcaagataacataaacatccacacaattgaaagaaattctttcgtggggctgagctttgaaagtgtgattctatggctgaataagaatgggattcaagaaatacacaactgtgcattcaatgg

SEQ ID NO: 6398 - DNA, 1833 bp, Homo sapiens
gggtagtgagccggctgagaggcatggagacgcaggaacttcggggggccctggctcttctcctcctttgctttttcacatctgccagtcaggatctgcaggtaattgacctgctgactgtgggcgagtctcggcagatggtagctgtggcagagaagatccggacagccttgctcactgctggggacatctacctcttatccaccttccgcctgccccccaagcagggtggtgtcctctttggcctctattctcgccaagacaacactcgatggctggaggcctctgttgtaggcaagatcaacaaagtgaccaatgcactgcactccattctaggtgaaggaaatgtccctgatccgaaacaccattatggagtgtcaggcttccatgagcagcgttcccactgcagccccaatccctgcttccgaggtgtggactgcatggaagtgtacgagtacccaggctaccgctgtgggccctgcccccctggcctgcagggcaacggcacccactgcagtgacatcaatgagtgtgctcacgctgacccctgtttcccgggctccagctgcatcaacaccatgcccggcttccactgtgaggcctgtcctcgagggtacaagggcacacaggtgtctggtgtgggcattgactatgcccgggccagcaaacaggtctgcaatgacatcgatgaatgcaacgatggcaacaatggtggctgtgacccaaactccatctgcaccaacactgtgggctctttcaagtgtggtccctgccgcctgggtttcctgggcaaccagagccagggctgcctcccagcccggacctgccacagcccagcccacagcccctgccacatccatgctcactgtctctttgaacgcaatggtgcagtgtcctgccagtgtaacgtgggctgggctgggaatgggaacgtgtgtgggactgacacagacatcgatggctacccagaccaagcactgccctgcatggacaacaacaaacactgcaaacaggacaactgccttttgacacccaactctgggcaggaagatgctgataatgatggtgtgggggaccagtgtgatgatgatgctgatggggatgggatcaagaatgttgaggcatccccaatggattggacaattgccctaaagtccccaacccactacagacagacagggatgaggacggggtgggagatgcttgcgacagctgccctgaaatgagcaatcctacccagacagatgcagacagcgacctggtgggggatgtctgtgatactaatgaagacagaccttcacctcacctggctgactgccaggggtctgattgtatggagagcaggctccagagactcccaggcagaagcgaagggaaggacaaggagtacctttaaatcctttatttggtacctgttcttctgattagcgatggggatgggcatcaggacaccaaggacaactgcccacagctgccaaatagctcccagctggactctgataacgatggacttggagatgagtgtgatggggatgatgacaatgatggcatcccagattatgtgcctcctggtcccgataactgccgcctggtacccaatcccaatcagaaggactcagatggcaatggcgttggtgatgtgtgtgaggatgactttgacaatgatgctgtggtcgaccccctggatgtgtgtcctgaaagtgcagaggtaacgcttacggattttcgggcctatcagaccgtcgtcctggatcctgagggtgatgctcagattgacccaaactgggttgtgctcaaccagggcatggaaatcgttcagaccatgaacagtga

SEQ ID NO: 6399 - DNA, 2851 bp, Homo sapiens
tagtcgcgggtccccgagtgagcacgccagggagcaggagaccaaacgacgggggtcggagtcagagtcgcagtgggagtccccggaccggagcacgagcctgagcgggagagcgccgctcgcacgcccgtcgccacccgcgtacccggcgcagccagagccaccagcgcagcgctgccatggagcccagcagcaagaagctgacgggtcgcctcatgctggccgtgggaggagcagtgcttggctccctgcagtttggctacaacactggagtcatcaatgccccccagaaggtgatcgaggagttctacaaccagacatgggtccaccgctatggggagagcatcctgcccaccacgctcaccacgctctggtccctctcagtggccatcttttctgttgggggcatgattggctccttctctgtgggccttttcgttaaccgctttggccggcggaattcaatgctgatgatgaacctgctggccttcgtgtccgccgtgctcatgggcttctcgaaactgggcaagtcctttgagatgctgatcctgggccgcttcatcatcggtgtgtactgcggcctgaccacaggcttcgtgcccatgtatgtgggtgaagtgtcacccacagcccttcgtggggccctgggcaccctgcaccagctgggcatcgtcgtcggcatcctcatcgcccaggtgttcggcctggactccatcatgggcaacaaggacctgtggcccctgctgctgagcatcatcttcatcccggccctgctgcagtgcatcgtgctgcccttctgccccgagagtccccgcttcctgctcatcaaccgcaacgaggagaaccgggccaagagtgtgctaaagaagctgcgcgggacagctgacgtgacccatgacctgcaggagatgaaggaagagagtcggcagatgatgcgggagaagaaggtcaccatcctggagctgttccgctcccccgcctaccgccagcccatcctcatcgctgtggtgctgcagctgtcccagcagctgtctggcatcaacgctgtcttctattactccacgagcatcttcgagaaggcgggggtgcagcagcctgtgtatgccaccattggctccggtatcgtcaacacggccttcactgtcgtgtcgctgtttgtggtggagcgagcaggccggcggaccctgcacctcataggcctcgctggcatggcgggttgtgccatactcatgaccatcgcgctagcactgctggagcagctaccctggatgtcctatctgagcatcgtggccatctttggctttgtggccttctttgaagtgggtcctggccccatcccatggttcatcgtggctgaactcttcagccagggtccacgtccagctgccattgccgttgcaggcttctccaactggacctcaaatttcattgtgggcatgtgcttccagtatgtggagcaactgtgtggtccctacgtcttcatcatcttcactgtgctcctggttctgttcttcatcttcacctacttcaaagttcctgagactaaaggccggaccttcgatgagatcgcttccggcttccggcaggggggagccagccaaagtgacaagacacccgaggagctgttccatcccctgggggctgattcccaagtgtgagtcgccccagatcaccagcccggcctgctcccagcagccctaaggatctctcaggagcacaggcagctggatgagacttccaaacctgacagatgtcagccgagccgggcctggggctcctttctccagccagcaatgatgtccagaagaatattcaggacttaacggctccaggattttaacaaaagcaagactgttgctcaaatctattcagacaagcaacaggttttataatttttttattactgattttgttatttttatatcagcctgagtctcctgtgcccacatcccaggcttcaccctgaatggttccatgcctgagggtggagactaagccctgtcgagacacttgccttcttcacccagctaatctgtagggctggacctatgtcctaaggacacactaatcgaactatgaactacaaagcttctatcccaggaggtggctatggccacccgttctgctggcctggatctccccactctaggggtcaggctccattaggatttgccccttcccatctcttcctacccaaccactcaaattaatctttctttacctgagaccagttgggagcactggagtgcagggaggagaggggaagggccagtctgggctgccgggttctagtctcctttgcactgagggccacactattaccatgagaagagggcctgtgggagcctgcaaactcactgctcaagaagacatggagactcctgccctgttgtgtatagatgcaagatatttatatatatttttggttgtcaatattaaatacagacactaagttatagtatatctggacaagccaacttgtaaatacaccacctcactcctgttacttacctaaacagatataaatggctggtttttagaaacatggttttgaaatgcttgtggattgagggtaggaggtttggatgggagtgagacagaagtaagtggggttgcaaccactgcaacggcttagacttcgactcaggatccagtcccttacacgtacctctcatcagtgtcctcttgctcaaaaatctgtttgatccctgttacccagagaatatatacattctttatcttgacattcaaggcatttctatcacatatttgatagttggtgttcaaaaaaacactagttttgtgccagccgtgatgctcaggcttgaaatgcattattttgaatgtgaag

SEQ ID NO: 6400 - DNA, 444 bp, Homo sapiens
gggttcggtccgagcccggtgggaggctcccggagcgcagcctgggcccagcccaccccgcgccggcggccatggcaggcaccctggacctggacaagggctgcacggtggaggagctgctccgcgggtgcatcgaagccttcgctggcggccaagctgctccacatctaccaacaatcccggaaggacaactccaattccctgcaggtgaaaacgtgccacctggtcaggtactggatctccgccttcccagcggagtttgacttgaacccggagttggctgagcagatcaaggagctgaaggctctgctagaccaagaagggaaccgacggcacagcagcctaatcgacatagacagcgtgtgcgtggggggagcacagagggctgggggggcactcagtatcctataccatctgtgcttaataaatgtctgttgaactgaa

SEQ ID NO: 6401 - DNA, 10108 bp, Homo sapiens; identical to SEQ ID NO: 2504

SEQ ID NO: 6402 - DNA, 2610 bp, Homo sapiens
agctgaattttttttttccctctctctttcttcactcctttttctttccaaacagggaaaagtgttccacgaagcggtagcgccttttcgcctcgcgttttcctccctgaccctggtcccggctcccgtccgggcgccagctggtggggcgagcgccgggagcccatctgcccccaggggcacggggcgcggggccggctcccgcccggcacatggctgcagccacctcgcgcgcaccccgaggcgccgcgcccagctcgcccgaggtccgtcggaggcgcccggccgccccggagccaagcagcagctgagcggggaagcgcccgcgtccggggatcgggatgtccctcctccttctcctcttgctagtttcctactatgttggaaccttggggactcacactgagatcaagagagtggcagaggaaaaggtcactttgccctgccaccatcaactggggcttccagaaaaagacactctggatattgaatggctgctcaccgataatgaagggaaccaaaaagtggtgatcacttactccagtcgtcatgtctacaataacttgactgaggaacagaagggccgagtggcctttgcttccaatttcctggcaggagatgcctccttgcagattgaacctctgaagcccagtgatgagggccggtacacctgtaaggttaagaattcagggcgctacgtgtggagccatgtcatcttaaaagtcttagtgagaccatccaagcccaagtgtgagttggaaggagagctgacagaaggaagtgacctgactttgcagtgtgagtcatcctctggcacagagcccattgtgtattactggcagcgaatccgagagaaagagggagaggatgaacgtctgcctcccaaatctaggattgactacaaccaccctggacgagttctgctgcagaatcttaccatgtcctactctggactgtaccagtgcacagcaggcaacgaagctgggaaggaaagctgtgtggtgcgagtaactgtacagtatgtacaaagcatcggcatggttgcaggagcagtgacaggcatagtggctggagccctgctgattttcctcttggtgtggctgctaatccgaaggaaagacaaagaaagatatgaggaagaagagagacctaatgaaattcgagaagatgctgaagctccaaaagcccgtcttgtgaaacccagctcctcttcctcaggctctcggagctcacgctctggttcttcctccactcgctccacagcaaatagtgcctcacgcagccagcggacactgtcaactgacgcagcaccccagccagggctggccacccaggcatacagcctagtggggccagaggtgagaggttctgaaccaaagaaagtccaccatgctaatctgaccaaagcagaaaccacacccagcatgatccccagccagagcagagccttccaaacggtctgaattacaatggacttgactcccacgctttcctaggagtcagggtctttggactcttctcgtcattggagctcaagtcaccagccacacaaccagatgagaggtcatctaagtagcagtgagcattgcacggaacagattcagatgagcattttccttatacaataccaaacaagcaaaaggatgtaagctgattcatctgtaaaaaggcatcttattgtgcctttagaccagagtaagggaaagcaggagtccaaatctatttgttgaccaggacctgtggtgagaaggttggggaaaggtgaggtgaatatacctaaaacttttaatgtgggatattttgtatcagtgctttgattcacaattttcaagaggaaatgggatgctgtttgtaaattttctatgcatttctgcaaacttattggattattagttattcagacagtcaagcagaacccacagccttattacacctgtctacaccatgtactgagctaaccacttctaagaaactccaaaaaaggaaacatgtgtcttctattctgacttaacttcatttgtcataaggtttggatattaatttcaaggggagttgaaatagtgggagatggagaagagtgaatgagtttctcccactctatactaatctcactatttgtattgagcccaaaataactatgaaaggagacaaaaatttgtgacaaaggattgtgaagagctttccatcttcatgatgttatgaggattgttgacaaacattagaaatatataatggagcaattgtggatttcccctcaaatcagatgcctctaaggactttcctgctagatatttctggaaggagaaaatacaacatgtcatttatcaacgtccttagaaagaattcttctagagaaaaagggatctaggaatgctgaaagattacccaacataccattatagtctcttctttctgagaaaatgtgaaaccagaattgcaagactgggtggactagaaagggagattagatcagttttctcttaatatgtcaaggaaggtagccgggcatggtgccaggcacctgtaggaaaatccagcaggtggaggttgcagtgagccaagattatgccattgcactccagcctgggtgacaaagcaagactccatctc

SEQ ID NO: 6403 - DNA, 1046 bp, Homo sapiens
gagcaaggagctggcagcaatggggcctggagcttcaggggacggggtcaggactgagacagctccacacatagcactggactccagagttggtctgcacgcctacgacatcagcgtggtggtcatctactttgtcttcgtcattgctgtggggatctggtcgtccatccgtgcaagtcgagggaccattggcggctatttcctggccgggaggtccatgagctggtggccaattggagcatctctgatgtccagcaatgtgggcagtggcttgttcatcggcctggctgggacaggggctgccggaggccttgccgtaggtggcttcgagtggaacgcaacctggctgctcctggcccttggctgggtcttcgtccctgtgtacatcgcagcaggtgtggtcacaatgccgcagtatctgaagaagcgatttgggggccagaggatccaggtgtacatgtctgtcctgtctctcatcctctacatcttcaccaagatctcgggatcctgctggtggtgactgccgtctacaccattgcaggtggcctcatggccgtgatctacacagatgctctgcagacggtgatcatggtagggggagccctggtcctcatgtttctgggtcattgtgcagcggtctctctcggccaagagtctgtctcatgccaagggaggctccgtgctggggggctacctgaagatcctccccatgttcttcatcgtcatgcctggcatgatcagccgggccctgttcccagacgaggtgggctgcgtggaccctgatgtctgccaaagaatctgtggggcccgagtgggatgttccaacattgcctaccctaagttggtcatggccctcatgcctgttggtctgcgggggctgatgattgccgtgatcatggccgctctcatgagctcactcacctccatcttcaacagcagcagcaccctgttcaccattgatgtgtggcagcgcttccgcaggaagtcaacagagcaggagctgatggtggtgggcagagtgtttgtggtgttcctggttgtcatca

SEQ ID NO: 6404 - DNA, 6742 bp, Homo sapiens
aaagttgcagggctgcgtctgcactacggagcctctagattgctgaaaacagtcttatggaaggataacacattgtctgtcactggctggttgtaatgcaaggaagggacaaagatgaaatggaaacatgttccttttttggtcatgatatcactcctcagcttatccccaaatcacctgtttctggcccagcttattccagaccctgaagatgtagagagggggaacgaccacgggacgccaatccccacctctgataacgatgacaattcgctgggctatacaggctcccgtcttcgtcaggaagattttccacctcgcattgttgaacacccttcagacctgattgtctcaaaaggagaacctgcaactttgaactgcaaagctgaaggccgccccacacccactattgaatggtacaaagggggagagagagtggagacagacaaagatgaccctcgctcacaccgaatgttgctgccgagtggatctttatttttcttacgtatagtacatggacggaaaagtagacctgatgaaggagtctatgtctgtgtagcaaggaattaccttggagaggctgtgagccacaatgcatcgctggaagtagccatacttcgggatgacttcagacaaaacccttcggatgtcatggttgcagtaggagagcctgcagtaatggaatgccaacctccacgaggccatcctgagcccaccatttcatggaagaaagatggctctccactggatgataaagatgaaagaataactatacgaggaggaaagctcatgatcacttacacccgtaaaagtgacgctggcaaatatgtttgtgttggtaccaatatggttggggaacgtgagagtgaagtagccgagctgactgtcttagagagaccatcatttgtgaagagacccagtaacttggcagtaactgtggatgacagtgcagaatttaaatgtgaggcccgaggtgaccctgtacctacagtacgatggaggaaagatgatggagagctgcccaaatccagatatgaaatccgagatgatcataccttgaaaattaggaaggtgacagctggtgacatgggttcatacacttgtgttgcagaaaatatggtgggcaaagctgaagcatctgctactctgactgttcaagaacctccacattttgttgtgaaaccccgtgaccaggttgttgctttgggacggactgtaacttttcagtgtgaagcaaccggaaatcctcaaccagctattttctggaggagagaagggagtcagaatctacttttctcatatcaaccaccacagtcatccagccgattttcagtctcccagactggcgacctcacaattactaatgtccagcgatctgatgttggttattacatctgccagactttaaatgttgctggaagcatcatcacaaaggcatatttggaagttacagatgtgattgcagatcggcctcccccagttattcgacaaggtcctgtgaatcagactgtagccgtggatggcactttcgtcctcagctgtgtggccacaggcagtccagtgcccaccattctgtggagaaaggatggagtcctcgtttcaacccaagactctcgaatcaaacagttggagaatggagtactgcagatccgatatgctaagctgggtgatactggtcggtacacctgcattgcatcaacccccagtggtgaagcaacatggagtgcttacattgaagttcaagaatttggagttccagttcagcctccaagacctactgacccaaatttaatccctagtgccccatcaaaacctgaagtgacagatgtcagcagaaatacagtcacattatcgtggcaaccaaatttgaattcaggagcaactccaacatcttatattatagaagccttcagccatgcatctggtagcagctggcagaccgtagcagagaatgtgaaaacagaaacatctgccattaaaggactcaaacctaatgcaatttaccttttccttgtgagggcagctaatgcatatggaattagtgatccaagccaaatatcagatccagtgaaaacacaagatgtcctaccaacaagtcagggggtggaccacaagcaggtccagagagagctgggaaatgctgttctgcacctccacaaccccaccgtcctttcttcctcttccatcgaagtgcactggacagtagatcaacagtctcagtatatacaaggatataaaattctctatcggccatctggagccaaccacggagaatcagactggttagtttttgaagtgaggacgccagccaaaaacagtgtggtaatccctgatctcagaaagggagtcaactatgaaattaaggctcgccctttttttaatgaatttcaaggagcagatagtgaaatcaagtttgccaaaaccctggaagaagcacccagtgccccaccccaaggtgtaactgtatccaagaatgatggaaacggaactgcaattctagttagttggcagccacctccagaagacactcaaaatggaatggtccaagagtataaggtttggtgtctgggcaatgaaactcgataccacatcaacaaaacagtggatggttccaccttttccgtggtcattccctttcttgttcctggaatccgatacagtgtggaagtggcagccagcactggggctgggtctggggtaaagagtgagcctcagttcatccagctggatgcccatggaaaccctgtgtcacctgaggaccaagtcagcctcgctcagcagatttcagatgtggtgaagcagccggccttcatagcaggtattggagcagcctgttggatcatcctcatggtcttcagcatctggctttatcgacaccgcaagaagagaaacggacttactagtacctacgcgggtatcagaaaagtcccgtcttttaccttcacaccaacagtaacttaccagagaggaggcgaagctgtcagcagtggagggaggcctggacttctcaacatcagtgaacctgccgcgcagccatggctggcagacacgtggcctaatactggcaacaaccacaatgactgctccatcagctgctgcacggcaggcaatggaaacagcgacagcaacctcactacctacagtcgcccagctgattgtatagcaaattataacaaccaactggataacaaacaaacaaatctgatgctccctgagtcaactgtttatggtgatgtggaccttagtaacaaaatcaatgagatgaaaaccttcaatagcccaaatctgaaggatgggcgttttgtcaatccatcagggcagcctactccttacgccaccactcagctcatccagtcaaacctcagcaacaacatgaacaatggcagcggggactctggcgagaagcactggaaaccactgggacagcagaaacaagaagtggcaccagttcagtacaacatcgtggagcaaaacaagctgaacaaagattatcgagcaaatgacacagttcctccaactatcccatacaaccaatcatacgaccagaacacaggaggatcctacaacagctcagaccggggcagtagtacatctgggagtcaggggcacaagaaaggggcaagaacacccaaggtaccaaaacagggtggcatgaactgggcagacctgcttcctcctcccccagcacatcctcctccacacagcaatagcgaagagtacaacatttctgtagatgaaagctatgaccaagaaatgccatgtcccgtgccaccagcaaggatgtatttgcaacaagatgaattagaagaggaggaagatgaacgaggccccactccccctgttcggggagcagcttcttctccagctgccgtgtcctatagccatcagtccactgccactctgactccctccccacaggaagaactccagcccatgttacaggattgtccagaggagactggccacatgcagcaccagcccgacaggagacggcagcctgtgagtcctcctccaccaccacggccgatctcccctccacatacctatggctacatttcaggacccctggtctcagatatggatacggatgcgccagaagaggaagaagacgaagccgacatggaggtagccaagatgcaaaccagaaggcttttgttacgtgggcttgagcagacacctgcctccagtgttggggacctggagagctctgtcacggggtccatgatcaacggctggggctcagcctcagaggaggacaacatttccagcggacgctccagtgttagttcttcggacggctcctttttcactgatgctgactttgcccaggcagtcgcagcagcggcagagtatgctggtctgaaagtagcacgacggcaaatgcaggatgctgctggccgtcgacattttcatgcgtctcagtgccctaggcccacaagtcccgtgtctacagacagcaacatgagtgccgccgtaatgcagaaaaccagaccagccaagaaactgaaacaccagccaggacatctgcgcagagaaacctacacagatgatcttccaccacctcctgtgccgccacctgctataaagtcacctactgcccaatccaagacacagctggaagtacgacctgtagtggtgccaaaactcccttctatggatgcaagaacagacagatcatcagacagaaaaggaagcagttacaaggggagagaagtgttggatggaagacaggttgttgacatgcgaacaaatccaggtgatcccagagaagcacaggaacagcaaaatgacgggaaaggacgtggaaacaaggcagcaaaacgagaccttccaccagcaaagactcatctcatccaagaggatattctaccttattgtagacctacttttccaacatcaaataatcccagagatcccagttcctcaagctcaatgtcatcaagaggatcaggaagcagacaaagagaacaagcaaatgtaggtcgaagaaatattgcagaaatgcaggtacttggaggatatgaaagaggagaagataataatgaagaattagaggaaactgaaagctgaagacaaccaagaggcttatgagatctaatgtgaaaatcatcactcaagatgcctcctgtcagatgacacatgacgccagataaaatgttcagtgcaatcagagtgtacaaattgtcgtttttattcctcttattgggatatcattttaaaaactttattgggtttttattgttgttgtttgatccctaaccctacaaagagccttcctattcccctcgctgttggagcaaaccattataccttacttccagcaagcaaagtgctttgacttcttgcttcagtcatcagccagcaagagggaacaaaactgttcttttgcattttgccgctgagatatggcattgcactgcttatatgccaagctaatttatagcaagatattgatcaaatatagaaagttgatattcaacctcacaagggctctcaaagtataatctttctatagccaactgctaatgcaaattaaaacatatttcattttaacatgatttcaaaatcagtttttcatactaccctttgctggaagaaactaaaaatatagcaaatgcagaaccacaaacaattcgaatggggtagaaacattgtaaatatttactctttgcaaaccctggtggtattttattttggcttcatttcaatcattgaagtatattcttattggaaatgtacttttggataagtagggctaagccagttggatctctggttgtctagtcattgtcataagtaaacctagtaaaaccttgttctatttttcaatcatcaaaaagtaattataaatacgtattacaaacaagtggatgtttttaatgaccaattgagtaagaacatccctgtcttaactggcctaaatttcttctggtagtgtcagttcaactttcagaagtgccacttaaggaagtttgatttttgtttttgtaatgcactgtttttaatctctctctctttttttttttttttttggttttaaaagcacaatcactaaactttatttgtaaaccattgtaactattaaccttttttgtcttattgaaaaaaaaaatgttgagaagcgtttttaacctgttttgttaatgctctatgtttgtatttggaatatttgaataatgacagatggtgaagtaacatgcatactttattgtgggccatgaaccaaatggttcttacttttcctggacttaaagaaaaaaagaggtttaagtttgttgtggccaatgtcgaaacctacaagatttccttaaaatctctaatagaggcattacttgctttcaattgacaaatgatgccctctgactagtagatttctatgatccttttttgtcattttatgaatatcattgattttataattggtgctatttgaagaaaaaaatgtacatttattcatagatagataagtatcaggtctgaccccagtggaaaacaaagccaaacaaaactgaaccacaaaaaaaaaggctggtgttcaccaaaaccaaacttgttcatttagataatttgaaaaagttccatagaaaaggcgtgcagtactaagggaacaatccatgtgattaatgttttcattatgttcatgtaagaagccccttatttttagccataattttgcatactgaaaatccaataatcagaaaagtaattttgtcacattatttattaaaaatgttctcaaata

SEQ ID NO: 6405 - DNA, 349 bp, Homo sapiens
gctgctcttcgctaggccaaatagtatcccagctttctgccagctactagctacctgtagaggtatatgaagttgaagaaatatggagatcaacacaaaactgctcatcagtgttacctgtatcagctttttcacctttcagcttcttttctactttgtaagttactggttttcagcaaaagtttctccaggtttcaatagtctcagcttcaaaaagaagattgaatggaactcaagggtagtatccacatgccattctttggtggttggtatttttggcctgtacattttcttattcgatgaggctactaaagctgatccactttggggtggtccatcacttgcaaac

SEQ ID NO: 6406 - DNA, 1002 bp, Homo sapiens
cagacaaaggcgggcgcagcccagcagccgtgcgggcaccgggcgaggcaggcccactcctcccggtagcgggaaggatgaccacgctcacacgacaagacctcaactttggccaagtggtggccgatgtgctctgcgagttcctggaggtggctgtgcatctcatcctctacgtgcgcgaggtctaccccgtgggcatcttccagaaacgcaagaagtacaacgtgccggtccagatgtcctgccacccggagctgaatcagtatatccaggacacgctgcactgcgtcaagccactcctggagaagaatgatgtggagaaagtggtggtggtgattttggataaagagcaccgcccagtggagaaattcgtctttgagatcacccagcctccactgctgtccatcaggtgggctgcccctgcccctcgcccactagctggcatcagctcagactcgctgttgtctcatgtggagcagctgctccgggccttcatcctgaagatcagcgtgtgcgatgccgtcctggaccacaaccccccaggctgtaccttcacagtcctggtgcacacgagagaagccgccactcgcaacatggagaagatccaggtcatcaaggatttcccctggatcctggcggatgagcaggatgtccacatgcatgacccccggctgataccactaaaaaccatgacgtcggacattttaaagatgcagctttacgtggaagagcgcgctcataaaggcagctgagggggcacctgccaccccactgatgcccaaactgtcagactttgggggatccccgcctagggcagtgctgcatggctgccctgattccaagtgctcttatcgcctctgtgtgtggatcgcccgccccagcccggggccgctcaggtctgcttggaggatgcctcccccaggagggcagtgagggatgccgcaacctcgacttctcagcctcctggggttccgccggccaacactgtctgtctcaaatact

SEQ ID NO: 6407 - DNA, 4143 bp, Homo sapiens; identical to SEQ ID NO: 5204

SEQ ID NO: 6408 - DNA, 1512 bp, Homo sapiens
atgagcgcggtattactgctggccctcctggggttcatcctcccactgccaggagtgcaggcgctgctctgccagtttgggacagttcagcatgtgtggaaggtgtccgacctgccccggcaatggacccctaagaacaccagctgcgacagcggcttggggtgccaggacacgttgatgctcattgagagcggaccccaagtgagcctggtgctctccaagggctgcacggaggccaaggaccaggagccccgcgtcactgagcaccggatgggccccggcctctccctgatctcctacaccttcgtgtgccgccaggaggacttctgcaacaacctcgttaactccctcccgctttgggccccacagcccccagcagatcccatgatgggagctgcagaaggcccctttgggaaggctgagcaggttgactcttgaggccagcaaaagtggggtgcagagaaggtatctgatcaaatccagtgccctctcagtgccccctcactctgtctgtcactttcctagacccaggatccttgaggtgcccagtctgcttgtctatggaaggctgtctggaggggacaacagaagagatctgccccaaggggaccacacactgttatgatggcctcctcaggctcaggggaggaggcatcttctccaatctgagagtccagggatgcatgccccagccagtttgcaacctgctcaatgggacacaggaaattgggcccgtgggtatgactgagaactgcgatatgaaagattttctgacctgtcatcgggggaccaccattatgacacacggaaacttggctcaagaacccactgattggaccacatcgaataccgagatgtgcgaggtggggcaggtgtgtcaggagacgctgctgctcctagatgtaggactcacatcaaccctggtggcgacctaaagctgcagcgctgttggggctcaaaattcccagaagaccaccatccactcagcccctcctggggtgcttgtggcctcctatacccacttctgctcctcggacctgtgcaatagtgccagcagcagcagcgttctgctgaactccctccctcctcaagctgcccctgtcccaggagaccggcagtgtcctacctgtgtgcagccccttggaacctgttcaagtggctccccccgaatgacctgccccaggggcgccactcattgttatgatgggtacattcatctctcaggaggtgggctgtccaccaaaatgagcattcagggctgcgtggcccaaccttccagcttcttgttgaaccacaccagacaaatcgggatcttctctgcgcgtgagaagcgtgatgtgcagcctcctgcctctcagcatgagggaggtggggctgagggcctggagtctctcacttggggggtggggctggcactggccccagcgctgtggtggggagtggtttgcccttcctgctaactctattacccccacgattcttcaccgctgctgaccacccacactcaacctc

SEQ ID NO: 6409 - DNA, 1706 bp, Homo sapiens
agacccccttaagttggaggaggcagaagggcaacaacggcggggaaggagaagtcaagacgtctggaaagaattacccagtcctggcttcgagcagcccattgaaccagagacttgaaacagccccagccaaagacttttctcccaattctgcgcttcctgggttctgctgagtcttccacaggctttttttttttttttttttttttttaagacgaaaaagagattttctgttatcgggggcagaaagactgaagcccaaaaaaaaaaaaaaaaaaaaaagaaaagaaaagaaaaaagaaaagttaatttatttttaaagcataatttttttaagaattagactgaagtgcaacggaaacataaagagaatattagtgaaattattttttaaagtggggaagaatcaaacatttaagactcccctatcctttttaaatgttgtttttaaatttcttattttttttggccggtcgtctcaaattcatctgatctcttattacctcaattttggaaactgcccgccaccgaccctccgggaccacacagacaggctgaggacgactttatgaccaagagctgaacaagatgcattgtgagaggtttctatgtatcctgagaataattggaaccacactctttggagtctctctcctccttggaatcacagctgcttatattgttggctaccagtttatccaaacggataattactatttctcttttggactgtatggtgcctttttggcatcacacctcatcatccaaagcctgtttgcctttttggagcaccgaaaaatgaaaaaatccctagaaacccccataaagttgaacaaaacagttgccctttgcatcgctgcctatcaagaagatccagactacttaaggaaatgtttgcaatctgtgaaaaggctaacctaccctgggattaaagttgtcatggtcatagatgggaactcagaagatgacctttacatgatggacatcttcagtgaagtcatgggcagagacaaatcagccacttatatctggaagaacaacttccacgaaaagggtcccggtgagacagatgagtcacataaagaaagctcgcaacacgtaacgcaattggtcttgtccaacaaaagtatctgcatcatgcaaaaatggggtggaaaaagagaagtcatgtacacagccttcagagcactgggacgaagtgtggattatgtacaggtttgtgattcagacactatgcttgacccagcctcatctgtggagatggtaaaagttttagaagaagatcccatggttggaggtgttgggggagatgtccagattttaaacaagtacgattcctggatctcattcctcagcagtgtaagatattggatggcttttaatatagaaagggcctgtcagtcttattttgggtgtgttcagtgcattagtggacctctgggaatgtacagaaactccttgttgcatgttttgacgtttgcagtcacacacaacaccttagttcctctaggggctgtacagtattgtggcatcagataatgccaccaaaggagacatatcactgctgctgggacttgaacaaagacatttatatgggtttattttcattctgccaaagtaaaacaatacatcaacaagaagaaactcagatttaacctgttatttctatgaaaatgggatgaattctttgtttatgcactttttcc

SEQ ID NO: 6410 - DNA, 570 bp, Homo sapiens
taaatgctcaaaatataaaatactgagctgagatttgcgaagagcagcagcatggatggattttatgaccagcaagtgccttacatggtcaccaatagtcagcgtgggagaaattgtaacgagaaaccaacaaatgtcaggaaaagaaaattcattaacagagatctggctcatgattcagaagaactctttcaagatctaagtcaattacaggaaacatggcttgcagaagctcaggtacctgacaatgatgagcagtttgtaccagactatcaggctgaaagttcaagatcaacacagattggagtacttgagaaagacttcatgaagaaaatgaagcctgacttacaacagaatgagaaatctactcaatgaaatattagaaatgacaggaacctggagataattcacccaatatctctgtgtttgttggataataatagctaatacttgtgtaatgctcacgatgtgctagttcctcttctaaacactttataaatatcttaatgcagccaatcttcataacatccttatttagtagaaactattatctctttcttttggtgagaa

SEQ ID NO: 6411 - DNA, 571 bp, Homo sapiens
aacctccaccgagttttcaggattctcctcctctcctgcctgcctccgaggtcccccttctccaagttttgacagtttcaactgaaaaaatgcagcgcctctctcgatttttagatcgagcctgcgtgctgccgaagcagggcgccgagtccatgcgaactgccatctgatccgctcttatcaatgaagcagccgatcatggcggatggcccccggtgcaagaggcgcaaacaagccaatcccaggaggaaaaacgggtcatcaagattgtcagaaaaggcctggactacatgcctgtcccagcactagattgtggtgaactatgacaatgtagtggacacaggttctgaaacagatgaggaagacaagcttcatattgctgaggatgacggtattgccaaccctctggaccaggagacgagtccagctagtgtgcccaaccatgagtcctccccacacgtgagccaagctctgttgccaagagaggaagaggaagatgaaataagggagggtggagtggaacacccctggcacaacaacgagattctacaagcctctgtagatggtccag

SEQ ID NO: 6412 - DNA, 554 bp, Homo sapiens
aggagctgttaaaaggttatcacttagttatgctggggaaagagtgagtgggattataaaagtcaatttaacagcacacatgaattaggccctctggtagatttgaaaattcctgccaacaagacacggtggactttaaaaaatttaaatttcagcactcgatataagttttatttctatgcacaaacatcagcaggatcaggaagtcaaattacagaggaagcagtaacaactgtggatgaagcgatggcaagccggcaggtggatattgcaactcagggctggttcattggtctgatgtgtgctgttgctctccttatcttaattttgctgattgtttgcttcatcagaagaaacaagggtggtaaatatccagttaaagaaaaggaagatgcccatgctgaccctgaaatccagcctatgaaggaagatgatgggacatttggagaatacagtgatgcagaagaccacaagcctttgaaaaaaggaagtcgaactccttcagacaggactgtgaaaaaagaagatagtgacgacagcctagttgactatgg

SEQ ID NO: 6413 - DNA, 865 bp, Homo sapiens
tccctgggctgctggtcttctttaccttccagctgctcacagaacagagagtttctacatacaagcagaagatgtgaaaatattgggaataaataaagtatatgcttataaacaagttgtggctgctcctggttacgttgtgcctgaccgaggaactggcagcagcgggagagaagtcttatggaaagccatgtgggggccaggactgcagtgggagctgtcagtgttttcctgagaaaggagcgagaggacgacctggaccaattggaattcaaggcccaacaggtcctcaaggattcactggctctactggtttatcgggattgaaaggagaaaggggtttcccaggccttctgggaccttatggaccaaaaggagataagggtcccatgggagttcctggctttcttggcatcaatgggattccgggccaccctggacaaccaggccccagaggcccacctggtctggatggctgtaatggaactcaaggagctgttggatttccaggccctgatggctatcctgggcttctcggaccacccgtatgctgccagatatttgcattttatttcaaatggctttgcttgtctctacgtgtgccctttttctgcctctctggaaacctcaagattttgtggggcagccactacacacccttgtccaatgtaggagtcaatactggcagcaccacaacagtaaaagtctaaagaagaataccagttgcagtggggtgtgcacatgctacactgcttagggttgccttttttttaatgcagcttgtgaaattggcaagattgttaaaaggctgtagtaaatttcatggcaaaatacacacttgggctatttgacatggtcccacatc

SEQ ID NO: 6414 - DNA, 2336 bp, Homo sapiens
tgcagcccataccaggtctcatggaggggaacaagctggaggagcaggactctagccctccacagtccactccagggctcatgaaggggaacaagcgtgaggagcaggggctgggccccgaacctgcggcgccccagcagcccacggcggaggaggaggccctgatcgagttccaccgctcctaccgagagctcttcgagttcttctgcaacaacaccaccatccacggcgccatccgcctggtgtgctcccagcacaaccgcatgaagacggccttctgggcagtgctgtggctctgcacctttggcatgatgtactggcaattcggcctgcttttcggagagtacttcagctaccccgtcagcctcaacatcaacctcaactcggacaagctcgtcttccccgcagtgaccatctgcaccctcaatccctacaggtacccggaaattaaagaggagctggaggagctggaccgcatcacagagcagacgctctttgacctgtacaaatacagctccttcaccactctcgtggccggctcccgcagccgtcgcgacctgcgggggactctgccgcaccccttgcagcgcctgagggtcccgcccccgcctcacggggcccgtcgagcccgtagcgtggcctccagcttgcgggacaacaacccccaggtggactggaaggactggaagatcggcttccagctgtgcaaccagaacaaatcggactgcttctaccagacatactcatcaggggtggatgcggtgagggagtggtaccgcttccactacatcaacatcctgtcgaggctgccagagactctgccatccctggaggaggacacgctgggcaacttcatcttcgcctgccgcttcaaccaggtctcctgcaaccaggcgaattactctcacttccaccacccgatgtatggaaactgctatactttcaatgacaagaacaactccaacctctggatgtcttccatgcctggaatcaacaacggtctgtccctgatgctgcgcgcagagcagaatgacttcattcccctgctgtccacagtgactggggcccgggtaatggtgcacgggcaggatgaacctgcctttatggatgatggtggctttaacttgcggcctggcgtggagacctccatcagcatgaggaaggaaaccctggacagacttgggggcgattatggcgactgcaccaagaatggcagtgatgttcctgttgagaacctttacccttcaaagtacacacagcaggtgtgtattcactcctgcttccaggagagcatgatcaaggagtgtggctgtgcctacatcttctatccgcggccccagaacgtggagtactgtgactacagaaagcacagttcctgggggtactgctactataagctccaggttgacttctcctcagaccacctgggctgtttcaccaagtgccggaagccatgcaggaatgggtcttccagatgctatcgcgacagaacaattacaccgtcaacaacaagagaaatggagtggccaaagtcaacatcttcttcaaggagctgaactacaaaaccaattctgagtctccctctgtcacgatggtcaccctcctgtccaacctgggcagccagtggagcctgtggttcggctcctcggtgttgtctgtggtggagatggctgagctcgtctttgacctgctggtcatcatgttcctcatgctgctccgaaggttccgaagccgatactggtctccaggccgagggggcaggggtgctcaggaggtagcctccaccctggcatcctcccctccttcccacttctgcccccaccccatgtctctgtccttgtcccagccaggccctgctccctctccagccttgacagcccctccccctgcctatgccaccctgggcccccgcccatctccagggggctctgcaggggccagttcctccacctgtcctctgggggggccctgagagggaaggagaggtttctcacaccaaggcagatgctcctctggtgggagggtgctggccctggcaagattgaaggatgtgcagggcttcctctcagagccgcccaaactgccgttgatgtgtggaggggaagcaagatgggtaagggctcaggaagttgctccaagaacagtagctgatgaagctgcccagaagtgccttggctccagccctgtaccccttggtactgcctctgaacactctggtttccccacccaactgcggctaagtctctttttcccttggatcagccaagcgaaacttggagctttgacaaggaactttcctaagaaaccgctgataaccaggacaaaacacaaccaag

SEQ ID NO: 6415 - DNA, 2168 bp, Homo sapiens
ggcagagacggggcggccgtggctccgagggcgggagctgagccgggccccgggaccgaagtttggcggcggctccgggaggcagagcgggctccccgggcgacttccaggcccctctcgcgtcctcgccccggacccgtgggcagccggggggaacggaagccgcggccgggccaactccgaggcggggacgccgcgacgggaacttgaggtgggaactttgcgcgctgcagcctcgccgggcgccaccaaagcgcgaaccggaccccgagcctgcaaactcgggctcgggggcggctgcacgtggccgtggccctgaactccctgcgggggcctcgaaacccgcctgcggggaggccagggcgacagaggactcgggagtcaccgctggtgcgtggcggcgtggagcgcgcttgttacggccaagggagcaggctgcctaatgaaggagccaggcttgcacacagacaattctagaactggtggcccgagagggatgtgaaggcccaaaatgaccctcttaccgggagacaattctgactacgactacagcgcgctgagctgcacctcggacgcctccttccacccggccttcctcccgcagcgccaggccatcaagggcgcgttctaccgccgggcgcagcggctgcggccgcaggatgagccccgccagggctgtcagcccgaggaccgccgccgtcggatcatcatcaacgtaggcggcatcaagtactcgctgccctggaccacgctggacgagttcccgctgacgcgcctgggccagctcaaggcctgcaccaacttcgacgacatcctcaacgtgtgcgatgactacgacgtcacctgcaacgagttcttcttcgaccgcaacccgggggccttcggcactatcctgaccttcctgcgcgcgggcaagctgcggctgctgcgcgagatgtgcgcgctgtccttccaggaggagctgctgtactggggcatcgcggaggaccacctggacggctgctgcaagcgccgctacctgcagaagattgaggagttcgcggagatggtggagcgggaggaagaggacgacgcgctggacagcgagggccgcgacagcgagggcccggccgagggcgagggccgcctggggcgctgcatgcggcgactgcgcgacatggtggagaggccgcactcggggctgcctggcaaggtgttcgcctgcctgtcggtgctcttcgtgaccgtcaccgccgtcaacctctccgtcagcaccttgcccagcctgagggaggaggaggagcaggtaagagcccacgccccgcggggaaacgcgccaccacgagggaagggactctgagcattgtcacctcctccagaaagcctcctctgattgcacactggctgaatagcatccctggtccctcctgacatcaggaatgtttgtgtgcatggtctgcctccctgttaatatgtgagcatcatgggggtccacgcctgtgcctgtcctggcctccactgtgcccaccactgccctcccccttgccagtgtttagaacagtgtccagcacaaacaggcactcaaccactatttgttgaatgaacaaatgagtgaataaatgggtggtgtgatttttgacgtgcctggccctgagcgaagcacattacatatatcatcaaatttatctcaaccattcggtcctttctcaacgttcctaatcctttgcatcatagtagcccagacacattttctgggtcctgaagataatttttattgataggtatatgtgtgtctacaaatggtgagcatttctttttgttacataagagaatgaatggaaagtttatttactccagggcctgacacggggtgtgtgctacagtctaagggctcccactcatctgggagttcacgggagccggagctgggctgcatgtgccaactacgtcttatctccctagggaatgctccagcaaccctgtgggggaagtgttttcacacccactaggtatttgaggacactgcccaaccccaggtctaagtccagtctgtctttgtaagcatggaaatatggtgtccacgtggcagcttggggacctaatatagccccacaggactatgtgattggcccacacaaggtttcccaaaaatttgacttggttgccaacaataaaagtgaagttttttc

SEQ ID NO: 6416 - DNA, 1868 bp, Homo sapiens
atgtctgctgaagtcatccatcaggttgaagaagcacttgatacagatgagaaggagatgctgctctttttgtgccgggatgttgctatagatgtggttccacctaatgtcagggaccttctggatattttacgggaaagaggtaagctgtctgtcggggacttggctgaactgctctacagagtgaggcgatttgacctgctcaaacgtatcttgaagatggacagaaaagctgtggagacccacctgctcaggaaccctcaccttgtttcggactatagagtgctgatggcagagattggtgaggatttggataaatctgatgtgtcctcattaattttcctcatgaaggattacatgggccgaggcaagataagcaaggagaagagtttcttggaccttgtggttgagttggagaaactaaatctggttgccccagatcaactggatttattagaaaaatgcctaaagaacatccacagaatagacctgaagacaaaaatccagaagtacaagcagtctgttcaaggagcagggacaagttacaggaatgttctccaagcagcaatccaaaagagtctcaaggatccttcaaataacttcaggctccataatgggagaagtaaagaacaaagacttaaggaacagcttggcgctcaacaagaaccagtgaagaaatccattcaggaatcagaagcttttttgcctcagagcatacctgaagagagatacaagatgaagagcaagcccctaggaatctgcctgataatcgattgcattggcaatgagacagagcttcttcgagacaccttcacttccctgggctatgaagtccagaaattcttgcatctcagtatgcatggtatatcccagattcttggccaatttgcctgtatgcccgagcaccgagactacgacagctttgtgtgtgtcctggtgagccgaggaggctcccagagtgtgtatggtgtggatcagactcactcagggctccccctgcatcacatcaggaggatgttcatgggagattcatgcccttatctagcagggaagccaaagatgttttttattcagaactatgtggtgtcagagggccagctggaggacagcagcctcttggaggtggatgggccagcgatgaagaatgtggaattcaaggctcagaagcgagggctgtgcacagttcaccgagaagctgacttcttctggagcctgtgtactgcggacatgtccctgctggagcagtctcacagctcaccatccctgtacctgcagtgcctctcccagaaactgagacaagaaagggggacaattcccggaagtggaattacagagtcaaaggacatgcatttttcaagcctcggatgcatcttactagatgtcctataggatggtcatatcagctttataggagagtagctgtgtccctgaattctccctgacactgcatgctcttatatttcctcaagttttgacaatttgataggtgaaaagtggtatctgactgttcagatctggaaggctttgttatataaacatttttttaatgtttattggcaagaatacttttctaagagaaacatcagtgagctggtttccatttaagctgaatgaagccacaatgtacctcaagtataagattaactggcctttttcagttgcactctaattacaatttagaatgatgtttctgagccacctgtcaaatgcattctgggctgtacctctgcgtaccccaggaataaatctcatggccttctttacctggcctccttagtggtggcccagcaggaagcgggggttagagcaggagccactcagccttccaagatagatactccatgggccggtggtattactggcctttt

SEQ ID NO: 6417 - DNA, 598 bp, Homo sapiens
gcagcctctgtgcggtgggaccaacggacggacggacggacgcgcgcacctaccgaggcgcgggcgctgcagaggctcccagcccaagcctgagcctgagcccgccccgaggtccccgccccgcccgcctggctctctcgccgcggagccgccaagatggggtctggtggctctgacagctatcgtatcgccacctcgcaggacaagaaagatgacaaggactcacccaagaagaacaagggcaaggagcgccgggacctggatgacctcaagaaggaggtggctatgacagagcacaagatgtcagtggaagaggtctgccggaaatacaacacagactgtgtgcagggtttgacccacagcaaagcccaggagatcctggcccgggatgggcctaacgcactcacgccaccgcctaccaccccagagtgggtcaagttttgccggcagctcttcgggggcttctccatcctgctgtggatcggggctatcctctgcttcctggcctacggtatccaggcgggcaccgaggacgacccctctggtgacaacctgtacctgggcatcgtgctggcggccgtggtgatcatcactggct

SEQ ID NO: 6418 - DNA, 494 bp, Homo sapiens
ggggaggccctggcggccgcgcagcaggtgcaggggcgcagagcccgggctcgccttggtacagacgagcgggccccggccttggcgccttcagtttccttccagtttttattttcgctgtgtctacagagcagatgacaccaatttggaaacccgcgagaattgtcactgctgttccaagggcacacgcagagggatttggaattcctggagagttgcctttgtgagaagctggaaatatttctttcaattccatctcttagttttccataggaacatcaagaaatcatgaacaactttggtaatgaagagtttgactgccacttcctcgatgaaggttttactgccaaggacattctggaccagaaaattaatgaagtttcttcttctgatgataaggatgccttctatgtggcagacctgggagacattctaaagaaacatctgaggtggttaaaagctctccctcgtgtcacccccttttatgcagtcaa

SEQ ID NO: 6419 - DNA, 805 bp, Homo sapiens
gagctcgcccaccgcccgccccagcagtggctgcaccatgcacgtgaacggcaaagtggcgctggtgaccggcgcggctcagggcataggcagagcctttgcagaggcgctgctgcttaagggcgccaaggtagcgctggtggattggaatcttgaagcaggtgtacagtgtaaagctgccctggatgagcagtttgaacctcagaagactctgttcatccagtgcgatgtggctgaccagcaacaactgagaggactcatgcccgttgcacagcagccggtttattgtgcttcaaagcatggcatagttggattcacacgctcagcagcgttggctgctaatcttatgaacagtggtgtgagactgaatgccatttgtccaggctttgttaacacagccatccttgaatcaattgaaaaagaagaaaacatgggacaatatatagaatataaggatcatatcaaggatatgattaaatactatggaattttggacccaccattgattgccaatggattgataacactcattgaagatgatgctttaaatggtgctattatgaagatcacaacttctaagggaattcattttcaagactatgatacaactccatttcaagcaaaaacccaatgaacagcttatgtgttagccatagctgaaaataagcacaaatagcttatattcagatcctatcttcatttgaatatagcttttaaatgaaatgttacagtttgaagttttccttcatgcacttggtgataaacgttttctaaatttttagttaagtatatggataaaaagtta

SEQ ID NO: 6420 - DNA, 3915 bp, Homo sapiens
atgcagcttaaaataatgccgaaaaagaagcgcttatctgcgggcagagtgcccctgattctcttcctgtgccagatgattagtgcactggaagtacctcttgatccaaaacttcttgaagacttggtacagcctccaaccatcacccaacagtctccaaaagattacattattgaccctcgggagaatattgtaatccagtgtgaagccaaagggaaaccgcccccaagcttttcctggacccgtaatgggactcattttgacatcgataaagaccctctggtcaccatgaagcctggcacaggaacgctcataattaacatcatgagcgaagggaaagctgagacctatgaaggagtctatcagtgtacagcaaggaacgaacgcggagctgcagtttctaataacattgttgtccgcccatccagatcaccattgtggaccaaagaaaaacttgaaccaatcacacttcaaagtggtcagtctttagtacttccctgcagacccccaattggattaccaccacctataatattttggatggataattcctttcaaagacttccacaaagtgagagagtttctcaaggtttgaatggggacctttatttttccaatgtcctcccagaggacacccgcgaagactatatctgttatgctagatttaatcatactcaaaccatacagcagaagcaacctatttctgtgaaggtgatttcagtggatgaattgaatgacactatagctgctaatttgagtgacactgagttttatggtgctaaatcaagtagagagaggccaccaacatttttaactccagaaggcaatgcaagtaacaaagaggaattaagaggaaatgtgctttcactggagtgcattgcagaaggactgcctaccccaattatttactgggcaaaggaagatggaatgctacccaaaaacaggacagtttataagaactttgagaaaaccttgcagatcattcatgtttcagaagcagactctggaaattaccaatgtatagcaaaaaacgcattaggagccatccaccataccatttctgttagagttaaagcggctccatactggatcacagcccctcaaaatcttgtgctgtccccaggagaggatgggaccttgatctgcagagctaatggcaaccccaaacccagaattagctggttaacaaatggagtcccaatagaaattgcccctgatgaccccagcagaaaaatagatggcgataccattattttttcaaatgttcaagaaagatcaagtgcagtctatcagtgcaatgcctctaatgaatatggatatttactggcaaacgcatttgtaaatgtgctggctgagccaccacgaatcctcacacctgcaaacacactctaccaggtcattgcaaacaggcctgctttactagactgtgccttctttgggtctcctctcccaaccatcgagtggtttaaaggagctaaaggaagtgctcttcatgaagatatttatgttttacatgaaaatggaactttggaaattcctgtggcccaaaaggacagtacaggaacttatacgtgtgttgcaaggaataaattagggatggcgaagaatgaagttcacttagaaatcaaagatcctacatggatcgttaaacagcccgaatatgcagttgtgcaaagagggagcatggtgtcctttgaatgcaaagtgaaacatgatcacaccttatccctcactgtcctgtggctgaaggacaacagggaactgcccagtgatgaaaggttcactgttgacaaggatcatctagtggtagctgatgtcagtgacgatgacagcgggacctacacgtgtgtggccaacaccactctggacagcgtctccgccagcgctgtgcttagcgttgttgctcctactccaactccagctcccgtttacgatgtcccaaatcctccctttgacttagaactgacagatcaacttgacaaaagtgttcagctgtcatggaccccaggcgatgacaacaatagccccattacaaaattcatcatcgaatatgaagatgcaatgcacaagccagggctgtggcaccaccaaactgaagtttctggaacacagaccacagcccagctgaagctgtctccttacgtgaactactccttccgcgtgatggcagtgaacagcattgggaagagcttgcccagcgaggcgtctgagcagtatttgacgaaagcctcagaaccagataaaaaccccacagctgtggaaggactgggatcagagcctgataatttggtgattacgtggaagcccttgaatggtttcgaatctaatgggccaggccttcagtacaaagttagctggcgccagaaagatggtgatgatgaatggacatctgtggttgtggcaaatgtatccaaatatattgtctcaggcacgccaacctttgttccatacctgatcaaagttcaggccctgaatgacatggggtttgcccccgagccagctgtagtcatgggacattctggagaagacctcccaatggtggctcctgggaacgtgcgtgtgaatgtggtgaacagtaccttagccgaggtgcactgggacccagtacctctgaaaagcatccgaggacacctacaaggctatcggatttactattggaagacccagagttcatctaaaagaaacagacgtcacattgagaaaaagatcctcaccttccaaggcagcaagactcatggcatgttgccggggctagagccctttagccactacacactgaatgtccgagtggtcaatgggaaaggggagggcccagccagccctgacagagtctttaatactccagaaggagtccccagtgctccctcgtctttgaagattgtgaatccaacactggactctctcactttggaatgggatccaccgagccacccgaatggcattttgacagagtacaccttaaagtatcagccaattaacagcacacatgaattaggccctctggtagatttgaaaattcctgccaacaagacacggtggactttaaaaaatttaaatttcagcactcgatataagttttatttctatgcacaaacatcagcaggatcaggaagtcaaattacagaggaagcagtaacaactgtggatgaagctggtattcttccacctgatgtaggtgcaggcaaagttcaagcagtaaatcccaggatcagcaatcttactgctgcagctgctgagacctatgccaatatcagttgggaatatgagggaccagagcatgtgaacttttatgttgaatatggtgtagcaggcagcaaagaagaatggagaaaagaaattgtaaatggttctcggagcttctttgggttaaagggtctaatgccaggaacagcatacaaagttcgagttggtgctgtgggggactctggttttgtgagttcagaggatgtgtttgagacaggcccagcgatggcaagccggcaggtggatattgcaactcagggctggttcattggtctgatgtgtgctgttgctctccttatcttaattttgctgattgtttgcttcatcagaagaaacaagggtggtaaatatccagttaaagaaaaggaagatgcccatgctgaccctgaaatccagcctatgaaggaagatgatgggacatttggagaatacagtgatgcagaagaccacaagcctttgaaaaaaggaagtcgaactccttcagacaggactgtgaaaaaagaagatagtgacgacagcctagttgactatggagaaggggttaatggccagttcaatgaggatggctcctttattggacaatacagtggtaagaaagagaaagagccggctgaaggaaacgaaagctcagaggcaccttctcctgtcaacgccatgaattcctttgtttaa

SEQ ID NO: 6421 - DNA, 1087 bp, Homo sapiens; identical to SEQ ID NO: 3885

SEQ ID NO: 6422 - DNA, 2983 bp, Homo sapiens
gttgctaatggtgtcatgcacccaccggccacccttggcgcgagcgcccccctctggacaccctgctccgtgcgcgctcacagttcgcctgtgcggggccggggccagggtcaggagccggggatagggaggaagagggcctgtggacaagctgagccgggacccctgggacctttgcggaggtggcctgggagcgctcagttcccaggctcaggcttcccgctgacgcctcctggccgcagcgggctccccccgccccaggaatgttcctctcccatccagtccgcctcccctagggcaggccccctgggggctgccgcagccccgcctcgccttcctgggctcccgggagggggcgaggcgggcaggacgcctgggttctctccccccacctcccataccagggagaaattcctccgaggtcccctcaggctctgggttcccaaaataaccctgcgggggaagggaggctgtggagggagggaagcgggaggggcgcagagccgagctgcggggtgctgcaggtgcctctggggagagggcgcgaggagaaggcgccctgcggggggctgggcgccagccagtcctgggatcttggttcgtccccatcctcgtgaagcccctcggccttcccgcgactccgagggtgggccggaagcctctctgcgggtccgtttcccaactggcgggttgcaccatcccgggccagaccgtttaaccccgggagtggccgcgggggacaactccgcccctgtccagcagggggcgtgcccgccccgccccgtttctgcccgcggggccgctcccccgcccgcgactccgcagactcccgctctgcctctcccgggacaggggttcggtccgagcccggtgggaggctcccggagcgcagcctgggcccagcccaccccgcgccggcggccatggcaggcaccctggacctggacaagggctgcacggtggaggagctgctccgcgggtgcatcgaagccttcgatgactccgggaaggtgcgggacccgcagctggtgcgcatgttcctcatgatgcacccctggtacatcccctcctctcagctggcggccaagctgctccacatctaccaacaatcccggaaggacaactccaattccctgcaggtgaaaacgtgccacctggtcaggtactggatctccgccttcccagcggagtttgacttgaacccggagttggctgagcagatcaaggagctgaaggctctgctagaccaagaagggaaccgacggcacagcagcctaatcgacatagacagcgtccctacctacaagtggaagcggcaggtgactcagcggaaccctgtgggacagaaaaagcgcaagatgtccctgttgtttgaccacctggagcccatggagctggcggagcatctcacctacttggagtatcgctccttctgcaagatcctgtttcaggactatcacagtttcgtgactcatggctgcactgtggacaaccccgtcctggagcggttcatctccctcttcaacagcgtctcacagtgggtgcagctcatgatcctcagcaaacccacagccccgcagcgggccctggtcatcacacactttgtccacgtggcggagaagctgctacagctgcagaacttcaacacgctgatggcagtggtcgggggcctgagccacagctccatctcccgcctcaaggagacccacagccacgttagccctgagaccatcaagctctgggagggtctcacggaactagtgacggcgacaggcaactatggcaactaccggcgtcggctggcagcctgtgtgggcttccgcttcccgatcctgggtgtgcacctcaaggacctggtggccctgcagctggcactgcctgactggctggacccagcccggacccggctcaacggggccaagatgaagcagctctttagcatcctggaggagctggccatggtgaccagcctgcggccaccagtacaggccaaccccgacctgctgagcctgctcacggtgtctctggatcagtatcagacggaggatgagctgtaccagctgtccctgcagcgggagccgcgctccaagtcctcgccaaccagccccacgagttgcaccccaccaccccggcccccggtactggaggagtggacctcggctgccaaacccaagctggatcaggccctcgtggtggagcacatcgagaagatggtggagtctgtgttccggaactttgacgtcgatggggatggccacatctcacaggaagaattccagatcatccgtgggaacttcccttacctcagcgcctttggggacctcgaccagaaccaggatggctgcatcagcagggaggagatggtttcctatttcctgcgctccagctctgtgttgggggggcgcatgggcttcgtacacaacttccaggagagcaactccttgcgccccgtcgcctgccgccactgcaaagccctgatcctgggcatctacaagcagggcctcaaatgccgagcctgtggagtgaactgccacaagcagtgcaaggatcgcctgtcagttgagtgtcggcgcagggcccagagtgtgagcctggaggggtctgcaccctcaccctcacccatgcacagccaccatcaccgcgccttcagcttctctctgccccgccctggcaggcgaggctccaggcctccagcagagatccgtgaggaggaggtacagacggtggaggatggggtgtttgacatccacttgtaatagatgctgtggttggatcaaggactcattcctgccttggagaaaatacttcaaccagagcagggagcctgggggtgtcggggcaggaggctggggatgggggtgggatatgagggtggcatgcagctgagggcagggccagggctggtgtccctaaggttgtacagactcttgtgaatatttgtattttccagatggaataaaaaggcccgtgtaattaaccttca

SEQ ID NO: 6423 - DNA, 5306 bp, Homo sapiens
gcgcgcctgtcgcggtggtgggtgcaggactggacccacgggcccattgtgcgcccgcccgcggcagccaggaccatgtgggtgaacccggaggaggtgttgctggccaacgcgctgtggatcaccgagagggccaacccatacttcatcctgcagcggaggaagggccacgccggcgatggaggcggcggcggcggactggcgggcctgctggtgggtacccttgatgttgtgttggactccagcgcccgggtcgctccttaccgaatcttgtaccagactccagactccctggtctactggaccatcgcctgtggtggttccaggaaagaaatcactgaacactgggaatggcttgagcaaaatctcttgcagacactctccatctttgaaaatgagaatgatatcaccacatttgtgagaggaaaaatacagggcatcattgcagaatacaacaaaatcaatgatgtaaaggaagatgatgacacggagaagtttaaagaagccattgtgaaatttcataggctgtttgggatgccagaggaagagaaactcgtcaactattactcttgcagctattggaaggggaaggtcccccgtcagggttggatgtacctcagcattaaccacctttgcttttattcttttcttatgggaagggaagcgaaactggtcatccggtgggtagacatcactcagcttgagaagaatgccaccctgcttctgcctgatgtgatcaaagtgagcacacggtccagtgagcatttcttctctgtattcctcaacatcaacgagaccttcaagttaatggagcagcttgccaacatagccatgaggcaactcttagacaatgagggatttgaacaagatcgatccctgcccaaactcaaaaggaaatctcctaaaaaagtgtctgctctaaaacgtgatcttgatgccagggcaaagagtgagagataccgtgcacttttccggctgcccaaagatgaaaaattagatggccacacagactgcactctctggactccatttaacaaaatgcacattttggggcagatgtttgtgtccacaaattacatctgttttaccagcaaggaggagaacttatgtagcctcattatcccgctccgtgaggtgacaattgtggaaaaggcagacagctccagtgtgctccccagtcccttatccatcagcacccgaaacaggatgaccttcctatttgccaacttgaaagatagagactttctagtgcagaggatctcagatttcctgcaacagactacttccaaaatatattctgacaaggagtttgcaggaagttacaacagttcagatgatgaggtgtactctcgacccagcagcctcgtctcctccagcccccagagaagcacgagctctgatgctgatggagagcgccagtttaacctaaatggcaacagcgtccccacagccacacagaccctgatgaccatgtatcggcggcggtctcccgaggagttcaacccgaaattggccaaagagtttctgaaagagcaagcctggaagattcactttgctgagtatgggcaagggatctgcatgtaccgcacagagaaaacgcgggagctggtgttgaagggcatcccggagagcatgcgtggggagctctggctgctgctgtcaggtgccatcaatgagaaggccacacatcctgggtactatgaagacctagtggagaagtccatggggaagtataatctcgccacggaggagattgagagggatttacaccgctcccttccagaacacccagcttttcagaatgaaatgggcattgctgcactaaggagagtcttaacagcttatgcttttcgaaatcccaacatagggtattgccaggccatgaatattgtcacttcagtgctgctgctttatgccaaagaggaggaagctttctggctgcttgtggctttgtgtgagcgcatgctcccagattactacaacaccagagttgtgggtgcactggtggaccaaggtgtctttgaggagctagcacgagactacgtcccacagctgtacgactgcatgcaagacctgggcgtgatttccaccatctccctgtcttggttcctcacactatttctcagtgtgatgccttttgagagtgcagttgtggttgttgactgtttcttctatgaaggaattaaagtgatattccagttggccctagctgtgctggatgcaaatgtggacaaactgttgaactgcaaggatgatggggaggccatgaccgttttgggaaggtatttagacagtgtgaccaataaagacagcacactgcctcccattcctcacctccactccttgctcagcgatgatgtggaaccttaccctgaggtagacatctttagactcatcagaacttcctacgagaaattcggaactatccgggcagatttgattgaacagatgagattcaaacagagactgaaagtgatccagacgctggaggatactacgaaacgcaacgtggtacgaaccattgtgacagaaacttcctttaccattgatgagctggaagaactttatgctcttttcaaggcagaacatctcaccagctgctactggggcgggagcagcaacgcgctggaccggcatgaccccagcctgccctacctggaacagtatcgcattgacttcgagcagttcaagggaatgtttgctcttctctttccttgggcatgtggaactcactctgacgttctggcctcccgcttgttccagttattagatgaaaatggagactctttgattaacttccgggagtttgtctctgggctaagtgctgcatgccatggggacctcacagagaagctcaaactcctgtacaaaatgcacgtcttgcctgagccatcctctgatcaagatgaaccagattctgcttttgaagcaactcagtacttctttgaagatattaccccagaatgtacacatgttgttggattggatagcagaagcaaacagggtgcagatgatggctttgttacggtgagcctaaagccagacaaagggaagagagcaaattcccaagaaaatcgtaattatttgagactgtggactccagaaaataaatctaagtcaaagaatgcaaaggatttacccaaattaaatcaggggcagttcattgaactgtgtaagacaatgtataacatgttcagcgaagaccccaatgagcaggagctgtaccacgccacggcagcagtgaccagcctcctgctggagattggggaggtcggcaagttgttcgtggcccagcctgcaaaggagggcgggagcggaggcagtgggccgtcctgccaccagggcatcccaggcgtgctcttccccaagaaagggccaggccagccttacgtggtggagtctgttgagcccctgccggccagcctggcccccgacagcgaggaacactcccttggaggacaaatggaggacatcaagctggaggactcctcgccccgggacaacggggcctgctcctccatgctgatctctgacgacgacaccaaggacgacagctccatgtcctcatactcggtgctgagtgccggctcccacgaggaggacaagctgcactgcgaggacatcggagaggacacggtcctggtgcggagcggccagggcacggcggcactgccccggagcaccagcctggaccgggactgggccatcaccttcgagcagttcctggcctccctcttaactgagcctgccctggtcaagtactttgacaagcccgtgtgcatgatggccaggattaccagtgcaaaaaacatccggatgatgggcaagcccctcacctcggccagtgactatgaaatctcggccatgtccggctgacacgggcgccttcccgggggagtgggaggagagggaggggagggattttttatgttcttctgtgttgagttttttctttctttcttttaaattaaatatttattagtacctggcttgaagcctagtgttttcataatgtaattcaatgaaaactgttggagaaatatttaaacacctcaatgtaggtacattacactcttgttgcggggaggggatttaccagaatacagtttatttcgtgaattctaaaaaacaaaaagatgaatctgtcagtgatatgtgtgtattataacttattaatcttgctgttgagctgtatacatggtttaaaaaatagtactgtttaatgctaagtaaggcagcagtcatttgtgtattcaggctttttaaataaaattagagctgtaaggaaaatgaaaagccacaaatgcaagactgttcttaaatggaaggcatagtcagcgagggtaaatcctataccactttaggaagtattaaaaatatttttaagatttgaaatatatttcatagaagtcctctattcaaaatcatattccacagatgttccccttcaaagggaaaacatttggggttctaaacagttatgaaagtaagtgatttttacatgattccagaataacacttgtattgaccaatttagacagataccagaccaattttgcatttaagaaattgttctgattatttacgtcaactcattagaattcagtgaaaagtaacagtcttttgtcacagagaatctgaaagtagcagcaaagacagagggctcatgacaggtttttgcttttgctttgcttttgtttttgaaagagtaaaagtactgatgcttctgatactggatgtttagcttcttactgcaaaaacataagtaaaacagtcaactttaccatttccgtattctccatagattgaagaaatttataccacatatcgcatatgaccatctttccatcaaatcaatgtagagataatgtaaactgaaaaaaaatctgcaagataatgtaactgaatgttttaaaaacagaacttgtcactttatataaaagaatagtatgctctatttcctgaatggatgtggaaatgaaagctagcgcacctgcactttgaattcttgcttcttttttattactgttatgattttgctttttacagatgttggacgattttttcttctgattgttgaattcataatcatggtctcatttcctttgcttctttggaatatttctttcaacacattcctttattttattatacattgtgtcctttttttagctattgctgctgttgttttttattctatttacaggatgatttttaaactgtcaaatgaagtagtgttaacctcaaataggctaaatgtgaacaaataaaatacagcaaatactcagatacagctttttatcttt

SEQ ID NO: 6424 - DNA, 8103 bp, Homo sapiens
cccgcgccggctgtgctgcacagggggaggagagggaaccccaggcgcgagcgggaagaggggacctgcagccacaacttctctggtcctctgcatcccttctgtccctccacccgtccccttccccaccctctggcccccaccttcttggaggcgacaacccccgggaggcattagaagggatttttcccgcaggttgcgaagggaagcaaacttggtggcaacttgcctcccggtgcgggcgtctctcccccaccgtctcaacatgcttaggggtccggggcccgggctgctgctgctggccgtccagtgcctggggacagcggtgccctccacgggagcctcgaagagcaagaggcaggctcagcaaatggttcagccccagtccccggtggctgtcagtcaaagcaagcccggttgttatgacaatggaaaacactatcagataaatcaacagtgggagcggacctacctaggcaatgcgttggtttgtacttgttatggaggaagccgaggttttaactgcgagagtaaacctgaagctgaagagacttgctttgacaagtacactgggaacacttaccgagtgggtgacacttatgagcgtcctaaagactccatgatctgggactgtacctgcatcggggctgggcgagggagaataagctgtaccatcgcaaaccgctgccatgaagggggtcagtcctacaagattggtgacacctggaggagaccacatgagactggtggttacatgttagagtgtgtgtgtcttggtaatggaaaaggagaatggacctgcaagcccatagctgagaagtgttttgatcatgctgctgggacttcctatgtggtcggagaaacgtgggagaagccctaccaaggctggatgatggtagattgtacttgcctgggagaaggcagcggacgcatcacttgcacttctagaaatagatgcaacgatcaggacacaaggacatcctatagaattggagacacctggagcaagaaggataatcgaggaaacctgctccagtgcatctgcacaggcaacggccgaggagagtggaagtgtgagaggcacacctctgtgcagaccacatcgagcggatctggccccttcaccgatgttcgtgcagctgtttaccaaccgcagcctcacccccagcctcctccctatggccactgtgtcacagacagtggtgtggtctactctgtggggatgcagtggctgaagacacaaggaaataagcaaatgctttgcacgtgcctgggcaacggagtcagctgccaagagacagctgtaacccagacttacggtggcaactcaaatggagagccatgtgtcttaccattcacctacaatggcaggacgttctactcctgcaccacagaagggcgacaggacggacatctttggtgcagcacaacttcgaattatgagcaggaccagaaatactctttctgcacagaccacactgttttggttcagactcgaggaggaaattccaatggtgccttgtgccacttccccttcctatacaacaaccacaattacactgattgcacttctgagggcagaagagacaacatgaagtggtgtgggaccacacagaactatgatgccgaccagaagtttgggttctgccccatggctgcccacgaggaaatctgcacaaccaatgaaggggtcatgtaccgcattggagatcagtgggataagcagcatgacatgggtcacatgatgaggtgcacgtgtgttgggaatggtcgtggggaatggacatgcattgcctactcgcagcttcgagatcagtgcattgttgatgacatcacttacaatgtgaacgacacattccacaagcgtcatgaagaggggcacatgctgaactgtacatgcttcggtcagggtcggggcaggtggaagtgtgatcccgtcgaccaatgccaggattcagagactgggacgttttatcaaattggagattcatgggagaagtatgtgcatggtgtcagataccagtgctactgctatggccgtggcattggggagtggcattgccaacctttacagacctatccaagctcaagtggtcctgtcgaagtatttatcactgagactccgagtcagcccaactcccaccccatccagtggaatgcaccacagccatctcacatttccaagtacattctcaggtggagacctaaaaattctgtaggccgttggaaggaagctaccataccaggccacttaaactcctacaccatcaaaggcctgaagcctggtgtggtatacgagggccagctcatcagcatccagcagtacggccaccaagaagtgactcgctttgacttcaccaccaccagcaccagcacacctgtgaccagcaacaccgtgacaggagagacgactcccttttctcctcttgtggccacttctgaatctgtgaccgaaatcacagccagtagctttgtggtctcctgggtctcagcttccgacaccgtgtcgggattccgggtggaatatgagctgagtgaggagggagatgagccacagtacctggatcttccaagcacagccacttctgtgaacatccctgacctgcttcctggccgaaaatacattgtaaatgtctatcagatatctgaggatggggagcagagtttgatcctgtctacttcacaaacaacagcgcctgatgcccctcctgacacgactgtggaccaagttgatgacacctcaattgttgttcgctggagcagaccccaggctcccatcacagggtacagaatagtctattcgccatcagtagaaggtagcagcacagaactcaaccttcctgaaactgcaaactccgtcaccctcagtgacttgcaacctggtgttcagtataacatcactatctatgctgtggaagaaaatcaagaaagtacacctgttgtcattcaacaagaaaccactggcaccccacgctcagatacagtgccctctcccagggacctgcagtttgtggaagtgacagacgtgaaggtcaccatcatgtggacaccgcctgagagtgcagtgaccggctaccgtgtggatgtgatccccgtcaacctgcctggcgagcacgggcagaggctgcccatcagcaggaacacctttgcagaagtcaccgggctgtcccctggggtcacctattacttcaaagtctttgcagtgagccatgggagggagagcaagcctctgactgctcaacagacaaccaaactggatgctcccactaacctccagtttgtcaatgaaactgattctactgtcctggtgagatggactccacctcgggcccagataacaggataccgactgaccgtgggccttacccgaagaggacagcccaggcagtacaatgtgggtccctctgtctccaagtacccactgaggaatctgcagcctgcatctgagtacaccgtatccctcgtggccataaagggcaaccaagagagccccaaagccactggagtctttaccacactgcagcctgggagctctattccaccttacaacaccgaggtgactgagaccaccattgtgatcacatggacgcctgctccaagaattggttttaagctgggtgtacgaccaagccagggaggagaggcaccacgagaagtgacttcagactcaggaagcatcgttgtgtccggcttgactccaggagtagaatacgtctacaccatccaagtcctgagagatggacaggaaagagatgcgccaattgtaaacaaagtggtgacaccattgtctccaccaacaaacttgcatctggaggcaaaccctgacactggagtgctcacagtctcctgggagaggagcaccaccccagacattactggttatagaattaccacaacccctacaaacggccagcagggaaattctttggaagaagtggtccatgctgatcagagctcctgcacttttgataacctgagtcccggcctggagtacaatgtcagtgtttacactgtcaaggatgacaaggaaagtgtccctatctctgataccatcatcccagctgttcctcctcccactgacctgcgattcaccaacattggtccagacaccatgcgtgtcacctgggctccacccccatccattgatttaaccaacttcctggtgcgttactcacctgtgaaaaatgaggaagatgttgcagagttgtcaatttctccttcagacaatgcagtggtcttaacaaatctcctgcctggtacagaatatgtagtgagtgtctccagtgtctacgaacaacatgagagcacacctcttagaggaagacagaaaacaggtcttgattccccaactggcattgacttttctgatattactgccaactcttttactgtgcactggattgctcctcgagccaccatcactggctacaggatccgccatcatcccgagcacttcagtgggagacctcgagaagatcgggtgccccactctcggaattccatcaccctcaccaacctcactccaggcacagagtatgtggtcagcatcgttgctcttaatggcagagaggaaagtcccttattgattggccaacaatcaacagtttctgatgttccgagggacctggaagttgttgctgcgacccccaccagcctactgatcagctgggatgctcctgctgtcacagtgagatattacaggatcacttacggagagacaggaggaaatagccctgtccaggagttcactgtgcctgggagcaagtctacagctaccatcagcggccttaaacctggagttgattataccatcactgtgtatgctgtcactggccgtggagacagccccgcaagcagcaagccaatttccattaattaccgaacagaaattgacaaaccatcccagatgcaagtgaccgatgttcaggacaacagcattagtgtcaagtggctgccttcaagttcccctgttactggttacagagtaaccaccactcccaaaaatggaccaggaccaacaaaaactaaaactgcaggtccagatcaaacagaaatgactattgaaggcttgcagcccacagtggagtatgtggttagtgtctatgctcagaatccaagcggagagagtcagcctctggttcagactgcagtaaccactattcctgcaccaactgacctgaagttcactcaggtcacacccacaagcctgagcgcccagtggacaccacccaatgttcagctcactggatatcgagtgcgggtgacccccaaggagaagaccggaccaatgaaagaaatcaaccttgctcctgacagctcatccgtggttgtatcaggacttatggtggccaccaaatatgaagtgagtgtctatgctcttaaggacactttgacaagcagaccagctcagggagttgtcaccactctggagaatgtcagcccaccaagaagggctcgtgtgacagatgctactgagaccaccatcaccattagctggagaaccaagactgagacgatcactggcttccaagttgatgccgttccagccaatggccagactccaatccagagaaccatcaagccagatgtcagaagctacaccatcacaggtttacaaccaggcactgactacaagatctacctgtacaccttgaatgacaatgctcggagctcccctgtggtcatcgacgcctccactgccattgatgcaccatccaacctgcgtttcctggccaccacacccaattccttgctggtatcatggcagccgccacgtgccaggattaccggctacatcatcaagtatgagaagcctgggtctcctcccagagaagtggtccctcggccccgccctggtgtcacagaggctactattactggcctggaaccgggaaccgaatatacaatttatgtcattgccctgaagaataatcagaagagcgagcccctgattggaaggaaaaagacagttcaaaagacccctttcgtcacccaccctgggtatgacactggaaatggtattcagcttcctggcacttctggtcagcaacccagtgttgggcaacaaatgatctttgaggaacatggttttaggcggaccacaccgcccacaacggccacccccataaggcataggccaagaccatacccgccgaatgtaggacaagaagctctctctcagacaaccatctcatgggccccattccaggacacttctgagtacatcatttcatgtcatcctgttggcactgatgaagaacccttacagttcagggttcctggaacttctaccagtgccactctgacaggcctcaccagaggtgccacctacaacgtcatagtggaggcactgaaagaccagcagaggcataaggttcgggaagaggttgttaccgtgggcaactctgtcaacgaaggcttgaaccaacctacggatgactcgtgctttgacccctacacagtttcccattatgccgttggagatgagtgggaacgaatgtctgaatcaggctttaaactgttgtgccagtgcttaggctttggaagtggtcatttcagatgtgattcatctagatggtgccatgacaatggtgtgaactacaagattggagagaagtgggaccgtcagggagaaaatggccagatgatgagctgcacatgtcttgggaacggaaaaggagaattcaagtgtgaccctcatgaggcaacgtgttatgatgatgggaagacataccacgtaggagaacagtggcagaaggaatatctcggtgccatttgctcctgcacatgctttggaggccagcggggctggcgctgtgacaactgccgcagacctgggggtgaacccagtcccgaaggcactactggccagtcctacaaccagtattctcagagataccatcagagaacaaacactaatgttaattgcccaattgagtgcttcatgcctttagatgtacaggctgacagagaagattcccgagagtaaatcatctttccaatccagaggaacaagcatgtctctctgccaagatccatctaaactggagtgatgttagcagacccagcttagagttcttctttctttcttaagccctttgctctggaggaagttctccagcttcagctcaactcacagcttctccaagcatcaccctgggagtttcctgagggttttctcataaatgagggctgcacattgcctgttctgcttcgaagtattcaataccgctcagtattttaaatgaagtgattctaagatttggtttgggatcaataggaaagcatatgcagccaaccaagatgcaaatgttttgaaatgatatgaccaaaattttaagtaggaaagtcacccaaacacttctgctttcacttaagtgtctggcccgcaatactgtaggaacaagcatgatcttgttactgtgatattttaaatatccacagtactcactttttccaaatgatcctagtaattgcctagaaatatctttctcttacctgttatttatcaatttttcccagtatttttatacggaaaaaattgtattgaaaacacttagtatgcagttgataagaggaatttggtataattatggtgggtgattattttttatactgtatgtgccaaagctttactactgtggaaagacaactgttttaataaaagatttacattccacaacttgaagttcatctatttgatataagacaccttcgggggaaataattcctgtgaatattctttttcaattcagcaaacatttgaaaatctatgatgtgcaagtctaattgttgatttcagtacaagattttctaaatcagttgctacaaaaactgattggtttttgtcacttcatctcttcactaatggagatagctttacactttctgctttaatagatttaagtggaccccaatatttattaaaattgctagtttaccgttcagaagtataatagaaataatctttagttgctcttttctaaccattgtaattcttcccttcttccctccacctttccttcattgaataaacctctgttcaaagagattgcctgcaagggaaataaaaatgactaagatattaaaagtatttgaatagta

SEQ ID NO: 6425 - DNA, 3127 bp, Homo sapiens
tttcctaaatgttgaggctgttaaaaacaatattactgaagtttgaaatttggtggtagcaaggagatctatcagtatttttaaaaacaaactatgtttttggttataggtactcatgtaatggaaggctctggaagaatggtagttacagctgtaggtgtaaattctcaaactggaattatctttaccttacttggagctggaggtgaagaggaagagaagaaagatgagaagaaaaaggaaaagaaaaataagaaacaagatggagctattgagaatcgcaacaaagcaaaagcccaggatggtgcagccatggaaatgcagccattgaagagtgaagaaggtggagatggtgatgaaaaagataaaaagaaagcaaatttgccaaaaaaggaaaaatctgttttacaagggaaacttacaaaactggctgttcagattggcaaagcaggtctgttgatgtctgccatcacagttatcattctagtattatattttgtcattgacaccttctgggttcagaaaagaccatggcttgctgagtgcacaccaatttatatacaatactttgtgaagttcttcattattggagttacagttttagtggtcgcagtgccagaaggtcttccacttgcagtcacgatctcactggcttattcagtcaaaaaaatgatgaaagataataacttagtaaggcatctggatgcttgtgaaaccatgggaaatgctacagctatttgttcagataaaacaggaactttgacaatgaacagaatgacagtcgttcaagcttacataaatgaaaaacattataaaaaggttcctgaaccagaagctattccaccaaatattttgtcctatcttgtaacaggaatttctgtgaattgtgcttatacatcaaaaatattgccaccagagaaagagggtggattacctcgtcacgttggtaataaaactgaatgtgccttgttgggacttcttttggatttaaaacgggattatcaggatgttagaaatgaaataccagaagaagcactgtacaaagtctacaccttcaattctgttaggaagtccatgagtactgtcctgaaaaattcagatggaagttatcgaatattcagcaagggtgcatctgagataattctgaaaaagtgtttcaaaatcttgagtgctaatggtgaggcaaaagtattcagaccaagggaccgtgatgatattgtaaaaactgtgattgaaccgatggcatcagaaggcttgagaaccatatgtcttgcattcagagattttccagcaggagaaccagaaccagagtgggataatgaaaatgatattgtcaccggccttacatgcattgctgttgtggggattgaagatcctgtgagacctgaggtgccagatgcaattaaaaagtgtcagagggctggaattactgtgcggatggtcactggtgataatattaatactgctcgggccattgctaccaaatgtggtattttacatcctggggaagattttctgtgcctagaaggtaaagattttaacagaagaatacgaaatgaaaaaggagagattgagcaagagaggatagacaagatttggccaaaacttcgagtacttgcaagatcatctcctactgataagcatacactggttaaaggtataattgacagcactgtctcagaccaacgccaggttgtagctgtaactggtgatggtacaaatgatggcccagcactaaagaaagcagatgttggatttgcaatgggtattgctggaactgatgtagctaaagaagcatccgatattattctcacagatgacaactttacaagcattgttaaagcagttatgtggggacgaaatgtctatgacagcatctcaaaattccttcagttccaacttactgttaatgtagtagcagtgattgttgcttttacgggcgcctgcattactcaagactcaccgcttaaggctgtgcagatgctgtgggtaaacctcataatggatacactcgcttccctggctctggcaacggaaccacccactgagtctctcttgcttcggaaaccttatggtagaaataagcctctcatctcacgtacaatgatgaagaatattttgggtcatgcattctatcaacttgtagtagtctttacactcttatttgctggagaaaagttttttgacattgatagtggaagaaatgctcctttgcatgctcctccttcagaacattatactattgtttttaatacctttgtgctgatgcaacttttcaacgaaataaatgcccggaaaattcatggtgaaagaaatgtattcgaaggaatctttaacaatgccatcttctgcacaattgttttaggcacttttgtggtacagataataattgtgcagtttggtggaaaacctttcagttgttcagaactttcaatagaacagtggctatggtcaatattcctaggaatgggaacattactctggggccagcttatttcaacaattccaactagccgtttaaaattcctcaaagaagctggtcatggaacacaaaaggaagaaatacctgaggaggaattagcagaggatgttgaagagattgatcacgctgaaagggagttgcggcgtggccaaatcttgtggtttagaggtctgaacagaatccaaacacagattcgagtggtgaatgcatttcgtagttctttatatgaagggttagaaaaaccggaatcaagaagttcgattcacaactttatgacacatcctgagtttaggatagaagattcagagcctcatatcccccttattgatgacactgatgccgaagatgatgctcctacaaaacgtaactccagtcctccaccctctcccaacaaaaataacaatgctgttgacagtggaattcaccttacaatagaaatgaacaagtctgctacctcttcatccccaggaagcccactacatagtttggaaacatcactctgattgtaagctgaatgttaacacactagctgcattgtaaagaaacaaattgaaactgggtcttttcacatattgtgatggacaagctagtattcttgtctttggacttcaacagaagacacacttgtacgaatgtagatttatt

SEQ ID NO: 6426 - DNA, 394 bp, Homo sapiens
ggaaccatcagttgttcaacaggcacgttacagaggaggaatctgggcccagagaggcagactggattactgctgctgggaatgaaagagaatcaagaattaaagacaatccaggccaatctgtcgaggcagagggtagaacaccagtgtctttcatctgaggaactgaagcaacgtttcccaaatattcggttgcccaggggagaagtggggctcttggacaattccggaggagttatctatgcatataaggccctcagagccctgcaggatgcaattcgacagctaggaggcatagtgcgtgacggagagaaggtggtggagataaacccagggctactggtcacggtgaaaaccacctccaggagctaccaagctaagagcttggtcatca

SEQ ID NO: 6427 - DNA, 3045 bp, Homo sapiens
attccactgggatagaagcggcaggagcagcgttggcaccggcgaaccatggctgggattttctatttcgccctattttcgtgtctcttcgggatttgcgacgctgtcacaggttccagggtataccccgcgaatgaagtgggaggaagtgagtatcatggatgaaaaaaatacaccaatccgaacctaccaagtgtgcaatgtgatggaacccagccagaataactggctacgaactgattggatcacccgagaaggggctcagagggtgtatattgagattaaattcaccttgagggactgcaatagtcttccgggcgtcatggggacttgcaaggagacgtttaacctgtactactatgaatcagacaacgacaaagagcgtttcatcagagagaaccagtttgtcaaaattgacaccattgctgctgatgagagcttcacccaagtggacattggtgacagaatcatgaagctgaacaccgagatccgggatgtagggccattaagcaaaaaggggttttacctggcttttcaggatgtgggggcctgcatcgccctggtatcagtccgtgtgttctataaaaagtgtccactcacagtccgcaatctggcccagtttcctgacaccatcacaggggctgatacgtcttccctggtggaagttcgaggctcctgtgtcaacaactcagaagagaaagatgtgccaaaaatgtactgtggggcagatggtgaatggctggtacccattggcaactgcctatgcaacgctgggcatgaggagcggagcggagaatgccaagcttgcaaaattggatattacaaggctctctccacggatgccacctgtgccaagtgcccaccccacagctactctgtctgggaaggagccacctcgtgcacctgtgaccgaggctttttcagagctgacaacgatgctgcctctatgccctgcacccgtccaccatctgctcccctgaacttgatttcaaatgtcaacgagacatctgtgaacttggaatggagtagccctcagaatacaggtggccgccaggacatttcctataatgtggtatgcaagaaatgtggagctggtgaccccagcaagtgccgaccctgtggaagtggggtccactacaccccacagcagaatggcttgaagaccaccaaagtctccatcactgacctcctagctcataccaattacacctttgaaatctgggctgtgaatggagtgtccaaatataaccctaacccagaccaatcagtttctgtcactgtgaccaccaaccaagcagcaccatcatccattgctttggtccaggctaaagaagtcacaagatacagtgtggcactggcttggctggaaccagatcggcccaatggggtaatcctggaatatgaagtcaagtattatgagaaggatcagaatgagcgaagctatcgtatagttcggacagctgccaggaacacagatatcaaaggcctgaaccctctcacttcctatgttttccacgtgcgagccaggacagcagctggctatggagacttcagtgagcccttggaggttacaaccaacacagtgccttcccggatcattggagatggggctaactccacagtccttctggtctctgtctcgggcagtgtggtgctggtggtaattctcattgcagcttttgtcatcagccggagacggagtaaatacagtaaagccaaacaagaagcggatgaagagaaacatttgaatcaaggtgtaagaacatatgtggacccctttacgtacgaagatcccaaccaagcagtgcgagagtttgccaaagaaattgacgcatcctgcattaagattgaaaaagttataggagttggtgaatttggtgaggtatgcagtgggcgtctcaaagtgcctggcaagagagagatctgtgtggctatcaagactctgaaagctggttatacagacaaacagaggagagacttcctgagtgaggccagcatcatgggacagtttgaccatccgaacatcattcacttggaaggcgtggtcactaaatgtaaaccagtaatgatcataacagagtacatggagaatggctccttggatgcattcctcaggaaaaatgatggcagatttacagtcattcagctggtgggcatgcttcgtggcattgggtctgggatgaagtatttatctgatatgagctatgtgcatcgtgatctggccgcacggaacatcctggtgaacagcaacttggtctgcaaagtgtctgattttggcatgtcccgagtgcttgaggatgatccggaagcagcttacaccaccaggggtggcaagattcctatccggtggactgcgccagaagcaattgcctatcgtaaattcacatcagcaagtgatgtatggagctatggaatcgttatgtgggaagtgatgtcgtacggggagaggccctattgggatatgtccaatcaagatgtgattaaagccattgaggaaggctatcggttaccccctccaatggactgccccattgcgctccaccagctgatgctagactgctggcagaaggagaggagcgacaggcctaaatttgggcagattgtcaacatgttggacaaactcatccgcaaccccaacagcttgaagaggacagggacggagagctccagacctaacactgccttgttggatccaagctcccctgaattctctgctgtggtatcagtgggcgattggctccaggccattaaaatggaccggtataaggataacttcacagctgctggttataccacactagaggctgtggtgcacgtgaaccaggaggacctggcaagaattggtatcacagccatcacgcaccagaataagattttgagcagtgtccaggcaatgcgaacccaaatgcagcagatgcacggcagaatggttcccgtctgagccagtactgaataaactcaaaactcttgaaattagtttacctcatccatgcactttaattgaagaactgcactttttttacttcgtcttcgccctctgaaatt

SEQ ID NO: 6428 - DNA, 555 bp, Homo sapiens
gtctctctgatcccctcgcgggtgcaacacaccaaacaatcgagcctgcgtgctgccgaagcagggcgccgagtccatgcgaactgccatctgatccgctcttatcaatgaagcagccgatcatggcggatggcccccggtgcaagaggcgcaaacaagccaatcccaggaggaaaaacgccttggagtcagaaatgagcactcggagcgggagatgccctgctgctgcttgccaccggtgcggcccgtttgtaacttgcaaagtttgttgcttttgcccctgattcgggcagcgggtcctgggatgctcctgcttccctcctgcctcccacggagcccgggaagagggtctgcctccccatcccgccaccttccagcatcagcctctgaaaaatctcacagagacatgcacgttgtagcaaaaatcaaatccggaaactgcttgtttcagagaaagaaatgaagttgtcttttaaagaaaaactgaattaggaggagagaaaagggaaataggagaagaaaggaaaagttaaatttgatttttctccagagttt

SEQ ID NO: 6429 - DNA, 5163 bp, Homo sapiens
ccagccatgggctcggggcgcgtacccgggctctgcctgcttgtcctgctggtccacgcccgcgccgcccagtacagcaaagccgcgcaagatgtggatgagtgtgtggaggggactgacaactgccacatcgatgctatctgccagaacaccccgaggtcatacaagtgcatctgcaagtctggctacacaggggacggcaaacactgcaaagacgtggatgagtgcgagcgagaggataatgcaggttgtgtgcatgactgtgtcaacatccctggcaattaccggtgtacctgctatgatggattccacctggcacatgacggacacaactgtctggatgtggacgagtgtgccgagggcaacggcggctgtcagcagagctgtgtcaacatgatgggcagctatgagtgccactgccgggaaggcttcttcctcagcgacaaccagcatacctgtatccagcggccagaagaaggaatgaattgcatgaacaagaaccacggctgtgcccacatttgccgggagacacccaaggggggtattgcctgtgaatgccgtcctggctttgagcttaccaagaaccaacgggactgtaaattgacatgcaactatggtaacggcggctgccagcacacgtgtgatgacacagagcagggtccccggtgcggctgccatatcaagtttgtgctccataccgacgggaagacatgcatcggggaaaggcggctagagcagcacatccccactcaagccgtttctaatgagacctgtgctgtcaacaacgggggctgtgacagtaagtgccatgatgcagcgactggtgtccactgcacctgccctgtgggcttcatgctgcagccagacaggaagacgtgcaaagatatagatgagtgccgcttaaacaacgggggctgtgaccatatttgccgcaacacagtgggcagcttcgaatgcagttgcaagaaaggctataagcttctcatcaatgagaggaactgccaggatatagacgagtgttcctttgatcgaacctgtgaccacatatgtgtcaacacaccaggaagcttccagtgtctctgccatcgtggctacctgttgtatggtatcacccactgtggggatgtggatgaatgcagcatcaaccggggaggttgccgctttggctgcatcaacactcctggcagctaccagtgtacctgcccagcaggccagggtcggctgcactggaatggcaaagattgcacagagccactgaagtgtcagggcagtcctggggcctcgaaagccatgctcagctgcaaccggtctggcaagaaggacacctgtgccctgacctgtccctccagggcccgatttttgccagagtctgagaatggcttcacggtgagctgtgggacccccagccccagggctgctccagcccgagctggccacaatgggaacagcaccaactccaaccactgccatgaggctgcagtgctgtccattaaacaacgggcctccttcaagatcaaggatgccaaatgccgtttgcacctgcgaaacaaaggcaaaacagaggaggctggcagaatcacagggccaggtggtgccccctgctctgaatgccaggtcaccttcatccaccttaagtgtgactcctctcggaagggcaagggccgacgggcccggacccctccaggcaaagaggtcacaaggctcaccctggaactggaggcagaggtcagagccgaagaaaccacagccagctgtgggctgccctgcctccgacagcgaatggaacggcggctgaaaggatccctgaagatgctcagaaagtccatcaaccaggaccgcttcctgctgcgcctggcaggccttgattatgagctggcccacaagccgggcctggtagccggggagcgagcagagccgatggagtcctgtaggcccgggcagcaccgtgctgggaccaagtgtgtcagctgcccgcagggaacgtattaccacggccagacggagcagtgtgtgccatgcccagcgggcaccttccaggagagagaagggcagctctcctgcgacctttgccctgggagtgatgcccacgggcctcttggagccaccaacgtcaccacgtgtgcaggtcagtgcccacctggccaacactctgtagatgggttcaagccctgtcagccatgcccacgtggcacctaccaacctgaagcaggacggaccctatgcttcccttgtggtgggggcctcaccaccaagcatgaaggggccatttccttccaagactgtgacaccaaagtccagtgctccccagggcactactacaacaccagcatccaccgctgtattcgctgtgccatgggctcctatcagcccgacttccgtcagaacttctgcagccgctgtccaggaaacacaagcacagactttgatggctctaccagtgtggcccaatgcaagaatcgtcagtgtggtggggagctgggtgagttcactggctatattgagtcccccaactacccgggcaactacccagctggtgtggagtgcatctggaacatcaaccccccacccaagcgcaagatccttatcgtggtaccagagatcttcctgccatctgaggatgagtgtggggacgtcctcgtcatgagaaagaactcatccccatcctccattaccacttatgagacctgccagacctacgagcgtcccattgccttcactgcccgttccaggaagctctggatcaacttcaagacaagcgaggccaacagcgcccgtggcttccagattccctatgttacctatgatgaggactatgagcagctggtagaagacattgtgcgagatggccggctctatgcctctgaaaaccaccaggagattttaaaggacaagaagctcatcaaggccttctttgaggtgctagcccacccccagaactacttcaagtacacagagaaacacaaggagatgctgccaaaatccttcatcaagctgctccgctccaaagtttccagcttcctgaggccctacaaatagtaaccctaggctcagagacccaattttttaagcccccagactccttagccctcagagccggcagccccctaccctcagacaaggaactctctcctctctttttggagggaaaaaaaaaatatcactacacaaaccaggcactctccctttctgtctttctagtttcctttccttgtctctctctgcctgcctctctactgttcccccttttctaacacactacctagaaaagccattcagtactggctctagtccccgtgagatgtaaagaaacagtacagccccttccactgcccattttaccagctcacattcccgaccccatcagcttggaagggtgctagaggcccatcaaggaagtgggtctggtgggaaacggggaggggaaagaagggcttctgccattatagggttgtgccttgctagtcaggggccaaaatgtcccctggctctgctccctagggtgattctaacagcccagggtcctgccaaagaagcctttgatttacaggcttaatgccagcaccagtcctctggggcacatggtttgagctctggacttcccacatggccagctttcttgtctatacagatcctctctttctttccctacgtctgcctggggtctactccataagggtttacaaatggcccacaacactgagttagtggacaccggctaaatgaggaagagcagcaggcattgtcatggtgaatgccccgctgtagctccctgagagaaagactgtaactctgcaggacagaaacaaggttttaaagcattgccaaaaaaaagaaaacagaaagaaaaaatgtatcatctaaaggactagacacagaacaattggaagtcaacttcaaacactaatcccttttcttgtcttccctggcccagccacctcctcagccccatgtgatgctccctgggggagccctactccccttgctacatgttgtccttaaacatggttattgacctgaagccagcctaggccttgccctacagttgtttttcccttgtagccccagctggcttgtgggcttcaccaaagaggaccccactctgaagccagcctggagccacctacctctggcctcaggctgtgggcagcaaaaggaatgtgtgtgcacttggcgagcctcctgcccaccctgtccacacctaataagtgcaatcattttgagtctttctatgttgtctagacggaggggtttttgttttctgggtttgttttttgtttttgtttcttcttcctctattagcaaaaccctatttatagctgcccaagagaaaagagtgtatgtttggagtggaagaaaatcggttttgaatctcatgaaccttgagtgctggagcatctgatctgtctctatgccaccactggccacctagagcccttggctgtggtaatccagggtaattgcgcagaggcatctgatgtgtaggaaagtaattctggggatttgatggagcagaaaggagagagacctatgtttgctaaaccaatcttgctatccctatgcctctccatggagtcagtgtggacctcatgattatagaggccaatggaactggtcagtgattctctaccccaagtagggaaaacctccatcttttccctgtcttcatcctgttatcccctggtgtacacatggaagaggaccaggacataccacctggggatgggctgactcagggtcccgaggccagagacaaagctgtgggagccaagaataagacagaaggcatcagatatttgcctggctctggtcacttccctttgaagttgacttcaagcttagcttcctcaactactgtttttcagaaggaagaaagaatcaaatggaagaagaatcaagtccatgcccaagcccaaagcctgcacacattctgcccttaatccaagtgttgcctataaaattattttctgttttctcactctagttcccccaaagctgtagtcccaatcaatcaaaggctaccaactgagtcctcaggttcatttcttttttttttttttttctttttaactctcctggtaactcacagaacagctcaggttcatttctaggtgactgtcctaggctactgctcccccaggagactcaacactaaataaaggagtc

SEQ ID NO: 6430 - DNA, 1578 bp, Homo sapiens; identical to SEQ ID NO: 81

SEQ ID NO: 6431 - DNA, 1163 bp, Homo sapiens; identical to SEQ ID NO: 6354

SEQ ID NO: 6432 - DNA, 920 bp, Homo sapiens
cctctgcccagacgccccatcttggatgtgaggagcacctctgcccagccaccaccccgtctgggaggtgaggagcacctctgcctggccgccccgtcttggaagagaggagcatctctgcctggccaccccatctgggaggtggttgtgagacaacttcaacaagaagtggctgattcccttaaaaaattaactatgttagagtctccactggaaggtacatgatgtcacattaatttggaagagacacgggcctcaaagaggaaattatttcaagtggaaagtcaaatataagaaactcctggaaatgacaataaatgtgttaagtgtatttggaaatgaagacttcgattgccatggagacttaaaaacagatcaactgaaaatgaatattctgattaagaaactaaaacataagtttgatgatcttacagcagagaaggaagctgtatcttcaaaatgtgtcgatttggctaaagacaatcaagttcttcaacaggagttattatctatgaaaaaagtacaacagcaatgtgaaaaacttgagaaggataaaaagatgttggaagaagaaatattaaatcttaagacacatatggaagacaatatggtagaacttagtaaactacaagaatataaatcggagctagatgaaagggcaatgacggcagtagaaaaattagaagaaatccatttacagatggagctggactgtgtggaacaaataattagagaaacaaagagaactgttgctgtgttggacacttgctcccatctattttcttctctagaatccactgcgctggaatgagtaattttttttagaagcagaggtggagccactgaggaagcacaggcgagccctccccagcgtgtactcactggtccccaacagaagaacagctgctgcatccactgag

SEQ ID NO: 6433 - DNA, 7510 bp, Homo sapiens
aattgagctggagaggaggcagcgtgagagcagaaacttcagacgccgctgatccgggaggagctggggtgagccgcggcggccgtctctcccacccgcagcagcatcctctctgcccttctctgccaccccggggagagccgggagctgcctctttacagcttccacgagccaggggtgcaggcagctgcccccaggaagtttgggcttctgcgtagtttaggggtgcctgcgagcgccccagagggcgaggggccgagggcgatgttgggcgccgcgcggggctgggggcgcccagaagacgtgcgagtgtccgcggtcctgctgctgtctccagtaccctccgcatcccccaagtgatgggaacaagggcccgcccaggcagccgctgtcgccgcaccgccccctcgctcgctctctgcgcgcggagtcacccagtcacactcccggcaccccgagcccttcctccggagctgctgcttctactttggctgctatcgccgccgccgcgggtggcccgctgctgactgggctcgccgggagacggagaagcactttttggccctccctcagcagctctcacaccccaactttgccgccgccgccgcgcctgccctcgcagcggcgctcggccgcacattgtgggggcgcacgccgggaggctccgcaagaccgtggaggcaggaaacggcactactgcgcttctgcctcggctctttgttgttcgctttggatggttcttgaaagtgtctgagcctcctcggaaatcctggggccggagaagacaaaccttggaattcttcctctgcaaaagtctctgagatactgacaagcgtccggaaaggtcgacgagtaattgccctgaaaactcttggctaattgacccacgttgcttatattaagcctttgtgtgtggtgtgtggcttcatacatttggggaccctatttccactccctcctcttggcatgagactgtatacaggatccacccgaggacaatgattgcggagcccgctcacttttacctgtttggattaatatgtctctgttcaggctcccgtcttcgtcaggaagattttccacctcgcattgttgaacacccttcagacctgattgtctcaaaaggagaacctgcaactttgaactgcaaagctgaaggccgccccacacccactattgaatggtacaaagggggagagagagtggagacagacaaagatgaccctcgctcacaccgaatgttgctgccgagtggatctttatttttcttacgtatagtacatggacggaaaagtagacctgatgaaggagtctatgtctgtgtagcaaggaattaccttggagaggctgtgagccacaatgcatcgctggaagtagccatacttcgggatgacttcagacaaaacccttcggatgtcatggttgcagtaggagagcctgcagtaatggaatgccaacctccacgaggccatcctgagcccaccatttcatggaagaaagatggctctccactggatgataaagatgaaagaataactatacgaggaggaaagctcatgatcacttacacccgtaaaagtgacgctggcaaatatgtttgtgttggtaccaatatggttggggaacgtgagagtgaagtagccgagctgactgtcttagagagaccatcatttgtgaagagacccagtaacttggcagtaactgtggatgacagtgcagaatttaaatgtgaggcccgaggtgaccctgtacctacagtacgatggaggaaagatgatggagagctgcccaaatccagatatgaaatccgagatgatcataccttgaaaattaggaaggtgacagctggtgacatgggttcatacacttgtgttgcagaaaatatggtgggcaaagctgaagcatctgctactctgactgttcaagaacctccacattttgttgtgaaaccccgtgaccaggttgttgctttgggacggactgtaacttttcagtgtgaagcaaccggaaatcctcaaccagctattttctggaggagagaagggagtcagaatctacttttctcatatcaaccaccacagtcatccagccgattttcagtctcccagactggcgacctcacaattactaatgtccagcgatctgatgttggttattacatctgccagactttaaatgttgctggaagcatcatcacaaaggcatatttggaagttacagatgtgattgcagatcggcctcccccagttattcgacaaggtcctgtgaatcagactgtagccgtggatggcactttcgtcctcagctgtgtggccacaggcagtccagtgcccaccattctgtggagaaaggatggagtcctcgtttcaacccaagactctcgaatcaaacagttggagaatggagtactgcagatccgatatgctaagctgggtgatactggtcggtacacctgcattgcatcaacccccagtggtgaagcaacatggagtgcttacattgaagttcaagaatttggagttccagttcagcctccaagacctactgacccaaatttaatccctagtgccccatcaaaacctgaagtgacagatgtcagcagaaatacagtcacattatcgtggcaaccaaatttgaattcaggagcaactccaacatcttatattatagaagccttcagccatgcatctggtagcagctggcagaccgtagcagagaatgtgaaaacagaaacatctgccattaaaggactcaaacctaatgcaatttaccttttccttgtgagggcagctaatgcatatggaattagtgatccaagccaaatatcagatccagtgaaaacacaagatgtcctaccaacaagtcagggggtggaccacaagcaggtccagagagagctgggaaatgctgttctgcacctccacaaccccaccgtcctttcttcctcttccatcgaagtgcactggacagtagatcaacagtctcagtatatacaaggatataaaattctctatcggccatctggagccaaccacggagaatcagactggttagtttttgaagtgaggacgccagccaaaaacagtgtggtaatccctgatctcagaaagggagtcaactatgaaattaaggctcgccctttttttaatgaatttcaaggagcagatagtgaaatcaagtttgccaaaaccctggaagaagcacccagtgccccaccccaaggtgtaactgtatccaagaatgatggaaacggaactgcaattctagttagttggcagccacctccagaagacactcaaaatggaatggtccaagagtataaggtttggtgtctgggcaatgaaactcgataccacatcaacaaaacagtggatggttccaccttttccgtggtcattccctttcttgttcctggaatccgatacagtgtggaagtggcagccagcactggggctgggtctggggtaaagagtgagcctcagttcatccagctggatgcccatggaaaccctgtgtcacctgaggaccaagtcagcctcgctcagcagatttcagatgtggtgaagcagccggccttcatagcaggtattggagcagcctgttggatcatcctcatggtcttcagcatctggctttatcgacaccgcaagaagagaaacggacttactagtacctacgcgggtatcagaaaagtcccgtcttttaccttcacaccaacagtaacttaccagagaggaggcgaagctgtcagcagtggagggaggcctggacttctcaacatcagtgaacctgccgcgcagccatggctggcagacacgtggcctaatactggcaacaaccacaatgactgctccatcagctgctgcacggcaggcaatggaaacagcgacagcaacctcactacctacagtcgcccagctgattgtatagcaaattataacaaccaactggataacaaacaaacaaatctgatgctccctgagtcaactgtttatggtgatgtggaccttagtaacaaaatcaatgagatgaaaaccttcaatagcccaaatctgaaggatgggcgttttgtcaatccatcagggcagcctactccttacgccaccactcagctcatccagtcaaacctcagcaacaacatgaacaatggcagcggggactctggcgagaagcactggaaaccactgggacagcagaaacaagaagtggcaccagttcagtacaacatcgtggagcaaaacaagctgaacaaagattatcgagcaaatgacacagttcctccaactatcccatacaaccaatcatacgaccagaacacaggaggatcctacaacagctcagaccggggcagtagtacatctgggagtcaggggcacaagaaaggggcaagaacacccaaggtaccaaaacagggtggcatgaactgggcagacctgcttcctcctcccccagcacatcctcctccacacagcaatagcgaagagtacaacatttctgtagatgaaagctatgaccaagaaatgccatgtcccgtgccaccagcaaggatgtatttgcaacaagatgaattagaagaggaggaagatgaacgaggccccactccccctgttcggggagcagcttcttctccagctgccgtgtcctatagccatcagtccactgccactctgactccctccccacaggaagaactccagcccatgttacaggattgtccagaggagactggccacatgcagcaccagcccgacaggagacggcagcctgtgagtcctcctccaccaccacggccgatctcccctccacatacctatggctacatttcaggacccctggtctcagatatggatacggatgcgccagaagaggaagaagacgaagccgacatggaggtagccaagatgcaaaccagaaggcttttgttacgtgggcttgagcagacacctgcctccagtgttggggacctggagagctctgtcacggggtccatgatcaacggctggggctcagcctcagaggaggacaacatttccagcggacgctccagtgttagttcttcggacggctcctttttcactgatgctgactttgcccaggcagtcgcagcagcggcagagtatgctggtctgaaagtagcacgacggcaaatgcaggatgctgctggccgtcgacattttcatgcgtctcagtgccctaggcccacaagtcccgtgtctacagacagcaacatgagtgccgccgtaatgcagaaaaccagaccagccaagaaactgaaacaccagccaggacatctgcgcagagaaacctacacagatgatcttccaccacctcctgtgccgccacctgctataaagtcacctactgcccaatccaagacacagctggaagtacgacctgtagtggtgccaaaactcccttctatggatgcaagaacagacagatcatcagacagaaaaggaagcagttacaaggggagagaagtgttggatggaagacaggttgttgacatgcgaacaaatccaggtgatcccagagaagcacaggaacagcaaaatgacgggaaaggacgtggaaacaaggcagcaaaacgagaccttccaccagcaaagactcatctcatccaagaggatattctaccttattgtagacctacttttccaacatcaaataatcccagagatcccagttcctcaagctcaatgtcatcaagaggatcaggaagcagacaaagagaacaagcaaatgtaggtcgaagaaatattgcagaaatgcaggtacttggaggatatgaaagaggagaagataataatgaagaattagaggaaactgaaagctgaagacaaccaagaggcttatgagatctaatgtgaaaatcatcactcaagatgcctcctgtcagatgacacatgacgccagataaaatgttcagtgcaatcagagtgtacaaattgtcgtttttattcctcttattgggatatcattttaaaaactttattgggtttttattgttgttgtttgatccctaaccctacaaagagccttcctattcccctcgctgttggagcaaaccattataccttacttccagcaagcaaagtgctttgacttcttgcttcagtcatcagccagcaagagggaacaaaactgttcttttgcattttgccgctgagatatggcattgcactgcttatatgccaagctaatttatagcaagatattgatcaaatatagaaagttgatattcaacctcacaagggctctcaaagtataatctttctatagccaactgctaatgcaaattaaaacatatttcattttaacatgatttcaaaatcagtttttcatactaccctttgctggaagaaactaaaaatatagcaaatgcagaaccacaaacaattcgaatggggtagaaacattgtaaatatttactctttgcaaaccctggtggtattttattttggcttcatttcaatcattgaagtatattcttattggaaatgtacttttggataagtagggctaagccagttggatctctggttgtctagtcattgtcataagtaaacctagtaaaaccttgttctatttttcaatcatcaaaaagtaattataaatacgtattacaaacaagtggatgtttttaatgaccaattgagtaagaacatccctgtcttaactggcctaaatttcttctggtagtgtcagttcaactttcagaagtgccacttaaggaagtttgatttttgtttttgtaatgcactgtttttaatctctctctctttttttttttttttttggttttaaaagcacaatcactaaactttatttgtaaaccattgtaactattaaccttttttgtcttattgaaaaaaaaaatgttgagaagcgtttttaacctgttttgttaatgctctatgtttgtatttggaatatttgaataatgacagatggtgaagtaacatgcatactttattgtgggccatgaaccaaatggttcttacttttcctggacttaaagaaaaaaagaggtttaagtttgttgtggccaatgtcgaaacctacaagatttccttaaaatctctaatagaggcattacttgctttcaattgacaaatgatgccctctgactagtagatttctatgatccttttttgtcattttatgaatatcattgattttataattggtgctatttgaagaaaaaaatgtacatttattcatagatagataagtatcaggtctgaccccagtggaaaacaaagccaaacaaaactgaaccacaaaaaaaaaggctggtgttcaccaaaaccaaacttgttcatttagataatttgaaaaagttccatagaaaaggcgtgcagtactaagggaacaatccatgtgattaatgttttcattatgttcatgtaagaagccccttatttttagccataattttgcatactgaaaatccaataatcagaaaagtaattttgtcacattatttattaaaaatgttctcaaatac

SEQ ID NO: 6434 - DNA, 799 bp, Homo sapiens
tttcaccaggcccccggcttggggcgccttccttccccatggcgggacacctggcttcagatttcgccttctcgccccctccaggtggtggaggtgatgggccaggggggccggagccgggctgggttgatcctcggacctggctaagcttccaaggccctcctggagggccaggaatcgggccgggggttgggccaggctctgaggtgtgggggattcccccatgccccccgccgtatgagttctgtggggggatggcgtactgtgggccccaggttggagtggggctagtgccccaaggcggcttggagacctctcagcctgagggtgaagcaggagtcggggtggagagcaactccgatggggcctccccggagccctgcaccgtcacccctggtgccgtgaagctggagaaggagaagctggagcaaaacccggaggagtcccaggacatcaaagctctgcagaaagaactcgagcaatttgccaagctcctgaagcagaagaggatcaccctgggatatacacaggccgatgtggggctcaccctgggggttctatttggtgggttcccctctgcagattctgaccgcatctcccctctaaggagtatccctgaacctagtggggaggggcaggggcagactctaccctcacccatgaagaggagtagggagagggagaagatgcttgggctttgagctccctctgggaagaggtggtaagcttggatctcagggtcacaagggccctgcgtgctccctcattttgcttctcttttgactggcctcccccaggg

SEQ ID NO: 6435 - DNA, 547 bp, Homo sapiens
gactgtgagctgcggcagctgagcagaggcggcggcgcgggacctgcagtcgccagggattccctccaggtgacgatgctctggttctccggcgtcggggctctggctgagcgttactgccgccgctcgcctgggattacgtgctgcgtcttgctgctactcaattgctcgggggtccccatgtctctggcttcctccttcttgacaggttctgttgcaaaatgtgaaaatgaaggtgaagtcctccagattccatttatcacagacaacccttgcataatgtgtgtctgcttgaacaaggaagtgacatgtaagagagagaagtgccccgtgctgtcccgagactgtgccctggccatcaagcagaggggagcctgttgtgaacagtgcaaagtgcttgtctcaagggttttaagggacacagtcctgttcactcttaaatactggagactcccagtattttggttgcacctatgaaggaaatacctataacagctccttcaaatggcagagcccggctgagccttgtgttctacgccagtgccag

SEQ ID NO: 6436 - DNA, 1543 bp, Homo sapiens
caaccttcccgaggcgtcctgcccgggaagccagttcctgggttctgggctggctaggttggcagcgaatgaggcttaggcatcactgcctgaggccctcacttagcatgtcgacagccacagacttgtctggcggagtttctcctggtgcccacttaagtagtctcaagtttgttcaaagctggactcctcgacttggaaccaggagcagctggagatttgtcaatttagagctcatttgccacgggagacgctcttggtgtccccagcaccgaagggcaggatggggaagcagaatagcaaactggcccctgaagtgatggaggacctggtgaagagcacagagtttaatgagcatgaactcaagcagtggtacaaaggatttctcaaggactgtccaagtgggaggctaaatctcgaggaatttcagcagctctatgtgaagttctttccttatggagacgcctccaagtttgcccagcatgccttccgaaccttcgacaagaatggggacggcaccattgacttccgagagttcatctgcgctctgtccatcacctccaggggcagctttgagcagaagctgaactgggccttcaatatgtatgacctggatggtgatggcaagatcacccgagtggagatgctggagatcatcgaggctatctacaaaatggtaggcactgtgatcatgatgaaaatgaatgaggatggcctgacgcctgagcagcgagtagacaagattttcagcaagatggataagaacaaagatgaccagattacactggatgaattcaaagaagctgcaaagagcgacccttccattgtattacttctgcagtgcgacatccagaaatgagctgatgtcaatgctatggactgcacaaaagtctcaatgttccattcagtctgcagctattcacacacacacacacacacacacacacacacacacacacacacacaaatattgcttggactacctataaatggacttgcttcttgtgtttgaaacactcgtgtgcatgagaatgtcatttgctaatgaattttaaaagcatatataaaacaaaacaaacaacctgccacaatgtgatatgtgtaatatcatttcataaaaatccctcttcctccaaagcctgggcagaaatgtgctgcaaagagttatatgacttcttgttcatgttttgctaatgctcgtatctccttgattacataatgttagtagcactgagacccccatggtaatgtaacttaattataagctatgtcactaccctcctgtaaaatactattggacagacacagagggacccttggctcctgtgtctggtccacacaccacagaagcttgtattatcagtgaatataaatgtactacatttgcatgccttttgggtttgccttaattcttacctcatttgcatcctatcgatctggaaagagctgttttggatgaatgcagtataaaatgtaaaaaccctgctaaatgacttattgattaagtatatctatctatatatacatatacacaaagatatta

SEQ ID NO: 6437 - DNA, 5867 bp, Homo sapiens
tcagaagaaagccccgagatcacagagacccggcgagatcacagagacccggcctgaaggaacgtggaaagaccaatgtacctgttttgaccggttgcctggagcaagaagttccagttggggagaattttcagaagataaagtcggagattgtggaaagacttgacttgcagcattactctactgactggcagagacaggagaggtagatgtccacgcccacagaccctggtgcgatgccccacccagggccttcgccggggcctgggccttcccctgggccaattcttgggcctagtccaggaccaggaccatccccaggttccgtccacagcatgatggggccaagtcctggacctccaagtgtctcccatcctatgccgacgatggggtccacagacttcccacaggaaggcatgcatcaaatgcataagcccatcgatggtatacatgacaaggggattgtagaagacatccattgtggatccatgaagggcactggtatgcgaccacctcacccaggcatgggccctccccagagtccaatggatcaacacagccaaggttatatgtcaccacacccatctccattaggagccccagagcacgtctccagccctatgtctggaggaggcccaactccacctcagatgccaccaagccagccgggggccctcatcccaggtgatccgcaggccatgagccagcccaacagaggtccctcacctttcagtcctgtccagctgcatcagcttcgagctcagattttagcttataaaatgctggcccgaggccagcccctccccgaaacgctgcagcttgcagtccaggggaaaaggacgttgcctggcttgcagcaacaacagcagcagcaacagcagcagcagcagcagcagcagcagcagcagcagcagcaacagcagccgcagcagcagccgccgcaaccacagacgcagcaacaacagcagccggcccttgttaactacaacagaccatctggcccggggccggagctgagcggcccgagcaccccgcagaagctgccggtgcccgcgcccggcggccggccctcgcccgcgccccccgcagccgcgcagccgcccgcggccgcagtgcccgggccctcagtgccgcagccggccccggggcagccctcgcccgtcctccagctgcagcagaagcagagccgcatcagccccatccagaaaccgcaaggcctggaccccgtggaaattctgcaagagcgggaatacagacttcaggcccgcatagctcataggatacaagaactggaaaatctgcctggctctttgccaccagatttaagaaccaaagcaaccgtggaactaaaagcacttcggttactcaatttccagcgtcagctgagacaggaggtggtggcctgcatgcgcagggacacgaccctggagacggctctcaactccaaagcatacaaacggagcaagcgccagactctgagagaagctcgcatgaccgagaagctggagaagcagcagaagattgagcaggagaggaaacgccgtcagaaacaccaggaatacctgaacagtattttgcaacatgcaaaagattttaaggaatatcatcggtctgtggccggaaagatccagaagctctccaaagcagtggcaacttggcatgccaacactgaaagagagcagaagaaggagacagagcggattgaaaaggagagaatgcggcgactgatggctgaagatgaggagggttatagaaaactgattgatcaaaagaaagacaggcgtttagcttaccttttgcagcagaccgatgagtatgtagccaatctgaccaatctggtttgggagcacaagcaagcccaggcagccaaagagaagaagaagaggaggaggaggaagaagaaggctgaggagaatgcagagggtggggagtctgccctgggaccggatggagagcccatagatgagagcagccagatgagtgacctccctgtcaaagtgactcacacagaaaccggcaaggttctgttcggaccagaagcacccaaagcaagtcagctggacgcctggctggaaatgaatcctggttatgaagttgcccctagatctgacagtgaagagagtgattctgattatgaggaagaggatgaggaagaagagtccagtaggcaggaaaccgaagagaaaatactcctggatccaaatagcgaagaagtttctgagaaggatgctaagcagatcattgagacagctaagcaagacgtggatgatgaatacagcatgcagtacagtgccaggggctcccagtcctactacaccgtggctcatgccatctcggagagggtggagaaacagtctgccctcctaattaatgggaccctaaagcattaccagctccagggcctggaatggatggtttccctgtataataacaacttgaacggaatcttagccgatgaaatggggcttggaaagaccatacagaccattgcactcatcacttatctgatggagcacaaaagactcaatggcccctatctcatcattgttcccctttcgactctatctaactggacatatgaatttgacaaatgggctccttctgtggtgaagatttcttacaagggtactcctgccatgcgtcgctcccttgtcccccagctacggagtggcaaattcaatgtcctcttgactacttatgagtatattataaaagacaagcacattcttgcaaagattcggtggaaatacatgatagtggacgaaggccaccgaatgaagaatcaccactgcaagctgactcaggtcttgaacactcactatgtggcccccagaaggatcctcttgactgggaccccgctgcagaataagctccctgaactctgggccctcctcaacttcctcctcccaacaatttttaagagctgcagcacatttgaacaatggttcaatgctccatttgccatgactggtgaaagggtggacttaaatgaagaagaaactatattgatcatcaggcgtctacataaggtgttaagaccatttttactaaggagactgaagaaagaagttgaatcccagcttcccgaaaaagtggaatatgtgatcaagtgtgacatgtcagctctgcagaagattctgtatcgccatatgcaagccaaggggatccttctcacagatggttctgagaaagataagaaggggaaaggaggtgctaagacacttatgaacactattatgcagttgagaaaaatctgcaaccacccatatatgtttcagcacattgaggaatcctttgctgaacacctaggctattcaaatggggtcatcaatggggctgaactgtatcgggcctcagggaagtttgagctgcttgatcgtattctgccaaaattgagagcgactaatcaccgagtgctgcttttctgccagatgacatctctcatgaccatcatggaggattattttgcttttcggaacttcctttacctacgccttgatggcaccaccaagtctgaagatcgtgctgctttgctgaagaaattcaatgaacctggatcccagtatttcattttcttgctgagcacaagagctggtggcctgggcttaaatcttcaggcagctgatacagtggtcatctttgacagcgactggaatcctcatcaggatctgcaggcccaagaccgagctcaccgcatcgggcagcagaacgaggtccgggtactgaggctctgtaccgtgaacagcgtggaggaaaagatcctcgcggccgcaaaatacaagctgaacgtggatcagaaagtgatccaggcgggcatgtttgaccaaaagtcttcaagccacgagcggagggcattcctgcaggccatcttggagcatgaggaggaaaatgaggaagaagatgaagtaccggacgatgagactctgaaccaaatgattgctcgacgagaagaagaatttgacctttttatgcggatggacatggaccggcggagggaagatgcccggaacccgaaacggaagccccgtttaatggaggaggatgagctgccctcctggatcattaaggatgacgctgaagtagaaaggctcacctgtgaagaagaggaggagaaaatatttgggagggggtcccgccagcgccgtgacgtggactacagtgacgccctcacggagaagcagtggctaagggccatcgaagacggcaatttggaggaaatggaagaggaagtacggcttaagaagcgaaaaagacgaagaaatgtggataaagatcctgcaaaagaagatgtggaaaaagctaagaagagaagaggccgccctcccgctgagaaactgtcaccaaatccccccaaactgacaaagcagatgaacgctatcatcgatactgtgataaactacaaagataggtgtaacgtggagaaggtgcccagtaattctcagttggaaatagaaggaaacagttcagggcgacagctcagtgaagtcttcattcagttaccttcaaggaaagaattaccagaatactatgaattaattaggaagccagtggatttcaaaaaaataaaggaaaggattcgtaatcataagtaccggagcctaggcgacctggagaaggatgtcatgcttctctgtcacaacgctcagacgttcaacctggagggatcccagatctatgaagactccatcgtcttacagtcagtgtttaagagtgcccggcagaaaattgccaaagaggaagagagtgaggatgaaagcaatgaagaggaggaagaggaagatgaagaagagtcagagtccgaggcaaaatcagtcaaggtgaaaattaagctcaataaaaaagatgacaaaggccgggacaaagggaaaggcaagaaaaggccaaatcgaggaaaagccaaacctgtagtgagcgattttgacagcgatgaggagcaggatgaacgtgaacagtcagaaggaagtgggacggatgatgagtgatcagtatggacctttttccttggtagaactgaattccttcctcccctgtctcatttctacccagtgagttcatttgtcatataggcactgggttgtttctatatcatcatcgtctataaactagctttaggatagtgccagacaaacatatgatatcatggtgtaaaaaacacacacatacacaaatatttgtaacatattgtgaccaaatgggcctcaaagattcagattgaaacaaacaaaaagcttttgatggaaaatatgtgggtggatagtatatttctatgggtgggtctaatttggtaacggtttgattgtgcctggttttatcacctgttcagatgagaagatttttgtcttttgtagcactgataaccaggagaagccattaaaagccactggttattttatttttcatcaggcaattttcgaggtttttatttgttcggtattgtttttttacactgtggtacatataagcaactttaataggtgataaatgtacagtagttagatttcacctgcatatacatttttccattttatgctctatgatctgaacaaaagctttttgaattgtataagatttatgtctactgtaaacattgcttaatttttttgctcttgatttaaaaaaaagttttgttgaaagcgctattgaatattgcaatctatatagtgtattggatggcttcttttgtcaccctgatctcctatgttaccaatgtgtatcgtctccttctccctaaagtgtacttaatctttgctttctttgcacaatgtctttggttgcaagtcataagcctgaggcaaataaaattccagtaatttcgaagaatgtggtgttggtgctttcctaataaagaaataatttagcttgacaaa

SEQ ID NO: 6438 - DNA, 881 bp, Homo sapiens
gcgaatattttggctcagaagcaactgcgttccatcattttaacacatgtcatccgagcccagcgggccatcaacaatgagatggcgcaccagctgtatgttctacaagtgctcacctttaacctcctggaagacaggatgatgaccaaaatggacccccaggaccaggctcagagggacatcatatttgaacttcgaagaattgcttttgatgctgagtctgaacctaacaacagcagtggcagcatggagaaacgcaagtccatgtacacgcgagattataagaagcttgggttcattaatcatgtcaaccctgccatggacttcacgcagactccacctgggatgttggctctggacaacatgctgtactttgccaagcaccaccaagatgcctacatccggattgtgcttgagaacagtagtcgagaagacaagcatgaatgtccctttggccgcagtagtatagagctgaccaagatgctatgtgagatcttgaaagtgggcgagttgcatcacttatctcctgaaaaattcacactgccgtgaacacgatccagccttgcagtgtgtctcggagctagtgagacctgcaacgacttccacccgatgttcttcacccacgacagatcctttgaggagtttttctgcatctgtatccagctcctgaacaagacatggaaggaaatgagggcaacttctgaagacttcaacaaggtaatgcaggtggtgaaggagcaggttatgagagcacttacaaccaagcctagctccctggaccagttcaagagcaaactgcagaacctgagctacactgagatcctgaaaatccgccagtccgagaggatgaaccaggaagatttccagtcccgcccgatttt

SEQ ID NO: 6439 - DNA, 553 bp, Homo sapiens
actgaaaactctttatctggaactacaccaagctacatctgaatcccaataaatgcagagtttagtggactttttgttcctgggttttgaaaagctgctgacccttgaaacatcagtttttcatcaacttggagggcgtgttaggcataagctgctgttgccattgtgcagagtaatccagatttacctgttgtcctcagtttgaaggttgcacaaaggcctactcgagactagaaaacttgaaaacacacttgagatctcacactggagagaaaccatacgtctgtgagcacgaaggttgcaacaaggctttctcaaatgcctctgatcgcgccaaacaccaaaacagaacgcattccaatgagaaaccatatgtgtgcaaaatcccaggctgcactaagcgttacacagacccaagctccctccggaaacatgtgaagacagtgcatggcccagaggctcatgtcaccaagaagcagcgaggggacatccatcctcggccgccacccccgagagattccggcagccattcacagtccaggtcgcctggccg

SEQ ID NO: 6440 - DNA, 1124 bp, Homo sapiens
gctttcacttcctcctccgagagcggacagatctctgggtgctgggcggtcatggcgctactagatgtatgcggagccccccgagggcagcggccggaatcggctctcccggttgcgggaagcgggcgtcgctcggacccaggacactacagtttctctatgcgatctccagagctcgctttaccccggggaatgcagcccacagaattcttccagtccctgggtggggacggagaaaggaacgttcagattgagatggcccatggcaccaccacgctcgccttcaagttccagcatggagtgattgcagcagtggattctcgggcctcagctgggtcctacattagtgccttacgggtgaacaaggtgattgagattaacccttacctgcttggcaccatgtctggctgtgcagcagactgtcagtactgggagcgcctgctggccaaggaatgcaggctgtactatctgcgaaatggagaacgtatttcagtgtcggcagcctccaagctgctgtccaacatgatgtgccagtaccggggcatgggcctctctatgggcagtatgatctgtggctgggataagaagggtcctggactctactacgtggatgaacatgggactcggctctcaggaaatatgttctccacgggtagtgggaacacttatgcctacggggtcatggacagtggctatcggcctaatcttagccctgaagaggcctatgaccttggccgcagggctattgcttatgccactcacagagacagctattctggaggcgttgtcaatatgtaccacatgaaggaagatggttgggtgaaagtagaaagtacagatgtcagtgacctgctgcaccagtaccgggaagccaatcaataatggtggtggtggcagctgggcaggtctcctctgggaggtcttggccgactcagggacctaagccacgttaagtccaaggagaagaagaggcctagcctgagccaaagagagagtacgggctcagcagccagaggaggccggtgaagtgcatcttctgcgtgttctctatttgaacaagcatttcccccagggaagtttctgggtgccccactaagtagaataaagaaaaacggttataaata

SEQ ID NO: 6441 - DNA, 5033 bp, Homo sapiens
ggccgagcgagcccccagcccagcctggcgactggggaccccggcacatgaggtggacgcccccggggaagacttgggtgcacagccaggcgagaaggtcttgagtcagacagagcaccagccttggggaccctggaccactatcatggagactgagagcgagcagaactccaattccaccaatgggagttctagctcagggggcagctctcggccccagatagctcaaatgtcactttatgaacgacaagcagtgcaggccacaattgctgccagtcggcaggccagctccccaaacaccagcactacacagcagcagactaccaccacccaggcctcgatcaatctggccaccacatcggccgcccagctcatcagccgatcccagagtgtgagctctcccagtgctaccaccttgacccaatctgtgctactggggaacaccacctccccacccctcaaccagtctcaggcccagatgtatctacgggtaaaccgaaccctgggtcggaatgtgcctctagcctcccaactcatcctgatgcctaatggggcggtggctgcagtccagcaggaggtgccatctgctcagtctcctggagttcatgcagatgcagatcaggttcagaacttggcagtaaggaatcaacaggcctcagctcaaggacctcagatgcaaggctccactcagaaggccattcctccaggagcctcccctgtctctagcctctcccaggcctctagccaggccctagcggtggcacaggcttcctctggggccacaaaccagtccctcaaccttagtcaagctggtggaggcagtgggaatagcatcccagggtccatgggtccaggtggaggtgggcaggcacatggtggtttgggtcagttgccttcctcaggaatgggtggtgggagctgtcccagaaagggtacaggagtggtgcagcccttgcctgcagcccaaacagtgactgtgagccagggcagccagacagaggcagaaagtgcagcagccaagaaggcagaagcagatgggagtggccagcagaatgtgggcatgaacctgacacggacagccacacctgcgcccagccagacacttattagctcagccacctacacacagatccagccccattcactgattcagcaacagcaacagatccacctccagcagaaacaggtggtgatccagcagcagattgccatccaccaccagcagcagttccagcaccggcagtcccagctccttcacacagctacacacctccagttggcgcagcagcagcagcagcaacaacagcaacagcagcaacagcagcagccgcaagccaccaccctcactgcccctcagccaccacaggtcccacctactcagcaggtcccaccttcccagtcccagcagcaagcccaaaccctggtcgttcagcccatgcttcagtcttcacccttgtctcttccacctgatgcagcccctaagccaccaattcccatccaatccaaaccacctgtagcacctatcaagccgcctcagttaggggccgctaagatgtcagctgcccagcaaccaccaccccatatccctgtgcaagttgtaggcactcgacagccaggtacagcccaggcacaggctttggggttggcacagctggcagctgctgtacctacttcccgggggatgccaggtacagtgcagtctggtcaggcccatttggcctcctcgccaccttcatcccaggctcctggtgcactgcaggagtgccctcccacattggcccctgggatgacccttgctcctgtgcaggggacagcacatgtggtaaagggtggggctaccacctcctcacctgttgtagcccaggtccctgctgccttctatatgcagtctgtgcacttgccgggtaaaccccagacattggctgtcaaacgcaaggctgactctgaggaggagagagatgatgtctccacattgggttcaatgcttcctgccaaggcatctccagtagcagaaagcccaaaagtcatggacgagaagagcagtcttggagaaaaagctgaatcagtggctaatgtgaatgctaatactccaagcagtgaactagtagccttgacccccgccccttcagtaccgcctcctacactagccatggtgtctagacaaatgggtgactcaaaacccccacaggccatcgtgaagccccagattctcacccacatcattgaaggctttgttatccaggaaggagcagaacctttcccggtgggttgttctcagttactgaaggagtctgagaagccactacagactggccttccgacagggctgactgagaatcagtcaggtggccctttgggagtggacagcccatctgctgagttagataagaaggcgaatctcctgaagtgcgagtactgtgggaagtacgcccccgcagagcagtttcgtggctctaagaggttctgctccatgacttgcgctaagaggtacaatgtgagctgtagccatcagttccggctgaagaggaaaaaaatgaaagagtttcaagaagccaactatgctcgcgttcgcaggcgtggaccccgccgcagctcctctgacattgcccgtgccaagattcagggcaagtgccaccggggtcaagaagactctagccggggttcagataattccagttatgatgaagcactctctccaacatctcctgggcctttatcagtaagagctgggcatggagaacgtgacctggggaatcccaatacagctccacctacaccggaattacatggcatcaaccctgtgttcctgtccagtaatcccagccgttggagtgtagaggaggtgtacgagtttattgcttctctccaaggctgccaagagattgcagaggaatttcgctcacaggagattgatggacaggcccttttattacttaaagaagaacatcttatgagtgccatgaacatcaagctgggccctgccctcaagatctgcgccaagataaatgtcctcaaggagacctaaggtggccctcttgcacaaaccagcctaaggcagacactctccactgtccaggttataacctggtaccagcagactttgcagggaagaaagagttgttccaatcatgtaaccttctgtaggggattactgagacagggaagagaagtgcaagaattggttgctggtgctacatggcggcagctttgacattttctctgggttctactttattttttaaaatctttacagttctcaccatttcacgtaccttaatccaatctttataaaagaggcagtctagagaactaggactgctcagccttatcctggagtggagcatttagcccaggtcttaattctccaagaggaggaatacatagtatggtaaggcaaggaactgggtggaatgtcaggttgcctgcccaatgggagaggtagggtttttctagcttgtgtgacagaagtagcaaaatctggtcctcccccctcccagtgtagctgtggctcagagttttttctttttgttgtcacttactcccttgtgattgaattttttctcctgcatccatggcaggatccccagccagtatagagacttggttggcatcttctgctgcagggactaaaagtatttgactggggcacatgtggctgttgtcattctttctgcatcccactgttcccctccaatttatgttattttctaccctgtttttcagttccatctctgctctgtcctatagctttataaaaccagagtgtgtggggctgaggtcaggagtataagtacctgccttaggcactattccttatataacaaaaatattaaatatttttttcctcagtaaaaggatgaaaattggtttcagttgtcttactctattccagtctttgcccactttcacacaaatgacaaggccaatatgttttgtttgttttttaatcattaagagtttttgtacaaaaggtgatggttttttttcttcattttaaaacaccagggtgtgggggagggatgcaaacaaataacaaaaaagatgcttttgtaacattattttccctgtttagaaagaaaaaaatcactccaatagtattgaaaagtccaaagatgaaatagtttcattttcttttcctaaggcttataaaaggccccctgcctgttgattccatccctcttttgtgtccagtggagccatgttactcttcagtggcccaggggttcactattaaagaaagatcagtccaggtttctgggcacatggcctaaacaggaagatggaagcatcagaggattaaaaacctttccccacagaaatgtgggcaagaagacacttccctgagccagcagaagggacaggtgcagcagcattccacacccagcgcagaggacagcagagccctcgatgtcccacttctgcttccgttccctttctagaagattgaaaaaaaggtcaaaaccacatgcctgtggagaaagtgcgacatgtttagaaatactggtagggaaccaggagtaagaaaagctttaccagcttttactacaaatggatgaaagacatcaggatcccaccaccgcaaggtaaagtgacttcccttttctggaacccctgtggcacaggagtaccaattttcctttccaacgaactggatttctggataggcattttggctgtatgtggacagataagaccacagtccttagcccaatcccagctatacagtcaccccaatttccacaaatgatgtgatggtaccgtataatcctgtaattgggaaatttcacatttttcctgtcctaatctcagaggtgggagaagcaagtctagaacatctccaggctcagactaaacgagagtacttggactgcaaccaagtaatcactgcaaagtagttccaagcagcaagaaataccagattctcatggaggctactatagggtacagaataacaacatgaaagcaatcaaccctgtataaataatgtttcttggcattttttttttaattaaagaaatccagtgtctcaaaaa

SEQ ID NO: 6442 - DNA, 5492 bp, Homo sapiens
aaagtaggccagtattgccagagaacaggagaggaggagagtatggtataagcatgtccagaaataaggagaacttgaagcagaatggctgcaagatgtgggtttatcaactctgatctcaggtgatgaagaggaagatggcaaagccttgctctccacattgactcgaacccaagcagctgccgtgcaaaagagataccatacctatacccaaaccatgaggaaaaaggataagcaatctatcagggatgtcagagacatttttggagtcagtgaatctcctcctcgtgatacctgtggcaaccacactaatcagctggatggcaccaaggaagaaagagagcttccaagagttatcaagacaagtggttccatgccagatgatgcttctctcaacagtactaccctgtctgacgcatcccaggataaagaagggagttttgcggttcccaggagtgactctgtggctatacttgagaccattccagttctaccagttcattccaatggatcaccggagcctggacagccagttcagaatgcgataagtgatgatgattttctggaaaagaacattccaccagaggctgaagagctgtcatttgaagtgtcttattcagaaatggttacggaggctctaaaaagaaataaacttaagaaatcagagattaagaaagaagactatgttttaactaaatttaatgttcagaaaaccagatttggcttaactgaagcaggagatctgtctgctgaagacatgaagaaaatccgccatctctctctgattgaattgactgccttttttgatgcctttggaattcaactgaaaaggaacaaaacagagaaagtaaaaggacgagacaatgggatttttggagttccacttacagtcctcctggacggtgaccgaaagaaagaccctggagtgaaagttcccctggtattacaaaaattttttgagaaagttgaggaatcaggtctggaatctgaaggaatttttcgactttcaggatgtactgctaaagtcaagcaataccgtgaagaacttgatgccaagtttaatgctgataaatttaaatgggacaaaatgtgccatagagaagctgcagtaatgttgaaagcgtttttcagagaactacccacctctctcttccctgtggaatatatacctgccttcatcagtctaatggaaagagggcctcacgtcaaagtacagtttcaagccttacacctcatggtcatggcgctgcctgatgccaacagagatgcagctcaggccctcatgacattcttcaataaagtgattgccaatgaatcaaaaaaccgaatgagtctgtggaacatttctacagtgatggcaccaaaccttttcttcagtagaagcaaacactctgattatgaagaattactgttagcaaacactgcggcccacatcatccgcctaatgcttaagtaccagaagattttgtggaaggttccatctttcttaatcactcaagtaagaagaatgaatgaagccacgatgctattgaagaagcagctcccaagtgtcaggaagctgctcaggaggaagaccctcgagcgggagactgcaagccccaagacttcaaaggtactgcaaaaatcaccctcggcaagacgaatgtctgacgtgccggaaggagtcatacgggtccatgctccacttctctccaaggtgtccatggccattcaactcaacaatcaaaccaaagccaaagacatattggcaaaatttcaatatgaaaacagtcatggttcatcagaatgtattaagattcagaaccaaaggttatatgaaattggaggaaatataggagagcattgcttggatccagatgcttatatattggatgtatatcgtataaatcctcaagcagaatgggtgattaaaccccaacaaagttcttaaaatatcctcgagagagctgctatcatgtattatatgccaaaaagatcctacattttggtagggaaaaaacaacactgtgtttgacgtatttgttcctacagcattctcagtatttctggccctcagcagtgggcattgtaagcatgaactatggaagaggcgccggttcaccaattcaactgaagctttctcatgacttttttttttataaaagtaaaggaaagatgatgtggtccttccagaagaaagaccaatctagaatatggaactctaatcacttctagtatttcaacttcctagcagaaatgaacttggccctagacctagggataagcaatgttctttatgtagccaatgctacgaaacaaaagaggtgaaagagacccttttttatacttaatgtacatatattgactttttgagcaagaatgccagaaatagccttcatttctaccctgcaaaataatccagatctgctttctaaaatgaatcagtttctaaagtgaaacatgcaatatttatgctctgactgactcctgaattggaagaggaagaacttctgtttacagaaaactgtattgttatatatgtcaggctgtgtattgtgactatcagcattctggtgcaaatgaacttttctccatcatcgactgtggaaaattgatacttttaaagcatattcttctatgagcacaggtcctcctagtgaagcttagtttgacaaagggtgtcatatgctttcctaacctgatttgtagttaacattcacagagcctacattttctcattacggttatgatgctcagtatctttccaagtgccaggcacgggcttccttttctgatcaaacataccattttttatatttcacaactatagacagtcacttctgcagtcccaatttaaaaatgcagaactgctttatccaagaatgctgaaaaatactgttctatccaggtttcctaaactataaaagcagattttgcttttgtttgttaatcataggcatggccgagcattgtggattagcctgaggcttaaaatcagatgcatgtctggtaagatgaccactgtctcactatcaagagcctgcagagccattttccagacctgtgattgcccagaacacatagtccccacgtttctaatttggagcaaatctaaaaggtgctgagggattggacagctctgactttcctcgagactatggatatagtccttctcagattagctggaaatggggacagagttctcatttatcccagatatatacattggcttttttggaatctatagattgagattttgatgaatttatattggttttaatgagacccaaatgactctctcttaacaattcaagcagtagacaaagttgctcacaaatacagaaaacatctttttgtctacttcgcaagtctcaaaacgtgataatatttaagcccatttgtagaagaaatcttgtatatactattattacaccttgatatctatacaaaacatcacttgtattaaaatatatagataactttctggcatttagaattttgttccattcatttaatttgttcatctgagaatttttttttttgcctgaaaacccattaaaagaaaacgtgccttctgtataagtttatgtttattcctacattttattcatttttaatgtatgggtaattggtggcacatgactttacataatgactttctagactctgaaaaaaatgcttttatcatttttgcaattcagacaagggtaaacattttactttatgtaattgccacatcccaagatgtaaaacggcagtaatttatgaccacgtatggaagaaattcttcaaatagctaccttacatttctgcgtatatatgaaaactgaatgatatttctcagtgtatttccttgcatttgaatggttcaattctgttgtgtttatgtagaaaattcacaaatctgttcatttaattttttaatttgagaatttttatttcttttgactgaaaacacattagaacctatgagtaaattctgaaggttttaagatttacttcagcttgtcaccagtttcaaataaatccctaataggtaacaagtaaaatacaaattcttgtctactttcatgtggttttaaatggcagggacttcgctgagtcagtaagtataatcactctagtttattcaaggatgtgtggcaactttcaacttccatacgtatatatgtatgtatggaaggccatgtcaatactagtatcattggatataactttgattcttaatcagagggcaaattcattagagaagaatttttagtagatacacagactaatatttgtgtggaggttcttttgaccaattttattcctaagaataaacaaacccctacagttaaaatgcaaagatgcctgtcatctaagtattgaaagaatttttgccttatcaagagttgttttttaaaaatttaataaattcataaaaaagactcatatctttgcaaacaaaagaagggcagatactgggcttctacatgctatccttaagagcttctccccctcacccattcctagtgctcttggtatacacttgggaaaataatgtcctccaggagaaagtgttagagggaactaacattttaggaatgcttattcagaaaaaaatcctagagttgattcattgttttcctccatcctgcaaaagaagatccctttgttaagcagctcacttggaaatatgattcttggagtcaatgatctctaaacaaactggattatcaactatttacaacgtctatacagtataaactacctcacttgcctttcttgggaaaaaaaaaatgaatggactttaacaattgttgttacaaactgtgcctgaatcttattatttaaatcacttcagttagctttcagtgtatgtttaataatatacatttaatgatgaaaaatattttcagcaaagctttaaaaccagaaatactgtgtaactgtgatctatgtggtatactctgagagaattctgtgtcctgctcattgtcttgagtttctaaccatgtgcagatgcaagcgttcaggagtaggaattaatgtccatcttttctttcaggcattttcatctgctgtccacgtatttcacttgactgaaagctcatatgagttaaaatgtcccttcttcctagcgagcatatttcaactgttcttcataaatgtttatgtgccttaaaagactttatgttaaaggattaaatagtttctctgacaggcagtttttaactgttttccacaaataaaaataatatgtcatgggattaaaatgtttgttttcaagcatttttaacagttttacacacttacatacaccttaattaaaaatttttttctgtcagacatttaccaactattttctaaaactaatttgacaaatcatgacactagaaaacgccaatgttttatgtctttgcccatctcaaaagctaatattgattcttctgttccatcagctttcattgttaagtagaatatgtatgttgcattttatccataagaaataaagagaaaaaaactaaaaa

SEQ ID NO: 6443 - DNA, 736 bp, Homo sapiens
gtgccacctaggaacctgggtctttcctaactcctaattgcctctctcctacttcttagcatcttcatgcagagcatagtgatggttctgtgtagttaaaaggaaaagagaaaaagatggaggaggggagaaagagagaaggagaagaattgcgggatttgagaaagctggctgtggcttgccccaattattttacggatgacaaagcagactcagaaaagtcaggtaacttggctaaaaacctgcctagttactggcagattgagaactacaatctgggtgagtaaagactttttgaaacacgagcattgtgtaaaactagaattgtttctcaagagaaagttcagaattgttctctctgaggacttctaaggacatcaaaggaaaccacctgaaggttcacaatagatatcttctgaggaccatggctaaatttaaccgggacatttcctgactaccctgacgttgaagaaggagggtcagctattattttttctgacaagaccatacaacaggttattgaggatatcatagcaaaccaagaggaagaagaaaaaaacaaaaagaagaagaagaaaaaggaaaaacaacccaagaaagccaaaaaacaaaagaaaggaacaaaggagaaaaataaggaagaagacgaaaaatggaaaatgtcaccaagtctttttcttcctgcaatgaaggaaggatgtaacgcatacaaagaaatctggatgaaaaaagatga

SEQ ID NO: 6444 - DNA, 7406 bp, Homo sapiens
gtactttagccttccaggcttagggactcaggctgcccagacctgaagcggtgtgcggccatggaccgcggagctgccgcagcccagggcactgccccgcctcaggatggagagcagcccgctgagtctccagagcctccgccgccttggccgccgccgccaccaccaccggctccgccgccggctccgccgctgctctccgaggcttcgccagaacccataccagagccctgtccagagcttgctccaggtccctgtccagaggcgacctcagaatcagccacagaactgtacacagaaccgaccccagaaccagccacagagccggcctcagaaccggccccagaacctgccacagagccggccccagaacctgccacagagccggccccagaaccggccccagaacctgccacagagtctgccccagagccgactccagaacctgccctagagtcggtcccagagccggccccagagctgactccagaagttgccccagagctggccccagagccgaccccagaacctgtgacagagctggccccagagttctgccctgaggcggctccagagttccgtccaagtccagcaccatgtctattgcaatgtccggtggacactcgagagagaggtctaaagacctcgccatcgccatcgccatcgccatcgcccagaacgccaatgtcgtggtccagaataaagaaaatattgaaggaaggacctatgctgaagaactgtaactctttcaagagatggaagcttagatattttctggttcaaggacagaagctctactttgcacaccatcccgcgtttgcacactttgaaacgattgatctgtctcaagccactgtggcagaaagcagctgtagaaacctttgccacagtttttgtgttattacaccacaacgaaaaatcactctggctgcacccaaccggaaagacatggaagaatggattaacatcataaaaaccatccaacagggagaaatttataagatacctgcagcagaaaacaacccttttcttgttggaatgcattgttggtactccagttacagccaccggacccagcactgcaatgtttgtcgagagagcattcctgccttatctagagatgccatcatctgtgaagtgtgcaaagtgaaatctcacagattgtgtgctttgagagcaagcaaagactgcaagtggaatacattgtctatcactgatgacctccttctgcctgcagatgaagtaaacatgccccatcaatgggtagaaggaaacatgcctgtcagctctcagtgtgcagtgtgtcatgagagctgtggcagttatcaaagacttcaagacttccgctgcctgtggtgtaattctacggtgcatgatgactgtaggagacggttttccaaggaatgttgcttcagaagccatcgctcatcagtcattcctcccactgctctaagcgaccccaaaggcgatggccaattagtagtatcttcagacttctggaatcttgattggtcatcagcctgttcatgtcccttgctcatcttcatcaactccaaaagtggcgatcatcaggggatcgtcttcctccgaaaattcaagcaataccttaacccatctcaagtgttcgacttattgaagggtggacctgaagcagggctgtctatgttcaagaactttgctcgctttcgcattctggtttgtggtggagatggcagcgtgagctgggtcttatctctgattgatgcctttggattacatgaaaagtgtcagttggcagtcatcccacttggaaccggcaatgatctggctcgtgttctgggctggggtgcattctggaacaaaagcaagtcacctctggacatcctcaacagagtggagcaggctagtgtgaggatcctagacagatggagtgtgatgattcgtgagactcccagacaaaccccgctgctaaaaggacaggttgaaatggatgtaccacgatttgaggctgctgccatccaacacttagaatctgcagccaccgagttgaacaaaatcctgaaggccaagtaccccacagagatgatcatcgcaaccagattcttgtgttcagctgtggaagattttgtggttgatattgtaaaggcctggggtcagataaaacagaacaacactgcaatagtgtctgtgattttgaaaagtgacttaatgtatgataggctcagtgtcctgatcgatgtcctggctgaggaggcagcagctacttctgctgaaaaaagtgctacagaatatgcagacagcagcaaggcagataggaagcccttcattcctcaaatagaccacatagccaagtgcaagttggagctggctacaaaggcccagagtctccagaaatccttgaaactcatcatatttcaagttgaacaagctctggatgaggaaagcagacagacaatatctgttaagaactttagttcaactttcttcctggaagatgacccagaagatattaaccagacaagcccacgacgccgttctcgtcgtggcactttgtcttctatatcttctctcaaaagtgaggacctggacaaccttaacttggatcacttacattttacacctgaatctatacgcttcaaagaaaaatgtgtcatgaacaactacttcggaattggactggatgctaaaatttctctggacttcaacaccagaagagatgaacacccagggcaatacaatagccgccttaagaacaagatgtggtatggccttctgggaaccaaagaacttttgcagcgctcttacaggaaactggaagaacgagtgcatttggagtgtgatggagaaaccatctccttgccaaacctgcaaggcattgtagtgctcaacattaccagctatgctggaggtatcaacttctggggaagcaacacagcaaccacggaatatgaggctcctgcaatcgatgatgggaaactggaggtggtggcaatctttggttctgtgcagatggcaatgtcccgtatcatcaacctgcatcatcatcgcattgcccagtgccatgaggtgatgataaccattgatggtgaagaaggtatcccagtgcaggtggatggggaggcctggattcagagaccaggcttatcaaaattagatacaagaacgctgcccagatgctgacaagagatcgggactttgagaactcaatgaaaatgtgggaatacaagcatactgaaattcaagctgcccctcaaccccagctggacttccaggactctcaagagagcctctctgacgaggagtatgcccagatgcagcacttagctcggcttgcagaaaacctcatcagcaaacttaatgacctgagcaagatccaccagcatgtgtctgtcctcatgggttctgtgaatgccagcgctaacatcctgaatgatatattttacggccaagacagtggcaatgagatgggtgcagcttcctgtattcccattgaaactctaagcagaaatgatgccgtagatgttacatttagtcttaaaggtctctacgatgacaccacagctttcctggatgaaaagctgctgagaagtgctgaggatgagactgcactacaaagcgccctggatgccatgaataaggagttcaaaaagctatctgagattgactggatgaatccaatctttgttccagaggaaaaatcttcggacactgacagtagaagcctcaggctgaaaattaagttccccaaattgggaaagaaaaaggtagaagaggaacgcaagcctaaatcaggccagagtgtccagagttttattggcaatttatggcaccgcagacatcgtgaagatgaagcagagggtgatgatcctctaacaccatcgagatctcaactgtagcccttgaaagctggaagaactcacaacattgagaattctactaaaaaaactctcaaaacctcaatacaggctagactaaatcatttcagaacaaacatgagcaccaccaagaaagaccctccaattcttttcactaatgcattttcctggacttaatctggtctccttagaggtttacatttcctcattggccaaaggttcttgttccgagttgtcttgttcagttctccttctctttgtgcatcttgagcaactacagtatttattgggataagctctttatgaatggcctgggatctataaaggattcaagggagttcacctcttcagggagttttggaatggttttctctgaccagcagagaaactatcaatgctaaggaatgaatgaaagacacacagactcccagggagatgaagagaagggggcaggcaggacagccagacttggttgtgtgtctctccgaatccctgccaactgcaacttgcaccttcaggagatctcttctagttggctcattaaaatgagaactagatcctgggggcttgtccactttcctgttaagatgaccatgtgaaatctctttttgtagatatggtaacctctctctctctctgcaaaccctttgcgtttttctatgtgtgcttgtatgtctgcatatgtccaggtggtgctctggtgggctcattggttggaactcacccctcatggcaaccatacaggctcccctcctgctgccttgatcctagcctgcatgcctccacggagtgtttgcctgcattcttgctggattttttaactaaatgttttgccgctgtgctgcagtatagattatgtatagagacataaagatgtatatatatatacatacgcatatatatttttaagagctgaaaatacaactcgacctctaagtgaccctataatttattgtgctaatccaggaatcccttcccactcccccttactctacataacaataacacatacacctctaccaactgccctatttcttggtggagcttctaaatcttttggtgcattttcagcgtcttagaggtggctgggatctatggcccagctgattctgacgcccccttaaaattctgagccaggccatggaaaggggaacaaaaacaccaatgccctaaagaaggggtttaagctggcatgctgcctttttttgctctatctgtcctagactcttcatcagcaactgtgcccttccccaataaaaagactatatggagcaaccaggccttgagctctgtgacttagatgcctgaactagggactgcctgacaattaagtcacagcctaggcccttccccacaagctccatcttggcctgatcttctggacaggctgttgggtcagtcctcaagtcaccttcaaatctcccatcttgcccttttcccttgagtacagaggggcattgaagtgatcagaaaaaacatgggcctggagaaatgaaggctagaagcctgtgctttcctgtggttcttcttgcaaatttctcatgaaaacaaactattcctaaatcgctccaaatactaattcacatttttcaaaaatgccttctcccagtcagggcaaatctaatcaaaccccaatgcccagagaggttctctctggtcagccttgcatcttcaccccacccttgactcatacctttagttaactgtcccttcccacttatcaagagaaaactggcctctccctacttctcagacaaacttagcgtgctcaattacctgattcagtccaatggctggttcattgaggtgcacaattcagattccaagcactggttctcaactctggaactccaccagcctaacccacttaaaccagccacctgtgctccacctccgcaggggtgaggagaaaaatattaacaaggggatagtccccaaatgtctgattgctgtgccaaactaagtcctagctctacaactagagaagaaagtcaatggaaaaagatgacagaaaacatttaaaacttatttaagcatcagaatgtgttagcttgttgtacatatttgagtagtgagtgtgctgttgttgtgtctttgactttctctgttattagtctttcttcccaggaggaggtattagatgaaatcagcaagctcactattgcagcctgacttggctcctctatggctgcatgcattgacacctgcacacacactcacagagtgggaaccaagttgcattttcttcagaagagctttttccgaaggggaaaatgtccaaatgagcaaatttaggactacagaaggaagtcctgggagaagatagctttatcttggcagtgactaagcagggctgtgtcttataattatttttatcactgatgatagtaaactgtaataagactccatctcttgtgcttactttgctgcaataattaggtctttgtgcacagtgatgctgctgttgctctgttgtgccatgtggattccctttcacctaccctgtcctcccactctgagtcagaatgatattgactgaaaccactagtatttggggctagagtcagctcatggagcacagttgatagatgacaaggcccaggagcaggtgtggcttgctcaatccctcagttacctcctaaattgctaagttaccagtagtttcccaaaaaggaagatagcttgccaagcacctgttcttgcatatgctcacttggaaacaaagcaagaagtgatgcctcaagggagttgtcttagctctgggagtgtgagctcctttaaggactttgttaaccacttgcagtaattaatacaattgcttgggtggtgggaccaaacaccaaatatccatctcaattatgttcagacatcattaagacccaaagctctagggtttggttgtatctttggtagcactttctgacgaattggttgggtaggcaattcctggccagaagaatagtggagaagaaaaagccgatacatttgaactgccaccaactgcttctggtgtcaatactataggaggtaaacagttatgggtccccttctccagaaaggccctgtgctgtgtccataagagcaggttaagaataagaaagagattttttaccttaataaaactgggccagaagaaacagtcagggtcaacgtcatcttccctcaggacacaaatggaagaatttttctttcacgagaggtggaaaataataccaaagcaaccaaacccattagcaccattccatcctatatgagaccttgcttggctatatgatttgtggaattgcatttgtctatttgtcagtgaatctgtaacccattgttgttttctgctctgtgttttttatttcctcagaggcccctgcaaataagcagcagggccaggggctggttgggggaggaagctggggtatttacatggtaacaggaaaaagcagaaaaaaaagatccacaaagtgtgcctattcctctccccccgccaaatggaacaccagtcctcaatgttaataaagtattgcttctttaaatattttaataaatggataaacataa

SEQ ID NO: 6445 - DNA, 1251 bp, Homo sapiens
gatgcctgatctcatcaatctagcgggagagacaggataacctgtccgagagtatagcgccactatgactccgccggaaaaattactttaaaaatcgccaaaaattacttggagcaaagggcagtcggcggagcttcgccaaggctggcgcagtcggttttgacctgtagcagagaaccaattctggagaacagcctcacttctttgattgaatacttacataatgcattggaacatgacatgagattaaggtttaataatgatagaatgaagaccacaataaaagagacctctacttagctcagcaattcttacctttcttacctatttgatgaagatgtcttttgaaaggtgtactgcaaggaacaaaatgtttgtaaattctccttttaccaaggtggataattactgtaccttcctcatggaaaaagttttatttaaagtgttatttctcattgaatactatcaaaaaggaaaaaaaaatgacctaaacttttgagatagatttggctctagtaagtatttagttatatcacttgcatatctgggagaagaaataagagactatcatcagtacattcccatctactaaaaaaatttattttacacatgtcaagggattacttataacttccattttattactaatagcttgaacccttttaatgaagacctaactcctccaccagaaatttaagtttatgttcttactttgtttacttataaaatacatctcaggtatttcggatgtcttttttttttctaagcctatatgaaatgaaaaatatattggcaaaataaatgtttaaaccttttacgttaaaattactttgaaagatgaaaagttagtgctgtttttgtctacgttatactgaaattaaatgtttataatttatattttgggtttatgtataaatcatggaatttatgcaaaaatatgagtagtacagattctcctctaattctgtaggactttgaataatgtgatatttttcttataattggacccttgtgttttgaagaaatgccaactgcttgaagaatctccttgttatttgtattatttgctatagggttagatgttgagaaattctgctgacaaaaaattttaagccagttttacactaaatgttcctcagtctgattaatttgttattggatgtattctgtatctttcttttgtaatttgtaacttttatccacttagcacgaatgattctattaaagaaaatcattaggaagtggtagaaa

SEQ ID NO: 6446 - DNA, 623 bp, Homo sapiens
atacaagagatgtgagaagcaccataaaaggcgttgtgaggagttgtgggggagtgagggagagaagaggttgaaaagcttattagctgctgtacggtaaaactccttctttctgcaacatggggaagaacaaactccttcatccaagtctggttcttctcctcttggtcctcctgcccacagacgcctcagtctctggaaaaccgcagtatatggttctggtcccctccctgctccacactgagaccactgagaagggctgtgtccttctgagctacctgaatgagacagtgactgtaagtgcttccttggagtctgtcaggggaaacaggagcctcttcactgacctggaggcggagaatgacgtactccactgtgtcgccttcgctgtcccaaagtcttcatccaatgaggaggtaatgttcctcactgtccaagtgaaaggaccaacccaagaatttaagaagcggaccacagtgatggttaagaacgaggacagtctggtctttgtccagacagacaaatcaatctacaaaccagggcagacagtgaaatttcgtgttgtctccatggatgaaaactttcaccccctgaatgagttgattccactagtatacattcag

SEQ ID NO: 6447 - DNA, 1648 bp, Homo sapiens
ggcctggcagaggacaggagggaggcttggggagcctgggaagggccggctgacagcttgatgggccctccctccctccacagtcccacccccagcctggggcctctgggagccttggtcctgagcagccaacacaccagcccagacagctgcaagtcaccatggacgctgaaggcctggcgctgctgctgccgcccgtcaccctggcagccctggtggacagctggctccgagaggactgcccagggctcaactacgcagccttggtcagcggggcaggcccctcgcaggcggcgctgtgggccaaatcccctggggtactggcagggcagcctttcttcgatgccatatttacccaactcaactgccaagtctcctggttcctccccgagggatcgaagctggtgccggtggccagagtggccgaggtccggggccctgcccactgcctgctgctgggggaacgggtggccctcaacacgctggcccgctgcagtggcattgccagtgctgccgccgctgcagtggaggccgccaggggggccggctggactgggcacgtggcaggcacgaggaagaccacgccaggcttccggctggtggagaagtatgggctcctggtgggcggggccgcctcgcaccgctacgacctgggagggctggtgatggtgaaggataaccatgtggtggccgccggtggcgtggagaaggcggtgcgggcggccagacaggcggctgacttcactctgaaggtggaagtggaatgcagcagcctgcaggaggccgtgcaggcagctgaggctggtgccgaccttgtcctgctggacaacttcaagccagaggagctgcaccccacggccaccgtgctgaaggcccagttcccgagtgtggctgtggaagccagtgggggcatcaccctggacaacctcccccagttctgcgggccgcacatagacgtcatctccatggggatgctgacccaggcggccccagcccttgatttctccctcaagctgtttgccaaagaggtggctccagtgcccaaaatccactagtcctaaaccggaagaggatgacaccggccatgggttaacgtggctcctcaggaccctctgggtcacacatctttagggtcagtggccaatggggcacatttggcactagcttgagcccaactctggctctgccacctgctgctcctgtgacctgtcagggctgacttcacctctgctcatctcagtttcctaatctgtaaaatgggtctaataaaggatcaaccacatggggttctgcggtgataatgagcacatagtgaggggtcagcaaatgtcagaagttacctgggacagccgggcacgatggctcacacctgtaatcccagcactttgggaggctgaggcgggaagatcacttgagttcaggagtttgagaccagcctggccaacatggtgaaaccccatctctaccaaaaatagaagaattagctgggtgtggtggcacgcgcctgtaatcccagctacttaggaggctgaggcaggagaatcgcttgaacccaggaagtggaggttgcagtgagctgatggtgccactgcactccagcctgggtgatagagcgagactctgtctccaaagaagaaacaaaggaaag

SEQ ID NO: 6448 - DNA, 1695 bp, Homo sapiens
caccgagcctggctctactgcaggcgctgggggttggggtgggggagaggcccagggcacatgatgccgcccccagcccgcccagcacatgacccaggcaggccggcggggtcctggcacacccgagccgcgtccgcgaacacagcccatggcctccccgcgcctagggaccttctgctgccccacgcgggacgcagccacgcagctcgtgctgagcttccagccgcgggccttccacgcgctctgcctgggcagcggcgggctccgcttggcgctgggccttctgcagctgctgcccggccgccggcccgcgggccccgggtcccccgcgacgtccccgccggcctcggtccgcatcctgcgcgctgccgctgcctgcgaccttctcggctgcctgggtatggtgatccggtccaccgtgtggttaggattcccaaattttgttgacagcgtctcggatatgaaccacacggaaatttggcctgctgctttctgcgtggggagtgcgatgtggatccagctgttgtacagtgcctgcttctggtggctgttttgctatgcagtggatgcttatctggtgatccggagatcggcaggactgagcaccatcctgctgtatcacatcatggcgtggggcctggccaccctgctctgtgtggagggagccgccatgctctactacccttccgtgtccaggtgtgagcggggcctggaccacgccatcccccactatgtcaccatgtacctgcccctgctgctggttctcgtggcgaaccccatcctgttccaaaagacagtgactgcagtggcctctttacttaaaggaagacaaggcatttacacggagaacgagaggaggatgggagccgtgatcaagatccgatttttcaaaatcatgctggttttaattatttgttggttgtcgaatatcatcaatgaaagccttttattctatcttgagatgcaaacagatatcaatggaggttctttgaaacctgtcagaactgcagccaagaccacatggtttattatgggaatcctgaatccagcccagggatttctcttgtctttggccttctacggctggacaggatgcagcctgggttttcagtctcccaggaaggagatccagtgggaatcactgaccacctcggctgctgagggggctcacccatccccactgatgccccatgaaaaccctgcttccgggaaggtgtctcaagtgggtgggcagacttctgacgaagccctgagcatgctgtctgaaggttctgatgccagcacaattgaaattcacactgcaagtgaatcctgcaacaaaaatgagggtgaccctgctctcccaacccatggagacctatgaaggggatgtgctgggggtccagaccccatattcctcagactcaacaattcttgttctttagaactgtgttctcaccttcccaacactgcactgccgaagtgtagcggcccccaaaccttgctctcatcaccagctagagcttcttcccgaagggcctttaggataggagaaagggttcatgcacacacgtgtgagaatggaagagccccctccagaccactctacagctgctctagccttagttgccactaggaagttttctgaggctggctgtaaagtaagtgtaaggtccacatccttggggaagtagttaaataaaatagttatgactg

SEQ ID NO: 6449 - DNA, 469 bp, Homo sapiens
ggaggcaagatgtgtgagcagcatccaaagaggcctgggcttcagttgtggagagggagagagccaggttggaatgggcagcaggtagggagatccctggggaggagctgaagcccatttggcttcagtgtcccccaaacccccaccaccctcttcctaggccgccctccccactgttaccaacatgaagctgctcgcagcaactgtgctactcctcaccatctgcagccttgaaggagctttggttcggagacaggcaaaggagccatgtgtggagagcctggtttctcagtacttccagaccgtgactgactatggcaaggacctgatggagaaggtcaagagcccagagcttcaggccgaggccaagtcttactttgaaaagtcaaaggagcagctgacacccctgatcaagaaggctggaacggaactggttaacttcttgagctatttcgtggaacttggaaca

SEQ ID NO: 6450 - DNA, 593 bp, Homo sapiens
gttgccttggagccagagagacgcagctaggcctgcacggctgtggagagatcctgccacgggccttgttcaccatgtcggtgctggatgcgctttgggaggatcgggatgtccgtttcgacctgtccgcgcagcaaatgaaaacaagacctggagaagtccttattgattgtttagattccattgaagacaccaaaggaaataatggagatagaggtgagtatatttttaaatgtatcttatattcctggtttaatttacaaatgttgaatcatattagctagagaatatatgaaacagcatcatttgtcagtgtaattgtgagaataggagagttaaattcacataagacttttctcagatttaaacagaagacaggataggtattaaacatgtagtttggtccttcagtaagtcctggttctaacatcacctttatccattgtagctgttaaaactcaagtagacctgtttgcaaggggcattagttctgaccgttagatctgtcttcccaaaaaaggatatggggtagtggaatataagtaggtcatagctgtagtacctggagccatgcttccttttcaaaaattcag

SEQ ID NO: 6451 - DNA, 620 bp, Homo sapiens
aaatagagaaacaatgtctgaatggaagctacaaagtgagatacagataagtcactcttgggaagaaggcttgaaactgaatgacaatggcttacagaaatcatcctctctaaagtgcattgatttaactccagtatcctcaatggcttcttccatcaagaagactgggaagcagtgtttctctccatcattacaaacttgtgtgagttgcactggttcgccttcaagtcctattcccagtcctatgcaacaatacatcataagaagtcaaaatcctaccaacattattagaccaagtatccttggaccattaaaaagaaaaggtgaaatggcatttcaatatcaaccaaaaaagattttccaaggcacaaccaacatgctttcttctgatacttcccaactgtcagaaaataatgtgtatctacttccagctacttttgatggaaacgacagcaatgctggatcttctggtaattcgtcagctgaaatcggcactgtcacaaactctcctgtgtcaccttctgatactggttctcatttgttctagtagacaaactttcaactaaatgattcacccatcccaagactttctcaccagtggagaaacacacacatcaagc

SEQ ID NO: 6452 - DNA, 3967 bp, Homo sapiens
gctgaggccaggagggcgcactggggattggaggcgagggaagtgcagggcgcatcccaggcggcagggctcccagcatcggcagtcgccatcaccgccagaccgcagagacaggttcggatccgcggtcctcttgcctctttccaggcctcgatgagtgttaaatcgccatttaatgtgatgtcaagaaataatttggaagcacctccttgtaagatgacagagccatttaattttgagaaaaatgaaaacaagcttccaccacatgagtctttaagaagtcctggaacacttcctaaccaccctaatttcaggctgaaaagctcagagaatggaaataaaaagaacaattttttgctttgtgagcaaaccaaacaatatttggctagtcaggaagacaattcagtttcttcaaacccgaatggcatcaacggagaagtagttggctccaaaggagacaggaaaaaattgccagcaggaaactcagtgtcaccaccaagtgctgaaagtaattcaccacccaaagaagtgaatattaagcctggaaataatgtacgtcctgcaaaatcaaaaaaactaaacaagttggtcgagaattccttgtccataagtaatccagggctcttcacctccttaggacctcctcttcggtccacaacttgccatcgctgtggcctatttggatcgctgaggtgctctcagtgcaagcagacctactattgctccacagcatgtcaaagaagagactggtctgcacacagcatcgtgtgcaggcctgttcagccaaatttccacaaacttgaaaataaatcatctattgaaacaaaggatgtggaggtaaacaataagagtgactgtccacttggagttactaaggaaatagccatttgggctgagagaataatgttttctgatttgagaagtctacaactcaagaaaaccatggaaataaagggtacggttaccgaattcaaacacccaggggacttctacgtgcagttatattcttcagaagttttagaatacatgaaccaactctctgccagcttaaaagaaacatatgcaaatgtgcatgaaaaagactatattcctgttaagggggaagtttgtattgccaagtacactgttgatcaggccataaagtgctttgtagccaatgttatcccagcagaagggaattggagcagtgattgtatcaaagctactaaaccactgttaatggagcagtactgctccataaagattgtcgacatcttggaagaggaagtggttacctttgctgtagaagttgagctgccaaattcaggaaaacttttagaccatgtgcttatagaaatgggatatggcttgaaacccagtggacaagattctaagaaggaaaatgcagatcaaagtgatcctgaagatgttggaaaaatgacaactgaaaacaacattgtcgtagacaaaagtgacctaatcccaaaagtgttaactttgaatgtaggtgatgagttttgtggtgtggttgcccacattcaaacaccagaagacttcttttgtcaacaactgcaaagtggccgaaagcttgctgaacttcaggcatcccttagcaagtactgtgatcagttgcctccacgctctgatttttatccagccattggtgatatatgttgtgctcagttctcaggagtaaagccatcattaggaatttggactccagaagctatttgtctcatgaaaaaacttgtacagaacaaaataatcacagtgaaagtggtggacaagttggaaaacagttccctggtggagcttattgataaatccgagacgcctcatgtcagtgttagcaaagttctcctagatgcaggctttgctgtgggagaacagagtatggtgacagataaacccagtgacgtgaaagaaaccagtgttcccttgggtgtggaaggaaaagtaaatccattggagtggacatgggttgaacttggtgttgaccaaacagtagatgttgtggtctgtgtgatatatagtcctggagaattttattgccatgtgcttaaagaggatgctttaaagaaactcaatgatttgaacaagtcattagcagaacactgccagcagaagttacctaatggtttcaaggcagagataggacaaccttgttgtgctttttttgcaggtgatggtagttggtatcgtgctttagtcaaggaaatcttaccaaatggacatgttaaagtacattttgtggattatggaaacatcgaagaagttactgcagatgaactccgaatgatatcatcaacatttttaaaccttccctttcagggaatacggtgccagttagcagatatacagtctagaaacaaacattggtctgaagaagccataacaagattccagatgtgtgttgctgggataaaattgcaagccagagtggttgaagtcactgaaaatgggataggagttgaactcaccgatctctccacttgttatcccagaataattagtgatgttctgattgatgaacatctggttttaaaatctgcttcaccacataaagacttaccaaatgacagacttgttaataaacatgagcttcaagttcatgtacagggacttcaagctacctcttcagctgagcaatggaagacgatagaattgccagtggataaaactatacaagcaaatgtattagaaatcataagcccaaacttgttttatgctctaccaaaagggatgccagaaaatcaggaaaagctgtgcatgttgacagctgaattattagaatactgcaatgctccgaaaagtcgaccaccctatagaccaagaattggagacgcatgctgtgccaaatacacaagtgatgatttttggtatcgtgcagttgttctggggacatcagacactgatgtggaagtgctctatgcagactatggaaacattgaaaccctgcctctttgcagagtgcaaccaatcacctctagccacctggcgcttcctttccaaattattagatgttcacttgaagaaaagatgtataggatgaattgctgctgcacagagttacagaaacaagttgaaaaacatgaacatattcttctcttcctcttaaacaattcaaccaatcaaaataaatttattgaaatgaaaaaactgttaaaaaaaacagcatctcttggaggtaaacccttatgagacaggaaacagcaaaggctagctttaggagagaaagtacagcacctggtgtttttatttatgagaaccttttctttgtccactttctctgtaatgaccttctatccctccgtttttgcctgcctgccattctcctattaggttggtggtttttattttcctctaagttccttccaccaaataaatattacgtaaaaaattcataccaaatcaatgagaatactggcaaggaatacatagggactttctgctatatatgtaactttttattacttaaaggtaccgaaggaaggccaggtgcagtggctcacgcccagcactttgggaggctgaggtgggaggatcccttgaggccaggagttcaaggttacagtgagctatgatagtgccactgcactccagcctgggtgacagattttgtcttaaaaaaaaaaaaaaaaaagttgatatgagttttattttctgtccgtttgaaatattttgtaatattccctgcattctctgtcgtctgcctcttccacataatgtcctttgctttcatgtttgttatcttctttttctgttcactcagaggtcatcaatttctttctctccgtccttaattggattatttttcttttggcctttgggcacagagtctgacctctggaccactctaactggagaaggaactttatgttccctctcctgctgtgtccacaaccttagaaatctgtagctagatttttgttgttatagatagaatttactgtttctgaaacccaaatacagttatcagtttaaggtt

SEQ ID NO: 6453 - DNA, 3368 bp, Homo sapiens
ctgggccggtggttccgcgcggagttagtctgtggtcagttacgtggtgaaaacacggctgtgccgcggccgcatctttccgcggccgaggcctctctgggtgggagtgttggcttcctttccggatcgctaaatggggaaagttctggccgctcggcgggatacgtctccaggccacggatggttcgttctccgtgccgcggccccgagctgggctccctgggtctccagcgcgggctcccggcattgggggctgcgggccggcccctccgccccgcccccgccccgccgcgcctcctcggccgagcggctcgcggtctccggcgcgggaggctccgagtctgcccactccgggccgagcgaggtctctggaggagaagagtggcgaggaggtgagggcacgccggccctcgcccggcgggtggcgccaggacttcaggtggcatggaatattcacatgggagagccgcatgaggccgcccaccacgcttcctgaaggatgcccgtgtggaagaattttgacgtgccagtgtcctcgttctacagggtgttccattcttccgcaatctcagaaaaatgggactaaaagaaactattttgtaaaataagaagacttccatttttaatgaccaacatgtattaagatggacacctactctacgaaacacgaagttctatggtctcgaagaagcccgtgcctgtttaaaactgatcctaactaaaaacagacttgagtggatatgagaatgttggttagtggcagaagagtcaaaaaatggcagttaattattcagttatttgctacttgttttttagcgagcctcatgtttttttgggaaccaatcgataatcacattgtgagccatatgaagtcatattcttacagatacctcataaatagctatgactttgtgaatgataccctgtctcttaagcacacctcagcggggcctcgctaccaatacttgattaaccacaaggaaaagtgtcaagctcaagacgtcctccttttactgtttgtaaaaactgctcctgaaaactatgatcgacgttccggaattagaaggacgtggggcaatgaaaattatgttcggtctcagctgaatgccaacatcaaaactctgtttgccttaggaactcctaatccactggagggagaagaactacaaagaaaactggcttgggaagatcaaaggtacaatgatataattcagcaagactttgttgattctttctacaatcttactctgaaattacttatgcagttcagttgggcaaatacctattgtccacatgccaaatttcttatgactgctgatgatgacatatttattcacatgccaaatctgattgagtaccttcaaagtttagaacaaattggtgttcaagacttttggattggtcgtgttcatcgtggtgcccctcccattagagataaaagcagcaaatactacgtgtcctatgaaatgtaccagtggccagcttaccctgactacacagccggagctgcctatgtaatctccggtgatgtagctgccaaagtctatgaggcatcacagacactaaattcaagtctttacatagacgatgtgttcatgggcctctgtgccaataaaatagggatagtaccgcaggaccatgtgtttttttctggagagggtaaaactccttatcatccctgcatctatgaaaaaatgatgacatctcatggacacttagaagatctccaggacctttggaagaatgctacagatcctaaagtaaaaaccatttccaaaggtttttttggtcaaatatactgcagattaatgaagataattctcctttgtaaaattagctatgtggacacatacccttgtagggctgcgtttatctaatagtacttgaatgttgtatgttttcactgtcactgagtcaaacctggatgaaaaaaacctttaaatgttcgtctataccctaagtaaaatgaggacgaaagacaaatattttgaaagcctagtccatcagaatgtttctttgattctagaagctgtttaatatcacttatctacttcattgcctaagttcatttcaaagaatttgtatttagaaaaggtttatattattagtgaaaacaaaactaaagggaagttcaagttctcatgtaatgccacatatatacttgaggtgtagagatgttattaagaagttttgatgttagaataattgcttttggaaaataccaaatgaacgtacagtacaacatttcaaggaaatgaatatattgttagaccaggtaagcaagtttatttttgttaaagagcacttggtggaggtagtaggggcagggaaaggtcagcataggagagaaagttcatgaatctggtaaaacagtctcttgttcttaagaggagatgtagaaaaatgtgtacaatgttattataaacagacaaatcacgtcttaccacatccatgtagctactggtgttagagtcattaaaatacctttttttgcatcttttttcaaagtttaatgtgaacttttagaaaagtgattaatgttgccctaatactttatatgtttttaatggatttttttttaagtattagaaaatgacacataacacgggcagctggttgctcatagggtccttctctagggagaaaccattgttaattcaaataagctgattttaatgacgttttcaactggtttttaaatattcaatattggtctgtgtttaagtttgttatttgaatgtaatttacatagaggaatataataatggagagacttcaaatggaaagacagaacattacaagcctaatgtctccataattttataaaatgaaatcttagtgtctaaatccttgtactgattactaaaattaacccactcctccccaacaaggtcttataaaccacagcactttgttccaagttcagagttttaaattgagagcattaaacatcaaagttataatatctaaaacaatttatttttcatcaataactgtcagaggtgatctttattttctaaatatttcaaacttgaaaacagagtaaaaaagtgatagaaaagttgccagtttggggttaaagcatttttaaagctgcatgttccttgtaatcaaagagatgtgtctgagatctaatagagtaagttacatttattttacaaagcaggataaaaatgtggctataatacacactacctcccttcactacagaaagaactaggtggtgtctactgctagggagattatatgaaggccaaaataatgacttcagcaagagtgactgaactcactctaaggcctttgactgcagaggcacctgttagggaaaatcagatgtctcatataataaggtgatgtcggaaacacgc

SEQ ID NO: 6454 - DNA, 1227 bp, Homo sapiens
aaagactacattactttcattgaaggcagatcataccatatcacacaatctggtgaaaatggaaaagaagagacacagtatgaaagaacagagccatctccaaatactgcggttgttcagaagctcttagtttgtgggctgtccttgttatttcacttgaccatctgtacaacattacctgtggagtacaacattgatgagcattttcaagctacagcttcgtggccaacaaagattatctatctgtatatctctcttttggctgccagacccaaatactattttgcatggacgctagctgatgccattaataatgctgcaggctttggtttcagagggtatgacgaaaatggagcagctcgctgggacttaatttccaatttgagaattcaacaaatagagatgtcaacaagtttcaagatgtttcttgataattggaatattcagacagctctttggctcaaaagaattttctgaaggagagataaaaactgagttaaataaagatgatcagaatggatgagaaataactttagacattatttcattgaaccttcccaactgaaattattttatgatgttataacatggatagtaactcaagtagcaataagttacacagttgtgccatttgtgcttctttctataaaaccatcactcacgttttacagctcctggtattattgcctgcacattcttggtatcttagtattattgttgttgccagtgaaaaaaactcaaagaagaaagaatacacatgaaaacattcagctctcacaatccaaaaagtttgatgaaggagaaaattctttgggacagaacagtttttctacaacaaacaatgtttgcaatcagaatcaagaaatagcctcgagacattcatcactaaagcagtgatcgggaaggctctgagggctgttttttttttttgatgttaacagaaaccaatcttagcaccttttcaaggggtttgagtttgttggaaaagcagttaactggggggaaatggacagttatagataaggaatttcctgtacaccagattggaaatggagtgaaacaagccctcccatgccatgtctccgtgggccacgccttatgtaagaatatttccatatttcagtgggcactcccaacctcagcacttgtccgtagggtcacacgcgtgccctgttgctgaatgtatgttgcgtatcccaaggcactgaagaggtggaaaaataatcg

SEQ ID NO: 6455 - DNA, 484 bp, Homo sapiens
cggctacatagctgtgactaccagggggtgcagtctctggggaccaccactaccgaggctgggtaccatgattatcgcggaacacctgcccattaatcttgaccctgttaaaacaataactgcctatccagatatgccacacttctgcctgctgttggcaaccctcctggactaggctgctcttgttaatcacatggatgttgctgattactctgagtgcaaaccttttcactgttccagagaggagcctgacaaccacattctccttctcaagatgtgaaaggcattgtacagaagaagatgagaatcacagtaaaccaaacaaaggaaatgcagaagagatattttcagctgaatattggaaagtaagattccctgcgagcaggatctcaggcaacgtcaatgaacaacatgaagcctgacacattgtaggtgccccgtaaatattggttgagtaactgaataaacgtatttagtaacttaa

SEQ ID NO: 6456 - DNA, 2740 bp, Homo sapiens
ggatgggaggatactgactaagtctgagaaggaggagaaagaaaattagctacaggaagagtttatatccccttctacaagaaaacttaaatatagctaccaccgctttgaaaggaatggtttgtgtccaaacagcattttccagacaagctctgtacttttttgccaaaagaattaactttaaactgaaggcagtggacagttaaacaagagtcggcactgggaacagctgtgcgtagaccagaccagtgacttataaggaggcgatcgagatcggatgacagcaaatcatgaaagctacctcctcatggcaagcacccagaatgatatggaagactgggtgaagtcaatccgccgagtcatatggggacctttcggaggaggcatttttggacagaaactggaggatactgttcgttatgagaagagatatgggaaccgtctggctccgatgttggtggagcagtgcgtggactttatccgacaaagggggctgaaagaagagggtctctttcgactgccaggccaggctaatcttgttaaggagctccaagatgcctttgactgtggggagaagccatcatttgacagcaacacagatgtacacacggtggcatcacttcttaagctgtacctccgagaacttccagaaccagttattccttatgcgaagtatgaagattttttgtcatgtgccaaactgctcagcaaggaagaggaagcaggtgttaaggaattagcaaagcaggtgaagagtttgccagtggtaaattacaacctcctcaagtatatttgcagattcttggatgaagtacagtcctactcgggagttaacaaaatgagtgtgcagaacttggcaacggtctttggtcctaatatcctgcgccccaaagtggaagatcctttgactatcatggagggcactgtggtggtccagcagttgatgtcagtgatgattagcaaacatgattgcctctttcccaaagatgcagaactacaaagcaagccccaagatggagtgagcaacaacaatgaaattcagaagaaagccaccatggggcagttacagaacaaggagaacaataacaccaaggacagccctagtaggcagtgctcctgggacaagtctgagtcaccccagagaagcagcatgaacaatggatcccccacagctctatcaggcagcaaaaccaacagcccaaagaacagtgttcacaagctagatgtgtctagaagcccccctctcatggtcaaaaagaacccagcctttaataagggtagtgggatagttaccaatgggtccttcagcagcagtaatgcagaaggtcttgagaaaacccaaaccacccccaatgggagcctacaggccagaaggagctcttcactgaaggtatctggtaccaaaatgggcacgcacagtgtacagaatggaacggtgcgcatgggcattttgaacagcgacacactcgggaaccccacaaatgttcgaaacatgagctggctgccaaatggctatgtgaccctgagggataacaagcagaaagaacaagctggagagttaggccagcacaacagactgtccacctatgataatgtccatcaacagttctccatgatgaaccttgatgacaagcagagcattgacagtgctacctggtccacttcctcctgtgaaatctccctccctgagaactccaactcctgtcgctcttctaccaccacctgcccagagcaagacttttttggggggaactttgaggaccctgttttggatgggcccccgcaggacgacctttcccaccccagggactatgaaagcaaaagtgaccacaggagtgtgggaggtcgaagtagtcgtgccaccagtagcagtgacaacagtgagacatttgtgggcaacagcagcagcaaccacagtgcactgcacagtttagtttccagcctgaaacaggaaatgaccaaacagaagatagagtatgagtccaggataaagagcttagaacagcgaaacttgactttggaaacagaaatgatgagcctccatgatgaactggatcaggagaggaaaaagttcacaatgatagaaataaaaatgcgaaatgccgagcgagcaaaagaagatgccgagaaaagaaatgacatgctacagaaagaaatggagcagtttttttccacgtttggagaactgacagtggaacccaggagaaccgagagaggaaacacaatatggattcagtgagcctgctttcgcctgctgtctctgatggctctggcaaggactccagggattctggtgggatatgacttagaaccaggtggctggtcacctggatgtacagaagtctaactggtgaaggaatatcatttacagacattaaacatccatatctgcaatgtgtaccaaagttatatcatgccccataatgctactgtcaagtgttacaactggatatgtgtatatagagtagtttttcaaaagtaaactaaaaatgagaagcatatttcaagaattattttattgcaagtcttgtatttaaatgttaaatcaatatgttgttgcaatttagcttgctttcaagcttcaccccttgcacttaacataagctatttttggcattgtgttatcatcggcttattttatagatcaatatttttatttcccttttttgctgaggaaatgaagataagcaaaaatataaatatatatataaatatatgagttattaaaatcagaagaata

SEQ ID NO: 6457 - DNA, 11574 bp, Homo sapiens
cggaccgtgctttcgccgcctgggagccgtccggcgcagcagtttctaggtccccactgtccccgccgtcccgccccttcgcgtcccgggaaccggctggcttccgagccgcactcgccgatcctccaggcatgccccgctacgagctggctttaatcctgaaagccatgcagcggggttggtacagtaggcttcactagacttagctgcaactcagaatttctcctccagcacctgagtaaatgctgatggtcttgtggagagtggattaagagtacgagctaagttctcaatcccaattaagaagcggaaaatttaaactgtcttcttcaaagtttatcacaaccaccaccatcaagacagcaaaccaaaggacaaagactttgaccctgctgtgttgctctgtgtagtccagttcacgtatggtttacagacttggctggggttactaaaaataaataaaaagttggacacttctgtcattggagcgctattattcacaagttaccagaatgagagctgtactggacacagcagacattgccatagtggccctgtattttatcctggtcatgtgcattggtttttttgccatgtggaaatctaatagaagcaccgtgagtggatacttcctggcggggcgctctatgacctgggtaacaattggtgcctctctgtttgtgagcaatattgggagtgagcacttcattgggctggcaggatctggagctgcaagtggatttgcagtgggcgcatgggaattcaatgccttactgcttttacaacttctgggatgggttttcatcccaatttacatccggtcaggggtatataccatgcctgaatacttgtccaagcgatttggtggccataggattcaggtctattttgcagccttgtctctgattctctatattttcaccaagctctcggtggatctgtattcgggtgccctttttatccaggagtctttgggttggaatctttatgtgtctgtcatcctgctcattggcatgactgctttgctgactgtcaccggaggccttgttgcagtgatctacacagacactctgcaggctctgctcatgatcattggggcacttacacttatgattattagcataatggagattggcgggtttgaggaagttaagagaaggtacatgttggcctcacccgatgtcacttccatcttattgacatacaacctttccaacacaaattcttgtaatgtctcccctaagaaagaagccctgaaaatgctgcggaatccaacagatgaagatgttccttggcctggattcattcttgggcagaccccagcttcagtatggtactggtgtgctgaccaagtcatcgtgcagagggtccttgcagccaaaaacattgctcatgccaaaggctctactcttatggctggcttcttaaagctcctgccaatgtttatcatagttgtcccaggaatgatttccaggatactgtttactgatgatatagcttgcatcaacccagagcactgcatgctggtgtgtggaagcagagctggttgctccaatattgcttacccacgcctggtgatgaagctggttcctgtgggccttcggggtttaatgatggcagtgatgattgcagctctgatgagtgacttagactctatctttaacagtgccagtaccatattcaccctcgatgtgtacaaacttatccgcaagagcgcaagctcccgggagttaatgattgtggggaggatatttgtggcatttatggtggtgatcagcatagcatgggtgccaatcatcgtggagatgcaaggaggccagatgtacctttacattcaggaggtagcagattacctgacacccccagtggcagccttgttcctgctggcaattttctggaagcgctgcaatgaacaaggggctttctatggtggaatggctggctttgttcttggagcagtccgtttgatactggcctttgcctaccgtgccccagaatgtgaccaacctgataataggccgggcttcatcaaagacatccattatatgtatgtggccacaggattgttttgggtcacgggactcattactgtaattgtgagccttctcacaccacctcccacaaaggaacagattcgaaccaccaccttttggtctaagaagaacctggtggtgaaggagaactgctccccaaaagaggaaccataccaaatgcaagaaaagagcattctgagatgcagtgagaataatgagaccatcaaccacatcattcccaacgggaaatctgaagacagcattaagggccttcagcctgaagatgttaatctgttggtaacctgcagagaggagggcaacccagtggcatccttaggtcattcagaggcagaaacaccagttgacgcttactccaatgggcaagcagctctcatgggtgagaaagagagaaagaaagaaacggatgatggaggtcggtactggaagttcatagactggttttgtggctttaaaagtaagagcctcagcaagaggagtctcagagacctgatggaagaggaggctgtttgtttacagatgctagaagagactcggcaagttaaagtaatactaaatattggactttttgctgtgtgttcacttggaattttcatgtttgtttatttctccttatgaacttaaggatatggtgagacactaacttaagacaatactgactggtctttggggaaaaaagttatgtaactgtgcatctctcaggcattgtttacgctgtaggttttagccaaattttacttagcagaaaatcatctaattacaagactttattttcccagagatggattaaagtaaatcttcaacttaagtgaagccaaacctaacagactgaattgtgcaaatgtggttttaaattttgcataccaaagtaagaagagaccaattattctcacagagcacttagagcagaatatatgttaagttaccatgaattaaggtatactgtctgcactgccaagtcttggcagaccttaccctgaagtagaagatttgctcatttctaaagttttttttctgtctctgtaatccctcctaccattaagaaaaacttatttcttagacattgtacaatcagttatgtactgaaaatcgaatgtgcttgtgtgatacttgtttcaggacaagttcatttgccaggttcattttgttagcatgagcctacggattctgatttcccaaagaaagaatgttttcctgtaggtatttttgtaccaccagtatatggaatgttagggaaaaactttgttccagttcctttttttttttctttctactttcaagtttaagtgaaccatactgaaatgaccaacaagtctgcctgtaaagttacatgtcatgattgtgttgttaaatgattatgggggagaaaatgaagtaaatgttgctgatgatccccatatttattgatcatattaaggttgtttatatagtttggaaatgaccagccccctaagcagtgtttgattaacttatgctaatcagatgattactcatatattctgctaattttctagctttattcttgttatttggaaaaattattagccaaatgccttcctaggtggatccagttggaagatatgtccagaaacctgaagaaaaattgacgctgcctttgtgtgctggattgctctacttgattagatcatgatatatcaaggttgaatttttagagggaaaatttaattctgatatcttattgcatccttgataagtttttccctgattttttttttcctcaaaagactttccatctgtacacagcctctacatttttgttgtagtgacttagagcataaggatgtttcagtgcaaactggccgtcggtaacagaaaactcagtgcatactttgctgttgttaggttgtcaatatagtctttctgtaggatggatagcatgtttgagaggtgccaaacaagaacttttggggttagtagtgtgtcttgtggagggtattacaggactgtgtaattataggactctaacttgacatggcttggcacccacttgcagctagtgggtacagggtacaaaagatgttagagaaaagctctacagattacgtacttctgtgtcttcgtatgctcaacactgtcctttgtcctccatgaaagatgaaggaagcaaattatgtatgtactttctttgaccttctttaatctctgatactttttagattgcatgattttactaggcttgtatttagggaaattactttcataaatacttttgtagattttgaatcaaaactcagtctttttaatttttttgtagtctataaactagtttcattatgatggacttgattagtccaaagttaattttagaaattgtcaggtagcatagtgtcttcccatgatcaggaggctttctgaaggactgagtctgtaaatgaaaaaataatttatgtatgaatagcatgtatttctgaagagcttagagtgccttgtagaatttttttctcaattttattcttgaggtttataatttgggggccaaatagatagagctcatcattttcttgtttggaagttgaggctgcgacatgtccaaggttatgaagtctcttttgggaagaacagaaaccaggtctccaaatctggactcatggtttgttcagatgtgtctggacaaatggttgtcaatgttttgtcctgttttttcaaaggaactgttcttcctttgggacaaccttttggtgtttgggaaagtaataagatcttggatttttcaaattaacattaagttgtaagaactaaaattttctttgaaccacattactgtgtaattcactgataattgacatattggctgggcagcctatctcttccatatccagcgtaaatgaataggaggtgtttgtgattttttttttctccctttatttaacattgagtcctagtagtttggagaattagggtccctctaccttctttctgctcttgtcttagtaagatacataaggtacatcatcttgtgtctgtgtgtatatagcagtaggtcaagtttagagtactaaagtctgtaaataaggaatgactattagcatattcattagaattgtttattcttgccagtataaacatcattttatttagactaaagtccctgaagcttgtctttcttattgcttcccagtaatagataatgtgctcgagtaagtttgtgaattgctgattgcaacttaattcagggaccagtcttcaatctatatttcattagaatgattgttcctggaatgatcatacatggactgtcttaagctagcaaaatgttcatactttacactgactaaatgggtcctaaatgatgacattggtctttagacattaacatgtgtatatttttatattagctcaagctaaggttcagaattgaagcttgatattgactagaatagctaaaagtcaaaatgaggtgaggacactggtcttggaaggtagagaaaaataaatgtcttaccaggtgttaatggtatccccagttcttagacttttgtcttctcaggcaattttcatctcaagatctgatgagaagggcatattacattggtatgcaggatgattattgcatattttgtgggacctctaatttccctggtcatctttcagaatattctgttctgccacccccagagagtaaacacttgagccgatttcttcttccccagctattctttcctgggggtaattatgctttgtctttagattagagaagcatcaagcaatagcaatggtgctgtgtccttcggcctaaattcaatagatctcatctcctagggcttccttttcacttggctcaaaggatccattgtattttggcacaaagagcctggccagggtcatgtagccatagctcttagggatgatacctcaagaaattagctgggacccatcactctgtgaaacttcacattttaagaactgagttgagggggttgttatgcacttctgtaacttgaggctaagcaaggggttaactcttgtgagagccaatagagtgtgtctgtattcgcagtccatggctcattttctttatagtaggcatatggatcttcccctctgactttgaatatcatttggtgtggcctgtgggttattttcattctttaccaccaaataaagcggcttattagctactcagttacttgctactcaaaggttaggtcttccctgttcctgcttggcagtgttaaagcttacagggttaacttatgatgattctcctggctcattttcatcagaggcatgatgactggaaagggatcacatgggtcgttggtggtgacacctcactgtttcctaggtttggatagagagatgtatacaagacctttcctgttaaattacgtgactacagagacttgccaggacaaaattttcctaagaaatcagaaaaatgattaagtgagataagtacctgggtgacacagatattagcccgttggtaaaagacaacaaatattagcttaaaatctgcatatgtagaatcattttcattagatttagagcttgaagcaccttggctctcagctactttaaactcctccccatataaatcagggcaccaataaataagtttcagctttttaaaccctggtttgatgttaagcattataaagtacgaagtttgttaccacagtagagataatttagtagaaaaatgctttgaggcttcagtatttgtaagattttgcattagccagatgctaggttgttgaaggcatttcagtgttgataatagcctgagcagacttctttacaaatgggatctgtttctatatgtgtatatgcccacttaccattcagagagactggtctttctctttgtcttccttcacattgctgtgtcagttctacacctagtcttttcagcacttagcaaattcaaattttgatttttttgtcagcttagttcactttaaggcatattggcatggtgtgtgaaagtgatgttttgccccagtattgaggacttttagatccaaataatgactcattaaatataattatgttttaagtatactgaatttctgttagcttaaaatgttaattctcaggaatgattttctcacactttgtgttggctaataataaaagcactgttttattctcaaaactcctttttcaaaaattagggagagagcagtagtgatcatttatgtgagcccctttgaaatgatggtgtcagagtgcagagaaacaatggagttttgatgccaaaaaggtttttttgcagtaaaagtaaaaatttggaattagttggcatatagaggaacccttttgtactggaacgtatgaggctggattgtgaaaaggtaatctttcgattgctagacttggttaacttagggctgcaaatctttttcttctgtcaaggtcacttaatatggaatgtttttgtcagactgtcctttgttggaatactttagctgttcagctactttgactcctaggagagaatttagttaaggttcaaagtaattaactggctttgccagtggtgagtcccacaccattattcacttagtagtcatataaatgtttttatttaaacttctctctcttcaatgctgagaataaggctttaaattactgattcacctttaaaggaatgttgtgagaattgatgtaatttctgtttctgtttccatctaaacttctttataaaaagagggattagtttttttgttttggggtaagcacctaatttatccagtaaccaacaaccctaaccattggcatatatagtctttcactcagaaataaacaaaaactgtttggtatatctgtatcattgctaatcttgtgcactttactttttgggcagtaccatacatagtctgaggctattgacttaaaccaataactgtactttatgtaatgactcttaaatttggttacctgggttcacagcttgcttgaagagaaaggatgctagaataaagtaagcagctgaagagcgagcaaatcaagacaaaacacagtggtctcagatttttcgtagtgtgggaacagtggttttgctctataccactgaaaagcactataacataattgttgtccatgatactgaagcttttcccctcacttctaggttgtttacattcagagctctatcaataagaggaatacatattacagtgaattcgacaaccgcacaagttggcagtaggtatccccaacctaatttatcttggtaaattcaccctgtttcctagtgctgctggataaaagagtgtttactttttattgctcttagacagagtagtctagataagttttcaatttatcaacatagcctagacttctgtaagtggaatgttcattagtaactcatctttttgttgttataattggaaacagaaacgaggcttattgctattgcagaaatcccaaactggcaaaggccagtatatatggtattccataatataaccagcttttgaaatttatgtgtttggattagtgccttctggttaccagtattgactctgctagtttgcacctttccgttcttaacagaaaatttgtatttgttattcctcttaaattttgtcgtaactagtgaaggaagtaaaaaaaaaaaaaaaacatgcattacattgacatactttatgtgcagcctttatttaggttcagtgaaaccaggtagttctgtatttgtgttgtagcctaaatgttgtttcttttatatccattaaaaacttaaagttacttatgttctgtgatcttaattttgttgtgtttccattgtaggttgataggtatatcgagaacaggtacgtgacaacagtttatattccatgatagaaagctaaagtccatagaaagcacaaaatcgtgttcacacattagtgtacccacacatagaaagcacaagactaatagtattctctgtatcccacaagtgccagtcataaaggccaccaggtatttgtctcagagttgctatgagcactacagtattgataagcccaagacaatgcggtatctaaactggtcctaatggtaagggacccaaaggaataatctcaataagtttgtaccacattgatggagggagagaatataaatgtcaagaatgccaaaattatatttgggggttactagctaaaatggggtttgagggctttttactgcaacttgaaactggagaaatagggacagatgtctaggtttttggtgggtggaacaggtgacatatttctgttttaagctgtagtgtgattggggttttttgtaaaaaatcttaaatcttttaggaaatattacctcttaacagtgcccccccaaacatgcagaaagtcatactttaacagggcaaatactacttgtctttgattttttttgtgtacgtttgtatgtgagagatgaagttacctttatttttttcctatacttgactgtgcttcattttaataaaggataatttgatctgagtgttctgagcatcagactaattctgaagcatatttgctagaggagctactttgcttttcacaatggggtggagaggattctttcacttgtcccattaaccctcttctagtctagatgagatgaaatctgttaatgtgtgtgtagaagaaaacgtatgttcttctactcagcattgcccttttccacctcctcacttcacctccgagtagcttgtttatcaagaatgaatgaatgtctttgtcttaaattttgcccatgtgttaaaagatgtaattctcagaatgggagagaaatgactacctttgttcctactcttttatataattatccttttagggaaagacttggtcaactctaatatatctagaaggaagactatatctggtgtagactaatatgagatgttttagaagagttaacctgaacactttgagggagagattattcttgccagcaaaaagctagccaggaatgagcctaccacattatttgagaatatcaaacctcaggcctggggggatgaggggaagaagattaccagaagtgcaggaaagagaagtttgaggaacacccttggcttagcaacatgtgataatgcaaagctgttataacctgttaatcctacgtactatgtgttctgtacctttacatgtttttaaatttaagatagtttgtaagaactgtacaaaaaaatgcttctggagatttctttggcagaaatgcctttcatctataatttcatggagaactgctttaattagcctaggtgaaaagtagtcctagcagtgtaaatatgtataattagagttttctaatttcactgtgagatctctaacttttgagtggcaaacagatcaagtcttttgctcatagacttttctgtggggttattaaaatgcaaaagctttattttttttaataatgccatactccattagtgtcagatgatggtatggaatttgttcccttgctttcccccactgttactgcttcagtttatagattgccagcagagttcagaaatagagcagggatttacccgttctttgcttggacatcccattttcttttgtccagacccatgttggcaatcatgtatgaactgtgttatacttctcagtgctttcttttttctttttgataagatggatatcaaaaatagttgctgtgcaaaagttagtagtcttcttcaagaagaaaaccaattctttttctaataatatcctgtgaaattgcttcattcattcatttatttttaagccaaatgtcagcagagtgctgctgcttttatctagtaattttgatatgtaagtattaatgcatttttaaaagatgtctacattgaaacatgttcttcccagtgtcctgcttatgatgctttgttcagattttttgtaagagaccagttagtacactgggggtgtatattgtgtacatgtgtcattttagttaggcattgtaggccaaatgtgattataaatgaagttgatgaacattaattttgttattagtgagttttttgaattgtaaatggatttccagtttaccttctgttgtctacagcttttttaattttaaggtttgactaattgtatccatctcattgtacagtgttttagttgcaagcagaaagtagaatttggtataaagcaggttatttctatattgaaaggagtacagttgaaattgtagatttaagattgttaaaatcatgacaattctaacttgtctattctaacctattgtgtacaatctgattttttaaaattgtaaacatgtatgatcttggtttcatgtgtttttgaaagtgttattgtttaaaaaatgaaaaaagcatatctgctaaagagctgtcagttttcattactgactctgtaaaatacactgttctttgtgtactgtgtgttattttgccagctgctgcattagccttcaaaagtatttggaaacttaagatgaactacatttcttgcaaagtacattcctttctgtggtattttgtcctgtaactgaagtatagtaattattttatggaaatgttagcaattctgtaccaactttgaataaaatgaaaaattta

SEQ ID NO: 6458 - DNA, 2877 bp, Homo sapiens
agtgctcggcaaggggaagcactctctaaacgttagcaaataccatggtaggacacaaggcccctgactctccgctttcagcttactgaagatcctcaaaaccaacagcacacagcttccagcgcatgctcctttccccaagaccttgtgggggaacccgccgccagcgcggagccaccgtgactcgtagcctgacttccgtttccgggggcggcttccggcggcgtgacctgaccgcaagaggccaatggagtgtgggagctgaaagggtcttcgctggcggccggacagtactgcttttaaagagacagtgttagggatcttggaagcacagccaacatgtgtgacattgaagaagccactaaccaactcctagatgtgaaccttcatgagaaccagaagtctgtacaagtgacagaaagtgacctcggaagtgaatctgagcttctagtcactattggagccactgtacctactggctttgagcaaacagctgcagatgaagtcagagagaaacttgggtcatcatgcaaaatcagcagagaccgtggcaagatatattttgtcatttcagtggaaagtctggcacaggttcattgtctgagatcagttgataacttatttgtggtggttcaggagtttcaagattaccagttcaaacaaacaaaggaagaagttctaaaggattttgaagacttggctggaaaactcccatggtcaaaccccttaaaagtgtggaaaattaatgccagttttaaaaagaaaaaagcaaagcgcaaaaagataaatcagaattcaagtaaagagaagattaataatggacaagaagtcaaaatcgatcagagaaatgttaaaaaagagttcactagccatgctttagattctcatatcttagattattatgaaaatccagccatcaaagaggatgtatcaacattaataggtgatgatttggcatcttgcaaagatgagactgatgaaagctcaaaagaagaaactgagcctcaagtgctgaagtttagagtcacatgcaacagggcaggagagaaacattgctttacctcaaatgaggctgcaagagattttgggggtgctgttcaagattattttaagtggaaggccgacatgaccaactttgatgtggaggttcttttgaacatccatgataatgaagtcattgtgggcattgcattgactgaagagagtctccaccgaagaaatataacacattttggacctacaactcttagatcaactcttgcctatgggatgctcaggctctgtgatcctctaccttatgatataatagtcgatccaatgtgtggaactggggcaataccaatagagggggccactgaatggtctgactgtttccatattgctggtgataataatccactggctgtgaatagagcagcaaataacattgcatctttattgaccaagagccaaattaaagaaggcaaaccctcctggggcttgcccatagatgctgttcagtgggatatctgcaatctgccattgagaactggctctgtggatattattgtaacagatttgccatttggaaaaaggatgggatccaagaagagaaactggaacctttatccagcttgcctacgggagatgagccgtgtctgcacacctaccacaggccgagctgtactacttactcaagacacaaaatgctttaccaaggcgttatctggaatgcgacacgtatggcgaaaggtggatacagtctgggtgaacgttggtggtcttcgtgctgcagtttacgttctgatacgtacacctcaagcttttgttcatccttcagaacaagacggagaaagaggaactctttggcaatgcaaagaatgaagatgactaatagtacttgtacttcccaccactggaaatgttagcataaaagaacttggagaggaaaaaagtattaacaaaactgcagtctgcactctttaaacctgtttaaggctcttcatcctggttagcaaaaggtgtgaatgtaatgtgatggaatttaaaagttttatgagaccaggcacagtggctcacgactgtaattccagcagtttaggaagccgaagtgtgcagatcacctgaggtccggagaccagcctggccaacatggtgaaaccctgtctctactagaaatacaaaaattagccaggtgtggtggcgggcgcctgtaatcccaactactcaggaggctgaggctagagaatcacttgaacccagcaggcggaggttgcggtgagtcgagatcacgccattgcactccagcctgtgcgacaagagcgaaactctgtctcaaaaagattttataagaaagcagagcttttccttgaagctcttttgaagtggtagcttaattagtattttgttgaaaatactttaaagatgcctagtgaaaagcctactaaagtgctgtgagattggggtttagaacattttattttcaggctttatggcctattttccattgtgtcaagtgcaaaactaccctggcccaaaggaagggcagagaacataattacatcttaggccacatttcattctttgcagctttgctaatccagttgctcaagttctttacctcaacctgaaggaatgaagcattattacattttgtgaatggtgttcagcctataagacgaagtctcacaagacctataggaaagtttaccatctgccttaaatattaaaatatccatctgttattcacattaatacacagaatgaaaatagaggtctaggaattatcaaaggtactgcaaaaatactgtatagaacttatttgtaaatagcacatacattgatagatggggtgtgggaccaacaaaccaaattaaaagaaattgtttttctttcagt

SEQ ID NO: 6459 - DNA, 812 bp, Homo sapiens
attgttatctcctgtggggaaactcatttgtggagaccagccctctggcttggtgagtgaatctggtttacaccggctcctgccctgccttcactcttctcccctgattcaagactcctctgctttggactgaagcactgcaggagtttgtgaccaagaacttcaagagtcaagacagaaggaagccaagggagcagtgcaatggatttctcagtaaaggtagacatagagaaggaggtgacctgccccatctgcctggagctcctgacagaacctctgagcctagattgtggccacagcttctgccaagcctgcatcactgcaaagatcaaggagtcagtgatcatctcaagaggggaaagcagctgtcctgtgtgtcagaccagattccagcctgggaacctccgacctaatcggcatctggccaacatagttgagagagtcaaagaggtcaagatgagcccacaggaggggcagaagagagatgtctgtgagcaccatggaaaaaaactccagatcttctgtaaggaggatggaaaagtcatttgctgggtttgtgaactgtctcaggaacaccaaggtcaccaaacattccgcataaacgaggtggtcaaggaatgtcaggaaaagctgcaggtagccctgcagaggctgataaaggaggatcaagaggctgagaagctggaagatgacatcagacaagagagaaccgcctggaagaattatatccagatcgagagacagaagattctgaaagggttcaatgaaatgagagtcatcttggacaatgaggagcagagagagctgcaaaa

SEQ ID NO: 6460 - DNA, 526 bp, Homo sapiens
tttgcaagaaggtagagataaagggaaggtgtgggaaggacttgtgaaatacatattcgaggaaaaactatgcacaaggccgtgcatttaaaaataaactccctaaggctggggtgaaacctgctacggtctgcgcaagttgactgttaatgaatttgattctcagacactttttcaaaaatggcaatggtatcagaattcctcaagcaggcctggtttattgaaaatgaagagcaggaatatgttcaaactgtgaagtcatccaaaggtggtcccggatcagcggtgagcccctatcctaccttcaatccatcctcggatgtcgctgccttgcataaggccataatggttaaaggtgtggatgaagcaaccatcattgacattctaactaagcgaaacaatgcacagcgtcaacagatcaaagcagcatatctccaggaaacaggaaagcccctggatgaaacactgaagaaagcccttacaggtcaccttgaggaggttgttttagctctgctaaaaactccag

SEQ ID NO: 6461 - DNA, 3463 bp, Homo sapiens
tgaataaattattcggcatttagcttatcattctgaatttcactttttgctttttggtgctctgaaacttgcagagagaggtggagtgctaaggggagggtaggggttgtgatactttgcacacacatccctgtcattgttctgcctaaagagacagggctgggttcaaggccacatgtgctcctgtcatcctccacatttctgctccaagtgcaatccggagtgtcagctctccatctgtctctgcctggcaggcgcacgcgcccagcaccctgcctccggcgatgccgccccagcccctctgatggccctcctctctgctgccactcattccagaacaggaggcatgagcccggaacgcgcttgcttttaggagacagccactttctgtgtggtacgctggattcaaggatgcctgatcgtactgagaagcactccacaatgccagactcacctgtggatgtgaagacgcaatctaggctgactcctccaacaatgccacctcccccaactactcaaggagctccaagaaccagttcatttacaccgacaacgttaactaatggcacgagccattctcctacagccttgaatggcgccccctcaccacccaatggcttcagcaatgggccttcctcttcttcctcctcctctctggctaatcaacagctgcccccagcctgtggtgccaggcaactcagcaagctgaaaaggttccttactaccctgcagcagtttggcaatgacatttcacccgagataggagaaagagttcgcaccctcgttctgggactagtgaactccactttgacaattgaagaatttcattccaaactgcaagaagctactaacttcccactgagaccttttgtcatcccatttttgaaggccaacttgcccctgctgcagcgtgagctcctccactgcgcaagactggccaaacagaaccctgcccagtacctcgcccagcatgaacagctgcttctggatgccagcaccacctcacctgttgactcctcagagctgcttctcgatgtgaacgaaaacgggaagaggcgaactccagacagaaccaaagaaaatggctttgacagagagcctttgcactcagaacatccaagcaagcgaccatgcactattagcccaggccagcggtacagtccaaataacggcttatcctaccagcccaatggcctgcctcaccctaccccacctccacctcagcattaccgtttggatgatatggccattgcccaccactacagggactcctatcgacaccccagccacagggacctcagggacagaaacagacctatggggttgcatggcacacgtcaagaagaaatgattgatcacagactaacagacagagaatgggcagaagagtggaaacatcttgaccatctgttaaactgcataatggacatggtagaaaaaacaaggcgatctctcaccgtactaaggcggtgtcaagaagcagaccgggaagaattgaattactggatccggcggtacagtgacgccgaggacttaaaaaaaggtggcggcagtagcagcagccactctaggcagcagagtcccgtcaacccagacccagttgcactagacgcgcatcgggaattccttcacaggcctgcgtctggatacgtgccagaggagatctggaagaaagctgaggaggccgtcaatgaggtgaagcgccaggcgatgacggagctgcagaaggccgtgtctgaggcggagcggaaagcccacgacatgatcacaacagagagggccaagatggagcgcacggtcgccgaggccaaacggcaggcggcggaggacgcactggcagttatcaatcagcaggaggattcaagcgagagttgctggaattgtggccgtaaagcgagtgaaacctgcagtggctgtaacacagcccgatactgtggctcattttgccagcacaaagactgggagaagcaccatcacatctgtggacagaccctgcaggcccagcagcagggagacacacctgcagtcagctcctctgtcacgcccaacagcggggctgggagcccgatggacacaccaccagcagccactccgaggtcaaccaccccgggaaccccttccaccatagagacaacccctcgctagacgtgaactcagaactgtcggaggaaagacaacacaaccaacgcgaaaccaattcctcatcctcagatgctcaaagttgttttttttgtttgtttgtttattagatgaattatcctatttcagtacttcagcaagagagaacctaactgtatcttgaggtggtagtaaaacacagagggccagtaacgggtcgtaatgacttattgtggataacaaagatatcttttctttagagaactgaaaagagagcagagaatataacatgaaatgatagatttgacctcctccctgttattttcaagtagctgggattttaaactagatgacctcattaaccgatgctttaccaaacagcaaaccaagagattgctaattgctgttgaaagcaaaaatgctaatattaaaagtcacaatgttctttatatacaataatggaaaaaaaaaaaagaggaaaaccctcaagggcatgagcattggatacagcagtagacattttaacaagaagatgaatggcgtccgtgggttgctaactgaactttgaagacccgctacaaaacgcgcagatgtgcagcagattggaaggagacacagatgttcggtttttttcctgtttctgaaaagaaataataatatccaggtcaacagaatgaaaaatgaaagatgatttgcaatgggatgtatgaatacagcagcaagaaaaaaaaatgccataatacaaaaggctccatatatatatatatatatatatatatacacacacacacacgcacatatacacacacacacacacacacacacacacacacacacacacacacacacacacacaagtaagagactcagcctgcagttaattagcattctggcagttttgacatcagccagctgccctaaataacccttcaacgtttcttcacttttgcaaggttccacagagtaagacattgggtctattccagctcattcattttatattgaaaaaaataattttaaaaatggtggcttcagctccagcccctttccaaaatttttcaaccccaccctgtttggatttttaattaaaaactagtagttctcttggtgttaaaacacttctgtcctgtgaggtttcccaatggtgtttttcttgtaaatgtgttggacaaatgtgaagatgcattgtagtttaaccatatgcccacatttagtctctttattcctagttggtgagaaacctgtatctttctatgctgcttttatatctgtatgtattagtgatatttctctagtagttaaaaaaaaaaaaaggaaaaaaagactctttttggttgtcctcaag

SEQ ID NO: 6462 - DNA, 1280 bp, Homo sapiens
ttttaatggtcagactctattacaccccacattctcttttcttttattcttgtctgttctgcctcactcccgagctctactgactcccaaaagagcgcccaagaagaaaatggccataagtggagtccctgtgctaggatttttcatcatagctgtgctgatgagcgctcaggaatcatgggctatcaaagaagaacatgtgatcatccaggccgagttctatctgaatcctgaccaatcaggcgagtttatgtttgactttgatggtgatgagattttccatgtggatatggcaaagaaggagacggtctggcggcttgaagaatttggacgatttgccagctttgaggctcaaggtgcattggccaacatagctgtggacaaagccaacctggaaatcatgacaaagcgctccaactatactccgatcaccaatgtacctccagaggtaactgtgctcacgaacagccctgtggaactgagagagcccaacgtcctcatctgtttcatcgacaagttcaccccaccagtggtcaatgtcacgtggcttcgaaatggaaaacctgtcaccacaggagtgtcagagacagtcttcctgcccagggaagaccaccttttccgcaagttccactatctccccttcctgccctcaactgaggacgtttacgactgcagggtggagcactggggcttggatgagcctcttctcaagcactgggagtttgatgctccaagccctctcccagagactacagagaacgtggtgtgtgccctgggcctgactgtgggtctggtgggcatcattattgggaccatcttcatcatcaagggagtgcgcaaaagcaatgcagcagaacgcagggggcctctgtaaggcacatggaggtgatggtgtttcttagagagaagatcactgaagaaacttctgctttaatgactttacaaagctggcaatattacaatccttgacctcagtgaaagcagtcatcttcagcgttttccagccctatagccaccccaagtgtggttatgcctcctcgattgctccgtactctaacatctagctggcttccctgtctattgccttttcctgtatctattttcctctatttcctatcattttattatcaccatgcaatgcctctggaataaaacatacaggagtctgtctctgctatggaatgccccatggggcatctcttgtgtacttattgtttaaggtttcctcaaactgtgatttttctgaacacaataaactattttgatgatcttgggtggaa

SEQ ID NO: 6463 - DNA, 1420 bp, Homo sapiens
agagaggggttgagtagtcccttcgcaagccctcatttcaccaggcccccggcttggggcgccttccttccccatggcgggacacctggcttcggatttcgccttctcgccccctccaggtggtggaggtgatgggccaggggggccggagccgggctgggttgatcctcggacctggctaagcttccaaggccctcctggagggccaggaatcgggccgggggttgggccaggctctgaggtgtgggggattcccccatgccccccgccgtatgagttctgtggggggatggcgtactgtgggccccaggttggagtggggctagtgccccaaggcggcttggagacctctcagcctgagggcgaagcaggagtcggggtggagagcaactccgatggggcctccccggagccctgcaccgtcacccctggtgccgtgaagctggagaaggagaagctggagcaaaacccggaggagtcccaggacatcaaagctctgcagaaagaactcgagcaatttgccaagctcctgaagcagaagaggatcaccctgggatatacacaggccgatgtggggctcaccctgggggttctatttgggaaggtattcagccaaacgaccatctgccgctttgaggctctgcagcttagcttcaagaacatgtgtaagctgcggcccttgctgcagaagtgggtggaggaagctgacaacaatgaaaatcttcaggagatatgcaaagcagaaaccctcgtgcaggcccgaaagagaaagcgaaccagtatcgagaaccgagtgagaggcaacctggagaatttgttcctgcagtgcccgaaacccacactgcagcagatcagccacatcgcccagcagcttgggctcgagaaggatgtggtccgagtgtggttctgtaaccggcgccagaagggcaagcgatcaagcagcgactatgcacaacgagaggattttgaggctgctgggtctcctttctcagggggaccagtgtcctttcctctggccccagggccccattttggtaccccaggctatgggagccctcacttcactgcactgtactcctcggtccctttccctgagggggaagcctttccccctgtctctgtcaccactctgggctctcccatgcattcaaactgaggtgcctgcccttctaggaatgggggacagggggaggggaggagctagggaaagaaaacctggagtttgtgccagggtttttgggattaagttcttcattcactaaggaaggaattgggaacacaaagggtgggggcaggggagtttggggcaactggttggagggaaggtgaagttcaatgatgctcttgattttaatcccacatcatgtatcacttttttcttaaataaagaagcctgggacacagtagatagacacactta

SEQ ID NO: 6464 - DNA, 760 bp, Homo sapiens
gggctggagtagttgaactggaaggttttttctaattttgcttctttgtgaatctaagtgagttctttctaccacactcccgaggaagctcccatggacaaagccggataatccgaaaggcgtacctggaagacttttacacccggatgatgcatgagtgctatcagatatgggcccagctggagcacgaggctggaacccaattgcacaggcagactggattactgctgctgggaatgaaagagaatcaagaattaaagacaatccaggccaatctgtcgaggcagagggtagaacaccagtgtctttcatctgaggaactgaagcaacgtttcccaaatattcggttgcccaggggagaagtggggctcttggacaattccggaggagttatctatgcatataaggccctcagagccctgcaggatgcaattcgacagctaggaggcatagtgcgtgacggagagaaggtggtggagataaacccagggctactggtcacggtgaaaaccacctccaggagctaccaagctaagagcttggtcatcacagcaggtccttggaccaaccagctcctccgtcccctgggcattgagatgcctctccagaccctgcggatcaacgtgtgttactggcgagagatggttcctgggagctatggtgtgtcccaggcctttccgtgcttcctgtggctgggcttgtgtccccaccacatctacggactgcccacaggagagtacccagggctgatgaaggtcag

SEQ ID NO: 6465 - DNA, 1424 bp, Homo sapiens
agagcagctcctcttccatctccagaaatgacctccaccttcaacccccgagaatgtaaactgtccaagcaagaagggcaaaactatggcttcttcctgcgaattgagaaggacaccgagggccacctggtccgggtggttgagaagtgtagcccagcagagaaggctggccttcaagatggagacagagttcttaggatcaatggtgtctttgtggacaaagaagaacatatgcaggttgtggatctggtcagaaagagtgggaattcagtgactttactagttctggatggggattcctatgagaaagcagtgaaaacacgggtggacttgaaagagttgggtcaaagtcagaaggagcaaggtttgagtgataatatactttcccctgtgatgaatggaggtgtgcaaacttggacccagccccggctctgctatctcgtgaaggaaggaggcagctatggcttctctctgaaaactgtccaaggtcaaatcatcaaggacatagattctggaagtccagcagaggaggctggcttgaagaacaatgatctggtagttgctgtcaacggcgagtctgtggaaaccctggatcatgacagtgtggtagaaatgattagaaagggtggagatcagacttcactgttggtggtagacaaagagacggacaacatgtacagactggctcatttttctccatttctctactatcaaagtcaagaactgcccaatggctctgtcaaggaggctccagctcctactcccacttctctggaagtctcaagtccaccagatactacagaggaagtagatcataagcctaaactctgcaggctggctaaaggtgaaaatggctatggctttcacttaaatgcgattcggggtctgccaggctcattcatcaaagaggtacagaagggcggtcctgctgacttggctgggctagaggatgaggatgtcatcattgaagtgaatggggtgaatgtgctagatgaaccctatgagaaggtggtggatagaatccagagcagtgggaagaatgtcacacttctagtctgtggaaagaaggcctatgattatttccaagctaagaaaatccctattgtttcctccctggctgatccacttgacacccctccagattctaaagaaggaatagtggtggagtcaaaccatgactcgcacatggcaaaagaacgggcccacagtacagcctcacattcttcttccaattctgaagatacagagatgtgatgaaaacaagtaatagctttggctgtttatttgatagctgtttctgggtatttaataggaatcctttctcaaggaatgagttgtgacctgtttactgtctctttagaagaaaaactccactggaaaccattcaccatgtgtgattgtcttctgttatcatttgtcttaca

SEQ ID NO: 6466 - DNA, 740 bp, Homo sapiens
cgggcacagcgcgtgcagcctcgtgcagctcttctggtctccggcgcccgcccctcagacgtaatgttgaattaaagaaaatactttatcagaagaagatggccactgcccagttgcagaggactcccatgagtgcactggtatttcccaataagatatcaactgaacaccagtctttggtgttagtgaagaggcttctagcagtttcagtatcctgtatcacgtatttgaggggaatattcccagaatgcgcttatggaacaagatatctagatggatgctaggatgttatgatgctttacagaaaaaatatgtatacacaaacccagaagatcctcagacaatttcagaatgttaccaattcaaattcaaatacaccaataatggaccactcatggacttcataagtaaaaaccaaagcaacgaatctagcatgttgtctactgacaccaagaaagcaagcattctcctcattcgcaagatttatatcctaatgcaaaatctggggcctttacctaatgatgtttgtttgaccatgaaacttttttactatgatgaagttacacccccagattaccagcctcccggttttaaggatggtgattgtgaaggagttatatttgaaggggaacctatgtatttaaatgtgggagaagtctcaacaccttttcacatcttcaaagtaaaagtgaccactgagagagaacgaatggaaaatattgactcaactatactatcac

SEQ ID NO: 6467 - DNA, 8242 bp, Homo sapiens
cgttctccaccgactcctgcccgcctcaacacaatgccttacctgtgaagcttgaggccactcaagttccaaatttgtgacaaatcccccagggctcactggagtggcagatatagacctgcagctaactggatttgatttataagagagaaatctgcagtcaatgcccactcttgccacactgctaatatggaaaacagaatgttcaataggatatggtctgataaatagtgatgattgaagatgctgctccaatacatgtgaaatcaatgggagatatctgctgtctgaagatctttcagagcttttctcgacaagctcccctgtaagaaatcggaggtatattctaccattatacagtctttctcaagtggatataaatacgtttgcctcactgtaaccagacaactagacaactaatgtgggaccatggcactgcccagatgcacgtggccaaattatgtttggagagcagtgatggcatgcttggtacaccggggattgggtgccccattgactctctgtatgttgggatgtttgcttcaggctggccatgtgctatcacaaaaattggatgatgtggacccactggtggctaccaactttggaaagataagagggattaagaaggaactcaataatgaaattttggggcctgttattcaatttcttggggttccatatgcagccccaccaacaggggaacgtcgttttcagcctccagaaccaccatctccctggtcagatatcagaaatgccactcaatttgctcctgtgtgtccccagaatatcattgatggcagattgccagaagtcatgcttcctgtgtggtttactaataacttggatgtggtttcatcatatgtgcaagaccagagcgaagactgcctatatttaaatatatatgtcccgactgaggatgatattcgggacagtgggggtcccaaaccagtgatggtgtatatccatggtggctcatatatggaaggtactggaaatttatatgatggaagtgtcttggcaagttatggcaatgtgatcgtcatcacagtcaactatcgacttggagtactcggtttcttgagtacaggcgatcaggctgcaaaggggaactatggactccttgatctcatacaagctttaagatggactagtgaaaacattggattctttggtggtgaccccttaagaatcactgtttttggatctggtgctgggggttcatgtgtcaacctgctgactttatcccattattctgaaggtaaccgttggagcaattcaaccaaaggactttttcaacgagcaatagctcaaagtggaacagccctttccagctgggctgttagttttcaacctgcaaaatatgctagaatgttggccacaaaagttggttgcaatgtttcagatacagtagagttagtggaatgcctacagaagaagccttacaaagaacttgttgaccaagatattcaaccagctcgataccacatagcctttggacctgtgattgatggtgatgtaataccagacgacccccagatattgatggagcaaggagagtttctcaactatgatataatgttaggagtgaaccaaggggaagggttaaaatttgttgaaaatatagtagatagcgatgatggtatatcagctagtgattttgactttgctgtttcaaattttgttgataatttatatggatatcctgaaggcaaagatgttttgagagaaaccattaagttcatgtatactgactgggctgaccgtcataaccctgaaaccagaagaaagacattactggctttgtttacggaccatcagtgggtggcaccagctgtagccacagcggatcttcactcaaactttggttcacctacgtacttctatgccttttaccatcattgccaaacagatcaggttccagcttgggctgatgcagcccacggagacgaggttccctatgtactgggaatccccatgattggccctacagagttatttccttgcaatttctccaaaaatgatgtgatgctgagtgcagttgtaatgacatactggacaaattttgctaaaactggtgacccaaatcaaccagtccctcaagacacgaaattcattcataccaaacccaaccgttttgaagaagtagcatggaccagatattcccagaaagaccaactttatctccatattggattaaaaccaagagttaaagaacattacagagccaataaggtgaacctctggttggagttggtacctcatctgcataatctcaatgacatttctcagtatacctctacaacaactaaagtgccatcaactgacatcactttcagacctacgagaaaaaattctgtacctgtcacgtcagcctttcccactgccaagcaggatgatcccaaacaacaaccaagtccattttcagtggatcaaagggactactcaacagagctgagtgtcactattgcagttggagcatcactgctgtttctgaacatcttggcctttgcagccctgtactacaaaaaggataagaggagacatgatgttcacaggagatgcagccctcagcgcactactaccaatgatctaacccatgcacaagaagaggaaatcatgtccctccaaatgaagcacactgatttggatcatgaatgtgagtccattcatccacatgaggtggttcttcggaccgcctgtcccccagattacacactagctatgaggaggtcacctgatgatgttcccttaatgacacccaacaccattacaatgattcccaacactataccagggattcagcccttacacacattcaatacatttactggaggacagaacaatactctgccccatccccatccccacccccattcacattcaacaaccagggtatagccagataagagaaacaaactattttttttgatggattgcagtaaacgatcactgaagattccttggctttcaacctacaagacttactatttaaataaggaggaatattatgtgaatatacatatcaagaactttgggggttttgaaaaaaatgaattgtatatatacaaatcaactttaaaaacaaatttcaattgcttgaagcaattgttctgaatgatactttttcattcacattcaagaattaattttttgaagatttaagttacataatggaattaggcatgtggaacaccaaacaggaaagaactatgtctgaaatataaaaaataaaaataaaaaaacaactatgaatatgcacaagggacacaccagtggaatgtcagataattttcaccagtttttatttggagccgttttattgtgtagaccatatttacatatttggataagtacacaaagcgtcaatgctgttaatggccttagcaaaggctcatgctgaaatttgccagtaaaacaaagaagtttaaagactggcaggtacaccattatcacataagtgctgtcagtataaagttgtggggataaaggaaactggatatttttagcacgatgtgcatgataatttatatgcttggtggctgtgctgctgattaagccgtaattaaaattcttctcatcccattggagtttttaatagaagcttcctccatcaattggcagaacctaaagaagattttaaggggcaaaagtaattacaataaaataattcacagtagtttcaatatagaaggaattagctattaaaggtatttgaagaaactataggtatagtggtgaatactcgctgatatgaatcccagaaaaaaatttcctgtttttaatgttcttttcaatcccatctagataatttatagaaatataaccctaattggacatgtggtacaggatctataagttgctgtgtttttttgttactctgtattttgttccttttggtaaggtgaagtgtgtccaaagagttacttgcaacagtctttcatgatatgaggatgcccccgtattaccactctgattatagttctgagttctttgatttactcatgctgcatgacaaaatgtttactaataacaattcattataaagttatatccctctttacatcacttatctttctcactgaggttcattcactggaatttactcacgcaatctcagtagagtacaacgtagatacagaacctaggagagtcaacatctggaggattttagtctttcttacacatatgtgtgattttaaacgaatattctcagaccacaggaaactcttcatccccctgttgtttaccagtaacagtatatcacagacctttccaaatgtttgtatatgtaatcagatgtacatttatattgaaaaacaaatgagatggacttaaagagcacatcctgataaatactttctctctcacctgtactatatttctattagactaaagttatgtgattttttttttacattttttcagatgactagcaattttgatagtttataagataatgcaaagaactttctctgacaaactaactgcagtaacagaaacctttcttttcagttactctttttcaagaatgaaagattattatacaaaaaattgtatactacttgatggaaccaactttgtacatcttggccatgtcactggtcattgtgtgaaataaagataatctggataatgactattagtccaatgctaagaaacatgatctttgctcattaaagagctaaaatgtttattgctgttttgtctttcttttttctaaaaaaagaaaaaaaagaaaaaaaggaaaagaagaacaaagaaacatgactgtctcaaagagtaatttttctagattagaccagtcaggtttttgaagacatataggtaacttccacagaaaacacaaacatgtatttaaaggcaagtctcatctaagatgaaactcataaaaattatttaatgtttgttatgaatttaaaagctccagaaatccatgaaaaaaagaaagattagctttgtgttgttaaatatctcttaggtacagatgttgtagaaataaagtgccaattgttttcagttagttagaaaaacaagttccaattctagtcatcaaggaaaaggtctattgaaaagaaatttgcaatatttcatggaatacaaataactaggttcataaaatgggggtgattaaactaccataaagtaatgaatagaaagttgccatgctaagagaatgtaaaagtgctgagcaagatattaaactgacactaaaagataaaaatctatttcaaggaatttatgtgattataatcccccctcccaattattatctatcaaagaaatgtaggtattcctccataattaaaaaaaagtctctgttagaagcaaaagtcttcaaaatccagagtgatctacatacagcttttgactgaggtggttatgcttttcaactgtgaactgccagtgtacacaaatacaaataattgtttagcatctgaagtattgttcaattggaacactgtattttactgtattaattaaacaaaacacaagaacagaatagaaatgacaacaaaataagatatgaatgaatactttcatatgcattgcttcatttggcaaaaccaaacattctattaaatagtatgttttaacgatggccatatttatatcatctacctaccaatctattgctctgcatttatcaatctgcctatatatagcataactgtcaccctctttatattaatttaggaaaatgattgaggaaaacaaagcatagccctattaattattttctctaaattagggtagaataactttatggaagataaagcagcctaggtttaattgttgttcaccagtcacgtgataaagtcattgtgaatgagtgttagttgctagttttataattgcagtctctagtttctgaatgaaaaaggatgccccacattatacagaacattaagaactgtttttaaagctgaaacataatctttatatgcaagaaaaataaatactgttactcaattttagcaaatatgtttaaaatgtatttatttagataattttctttgaaaaacaatgtaagtaacaaaattaaaataatatttttggcattatttgttaattcagattttcctgcctccgattaaaaattaggcaaagctgcttataatttatacaaagattacactaaaatgaactttatttcattgttttgctgttatataaaatttttaccaaatgtttaccaagagattaatgttttagagtatgaggatagaaaaataaaagtgacagatttcatagttttaaatctctactgaacatgttgactatgaacaaaatctaattggctaccacagatatataacaaagtttattactaactttatgcaaattggaaaataatttgctaaagcattaaaaatgtcagatttgtagacgtcttgctggcaactcaaagcagaaaatctgagtatatattattttattcctcatttcaaatataaaagttgaccaaagtgatgctttatttccgacttcctgatctgtatgtgaaaacagcaacatttttttaaaaattatcaagtatatataatattaaaaagaggaaaacagatggcactaattttcttacaggagtgaagtgctgaaactaaattgttacatctgtaacaacagttatttcacctcttgccacactcatcctgacatacgtattaatatcaaaaaatgatacaaagaatatgagaaatgtgttccagcattaaagacactactacatagaaattactgggattcttttctttggcgagtttcactgaaatagtttcacaggatgaaatgatgaattgaattcttaagaagctgtcaaatatggcagtcttttgatgttagtaattttgttttcttctgtgttattggttcaaagtactggccttttccttcatttccagtaattagttgttatagactatcactttttaatgtgagtggaaattagatgatttggttatacttgtgaaaacatgcttccaaataaattcaattaatgggcacttccctgctgagattttgttatcattcatttgattatcttgtcaagctttactgttacgacaaatgttttagctttctggtcaatagactaagggaatttctccagtagccttatacctctcctgcacttgatctgatagcaacatacacttcaaatttccatcagaagtctctaaagaaatttcctactgctatgaaacatttggtggccaacttgattctttttcataagcattctgatttgattttattctggcacgttgctgtatttggatgcaggccagaaatcaattccatttgataagggttgtggagaatacagactggaataaccgtgtgcagggcttaagtgccttttcctcctgagattttatttataaaacttagcttttttaaattttcagattcagataattcaatttaaagagtacaataggatgactatattataaattaccaataaagaaagtttatttggacatttttacatttaatttgatttttaaaataatatcagatgcatctaaatggcttccgggaaagactgaggtaaatttttgaaagtgacaattatataggcatctgacttgatggtacttaagaataaaaatttaaatctctagcaaactttaaaaattgtccaaatagtaagtttaatttgaaagaagtctgaagctattagagaaaatcatgtactagataggtatatatttttttctagtcagctattacgtacaccacataatatatataccctatatactatatggtttatataacatttataatggccctttcagacccatatacttacaaatgacattgtataactacctacatatgtattaatgtgacagaatttagtcctttatggaaagtcaaaccaaattgctagcagttttgagttgaaatgaatgataacaattaaagcttttaagaaattggtaaaggtaccgtaacaaaaactcagcagataaatttaaaagagagggaccatttttgaatgccattttcagagttgacatctaaactagatggtgtgtttaaaaggattttagtggttttgattcatcctttctctgcattcatatcatttagcaaattaatgggacatatgtcatggtttttgtaaaaaagaccattgggttgtcatgattcagtttgtgtttggacatctatggctttcattaaaaacgtgtttattatcatgaataaatattaccatgttttccaa

SEQ ID NO: 6468 - DNA, 802 bp, Homo sapiens
atagtacatagctgatgccatgctcctggccagtgctggagtagtctggtctcatctccccaccttgtcttgtgtttttgttttccagccattaatgggtttctgttctctaacctgcccaggctggacatgtgcaagggtgacacagtggcctggcacctgctcggcctgggcacagagactgatgtgcatggagtcatgttccagggcaacactgtgcagcttcagggcatgaggaagggtgcagctatgctctttcctcatacctttgtcatggccatcatgcagcctgacaaccttgggacatttgagatttattgccaggcaggcagccatcgagaagcagggatgagggcaatctataatgtctcccagtgtcctggccaccaagccacccctcgccaacgctaccaagctgcaagaatctactatatcatggcagaagaagtagagtgggactattgccctgaccggagctgggaacgggaatggcacaaccagtctgagaaggacagttatggttacattttcctgagcaacaaggatgggctcctgggttccagatacaagaaagctgtattcagggaatacactgatggtacattcaggatccctcggccaaggactggaccagaagaacacttgggaatcttgggtccacttatcaaaggtgaagttggtgatatcctgactgtggtattcaagaataatgccagccgcccctactctgtgcatgctcatggagtgctagaatctactactgtctggccactggctgctgagcctggtgagtggggacact

SEQ ID NO: 6469 - DNA, 1976 bp, Homo sapiens
agcaaatgctcactaccactaataagaacatttctaaatctgatgttctgaggatttttagagcttatagtagcaaaaagaaaagggaaattctatccgagatgtcctttgttgtaggcctaatgagaaaaggttgaagataaagttctggtactcatttaagtgtaatattgaaaattgatattaccgaatctggaacaaccaatttaaaataaggaaagaaagacactgtgttttctaggttaaaaatgcccagctggcaggggccaaaggagtcattctctactccgaccctgctgactactttgctcctggggtgaagtcctatccagatggttggaatcttcctggaggtggtgtccagcgtggaaatatcctaaatctgaatggtgcaggagaccctctcacaccaggttacccagcaaatgaatatgcttataggcgtggaattgcagaggctgttggtcttccaagtattcctgttcatccaattggatactatgatgcacagaagctcctagaaaaaatgggtggctcagcaccaccagatagcagctggagaggaagtctcaaagtgccctacaatgttggacctggctttactggaaacttttctacacaaaaagtcaagatgcacatccactctaccaatgaagtgacaagaatttacaatgtgataggtactctcagaggagcagtggaaccagacagatatgtcattctgggaggtcaccgggactcatgggtgtttggtggtattgaccctcagagtggagcagctgttgttcatgaaattgtgaggagctttggaacactgaaaaaggaagggtggagacctagaagaacaattttgtttgcaagctgggatgcagaagaatttggtcttcttggttctactgagtgggcagaggagaattcaagactccttcaagagcgtggcgtggcttatattaatgctgactcatctatagaaggaaactacactctgagagttgattgtacaccgctgatgtacagcttggtacacaacctaacaaaagagctgaaaagccctgatgaaggctttgaaggcaaatctctttatgaaagttggactaaaaaaagtccttccccagagttcagtggcatgcccaggataagcaaattgggatctggaaatgattttgaggtgttcttccaacgacttggaattgcttcaggcagagcacggtatactaaaaattgggaaacaaacaaattcagcggctatccactgtatcacagtgtctatgaaacatatgagttggtggaaaagttttatgatccaatgtttaaatatcacctcactgtggcccaggttcgaggagggatggtgtttgagctagccaattccatagtgctcccttttgattgtcgagattatgctgtagttttaagaaagtatgctgacaaaatctacagtatttctatgaaacatccacaggaaatgaagacatacagtgtatcatttgattcacttttttctgcagtaaagaattttacagaaattgcttccaagttcagtgagagactccaggactttgacaaaagcaacccaatagtattaagaatgatgaatgatcaactcatgtttctggaaagagcatttattgatccattagggttaccagacaggcctttttataggcatgtcatctatgctccaagcagccacaacaagtatgcaggggagtcattcccaggaatttatgatgctctgtttgatattgaaagcaaagtggacccttccaaggcctggggagaagtgaagagacagatttatgttgcagccttcacagtgcaggcagctgcagagactttgagtgaagtagcctaagaggattctttagagaatccgtattgaatttgtgtggtatgtcactcagaaagaatcgtaatgggtatattgataaattttaaaattggtatatttgaaataaagttgaatattatatata

SEQ ID NO: 6470 - DNA, 753 bp, Homo sapiens
atgaaggccactatcatcctccttctgcttgcacaagtttcctgggctggaccgtttcaacagagaggcttatttgactttatgctagaagatgaggcttctgggataggcccagaagttcctgatgaccgcgacttcgagccctccctaggcccagtgtgccccttccgctgtcaatgccatcttcgagtggtccagtgttctgatttggaactgggcaccaatccgctgaagagctcaggaattgaaaatggggctttccagggaatgaagaagctctcctacatccgcattgctgataccaatatcaccagcattcctcaaggtcttcctccttcccttacggaattacatcttgatggcaacaaaatcagcagagttgatgcagctagcctgaaaggactgaataatttggctaagttgggattgagtttcaacagcatctctgctgttgacaatggctctctggccaacacgcctcatctgagggagcttcacttggacaacaacaagcttaccagagtacctggtgggctggcagagcataagtacatccaggttgtctaccttcataacaacaatatctctgtagttggatcaagtgacttctgcccacctggacacaacaccaaaaaggcttcttattcgggtgtgagtcttttcagcaacccggtccagtactgggagatacagccatccaccttcagatgtgtctacgtgcgctctgccattcaactcggaaactataagtaa

SEQ ID NO: 6471 - DNA, 2094 bp, Homo sapiens
atttcagtccccgttaccctctgctttttctgctcctcagagtcaacagctgttgcagcatgagcgatacgcttggttctcctaactagcaccttcccctctcccctgactcagctggtagcccctcctccccgcacctgcccaaaggtcactggacagggcaatgccaggaagctggtgaagggtttcctctcctccaccatggttgacagcactgagtatgaagtggcctcccagcctgaggtggaaacctcccctttgggtgatggggccagcccagggccggagcaggtgaagctgaagaaggagatctcactgcttaacggcgtgtgcctgattgtggggaacatgatcggctcgggcatctttgtttcccccaagggtgtgctcatatacagtgcctcctttggtctctctctggtcatctgggctgtcgggggcctcttctccgtctttggggccctttgttatgcggaactgggcaccaccattaagaaatctggggccagctatgcctatatcctggaggcctttggaggattccttgctttcatcagactctggacctccctgctcatcattgagcccaccagccaggccatcattgccatcacctttgccaactacatggtacagcctctcttcccgagctgcttcgccccttatgctgccagccgcctgctggctgctgcctgcatttgtctcttaaccttcattaactgtgcctatgtcaaatggggaaccctggtacaagatattttcacctatgctaaagtattggcactgatcgcggtcatcgttgcaggcattgttagacttggccagggagcctctactcattttgagaattcctttgagggttcatcatttgcagtgggtgacattgccctggcactgtactcagctctgttctcctactcaggctgggacaccctcaactatgtcactgaagagatcaagaatcctgagaggaacctgcccctctccattggcatctccatgcccattgtcaccatcatctatatcttgaccaatgtggcctattatactgtgctagacatgagagacatcttggccagtgatgctgttgctgtgacttttgcagatcagatatttggaatatttaactggataattccactgtcagttgcattatcctgttttggtggcctcaatgcctccattgtggctgcttctaggcttttctttgtgggctcaagagaaggccatctccctgatgccatctgcatgatccatgttgagcggttcacaccagtgccttctctgctcttcaatggtatcatggcattgatctacttgtgcgtggaagacatcttccagctcattaactactacagcttcagctactggttctttgtggggctttctattgtgggtcagctttatctgcgctggaaggagcctgatcgacctcgtcccctcaagctcagcgttttcttcccgattgtcttctgcctctgcaccatcttcctggtggctgttccactttacagtgatactatcaactccctcatcggcattgccattgccctctcaggcctgcccttttacttcctcatcatcagagtgccagaacataagcgaccgctttacctccgaaggatcgtggggtctgccacaaggtacctccaggtcctgtgtatgtcagttgctgcagaaatggatttggaagatggaggagagatgcccaagcaacgggatcccaaatctaactaaacaccatctggaatcctgatgtggaaagcaggggtttctggtctactggctagagctaaggaagttgaaaaggaaagctcacttctttggaggcacctgtccagaagcctggcctaggcagcttcaacctttgaacttactttttgaaatgaaaagtaatttatttgttttgctacatactgttccagacttttaaaggggacaatgaaggtgactgtggggaggagcatgtcaggtttgggcttggttgttttagaagcacctgggtgtgcctacctactcctcttttcttttaaaagggcccacaatgctccaatttcctgtctcctttagagagacatgaaactatcacaggtg

SEQ ID NO: 6472 - DNA, 3972 bp, Homo sapiens
gagaaatccatgactcacatatatcgtccgtcatccccagtcaagctcagggaggagggaggagcccagctggggcaggagaggggtgtctccccaccaaacaaacccggtccctccctctccgcactagctgtctgccctgccctgccgtaggagatgggctgggagcctcccacgctctccagctcactcggcaggcagcggggaccagggctggcaggttaagcctctgggggtggatcctgaaaggtggtccagccgcctggccctgcgtgggaccctccacctggcagcaggtacccaaacaagggctggacagcaggtgggaaggggaatagtgtgagtgtggccagcccaaccaccacacagtccacactcccagctaacactcctggtctcttccaggtggtgacttccaagagtgactccgtcggaggaaaatgactccccagtcgctgctgcagacgacactgttcctgctgagtctgctcttcctggtccaaggtgcccacggcaggggccacagggaagactttcgcttctgcagccagcggaaccagacacacaggagcagcctccactacaaacccacaccagacctgcgcatctccatcgagaactccgaagaggccctcacagtccatgcccctttccctgcagcccaccctgcttcccgatccttccctgaccccaggggcctctaccacttctgcctctactggaaccgacatgctgggagattacatcttctctatggcaagcgtgacttcttgctgagtgacaaagcctctagcctcctctgcttccagcaccaggaggagagcctggctcagggccccccgctgttagccacttctgtcacctcctggtggagccctcagaacatcagcctgcccagtgccgccagcttcaccttctccttccacagtcctccccacacggccgctcacaatgcctcggtggacatgtgcgagctcaaaagggacctccagctgctcagccagttcctgaagcatccccagaaggcctcaaggaggccctcggctgcccccgccagccagcagttgcagagcctggagtcgaaactgacctctgtgagattcatgggggacatggtgtccttcgaggaggaccggatcaacgccacggtgtggaagctccagcccacagccggcctccaggacctgcacatccactcccggcaggaggaggagcagagcgagatcatggagtactcggtgctgctgcctcgaacactcttccagaggacgaaaggccggagcggggaggctgagaagagactcctcctggtggacttcagcagccaagccctgttccaggacaagaattccagccaagtcctgggtgagaaggtcttggggattgtggtacagaacaccaaagtagccaacctcacggagcccgtggtgctcactttccagcaccagctacagccgaagaatgtgactctgcaatgtgtgttctgggttgaagaccccacattgagcagcccggggcattggagcagtgctgggtgtgagaccgtcaggagagaaacccaaacatcctgcttctgcaaccacttgacctactttgcagtgctgatggtctcctcggtggaggtggacgccgtgcacaagcactacctgagcctcctctcctacgtgggctgtgtcgtctctgccctggcctgccttgtcaccattgccgcctacctctgctccagggtgcccctgccgtgcaggaggaaacctcgggactacaccatcaaggtgcacatgaacctgctgctggccgtcttcctgctggacacgagcttcctgctcagcgagccggtggccctgacaggctctgaggctggctgccgagccagtgccatcttcctgcacttctccctgctcacctgcctttcctggatgggcctcgaggggtacaacctctaccgactcgtggtggaggtctttggcacctatgtccctggctacctactcaagctgagcgccatgggctggggcttccccatctttctggtgacgctggtggccctggtggatgtggacaactatggccccatcatcttggctgtgcataggactccagagggcgtcatctacccttccatgtgctggatccgggactccctggtcagctacatcaccaacctgggcctcttcagcctggtgtttctgttcaacatggccatgctagccaccatggtggtgcagatcctgcggctgcgcccccacacccaaaagtggtcacatgtgctgacactgctgggcctcagcctggtccttggcctgccctgggccttgatcttcttctcctttgcttctggcaccttccagcttgtcgtcctctaccttttcagcatcatcacctccttccaaggcttcctcatcttcatctggtactggtccatgcggctgcaggcccggggtggcccctcccctctgaagagcaactcagacagcgccaggctccccatcagctcgggcagcacctcgtccagccgcatctaggcctccagcccacctgcccatgtgatgaagcagagattcggcctcgtcgcacactgcctgtggcccccgagcccggcccagccccaggccagtcagccgcagactttggaaagcccaacgaccatggagagatgggccgttgccatggtggacggactcccgggctgggcttttgaattggccttggggactactcggctctcactcagctcccacgggactcagaagtgcgccgccatgctgcctagggtactgtccccacatctgtcccaacccagctggaggcctggtctctccttacaacccctgggcccagccctcattgctgggggccaggccttggatcttgagggtctggcacatccttaatcctgtgcccctgcctgggacagaaatgtggctccagttgctctgtctctcgtggtcaccctgagggcactctgcatcctctgtcattttaacctcaggtggcacccagggcgaatggggcccagggcagaccttcagggccagagccctggcggaggagaggccctttgccaggagcacagcagcagctcgcctacctctgagcccaggccccctccctccctcagccccccagtcctccctccatcttccctggggttctcctcctctcccagggcctccttgctccttcgttcacagctgggggtccccgattccaatgctgttttttggggagtggtttccaggagctgcctggtgtctgctgtaaatgtttgtctactgcacaagcctcggcctgcccctgagccaggctcggtaccgatgcgtgggctgggctaggtccctctgtccatctgggcctttgtatgagctgcattgcccttgctcaccctgaccaagcacacgcctcagaggggccctcagcctctcctgaagccctcttgtggcaagaactgtggaccatgccagtcccgtctggtttccatcccaccactccaaggactgagactgacctcctctggtgacactggcctagggcctgacactctcctaagaggttctctccaagcccccaaatagctccaggcgccctcggccgcccatcatggttaattctgtccaacaaacacacacgggtagattgctggcctgttgtaggtggtagggacacagatgaccgacctggtcactcctcctgccaacattcagtctggtatgtgaggcgtgcgtgaagcaagaactcctggagctacagggacagggagccatcattcctgcctgggaatcctggaagacttcctgcaggagtcagcgttcaatcttgaccttgaagatgggaaggatgttctttttacgtaccaattcttttgtcttttgatattaaaaagaagtacatgttcattgtagagaatttggaaactgtagaagagaatcaagaagaaaaataaaaatcagctgttgtaatcacctagcaaactgg

SEQ ID NO: 6473 - DNA, 1911 bp, Homo sapiens
ccttgcacacccacagggtagacggatcgagtttcagcttaaaccgaggggtgtgggggaagggtgttgggttcagctagtccacgtgggtgctgtcctccacttggtgctgaaatctgggcggccacatccccggggcgggagggggctacatccccggctttagacgcgcgagtctcaggtcccgctaattacctggcgggtgctgcccacccctgccctcgcgcacctagcgcggtggcaggcgggaaggcggggcctgggggagccccacccctggagactgcggctggggcctccctctcctccgcccgcccgcctgccactagctcattgcgcctctcctgcagtctgattggcaccggctcccattccggctccagcctccaatccgacccccatttcggctgcagcctcggacctagctccggccctcggtctatccggttgcatcctccctccctgttccggatcttatcttgcgccagcgcctactccaggatcccgtagccagacctcaagccatggctggtcccttctcccgtctgctgtccgcccgcccgggactcaggctcctggctttggccggagcggggtctctagccgctgggtttctgctccgaccggaacctgtacgagctgccagtgaacgacggaggctgtatcccccgagcgctgagtacccagacctccgaaagcacaacaactgcatggccagtcacctgaccccagcagtctatgcacggctctgcgacaagaccacacccactggttggacgctagatcagtgtatccagactggcgtggacaaccctggccaccccttcatcaagactgtgggcatggtggctggagatgaggagacctatgaggtatttgctgacctgtttgaccctgtgatccaagagcgacacaatggatatgacccccggacaatgaagcacaccacggatctagatgccagtaaaatccgttctggctactttgatgagaggtatgtattgtcctctagagtcagaactggccgaagcatccgaggactcagtctgcctccagcttgcactcgagcagagcgacgagaggtggaacgtgttgtggtggatgcactgagtggcctgaagggtgacctggctggacgttactataggctcagtgagatgacagaggctgaacagcagcagcttattgatgaccactttctgtttgataagcctgtgtccccgttgctgactgcagcaggaatggctcgagactggccagatgctcgtggaatttggcacaacaatgagaagagcttcctgatctgggtgaatgaggaggatcatacacgggtgatctccatggagaagggtggtaacatgaagagagtgtttgaaagattctgccgaggcctcaaagaggtggagagacttatccaagaacgtggctgggagttcatgtggaatgagcgtttgggatacatcttgacctgtccatctaacctgggcactggacttcgggcaggagtgcacatcaaactgcccctgctaagcaaagatagccgcttcccaaagatcctggagaacctaagactccaaaagcgtggtactggaggagtggacactgctgccacaggcggtgtctttgatatttctaatttggaccgactaggcaaatcagaggtggagctggtgcaactggtcatcgatggagtaaactatttgattgattgtgaacggcgtctggagagaggccaggatatccgcatccccacacctgtcatccacaccaagcattaactccccatcgccagctgatgactcaagattccaaggagttctgctcattctaatgatggcccattctacttgctctggacctgccctcgcatcccctgcctccatcctagtaaagactccttgctatgctgca

SEQ ID NO: 6474 - DNA, 2989 bp, Homo sapiens
cagggtttattgttatgtaagttcttgttcagcttcctttgttttctttcacttctgagaatttaactttcgtttctcactcagctcctgtggggaaactcatttgtggagaccagccctctggcttggtgagtgaatctggtttacaccggctcctgccctgccttcactcttctcccctgattcaagactcctctgctttggactgaagcactgcaggagtttgtgaccaagaacttcaagagtcaagacagaaggaagccaagggagcagtgcaatggatttctcagtaaaggtagacatagagaaggaggtgacctgccccatctgcctggagctcctgacagaacctctgagcctagattgtggccacagcttctgccaagcctgcatcactgcaaagatcaaggagtcagtgatcatctcaagaggggaaagcagctgtcctgtgtgtcagaccagattccagcctgggaacctccgacctaatcggcatctggccaacatagttgagagagtcaaagaggtcaagatgagcccacaggaggggcagaagagagatgtctgtgagcaccatggaaaaaaactccagatcttctgtaaggaggatggaaaagtcatttgctgggtttgtgaactgtctcaggaacaccaaggtcaccaaacattccgcataaacgaggtggtcaaggaatgtcaggaaaagctgcaggtagccctgcagaggctgataaaggaggatcaagaggctgagaagctggaagatgacatcagacaagagagaaccgcctggaagaattatatccagatcgagagacagaagattctgaaagggttcaatgaaatgagagtcatcttggacaatgaggagcagagagagctgcaaaagctggaggaaggtgaggtgaatgtgctggataacctggcagcagctacagaccagctggtccagcagaggcaggatgccagcacgctcatctcagatctccagcggaggttgaggggatcgtcagtagagatgctgcaggatgtgattgacgtcatgaaaaggagtgaaagctggacattgaagaagccaaaatctgtttccaagaaactaaagagtgtattccgagtaccagatctgagtgggatgctgcaagttcttaaagagctgacagatgtccagtactactgggtggacgtgatgctgaatccaggcagtgccacttcgaatgttgctatttctgtggatcagagacaagtgaaaactgtacgcacctgcacatttaagaattcaaatccatgtgatttttctgcttttggtgtcttcggctgccaatatttctcttcggggaaatattactgggaagtagatgtgtctggaaagattgcctggatcctgggcgtacacagtaaaataagtagtctgaataaaaggaagagctctgggtttgcttttgatccaagtgtaaattattcaaaagtttactccagatatagacctcaatatggctactgggttataggattacagaatacatgtgaatataatgcttttgaggactcctcctcttctgatcccaaggttttgactctctttatggctgtgcctccctgtcgtattggggttttcctagactatgaggcaggcattgtctcatttttcaatgtcacaaaccacggagcactcatctacaagttctctggatgtcgcttttctcgacctgcttatccgtatttcaatccttggaactgcctagtccccatgactgtgtgcccaccgagctcctgagtgttctcattcctttacccacttctgcatagtagcccttgtgctgagactcagattctgcacctgagttcatctctactgagaccatctcttcctttctttccccttcttttacttagaatgtctttgtattcatttgctagggcttccatagcaaagcatcatagattgctgatttaaactgtaattgtattgccgtactgtgggctggaaatcccaaatctagattccagcagagttggttctttctgaggtctgcaaggaagggctctgttccatgcctctctccttggcttgtagaaggcatcttgtccctatgactcttcacattgtctttatgtacatctctgtgcccaagttttccctttttattaagacaccagtcatactggctcagggcccaccgctaatgccttaatgaaatcattttaacattatattctctacaaagaccttatttccaaataagataatatttggaggtattgggaataaaaactccaacatataaatttgaggaaggcacgatttcactcataacaatcttaccctttcttgcaagagatgcttgtacattattttcctaataccttggtttcactagtagtaaacattattattttttttatatttgcaaaggaaacatatctaatccttcctatagaaagaacagtattgctgtaattccttttcttttcttcctcatttcctctgccccttaaaagattgaagaaagagaaacttgtcaactcatatccacgttatctagcaaagtacataagaatctatcactaagtaatgtatccttcagaatgtgttggtttaccagtgacaccccatattcatcacaaaattaaagcaagaagtccatagtaatttatttgctaatagtggatttttaatgctcagagtttctgaggtcaaattttatcttttcacttacaagctctatgatcttaaataatttacttaatgtattttggtgtattttcctcaaattaatattggtgttcaagactatatctaattcctctgatcactttgagaaacaaacttttattaaatgtaaggcacttttctatgaattttaaatataaaaataaatattgttctgattattactgaaaagatgtcagccatttcaatgtcttgggaaacaattttttgtttttgttctgttttctttttgcttcaataaaacaatagctggctcta

SEQ ID NO: 6475 - DNA, 2161 bp, Homo sapiens
ttgcgctgtggggctgcccgggctgcgcggcgtctgcaggcgccaccgctgcctctttccggctgtgaccctcctcgccgccgccgcttggctgcgtcctccgactccccgcgccgccgagaccaggctcccgctccggttgcggccgcaccgccctccgcggccgccccctggggatccagcgagcgcggtcgtccttggtggaaggaaccatgaactggcatctccccctcttcctcttggcctctgtgacgctgccttccatctgctcccacttcaatcctctgtctctcgaggaactaggctccaacacggggatccaggttttcaatcagattgtgaagtcgaggcctcatgacaacatcgtgatctctccccatgggattgcgtcggtcctggggatgcttcagctgggggcggacggcaggaccaagaagcagctcgccatggtgatgagatacggcgtaaatggagttggtaaaatattaaagaagatcaacaaggccatcgtctccaagaagaataaagacattgtgacagtggctaacgccgtgtttgttaagaatgcctctgaaattgaagtgccttttgttacaaggaacaaagatgtgttccagtgtgaggtccggaatgtgaactttgaggatccagcctctgcctgtgattccatcaatgcatgggttaaaaatgaaaccagggatatgattgacaatctgctgtccccagatcttattgatggtgtgctcaccagactggtcctcgtcaacgcagtgtatttcaagggtctgtggaaatcacggttccaacccgagaacacaaagaaacgcactttcgtggcagccgacgggaaatcctatcaagtgccaatgctggcccagctctccgtgttccggtgtgggtcgacaagtgcccccaatgatttatggtacaacttcattgaactgccctaccacggggaaagcatcagcatgctgattgcactgccgactgagagctccactccgctgtctgccatcatcccacacatcagcaccaagaccatagacagctggatgagcatcatggtgcccaagagggtgcaggtgatcctgcccaagttcacagctgtagcacaaacagatttgaaggagccgctgaaagttcttggcattactgacatgtttgattcatcaaaggcaaattttgcaaaaataacaaggtcagaaaacctccatgtttctcatatcttgcaaaaagcaaaaattgaagtcagtgaagatggaaccaaagcttcagcagcaacaactgcaattctcattgcaagatcatcgcctccctggtttatagtagacagaccttttctgtttttcatccgacataatcctacaggtgctgtgttattcatggggcagataaacaaaccctgaagagtatacaaaagaaaccatgcaaagcaacgactactttgctacgaagaaagactcctttcctgcatctttcatagttctgttaaatatttttgtacatcgcttctttttcaaaactagttcttaggaacagactcgatgcaagtgtttctgttctgggaggtattggagggaaaaaacaagcaggatggctggaacactgtactgaggaatgaatagaaaggcttccagatgtctaaaagattctttaaactactgaactgttacctaggttaacaaccctgttgagtatttgctgtttgtccagttcaggaatttttgttttgttttgtctatatgtgcggcttttcagaagaaatttaatcagtgtgacagaaaaaaaaatgttttatggtagcttttactttttatgaaaaaaaaattatttgccttttaaattcttttcccccatccccctccaaagtcttgatagcaagcgttattttggtggtagaaacggtgaaatctctagcctctttgtgtttttgttgttgttgttgttgttgttttatataatgcatgtattcactaaaataaaatttaaaaaactcctgtcttgctagacaaggttgctgttgtgcagtgtgcctgtcactactggtctgtactccttggatttgcatttttgtattttgtacaaagtaaaaataaactgttatgagtagtaaaaataaagctatttctctgctatttgaaaatacaatagaagaaactga

SEQ ID NO: 6476 - DNA, 992 bp, Homo sapiens
aggcgtttgaggggctctcggagggaggtgacagggaggggtgcgtgtgcgtgcgtgtggggcttctgtgtccagaggtctgggggtgacgtcctttgttttgggcaggaggcgggctgggggcttgcgggacctgtgggcgctgcggggacgcggcgtcgatgctcaagaaaccagaaactcggcttgaggagttgctgcttttttgtcggaaggtcttcaaatgagagtaaagcgttaagagcctcactcctgagtctttttttttttttaagataaaaactatactagagtccagcgacttcttaccactctgaatgtgagtaacaaattgtgaatcaaagcccgaatccccgtggaattcattccgaggctgattgcaatcacttggagtcgggcgcgtcctacctaaaccaggcagtttatggcaaatacctgccttgaccgtgcttaaattagtgaacttttgggcaccaactggtcgatttaccatagaaattggtagttgctgcaaaaagaaaatgttgctgaagtgctgctgaaagggccagagatgcaaggatttgggatacattttgaacctttaagctgtctgacattgacctcctttcattattaataaagaagaatcaggagcttaggatgtattaacaccaactcattaatatactaaccggacaatgttctacaaacaattctacattgtaaaggactggattggcacaaaataaaataattttattttattcagcttataatatgactcgatggaggaaaatttgataagcatgagagaagaccattcttttcatgttcgttacagaatggaagcttcttgcctagagctggccttggaaggggaacgtctatgtaaatcaggagactgccgcgctggcgtgtcattctttgaagctgcagttcaagttggaactgaagacctaaaaacacttagcgctatttacagccagttgggcaatgcttatttctatttg

SEQ ID NO: 6477 - DNA, 914 bp, Homo sapiens
gtgtgtgcgcagggagagaacgccggccaccttcccgcttccgagctgggtgcgcgccgagcacaggagggtgcaatacctgccttgcgtcgcccgtgccgctccagccaccgtcaaatccgggtagcgacccggggcgtttgcagcggtgccgaggaagaggacgggaacggtgttacgattgcctgcgtttaggaggtggctgcgttgtgggaaaagctatcaaggaagaaattgccaaaccatgtctttttttctgttttcagagtagttcacaacagatctgagtgttttaattaagcatggaatacagaaaacaacaaaaaacttaagctttaatttcatctggaattccacagagacaaggccactttatgtttcccaggctggactggaacccctgggctcaaatgatcctcctacctaagcctgcagagtagcgaggacttcagttttcttagctccctggacccggttgacctgttggctcttcccgctggctgctctatcacgtggtgctctccgactactcaccccgagtgtaaagaaccttcggctcgcgtgcttctgagctgctgtggatggcctcggctctctggactgtccttccgagtaggatgtcactgagatccctcaaatggagcctcctgctgctgtcactcctgagtttctttgtgatgtggtacctcagccttccccactacaatgtgatagaacgcgtgaactggatgtacttctatgagtatgagccgatttacagacaagactttcacttcacacttcgagagcattcaaactgctctcatcaaaatccatttctggtcattctggtgacctcccacccttcagatgtgaaagccaggcaggccattagagttacttggggtgaaaaaaagtcttggtggggatatgag

SEQ ID NO: 6478 - DNA, 2395 bp, Homo sapiens
aactgagttcaaggcaattaaagtcaagagctaaggagggagggagagggtttagaaataccagcataataagtagtatgactgggtgctctgtaaattaactcaattagacaaagcctgacttaacgggggaagatggtgagaagcgctaccctcattaaatttggttgttagaggcgcttctaaggaaattaagtctgttagttgtttgaatcacataaaattgtgtgtgcacgttcatgtacacatgtgcacacatgtaacctctgtgattcttgtgggtatttttttaagaagaaaggaatagaaagcaaagaaaaataaaaaatactgaaaagaaaagactgaaagagtagaagataaggagaaaagtacgacagagacaaggaaagtaagagagagagagagctctcccaattataaagccatgagccccctttggtgggggtttctgctcagttgcttgggctgcaaaatcctgccaggagcccagggtcagttcccccgagtctgcatgacggtggacagcctagtgaacaaggagtgctgcccacgcctgggtgcagagtcggccaatgtctgtggctctcagcaaggccgggggcagtgcacagaggtgcgagccgacacaaggccctggagtggtccctacatcctacgaaaccaggatgaccgtgagctgtggccaagaaaattcttccaccggacctgcaagtgcacaggaaactttgccggctataattgtggagactgcaagtttggctggaccggtcccaactgcgagcggaagaaaccaccagtgattcggcagaacatccattccttgagtcctcaggaaagagagcagttcttgggcgccttagatctcgcgaagaagagagtacaccccgactacgtgatcaccacacaacactggctgggcctgcttgggcccaatggaacccagccgcagtttgccaactgcagtgtttatgatttttttgtgtggctccattattattctgttagagatacattattaggaccaggacgcccctacagggccatagatttctcacatcaaggacctgcatttgttacctggcaccggtaccatttgttgtgtctggaaagagatctccagcgactcattggcaatgagtcttttgctttgccctactggaactttgccactgggaggaacgagtgtgatgtgtgtacagaccagctgtttggggcagcgagaccagacgatccgactctgattagtcggaactcaagattctccagctgggaaactgtctgtgatagcttggatgactacaaccacctggtcaccttgtgcaatggaacctatgaaggtttgctgagaagaaatcaaatgggaagaaacagcatgaaattgccaaccttaaaagacatacgagattgcctgtctctccagaagtttgacaatcctcccttcttccagaactctaccttcagtttcaggaatgctttggaagggtttgataaagcagatgggactctggattctcaagtgatgagccttcataatttggttcattccttcctgaacgggacaaacgctttgccacattcagccgccaatgatcccatttttgtggtgatttctaatcgtttgctttacaatgctacaacaaacatccttgaacatgtaagaaaagagaaagcgaccaaggaactcccttccctgcatgtgctggttcttcattcctttactgatgccatctttgatgagtggatgaaaagatttaatcctcctgcagatgcctggcctcaggagctggcccctattggtcacaatcggatgtacaacatggttcctttcttccctccagtgactaatgaagaactctttttaacctcagaccaacttggctacagctatgccatcgatctgccagtttcagttgaagaaactccaggttggcccacaactctcttagtagtcatgggaacactggtggctttggttggtctttttgtgctgttggcttttcttcaatatagaagacttcgaaaaggatatacacccctaatggagacacatttaagcagcaagagatacacagaagaagcctagggtgctcatgccttacctaagagaagaggctggccaagccacagttctgacgctgacaataaaggaactaatcctcactgttccttcttgagttgaagatctttgacataggttcttctatagtgatgatgatctcattcagaagatgcttagctgtagtttccgctttgcttgcttgtttaacaaacccaactaaagtgcttgaggctacctctaccttcaaataaagatagacctgacaatttgtgatatctaataataaccccccccccaatattgattaagcctcctccttttctgaaagcattt

SEQ ID NO: 6479 - DNA, 3868 bp, Homo sapiens
gctgaaccctgcccgaagaaaccacatgagccagcagttgctgccctcccgaagtggtcctcggaggcagcgcaccccttcattttggcgaaccgaggaggaagggaggaaccgtgtgggggaaatctagaacttctggttccccaaggacccagcagactgtgttctggctacaaggtgatcactgccaccaggtcagtgcaggattcctccaatgtagatgggccgggagccacaacttgcgcggagcagcagcctcgccgaccactcagagagaagccgcgcgacagccaggcttggcccggacggcgcccccaccctgcgcgcgcgatccaaggttctcacctggagcgctcaggtagggctggggcggggcgggaggctggcgcgcaggcgcggaagtggggcctcgcccctgccgacgtcgcaggctggagctcacctgggagactccaagtggaagccgagcctcggttctgcctctccaggcaacgcgggaggcccagcgggaaggcaggaggcggcggcggaggaggagctctactgagccgcaactgtggcgacagcaaccggagtcgcagccgccgccacctgcacctggcgcctagcccacgtccagcgcctgcccggccgccgcttcccgccaccctgccctgcccacccgccaggtactaccattaaagataccttcttctcagcaaatctatgataaaaaatataagtaacagaagaagaaataactgttatttgtcaagtgacaagcttttaatgtcagaatggctcacctaaagcgactagtaaaattacacattaaaagacattaccataaaaagttctggaagcttggtgcagtaatttttttctttataatagttttggttttaatgcaaagagaagtaagtgttcaatattccaaagaggaatcaaggatggaaaggaacatgaaaaacaaaaacaagatgttggatttaatgctagaagctgtaaacaatattaaggatgccatgccaaaaatgcaaataggagcacctgtcaggcaaaacattgatgctggtgagagaccttgtttgcaaggatattatacagcagcagaattgaagcctgtccttgaccgtccacctcaggattcaaatgcacctggtgcttctggtaaagcattcaagacaaccaatttaagtgttgaagagcaaaaggaaaaggaacgtggggaagctaaacactgctttaatgctttcgcaagtgacaggatttctttgcaccgagatcttggaccagacactcgacctcctgaatgtattgaacaaaaatttaagcgctgccctcccctgcccaccaccagtgtcataatagtttttcataatgaagcgtggtccacgttgcttagaactgtccacagtgtgctctattcttcacctgcaatactgctgaaggaaatcattttggtggatgatgctagtgtagatgagtacttacatgataaactagatgaatatgtaaaacaattttctatagtaaaaatagtcagacaaagagaaagaaaaggtctgatcactgctcggttgctaggagcaacagtcgcaacagctgaaacgctcacatttttagatgctcactgtgagtgtttctatggttggctagaacctctgttggccagaatagctgagaactacacggctgtcgtaagtccagatattgcatccatagatctgaacacgtttgaattcaacaaaccttctccttatggaagtaaccataaccgtggaaattttgactggagtctttcatttggctgggagtcgcttcctgatcatgagaagcaaagaaggaaagatgaaacctacccaattaaaacacccacttttgcaggaggacttttttccatatcaaaagaatattttgagtatattggaagctatgatgaagaaatggaaatctggggaggtgaaaatatagaaatgtctttcagagtatggcaatgtggtgggcagttggagattatgccttgctctgttgttggacatgtttttcgcagcaaaagccctcatagctttccaaaaggcactcaggtgattgctagaaaccaagttcgccttgcagaagtctggatggatgaatacaaggaaatattttataggagaaatacagatgcagcaaaaattgttaaacaaaaagcatttggtgatctttcaaaaagatttgaaataaaacaccgccttcagtgtaaaaattttacatggtatctgaacaacatttatccagaggtgtatgtgccagaccttaatcctgttatatctggatacattaaaagcgttggtcagcctctatgtctggatgttggagaaaacaatcaaggaggcaaaccattaattatgtatacatgtcatggacttgggggaaaccagtactttgaatactctgctcaacatgaaattcggcacaacatccagaaggaattatgtcttcatgctgctcaaggtctcgttcagctgaaggcatgtacctacaaaggtcacaagacagttgtcactggagagcagatatgggagatccagaaggatcaacttctatacaatccattcttaaaaatgtgcctttcagcaaatggagagcatccaagtttagtgtcatgcaacccatcagatccactccaaaaatggatacttagccaaaatgattaagtgttccttaaaattaagttgaaaaaggaaatattctttctcataaaactgtgactaggcatacactgtagtttttgaaaattatgcaaaagcagctaaatgtaacttattccaagtgcatttttcttatttatatctttatgtagcactactacagaaattctgcaagtttctgtttcaaagcacaataactagtaataccaaagactatttcaaaatgtccagatgtaggggaagagatgtttacagtatgatgaaaataattttccaagtaaagtgatgtttgtgtgttttgtacacttagggatatatatatatagctacattcacacactcacaatttaaaatatttcccctagttttttggggggataggaagaaagatttgttactgtatttttttaactacataaaaatagatcaataaatgtcagcattggcctctgtgtacaaaccaagagcttttacagatccagaatttattagtttaaaatgcaggtgaacttttttttgcgtttggtttacttgtctgtcaaatgtttccttaaacatgaaactgaataaggagaagagtatttttaacacttaaatttcttggcaaattttaaaacattttttagtctgtaatacactccacttgaagcacttaagtcttccttaaatgacttttcttaagtaatgatactgtgtgttttcccaaagcacttttaaaaaaatttttataaattactatctgttgaaaaggtgtccttttcctttcttctagtatttttttcttaccaaaattcactaatcttgaatgtttgtgatattaaatttcaaatgcagaatacttgactcatttaaagctaaattttgttactgattcaattataattgtaatggatttttgactttgtaatggattcttttcatcaaaaagccttatttttttatctatgtggaaaacacaataaaaaatcctcaacactattgtaatcatttggttaagtttttttcctcttttgggtaaaatctgtaattgataataggtgggggaaaatgaattttgtatgctgaatttctaagcgcctattgtttgtaaaaccatcagatatttcttatggcacaaaaaatgaggaatagcaaaattcctgtgttcaatatttagaaaattttgtattaatttctgataaagttccttaagcatc

SEQ ID NO: 6480 - DNA, 451 bp, Homo sapiens
gcggccgcgcggagcggggagccgccagcctgcgccccgtccgcgggtctatgggaagttcggggacttgacagccgctgccgccgcagggcatttttggtcgaagagagctgaagtaatgagaagacatcatggaggcccagtcccacagctccacgaccactgaaaagaaaaaagttgagaattccatagtgaagtgctccactcgaacagatgtgagcgagaaagccgttgcctccagcaccacttctaatggcaaccatttggaggcccaggccagaggctggaccaggaggattggatgcatccgcgctgtccatccctgctgctgcacaaacgactcagccacagatcctcttggatgggctaccttgaaagggggaagctccaaagaatgcgtacaaacccatacatttacctaggtgcgggatgattgcaagaccactttatt

SEQ ID NO: 6481 - DNA, 2887 bp, Homo sapiens
tacaacttcaggaatgatggccgctgccattatatgaccatccacaatgtgaccccagacgatgaaggtgtctactcggtcatcgctcggctggagccaagaggtgaagcaagaagcacggcagagctgtacctaacgacgaaagaaatcaaacttgagctgaagcctcctgatattcctgactccagagttccaatcccaaccatgcctatcagagcagtgccaccagaagaaatccctcctgtggttgctcctcctatcccccttttgctaccaacacccgaagaaaagaaaccaccaccaaaacgtattgaagttaccaaaaaggctgtgaagaaagatgccaaaaaagttgttgcaaagcccaaagagatgacaccacgtgaagagattgtcaagaagcctccacctcctactaccttaattccagcaaaagctcctgaaatcattgatgtatcctctaaagctgaagaagtaaaaataatgactataaccagaaagaaagaggttcagaaagaaaaagaagctgtgtatgagaaaaagcaagcagtccacaaggagaagagagtcttcattgaatctttcgaagaaccttatgacgaactggaggtagaaccatacacagagccatttgaacaaccttattatgaagaaccagatgaagactatgaagagattaaggtagaagctaaaaaagaagttcacgaggaatgggaagaagattttgaagaagggcaagaatactatgaaagggaagaaggctatgacgaaggggaggaagagtgggaagaggcttaccaagaaagggaagtaattcaagttcaaaaggaggtctatgaagaatcacatgagagaaaagttccagccaaagtacctgaaaagaaagcaccaccacctcctaaagttataaagaagccagtaattgaaaaaattgaaaagacttctcgaagaatggaggaagaaaaagttcaagtcaccaaagtacctgaagtttcaaagaagattgttccacaaaaaccttcccggactccagtacaggaagaagttattgaagtgaaagtaccagctgtgcatacaaagaagatggttatttcagaagaaaagatgttctttgcttctcacacagaggaggaggtgtcagtcacagtccccgaggtacaaaaggaaattgttactgaagagaaaattcacgttgccatttccaaaagggttgaaccaccacctaaagtccctgagctacctgagaaaccagctccagaagaagtggcccctgttcctatccctaaaaaagtggagcccccagcaccaaaagttcctgaggttcccaagaaacccgtgccagaggagaaaaagccagttcctgtgcctaagaaggaacctgctgctcccccaaaagtcccagaggtgccaaagaaacctgtccctgaagaaaagattcccgttcctgttgcaaagaaaaaggaagctcccccagctaaagttcctgaagtacagaagggagttgtgacagaagaaaaaataaccattgtaactcaaagagaggaatctccaccaccagcagtgccagaaataccaaagaagaaagttcctgaagaaaggaaacctgttcctcggaaggaggaagaagttccaccaccaccaaaagtgccagctctgcctaagaaacccgtcccagaggagaaagttgcagtgccagttcctgtcgctaagaaagctcctcctccccgagaagtaactataatggaagagaaagaaagggcttataccctagaagaagaagctgtttcagtacaacgggaagaagaatatgaggaatatgaagaatatgattataaagaatttgaggagtatgaaccaacagaagaatatgaccaatatgaagaatacgaggagcgggagtatgaacgatatgaagagcatgaagaatacatcacagaaccagagaagcctatccctgtaaagcctgtcccagaagaaccagttcccacaaaaccaaaggccccaccggctaaagttcctgaagtgcccaagaaacctgtgccagaggagaaagtaccagtaccagttcctaaaaaggtggaagctccacctgccaaagtgccagaggtacccaagaagcctgtgcctgagaagaaggtgccagttcctgctcctaagaaagtggaggctccacctgcaaaagtgccagaggtgcccaagaagctcatcccagaagaaaagaaaccaacacctgttccgaaaaaagtggaagcaccaccacccaaagtgactgaggagcctgaagaagagcctatttcagaagaagaaatcccagaagaaccacctagcatagaggaagttgaagaggtggcaccacctagagtgcctgaagtgattaagaaagcagtacctgaagcacctactcctgttcctaaaaaagtggaggcaccaccagctaaagtgcctggaggtgaaaagaaagttcgcaaattacttccggaacgtaaacctgaaccaaaggaagaagttgttctgaaaagcgttctaagaaaaagacctgaagaagaagaacctaaagtagaacctaaaaaactagaaaaagttaaaaaacctgcagtaccagaaccaccacctccaaaacctgttgaagaggttgaagtacctactgttacaaaaagggaaaggaagattcctgaaccaacaaaagtgcctgaaatcaagccagcaatacctctccctgcacctgaaccgaaaccaaagcccgaagcagaagtgaaaacaatcaaaccacctcctgtggaacctgaaccaacccccatcgctgccccagtaacagtgccagtggttggaaagaaagcaggtgtacccaaaaagactccttcaccaatagaagccgaaaggagaaagt

SEQ ID NO: 6482 - DNA, 5782 bp, Homo sapiens
cgtcgagaacggaggacaccggcggtccagggtcctgggcagtcgcgccagagctgagcggagggcgcggcgcgagaacgaatctttgtgacattctctctcagcattctttatcccctgtttgctgaagacttcgacaaaagctggtcttagctgttggcattctcctgagaaaaggatagcttcagaaatcagaaaaacatttgggaggtgtctagcccagtggaccttctgaagagcaatgctaagaagacgtttggtttaaagaattaaaaggaagaacaacttaagagcttcttcaaagtttcccgcatgaaaattacttaaacgttgcacacaacgtttcacaaaatcttttgtgaaagaagaaaaggaaattcagtgtgtgagtctcagcaggagttaagctaatgcagcttaaaataatgccgaaaaagaagcgcttatctgcgggcagagtgcccctgattctcttcctgtgccagatgattagtgcactggaagtacctcttgatccaaaacttcttgaagacttggtacagcctccaaccatcacccaacagtctccaaaagattacattattgaccctcgggagaatattgtaatccagtgtgaagccaaagggaaaccgcccccaagcttttcctggacccgtaatgggactcattttgacatcgataaagaccctctggtcaccatgaagcctggcacaggaacgctcataattaacatcatgagcgaagggaaagctgagacctatgaaggagtctatcagtgtacagcaaggaacgaacgcggagctgcagtttctaataacattgttgtccgcccatccagatcaccattgtggaccaaagaaaaacttgaaccaatcacacttcaaagtggtcagtctttagtacttccctgcagacccccaattggattaccaccacctataatattttggatggataattcctttcaaagacttccacaaagtgagagagtttctcaaggtttgaatggggacctttatttttccaatgtcctcccagaggacacccgcgaagactatatctgttatgctagatttaatcatactcaaaccatacagcagaagcaacctatttctgtgaaggtgatttcagctaaatcaagtagagagaggccaccaacatttttaactccagaaggcaatgcaagtaacaaagaggaattaagaggaaatgtgctttcactggagtgcattgcagaaggactgcctaccccaattatttactgggcaaaggaagatggaatgctacccaaaaacaggacagtttataagaactttgagaaaaccttgcagatcattcatgtttcagaagcagactctggaaattaccaatgtatagcaaaaaacgcattaggagccatccaccataccatttctgttagagttaaagcggctccatactggatcacagcccctcaaaatcttgtgctgtccccaggagaggatgggaccttgatctgcagagctaatggcaaccccaaacccagaattagctggttaacaaatggagtcccaatagaaattgcccctgatgaccccagcagaaaaatagatggcgataccattattttttcaaatgttcaagaaagatcaagtgcagtctatcagtgcaatgcctctaatgaatatggatatttactggcaaacgcatttgtaaatgtgctggctgagccaccacgaatcctcacacctgcaaacacactctaccaggtcattgcaaacaggcctgctttactagactgtgccttctttgggtctcctctcccaaccatcgagtggtttaaaggagctaaaggaagtgctcttcatgaagatatttatgttttacatgaaaatggaactttggaaattcctgtggcccaaaaggacagtacaggaacttatacgtgtgttgcaaggaataaattagggatggcgaagaatgaagttcacttagaaatcaaagatcctacatggatcgttaaacagcccgaatatgcagttgtgcaaagagggagcatggtgtcctttgaatgcaaagtgaaacatgatcacaccttatccctcactgtcctgtggctgaaggacaacagggaactgcccagtgatgaaaggttcactgttgacaaggatcatctagtggtagctgatgtcagtgacgatgacagcgggacctacacgtgtgtggccaacaccactctggacagcgtctccgccagcgctgtgcttagcgttgttgctcctactccaactccagctcccgtttacgatgtcccaaatcctccctttgacttagaactgacagatcaacttgacaaaagtgttcagctgtcatggaccccaggcgatgacaacaatagccccattacaaaattcatcatcgaatatgaagatgcaatgcacaagccagggctgtggcaccaccaaactgaagtttctggaacacagaccacagcccagctgaagctgtctccttacgtgaactactccttccgcgtgatggcagtgaacagcattgggaagagcttgcccagcgaggcgtctgagcagtatttgacgaaagcctcagaaccagataaaaaccccacagctgtggaaggactgggatcagagcctgataatttggtgattacgtggaagcccttgaatggtttcgaatctaatgggccaggccttcagtacaaagttagctggcgccagaaagatggtgatgatgaatggacatctgtggttgtggcaaatgtatccaaatatattgtctcaggcacgccaacctttgttccatacctgatcaaagttcaggccctgaatgacatggggtttgcccccgagccagctgtagtcatgggacattctggagaagacctcccaatggtggctcctgggaacgtgcgtgtgaatgtggtgaacagtaccttagccgaggtgcactgggacccagtacctctgaaaagcatccgaggacacctacaaggctatcggatttactattggaagacccagagttcatctaaaagaaacagacgtcacattgagaaaaagatcctcaccttccaaggcagcaagactcatggcatgttgccggggctagagccctttagccactacacactgaatgtccgagtggtcaatgggaaaggggagggcccagccagccctgacagagtctttaatactccagaaggagtccccagtgctccctcgtctttgaagattgtgaatccaacactggactctctcactttggaatgggatccaccgagccacccgaatggcattttgacagagtacaccttaaagtatcagccaattaacagcacacatgaattaggccctctggtagatttgaaaattcctgccaacaagacacggtggactttaaaaaatttaaatttcagcactcgatataagttttatttctatgcacaaacatcagcaggatcaggaagtcaaattacagaggaagcagtaacaactgtggatgaagctggtattcttccacctgatgtaggtgcaggcaaagcgatggcaagccggcaggtggatattgcaactcagggctggttcattggtctgatgtgtgctgttgctctccttatcttaattttgctgattgtttgcttcatcagaagaaacaagggtggtaaatatccagttaaagaaaaggaagatgcccatgctgaccctgaaatccagcctatgaaggaagatgatgggacatttggagaatacagtgatgcagaagaccacaagcctttgaaaaaaggaagtcgaactccttcagacaggactgtgaaaaaagaagatagtgacgacagcctagttgactatggagaaggggttaatggccagttcaatgaggatggctcctttattggacaatacagtggtaagaaagagaaagagccggctgaaggaaacgaaagctcagaggcaccttctcctgtcaacgccatgaattcctttgtttaatttttaagctctttgccaatattccatttctctagaatgtttatcctaagcacttgtttgtcagccctctcatactatgaacatatgggtagagagtatattttctgctgtatgttagtattatgagaatagttacagcaaaaacataactcagtcaaatgatatgttaatatgaactggaatgcaaagtgcatactttttcattcaaaatgggtattcttgatttcctcagaactgataaaaaataatgcaacatcaccaacagatcctgttatttcctctgcaggatacagttcaatatgatgcatgaaaaatgctccacatttaaaggacatacccgtgtatgttatgaaaacatggtttgatactttgtttatactaccctcagctgaacccctatatatgaattccgttttcattgtcaagaatgttactgtagtattctctagaacttcaatgtctttgtggacattgttgtgaaattggtgactatgtatagctgtcgttagtctttttgggagactgttaggaacagtttgtacagtatatacttgctaaatgagttcattatgacagtcacattgctgatgcttactgagaactattacctactcttggctcctgttactccgtaggcttcttaatcttccaggcattacagcagcacagtgttctactttttacatcatttctatgttcggttgtttttaggcataaacaatgtgtattgcagtgcatttcggcatttgtgccatactgaaagaatcaaaaacaaatcatccaaattaaatttcaaacattatttcagagaacacagggcaagacacatacagtgccttcagatattaagcattccacaacatcgtgcattctgtatcagctggtccagtccattctgggtcctagattactgtcattgtctaaaagtaacttttaaaaagcagagttcatgaaaactgcaatgctgggaaaagaaggaaacatgaaaataaaaataagacagtttattagaaatagcatttcctcataagcataaaaagaaaatctttgttgccaactgaagcacatgatgattttgtggtcctttatggtttctattacattcagtaagaaagatgtcaacatgctagaaaattaattttaaaactaagttattccaacactaaaagcatacaacagcatgccaacagtaatatattattctccaagactttacctatgtaagtgttcaaaactctgcagcattaaacaacgtgtatgcaaattgttatggatacatttcagaatctaagaaatcaggcaagtgcttaaaaggccaacggtccaagggattacatctgcagtttaaaaagtaaatatatattctatcgtattcataaacaatatctatcaaatgggttacctccaaatatgaaaatctataacaacctatggttgaaggaatgctcagtttcatttgccaataaattggtttctcataacttgcatcaagtttaattttaagtaaagctttttatatgtagatattttgttgaatttgtaaatacacttaaaatgtagatgctatatgcttataggtgttacatacaaataaacatgcaatgtttatgttgtactgtataagaggtaagctaattaatgcagtgaatgggattggaaagcatctacttaaatatctattgggttcccccctccccccaccttttttgctgtgaaactgaaatagtgaacttttctacgtattgacagcagatttttcgatgaaatcttcagagctttgcctatggggcaca

SEQ ID NO: 6483 - DNA, 4891 bp, Homo sapiens
tttgtctggcagcgttggttctatgggggtgtgtgatgataataatacgcgggcttatataaccgtcttcatcttgcgagcacttcgcagaccgtcgctaatgaatcttggggccggtgtcgggccggggcggcttgatcggcaactaggaaaccccaggcgcagaggccaggagcgagggcagcgaggatcagaggccaggccttcccggctgccggcgctcctcggaggtcagggcagatgaggaacatgactctcccccttcggaggaggaaggaagtcccgctgccaccttatctctgctcctctgcctcctccctgttcccagagctttttctctagagaagattttgaaggcggcttttggattcttcacttctcttgaacaaggaactcactcagagactaacacaaaggaagtaatttcttacctggtcattatttagtctacaataagttcatccttcttcagtgtgaccagtaaattcttcccatactcttgaagagagcataattggaatggagaggtgctgacggccacccaccatcatctaaagaagataaacttggcaaatgacatgcaggttcttcaaggcagaataattgcagaaaatcttcaaaggaccctatctgcagatgttctgaatacctctgagaatagagattgattattcaaccaggatacctaattcaagaactccagaaatcaggagacggagacattttgtcagttttgcaacattggaccaaatacaatgaagtattcttgctgtgctctggttttggctgtcctgggcacagaattgctgggaagcctctgttcgactgtcagatccccgaggttcagaggacggatacagcaggaacgaaaaaacatccgacccaacattattcttgtgcttaccgatgatcaagatgtggagctggggtccctgcaagtcatgaacaaaacgagaaagattatggaacatgggggggccaccttcatcaatgcctttgtgactacacccatgtgctgcccgtcacggtcctccatgctcaccgggaagtatgtgcacaatcacaatgtctacaccaacaacgagaactgctcttccccctcgtggcaggccatgcatgagcctcggacttttgctgtatatcttaacaacactggctacagaacagccttttttggaaaatacctcaatgaatataatggcagctacatcccccctgggtggcgagaatggcttggattaatcaagaattctcgcttctataattacactgtttgtcgcaatggcatcaaagaaaagcatggatttgattatgcaaaggactacttcacagacttaatcactaacgagagcattaattacttcaaaatgtctaagagaatgtatccccataggcccgttatgatggtgatcagccacgctgcgccccacggccccgaggactcagccccacagttttctaaactgtaccccaatgcttcccaacacataactcctagttataactatgcaccaaatatggataaacactggattatgcagtacacaggaccaatgctgcccatccacatggaatttacaaacattctacagcgcaaaaggctccagactttgatgtcagtggatgattctgtggagaggctgtataacatgctcgtggagacgggggagctggagaatacttacatcatttacaccgccgaccatggttaccatattgggcagtttggactggtcaaggggaaatccatgccatatgactttgatattcgtgtgcctttttttattcgtggtccaagtgtagaaccaggatcaatagtcccacagatcgttctcaacattgacttggcccccacgatcctggatattgctgggctcgacacacctcctgatgtggacggcaagtctgtcctcaaacttctggacccagaaaagccaggtaacaggtttcgaacaaacaagaaggccaaaatttggcgtgatacattcctagtggaaagaggcaaatttctacgtaagaaggaagaatccagcaagaatatccaacagtcaaatcacttgcccaaatatgaacgggtcaaagaactatgccagcaggccaggtaccagacagcctgtgaacaaccggggcagaagtggcaatgcattgaggatacatctggcaagcttcgaattcacaagtgtaaaggacccagtgacctgctcacagtccggcagagcacgcggaacctctacgctcgcggcttccatgacaaagacaaagagtgcagttgtagggagtctggttaccgtgccagcagaagccaaagaaagagtcaacggcaattcttgagaaaccaggggactccaaagtacaagcccagatttgtccatactcggcagacacgttccttgtccgtcgaatttgaaggtgaaatatatgacataaatctggaagaagaagaagaattgcaagtgttgcaaccaagaaacattgctaagcgtcatgatgaaggccacaaggggccaagagatctccaggcttccagtggtggcaacaggggcaggatgctggcagatagcagcaacgccgtgggcccacctaccactgtccgagtgacacacaagtgttttattcttcccaatgactctatccattgtgagagagaactgtaccaatcggccagagcgtggaaggaccataaggcatacattgacaaagagattgaagctctgcaagataaaattaagaatttaagagaagtgagaggacatctgaagagaaggaagcctgaggaatgtagctgcagtaaacaaagctattacaataaagagaaaggtgtaaaaaagcaagagaaattaaagagccatcttcacccattcaaggaggctgctcaggaagtagatagcaaactgcaacttttcaaggagaacaaccgtaggaggaagaaggagaggaaggagaagagacggcagaggaagggggaagagtgcagcctgcctggcctcacttgcttcacgcatgacaacaaccactggcagacagccccgttctggaacctgggatctttctgtgcttgcacgagttctaacaataacacctactggtgtttgcgtacagttaatgagacgcataattttcttttctgtgagtttgctactggctttttggagtattttgatatgaatacagatccttatcagctcacaaatacagtgcacacggtagaacgaggcattttgaatcagctacacgtacaactaatggagctcagaagctgtcaaggatataagcagtgcaacccaagacctaagaatcttgatgttggaaataaagatggaggaagctatgacctacacagaggacagttatgggatggatgggaaggttaatcagccccgtctcactgcagacatcaactggcaaggcctagaggagctacacagtgtgaatgaaaacatctatgagtacagacaaaactacagacttagtctggtggactggactaattacttgaaggatttagatagagtatttgcactgctgaagagtcactatgagcaaaataaaacaaataagactcaaactgctcaaagtgacgggttcttggttgtctctgctgagcacgctgtgtcaatggagatggcctctgctgactcagatgaagacccaaggcataaggttgggaaaacacctcatttgaccttgccagctgaccttcaaaccctgcatttgaaccgaccaacattaagtccagagagtaaacttgaatggaataacgacattccagaagttaatcatttgaattctgaacactggagaaaaaccgaaaaatggacggggcatgaagagactaatcatctggaaaccgatttcagtggcgatggcatgacagagctagagctcgggcccagccccaggctgcagcccattcgcaggcacccgaaagaacttccccagtatggtggtcctggaaaggacatttttgaagatcaactatatcttcctgtgcattccgatggaatttcagttcatcagatgttcaccatggccaccgcagaacaccgaagtaattccagcatagcggggaagatgttgaccaaggtggagaagaatcacgaaaaggagaagtcacagcacctagaaggcagcgcctcctcttcactctcctctgattagatgaaactgttaccttaccctaaacacagtatttctttttaacttttttatttgtaaactaataaaggtaatcacagccaccaacattccaagctaccctgggtacctttgtgcagtagaagctagtgagcatgtgagcaagcggtgtgcacacggagactcatcgttataatttactatctgccaagagtagaaagaaaggctggggatatttgggttggcttggttttgattttttgcttgtttgtttgttttgtactaaaacagtattatcttttgaatatcgtagggacataagtatatacatgttatccaatcaagatggctagaatggtgcctttctgagtgtctaaaacttgacacccctggtaaatctttcaacacacttccactgcctgcgtaatgaagttttgattcatttttaaccactggaatttttcaatgccgtcattttcagttagatgattttgcactttgagattaaaatgccatgtctatttgattagtcttatttttttatttttacaggcttatcagtctcactgttggctgtcattgtgacaaagtcaaataaacccccaaggacgacacacagtatggatcacatattgtttgacattaagcttttgccagaaaatgttgcatgtgttttacctcgacttgctaaaatcgattagcagaaaggcatggctaataatgttggtggtgaaaataaataaataagtaaacaaaa

SEQ ID NO: 6484 - DNA, 5268 bp, Homo sapiens
tcggtcctcagaggaggggcccgggcaccctccgtgcgggccgcagcacgccggtctttgagggacccttggactcccggatctgcatgcgagggatgcggtcgaagacgagatgagggagctgacgggaggggaaacggaggggcaggtgaacatggagagagcaggaacagggagagagtagggacagcgactgggagacgcgctccacagaaacccggactgagaggcagcgagaggacgtagtcttgctctgttgcctaggctggagtagagtggtgtgatcttggctcactgcaacctccgcctcccaggttcaagcgattctcctgcctcagcctcccaagtagttgggattacagacatctgaatgggactccgagtgccttacatccctgcagccccttcctcttcctacacccccagcagcaaatgaggcacacctgcagacagcagctatctctctgtggacagtggtggccgccgtgcaggctatagagaggaaggtggagatccacagccggcgactcctacacctggaaggtcggacagggacagcagagaagaaactagccagctgtgaaaagacagttaccgagcttgggaaccagctggagggcaagtgggccgtgctgggaaccctgctgcaggagtacgggctgctgcagaggcggctggagaacttggagaacctgctgcgcaacaggaacttctggatcctgcggctccctccaggtattaagggagatatcccaaaggtgcctgtggcatttgatgatgtctccatctacttttccactccagagtgggaaaaattagaagaatggcaaaaggaactttacaagaatatcatgaagggcaactacgagtctctcatctccatggattatgctataaatcaacctgatgtcttatctcagattcaaccagaaggggaacataatacagaggaccaggcagggccagaggaaagtgagattcccacagaccccagtgaagagcctggtatttcaacatcagatattctgtcttggattaaacaagaagaagagcctcaggttggggccccaccggagtccaaggagagtgacgtgtacaaaagcacttatgctgatgaagagcttgtcatcaaagctgaaggccttgctagatcctcgttgtgccctgaggttccagtccctttctcttctccaccagcagcagcaaaggatgctttttcagatgtggctttcaaaagccagcagtctacatccatgacaccttttggacgtccagccactgacctgcctgaagcctctgagggacaagtgacttttactcagttgggtagctatcccctcccacctccagttggcgagcaggtgttctcatgccaccactgtggcaagaatctcagccaagacatgttgctgacccaccaatgtagccatgctactgagcaccccttaccctgtgcccagtgccctaagcactttactccacaggcggacctcagcagcacctcccaggaccatgccagcgagacaccccccacctgcccacactgtgccaggacttttactcacccatcaagacttacctaccatcttcgggtccataacagcactgagcgtcctttcccctgtcctgattgccccaagcgctttgctgaccaggctcgactcaccagccaccggagagctcatgcaagcgaaaggcccttccgctgtgcccagtgcggcaggagcttcagcttgaaaatcagcctcctgctccaccagcggggtcatgcacaagagcgccctttctcctgccctcagtgtggcattgacttcaacggccactcggccctgatccgccaccagatgatccacacaggcgagcgtccttacccctgcactgactgcagtaagagcttcatgcgcaaggagcacctgctgaaccaccggcggctgcacacaggcgagcggcccttcagttgtcctcactgtggcaagagcttcatccgcaagcaccacctaatgaaacaccagcgcatccacaccggggagcggccctacccctgctcctactgtggcaggagcttccgctacaaacagacactcaaggaccacctccgttcaggccacaatggaggctgtgggggtgatagtgacccatcaggtcagccacccaacccaccaggtcccctcataactgggcttgaaacttctggcctgggtgtcaacactgaaggtctagagaccaaccagtggtatggggaagggagtggagggggagttttgtaaatccaaatctctgtggcttcatgcttgtatatgctcacagcagggcacaaaatccaagagaaggtctgtgagccccatccaacacccacagtaattattatctggcacatcaatgaatttggggtcctatacacttgactagagacatgcttgtgttttggaatttcacacccttacaagaataccacattttgaaacccagaaagacctggaaaggagcccagcatgtccatcttttcaaagatacaacaaaagcagaagttacaagaatattgcggagaggttggaaagcaggatttaacctctagttctcttgttctcagagaacagcaggttgatagtagattatgtctctaggtagagacagatacatgagaagagcctccaaaactggaagcccatcataaggcatgagaatgtttaactataaagccttttattagttctttgatagctaagatggttgttggagaaagtgcttaagccactgtttatgttgctgcctcctctctcaaaaccagccaagatctgttcacacacctctgtggctgtctttccctgaaacatggtaactcaagactgcctgcctaggtttcttagattaattattcacataaattttgtttaatattggttgaacaagaaatctgactttaaaagattattaaggagaatattccttaactatactggcttgatttgaaacaggctcttattgccatttaaactgccagaaatctttgccaaggtcctggttaaaaaaattggaaacggttttcttagccccagctttaaaagctagagatctcagagaaatagctggcttaacaatgacagaacagcttaaaatttgtgcctacaccatgttctgagagtcgttcacatcaaattcttatcttttccaagccagtaagttggcttctccattcctggtgtctgatattcttgacaatcatcagcaacaaagatcacagcactttccagaagcatggagcttcagaaagtgccagtgaactcttggtcctcagtagtgagatgataacagtgttataatgcagcttccttgagccatcagagagagtgtatgttcaccctatctggctgtatcccattggcagtggacagattgaggaaattcctagatcactgagagctaagcaccatgcatagacaacagtttgttcttgcctgtgttgcttttagggactttgactaccacatgttcttttcttggggtgatttaatcacctgggagcatctgagtctgctcctaagtggctttgcaactgggcctaagttctgtttcctttatggatctcaaattttcatctgcacaatgaggctgttgaaaggaaaaaaagtgagcctctaggaattattcaaaaaaagtctgtgatacattccttttcctgccaaagttctgtctctgtctttggcttctgtccaggcaaagctaaataagacagcaaagtcaaagcagataaattcttgttgaaacttgactaaaatttatttgatttgttgttttactcccacttggaatcctgaggtagaagacagaatgcagaagtcttacatcttgggcaggaaactggtttattcctatactcttgtttcctctgcttcttcctgaggtctagaacaaggtctggaaatgtttagacaggatattttcttgatgaagtgataaggaaaggacccatttttttgctcatcacctagcccatccttcactctctctagttatgcataacaacactagaagaaggtgttagcccagctaactttgcttctgggaaggctatgtctgaacatgttgctctgtaggataatcacacttagaaaacatctgctccatgacattcacaataccagggaccatgggagacacaagaaatgtgtgtctgctgtcataacttacagtgaaaaagcccaataatacagaacaagacatgatgggcaataccctagcatattgggattaagagctttctagccagaatctggacctataccatgggaaaatttaggggtgctgggaatcccaaagccaaggttctggcttcattggcaacccactaggaacttgaatgtgagattcagctctagtttgcaccttgatttccccagtgaaaagggagaagagccaaagtattgtctaggtgctgagttcccttttctgagtggatttcaagcatttgccagggtatgctggaggagggactcctaaagtaggtgagatgtgggactaggtaacactttaaatacttttttactcaaagatttgccaagaacacagcttattagtgaaagagacctgtggattgaaatggctgcagatagatcccgcagtcccttctgaaaggaactgtgtagccagcagggacctaaactttggcaaaaagtgaacacaattcaaatacgaatgaaggaagagccctcagatggaacgaaaggcgatgtgcaaggccatcccagagagacggaagcaggtgcgatactaagcctcagcccaagaataaaagagagttcaactgttactcttttctttcatcaatcccctatcagttagaactgcaggccagttccaaagagtgtttgcttaagattcaaaagtgggtaagtaaaatggatcagtgggaaggataaggtgtccaacagaaagtgtggaggagaaactcttggcctatcaagtgctcctgagagaaaccatgcaatttaacacttcagttaaagaaatacatgagaactgcttgtcatgaccagacaagataggaaaggggaaaccccagaaacgtgctcttcatctgtcagccttttggaccaagaagctgtcactatcacacataagcaccattcccttagagtggatccaggtgttgactataaccagatttactctttgcttactaggttttccattgtcaccattggatgaacctctggtttagccacagttgtgaaaataaatggaagttggttgattgtctagaaagtgcaa

SEQ ID NO: 6485 - DNA, 433 bp, Homo sapiens
tgaagctgacagcattcgggccgagatgtctcgctccgtggccttagctgtgctcgcgctactctctctttctggcctggaggctatccagcgtactccaaagattcaggtttactcacgtcatccagcagagaatggaaagtcaaatttcctgaattgctatgtgtctgggtttcatccatccgacattgaagttgacttactgaagaatggagagagaattgaaaaagtggagcattcagacttgtctttcagcaaggactggtctttctatctcttgtactacactgaattcacccccactgaaaaaatgagtatgcctgccgtgtgaaccatgtgactttgtcacagcccaagatagttaagtgggatcgagacatgtaagcagcatcatggaggtttgaagatgccgcatttggattggatgaattcc

SEQ ID NO: 6486 - DNA, 2515 bp, Homo sapiens
ggaaaacggccagcctgaggagctgctgcgagggtccgcttcgtctttcgagagtgactcccgcggtcccaaggctttccagagcgaacctgtgcggctgcaggcaccggcgtgttgagtttccggcgttccgaaggactgagctcttgtcgcggatcccgtccgccgtttccagcccccagtctcagagcggagcccacagagcagggcaccggcatggccaaagccgcggcgatcggcatcgacctgggcaccacctactcctgcgtgggggtgttccaacacggcaaggtggagatcatcgccaacgaccagggcaaccgcaccacccccagctacgtggccttcacggacaccgagcggctcatcggggatgcggccaagaaccaggtggcgctgaacccgcagaacaccgtgtttgacgcgaagcggctgatcggccgcaagttcggcgacccggtggtgcagtcggacatgaagcactggcctttccaggtgatcaacgacggagacaagcccaaggtgcaggtgagctacaagggggagaccaaggcattctaccccgaggagatctcgtccatggtgctgaccaagatgaaggagatcgccgaggcgtacctgggctacccggtgaccaacgcggtgatcaccgtgccggcctacttcaacgactcgcagcgccaggccaccaaggatgcgggtgtgatcgcggggctcaacgtgctgcggatcatcaacgagcccacggccgccgccatcgcctacggcctggacagaacgggcaagggggagcgcaacgtgctcatctttgacctgggcgggggcaccttcgacgtgtccatcctgacgatcgacgacggcatcttcgaggtgaaggccacggccggggacacccacctgggtggggaggactttgacaacaggctggtgaaccacttcgtggaggagttcaagagaaaacacaagaaggacatcagccagaacaagcgagccgtgaggcggctgcgcaccgcctgcgagagggccaagaggaccctgtcgtccagcacccaggccagcctggagatcgactccctgtttgagggcatcgacttctacacgtccatcaccagggcgaggttcgaggagctgtgctccgacctgttccgaagcaccctggagcccgtggagaaggctctgcgcgacgccaagctggacaaggcccagattcacgacctggtcctggtcgggggctccacccgcatccccaaggtgcagaagctgctgcaagacttcttcaacgggcgcgacctgaacaagagcatcaaccccgacgaggctgtggcctacggggcggcggtgcaggcggccatcctgatgggggacaagtccgagaacgtgcaggacctgctgctgctggacgtggctcccctgtcgctggggctggagacggccggaggcgtgatgactgccctgatcaagcgcaactccaccatccccaccaagcagacgcagatcttcaccacctactccgacaaccaacccggggtgctgatccaggtgtacgagggcgagagggccatgacgaaagacaacaatctgttggggcgcttcgagctgagcggcatccctccggcccccaggggcgtgccccagatcgaggtgaccttcgacatcgatgccaacggcatcctgaacgtcacggccacggacaagagcaccggcaaggccaacaagatcaccatcaccaacgacaagggccgcctgagcaaggaggagatcgagcgcatggtgcaggaggcggagaagtacaaagcggaggacgaggtgcagcgcgagagggtgtcagccaagaacgccctggagtcctacgccttcaacatgaagagcgccgtggaggatgaggggctcaagggcaagatcagcgaggcggacaagaagaaggttctggacaagtgtcaagaggtcatctcgtggctggacgccaacaccttggccgagaaggacgagtttgagcacaagaggaaggagctggagcaggtgtgtaaccccatcatcagcggactgtaccagggtgccggtggtcccgggcctgggggcttcggggctcagggtcccaagggagggtctgggtcaggccctaccattgaggaggtggattaggggcctttgttctttagtatgtttgtctttgaggtggactgttgggactcaaggactttgctgctgttttcctatgtcatttctgcttcagctctttgctgcttcacttctttgtaaagttgtaacctgatggtaattagctggcttcattatttttgtagtacaaccgatatgttcattagaattctttgcatttaatgttgatactgtaagggtgtttcgttccctttaaatgaatcaacactgccaccttctgtacgagtttgttttttttttttttttttttttgcttggcgaaaacactacaaaggctgggaatgtatgtttttataatttgtttatttaaatatgaaaaataaaatgttaaactttt

SEQ ID NO: 6487 - DNA, 5235 bp, Homo sapiens
caggaagggagcagaggcgagagccagcctccggcaggagggcgtagaccccggtgccagccagaacggctccagccttcccgcggccagagagccagcggcgggaggggacgggcgggacctccgcggacagccccgggtgcggaccagcgggcagcggccggcgagaccctccctggatccgcccagagcttaccggaccctgcgcgcccccgtcccggctcccggccggctcgggggagaaggcgcccgaggggaggcgccggacagatcgcgtttcggaggcggcgcaggtgctgtaaactgcaaaccataatcctgtcttaatactgcaaacaaatcatagtggaactaaggggaacttaatttactgtttccaggttaactaaggtctcagctgtaaaccaaaagtgagaggagacattaagattttcattcttaccgggttgtcttcttcctgaagagcaatggagccgcttttacttggaagaggactaatcgtatatctaatgttcctcctgttaaaattctcaaaagcaattgaaataccatcttcagttcaacaggttccaacaatcataaaacagtcaaaagtccaagttgcctttcccttcgatgagtattttcaaattgaatgtgaagctaaaggaaatccagaaccaacattttcgtggactaaggatggcaaccctttttatttcactgaccatcggataattccatcgaacaattcaggaacattcaggatcccaaacgaggggcacatatctcactttcaagggaaataccgctgctttgcttcaaataaactgggaatcgctatgtcagaagaaatagaatttatagttccaagtgttccaaaattcccaaaagaaaaaattgaccctcttgaagtggaggagggagatccaattgtcctcccatgcaatcctcccaaaggcctcccacctttacacatttattggatgaatattgaattagaacacatcgaacaagatgaaagagtatacatgagccaaaagggagatctatacttcgcaaacgtggaagaaaaggacagtcgcaatgactactgttgctttgctgcatttccaagattaaggactattgtacagaaaatgccaatgaaactaacagttaacagttcaaattccatcaagcaaagaaaacccaaactgctgttgcctcccactgagagtggcagtgagtcttcaattaccatcctcaaaggggaaatcttgctgcttgagtgttttgctgaaggcttgccaactccacaggttgattggaacaaaattggtggtgacttaccaaaggggagagaaacaaaagaaaattatggcaagactttgaagatagagaatgtctcctaccaggacaaaggaaattatcgctgcacagccagcaatttcttgggaacagccactcacgattttcacgttatagtagaagagcctcctcgctggacaaagaagcctcagagtgctgtgtatagcaccggaagcaatggcatcttgttatgtgaggctgaaggagaacctcaacccacaatcaagtggagagtcaatggctccccagttgacaatcatccatttgctggtgatgttgtcttccccagggaaatcagttttaccaaccttcaaccaaatcatactgctgtgtaccagtgtgaagcctcaaatgtccatggaactatccttgccaatgccaatattgatgttgtggatgtccgtccattgatacaaaccaaagatggagaaaattacgctacagtggttgggtacagtgctttcttacattgcgagttctttgcttcacctgaggcagtcgtgtcctggcagaaggtggaagaagtgaaacccctggagggcaggcggtatcatatctatgaaaatggcacattgcagatcaacagaaccaccgaagaagatgctgggtcttactcatgttgggtagaaaatgctataggaaaaactgcagtcacagccaatttggatattagaaatgctacaaaacttagagtttctcctaagaatcctcgtatccccaaattgcatatgcttgaattacattgtgaaagcaaatgtgactcacatttgaaacacagtttgaagttgtcctggagtaaagatggagaagcctttgaaattaatggcacagaagatggcaggataattattgatggagctaatttgaccatatctaatgtaactttagaggaccaaggtatttactgctgttcagctcatactgctctagacagtgctgccgatataactcaagtaactgttcttgatgttccggatccaccagaaaaccttcacttgtctgaaagacagaacaggagtgttcggctgacctgggaagctggagctgaccacaacagcaatattagcgagtatattgttgaatttgaaggaaacaaagaagagcctggaaggtgggaggaactgaccagagtccaaggaaagaaaaccacagttatcttacctttggctccatttgtgagataccagttcagggtcatagccgtgaacgaagtagggagaagtcagcctagccagccgtcagaccatcatgaaacaccaccagcagctccagataggaatccacaaaacataagggttcaagcctctcaacccaaggaaatgattataaagtgggagcctttgaaatccatggagcagaatggaccaggcctagagtacagagtgacctggaagccacagggagccccagtggagtgggaagaagaaacagtcacaaaccacacattgcgggtgatgacgcctgctgtctatgccccttatgatgtcaaggtccaggctatcaatcaactaggatctgggcctgaccctcagtcagtgactctctattctggagaagactatcctgatacagctccagtgatccatggggtggacgttataaacagtacattagttaaagttacctggtcaacagttccaaaggacagagtacatggacgtctgaaaggctatcagataaattggtggaaaacaaaaagtctgttggatggaagaacacatcccaaagaagtgaacattctaagattttcaggacaaagaaactctggaatggttccttccttagatgcctttagtgaatttcatttaacagtcttagcctataactctaaaggagctggtcctgaaagtgagccttatatatttcaaacaccagaaggagtacctgaacagccaacttttctaaaggtcatcaaagttgataaagacactgccactttatcttggggactacctaagaaattaaatggaaacttaactggctatcttttgcaatatcagataataaatgacacctacgagattggagaattaaatgatattaacattacaactccatcaaagcccagctggcacctctcaaacctgaatgcaactaccaagtacaaattctacttgagggcttgcacttcacagggctgtggaaaaccgatcacggaggaaagctccaccttaggagaagggagtaaaggtatcgggaagatatcaggagtaaatcttactcaaaagactcacccaatagaggtatttgagccgggagctgaacatatagttcgcctaatgactaagaattggggcgataatgatagcatttttcaagatgtaattgagacaagagggagagaatatgctggtttatatgatgacatctccactcaaggctggtttattggactgatgtgtgcgattgctcttctcacactactattattaactgtttgctttgtgaagaggaatagaggtggaaagtactcagttaaagaaaaggaagatttgcatccagacccagaaattcagtcagtaaaagatgaaacctttggtgaatacagtgacagtgatgaaaagcctctcaaaggaagccttcggtcccttaatagggatatgcagcctactgaaagtgctgacagcttagtcgaatacggagagggagaccatggtctcttcagtgaagatggatcatttattggtgcctacgctggatctaaggagaagggatctgttgaaagcaatggaagttctacagcaacttttccccttcgggcataaacacaacatatgtaagcaacgctactggttcaccccaaccttccatatttatctgttcaaaggagcaagaactttcatataggaatagaaacatgctggccgaagatttcatccagaagtcaacatcctgcaattatgttgaaaagagtagtactttcttcaaaatataaaatgccaagcacttcaggcctatgttttgcttatattgttttcaggtgctcaaaatgcaaaacacaaaacaaatcctgcatttagatacacctcaactaaatccaaagtccccattcagtatattccatatttgcctgattttactattcggtgtgtttgcatagatgttgctacttggtgggtttttctccgtatgcacattggtatacagtctctgagaactggcttggtgactttgcttcactacaggttaaaagaccataagcaaactggttatttaaaatgtaaaaaggaatatgaaagtcttattaaaacacttcattgaaaatatacagtctaaatttattatttaaattttactagcaaaagtcttaggtgaacaatcaactagtatttgttgagctcctatttgcccagagatggtcatatttaaacagaagtatacgtttttcagtttcaacatgaatttttttatttctgtcagttatgacatccacaagcatcactttttgtgtctgttttttttttttttcttggactaaattcaactgcatggaagcggtggtcagaaggttgttttatacgagaacaggcagaaagtgcccattgttcaggattctaatagctacatctacttaatatcttcatttctaaattgactgcttttacctttttctcatgtttatataatggtatgcttgcatatatttcatgaatacattgtacatattatgttaatatttacacaatttaaaatatagatgtgttttattttgaagtgagaaaatgaacattaacaggcatgtttgtacagctagaatatattagtaagatactgtttttcgtcattccagagctacaactaataacacgaggttccaaagctgaagactttgtataaagtatttgggttttgttcttgtattgctttctttcaacagtttcaaaataaaatatcatataaatattg

SEQ ID NO: 6488 - DNA, 11279 bp, Homo sapiens
ggagctgcacgcggggctgccggggcggacgctgctctgcctgcatccggaggcggccgccagcggatttgccacccagagcataaccttcggtggcaggacaaatcaggccagcacgcagtctgccaagtcctgctcgctccctgtcaagaaaaacagctggatccatttctaatcaacacttcccaacgcaacacttctgagtctctgaaggagaccagagcttgaaactttccagacttccaacagacatcgagtgcaaaaggatatttaggttgtctttgcacaaatctggttgatttgagagataaagggggggggaaccagtgtgactttcacctaagaagtcacatgaacatatttcacatttgaactacataatgaatgatggttattgaaatagcccaaacctctaccacagagcgagggatatagctcaaggggcaaccaggcagtcgcagaaccaaggaatggatgactacaagtatcaggacaattatgggggctatgctcccagtgatggctattaccgcggcaatgagtccaacccagaagaagatgcacagagtgatgtcaccgaaggccatgatgaggaagacgagatctatgagggcgagtaccagggtatccctcacccagatgatgtcaaggccaagcaggccaagatggcgccctccagaatggacagccttcggggccagacagacctgatggctgagaggctggaagatgaggagcagttggcccaccagtacgagaccatcatggatgagtgtggccatggccgcttccagtggatcctctttttcgtcttgggtttggccctgatggccgatggggtggaagtgttcgtggtgagttttgccctgcccagtgcagagaaggacatgtgtctgtccagttccaaaaaaggaatgctagggatgatagtctacttgggaatgatggcgggcgccttcatcctgggaggcctggctgataagctgggaaggaagcgagtcctcagcatgtctctggccgtcaatgcctccttcgcctccctctcttccttcgtgcagggatatggagccttcctcttctgccgactcatctcaggcatcggtattgggggtgctctaccgattgtttttgcctatttttctgaattcttgtctcgggagaagcgaggagaacacctcagttggctgggcatcttctggatgactgggggcctgtacgcatctgccatggcctggagcatcatcccacactatggctggggcttcagcatggggaccaattaccacttccatagctggagagtgtttgtcatcgtctgtgctctgccctgcaccgtgtccatggtggccctgaagttcatgccagagagcccaaggtttctgctagagatgggcaaacatgatgaagcctggatgattctcaagcaagtccatgacaccaacatgagagctaaggggaccccagagaaagtgttcacggtttccaacatcaaaactcccaagcaaatggatgaattcattgagatccaaagttcaacaggaacctggtaccagcgctggctggtcagattcaagaccattttcaagcaggtctgggataatgccctgtactgtgtgatggggccctacagaatgaatacactgattctggccgtggtttggtttgccatggcattcagttactatggactgacagtttggtttcctgatatgatccgctattttcaagatgaagaatacaagtctaaaatgaaggtgttttttggtgagcatgtgtacggcgccacaatcaacttcacgatggaaaatcagatccaccaacatgggaaacttgtgaatgataagttcacaagaatgtactttaaacatgtactctttgaggacacattctttgacgagtgctattttgaagacgtaacatcaacagatacctacttcaaaaattgtaccattgaatcaaccatcttttacaacacagacctctacgagcacaagttcatcaactgtcggtttatcaactccaccttcctggagcagaaggagggctgccacatggacttggagcaagataatgacttcctgatttacctcgtcagcttcctgggcagcctgtctgtcttacccgggaacatcatttctgccctgctcatggatagaattggaaggctcaagatgattggtggctccatgctaatctctgcagtctgctgcttcttcctgttttttggcaacagtgagtctgcaatgatcggctggcagtgcctgttctgtgggacaagcattgcagcctggaatgctctggatgtgatcacagtggagctgtatcccaccaaccagagagcaacagccttcggcattctcaatggattatgcaaatttggcgccatcctgggaaacaccatctttgcttcttttgttgggataaccaaagtggtccccatccttctggctgctgcttctctggttgggggtggcctgattgcccttcgactgccagagactcgagaacaggtcctgatgtgaacaacctatgggaaaaggaaaggtcgagagaatcttgtccaggacactgaaatgcatccacacttcctgcctatcacggtccggaggacaccttggatagcacgggaggagaagttgactttgtgacccctagtttaggacccacttcagctgtcaatatgtttgtaactcaggtgactgatttgggggtgccctgagccacccttagaatcacagagctgcgtgtttaacttcaagtcttcccagtccaaggcagggagaggattctccagtgagtgcacacactatgcgaggagcaagcatttctctaagtcaagtgcaaggacttaacttgcgtttgaaaaggaattagagggtcagaaacacccaggttcctccagaaagctccttggagcccaacaacttaacaaatcaacttggctggaagttagagtcattatatgaagattgggcttgaagtatatatttttgcatttaaaagtatcacctatcatattttccactcgaaaattgacatagtagcattgaggatactctgatctagaaagccaagtatttgagcaacatctatagagatctacttttctcctatgtctcctaggctttccatgataattaggtaatacatttaagaaggatatttatttctgttttgctctattcaaagaaacggaatgggatagttattctgtaaactaagtttgtatataactttatttgggtttaatttccacaactggtatctgcaaatattgccagcattttagccatattttgggagaacttggtgtttgaggtcccaggaaatgaggtctgatcaaatgaaatgcaagcacaatttcttacagccatttaactttctgttgggaggatgaattaacaaactcacattgtgcagtctgcttaatccaggcacttttctttgtgcaggtgtagtgagtagttacttctctcccttacacagatgacttgtgaaactcaagctcaccatcttcagtgctggcattttactttgccactacccaaaaacaatgtgagatgtgttcagtggcctctggtactctttgcaggcaagaatcaaacaacatggggactgagggaaggatggggaagtgtagccacagttcttccaaatgtaaatactttttgtttgttctagtggtaaaatgcaaatgcaatccatatttgttaggatggtcaggtctcatgagaaatctatgctatgtgtccagagcttttgaaacagagtccattggagtgggagttagggagtgtagtggatgccaaatatgtttttcttcagtgcttaagagaactgtttcctgaagtccagctttgaacataaacaggggtgtgggttgggggaggagcttaggacaaacctctctgatgaaggtcagcaatagactgaagtcttgactgcatggaagaggaaaaacatcagaactgtctgacaatggaggggacagtgagctacgcacaactgccagcggaggtgaacttgcacctgcccaggccggatgaacatcagcctgcaagaactagttgtttgagttgatttgcagtgctctcaatgggcaagtgccacattttccctggcagagatctccaaaaatttaaaacagaataataatggctatatcgagtgttttctcagtattggagaaatgcttaggtcctatgatagcttcgggacatctttctgtaattttcctcaattaacgggttggtaggggtaaatcttatgacacctttccaccgtcgatttgagatcagttttaatggttaaaatgtttactctccttctgtcaaccctcacctttttatttacacccctccctttttttctgtacagggagagaagacatattgactctgactggacaccctgattcctccaaatatatataccactgtgtattaatctttctctcagtgttttataggagtactaacatttattgctctgtcaataatgaaaggctcgatgtaatatagctgtaatttactttccatatgaatacagtggctaggttcataaaagagaattgtgtgagtctgggattaccacatctaaaacattattctttaatgggataatacaattcattgagcagctaccacttaaaaaacttgcaggacagttagagcctgcatttctagttaagatggatcttgtaaatttaaaattggattaacattggagtgctggggtggctgcaataatttgggggctaactccatttggtttccaagatctcacttctgcattatctttatggctctttaaaccagccacctagccaatcaagggcaattcccatctcatccatcactcaggtctttgtaaagggtgcagccaagctctgcagacttttgcaggattgtctagcctgagtaccgggctacttcttaaatgccgtcactcctgctgagataaatgcgtctttaaaaatagtctctgtggcaggtcactgggggacaatgtacagcattctggccatccacttctttttcacttcatgttctaccccaagagactcccgatgtcggctgtggagggttaaagggatgaggctttcctttgtttagcaaatctgttcacagttcttgatgatgtattttatgatgcccagcttggaaatagttgctttccatagtctcaactgtattgtgtcatctcctgatgctgatttttgatcttttgttttattaaaaataattagtgaaagaggtgtgcctatctgtgaagtttgtagtacatcatcctgaggtcatgtaacaagtaaaccccaacccagcgttccctcctacgttgtgttagttcattaaaactaaataataaaaataactgtaagaaaaccttaaggactggggttagagattattttcaggcactaaggtctcttctgtattccaaaattgattgaatcagctgggagaaacattgagaatcgcttccttcaacttttattttgcaacatggggaccttgagaggttaaacgatgtggcccagattacatgtaatgtgaggagtgggcgagaaggcctaaggtgatgctctcatgacagttctggggaagcctgcagtttggggaatgggacaatgtgacaaatactcgccattccctgagaccattcattgactattcccttgatggctttactataatgagaggaagcatcagtttaaacataaaaagattagtatttatccatccatttattcattcagcaaatccttattgagccctgaccatgggccagtctctctgccaagccctggggacacagtgatgaaaaaactggccacagtttctgcttcctgcctcattccacttgcagtgagcggatattaaattggccataaacaccgagtacgatgaccttacaatccgcaaactgcacctttcatgtgtaaaaggattgctactactttacttgtcagctgtggatttccaaatgtggtggctccctcttatttttttttctttgaggagtgtaccaattttttatctttataaaccaggtaagggaaatgatgcccttgcccattttctacagacctaatcgatttttacctaatcagttttacagaaagggttacatggaagaagagataggggccaggaatgcaagagggacattggtgagtggggtaagaatccccgtagccctgggaaaggtgtctccacttccacatctggcttttctagggggcatctgtgctaactgacctgggattatgttggatggcatatgactgcaaattcaaagaaaccaatttataataagtttatagtaagttaaaggtttgttttactctcatgtgaagggaatctggaggaaggaaagccagggctggagtggctgcctttgatcatgggagcacactccttctgcccgatcattgggagcacactccttctgcctgatcgttgggagcacactcctgcctgatcatgggcgcacgttccttctgcctgatcgttgggagcacactccttctgcctgatcatgggagcacactccttctgcctgatcattgggagcacgctccttctgcctgatcgttgggagcacactctttctgcctgatcgttgggagcacaccccttctgcctgatcattgggagcacactccttctgcctgatcatgggcacacgctccttctgcccgatcatgggcacacgctccttctgcccgatcgttgggagcacactccttctgcccaatcattgggctcacgctccttctgcccgatcgctgggctcacgctccttctgcccgatcttgggcgcacgctccttctgcccgatcgttgggcgcacgctccttctgcccgatcgttgggcgcatgctccttctgcccgatcgttgggagcacgctcattctgcccgattgttgggagcacgctccttctgcccgatcgttgggcgcacgctccttctgcccgatcgttgggcgcacgcttcttctgcctgatcgttgggcgcacgctccttctgcctgatcgttgggcgcacgctccttctgcctgatcgttgggagcacgctccttctgcctgattgttggaagcacgctccttctgccttcagactccttgatttttagtgcagtttccatcactgaggctgcctcatgggctgagatggctgttgaagcactgaacctcacatccacaattcaggcaggaagcagaaggaagggcaatgggcaaaggggctgtgccttgcagccgatccagcctccctttgctgcagaggaggcagggaaatgcggtatttactgggaacattgctgcccctcctccaaattgagggtcttggctcgaaggacaaaagccagaaaggataggtggattagtgcttcttaaacttttgcgtgcatcagaatcacccagaaagatgttaaaactcactcttcaaggccccatccccagagattcggattctggggatttggaatctggggtggggtctgaagaatctgcattttttaacaaactcccaggtgacatagatggcatcaattctcaagccatattttgagtagcactgacactcttccaataggtggtactttgacttgtcagggaagttctattgctctgataacttaaaaccaacccaaccagaagctcacaaaaactagcagcctgtgaaaaatgatcaccattttcctagagctccgagacaactagtggtagtgcaacagtaacccaaaaatgtcaatgaaaatatttccttccccagaaactgcttggtttcactcaggtcctgtccttatgggcctgtgtctggttgcagggcttgaagtatttcggaagctcagcagaggttgaaccctttcccctgggggttggtgatctttgttttggccatttccacctggtgaagattttcatagacaaatatgcttgtggcatcctgtaattcattgtgccttatgatggacctctgattctataagcttccccctagctagggatgcacgggggtgatcaagacatgactagatgtgaacctgacctgcagacagtccacctgaacgtgcctggaaatgtctcccgaaaaggatgaaaagcctcctcctttagacaaggaagacagagtggagcaaatttctctacatagatctcattcgaaaacaaatttacagaatgcagaatggctactgtgtgtcttgtgctatgctaggtctctctctctctaagtggactctgaccctgtccaaaacattgtgcttttgcatgtagctgtgtcgcatttaggcccagctctaagaaccgtttggaaataaatcacatagagcctttgattgtgaggcaggcttaaagtacattttgtttgatttgcagaggcatggtgaggaatttatatgcatggctgttgtggcagcagcgagatttccaaaaagatgaatgatgaaatgaaacagactgaagctatctcacaaatgttaaatggagaaataaaagttgttatagtcattgctaattacagaatgagcaagagatttatttagcaggaccatactatgccccctggaaggttcagtttatgagctggagcacaaggatttactgtcatttcacctgaaaacacacatttagctgtccatttacctttaatcctacaggcttaaaatactttaaaatttcagagaccattaatatgtattcctttagaaagcaaaggtctttcagaagctgtcctctaccaaagttaatgtggtcaccacatttgatgattttgctaggtagggaggtttatttaatcacagctactgtcactcaggaggatgagccatttaaaaatggtggccctgtcctccacttcttacctaccatatataatctcagtaattcagatttctctaaatcagcattagtgatcatttcaatagggtatgaacaaaaggcctataaaaatagctttccaattcgccaccaaaaatgcaaaaatgacaagtaagtgaggtaacgcatgagctaaatagcttgatttagtcactctaaaatgtgggtgtgtatatatacatacatatatatacacacacacattatgttatacaccataaatatatagaagttttacttgtcaattaaaactataaataaagtggctttccagaaaaattagatattggactctatcacaaaggaattgcataaaaatacttacaaacataactataagcaattgatgagcaaattacaaatgactgttttttattaaaacattcctccaaaagaacggcaaagcaaatcccatagacacccaaaatactaaaagtgacaaaacaatacttctttaaaaatgtattttatgatctatttattgatattctaatggttttaagaaggataattttccaaaacctaaatgctacacattttacagtggcaatatcaaccttatcatgagctaaagatttgcaatcagaacattggtagagtgcattgctgagttataacaagtgtctcaggacgaggatatttggtaggtatccttaaatatatagatgcttaccagtaggtttaatagaagatttctgaaaggtagcgcaagtttttatttcattatttttatttttatttttttgagacagagtctcactctgtcatctaggctggagtgcagtggtgcaatcttggcttgctgcaatctccacctcccaggttcaagcgattctcccacctcagcctcccgagtagctgggattacaggcatgcgccaccatgcctggctaatttttgtatttttagtagagacggggtttcgccatgttggccaggctcgtctcgaactcctggcctcaagtgatctgcccgcctcagcctcccaaagtgctgggattacaaatgtgagctactatgcctggtcccaacttcttaaaattaaattttggggaagttcatggagatatttttgacatgtaaaagtagaaaacaaaccatccatagtgtgtgcatatatacacacaaggtttggtttaatatacttgctgtgcactagtcagttttgattcaggttacataagggataaaatatagaaagacattttaaagtttgaaatatgtgctaagtagttagagatttggcagttttgccacatttcaaatgggccaaacattaaaataacttatccatgaatttcaggtttcaaggaaggaggaatatctgactatttttttttgtgtgtgagatttggtctcagctttttggtccatctgaatcctggaagtccccaactctaccagaccaaaagggtgtctctattttttgttgttacttctctgttcttgatgtaatgagttaagtagatgaaagagattaaggtgcagggaagggctcttaaaagtttaatgtttcagctttccatagtcattcatacttgtgaatcttcttcctcttctacttcaaagtagccaaaacttggaaagttcaaattaatctttgggctccaaagagcaattctgaaggattaacaggtttcattctctccagtgggaggtggcctagacaggtgccggttttggggagaggtgagagtacccagatgtgggtgactatttcctgttcttccctgaaagtcaggccagtggtctcgaatcattcccacagcaactgctacaaaagtgactatcttaatcctttggctagatgggatacctcttctaccttttcagaggtgagctgttgagtagtaatgtccgctacaacaccacgctcccggaatggtggttcctaagagcaaagtcagttaatacaatttctccaggtatccagctatctccaggtgtgcggtcctgtgaagcactctaagaactgtaaaaaatatttcataggtatagaaggcatttgtaatactgttggttcaaatgtgctgacatgtagccagtggaggaagatgtttctttggaagcctgccatctttctgtaacgcaccttcaacctgagataattaagagtcattacgtttcccagtcccatgtcacattgaccagtcctgtggtcctatggctaagcggaggacacggccacaagctgtgagtcatgaaaaggagggtgcaggtgataggcaaagggacccattagccagtttacaatgactggcaactgaccagatagagcttaccgtatgtccatgtagagttgctcatattagtctgtaaataattctatgcatagtgaatgcagcttctgaattattaaactgatgctataaatgtgaactgacaaaaccca

SEQ ID NO: 6489 - DNA, 725 bp, Homo sapiens
cgagctgcccgagccgctgctgctgcgcgtgctggccgcactgccggccgccgagctggtgcaggcctgccgcctggtgtgcctgcgctggaaggagctggtggacggcgccccgctgtggctgctcaagtgccagcaggaggggctggtgcccgagggcggcgtggaggaggagcgcgaccactggcagcagttctacttcctgagcaagcggcgccgcaaccttctgcgtaacccgtgtggggaagaggacttggaaggctggtgtgacgtggagcatggtggggacggctggagggtggaggagctgcctggagacagtggggtggagttcacccacgatgagagcgtcaagaagtacttcgcctcctcctttgagtggtgtcgcaaagcacaggtcattgacctgcaggctgagggctactgggaggagctgctggacacgactcagccggccatcgtggtgaaggactggtgagagggtcctggggtggcatggggctgggaggagcggggtaaggcagaggggagagccagctggggaaccccccgcctgggggtgctgcctccccactgcaggggttgaggccacgtgggccacgggtctgcaaaggttgacaacttccgtgtttgcaggagaacctggaaacccacctcccctcctgagttttaaatgttggcaaatatatgcacatatatatgtttgtatatatgtaatgtatata

SEQ ID NO: 6490 - DNA, 552 bp, Homo sapiens
tacttcattgatgccacaaccataatagaatgtctacattccttctgtaaaacgtgtattgttcgttacctggagaccagcaagtattgtcctatttgtgatgtccaagttcacaagaccagaccactactgaatataagattggatcggaaagtaaacaaagacaaagagaaatctaaggaggaggtgaatgataaaagatacttacgatgcccagcagcaatgactgtgatgcacttaagaaagtttctcagaagtaaaatggacatacctaatactttccagattgatgtcatgtatgaggaggaacctttaaaggattattatacactaatggatattgcctacatttatacctggagaaggaatggtccacttccattgaaatacagagttcgacctacttgtaaaagaatgaagatcagtcaccagagagatggactgacaaatgctggagaactggaaagtgactctgggagtgacaaggccaacagcccagcaggaggtattccctccacctcttcttgtttgcctagccccagtactccagtg

SEQ ID NO: 6491 - DNA, 798 bp, Homo sapiens
aacaccttaggctggtggggctgcggcaagaagcgggtctgtttctttacttcctccacggagtcggcacactatggctgccctctgggctcccagaacccacaacatgaaagcttggaaatgaatatgctgcactttacaaccactgcactacctgactcaggaatcggctctggaaggtgaagctagaggaaccagacctcatcagcccaacatcaaagacaccatcggaacagcagcgcccgcagcacccaccccgcaccggcgactccatcttcatggccaccccctgcggcggacggttgaccaccagccaccacatcatcccagagctgagctcctccagcgggatgacgccgtccccaccacctccctcttcttctttttcatccttctgtctctttgtttctgagctttcctgtctttccttttttctgagagattcaaagcctccacgactctgtttcccccgtcccttctgaatttaatttgcactaagtcatttgcactggttggagttgtggagacggccttgagtctcagtacgagtgtgcgtgagtgtgagccaccttggcaagtgcctgtgcagggcccggccgccctccatctgggccgggtgactgggcgccggctgtgtgcccgaggcctcaccctgccctcgcctagtctggaagctccgaccgacatcacggagcagccttcaagcattccattacgccccatctcgctctgtgcccctccccaccagggcttcagcaggagccctggactcatcatcaataaacactgttacagcaa

SEQ ID NO: 6492 - DNA, 2101 bp, Homo sapiens
gcacatccctgcactagtggccgcaaccgaggcgccgcgctccagcagctgctgccgcccagcccggccccgccgccgccccccagccctgcagccccgcagccccggccgcgcccagcccggcgaggacagcaccaggaggcggcccccagcgcggccacaaagacccccggcggcgtctctccgcggaccggtcctacttgaagtccatcatgtccttcggcagagacatggagctggagcacttcgacgagcgggataaggcgcagagatacagccgagggtcgcgggtgaacggcctgccgagcccgacgcacagcgcccactgcagcttctaccgcacccgcacgctgcagacgctcagctccgagaagaaggccaagaaagttcgtttctatcgaaacggagatcgatacttcaaagggattgtgtatgccatctccccagaccggttccgatcttttgaggccctgctggctgatttgacccgaactctgtcggataacgtgaatttgccccagggagtgagaacaatctacaccattgatgggctcaagaagatttccagcctggaccaactggtggaaggagagagttatgtatgtggctccatagagcccttcaagaaactggagtacaccaagaatgtgaaccccaactggtcggtgaacgtcaagaccacctcggcttctcgggcagtgtcttcactggccactgccaaaggaagcccttcagaggtgcgagagaataaggatttcattcggcccaagctggtcaccatcatcagaagtggcgtgaagccacggaaagctgtcaggattctgctgaacaagaaaacggctcattcctttgagcaggtcctcaccgatatcaccgatgccatcaagctggactcgggagtggtgaaacgcctgtacacgttggatgggaaacaggtgatgtgccttcaggacttttttggtgatgatgacatttttattgcatgtggaccggagaagttccgttaccaggatgatttcttgctagatgaaagtgaatgtcgagtggtaaagtccacttcttacaccaaaatagcttcatcatcccgcaggagcaccaccaagagcccaggaccgtccaggcgtagcaagtcccctgcctccaccagctcagttaatggaacccctggtagtcagctctctactccgcgctcaggcaagtcgccaagcccatcacccaccagcccaggaagcctgcggaagcagagggacctgtaccgccccctctcttcggatgacttggattcagtaggagactcagtgtaaaagaaacaatggagcaatgtatatggtttgtgattgggtgaaggtttcacatttctgaagcaaaagtcttacagcaaaatacacaaaagagttttgcataccttgaaatgataaaagaccaaatcatccaaaagtaaatatgtatgcattttgttttcgtgatgttcaaccttgaaattgagagatttttaaaaatatctcccacatggatttgattggggagagtttgaacacaaaatgctgagatttttgtacagggcctggctctagatgaatttcatacacggacccaatattgagtacaagaacacactaaccatgtggcaatatagagccagaatttctgcagatggagttttcttcttaattataagtagacatagagatataatttttctgtactttctgtaaagcatattaaaacggcactagcaggcatattttttctaaaggttatattgtttttaaaatttgaattgcttggtttttagaggtacttttattacaaaataataaaaatacttgggtagattttttttctccctagacagtagaaaaagctacttactgttttgtgggttagtacatccgagagaaaaagaaaaattatgacaacgacacatctcataaagactctgaagttaggctttaggaacttgccttgtttttgttgtcaagtaaattttattttttaaagttattttattagaaacagtataaatttagcttaagctatatgccaatatgaagaacttggccaatggcattgctatagattgtataattttttcttacaa

SEQ ID NO: 6493 - DNA, 1517 bp, Homo sapiens
gtcccagtgaggacagggacacagtactcggccacaccatggggcgcccactgcacctcgtcctgctcagtgcctccctggctggcctcctgctgctcggggaaagtctgttcatccgcagggagcaggccaacaacatcctggcgagggtcacgagggccaattcctttcttgaagagatgaagaaaggacacctcgaaagagagtgcatggaagagacctgctcatacgaagaggcccgcgaggtctttgaggacagcgacaagacgaatgaattctggaataaatacaaagatggcgaccagtgtgagaccagtccttgccagaaccagggcaaatgtaaagacggcctcggggaatacacctgcacctgtttagaaggattcgaaggcaaaaactgtgaattattcacacggaagctctgcagcctggacaacggggactgtgaccagttctgccacgaggaacagaactctgtggtgtgctcctgcgcccgcgggtacaccctggctgacaacggcaaggcctgcattcccacagggccctacccctgtgggaaacagaccctggaacgcaggaagaggtcagtggcccaggccaccagcagcagcggggaggcccctgacagcatcacatggaagccatatgatgcagccgacctggaccccaccgagaaccccttcgacctgcttgacttcaaccagacgcagcctgagaggggcgacaacaacctcaccaggatcgtgggaggccaggaatgcaaggacggggagtgtccctggcaggccctgctcatcaatgaggaaaacgagggtttctgtggtggaaccattctgagcgagttctacatcctaacggcagcccactgtctctaccaagccaagagattcaaggtgagggtaggggaccggaacacggagcaggaggagggcggtgaggcggtgcacgaggtggaggtggtcatcaagcacaaccggttcacaaaggagacctatgacttcgacatcgccgtgctccggctcaagacccccatcaccttccgcatgaacgtggcgcctgcctgcctccccgagcgtgactgggccgagtccacgctgatgacgcagaagacggggattgtgagcggcttcgggcgcacccacgagaagggccggcagtccaccaggctcaagatgctggaggtgccctacgtggaccgcaacagctgcaagctgtccagcagcttcatcatcacccagaacatgttctgtgccggctacgacaccaagcaggaggatgcctgccagggggacagcgggggcccgcacgtcacccgcttcaaggacacctacttcgtgacaggcatcgtcagctggggagagggctgtgcccgtaaggggaagtacgggatctacaccaaggtcaccgccttcctcaagtggatcgacaggtccatgaaaaccaggggcttgcccaaggccaagagccatgccccggaggtcataacgtcctctccattaaagtgagatcccactcaa

SEQ ID NO: 6494 - DNA, 2304 bp, Homo sapiens
gtgcatgtgtgtgggagtgtacatgcgtggagaggcactgccttgcgtgtgtgcacacgtgtgaggatgtcagcgcctgtgtggccgcgggactcaaggctggcctggctcaagtgaacagcacgtccaggaggcgacctcgtccgcgggtttgcattctggggtggacgagctgggggttcggtccgagcccggtgggaggctcccggagcgcagcctgggcccagcccaccccgcgccggcggccatggcaggcaccctggacctggacaagggctgcacggtggaggagctgctccgcgggtgcatcgaagccttcgatgactccgggaaggtgcgggacccgcagctggtgcgcatgttcctcatgatgcacccctggtacatcccctcctctcagctggcggccaagctgctccacatctaccaacaatcccggaaggacaactccaattccctgcaggtgaaaacgtgccacctggtcaggtactggatctccgccttcccagcggagtttgacttgaacccggagttggctgagcagatcaaggagctgaaggctctgctagaccaagaagggaaccgacggcacagcagcctaatcgacatagacagcgtccctacctacaagtggaagcggcaggtgactcagcggaaccctgtgggacagaaaaagcgcaagatgtccctgttgtttgaccacctggagcccatggagctggcggagcatctcacctacttggagtatcgctccttctgcaagatcctgtttcaggactatcacagtttcgtgactcatggctgcactgtggacaaccccgtcctggagcggttcatctccctcttcaacagcgtctcacagtgggtgcagctcatgatcctcagcaaacccacagccccgcagcgggccctggtcatcacacactttgtccacgtggcggagaagctgctacagctgcagaacttcaacacgctgatggcagtggtcgggggcctgagccacagctccatctcccgcctcaaggagacccacagccacgttagccctgagaccatcaagctctgggagggtctcacggaactagtgacggcgacaggcaactatggcaactaccggcgtcggctggcagcctgtgtgggcttccgcttcccgatcctgggtgtgcacctcaaggacctggtggccctgcagctggcactgcctgactggctggacccagcccggacccggctcaacggggccaagatgaagcagctctttagcatcctggaggagctggccatggtgaccagcctgcggccaccagtacaggccaaccccgacctgctgagcctgctcacggtgtctctggatcagtatcagacggaggatgagctgtaccagctgtccctgcagcgggagccgcgctccaagtcctcgccaaccagccccacgagttgcaccccaccaccccggcccccggtactggaggagtggacctcggctgccaaacccaagctggatcaggccctcgtggtggagcacatcgagaagatggtggagtctgtgttccggaactttgacgtcgatggggatggccacatctcacaggaagaattccagatcatccgtgggaacttcccttacctcagcgcctttggggacctcgaccagaaccaggatggctgcatcagcagggaggagatggtttcctatttcctgcgctccagctctgtgttgggggggcgcatgggcttcgtacacaacttccaggagagcaactccttgcgccccgtcgcctgccgccactgcaaagccctgatcctgggcatctacaagcagggcctcaaatgccgagcctgtggagtgaactgccacaagcagtgcaaggatcgcctgtcagttgagtgtcggcgcagggcccagagtgtgagcctggaggggtctgcaccctcaccctcacccatgcacagccaccatcaccgcgccttcagcttctctctgccccgccctggcaggcgaggctccaggcctccagagatccgtgaggaggaggtacagacggtggaggatggggtgtttgacatccacttgtaatagatgctgtggttggatcaaggactcattcctgccttggagaaaatacttcaaccagagcagggagcctgggggtgtcggggcaggaggctggggatgggggtgggatatgagggtggcatgcagctgagggcagggccagggctggtgtccctaaggttgtacagactcttgtgaatatttgtattttccagatggaataaaaaggcccgtgtaattaaccttca

SEQ ID NO: 6495 - DNA, 1163 bp, Homo sapiens
gtagtcctttgttacatgcatgagtcagtgaacagggaatgggtgaatgacatttgtgggtaggttatttctagaagttaggtgggcagcttggaaggcagatgcacttctacagactattccttggggccacacgtaggttcttgaatcccgaatggaaaggggagattgataactggtgtgtttatgttcttacaagtcttctgccttttaaaatccagtcccaggacatcaaagctctgcagaaagaactcgagcaatttgccaagctcctgaagcagaagaggatcaccctgggatatacacaggccgatgtggggctcaccctgggggttctatttgggaaggtattcagccaaacgaccatctgccgctttgaggctctgcagcttagcttcaagaacatgtgtaagctgcggcccttgctgcagaagtgggtggaggaagctgacaacaatgaaaatcttcaggagatatgcaaagcagaaaccctcgtgcaggcccgaaagagaaagcgaaccagtatcgagaaccgagtgagaggcaacctggagaatttgttcctgcagtgcccgaaacccacactgcagcagatcagccacatcgcccagcagcttgggctcgagaaggatgtggtccgagtgtggttctgtaaccggcgccagaagggcaagcgatcaagcagcgactatgcacaacgagaggattttgaggctgctgggtctcctttctcagggggaccagtgtcctttcctctggccccagggccccattttggtaccccaggctatgggagccctcacttcactgcactgtactcctcggtccctttccctgagggggaagcctttccccctgtctctgtcaccactctgggctctcccatgcattcaaactgaggtgcctgcccttctaggaatgggggacagggggaggggaggagctagggaaagaaaacctggagtttgtgccagggtttttgggattaagttcttcattcactaaggaaggaattgggaacacaaagggtgggggcaggggagtttggggcaactggttggagggaaggtgaagttcaatgatgctcttgattttaatcccacatcatgtatcacttttttcttaaataaagaagcctgggacacagtagatagacacactta

SEQ ID NO: 6496 - DNA, 943 bp, Homo sapiens
aatatggctgcccccagggagagacgaggctaccatgaaggagccgagcgcagaccctgagtccgtcacccatggatcgcagcgcggagttcaggaaatggaaggcgcaatgtttgagcaaagcggacctcagccggaagggcagtgttgacgaggatgtggtagagcttgtgcagtttctgaacatgcgagatcagtttttcaccaccagctcctgcgctggccgcatcctactccttgaccgggctgtccggagtacacatggcttagaagttccattaagccataagggaaaactgatggtgacagaggaatatattgacttcctgttaaatgtggcaaatcaaaaaatggaggaaaacaagaaaagaattgagaggttttacaactgcctacagcatgctttggaaagggaaacgatgactaacttacatcccaagatcaaagagaaaaataactcatcatatattcataagaaaaaaagaaacccagaaaaaacacgtgcccagtgtattactaaagaaagtgatgaagaacttgaaaatgatgatgatgatgatctaggaatcaatgttaccatcttccctgaagattactaagctttggttctgatgtgtcttggccgtaatgtttctagtaggttttataaagctgctcttcataagagtattttagtttgttgagtgtatcagccattcataagccagtaatgacaagtgcagagcttcaaactataactttgttgcccagaggatgtgcagttgtcatctaagctctcagcagtacccggcttatcctacgacttcacctgaaatgctatagttatccctacttttttaccagtttctcccagaagcacctgcttaataaatcaaagatgtttgaatggtgtcttattctgaaataacctgacctaagacaggtatttagattattttggata

SEQ ID NO: 6497 - DNA, 868 bp, Homo sapiens
acttccggccagggagggggataggctcagacacaaggagaggcttggagagagcagacgccttctggattcaagaagacgaggtttgaagaaaacctgctggaggtttgggacctaaccgcatcaaagtcgcctttagcggtgcctggacccagttcgcacgggaggaagtaggaggctcacctgttactcggcctcccagaaagatggataggagaaatgactacggatatagggtgcctctatttcagatatacagactgagaccacagaagaggacagtgtcctgctgatgcataccctgttggcggcaaccaaggactccctggccatggacccaccagttgtcaaccggcctaagaaaagcaagaccaagaaggcccctataaagactattactaaggctgcacctgctgcccctccagtcccagctgccaatgagattgccaccaacaagcccaaaataacttggcaggctttaaacctgccagtcattacccagatcagccaggctttacctaccactgaggtaaccaatactcaggcttcttcagtcactgctcagcctaagaaagccaacaagatgaagagagttactgccaaggcagcccaaggctcccaatccccaactggccatgagggtggcactatacagctgaagtcacccttgcaggtcctaaagctaccagtcatctcacagaatattcacgctccaattgccaatgagtcagccagttcccaagccttgataacctctatcaagcctaagaaagcttccaaggctaagaaggctgcaaataaggccatagctagtgccaccgaggtctcgctggctgcaactgccacccatacagctaccacccaaggc

SEQ ID NO: 6498 - DNA, 6524 bp, Homo sapiens
gcttggagccgccgcacccgggacggtgcgtagcgctggaagtccggccttccgagagctagctgtccgccgcggcccccgcacgccgggcagccgtccctcgccgcctcgggcgcgccaccatggggccccggctcagcgtctggctgctgctgctgcccgccgcccttctgctccacgaggagcacagccgggccgctgcgaagggtggctgtgctggctctggctgtggcaaatgtgactgccatggagtgaagggacaaaagggtgaaagaggcctcccggggttacaaggtgtcattgggtttcctggaatgcaaggacctgaggggccacagggaccaccaggacaaaagggtgatactggagaaccaggactacctggaacaaaagggacaagaggacctccgggagcatctggctaccctggaaacccaggacttcccggaattcctggccaagacggcccgccaggccccccaggtattccaggatgcaatggcacaaagggggagagagggccgctcgggcctcctggcttgcctggtttcgctggaaatcccggaccaccaggcttaccagggatgaagggtgatccaggtgagatacttggccatgtgcccgggatgctgttgaaaggtgaaagaggatttcccggaatcccagggactccaggcccaccaggactgccagggcttcaaggtcctgttgggcctccaggatttaccggaccaccaggtcccccaggccctcccggccctccaggtgaaaagggacaaatgggcttaagttttcaaggaccaaaaggtgacaagggtgaccaaggggtcagtgggcctccaggagtaccaggacaagctcaagttcaagaaaaaggagacttcgccaccaagggagaaaagggccaaaaaggtgaacctggatttcaggggatgccaggggtcggagagaaaggtgaacccggaaaaccaggacccagaggcaaacccggaaaagatggtgacaaaggggaaaaagggagtcccggttttcctggtgaacccgggtacccaggactcataggccgccagggcccgcagggagaaaagggtgaagcaggtcctcctggcccacctggaattgttataggcacaggacctttgggagaaaaaggagagaggggctaccctggaactccggggccaagaggagagccaggcccaaaaggtttcccaggactaccaggccaacccggacctccaggcctccctgtacctgggcaggctggtgcccctggcttccctggtgaaagaggagaaaaaggtgaccgaggatttcctggtacatctctgccaggaccaagtggaagagatgggctcccgggtcctcctggttcccctgggccccctgggcagcctggctacacaaatggaattgtggaatgtcagcccggacctccaggtgaccagggtcctcctggaattccagggcagccaggatttataggcgaaattggagagaaaggtcaaaaaggagagagttgcctcatctgtgatatagacggatatcgggggcctcccgggccacagggacccccgggagaaataggtttcccagggcagccaggggccaagggcgacagaggtttgcctggcagagatggtgttgcaggagtgccaggccctcaaggtacaccagggctgataggccagccaggagccaagggggagcctggtgagttttatttcgacttgcggctcaaaggtgacaaaggagacccaggctttccaggacagcccggcatgacagggagagcgggttctcctggaagagatggccatccgggtcttcctggccccaagggctcgccgggttctgtaggattgaaaggagagcgtggcccccctggaggagttggattcccaggcagtcgtggtgacaccggcccccctgggcctccaggatatggtcctgctggtcccattggtgacaaaggacaagcaggctttcctggaggccctggatccccaggcctgccaggtccaaagggtgaaccaggaaaaattgttcctttaccaggcccccctggagcagaaggactgccggggtccccaggcttcccaggtccccaaggagaccgaggctttcccggaaccccaggaaggccaggcctgccaggagagaagggcgctgtgggccagccaggcattggatttccagggccccccggccccaaaggtgttgacggcttacctggagacatggggccaccggggactccaggtcgcccgggatttaatggcttacctgggaacccaggtgtgcagggccagaagggagagcctggagttggtctaccgggactcaaaggtttgccaggtcttcccggcattcctggcacacccggggagaaggggagcattggggtaccaggcgttcctggagaacatggagcgatcggaccccctgggcttcaggggatcagaggtgaaccgggacctcctggattgccaggctccgtggggtctccaggagttccaggaataggcccccctggagctaggggtccccctggaggacagggaccaccggggttgtcaggccctcctggaataaaaggagagaagggtttccccggattccctggactggacatgccgggccctaaaggagataaaggggctcaaggactccctggcataacgggacagtcggggctccctggccttcctggacagcagggggctcctgggattcctgggtttccaggttccaagggagaaatgggcgtcatggggacccccgggcagccgggctcaccaggaccagtgggtgctcctggattaccgggtgaaaaaggggaccatggctttccgggctcctcaggacccaggggagaccctggcttgaaaggtgataagggggatgtcggtctccctggcaagcctggctccatggataaggtggacatgggcagcatgaagggccagaaaggagaccaaggagagaaaggacaaattggaccaattggtgagaagggatcccgaggagaccctgggaccccaggagtgcctggaaaggacgggcaggcaggacagcctgggcagccaggacctaaaggtgatccaggtataagtggaaccccaggtgctccaggacttccgggaccaaaaggatctgttggtggaatgggcttgccaggaacacctggagagaaaggtgtgcctggcatccctggcccacaaggttcacctggcttacctggagacaaaggtgcaaaaggagagaaagggcaggcaggcccacctggcataggcatcccagggctgcgaggtgaaaagggagatcaagggatagcgggtttcccaggaagccctggagagaagggagaaaaaggaagcattgggatcccaggaatgccagggtccccaggccttaaagggtctcccgggagtgttggctatccaggaagtcctgggctacctggagaaaaaggtgacaaaggcctcccaggattggatggcatccctggtgtcaaaggagaagcaggtcttcctgggactcctggccccacaggcccagctggccagaaaggggagccaggcagtgatggaatcccggggtcagcaggagagaagggtgaaccaggtctaccaggaagaggattcccagggtttccaggggccaaaggagacaaaggttcaaagggtgaggtgggtttcccaggattagccgggagcccaggaattcctggatccaaaggagagcaaggattcatgggtcctccggggccccagggacagccggggttaccgggatccccaggccatgccacggaggggcccaaaggagaccgcggacctcagggccagcctggcctgccaggacttccgggacccatggggcctccagggcttcctgggattgatggagttaaaggtgacaaaggaaatccaggctggccaggagcacccggtgtcccagggcccaagggagaccctggattccagggcatgcctggtattggtggctctccaggaatcacaggctctaagggtgatatggggcctccaggagttccaggatttcaaggtccaaaaggtcttcctggcctccagggaattaaaggtgatcaaggcgatcaaggcgtcccgggagctaaaggtctcccgggtcctcctggccccccaggtccttacgacatcatcaaaggggagcccgggctccctggtcctgagggccccccagggctgaaagggcttcagggactgccaggcccgaaaggccagcaaggtgttacaggattggtgggtatacctggacctccaggtattcctgggtttgacggtgcccctggccagaaaggagagatgggacctgccgggcctactggtccaagaggatttccaggtccaccaggccccgatgggttgccaggatccatggggcccccaggcaccccatctgttgatcacggcttccttgtgaccaggcatagtcaaacaatagatgacccacagtgtccttctgggaccaaaattctttaccacgggtactctttgctctacgtgcaaggcaatgaacgggcccatggccaggacttgggcacggccggcagctgcctgcgcaagttcagcacaatgcccttcctgttctgcaatattaacaacgtgtgcaactttgcatcacgaaatgactactcgtactggctgtccacccctgagcccatgcccatgtcaatggcacccatcacgggggaaaacataagaccatttattagtaggtgtgctgtgtgtgaggcgcctgccatggtgatggccgtgcacagccagaccattcagatcccaccgtgccccagcgggtggtcctcgctgtggatcggctactcttttgtgatgcacaccagcgctggtgcagaaggctctggccaagccctggcgtcccccggctcctgcctggaggagtttagaagtgcgccattcatcgagtgtcacggccgtgggacctgcaattactacgcaaacgcttacagcttttggctcgccaccatagagaggagcgagatgttcaagaagcctacgccgtccaccttgaaggcaggggagctgcgcacgcacgtcagccgctgccaagtctgtatgagaagaacataatgaagcctgactcagctaatgtcacaacatggtgctacttcttcttctttttgttaacagcaacgaaccctagaaatatatcctgtgtacctcactgtccaatatgaaaaccgtaaagtgccttataggaatttgcgtaactaacacaccctgcttcattgacctctacttgctgaaggagaaaaagacagcgataagctttcaatagtggcataccaaatggcacttttgatgaaataaaatatcaatattttctgcaatccaatgcactgatgtgtgaagtgagaactccatcagaaaaccaaagggtgctaggaggtgtgggtgccttccatactgtttgcccattttcattcttgtattataattaattttctacccccagagataaatgtttgtttatatcactgtctagctgtttcaaaatttaggtcccttggtctgtacaaataatagcaatgtaaaaatggttttttgaacctccaaatggaattacagactcagtagccatatcttccaaccccccagtataaatttctgtctttctgctatgtgtggtactttgcagctgcttttgcagaaatcacaattttcctgtggaataaagatggtccaaaaatagtcaaaaattaaatatatatatatattagtaatttatatagatgtcagcaattaggcagatcaaggtttagtttaacttccactgttaaaataaagcttacatagttttcttcctttgaaagactgtgctgtcctttaacataggtttttaaagactaggatattgaatgtgaaacatccgttttcattgttcacttctaaaccaaaaattatgtgttgccaaaaccaaacccaggttcatgaatatggtgtctattatagtgaaacatgtactttgagcttattgtttttattctgtattaaatattttcagggttttaaacactaatcacaaactgaatgacttgacttcaaaagcaacaaccttaaaggccgtcatttcattagtattcctcattctgcatcctggcttgaaaaacagctctgttgaatcacagtatcagtattttcacacgtaagcacattcgggccatttccgtggtttctcatgagctgtgttcacagacctcagcagggcatcgcatggaccgcaggagggcagattcggaccactaggcctgaaatgacatttcactaaaagtctccaaaacatttctaagactactaaggccttttatgtaatttctttaaatgtgtatttcttaagaattcaaatttgtaataaaactatttgtataaaaattaagcttttattaatttgttgctagtattgccacagacgcattaaaagaaacttactgcacaagctgctaataaatttgtaagctttgc

SEQ ID NO: 6499 - DNA, 498 bp, Homo sapiens
aaattgaggcccagaaagaagccacccctacccccaggtcacagtctagttactgggtgagctgggctgggacccaggtgtcctgactcccgccctgcgttctcccatgctccattgttctcttgggagacctcatggcaagcccaggccccaccacggagacccctctgtgaaggactgccccttaccctttgtcccttccccaggacagagtctgtggctgaaaagatgctgaccaattggttcgccttcctcctgcacaagttcctaaaggagtgcgcaggggagccactcttcatgctatactgtgccatcaagcagcagatggagaagggccccattgatgccatcacgggcgaggcccgctactccctgagcgaggacaagctcatccggcagcagatcgagtacaagaccctgatcctgaactgcgtcaaccctgacaacgagaacagtccagagatcccagtgaaggtgttaaactgtgacaccatcaca

SEQ ID NO: 6500 - DNA, 1659 bp, Homo sapiens
atgtttgaacagctgaagccaatcgaacctagagattgctggagggaggcacgggtgaagaagaagccagtcacctttgaggatgtggcagtgaatttcacccaggaagagtgggactgtctagatgccagccagagggtcctttaccaggatgttatgtcggaaacctttaagaatctaacatctgtggccagaatctttctgcataagccagagctaatcaccaagcttgagcaagaagaggaacagtggagagagtttgtccatctcccaaacacagaaggcctttcagaaggcaagaagaaagagcttcgagaacaacatcccagtctgagagatgaggggactagtgatgacaaggtcttccttgcatgcagaggggccggccagtgccccctatctgccccagctgggactatggacaggacccgggtgcttcaagcatcccaggctgggccaccctttttttgctacacctgtggcaaatgtttcagcaggcgctcctacctctatagccaccagtttgttcacaatcccaagctgactaacagctgcagtcagtgtgggaagttgtttcggagccccaagtccctcagctatcacagacgcatgcatcttggggagaggcccttctgttgcacgctctgtgacaagacctactgtgatgcttctggactaagtcgtcaccgccgcgtccatctgggttaccggccccattcatgctctgtgtgtgggaagagcttccgggaccagtctgagctcaaacgccaccagaagatacaccaaaaccaggagccagtggatggaaaccaggagtgtactttgaggattccaggcacccaggctgaattccagacacccatcgccagaagccagaggtccatccaggggcttttggatgtgaaccatgcaccagtggccaggtcccaggaacccatatttagaactgagggtcctatggcccagaaccaggcatctgtacttaagaaccaagcacctgtgaccaggacccaggcacccatcactggaaccctctgtcaggatgccagatccaactctcatccagtgaagccctcaagactcaatgtcttctgttgcccccattgttctttgacttttagcaagaaatcctatctctccagacaccagaaggcccacctcacagagccgcccaactactgcttccattgcagcaagtctttcagctcattttccaggctggtcagacaccagcagacccactggaagcagaagagctacctttgccctatctgtgacctctcctttggggagaaagagggccttatggatcactggaggggctataaaggcaaggacctgtgccagagcagccaccataaatgccgggtgatcctgggccagtggcttggcttctctcatgatgtccccactatggctggggaggaatggaagcatggaggtgatcaatctccccccaggatccatacccccaggagaagaggcctaagagagaaggcctgcaaaggagacaaaacaaaggaggcagtgagcatcttgaaacataaataaatggcctttctgactgagctctttctttgtgtttagttttcctgaggactgacctctggggtaatgaggctggagtagagggagacaggtgcgtggataaggaaggaa

SEQ ID NO: 6501 - DNA, 571 bp, Homo sapiens
agacgctgcagcgatgcctcgcccacggcgggtcagtcagctcctggatcttgatgcttaggaaagattttatatcattaaaaagaaattgggaggtcacttccaagatggctaaatgggaacagctccagtctgcagctcccagcaagattgacgcagaagatgggcgatttctgcatttccaactgagatgctactggacttgaatggttaataaaattgcacaatgttgttggtggcagtgacttctttctgttcagatgcctttggtgcttcatgaagaatatttccagatatctcacagacattaagcctttgcctcccaacataaaagacagactgattaaaataatgagtatgcagggacagataacagattcaaatataagtgagggtcatgctccgttgcccaggctggagtacagtggtgcaatctcagctcactgcaacctccgctgcctggacttagagacagggtttcaccatgttgcccaggctggtctcgaactccggagctcaagtgatccatccgcctcagcctctcaaaatgctgggattacagattttacat

SEQ ID NO: 6502 - DNA, 2239 bp, Homo sapiens
cacaacctagatccctcacatgtgcaggtcacgatagggttcgcacttctgtgagaatctattgcaatggctgatctaacaggaggcggagctcaggtggtaatgttcgcttgcctcctgctatgcggctcggttcccaacaggccatagactgacactggtccatggcccagggattggggacccctgctttagagggctgttgcaagatttgataaagtatgtaaaatctagtgtaagtgcctgatacatagcaagggctccgttaattctagatgctgcctattatcattattaaatgagcaaaaacaactattgtgattactcttctaccctagccctctgacgtaacagccaatgagctagaaaaccatgtggactcctatgaagccattctaagtcacctggtcctatagctgaaggactgtgaagttccaaacttcaatctgacaacccctaagaaggtcttccctggttctggcttgcagggatatcaggagtatgcaggtgactcccaaagcagaaaggtcataaaggacaagggcaggttagatgggtccattgagagacggagaagccccctgctcctcactgagttgtggtcaggggcagtggagaaaggtctgaggtccaaggggaccccaagtctgaatataacgcagccacagaatgcctgtgctgaagtgagactgctccagggagacaagcagtagcacaatgtcccgagttgaggggttggggttgtcctcccctggcccagggaacactatgcccagggcagcctgatgtcacaactggtaaggaccactggagcctgagtcgggaggaaaacagcctgggtggtcataaagaatggcagagggccagagcagggatgtggcaagactgacacccttgaagtcaccagaaagctatccccttggacttgggcagaagtgtctcttaatatgatgatgtattatcattaatagttgccacctgctaccatgtattgagcacctattgtgtgccagacctagcacttagctctttacatgggttatctcatgtgatcattgtaagaaccctaaggaggtttttcttactatcctccattttacaggtaagaaaactgaggctcaaagaggttaaatcagttgttccaggtgcatagcttgggcacctagcttgcaagtgacaaggcgagcccaatgccacccacaccagctctggttctttgcctccagccctggctcctttctccaaccatcttccctctctgccccgggcaggtggggagaaaaggaagaaagagaggcccacgtcatgtgtttcagcttccctttccctctctgctggtgcccactggccctcacacccatttcttgttgcaggaaggtgaacaagtgctaccggggccgctcctgccccatcatcgtgcactgcagtgatggtgcggggaggaccggcacctacatcctcatcgacatggtcctgaaccgcatggcaaaaggagtgaaggagattgacatcgctgccaccctggagcatgtccgtgaccagcggcctggccttgtccgctctaaggaccagtttgaatttgccctgacagccgtggcggaggaagtgaatgccatcctcaaggccctgccccagtgagaccctggggccccttggcgggcagcccagcctctgtccctctttgcctgtgtgagcatctctgtgtacccactcctcactgccccaccagccacctcttgggcatgctcagcccttcctagaagagtcaggaagggaaagccagaaggggcacgcctgcccagcctcgcatgccagagcctggggcatcccagagcccagggcatcccatgggggtgctgcagccaggaggagaggaaaggacatgggtagcaattctacccagagccttctcctgcctacattccctggcctggctctcctgtagctctcctggggttctgggagttccctgaacatctgtgtgtgtccccctatgctccagtatggaagaatggggtggagggtcgccacacccggctccccctgcttctcagccccgggcctgcctctgactcacacttgggcgctctgccctccctggcctcacgcccagcctcctcccaccaccctcccaccatgcgctgctcaacctctctccttctggcgcaagagaacatttctagaaaaaactacttttgtaccagtgtgaataaagttagtgtgttgtctgtgcagctgc

SEQ ID NO: 6503 - DNA, 922 bp, Homo sapiens
ccccaaacctgccaccgacggccacttccgtttccccgatagtatttggggatctcgaagcgatacttccggctccccccaggtccccaagctttacttttgtggggcacgacgagaaagtccgcagccccaaacattcccagaggtccacttgggccagtggtactttatcgcaggggcagctcccaccaaggaggagttggcaacttttgaccctgtggacaacattgtcttcaatatggctgctggctctgccccgatgcagctccaccttcgtgctaccatccgcatgaaagatgggctctgtgtgccccggaaatggatctaccacctgactgaagggagcacagatctcagaactgaaggccgccctgacatgaagactgagctcttttccagctcatgcccaggtggaatcatgctgaatgagacaggccagggttaccagcgctttctcctctacaatcgctcaccacatcctcccgaaaagtgtgtggaggaattcaagtccctgacttcctgcctggactccaaagccttcttattgactcctaggaatcaaggtaaggggttaaaatctcataaaacaggattaggactcaccaagtcttctggtgttacagggtgaaagaggctcgtgtgatgtcaccagagggatgtggctaagagctgtgatgtcacctgagggaggcaggatgggttctgggctactcaaaagagaggtttctgagtttgcactggataaagggggcagagggtcatacgtggagggaaaagagccttagagactcccctttgacacagggaatgaaagaacacgttctcccccaccccattactatcaactttgcttttctccctggacttcccttctgtccttctttttccctccccccatcacagaggcctgtgagctgtccaa

SEQ ID NO: 6504 - DNA, 3694 bp, Homo sapiens
gtaaccaagatactgactgaacatggctggcggactcaggctggggtctgcagtgcagcattaatgggccgctgacatgaatatggagtagttttctctagcaaagagtaatgtgggccatggagtcaggccacctcctctgggctctgctgttcatgcagtccttgtggcctcaactgactgatggagccactcgagtctactacctgggcatccgggatgtgcagtggaactatgctcccaagggaagaaatgtcatcacgaaccagcctctggacagtgacatagtggcttccagcttcttaaagtctgacaagaaccggatagggggaacctacaagaagaccatctataaagaatacaaggatgactcatacacagatgaagtggcccagcctgcctggttgggcttcctggggccagtgttgcaggctgaagtgggggatgtcattcttattcacctgaagaattttgccactcgtccctataccatccaccctcatggtgtcttctacgagaaggactctgaaggttccctatacccagatggctcctctgggccactgaaagctgatgactctgttcccccggggggcagccatatctacaactggaccattccagaaggccatgcacccaccgatgctgacccagcgtgcctcacctggatctaccattctcatgtagatgctccacgagacattgcaactggcctaattgggcctctcatcacctgtaaaagaggagccctggatgggaactcccctcctcaacgccaggatgtagaccatgatttcttcctcctcttcagtgtggtagatgagaacctcagctggcatctcaatgagaacattgccacttactgctcagatcctgcttcagtggacaaagaagatgagacatttcaggagagcaataggatgcatgcaatcaatggctttgtttttgggaatttacctgagctgaacatgtgtgcacagaaacgtgtggcctggcacttgtttggcatgggcaatgaaattgatgtccacacagcatttttccatggacagatgctgactacccgtggacaccacactgatgtggctaacatctttccagccacctttgtgactgctgagatggtgccctgggaacctggtacctggttaattagctgccaagtgaacagtcactttcgagatggcatgcaggcactctacaaggtcaagtcttgctccatggcccctcctgtggacctgctcacaggcaaagttcgacagtacttcattgaggcccatgagattcaatgggactatggcccgatggggcatgatgggagtactgggaagaatttgagagagccaggcagtatctcagataagtttttccagaagagctccagccgaattgggggcacttactggaaagtgcgatatgaagcctttcaagatgagacattccaagagaagatgcatttggaggaagataggcatcttggaatcctggggccagtgatccgggctgaggtgggtgacaccattcaggtggtcttctacaaccgtgcctcccagccattcagcatgcagccccatggggtcttttatgagaaagactatgaaggcactgtgtacaatgatgggacatttgagatttattgccaggcaggcagccatcgagaagcagggatgagggcaatctataatgtctcccagtgtcctggccaccaagccacccctcgccaacgctaccaagctgcaagaatctactatatcatggcagaagaagtagagtgggactattgccctgaccggagctgggaacgggaatggcacaaccagtctgagaaggacagttatggttacattttcctgagcaacaaggatgggctcctgggttccagatacaagaaagctgtattcagggaatacactgatggtacattcaggatccctcggccaaggactggaccagaagaacacttgggaatcttgggtccacttatcaaaggtgaagttggtgatatcctgactgtggtattcaagaataatgccagccgcccctactctgtgcatgctcatggagtgctagaatctactactgtctggccactggctgctgagcctggtgaggtggtcacttatcagtggaacatcccagagaggtctggccctgggcccaatgactctgcttgtgtttcctggatctattattctgcagtggatcccatcaaggacatgtatagtggcctggtggggcccttggctatctgccaaaagggcatcctggagccccatggaggacggagtgacatggatcgggaatttgcattgttgttcttgatttttgatgaaaataagtcttggtatttggaggaaaatgtggcaacccatgggtcccaggatccaggcagtattaacctacaggatgaaactttcttggagagcaataaaatgcatgcaatcaatgggaaactctatgccaaccttaggggtcttaccatgtaccaaggagaacgagtggcctggtacatgctggccatgggccaagatgtggatctacacaccatccactttcatgcagagagcttcctctatcggaatggcgagaactaccgggcagatgtggtggatctgttcccagggacttttgaggttgtggagatggtggccagcaaccctgggacatggctgatgcactgccatgtgactgaccatgtccatgctggcatggagaccctcttcactgttttttctcgaacagaacacttaagccctctcaccgtcatcaccaaagagactgaaaaagcagtgccccccagagacattgaagaaggcaatgtgaagatgctgggcatgcagatccccataaagaatgttgagatgctggcctctgttttggttgccattagtgtcacccttctgctcgttgttctggctcttggtggagtggtttggtaccaacatcgacagagaaagctacgacgcaataggaggtccatcctggatgacagcttcaagcttctgtctttcaaacagtaacatctggagcctggagatatcctcaggaagcacatctgtagtgcactcccagcaggccatggactagtcactaaccccacactcaaaggggcatgggtggtggagaagcagaaggagcaatcaagcttatctggatatttctttctttatttattttacatggaaataatatgatttcactttttctttagtttctttgctctacgtgggcacctggcactaagggagtaccttattatcctacatcgcaaatttcaacagctacattatatttccttctgacacttggaaggtattgaaatttctagaaatgtatccttctcacaaagtagagaccaagagaaaaactcattgattgggtttctacttctttcaaggactcaggaaatttcactttgaactgaggccaagtgagctgttaagataacccacacttaaactaaaggctaagaatataggcttgatgggaaattgaaggtaggctgagtattgggaatccaaattgaattttgattctccttggcagtgaactactttgaagaagtggtcaatgggttgttgctgccatgagcatgtacaacctctggagctagaagctcctcaggaaagccagttctccaagttcttaacctgtggcactgaaaggaatgttgagttacctcttcatgttttag

SEQ ID NO: 6505 - DNA, 587 bp, Homo sapiens
ctgaaaccttctgggaggagaagaggcctgaccttggcgctggggtccagtgggcattgctctggtccgaggctgctgctcttgacctctgctctgcggctgttttccattggagtagaggctcctcctgtcctgtcctgcctgtggagggaagcaaaccttcccctggaccagagagaggagaaagcggagacaggtagcaacgctgtggactggtgatgacaggctcttcagctccctgcaagtgaccgggcctggggaacagggcatggcacaggcacacaggaccccccagcccagggctgcccccagccagccccgtgtgttcaagctggttctcctgggaagtggctccgtgggtaagtccagcttggctcttcggtacgtgaagaacgacttcaagagtatcctgcctacggtgggctcatcttccttcctgcctggacttggtttaccagcttggcctggattgggggtgggaagatcattttgggggtgggcggggagggagaccttctctctgtgtttcttaaaaaggctaacctgtcatgaagctcaggagtaactgtatggggcatctgcaggct

SEQ ID NO: 6506 - DNA, 5837 bp, Homo sapiens
ggacaggcgtggcggccggagccccagcatccctgcttgaggtccaggagcggagcccgcggccaccgccgcctgatcagcgcgaccccggcccgcgcccgccccgcccggcaagatgctgcccgtgtaccaggaggtgaagcccaacccgctgcaggacgcgaacctctgctcacgcgtgttcttctggtggctcaatcccttgtttaaaattggccataaacggagattagaggaagatgatatgtattcagtgctgccagaagaccgctcacagcaccttggagaggagttgcaagggttctgggataaagaagttttaagagctgagaatgacgcacagaagccttctttaacaagagcaatcataaagtgttactggaaatcttatttagttttgggaatttttacgttaattgaggaaagtgccaaagtaatccagcccatatttttgggaaaaattattaattattttgaaaattatgatcccatggattctgtggctttgaacacagcgtacgcctatgccacggtgctgactttttgcacgctcattttggctatactgcatcacttatatttttatcacgttcagtgtgctgggatgaggttacgagtagccatgtgccatatgatttatcggaaggcacttcgtcttagtaacatggccatggggaagacaaccacaggccagatagtcaatctgctgtccaatgatgtgaacaagtttgatcaggtgacagtgttcttacacttcctgtgggcaggaccactgcaggcgattgcagtgactgccctactctggatggagataggaatatcgtgccttgctgggatggcagttctaatcattctcctgcccttgcaaagctgttttgggaagttgttctcatcactgaggagtaaaactgcaactttcacggatgccaggatcaggaccatgaatgaagttataactggtataaggataataaaaatgtacgcctgggaaaagtcattttcaaatcttattaccaatttgagaaagaaggagatttccaagattctgagaagttcctgcctcagagggatgaatttggcttcatttttcagtgcaagcaaaatcatcgtgtttgtgaccttcaccacctacgtgctcctcggcagtgtgatcacagccagccgcgtgttcgtggcagtgacgctgtatggggctgtgcggctgacggttaccctcttcttcccctcagccattgagagggtgtcagaggcaatcgtcagcatccgaagaatccagacctttttgctacttgatgagatatcacagcgcaaccgtcagctgccgtcagatggtaaaaagatggtgcatgtgcaggattttactgctttttgggataaggcatcagagaccccaactctacaaggcctttcctttactgtcagacctggcgaattgttagctgtggtcggccccgtgggagcagggaagtcatcactgttaagtgccgtgctcggggaattggccccaagtcacgggctggtcagcgtgcatggaagaattgcctatgtgtctcagcagccctgggtgttctcgggaactctgaggagtaatattttatttgggaagaaatacgaaaaggaacgatatgaaaaagtcataaaggcttgtgctctgaaaaaggatttacagctgttggaggatggtgatctgactgtgataggagatcggggaaccacgctgagtggagggcagaaagcacgggtaaaccttgcaagagcagtgtatcaagatgctgacatctatctcctggacgatcctctcagtgcagtagatgcggaagttagcagacacttgttcgaactgtgtatttgtcaaattttgcatgagaagatcacaattttagtgactcatcagttgcagtacctcaaagctgcaagtcagattctgatattgaaagatggtaaaatggtgcagaaggggacttacactgagttcctaaaatctggtatagattttggctcccttttaaagaaggataatgaggaaagtgaacaacctccagttccaggaactcccacactaaggaatcgtaccttctcagagtcttcggtttggtctcaacaatcttctagaccctccttgaaagatggtgctctggagagccaagatacagagaatgtcccagttacactatcagaggagaaccgttctgaaggaaaagttggttttcaggcctataagaattacttcagagctggtgctcactggattgtcttcattttccttattctcctaaacactgcagctcaggttgcctatgtgcttcaagattggtggctttcatactgggcaaacaaacaaagtatgctaaatgtcactgtaaatggaggaggaaatgtaaccgagaagctagatcttaactggtacttaggaatttattcaggtttaactgtagctaccgttctttttggcatagcaagatctctattggtattctacgtccttgttaactcttcacaaactttgcacaacaaaatgtttgagtcaattctgaaagctccggtattattctttgatagaaatccaataggaagaattttaaatcgtttctccaaagacattggacacttggatgatttgctgccgctgacgtttttagatttcatccagacattgctacaagtggttggtgtggtctctgtggctgtggccgtgattccttggatcgcaatacccttggttccccttggaatcattttcatttttcttcggcgatattttttggaaacgtcaagagatgtgaagcgcctggaatctacaactcggagtccagtgttttcccacttatcatcttctctccaggggctctggaccatccgggcatacaaagcagaagagaggtgtcaggaactgtttgatgcacaccaggatttacattcagaggcttggttcttgtttttgacaacgtcccgctggtttgccgtccgtctggatgccatctgtgccatgtttgtcatcatcgttgcctttgggtccctgattctggcaaaaactctggatgccgggcaggttggtttggcactgtcctatgccctcacgctcatggggatgtttcagtggtgtgttcgacaaagtgctgaagttgagaatatgatgatctcagtagaaagggtcattgaatacacagaccttgaaaaagaagcaccttgggaatatcagaaacgcccaccaccagcctggccccatgaaggagtgataatctttgacaatgtgaacttcatgtacagtccaggtgggcctctggtactgaagcatctgacagcactcattaaatcacaagaaaaggttggcattgtgggaagaaccggagctggaaaaagttccctcatctcagccctttttagattgtcagaacccgaaggtaaaatttggattgataagatcttgacaactgaaattggacttcacgatttaaggaagaagatgtcaatcatacctcaggaacctgttttgttcactggaacaatgaggaaaaacctggatccctttaatgagcacacggatgaggaactgtggaatgccttacaagaggtacaacttaaagaaaccattgaagatcttcctggtaaaatggatactgaattagcagaatcaggatccaattttagtgttggacaaagacaactggtgtgccttgccagggcaattctcaggaaaaatcagatattgattattgatgaagcgacggcaaatgtggatccaagaactgatgagttaatacaaaaaaaaatccgggagaaatttgcccactgcaccgtgctaaccattgcacacagattgaacaccattattgacagcgacaagataatggttttagattcaggaagactgaaagaatatgatgagccgtatgttttgctgcaaaataaagagagcctattttacaagatggtgcaacaactgggcaaggcagaagccgctgccctcactgaaacagcaaaacaggtatacttcaaaagaaattatccacatattggtcacactgaccacatggttacaaacacttccaatggacagccctcgaccttaactattttcgagacagcactgtgaatccaaccaaaatgtcaagtccgttccgaaggcattttccactagtttttggactatgtaaaccacattgtacttttttttactttggcaacaaatatttatacatacaagatgctagttcatttgaatatttctcccaacttatccaaggatctccagctctaacaaaatggtttatttttatttaaatgtcaatagttgttttttaaaatccaaatcagaggtgcaggccaccagttaaatgccgtctatcaggttttgtgccttaagagactacagagtcaaagctcatttttaaaggagtaggacaaagttgtcacaggtttttgttgttgtttttattgcccccaaaattacatgttaatttccatttatatcagggattctatttacttgaagactgtgaagttgccattttgtctcattgttttctttgacataactaggatccattatttcccctgaaggcttcttgttagaaaatagtacagttacaaccaataggaacaacaaaaagaaaaagtttgtgacattgtagtagggagtgtgtaccccttactccccatcaaaaaaaaaaatggatacatggttaaaggatagaagggcaatattttatcatatgttctaaaagagaaggaagagaaaatactactttctcaaaatggaagcccttaaaggtgctttgatactgaaggacacaaatgtgaccgtccatcctcctttagagttgcatgacttggacacggtaactgttgcagttttagactcagcattgtgacacttcccaagaaggccaaacctctaaccgacattcctgaaatacgtggcattattcttttttggatttctcatttatggaaggctaaccctctgttgactgtaagccttttggtttgggctgtattgaaatcctttctaaattgcatgaataggctctgctaacgtgatgagacaaactgaaaattattgcaagcattgactataattatgcagtacgttctcaggatgcatccaggggttcattttcatgagcctgtccaggttagtttactcctgaccactaatagcattgtcatttgggctttctgttgaatgaatcaacaaaccacaatacttcctgggaccttttgtactttatttgaactatgagtctttaatttttcctgatgatggtggctgtaatatgttgagttcagtttactaaaggttttactattatggtttgaagtggagtctcatgacctctcagaataaggtgtcacctccctgaaattgcatatatgtatatagacatgcacacgtgtgcatttgtttgtatacatatatttgtccttcgtatagcaagttttttgctcatcagcagagagcaacagatgttttattgagtgaagccttaaaaagcacacaccacacacagctaactgccaaaatacattgaccgtagtagctgttcaactcctagtacttagaaatacacgtatggttaatgttcagtccaacaaaccacacacagtaaatgtttattaatagtcatggttcgtattttaggtgactgaaattgcatcagtgatcataatgaggtttgttaaaacgatagctatattcaaaatgtctatatgtttatttggacttttgaggttaaagacagtcatataaacgtcctgtttctgttttaatgttatcatagaattttttaatgaaactaaattcaattgaaataaatgatagttttcatctccattca

SEQ ID NO: 6507 - DNA, 540 bp, Homo sapiens
agcagttgctgccctcccgaagtggtcctcggaggcagcgcaccccttcattttggcgaaccgaggaggaagggaggaaccgtgtgggggaaatctagaacttctggttccccaaggacccagcagactgtgttctggctacaaggtgatcactgccaccaggtactaccattaaagataccttcttctcagcaaatctatgataaaaaatataagtaacagaagaagaaataactgttatttgtcaagtgacaagcttttaatgtcagaatggctcacctaaagcgactagtaaaattacacattaaaagacattaccataaaaagttctggaagcttggtgcagtaatttttttctttataatagttttggttttaatgcaaagagaagtaagtgttcaatattccaaagaggaatcaaggatggaaaggaacatgaaaaacaaaaacaagatgttggatttaatgctagaagctgtaaacaatattaaggatgccatgccaaaaatgcaaataggagcacctgtcaggcaaaacatt

SEQ ID NO: 6508 - DNA, 1753 bp, Homo sapiens
ggggggcagagggcgagtcggcggcggcgagggcaagctctttcttgcggcacgatgccgtctctgctggtgctcactttctccccgtgcgtactactcggctgggcgttgctggccggcggcaccggtggcggtggcgttggcggcggcggcggtggcgcgggcataggcggcggacgccaggagagagaggcgctgccgccacagaagatcgaggtgctggtgttactgccccaggatgactcgtacttgttttcactcacccgggtgcggccggccatcgagtatgctctgcgcagcgtggagggcaacgggactgggaggcggcttctgccgccgggcactcgcttccaggtggcttacgaggattcagactgtgggaaccgtgcgctcttcagcttggtggaccgcgtggcggcggcgcggggcgccaagccagaccttatcctggggccagtgtgcgagtatgcagcagcgccagtggcccggcttgcatcgcactgggacctgcccatgctgtcggctggggcgctggccgctggcttccagcacaaggactctgagtactcgcacctcacgcgcgtggcgcccgcctacgccaagatgggcgagatgatgctcgccctgttccgccaccaccactggagccgcgctgcactggtctacagcgacgacaagctggagcggaactgctacttcaccctcgagggggtccacgaggtcttccaggaggagggtttgcacacgtccatctacagtttcgacgagaccaaagacttggatctggaagacatcgtgcgcaatatccaggccagtgagagagtggtgatcatgtgtgcgagcagtgacaccatccggagcatcatgctggtggcgcacaggcatggcatgaccagtggagactacgccttcttcaacattgagctcttcaacagctcttcctatggagatggctcatggaagagaggagacaaacacgactttgaagctaagcaagcatactcgtccctccagacagtcactctactgaggacagtgaaacctgagtttgagaagttttccatggaggtgaaaagttcagttgagaaacaagggctcaatatggaggattacgttaacatgtttgttgaaggattccacgatgccatcctcctctacgtcttggctctacatgaagtactcagagctggttacagcaaaaaggatggagggaaaattatacagcagacttggaacagaacatttgaaggtatcgccgggcaggtgtccatagatgccaacggagaccgatatggggatttctctgtgattgccatgactgatgtggaggcgggcacccaggaggttattggtgattattttggaaaagaaggtcgttttgaaatgcggccgaatgtcaaatatccttggggccctttaaaactgagaatagatgaaaaccgaattgtagagcatacaaacagctctccctgcaaatcatgtggcctagaagaatcggcagtgacaggaattgtcgtgggggctttactaggagctggcttgctaatggccttctactttttcaggaagaaatacagaataaccattgagaggcgaacccagcaagaagaaagtaaccttggaaaacatcgggaattacgggaagattccatcagatcccatttttcagtagcttaaaggaagccccccactttttttttttctgcctgagattctttaaggagatagacgggttgaaagacatcaatgaaac

SEQ ID NO: 6509 - DNA, 458 bp, Homo sapiens
aagtccaacagtgcgcgactccccaggtcaggagaagccccgatgtgtgcagaatctgcagatggggctgctctcggccctgcctctggctgtggaaacaggcctccaagtacccaagaaagcaaggagatggccaccaaggagaagctgcagtgtctgaaagatttccacaaggacatcctgaagccctcaccagggaagagcccaggcacgcggcctgaggacgaggctgagggaaaacctccgcagagggagaagtggtctagcaagatcgactttgtgctctctgtggctggcggcttcgtgggcttgggcaacgtctggcgcttcccgtacctctgctacaagaatggtggaggtgcgtttctcataccgtattttattttcctgtttgggagcggcctgcctgtgtttttcttggagatcatcataggccagtacacctctgaagggggcat

SEQ ID NO: 6510 - DNA, 603 bp, Homo sapiens
gtaaaacaattttctatagtaaaaatagtcagacaaagagaaagaaaaggtctgatcactgctcggttgctaggagcaacagtcgcaacagctgaaacgctcacatttttagatgctcactgtgagtgtttctatggttggctagaacctctgttggccagaatagctgagaactacacggctgtcgtaagtccagatattgcatccatagatctgaacacgtttgaattcaacaaaccttctccttatggaagtaaccataaccgtggaaattttgactggagtctttcatttggctgggagtcgcttcctgatcatgagaagcaaagaaggaaagatgaaacctacccaattaaaacacccacttttgcaggaggacttttttccatatcaaaagaatattttgagtatattggaagctatgatgaagaaatggaaatctggggaggtgaaaatatagaaatgtctttcagagtaagtttatggaaattaaatatagcagatatattaaacaatgaaatatattgtgttctaatcggctggtacatatgattacagatgtgtgcactctactttttgtgctttctgaaacttaattgctgg

SEQ ID NO: 6511 - DNA, 655 bp, Homo sapiens
caggaagtcacatagctttcacagtcaaaggaccagtgtcacctctgtggagacctgggtgactcaagcttgggagcactggggaagagaggcatggctcggggaggctgcactccagctttgtgctctgcctctgaggagaccatggcccagtatctgagtaccctgctgctcctgctggccaccctagctgtggccctggcctggagccccaaggaggaggataggataatcccgggtggcatctataacgcagacctcaatgatgagtgggtacagcgtgcccttcacttcgccatcagcgagtataacaaggccaccaaagatgactactacagacgtccgctgcgggtactaagagccaggcaacagaccgttgggggggtgaattacttcttcgacgtagaggtgggccgcaccatatgtaccaagtcccagcccaacttggacacctgtgccttccatgaacagccagaactgcagaagaaacagttgtgctctttcgagatctacgaagttccctgggagaacagaaggtccctggtgaaatccaggtgtcaagaatcctagggatctgtgccaggccattcgcaccagccaccacccactcccaccccctgtagtgctcccacccctggactggtggcccccaccc

SEQ ID NO: 6512 - DNA, 3323 bp, Homo sapiens
agtacgaagacgaccgggctctcaagatggcggccccatgcggaaacagctccagggagcagccatgttgcttcctgaacaaagcctctgaagatgcggaacgggcaaaaccgcccagtacggaacggcgcagcctcgggagcccggtgtggtgctcgcggacaggaagcaggagagtttgccaatagggatgtgacagcggttcccattaagcggtgatggtggttttgggacctgataatcgagctgggagtcagaggcgggatgtgtgcggtgaaggatgttttgatacccccatataaaataatctgtctgtcatgggagcccccacgtcctctgaaatagttcagctctgtctgcatgacttgtcctgggactgaggaaaatttaccaggtacaagaggagtaaagaatgatccctcctccacatggtgcctgctgagacttcttcatctggccttttggaagagcaaaaaatgatgaagtcccaggggttagtatcattcaaggatgtggctgtggatttcacccaggaggagtggcagcaacttgacccttctcagaggaccctgtacagggatgtgatgctggagaactacagccacctggtctcaatggggtatccagtttccaaaccagatgtcatctccaagttggaacaaggagaagagccatggatcataaagggagacatatcaaattggatctatccagatgaatatcaggcagatgggagacaagacaggaagagtaaccttcacaactcccagtcatgtattttggggacagtttccttccatcataagatactgaaaggagtcacaagggatggttcattgtgctccattttaaaagtctgtcaaggtgatggtcagctgcagagatttctagagaatcaagacaaactcttcaggcaggtcacatttgttaacagcaaaacagtgactgaggcatcagggcataaatataatccactggggaaaatatttcaagagtgcatagaaacagatatatcaatacagagattccataaatatgatgcttttaaaaagaacttaaaaccaaatattgacctaccgagttgttataagagcaattcaagaaaaaaacctgatcagagttttggaggtggaaaatcatctagccagagtgagcccaattctaatcttgagaagattcacaatggagtaataccttttgatgataatcagtgtggaaacgtttttagaaatacacaatcccttattcaatatcagaatgtggaaactaaagagaaaagctgtgtatgtgttacatgtggaaaagcctttgctaagaagtcacaactcattgtacatcaaagaattcatactggaaagaaaccatatgattgtggtgcatgcggaaaagccttcagtgagaagtttcatcttgttgtacatcagagaactcatactggggagaaaccttatgattgttctgaatgtggaaaagccttctctcagaaatcgtcccttattatacatcagagagttcacactggggaaaaaccctatgaatgtagtgaatgcgggaaagccttctcccagaaatcacccctcattatacatcagagaatacatactggggaaaaaccctatgaatgtagagagtgtgggaaggccttttcccagaagtcacagctgattatacaccacagagctcatactggagagaagccgtatgagtgtaccgaatgtgggaaagccttctgtgagaagtcccacctcattatacataaaagaattcacactggtgagaaaccctacaaatgtgctcaatgtgaggaagccttcagcaggaagacagaactcattacacatcagttagttcatactggggaaaaaccttatgaatgtactgaatgtggaaagacattctcccgcaagtcacagctcatcatacatcagagaacacatactggagaaaaaccctataaatgtagtgaatgtggcaaagccttctgccagaagtcacatctcattggacatcagagaattcacacaggagaaaaaccttatatatgtactgaatgtgggaaagccttctctcagaagtcccaccttccgggacaccagcgaattcatacaggagagaaaccttacatatgtgctgaatgtggaaaggccttttctcagaagtcagaccttgttttacatcagaggattcatactggggaaagaccctatcaatgtgctatatgtgggaaggccttcatccagaagtcacaactaactgtacaccagagaattcacacagtggtaaaatcataatgaactggccacagaaaagccttagtattagctcaagccttaataattactagaaacccaattaatttgataagcttggggacaacatcccaatagataaaaatttttaagggaatttgtttctagtttggtgatgcctaacttttccagcaaagatgatggaaaatagttatataaatgaagaacatttttaatatggcatgtaaagcttttaaagttatgaactcagtgatcagcacagcaagttaagcatacagaatattgtcaagttgcatattccttatactacaaaatgataatcagccattgtgaaactgctaatattagcttgtcataattatggccataaactaatttttctataaaagacgtggaagaaagcttaagtaaacaataaaataaaacctatacactattttaagaaggggcttgagcatgacccctaaagctacatgtaaagttcttgtacaaaaaatggaatgataggttgatcagattcagtaaagttgatctgtatgcattttcccatctcaagcatataagttgacctgcatctctggaaggaccttgagattgatgcattttgagcaggtctcccttttactcttcccaactgggaacttggagctgaaaaacattggcactgaggccagatggccttgggtttaatcctggctcagtgcctcacagattgtgtgactttaggcaaacatacttctcctagctgagtattttttatcagtaagtacaaatacaatgcagagctcattttcagttaatattagtactttttaaatctttactctctatcttgaagcattagatgttaagactaatgtgtaaaaaccacgtctgagcttgcttttccctctggacactctgcttttgattgcctatccctataagtggctcattttactgtcttctgatcctggtggccttatttttgctatgttaaggttgtgttttttaatacttggatttattttcatatacttacataaaccgtggtgattgcacataaagaccctg

SEQ ID NO: 6513 - DNA, 1634 bp, Homo sapiens; identical to SEQ ID NO: 2247

SEQ ID NO: 6514 - DNA, 2869 bp, Homo sapiens
ccgggatcctgccgcagtgcttggggctgtaaccttgaactttcccagcgcggtgacacattctccccgctctccctcccgcccgcccgctcgccctcctgcgccctcccgcgcccccctccccgccttttttgaaaaagcattttaccaccaaccaccaccccaatccaacccacaccgaaccttcgcgcaccccctacaccccaacaacaacaacaactgcaaaatagaaaacaaatccccaaacccaggcgaaaagcagccaacaccggcggcggcggcggcctcggcaagcacggccagcgcgctcggactgcaagagggttaaaagtgtagattggatttcacccctggaaatctagcacgccgagtgaacttgaatctttggctatttaaggaggactgggtttgttgtgaagttgcggtgatccagcgcagagccccgtcctgattgatcgcatcgcggggctcagatgactgtaaaatgaatagatgaaattcttgcttctcgaagattttcttgggcatctcccggaaagtgcgttttaaggcgaagtcatgatgtattctcccatctgtctcactcaggatgaatttcacccattcatcgaggcacttcttccacatgtccgtgcaattgcctatacttggttcaacctgcaggctcgaaaacgcaagtactttaaaaagcatgagaagcgaatgtcaaaggatgaagaaagagcagtcaaagatgagcttctcagtgaaaagcctgaaatcaaacagaagtgggcatccaggctccttgccaaactgcgcaaagatattcgccaggagtatcgagaggactttgtgctcaccgtgactggcaagaagcacccgtgctgtgtcttatccaatcccgaccagaagggtaagattaggagaatcgactgcctgcgacaggcagacaaagtctggcgtctggatctagtcatggtgatcctgttcaaaggcatccccttggaaagtaccgatggagagcggctcatgaaatccccacattgcacaaacccagcactttgtgtccagccacatcatatcacagtatcagttaaggagcttgatttgtttttggcatactacgtgcaggagcaagattctggacaatcaggaagtccaagccacaatgatcctgccaagaatcctccaggttaccttgaggatagttttgtaaaatctggagtcttcaatgtatcagaacttgtaagagtatccagaacgcccataacccagggaactggagtcaacttcccaattggagaaatcccaagccaaccatactatcatgacatgaactcgggggtcaatcttcagaggtctctgtcttctccaccaagcagcaaaagacccaaaactatatccatagatgaaaatatggaaccaagtcctacaggagacttttacccctctccaagttcaccagctgctggaagtcgaacatggcacgaaagagatcaagatatgtcttctccgactactatgaagaagcctgaaaagccattgttcagctctgcatctccacaggattcttccccaagactgagcactttcccccagcaccaccatcccggaatacctggagttgcacacagtgtcatctcaactcgaactccacctccaccttcaccgttgccatttccaacacaagctatccttcctccagccccatcgagctacttttctcatccaacaatcagatatcctccccacctgaatcctcaggatactctgaagaactatgtaccttcttatgacccatccagtccacaaaccagccagcctaacggcagtggtcaagtagtagggaaagtgcctggccatttcactcctgtcttggcaccctctccccatcccagtgcagtgcgacctgtgaccctgagcatgacagatactaaacccatcactacatccactgaagcctacacagcctcaggcacatctcaagccaatcgatatgtgggactaagcccaagagacccatccttcctacatcagcaacagctgaggatttgtgactggaccatgaatcaaaacggcaggcatttataccccagtaccagtgaggatacattgggaattacttggcaaagtcctggtacctgggctagcttggttcctttccaagtgtcaaataggacacccatcttaccggccaatgtccaaaattacggtttgaacataattggagaacctttccttcaagcagaaacaagcaactgagggaaaaagaaacacaacaatagtttaagaaattttttttttaaataaaaaaaaaggaaaagaggaagactggacaaaacaacacaaaggcagaaaggaaagaaactgaagaaagaagataatagaccagcaattgcagcacttacaatcactaattcccttaaggttgaaactgtaatgacataaaaagggtcgatgatatttcactgatggtagatcgcagcccctgcaacgtagcctttgttacatgaagtccgctgggaaatagatgttctgtctctatgacaatatattttaactgactttctagatgccttaatatttgcatgataagctagttttattggtttagtattcttgttgtttacgcatggaatcactattcctggttatctcaccaacgaaggctaggaggcggcgtcagaggtgctgggtgacagagccatgagccagccattttataagcactctgatttctaaaagttaaaaaaaatatatgaaatctctgtagcctttagttatcagtacagatttattaaatttcggcccttaacccagccttttccagtgtgtaacccagtttgaaatcttaaaaaaagaaaaaatgaaaaaaaaaggaaaaaaa

SEQ ID NO: 6515 - DNA, 1980 bp, Homo sapiens
tccccgggagaccctgtgcccctaaatcgcggtccactgcgcgcgtcaggtttctagaagcagggtagaacagacggcagacacctagcccaggctggtgttgttactaaacaatggcagctggtgagccaagggtgaccagggccctgaactcggtggcccagctttgagggaagcaaaattgttctcaattgtggaagaggagaatttggacagcagaacaaaaaaggaagacagcctcttggagcagatacatttgtcacaggaagccacatcaaaccctggggcctttgctgggcctctccatctgcccagttactgggaggtagatagccccaggaaggaatccagtcaggcctgggcaccaggccaggagtggataaagctagaaagagacaccacagaagagaagatgtttgaacagctgaagccaatcgaacctagagattgctggagggaggcacgggtgaagaagaagccagtcacctttgaggatgtggcagtgaatttcacccaggaagagtgggactgtctagatgccagccagagggtcctttaccaggatgttatgtcggaaacctttaagaatctaacatctgtggccagaatctttctgcataagccagagctaatcaccaagcttgagcaagaagaggaacagtggagagagtttgtccatctcccaaacacagaaggcctttcagaaggcaagaagaaagagcttcgagaacaacatcccagtctgagagatgaggggactagtgatgacaaggtcttccttgcatgcagaggggccggccagtgccccctatctgccccagctgggactatggacaggacccgggtgcttcaagcatcccaggctgggccaccctttttttgctacacctgtggcaaatgtttcagcaggcgctcctacctctatagccaccagtttgttcacaatcccaagctgactaacagctgcagtcagtgtgggaagttgtttcggagccccaagtccctcagctatcacagacgcatgcatcttggggagaggcccttctgttgcacgctctgtgacaagacctactgtgatgcttctggactaagtcgtcaccgccgcgtccatctgggttaccggccccattcatgctctgtgtgtgggaagagcttccgggaccagtctgagctcaaacgccaccagaagatacaccaaaaccaggagccagtggatggaaaccaggagtgtactttgaggattccaggcacccaggctgaattccagacacccatcgccagaagccagaggtccatccaggggcttttggatgtgaaccatgcaccagtggccaggtcccaggaacccatatttagaactgagggtcctatggcccagaaccaggcatctgtacttaagaaccaagcacctgtgaccaggacccaggcacccatcactggaaccctctgtcaggatgccagatccaactctcatccagtgaagccctcaagactcaatgtcttctgttgcccccattgttctttgacttttagcaagaaatcctatctctccagacaccagaaggcccacctcacagagccgcccaactactgcttccattgcagcaagtctttcagctcattttccaggctggtcagacaccagcagacccactggaagcagaagagctacctttgccctatctgtgacctctcctttggggagaaagagggccttatggatcactggaggggctataaaggcaaggacctgtgccagagcagccaccataaatgccgggtgatcctgggccagtggcttggcttctctcatgatgtccccactatggctggggaggaatggaagcatggaggtgatcaatctccccccaggatccatacccccaggagaagaggcctaagagagaaggcctgcaaaggagacaaaacaaaggaggcagtgagcatcttgaaacataaataaatggcctttctgactga

SEQ ID NO: 6516 - DNA, 3191 bp, Homo sapiens
ggaaggcagaagcaatctctgccgagagagtcagccgagcggccgcgcggagaggaggggcgggcggtccccaggcgggcgggtgcagggcgcagggcgccgacctgctggagagggggcccgggcgcgaggcggagtcccggcgcgcagccaggctggtggaggcccccggcaggctgcagattccctccggctccgggagccgcagcaggaccggccaggaggcgccatggaggggagccccatcccggtgctgacagtgcccaccgcgccctacgaggaccagcggccggccggcggcgggggtctgcggcgacccaccggcctcttcgagggccagcgcaactacctgcccaactttatccagagcgtgctgtcgtccatcgacctgcgcgaccgtcagggctgcaccatggtggtgggcagcgacggcaggtactttagcaggacggccatcgagatcgtggtgcagatggccgcggccaacgggattggacgactgattattggacagaatggcatcttgtcgacacctgcggtctcctgcattatcaggaagatcaaggcagctggtggaatcattctaacagccagccactgccctggaggaccagggggagagtttggagtgaagtttaatgttgccaatggagtggagatagtggacccagtggatatctatcttaacctccttcggaccatctttgactttcatgccatcaagggtttgctgactggacccagccaactgaagattcgcattgacgcaatgcacggagttatgggaccttatgtgagaaaagttctgtgtgatgagctgggggccccagccaattctgcaataaactgtgttcccctggaagactttggagggcagcaccctgacccaaacctgacatatgcaacgactcttctggaagcaatgaaaggaggagaatatggatttggagctgcatttgatgctgatggggaccgttatatgatcctaggccaaaatggcttctttgtgagcccttctgactccctggccatcattgctgccaacctctcttgcattccatatttccgtcagatgggggtccgcgggtttgggaggagtatgccaaccagcatggccctggacagagtggccaaatcaatgaaggtccctgtatatgagaccccagctggatggagattcttctcaaatctgatggactcaggacgttgcaatctgtgtggggaagagagctttggcactggctctgaccacctccgagagaaggatggcctgtgggctgtcttggtctggctctccattattgctgcccggaagcagagtgtggaggaaattgtccgagatcactgggccaaatttggccgccactactattgcaggtttgactatgaggggttggatcccaagacgacatattatatcatgagggacctggaggccctggtcacagacaaatccttcattggccagcagtttgctgtggggagccatgtctacagcgtggcgaagacggatagttttgaatacgtggaccctgtggatggcactgtgaccaagaaacagggcctaaggatcattttctcggatgcatcacggctcatcttccggctcagttcctccagtggtgtgcgggccaccctcagactgtacgcagagagctacgagagggatcccagcggccatgaccaggagccacaggcagtgctgagccctctcatagccatcgcactgaaaatatcccagattcatgagagaactggccggaggggacccactgtcatcacctgaatagaggaaagatcactcaccagggccaaagagagtgctcagcgggagatgcttcactgatgccttcttgctacctgtttgtgcctcttatgactttggaaaaacaaaagatattttgcttttgggggatagagggtgggtgggaaaagaaaaaaaatccatttggttttggttttgtcctattcctccaaatgcagcagggcctttagttgtctgttaaagctgcactataatttggtatctacattttatcacacaaaggaacctccccttttgacaacaactgggctaggcagctgttaatcacaacatttgtgcatcacttgtgccaagtgagaaaatgttctaaaatcacaagagagaacagtgccagaatgaaactgaccctaagtcccaggtgcccctgggcaggcagaaggagacactcccagcatggaggagggtttatcttttcatcctaggtcaggtctacaatgggggaaggttttattatagaactcccaacagcccacctcactcctgccacccacccgatggccctgcctcccccatcccatccccaacatccctgtaccaccttctctcacatcttctaaagctttgtacaaatcacaatggtgcacttccaacaaaatatatcaataggtgttttcctctcttattttgtaaatagtattattttagctattaagctggataccttctttcaaattcagccattcagttgtaaagttgggaagaagtttcttgacaagactctgcaattaaatgcttaaaatttggaggggatccttccttgattacatcaagtatgttggtacatgggtttatacaagttcctcttgagaaggcaaaaagaccaccatgtgtgagagctctttgacttggccaataggggcctatcttaatgcacttgtttggacacatttctgatcttatttgtaaaggctgcaaaaggagaggatgaaatgctgtaaaagtaggaaatgaagtggaagctggaagaaaatgtaattggtggtacagctatgggccagatggtggaggggagggtggggacccctgccggcaagcagagtgtcacagctggctttcctcacttgggaaaagggtactgccggtctagcagcctcctctgtactcagccaggacacccagcgcgtgggacctgtttgtgtctgttttgcttccttgggaacggcacagtcactcaccctgccatttgcggaaatgacctggtgcactttgactgttaagcaatgcgttattgctgtagtcaaggttagtgcaagcaaggaaacattcccagtaaggtatttgtttccattttctgtctgtgcttctgtcagaaacttgctaggacatttagtggccaataaaaaagaaattcctaatttcaacctta

SEQ ID NO: 6517 - DNA, 559 bp, Homo sapiens
agtgtgtcggttgcccctggagagatcccgaaaggggcgccctgggccaaggggcaggtggcgcctcgggggggagcccggtcacaccctctcgcccacggtgcccccgccagtccctatggggcggcccctgaggagctggacggagaccaaagacctggggttccttcaggagtcacaagtactattgggttggaaaatctgggagaataatagtttacttactgatgaaactgctgtattatcattcattaagctggagcagatcacagtttgagggtactaccattaaagataccttcttctcagcaaatctatgataaaaaatataagtaacagaagaagaaataactgttatttgtcaagtgacaagcttttaatgtcagaatggctcacctaaagcgactagtaaaattacacattaaaagacattaccataaaaagttctggaagcttggtgcagtaatttttttctttataatagttttggttttaatgcaaagagaagtaagtgttcaatattccaaagaggaatcaaggatggaaaggaacatgaaaa

SEQ ID NO: 6518 - DNA, 3377 bp, Homo sapiens
atgcctgccctcctgggaatgaagcacagcaggtctcagcctcatcttacccagccccccactcaagatggaggtgcctggtttgaacacctctgacaaatggaagtctgtgttgtccagaggcaatgcagtgggggcttaagaagataactctggacttagaccgcttggcttcaaatcaaagagtgcatgaaccaaccagctggcctagtgatgatgttaggcaagtgacttctcagtttcttcatctgcaaactgggaaatttcctatctcagggttaaaagagaggtaatcttaggtgcttacctagcacatgcaatacctgaacaccttctatggctgccccaaggagagctgcaacctgtttgtgctgaaggacacactaaagaagatgcagaagttctttggactgccccagacaggtgatcttgaccagaataccatcgagaccatgcggaagccacgctgcggcaacccagatgtggccaactacaacttcttccctcgcaagcccaagtgggacaagaaccagatcacatacaggatcattggctacacacctgatctggacccagagacagtggatgatgcctttgctcgtgccttccaagtctggagcgatgtgaccccactgcggttttctcgaatccatgatggagaggcagacatcatgatcaactttggccgctgggagcatggcgatggatacccctttgacggtaaggacggactcctggctcatgccttcgccccaggcactggtgttgggggagactcccattttgatgacgatgagctatggaccttgggagaaggccaagtggtccgtgtgaagtatgggaacgccgatggggagtactgcaagttccccttcttgttcaatggcaaggagtacaacagctgcactgataccggccgcagcgatggcttcctctggtgctccaccacctacaactttgagaaggatggcaagtacggcttctgtccccatgaagccctgttcaccatgggcggcaacgctgaaggacagccctgcaagtttccattccgcttccagggcacatcctatgacagctgcaccactgagggccgcacggatggctaccgctggtgcggcaccactgaggactacgaccgcgacaagaagtatggcttctgccctgagaccgccatgtccactgttggtgggaactcagaaggtgccccctgtgtcttccccttcactttcctgggcaacaaatatgagagctgcaccagcgccggccgcagtgacggaaagatgtggtgtgcgaccacagccaactacgatgatgaccgcaagtggggcttctgccctgaccaagggtacagcctgttcctcgtggcagcccacgagtttggccacgccatggggctggagcactcccaagaccctggggccctgatggcacccatttacacctacaccaagaacttccgtctgtcccaggatgacatcaagggcattcaggagctctatggggcctctcctgacattgaccttggcaccggccccacccccacgctgggccctgtcactcctgagatctgcaaacaggacattgtatttgatggcatcgctcagatccgtggtgagatcttcttcttcaaggaccggttcatttggcggactgtgacgccacgtgacaagcccatggggcccctgctggtggccacattctggcctgagctcccggaaaagattgatgcggtatacgaggccccacaggaggagaaggctgtgttctttgcagggaatgaatactggatctactcagccagcaccctggagcgagggtaccccaagccactgaccagcctgggactgccccctgatgtccagcgagtggatgccgcctttaactggagcaaaaacaagaagacatacatctttgctggagacaaattctggagatacaatgaggtgaagaagaaaatggatcctggcttccccaagctcatcgcagatgcctggaatgccatccccgataacctggatgccgtcgtggacctgcagggcggcggtcacagctacttcttcaagggtgcctattacctgaagctggagaaccaaagtctgaagagcgtgaagtttggaagcatcaaatccgactggctaggctgctgagctggccctggctcccacaggcccttcctctccactgccttcgatacaccgggcctggagaactagagaaggacccggaggggcctggcagccgtgccttcagctctacagctaatcagcattctcactcctacctggtaatttaagattccagagagtggctcctcccggtgcccaagaatagatgctgactgtactcctcccaggcgccccttccccctccaatcccaccaaccctcagagccacccctaaagagatactttgatattttcaacgcagccctgctttgggctgccctggtgctgccacacttcaggctcttctcctttcacaaccttctgtggctcacagaacccttggagccaatggagactgtctcaagagggcactggtggcccgacagcctggcacagggcagtgggacagggcatggccaggtggccactccagacccctggcttttcactgctggctgccttagaacctttcttacattagcagtttgctttgtatgcactttgtttttttctttgggtcttgttttttttttccacttagaaattgcatttcctgacagaaggactcaggttgtctgaagtcactgcacagtgcatctcagcccacatagtgatggttcccctgttcactctacttagcatgtccctaccgagtctcttctccactggatggaggaaaaccaagccgtggcttcccgctcagccctccctgcccctcccttcaaccattccccatgggaaatgtcaacaagtatgaataaagacacctactgagtggccgtgtttgccatctgttttagcagagcctagacaagggccacagacccagccagaagcggaaacttaaaaagtccgaatctctgctccctgcagggcacaggtgatggtgtctgctggaaaggtcagagcttccaaagtaaacagcaagagaacctcagggagagtaagctctagtccctctgtcctgtagaaagagccctgaagaatcagcaattttgttgctttattgtggcatctgttcgaggtttgcttcctctttaagtctgtttcttcattagcaatcatatcagttttaatgctactactaacaatgaacagtaacaataatatccccctcaattaatagagtgctttctatgtgcaaggcacttttcacgtgtcacctattttaacctttccaaccacataaataaaaaaggccattattagttg

SEQ ID NO: 6519 - DNA, 1054 bp, Homo sapiens
atggccaaagccgcggcgatcggcatcgacctgggcaccacctactcctgcgtgggggtgttccaacacggcaaggtggagatcatcgccaacgaccagggcaaccgcaccacccccagctacgtggccttcacggacaccgagcggctcatcggggatgcgggtgtgatcgcggggctcaacgtgctgcggatcatcaacgagcccacggccgccgccatcgcctacggcctggacagaacgggcaagggggagcgcaacgtgctcatctttgacctgggcgggggcaccttcgacgtgtccatcctgacgatcgacgacggcatcttcgaggtgaaggccacggccggggacacccacctgggtggggaggactttgacaacaggctggtgaaccacttcgtggaggagttcaagagaaaacacaagaaggacatcagccagaacaagcgagccgtgaggcggctgcgcaccgcctgcgagagggccaagaggaccctgtcgtccagcacccaggccagcctggagatcgactccctgtttgagggcatcgacttctacacgtccatcaccagggcgaggttcgaggagctgtgctccgacctgttccgaagcaccctggagcccgtggagaaggctccacccgcatccccaaggtgcagaagctgctgcaggacttcttcaacgggcgcgacctgaacaagagcatcaaccccgacgaggctgtggcctacggggcggcggtgcaggcggccatcctgatgggggacaagtccgagaacgtgcaggacctgctgctgctggacgtggctcccctgtcgctggggctggagacggccggaggcgtgatgactgccctgatcaagcgcaactccaccatccccaccaagcagacgcagatcttcaccacctactccgacaaccaacccggggtgctgatccaggtgtacgagggcgagagggccatgacgaaagacaacaatctgttggggcgcttcgagctgagcggcatccctccggcccccaggggcgtgccccagatcgaggtgacctt

SEQ ID NO: 6520 - DNA, 930 bp, Homo sapiens
tcccttattcaactgtcttcatttattctgtaaaagtagcagcagctcagccctgaccatctcctctctcacttgtgggagtctcatttagggatcgtttccacctggatgtttgaggttgtgtagatgtggccggcacccttgagagtggagctagggggtgcagactgagcagtgaacagaaggagccttggacagggctgggccagcctcccgagttccaggagcgaattgcaaacccaccgggaaaatgagcgaagagacggtccccgaggctgcctcgccgccgcccccgcaggggcagccttactttgaccgcttctcagaggacgaccccgagtacatgcgccttcgcaaccgggcggcggacctgcggcaggacttcaacctgatggagcagaagaagcgcgtcaccatgatcctgcagagtccctctttcagggaggagctggaaggcctcatccaggagcagatgaagaaggggaacaactcctccaacatctgggccctgcgacagatcgcggacttcatggccagcacctcccacgcagtcttcccgacatcttccatgaatgtctccatgatgacgcctatcaatgacctccacacagctgactccctgaacctggccaaaggggagcggctcatgcggtgcaagatcagcagtgtctaccgactcctggacctctatggctgggcccagctgagtgacacctatgtcacgttgagagtcagcaaggagcaggaccacttcctgatcagccctaagggagtttcttgcagtgaagtcacagcgtccagcctgatcaaggtgaacattctgggagaggtggtggagaagggcagcagctgcttcccagtggacaccacaggcttctgtctgcactcggccatctatgcagcgaggcccgacgtgcgctgcatcatcca

SEQ ID NO: 6521 - DNA, 1196 bp, Homo sapiens
agagcagctctagggaagagagacatagacacaaggtataacaacactatgtaaatagtgttgggatagagggtctgtaggaagggttggtgtgggagttcagagaactacattcctcctaggggaaacaggagaatcaaataggaacggagatacagagtggggaatagagaagtcaaatggagaataagagggagtgataactgaataggggtagtaagaagaaaaagggagctacattgaggagaatggaaagttgaaagtaggtatggaggggaggagactgacaggcaggaacggagacccccctctggaggcggaaagaggcaggaccacttccggccagggagggggataggctcagacacaaggagaggcttggagagagcagacgccttctggattcaagaagacgagggccctctgcctcccccggggagcctggggcttcccttccctccagatatacagactgagaccacagaagaggacagtgtcctgctgatgcataccctgttggcggcaaccaaggactccctggccatggacccaccagttgtcaaccggcctaagaaaagcaagaccaagaaggcccctataaagactattactaaggctgcacctgctgcccctccagtcccagctgccaatgagattgccaccaacaagcccaaaataacttggcaggctttaaacctgccagtcattacccagatcagccaggctttacctaccactgaggtaaccaatactcaggcttcttcagtcactgctcagcctaagaaagccaacaagatgaagagagttactgccaaggcagcccaaggctcccaatccccaactggccatgagggtggcactatacagctgaagtcacccttgcaggtcctaaagctaccagtcatctcacagaatattcacgctccaattgccaatgagtcagccagttcccaagccttgataacctctatcaagcctaagaaagcttccaaggctaagaaggctgcaaataaggccatagctagtgccaccgaggtctcgctggctgcaactgccacccatacagctaccacccaaggccaaattaccaatgagacagccagtatccacaccacagcagcctccatccgaaccaagaaagcctccaaagccaggaagacaattgctaaggtcataaatactgacactgagcatat

SEQ ID NO: 6522 - DNA, 1104 bp, Homo sapiens
agtcagtgactctctattctggagaagactatcctgatacagctccagtgatccatggggtggacgttataaacagtacattagttaaagttacctggtcaacagttccaaaggacagagtacatggacgtctgaaaggctatcagataaattggtggaaaacaaaaagtctgttggatggaagaacacatcccaaagaagtgaacattctaagattttcaggacaaagaaactctggaatggttccttccttagatgcctttagtgaatttcatttaacagtcttagcctataactctaaaggagctggtcctgaaagtgagccttatatatttcaaacaccagaaggagtacctgaacagccaacttttctaaaggtcatcaaagttgataaagacactgccactttatcttggggactacctaagaaattaaatggaaacttaactggctatcttttgcaatatcagataataaatgacacctacgagattggagaattaaatgatattaacattacaactccatcaaagcccagctggcacctctcaaacctgaatgcaactaccaagtacaaattctacttgagggcttgcacttcacagggctgtggaaaaccgatcacggaggaaagctccaccttaggagaagggaaatatgctggtttatatgatgacatctccactcaaggctggtttattggactgatgtgtgcgattgctcttctcacactactattattaactgtttgctttgtgaagaggaatagaggtggaaagtactcagttaaagaaaaggaagatttgcatccagacccagaaattcagtcagtaaaagatgaaacctttggtgaatacagtgacagtgatgaaaagcctctcaaaggaagccttcggtcccttaatagggatatgcagcctactgaaagtgctgacagcttagtcgaatacggagagggagaccatggtctcttcagtgaagatggatcatttattggtgcctacgctggatctaaggagaagggatctgttgaaagcaatggaagttctacagcaacttttccccttcgggcataaacacaacatatgtaagcaacgctactgg

SEQ ID NO: 6523 - DNA, 4148 bp, Homo sapiens
caggtggaatgtcagaagactgagaacattgttccttcttcatactgctgctctgttgccagagaatcccaatttacactcaaagcttctttgattaagtgctaggagataaatttgcattttctcaaggaaaaggctaaaagtggtagcaggtggcatttaccgtcatggagagcagggatcataacaacccccaggagggacccacgtcctccagcggtagaagggctgcagtggaagacaatcacttgctgattaaagctgttcaaaacgaagatgttgacctggtccagcaattgctggaaggtggagccaatgttaatttccaggaagaggaagggggctggacacctctgcataacgcagtacaaatgagcagggaggacattgtggaacttctgcttcgtcatggtgctgaccctgttctgaggaagaagaatggggccacgccttttatcctcgcagcgattgcggggagcgtgaagctgctgaaacttttcctttctaaaggagcagatgtcaatgagtgtgatttttatggcttcacagccttcatggaagccgctgtgtatggtaaggtcaaagccctaaaattcctttataagagaggagcaaatgtgaatttgaggcgaaagacaaaggaggatcaagagcggctgaggaaaggaggggccacagctctcatggacgctgctgaaaaaggacacgtagaggtcttgaagattctccttgatgagatgggggcagatgtaaacgcctgtgacaatatgggcagaaatgccttgatccatgctctcctgagctctgacgatagtgatgtggaggctattacgcatctgctgctggaccatggggctgatgtcaatgtgaggggagaaagagggaagactcccctgatcctggcagtggagaagaagcacttgggtttggtgcagaggcttctggagcaagagcacatagagattaatgacacagacagtgatggcaaaacagcactgctgcttgctgttgaactcaaactgaagaaaatcgccgagttgctgtgcaaacgtggagccagtacagattgtggggatcttgttatgacagcgaggcggaattatgaccattcccttgtgaaggttcttctctctcatggagccaaagaagattttcaccctcctgctgaagactggaagcctcagagctcacactggggggcagccctgaaggatctccacagaatataccgccctatgattggcaaactcaagttctttattgatgaaaaatacaaaattgctgatacttcagaaggaggcatctacctggggttctatgagaagcaagaagtagctgtgaagacgttctgtgagggcagcccacgtgcacagcgggaagtctcttgtctgcaaagcagccgagagaacagtcacttggtgacattctatgggagtgagagccacaggggccacttgtttgtgtgtgtcaccctctgtgagcagactctggaagcgtgtttggatgtgcacagaggggaagatgtggaaaatgaggaagatgaatttgcccgaaatgtcctgtcatctatatttaaggctgttcaagaactacacttgtcctgtggatacacccaccaggatctgcaaccacaaaacatcttaatagattctaagaaagctgctcacctggcagattttgataagagcatcaagtgggctggagatccacaggaagtcaagagagatctagaggaccttggacggctggtcctctatgtggtaaagaagggaagcatctcatttgaggatctgaaagctcaaagtaatgaagaggtggttcaactttctccagatgaggaaactaaggacctcattcatcgtctcttccatcctggggaacatgtgagggactgtctgagtgacctgctgggtcatcccttcttttggacttgggagagccgctataggacgcttcggaatgtgggaaatgaatccgacatcaaaacacgaaaatctgaaagtgagatcctcagactactgcaacctgggccttctgaacattccaaaagttttgacaagtggacgactaagattaatgaatgtgttatgaaaaaaatgaataagttttatgaaaaaagaggcaatttctaccagaacactgtgggtgatctgctaaagttcatccggaatttgggagaacacattgatgaagaaaagcataaaaagatgaaattaaaaattggagacccttccctgtattttcagaagacatttccagatctggtgatctatgtctacacaaaactacagaacacagaatatagaaagcatttcccccaaacccacagtccaaacaagcctcagtgtgatggagctggtggggccagtgggttggccagccctgggtgctgatggactgatttgctggagttcagggaactacttattagctgtagagtccttggcaaatcacaacattctgggccttttaactcaccaggttgcttgtgagggatgagttgcatagctgatatgtcagtccctggcatcgtgtattccatatgtctataacaaaagcaatatatacccagactacactagtccataagctttacccactaactgggaggacattctgctaagattccttttgtcaattgcaccaaaagaatgagtgccttgacccctaatgctgcatatgttacaattctctcacttaattttcccaatgatcttgcaaaacagggattatcatccccatttaagaactgaggaacctgagactcagagagtgtgagctactggcccaagattattcaatttatacctagcactttataaatttatgtggtgttattggtacctctcatttgggcaccttaaaacttaactatccttccagggctcttccagatgaggcccaaaacatatataggggttccaggaatctcattcattcattcagtatttattgagcatctagtataagtctgggcactggatgcatgaattccactccttccagaaccaactgcattggttttccatgaccttaaggcagtagttctcaactggggggcaattttgcactgaagagagcatttggcagagtctgaagaagtttttggtgtcacagctttgtggggagcatgctatggcatttagtgggtaaagaccagggatgctgccaaacctgccttgcacaggacagcccctgcaacaaagaattatccagacaaaaatatcaatggtgctgaggttgagaaaacctgacttaaggggctgggatgcttttgaactagcttaaggcccaggactgtggagtgtgtggaccaccccacagaggagggactcagatttatttactcttgctggatctgtagtgatggagttccttctggtgtcagccccacaggaggctcccaggcctccctcacttcccatacccagtctaggagctccttctggctcccaagcacccagagctttcctccgccttttagttttggttcctccactggaatgtaggctcctcacgggcgatggctgtcttttcttgactttgtatcttcactgccaagcaaaaagtctgccaagtgggaatgtttaataaatattcattgaataatgaatgaaccatcttcgtacatgaataataatactgtcttacgtttttctggtgctttataatgtatacattacatctgagtattttattttatttaattttcaaaacaatcctttaaggtcaacattgttatccctattttgctgatgaggaaactaaggttagaaacattttgatttcctctaggacgtatagctaggaagtgttactatcttgatttgaacaaattttctggtgctaagtctgatgttctttccatgaatcattgtggtggttgagatggagctttgtaatgggaataaaacagtaccttaggttctttctgaaaaggaggtatctagcaatggataaatagataccactgaatgaaattaaatgttgattaggaacaaatttaaggcttaaaaaatactttatgagcagcaagattgctttaacttttaaaatgaagctttggttctctgatttgtaatgagcacctggacatgtcaattaaaatgcccatttgtgaagcttactcaataaaactttaaattgtc

SEQ ID NO: 6524 - DNA, 852 bp, Homo sapiens
ggcgtctctgggaaggcagtggattgttggtctgcgtggaacttctcaggtggacaccagagcatggaacacatccacgacagcgatggcagttccagcagcagccaccagagcctcaagagcacagccaaatgggcggcatccctggagaatctgctggaagacccagaaggcgtgaaaagatttagggaatttttaaaaaaggaattcagtgaagaaaatgttttgttttggctagcatgtgaagattttaagaaaatgcaagataagacgcagatgcaggaaaaggcaaaggagatctacatgacctttctgtccagcaaggcctcatcacaggtcaacgtggaggggcagtctcggctcaacgagaagatcctggaagaaccgcaccctctgatgttccagaaactccaggaccagatctttaatctcatgaagtacgacagctacagccgcttcttaaagtctgacttgtttttaaaacacaagcgaaccgaggaagaggaagaagatttgcctgatgctcaaactgcagctaaaagagcttccagaatttataacacatgagcccccaaaaagccgggactggcagctttaagaagcaaaggaatttcctctcaggaccgtgccgggtttatcattgctttgttatttgtaaggactgaaatgtacaaaacccttcaatgggatgtgtgttttattaactgcttcaccagtaaattttgcatgatggctaagctaacataaaaaaagaataataataacttggaagttttagtttacaaaacagagattccttcaacactggacacgtcgagcattttgtagcttaattaaacctcatgtaaggcc

SEQ ID NO: 6525 - DNA, 291 bp, Homo sapiens
attctcttttcttttattcttgtctgttctgcctcactcccgagctctactgactcccaacagagcgcccaagaagaaaatggccataagtggagtccctgtgctaggatttttcatcatagctgtgctgatgagcgctcaggaatcatgggctatcaaagaagaatttggacgatttgccagctttgaggctcaaggtgcattggccaacatagctgtggacaaagccaacctggaaatcatgacaaagcgctccaactatactccgatcaccaatgtacctccagaggt

SEQ ID NO: 6526 - DNA, 429 bp, Homo sapiens
atgctgttgcgcctggcacgcccagccaaactctctgaactcatccagccccttcccctggagagggactgctcagccaacaccaccagctgccacatcctgggctggggcaagacagcagatggtgatttccctgacaccatccagtgtgcatacatccacctggtgtcccgtgaggagtgtgagcatgcctaccctggccagatcacccagaacatgttgtgtgctggggatgagaagtacgggaaggattcctgccagggtgattctgggggtccgctggtatgtggagaccacctccgaggccttgtgtcatggggtaacatcccctgtggatcaaaggagaagccaggagtctacaccaacgtctgcagatacacgaactggatccaaaaaaccattcaggccaagtgaccctgacatgtgaca

SEQ ID NO: 6527 - DNA, 670 bp, Homo sapiens
caaatgaggctgcaagagattttgggggtgctgttcaagattattttaagtggaaggccgacatgaccaactttgatgtggaggttcttttgaacatccatgataatgaagtcattgtgggcattgcattgactgaagagagtctccaccgaagaaatataacacattttggacctacaactcttagatcaactcttgcctatgggatgctcaggctctgtgatcctctaccttatgatataatagtcgatccaatgtgtggaactggggcaataccaatagagggggccactgaatggtctgactgtttccatattgctggtgataataatccactggctgtgaatagagcagcaaataacattgcatctttattgaccaagagccaaattaaagaagggtaaaaatttaaaagatttcttagcatcttttagagttagagaatcactttttatattgactttatgaattaaaactcccagtgcattgtgacgtcattgtaaccaaaatgaatatactatgagactccatttacatttttaaagtttattgaaaataagttatatttttaaaatattattttagcgataatttccccaccatatgcaatttttcatttgtcttattcatatgtcttttcccctacatattggaagaatattttatagac

SEQ ID NO: 6528 - DNA, 663 bp, Homo sapiens
gtcagaagaggcagaagtggatgtgagagaaagagagacacagagagacagagagccaaagagggcaagagacttgactttaagagactcctgtactgacaactccatgcagttcggaaccagaacgactacggctgaaccagggttcatggggacatggcaaaacgctgatactaacctcttattcagaatgtcccaacaggccatccgttgcacactggtaaactgcacatgtgaatgttttcagccagggaagattaacctgaggacttgtgatcagtgtaaacatggctgggtggcacatgaaaccctgaaatcgtgtctccaatgacttctgctcagaggtgaaacacagcattctttccggctgccttatactgtgcagtgtcctgggtgtggggcaatgaggaagtgacttgggttttctagtgtgtaattttcctctgaaatgcatggaacagcaacaaaactaccaagatacattgcccagaatggtttcatggtagcactgaatgcattctacctgtcattatgtcaataaaaaaatttttaatatctgctgctaaaaaataaccaaatgccaaaatcatgtattctctctaaaacagatttttagaaatttgttgacctcctttcttgaataaattatccttgttaacagca

SEQ ID NO: 6529 - DNA, 2443 bp, Homo sapiens
gcttcatgaatgcacacagtcacgtcgcagaagtgcccacccagcttctgcccattgagggtctcaagcagagagcgtgagaagttctgcagatgtatgtggcgcacagcctctacagccgccgactccgactcctcttcaggcaccaggcctggccgtggccgccttctcaccgactccaaggcagcacttccgggcgcttctctttatttttatacagttttattgagatataatttacatgctatccagcccatctatttcaagtgtaccatgcaaggggtttgtatatattcacagagttgtgtatccatcaccatcgttttagaacattcatcactccagaagaaactactacccatcagcagccactgcccatttccctgatctgccccgccctaggaaatccgtaatcactttcagtctatggatttgcctattctagaccattcatataaatgaagtcacacaacactgggtcttatgtgactggcttctatcaaagtttgcaaggttcatttatgttcatgggctgaccccacattggacaccgctgcatccatgtccatcacacaacacagctgccgtttcttctgcctgcttatgggaaagtcccctcttctcctccgttttcttctcttcctgccctatcacaccgtgcacttctccctttccttaaagaaccaccatcaactttaggaggagggaaaggggtggctctggcaggaaaagccagaatcccctctagccagcagagagagagaggaatggctgcatgttttctcccccagtccaaggcactgggtcttggctgggttgaaggttccaagctgctctcctgctgtgtcggtgagttctggtcaacctgcaacctcctgatatggccattgcagttcatcgagtcttcagggactccccatggcctggagtactttgccttgcttacacgggagaggagaatggatttatagagaacatcatctaaatccaacttgaccattgtgtggccacacttgctagattgctatagtctaaatctagcattgtagaaagacgggggagcttggagctgcacaaacccaggtctggaactggctccttaccttggaaggtgaatgatcctgccaggactcttagcctccctgggtctcaatttctttatctgtttcatgggaatgaggatctctgctgggtggttgggtgatgtgggggctgtgtgaaaacagcttgtcaatacaagccaaaatagaaatatttctccacagagtatgaaggtcaaatgagagaatacatttaaattaaatggaaaattaaaatggtaaaaaatgcaaagctgtattgaaagttccgagcttctctataaggagctttttgactatgtaagaatcctgtactcgttccccctaaatataaaaaaaagttgaaggaggcagaagggagagtgatgcacgatgggcaaggacttcacctgctgttgctggctttgaggatggaggaaggaggccacaaacctagaagctggagcccctagaagctagaaaaggcagggacccgattctttccttgagcctccagaagggacacagccccgccagcaccttgactttagcctggtgagatcctcttaggacttttggcaatcagaactataagacagaaatggaagccactgagtctgtagctgtttgttgcagcagcaatagaaaactaatgcagggcccaagaaatcactggtgatgagatcgggaaagtgggctcaggaggtctggatctgtgatgagatggggaaagtgggctcaagaggtctggatctgtggtgagatgggggaagtgggctcaggaggtctggatctgtgatgagatggggaaagtgggctcaggaggtctggatctgtgatgagatggggaaagtgggctcaggaggtctggatctgtgatgagatgggggaagtgggctcaggaggtctggatctgtgatgagatgggggaagtgggctcaggaggtctggatctgtgatgagatgggggaagtgggctcaggaggtctggatctgtgatgagatggggaaagtgggctcaggaggtctggatctgtgatgagatgggggaagtgggctcaggaggtctggatctgtgatgagatggggaaagtgggctcaggaggtctggatctgtgatgagatcgggaaagtgggctcaagaggtctggatctgtggtgagatgggggaagtgggctcaggaggtctggatctgtgatgagatggggaaagtgggctcaggaggtctggatctgtgatgagatggggaaagtgggctcaggaggtctggatctggggtggggatctggagtggaaggggaattcatttgttcattgtctatccttttgtattgattgaattttttatatatatatgtgaattttcacaataaaatttttttcc

SEQ ID NO: 6530 - DNA, 2301 bp, Homo sapiens
agtaggatgcggccagcgcaggagctggtggtgaaaaactgatctcgcatgttcagaaactgcacaagctctaccacatcctcgtcaacactgcccttccggctgaggtccgctttgctcaaacattgcgccttccatttcctgaactccgcgctgcgatccatgggtgacggactcagggtctgcgctcggctccttcatggtagcctcgtctctccctgggggcagccatattgaagcgagcggtggccgaaaaggtccaaacttcctcttcgttcttaatttgggaaattctagtgccttcgcctaggggtggagagaggcgcacatcctgggtggagcgaggcgcacatcctgggtggagcctgcaaaagttggagaaggtgtggcagtcctcatttctgtggaatctgaagaagcccacgcagattttaattcccactctagattctggcttcatcgttatgaagcatatgatgatcccgtggatagtatctagatcaccatggcgactggacagaagttgatgagagctgttagagtttttgaatttggtgggccagaagtcctgaaattgcgatcagatattgcagtaccgattccaaaagaccatcaggttctaatcaaggtccatgcatgtggtgtcaaccccgtggagacatacattcgctctggtacttatagtagaaaaccactcttaccctatactcctggctcagatgtggctggggtgatagaagctgttggagataatgcatctgctttcaagaaaggtgacagagttttcactagcagcacgatctctgggggttatgcagagtatgctcttgcagcagaccacactgtttacaaactacctgaaaaactggactttaaacaaggagctgccatcggcattccatattttactgcttatcgagctctgatccacagtgcctgtgtgaaagctggagagagtgttctggttcatggggcaagtggaggagttggattagcagcatgccaaattgctagagcttatggcttaaagattttgggcactgctggtactgaggaaggacaaaagattgttttgcaaaatggagcccatgaagtgttcaatcacagagaagtgaattacattgataaaattaagaagtatgttggtgagaaaggaattgatataattattgaaatgttagctaatgtaaatcttagtaaagacttgagtcttctgtcacatggaggacgagtgatagttgttggcagcagaggtactattgaaataaacccacgagacaccatggcaaaggagtcgagtataattggagttactctcttttcctcaaccaaggaggaatttcagcaatatgcagcagcccttcaagctggaatggaaattggctggttgaaacctgtgataggttctcaatatccattggagaaggtggccgaggctcatgaaaatatcattcatggtagtggggctactggaaaaatgattcttctcttatgatgattaattctttcatggatttcctatgtaattagaggtactgtctttcccccagttgtacttaccctatcttttctttaattaacattcgattccatgagcttcttatgtgaaaaaataagatttttctttagagagcagaagcagaagagtaaaatttattgtatagctagcaatatttttttatgccatctgtctcaaatcaaagagtcatcatagtaggaaataacatgttagttgtcatttggcatgagtgtgcattccagtaattcttaattgatatttgattaattccatacctttgattaaaacatgctagttcaaaataagactgctcagtttccaagggttttcaagcctacttacctttataaaggttctctagtctctgattagccatgactgtattggactttgaacattttctgaactaaaaacctctattctaaactaatctcatttggatgtgtaagtcttttgtaaaggcaagaataaataatatccaggacaatttattagttttctcagtattttcccaaatattagaatatttacttcattattggttggctgccaatgaccccatatgttctgtgagaatagtagctttatctttgatataatacatagtctccaaataggtaatacttcgcaattgattagattttcagagtagatttagagttatctgtttttctggtgagggtcaaatatttttgttaattaagctcacaaatttgataaattaagaattatctgcatttgtctcgtaacataataatgtgtaataaagtctatagaaaatt

SEQ ID NO: 6531 - DNA, 709 bp, Homo sapiens
cccaaacctgccaccgacggccacttccgtttccccgatagtatttggggatctcgaagcgatacttccggctccccccaggtccccaagctttacttttgtggggcacgacgagaaagtccgcagccccaaacattcccagaggtccacttgggccagtggtactttatcgcaggggcagctcccaccaaggaggagttggcaacttttgaccctgtggacaacattgtcttcaatatggctgctggctctgccccgatgcagctccaccttcgtgctaccatccgcatgaaagatgggctctgtgtgccccggaaatggatctaccacctgactgaagggagcacagatctcagaactgaaggccgccctgacatgaagactgagctcttttccagctcatgcccaggtggaatcatgctgaatgagacaggccagggttaccagcgctttctcctctacaatcgctcaccacatcctcccgaaaagtgtgtggaggaattcaagtccctgacttcctgcctggactccaaagccttcttattgactcctaggaatcaagaggcctgtgagctgtccaataactgacctgtaacttcatctaagtccccagatgggtacaatgggagctgagttgttggagggagaagctggagacttccagctccagctcccactcaagataataaagataatttttcaatcctca

SEQ ID NO: 6532 - DNA, 1010 bp, Homo sapiens
gcaaggcagcaggatggaggggtttgtaaaaatgccttccacctaccctgctgggcttgcccgagaggctctgagtgtgtgaaggggaagacaattatcgctaggctggagaatagaaagagcaccatcagtccagtgagttgcaagcctaatgctcacctgcagagacagaattcctgagtgaacgaacagagcagctcctcttccatctccagaaatgacctccaccttcaacccccgagaatgtaaactgtccaagcaagaagggcaaaactatggcttcttcctgcgaattgagaaggacaccgagggccacctggtccgggtggttgagaagtgtagcccagcagagaaggctggccttcaagatggagacagagttcttaggatcaatggtgtctttgtggacaaagaagaacatatgcaggttgtggatctggtcagaaagagtgggaattcagtgactttactagttctggatggggattcctatgagaaagcagtgaaaacacgggtggacttgaaagagttgggtcaaagtcagaaggagcaaggtttgagtgataatatactttcccctgtgatgaatggaggtgtgcaaacttggacccagccccggctctgctatctcgtgaaggaaggaggcagctatggcttctctctgaaaactgtccaaggtaaaaagggggtgtacatgactgatattacacctcaaggtgtggctatgagagctggagttctggctgatgatcacttgattgaagtgaatggagagaatgtagaggatgccagccatgaggaagtggttgaaaaggtgaagaagtcaggaagccgtgtcatgttcctgctggtggacaaagaaactgacaagcgtcatgttgagcagaagatacaattcaaaagagaaacagccagtttgaaactgttaccccaccagccccgaattgtggagatgaagaaaggaagcaatggctatggtttctatctgagggcaggctcagaacagaaag

SEQ ID NO: 6533 - DNA, 897 bp, Homo sapiens
gacgggcagactgctgctcatctctgcagctccactttggtctcttgtctctgaaggtccagtcacagggaacttgttcttctgagtacccacagcttactcttcctttgtagcaggaccagccacagaaaaaactcctcagacaccgagcactgcaggagtttgtgaccaagaacttcaagagtcaagacagaaggaagccaagggagcagtgcaatggatttctcagtaaaggtagacatagagaaggaggtgacctgccccatctgcctggagctcctgacagaacctctgagcctagattgtggccacagcttctgccaagcctgcatcactgcaaagatcaaggagtcagtgatcatctcaagaggggaaagcagctgtcctgtgtgtcagaccagattccagcctgggaacctccgacctaatcggcatctggccaacatagttgagagagtcaaagaggtcaagatgagcccacaggaggggcagaagagagatgtctgtgagcaccatggaaaaaaactccagatcttctgtaaggaggatggaaaagtcatttgctgggtttgtgaactgtctcaggaacaccaaggtcaccaaacattccgcataaacgaggtggtcaaggaatgtcaggaaaagctgcaggtagccctgcagaggctgataaaggaggatcaagaggctgagaagctggaagatgacatcagacaagagagaaccgcctggaagaattatatccagatcgagagacagaagattctgaaagggttcaatgaaatgagagtcatcttggacaatgaggagcagagagagctgcaaaagctggaggaaggtgaggtgaatgtgctggataacctggcagcagctacagaccagctggtccagcagagg

SEQ ID NO: 6534 - DNA, 2137 bp, Homo sapiens
cggccccgccccgccccgcccggctgctccatggcgctgtgcgaggccgcgggctgcgggagtgccctgctctggcctcgcttgttgctcttcggggactccatcacccagaaaatgtgatgttctgaatcgtggattttcaggttacaataccaggtgggccaaaattatccttccaagattaatcaggaaaggaaacagtttggacatcccagtagcagttacaattttctttggggccaatgacagtgcactaaaagatgagaatcccaagcagcacattcccctggaggagtacgctgcgaacctaaagagcatggtgcagtacctgaagtccgtggacatccctgagaatcgagtcattctcatcacgccgaccccactttgtgaaacagcctgggaagaacagtgcatcatacaaggttgcaaactaaatcgcctgaactctgttgttggtgaatatgccaatgcgtgtttacaagtggcccaagactgtgggactgacgtacttgacctgtggaccctgatgcaggacagccaggacttctcatcttatttatcagatggactacatttgtctccaaaggggaatgaatttttgttctcgcatctctggcctttgatagagaaaaaggtctcttctctacctttgctgcttccttactggcgggatgtagcagaagcaaaacctgaattaagtctgctgggagatggagaccattagccaatcacaggagacccaaatctgcttgttatctacagaactcaaagttgtcaatacgtagaggtacgcttttttcctcaggcttaaacctttgccactgatattaataataaaagtattagatgatttttcagggaagttttatacttaggtccattgtgtttcgacagtatttattaatgcagatatcagtgctacagctataaaatataccctgagcagcttgttaattctataaatgacaaagactatgtttttaaaaagtcacaattttataaaaatggtttttcttacattcttttgagaactgtttcactcatacatacacccacacaccccactcaaccttgtatcaaattccaaaagtgtaactaaagtataagaatatcatgactagttaaaagatagcaaataccataaggtacaagttcaagtattagtataacaagtatctgagtaacaaatgtccttggaaatggggggtaggaggagatatgattagtcacaggtttggttaactgccctcaaaatttacaagttaaaatgttttggctggtgagcacatttcagttcttaggggaaaaaaagcttttaatggcaatttatagaaatcagaatccaggctaatgatttttatccttcacacagtaaatgcagcccatccagaatcctggagcaataaagtaagaagtaattcaaatatctgcttgtgggtcaataaaaagggtttctgaagtatcaagtcttgtggggacagcccccaaccctaagggcaggtagtattctatctcctggctggctcatcacattcaaaacaacctgttttttttgttgttgttgttgttaagaaatatctcaccctcttattcaatagtgtttgaaaacaggcaatctttgtattttaaatattctaggtttgtagatagtgaattttttttttttttttttttttttgaggcagagtctcactctgtcacccaggctggagtgtagtggcgcaacctcagcctctccaagtgctgggattacaggcatgagccaccactcccagccaatagtgaattttctaagagcatgtatccctatcagtaacagggatacatgaagatacttataaaatacagaaaaactgcccagcaaatcagggccctaaacagttggtagattccataaattcaactggctaccatgtatagccctcactgtaaggtaggtggttaggtttctagagagcattagtcttagaattatgaagagccatattaacccaaatgatttctaaatttagatatatattttccctgctacataaaaactctgggtaataactagaaatagacccacaatttagagacaatgtatactagatttatctcctttgtttttagttgaaggcaaaaaaaaaaaaaaaaa

SEQ ID NO: 6535 - DNA, 619 bp, Homo sapiens
tctacatgggctgggcagccccaaactgaaatgtgagtgccagagtgcatcctttaagcgaggtctgccccacggacacccgctccctctgtgtccctgctttgacagatctatccatctggccatccatccgtgggggtctgcaatggccacctttagccgccaggaatttttccagcagctactgcaaggctgtctcctgcctactgcccagcagggccttgaccagatctggctgctccttgccatctgcctcgcctgccgcctcctctggaggctcgctgcacatggtttgggtcgtgctgctcagcctcctgtgctacctcgtgctgttcctctgccgacattcctcccatcgaggcgtcttcctatccgtcaccatcctcatctacctactcatgggtgagatgcacatggtagacaccgtgacatggcacaagatgcgaggggcacagatgattgtggccatgaaggcagtgtctctgggcttcgacctggaccggggcgaggtgggtacggtgccctcgccagtggagttcatgggctacctctacttcgtgggcaccatcgtcttcgggccctggatatccttccacagctacctacaagctgtccaagg

SEQ ID NO: 6536 - DNA, 1121 bp, Homo sapiens
ctcgcactcttgcgcaacacgtcaccagtcggaaactgggggtttgcttctgtgatttatttcattattgtgctggtaaaaggccatcgaagacggcaatttggaggaaatggaagaggaagtacggcttaagaagcgaaaaagacgaagaaatgtggataaagatcctgcaaaagaagatgtggaaaaagctaagaagagaagaggccgccctcccgctgagaaactgtcaccaaatccccccaaactgacaaagcagatgaacgctatcatcgatactgtgataaactacaaagatagttcagggcgacagctcagtgaagtcttcattcagttaccttcaaggaaagaattaccagaatactatgaattaattaggaagccagtggatttcaaaaaaataaaggaaaggattcgtaatcataagtaccggagcctaggcgacctggagaaggatgtcatgcttctctgtcacaacgctcagacgttcaacctggagggatcccagatctatgaagactccatcgtcttacagtcagtgtttaagagtgcccggcagaaaattgccaaagaggaagagagtgaggatgaaagcaatgaagaggaggaagaggaagatgaagaagagtcagagtccgaggcaaaatcagtcaaggtgaaaattaagctcaataaaaaagatgacaaaggccgggacaaagggaaaggcaagaaaaggccaaatcgaggaaaagccaaacctgtagtgagcgattttgacagcgatgaggagcaggatgaacgtgaacagtcagaaggaagtgggacggatgatgagtgatcagtatggacctttttccttggtagaactgaattccttcctcccctgtctcatttctacccagtgagttcatttgtcatataggcactgggttgtttctatatcatcatcgtctataaactagctttaggatagtgccagacaaacatatgatatcatggtgtaaaaaacacacacatacacaaatatttgtaacatattgtgaccaaatgggcctcaaagattcagattgaaacaaacaaaaagcttttgatggaaaatatgtgggtggatagtatatttctatgggtgggtctaattt

SEQ ID NO: 6537 - DNA, 1546 bp, Homo sapiens
ggggagtaacaggtgtctggaggctgaagggtggaggggttcctggatttggggtttgcttgtgaaactcccctccaccctcctctctcgcacccacccaccccctcacccccttctttttccgtccttggaaaatggtgtccaagctcacgtcgctccagcaagaactcctgagcgccctgctgagctccggggtcaccaaggaggtgctggttcaggccttggaggagttgctgccatccccgaacttcggggtgaagctggagacgctgcccctgtcccctggcagcggggccgagcccgacaccaagccggtcttccatactctcaccaacggccacgccaagggccgcttgtccggcgacgagggctccgaggacggcgacgactatgacacacctcccatcctcaaggagctgcaggcgctcaacaccgaggaggcggcggagcagcgggcggaggtggaccggatgctcagtgaggacccttggagggctgctaaaatgatcaagggttacatgcagcaacacaacatcccccagagggaggtggtcgatgtcaccggcctgaaccagtcgcacctctcccagcatctcaacaagggcacccctatgaagacccagaagcgtgccgctctgtacacctggtacgtcagaaagcaacgagagatcctccgacagttcagtcaacagagccatgggcctgggcagtccgatgatgcctgctctgagcccaccaacaagaagatgcgccgcaaccggttcaaatgggggcccgcgtcccagcaaatcttgtaccaggcctacgatcggcaaaagaaccccagcaaggaagagagagaggccttagtggaggaatgcaacagggcagaatgtttgcagcgaggggtgtccccctccaaagcccacggcctgggctccaacttggtcactgaggtccgtgtctacaactggtttgcaaaccgcaggaaggaggaggcattccggcaaaagctggccatggacgcctatagctccaaccagactcacagcctgaaccctctgctctcccacggctccccccaccaccagcccagctcctctcctccaaacaagctgtcaggagtgcgctacagccagcagggaaacaatgagatcacttcctcctcaacaatcagtcaccatggcaacagcgccatggtgaccagccagtcggttttacagcaagtctccccagccagcctggacccaggccacaatctcctctcacctgatggtaaaatgatctcagtctcaggaggaggtttgcccccagtcagcaccttgacgaatatccacagcctctcccaccataatccccagcaatctcaaaacctcatcatgacacccctctctggagtcatggcaattgcacaaatgtcctctacaagcctggtgatgcccacacaccacttacttcgtgcgcaacaacaaggaccctgttttccacaccatcaccctctgggcagctgtcatggaaaagcccagtgacctgaccggcacctgcgagaggtccctgcttacctgac

SEQ ID NO: 6538 - DNA, 847 bp, Homo sapiens
ggggacagctaaggtctccaggctgctgatgaagtgagggaaagtggaggagagtcggcgccgagatgggcggataaaaggagcgaccgctcagcagcgagagggagaggcgagagtaaggcgcccagacaccatgtggacaaggggaggagagaaatcagaggtggcgcgcgaaggctgagcgcccaggcagccagagcccagatcggaagagccgagtccgggcagaggggtccgcgggctctggaggtgctggacgggtgcgatccgagagcagaccggggccctcgcgagcctctcccggcccctgcccgcgatgagcgaggccagccgactgtgctccggctactacagcctcaaccagagcttcgtggagcccttccagtgcccccggcgcggcgagggggcagcgctccagtattgctgcggcttcgccgacctcaagtactgctgcagcgagccgggcagctacttcccctacaagcacagctacatgtggagcctcagcattggtgccttgattggactaggaattgctgcccttgttttactcgcctttgtcatcagtgtctgtgtcctttgctatttatttctgtatacgaaacctcaaagattagacactggccttaagcttcaacacttagaggcttcttccactcaagaaggcaagtcaaatggaaaaaccaaagccctcaattcaaatgcagcatcaaatgcaacaaatgaaacatactatgaagctgatgatataattcaagaaaaaacaatggatgcaacacaaatccacattgcttattaactaaaaattctgtgttttaaatgcttactggagagatgggacaataaa

SEQ ID NO: 6539 - DNA, 1523 bp, Homo sapiens
atgaggttcacatttacaagccggtgcttggcactgtttcttcttctaaatcacccaaccccaattcttcctgccttttcaaatcaaacctatccaacaatagagcccaagccatttctttacgtcgtaggacgaaagaagatgatggatgcacagtacaaatgctatgaccgaatgcagcagttacccgcataccaaggagaaggtccatattgcaatcgcacctgggatggatggctgtgctgggatgacacaccggctggagtattgtcctatcagttctgcccagattattttccggattttgatccatcagaaaaggttacaaaatactgtgatgaaaaaggtgtttggtttaaacatcctgaaaacaatcgaacctggtccaactatactatgtgcaatgctttcactcctgagaaactgaagaatgcatatgttctgtactatttggctattgtgggtcattctttgtcaattttcaccctagtgatttccctggggattttcgtgtttttcagaaaattgacaactatttttcctttgaattggaaatataggaaggcattgagccttggctgccaaagggtaaccctgcacaagaacatgtttcttacttacattctgaattctatgattatcatcatccacctggttgaagtagtacccaatggagagctcgtgcgaagggacccggtgagctgcaagattttgcattttttccaccagtacatgatggcctgcaactatttctggatgctctgtgaagggatctatcttcatacactcattgtcgtggctgtgtttactgagaagcaacgcttgcggtggtattatctcttgggctgggccccagccttccacagagactaatctttcctttccctggccttctcatccggttcccgctggtgccaaccactatccatgctattaccagggccgtgtacttcaatgacaactgctggctgagtgtggaaacccatttgctttacataatccatggacctgtcatggcggcacttgtggtcaatttcttctttttgctcaacattgtccgggtgcttgtgaccaaaatgagggaaacccatgaggcggaatcccacatgtacctgaaggctgtgaaggccaccatgatccttgtgcccctgctgggaatccagtttgtcgtctttccctggagaccttccaacaagatgcttgggaagatatatgattacgtgatgcactctctgattcatttccagggcttctttgttgcgaccatctactgcttctgcaacaatgaggtccaaaccaccgtgaagcgccaatgggcccaattcaaaattcagtggaaccagcgttgggggaggcgcccctccaaccgctctgctcgcgctgcagccgctgctgcggaggctggcgacatcccaatttacatctgccatcaggagctgaggaatgaaccagccaacaaccaaggcgaggagagtgctgagatcatccctttgaatatcatagagcaagagtcatctgcttga

SEQ ID NO: 6540 - DNA, 2369 bp, Homo sapiens
ggccgcggatataaagcgcggcggcggctgccgggcggagcggctgcacggacaagagcggaggcctggaaggggaaactgaagcagaaagaggttacttaatgggctcaaggtcacctacctgacctaccagcagctcaatggccttcccaaagaagaaacttcagggtcttgtggctgcaaccatcacgccaatgactgagaatggagaaatcaacttttcagtaattggtcagtatgtggattatcttgtgaaagaacagggagtgaagaacatttttgtgaatggcacaacaggagaaggcctgtccctgagcgtctcagagcgtcgccaggttgcagaggagtgggtgacaaaagggaaggacaagtcaaaccatcataagttggggaccatccgcacaacccaaagtagacggagtagctttagaagacagctgaaggcctggcacagtggctcacacctgtaatcccagcactttgggaggccaagtggtagctgtgcctagcagcccaggagaaagaggaagagcaaatggatgattggcttcacctaaaccaagagaaaggggtagtgaagggaggggtcgtgcaataaaactgctggtgagagttcaacaggctggatcaggtgataattcacgtaggagcactgagcttgaaggagtcacaggaactggcccaacatgcagcagaaataggagctgatggcatcgctgtcattgcaccgttcttcctcaagccatggaccaaagatatcctgattaatttcctaaaggaagtggctgctgccgcccctgccctgccattttattactatcacattcctgccttgacaggggtaaagattcgtgctgaggagttgttggatgggattctggataagatccccaccttccaagggctgaaattcagtgatacagatctcttagacttcgggcaatgtgttgatcagaatcgccagcaacagtttgctttcctttttggggtggatgagcaactgttgagtgctctggtgatgggagcaactggagcagtgggcagtacctataactacctgggaaaaaagacaaaccagatgttggaggcttttgaacaaaaggacttctctttagccctgaactatcagttttgtatccagagatttatcaactttgttgtcaaactaggtaagtgccacccatcttctgctttgtctgctgctggagactgtaaagaaaatggaataccatcactttctctgagggttcaacaagaacactttttaatggtctgttgcaagcagagttctgtttcccttattaaccctcggggccaaccatataaaactgtgaagtaaacctagttggaaaatctttggcaaccttctccattttagcacatgcctaccccattttccattctttctctcctaaaccatcagcactccctccctttacttgcttcagctcattaaaattctactactgcattgaggttgatttcagcctaagtgcttggaggaaggcagtctaaatacagattttactaaattgtgaatgactgacagctctcccaagagtatttacaatttaaacagagtttattaacacaagtaagcctaaatggatggaggtttggataatatgacaaagtaaaattggggagcagtcgtggggagaaatacagtgaatttgagtagagaaaccgctccagagtctcttaaatcttctataacaaatgacaaatgccactatccactcttctgcaagagattggcccttgggccaattgaatctgcgttaatgcaggaaaatttttaagtttatttttggtagacctccctgctccctgtcagagtcctgcataattctgacaactcctccctctcccccaagcacctcttctgtgttatgcccctcattcttgcagggttctcaacccactctcttactccttcaaggacgtttctgtttgtttttccactttcgtgatttttgcacatttgtgtgctgccagtgctatgaactacctattattgttccatttttctaagcaatggtttcacaaaattgtgggtttggtgtgataattattatgttcctaaaatacattaaaataggtattgaactgttaaaattttagacaaactaaaagcttgatgtgtgtagtagtccccccttatctcagggggatatgttccaagatgaccagtggatgcctgaaattgcagataatacgaaaccctatatatactatgttttttcctgtacatgcatacctatggtaaagtttaatttataaattaggcatagtaagagataaacagtaactaataataaaatagaacaattataacaatatactgcaataaaagttatataactatg

SEQ ID NO: 6541 - DNA, 563 bp, Homo sapiens
acttgttttattgagagtcgcgagactcactgcttccaccttgcttccgactggtgtttactttcctccacctgcgtgcctggcccgggagaaggggaggcggggccgccagcgttggaaggcgcagagtgcccggcgcccgagcccaaaccgctgtcacctgcccgagtctggcggcaaagactgagccactaacgatccctaaagaagtggctgacatctttaacgcccccagtgatgatgaagagtttgttggcttccgagatgatgttcccatggaaaccctctcgtcagaggagagctgcgatagttttgactcactagagtcagggaaacagcaggatgtgcgctttcattccaaatacttcacagaagagctaagaagaatttttatagaggacactgactcagagactgaggattttgcaggatttacgcagagtgatctgaatggaaagactaacccagaagtaatggtcgtggagtcagatttgagtgatgatggcaaagcatctttggtgagcgaggaagaggaagatgaagaagaagataaggctacccct

SEQ ID NO: 6542 - DNA, 2292 bp, Homo sapiens
cccagcctctgccaggttcggtccgccatcctcgtcccgtcctccgccggcccctgccccgcgcccagggatcctccagctcctttcgcccgcgccctccgttcgctccggacaccatggacaagttttggtggcacgcagcctggggactctgcctcgtgccgctgagcctggcgcagatcgatttgaatataacctgccgctttgcaggtgtattccacgtggagaaaaatggtcgctacagcatctctcggacggaggccgctgacctctgcaaggctttcaatagcaccttgcccacaatggcccagatggagaaagctctgagcatcggatttgagacctgcaggtatgggttcatagaagggcacgtggtgattccccggatccaccccaactccatctgtgcagcaaacaacacaggggtgtacatcctcacatccaacacctcccagtatgacacatattgcttcaatgcttcagctccacctgaagaagattgtacatcagtcacagacctgcccaatgcctttgatggaccaattaccataactattgttaaccgtgatggcacccgctatgtccagaaaggagaatacagaacgaatcctgaagacatctaccccagcaaccctactgatgatgacgtgagcagcggctcctccagtgaaaggagcagcacttcaggaggttacatcttttacaccttttctactgtacaccccatcccagacgaagacagtccctggatcaccgacagcacagacagaatccctgctaccaatatggactccagtcatagtataacgcttcagcctactgcaaatccaaacacaggtttggtggaagatttggacaggacaggacctctttcaatgacaacgcagcagagtaattctcagagcttctctacatcacatgaaggcttggaagaagataaagaccatccaacaacttctactctgacatcaagcaataggaatgatgtcacaggtggaagaagagacccaaatcattctgaaggctcaactactttactggaaggttatacctctcattacccacacacgaaggaaagcaggaccttcatcccagtgacctcagctaagactgggtcctttggagttactgcagttactgttggagattccaactctaatgtcaatcgttccttatcaggagaccaagacacattccaccccagtggggggtcccataccactcatggatctgaatcagatggacactcacatgggagtcaagaaggtggagcaaacacaacctctggtcctataaggacaccccaaattccagaatggctgatcatcttggcatccctcttggccttggctttgattcttgcagtttgcattgcagtcaacagtcgaagaaggtgtgggcagaagaaaaagctagtgatcaacagtggcaatggagctgtggaggacagaaagccaagtggactcaacggagaggccagcaagtctcaggaaatggtgcatttggtgaacaaggagtcgtcagaaactccagaccagtttatgacagctgatgagacaaggaacctgcagaatgtggacatgaagattggggtgtaacacctacaccattatcttggaaagaaacaaccgttggaaacataaccattacagggagctgggacacttaacagatgcaatgtgctactgattgtttcattgcgaatcttttttagcataaaattttctactctttttgttttttgtgttttgttctttaaagtcaggtccaatttgtaaaaacagcattgctttctgaaattagggcccaattaataatcagcaagaatttgatcgttccagttcccacttggaggcctttcatccctcgggtgtgctatggatggcttctaacaaaaactacacatatgtattcctgatcgccaacctttcccccaccagctaaggacatttcccagggttaatagggcctggtccctgggaggaaatttgaatgggtccattttgcccttccatagcctaatccctgggcattgctttccactgaggttgggggttggggtgtactagttacacatcttcaacagaccccctctagaaatttttcagatgcttctgggagacacccaaagggtgaagctatttatctgtagtaaactatttatctgtgtttttgaaatattaaaccctggatcagtcctttgatcagtataattttttaaagttactttgtcagaggcacaaaagggtttaaactgattcataataaatatctgtacttcttcgatcttca

SEQ ID NO: 6543 - DNA, 626 bp, Homo sapiens
acttccggccagggagggggataggctcagacacaaggagaggcttggagagagcagacgccttctggattcaagaagacgaggtgagctgaggctcacctgttactcggcctcccagaaagatggataggagaaatgactacggatatagggtgcctctatttcagggccctctgcctcccccggggagcctggggcttcccttccctccagatatacagactgagaccacagaagaggacagtgtcctgctgatgcataccctgttggcggcaaccaaggactccctggccatggacccaccagttgtcaaccggcctaagaaaagcaagaccaagaaggcccctataaagactattactaaggctgcacctgctgcccctccagtcccagctgccaatgagattgccaccaacaagcccaaaataacttggcaggctttaaacctgccagtcattacccagatcagccaggctttacctaccactgaggtaaccaatactcaggcttcttcagtcactgctcagcctaagaaagccaacaagatgaagagagttactgccaaggcagcccaaggctcccaatccccaactggccatgagggtggcactatacagctgaagtca

SEQ ID NO: 6544 - DNA, 1677 bp, Homo sapiens
gtagtcataaaggtctctttgccaagttactgccctctcaagctgcttccagtgaatgctacacacctgcaccatggtttgtccgacatccttagccaagatcaggattggctatgttggtacttacatatcctcatgagaattgtggttctggtactagtttggtaaagaaattattaaacctagctgatgcttgaaggtagttggattaacaggaaagaaaagagacttcttttctagccaagatgaaagatacacaagacattcaggaagcttcgaaggcaatgcagaataaagtccatgagcaggaagataagaatgagaaacaaaaacaaagagaagacaaacttggagtatattctttagtacatttttccccaaagatgttgggttcagttgccacaacactgccattgtcatcttcaaattccagtggaatgcctcttggttactatctgtctagtcctcagattagtagagtaactatatcaacaactggacaattgacttctaaagctactgtaggtagctgttccagagtggaaaacagcttggatgccagccccttctcagttccgaagaaacaggatgaatcacccatgattggggatggagaagattatttcctttctttgtttggtgattcaaagaaacttacagcacactcaaactacactcagaaaactttaaaatacttttctatgattcttgaagaagttggccaatttacctccagttctcttggagatgttgaaatagctgaagtgaatgtcaagggtttgttcgtgaagctcattaactcttcccttgacaaagaaatggcaattggagatcatattctccagcaaaatgtgaatggacaaaccatttctttgtaccgattccttccaaacatcgtaatgcaggcaaattccacagtaacagtgtgggcagcagcatctgaagcaaagcatcaacctccatcagattttctttggaaggaacaagacaagtttagagcaagtcctgattgtataacaatcctgtgcaaaccgaacggtcaagccattgcgtggtacacccctatccactggaagcaagcgtgggaaaaattagatgctgacgttgaatttaacagatgttcagtagtatctccaacattccgaaagcgtgtgtttcagtggacagcatctacagctacaataactaaagaaaaacaagatcaacctaagaaagatatctcaaattatcaggtggaacaagctcaagttcttcttaagagagagaaggaaatcccaccaaccgttttccctaatcgcagcccttggtgccagaatccctatgtctctgcacatccttactgtcctctgattgaaccacacaatacatccaccgctggaggcagattggatagacagcccaggactcggtcaaccagacctaatcgagcctcagggtctaagaaaaagaagacatctgagtcacaaaagcaataagcagtcaactcaacctttaaagtaatctagtccaccctcaaccagctactagaaaagcaaaagagaactcaaatccctgaggcctgctctgcaacctccctgctattccatgagagggtgaagacatcacatttctatatggaaaaaggatccaaaatttgtattgctgtagaattggtgaattatagatgcttgatgaaat

SEQ ID NO: 6545 - DNA, 3636 bp, Homo sapiens
gggcggggcggggccgcgggagggcggggccggcgcggcgagcgcaccagcagcatcctggctcagccgcggcggtggcgggggcgcaaccagcgggccgaggcggcggcgccagcggcgccttaaatagcatccagagccggcgcggggcagggagtgggctgcagtgacagccggcggcggagcggccggtccacggaggagggtagtggtggtgcacgaagatccgcactacttgacagcgacgagcccttggtgtatttctatgatgatgtcacaacattatacgaaggtttccagaggggaatacaggtgtcaaataatggcccttgtttaggctctcggaaaccagaccaaccctatgaatggctttcatataaacaggttgcagaattgtcggagtgcataggctcagcactgatccagaagggcttcaagactgccccagatcagttcattggcatctttgctcaaaatagacctgagtgggtgattattgaacaaggatgctttgcttattcgatggtgatcgttccactttatgatacccttggaaatgaagccatcacgtacatagtcaacaaagctgaactctctctggtttttgttgacaagccagagaaggccaaactcttattagagggtgtagaaaataagttaataccaggccttaaaatcatagttgtcatggatgcctacggcagtgaactggtggaacgaggccagaggtgtggggtggaagtcaccagcatgaaggcgatggaggacctgggaagagccaacagacggaagcccaagcctccagcacctgaagatcttgcagtaatttgtttcacaagtggaactacaggcaaccccaaaggagcaatggtcactcaccgaaacatagtgagcgattgttcagcttttgtgaaagcaacagagaatacagtcaatccttgcccagatgatactttgatatctttcttgcctctcgcccatatgtttgagagagttgtagagtgtgtaatgctgtgtcatggagctaaaatcggatttttccaaggagatatcaggctgctcatggatgacctcaaggtgcttcaacccactgtcttccccgtggttccaagactgctgaaccggatgtttgaccgaattttcggacaagcaaacaccacgctgaagcgatggctcttggactttgcctccaagaggaaagaagcagagcttcgcagcggcatcatcagaaacaacagcctgtgggaccggctgatcttccacaaagtacagtcgagcctgggcggaagagtccggctgatggtgacaggagccgccccggtgtctgccactgtgctgacgttcctcagagcagccctgggctgtcagttttatgaaggatacggacagacagagtgcactgccgggtgctgcctgaccatgcctggagactggaccgcaggccatgttggggccccgatgccgtgcaatttgataaaacttgttgatgtggaagaaatgaattacatggctgccgagggcgagggcgaggtgtgtgtgaaagggccaaatgtatttcagggctacttgaaggacccagcgaaaacagcagaagctttggacaaagacggctggttacacacaggggacattggaaaatggttaccaaatggcaccttgaaaattatcgaccggaaaaagcacatatttaagctggcacaaggagaatacatagcccctgaaaagattgaaaatatctacatgcgaagtgagcctgttgctcaggtgtttgtccacggagaaagcctgcaggcatttctcattgcaattgtggtaccagatgttgagacattatgttcctgggcccaaaagagaggatttgaagggtcgtttgaggaactgtgcagaaataaggatgtcaaaaaagctatcctcgaagatatggtgagacttgggaaggattctggtctgaaaccatttgaacaggtcaaaggcatcacattgcaccctgaattattttctatcgacaatggccttctgactccaacaatgaaggcgaaaaggccagagctgcggaactatttcaggtcgcagatagatgacctctattccactatcaaggtttagtgtgaagaagaaagctcagaggaaatggcacagttccacaatctcttctcctgctgatggccttcatgttgttaattttgaatacagcaagtgtagggaaggaagcgttcgtgtttgacttgtccattcggggttcttctcataggaatgctagaggaaagagaacactgccttacagtcacctcatgttgcagaccatgtttatggtaatacacactttccaaaatgagccttaaaaattgtaaaggggatactataaatgtgctaagttatttgagacttcctcagtttaaaaagtgggttttaaatcttctgtctccctgtttctctaatcaaggggttaggactttgctatctctgagatgtctgctacttgctgcaaattctgcagctgtctgctgctctaaagagtacagtgcactagagggaagtgttccctttaaaaataagaacaactgtcctggctggagaatctcacaagcggaccagagatctttttaaatccctgctactgtcccttctcacaggcattcacagaacccttctgattcgtaagggttacgaaactcatgttcttctccagtcccctgtggtttctgttggagcataaggtttccagtaagcgggagggcagatccaactcagaaccatgcagataaggagcctctggcaaatgggtgctcatcagaacgcgtggattctctttcatggcagaatgctcttggactcggttctccaggcctgattccccgactccatcctttttcaggggttatttaaaaatctgccttagattctatagtgaagacaagcatttcaagaaagagttacctggatcagccatgctcagctgtgacgcctgaataactgtctactttatcttcactgaaccactcactctgtgtaaaggccaacagatttttaatgtggttttcatatcaaaagatcatgttgggattaacttgcctttttccccaaaaaataaactctcaggcaagcatttctttaaagctattaagggagtatatacttgagtacttattgaaatggacagtaataagcaaatgttcttataatgctacctgatttctatgaaatgtgtttgacaagccaaaattctaggatgtagaaatctggaaagttcatttcctgggattcacttctccagggattttttaaagttaatttgggaaattaacagcagttcactttattgtgagtctttgccacatttgactgaattgagctgtcatttgtacatttaaagcagctgttttggggtctgtgagagtacatgtattatatacaagcacaacagggcttgcactaaagaattgtcattgtaataacactacttggtagcctaacttcatatatgtattcttaattgcacaaaaagtcaataatttgtcaccttggggttttgaatgtttgctttaagtgttggctatttctatgttttataaaccaaaacaaaatttccaaaaacaatgaaggaaaccaaaataaatatttctgcatttcaggtga

SEQ ID NO: 6546 - DNA, 9590 bp, Homo sapiens
atggagaatagtcttagatgtgtttgggtacccaagctggcttttgtactcttcggagcttccttgttcagcgcgcatcttcaagtaaccggttttcaaattaaagctttcacagcactgcgcttcctctcagaaccttctgatgccgtcacaatgcggggaggaaatgtcctcctcgactgctccgcggagtccgaccgaggagttccagtgatcaagtggaagaaagatggcattcatctggccttgggaatggatgaaaggaagcagcaactttcaaatgggtctctgctgatacaaaacatacttcattccagacaccacaagccagatgagggactttaccaatgtgaggcatctttaggagattctggctcaattattagtcggacagcaaaagttgcagtagcaggaccactgaggttcctttcacagacagaatctgtcacagccttcatgggagacacagtgctactcaagtgtgaagtcattggggagcccatgccaacaatccactggcagaagaaccaacaagacctgactccaatcccaggtgactcccgagtggtggtcttgccctctggagcattgcagatcagccgactccaaccgggggacattggaatttaccgatgctcagctcgaaatccagccagctcaagaacaggaaatgaagcagaagtcagaattttatcagatccaggactgcatagacagctgtattttctgcaaagaccatccaatgtagtagccattgaaggaaaagatgctgtcctggaatgttgtgtttctggctatcctccaccaagttttacctggttacgaggcgaggaagtcatccaactcaggtctaaaaagtattctttattgggtggaagcaacttgcttatctccaatgtgacagatgatgacagtggaatgtatacctgtgttgtcacatataaaaatgagaatattagtgcctctgcagagctcacagtcttggttccgccatggtttttaaatcatccttccaacctgtatgcctatgaaagcatggatattgagtttgaatgtacagtctctggaaagcctgtgcccactgtgaattggatgaagaatggagatgtggtcattcctagtgattattttcagatagtgggaggaagcaacttacggatacttggggtggtgaagtcagatgaaggcttttatcaatgtgtggctgaaaatgaggctggaaatgcccagaccagtgcacagctcattgtccctaagcctgctatcccaagctccagtgtcctcccttcggctcccagagatgtggtccctgtcttggtttccagccgatttgtccgtctcagctggcgcccacctgcagaagcgaaagggaacattcaaactttcacggtctttttctccagagaaggtgacaacagggaacgagcattgaatacaacacagcctgggtcccttcagctcactgtgggaaacctgaagccagaagccatgtacacctttcgagttgtggcttacaatgaatggggaccgggagagagttctcaacccatcaaggtggccacacagcctgagttgcaagttccagggccagtagaaaacctgcaagctgtatctacctcacctacctcaattcttattacctgggaaccccctgcctatgcaaacggtccagtccaaggttacagattgttctgcactgaggtgtccacaggaaaagaacagaatatagaggttgatggactatcttataaactggaaggcctgaaaaaattcaccgaatatagtcttcgattcttagcttataatcgctatggtccgggcgtctctactgatgatataacagtggttacactttctgacgtgccaagtgccccgcctcagaacgtctccctggaagtggtcaattcaagaagtatcaaagttagctggctgcctcctccatcaggaacacaaaatggatttattaccggctataaaattcgacacagaaagacgacccgcaggggtgagatggaaacactggagccaaacaacctctggtacctattcacaggactggagaaaggaagtcagtacagtttccaggtgtcagccatgacagtcaatggtactggaccaccttccaactggtatactgcagagactccagagaatgatctagatgaatctcaagttcctgatcaaccaagctctcttcatgtgaggccccagactaactgcatcatcatgagttggactcctcccttgaacccaaacatcgtggtgcgaggttatattatcggttatggcgttgggagcccttacgctgagacagtgcgtgtggacagcaagcagcgatattattccattgagaggttagagtcaagttcccattatgtaatctccctaaaagcttttaacaatgccggagaaggagttcctctttatgaaagtgccaccaccaggtctataaccgatcccactgacccagttgattattatcctttgcttgatgatttccccacctcggtcccagatctctccacccccatgctcccaccagtaggtgtacaggctgtggctcttacccatgatgctgtgagggtcagctgggcagacaactctgtccctaagaaccaaaagacgtctgaggtgcgactttacaccgtccggtggagaaccagcttttctgcaagtgcaaaatacaagtcagaagacacaacatctctaagttacacagcaacaggcctcaaaccaaacacaatgtatgaattctcggtcatggtaacaaaaaacagaaggtccagtacttggagcatgactgcacatgccaccacgtatgaagcagcccccacctctgctcccaaggacttgacagtcattactagggaagggaagcctcgtgccgtcattgtgagttggcagcctcccttggaagccaatgggaaaattactgcttacatcttattttataccttggacaagaacatcccaattgatgactggattatggaaacaatcagtggtgataggcttactcatcaaatcatggatctcaaccttgatactatgtattactttcgaattcaagcacgaaattcaaaaggagtggggccactctctgatcctatcctcttcaggactctgaaagtggaacaccctgacaaaatggctaatgaccaaggtcgtcatggagatggaggttattggccagttgatactaatttgattgatagaagcaccctaaatgagccgccaattggacaaatgcaccccccgcatggcagtgtcactcctcagaagaacagcaacctgcttgtgatcattgtggtcaccgttggtgtcatcacagtgctggtagtggtcatcgtggctgtgatttgcacccgacgctcttcagcccagcagagaaagaaacgggccacccacagtgctggcaaaaggaagggcagccagaaggacctccgaccccctgatctttggatccatcatgaagaaatggagatgaaaaatattgaaaagccatctggcactgaccctgcaggaagggactctcccatccaaagttgccaagacctcacaccagtcagccacagccagtcagaaacccaactgggaagcaaaagcacctctcattcaggtcaagacactgaggaagcagggagctctatgtccactctggagaggtcgctggctgcacgccgagccccccgggccaagctcatgattcccatggatgcccagtccaacaatcctgctgtcgtgagcgccatcccggtgccaacgctagaaagtgcccagtacccaggaatcctcccgtctcccacctgtggatatccccacccgcagttcactctccggcctgtgccattcccaacactctcagtggaccgaggtttcggagcaggaagaagtcagtcagtgagtgaaggaccaactacccaacaaccacctatgctgcccccatctcagcctgagcattctagcagcgaggaggcaccaagcagaaccatccccacagcttgtgttcgaccaactcacccactccgcagctttgctaatcctttgctacctccaccaatgagtgcaatagaaccgaaagtcccttacacaccacttttgtctcagccagggcccactcttcctaagacccatgtgaaaacagcctcccttgggttggctggaaaagcaagatcccctttgcttcctgtgtctgtgccaacagcccctgaagtgtctgaggagagccacaaaccaacagaggattcagccaatgtgtatgaacaggatgatctgagtgaacaaatggcaagtttggaaggactcatgaagcagcttaatgccatcacaggctcagccttttaacatgtatttctgaatggatgaggtgaattttccgggaactttgcagcataccaattacccataaacagcacacctgtgtccaagaactctaaccagtgtacaggtcacccatcaggaccactcagttaaggaagatcctgaagcagttcagaaggaataagcattccttctttcacaggcatcaggaattgtcaaatgatgattatgagttccctaaacaaaagcaaagatgcattttcactgcaatgtcaaagtttaagctgctagaatagtcatgggcctttgtcactgcagtgaccacactgtcataactaatacctatgttttcctttgtcaaggcctgttgtttaatgtgtaggtctagtcttacaaaatgcaagtgcattatttaagcctgtaccatgccatggcaaaccagtgcaagctcactattttgttttcaacttaaacatacaaagcacccatgggaatctctcatgccatagcaccaaaggattggatgttttccttacagcacaaaaagtaaatagtaaacaaacaaaaggcagagaatgcttatgtttgtaactcagtcattcatcttgcacaagtggtggatattagtgagtggctaaaaattcacctattttggcaagtatttgtaaatccacccttggttaatatgtatgtctggagtccaggaatataaaaatctgcaactagtggcattctgccagcagcagtacatttctggaaagaggatataatatgcaatcttctcagacacatggtaattatatgcttaagcttgtaataggacagttttcaatttgggtggcttttgtgccataccacactgtgatacaatttcaaagcttcactaaggccatcttccttaggagtttggccagaagaatgcccccaccccttcaccccatccctccctgagttctccttggcaactagcgttgggtgaaatggccagctccacatgtcatatggtgcactggccaatgtcgcctgtcttctaatcccgtagaaatggcagactccctgagagcaggaagagaaggaaaataaaaggtagcttctaacagtaccttctcttaaagaatgccaactctgcctacagggtcagtgttggcaagcattggccaccagacccttttgttaagggaaacttttacactacacctgtgtcagagtcagggggaagcagaggggcaggtgccacctgacacttccgacatgtaaatccagcagatacttttcaaagcagcatcttaaactgtggactacagttttaaacttctattgccatgtttatctacagcttggaactagctaaaattaagaacattttgtatgcagcattttagtttctgaattttcagctgcatttggagttaatccctgtttatgcagctgaatcgccaaaagggagctagtttgcatatttatcagttaggtgacttgaaaacccaatgagagagtttcagctgaattattcctttcagctctgcctttgatttcaagcttgagtaggtcataattttaaaagagcatggaagggataggatctttacaacctaatagctccttttattaggtgggtaattatatatgaatccctgaataaaatattttgagcaaaatggcactgtaacagaagtaataattcagtttatttttttacagttttatgtcgggaaggaaatctgatgtcaaagagagggctgttcaaatggttcattagaaagtccggtccatttgcgaatttgttccttcaacaagagtgctcattcaagttactcagattttctggaagtcttttctgaagagctatgtgatgttgttctatgggacagactactcttatttaacatctgggcacttaggtagacaaccttctactgacctggaataaagtgtttcctaacataatattgaattattcagaaataatccattacttcaaaaaagaaaatattcattgggctagcccaaccttctctaggccctaagaattattacctcccctttctaattctagcaaacatggaacattctccttaggcacttgacacccacgagggtaatcctgagtgctcagtttggaataggttgcaaatctcagattttagggattgagtcacaccttcaatctatagaatgaagttgaccaattaaaaaaaaaaaaaaaacctatcattttcacaaatttctagatccttctagtcaaaaataattatttaggaaataaaatttttaaaaatccatttaaatacatgttatttgtcttcagtggaagttatatttctgctgcatgcttttgaaactttcttcattaaatagaatggtttgtcttagtaactggcaatgccagtattagcaccatgcatttaatctataatacaatcaatttaaacatcctcaaaaaactctagtatcatttacctggtagtattaatatacaatgatgtcaccacaacttttgtataactctgttccctttaccctcaaatgattcatatatgtatataattgcctgcccaagttttcaggtaacttattaatttcccagtctcctgatctcttgacaagaagaaacctgtgaatactgcaaactagcctctgacttcctcctactgagtctagttcatggtatccaggactctttatgctcataactctctctgattcccattgggtgatacctgacagccaaccagccgctctgccaccagaactcatttctccctgaaaaagaagaaaatcatatttggcagagcattctctggtctgccctgtaatgtgcttaaatgtcaggcaacatcctcttttttttaaaaaaaatggtatttttctttaaatttcaccctaataagaaagctattttctctcctctgcagaaatttctgcatttgtgaaacttataaaaatttagatagttcaaatgtataaagaatatttggatgatgctctagccaaaagttaaatatttcgtagtgaatcatagccaataagaaaccagtcatacttgcctctttgaataacagagatataagcttctagaatatttaaataatgaagttttacatttgggtattataaaatgcatactcaattgaatgagctgaaaaaaataccaagccagtgatataagtggagatttattaaggattcctgttgagtatattcttagtttcctcaaaatagggattattcaaaattaggtgtatgttcaatctcctgctttggttccagctacacaaggagagccatcctgtgctagtgtgatgtttcagacaacattctgaaactaaaatgtttggcacttattggcttttccaataaagaatctcttaagtacaggtatttctggaagctgttggtgtctgtgcttgaagatgattgctgatacttatccaccctttgggtacttctgttgactttgtttaaataatcatcttatggttgtccccaaatgtaatatggtatctcagatatagcagctggactgtaattacaacaaaaggttacctctaaagataacatcttaccattttagataaaattgtgtcccagaattcttatggtttcggaatgtacatttctagtcaatgaaagaaagaaaaatggaaaaattgtctagtttcaggcatgtttaaagaaaacaaagtcatctgaactttaaaatagatgcagagcagggttactttccctttcactcagttcccttcatgcaaccacaggcagtcctgcaggccagaggttactatcctaacctgctcataaccatatactatacagagcccacaactttctggagatgcagaagcagccatacactcaagtctctgtttttgtaaatcacattcaaagcaacattttactcataatttgcatttctctggtgactttcagaaatcactttagtattgtacagaaaagctttttatttgagtctagtgtttaaaattaaattggatacttgggaaaatcatagataggtgttttgtatgatattccattccaatgcaaaatatatgtacccatgcctcaatgtatcttgctatctaaatacctgttgccaaaaagtattgatttgggaaaaaaaatgccaatttcctggtcagtgaggttatgtaaaagacaaaataccacacccatatcagcaaatgaatattactactcatctggactcttcgttgccactattgcataacgttcacgtggcagacttccagttgcactctctgaaggacttttttctcttactctcaatagagagcctttgtacattgtcatcctatgattgttgttggtagaagagcaagagcaaaactctgcaagatttaataaacacaggggcatgggccaagggatctcactgtgtgctgaacatgtattttcagatgcaagaaaggaatgatggagaggaggagaaatgctgttttttattattgtagggtaaatctgacaattctgaactttgtgaattgtcagcttgtttgggggaagggtgggcgggtatggggtgtactttttataagtaatatttaatttattatttagagtggcttctttttggataatttatgataaaaagggagatctggttgggatctagatacggctgttaaagctgcagtgttccatacctcagagggaccactttggaaatgaattgtccattgctgagtatgaagagatgtccagtccaggcaaagccttcactgaagttccatcatcgccacttctccctttttagggtcattcaaagaagataacaccaaacctaaataattctgaaagcattttgcagatcagtgctactcattcaaagggctttgcaactcaaacagattgttagtgtgctagtgataagtttatttggtagaaatgggtatactacagctttaactagccttagtgagaaaagaaattttttgttgttacaaaacaccttttttaacaaaaaggtattttgagcctacaaaaagtttctttaaactgtcagattctagcattgttaaccaaattagactagtgattgcaatatttaagtgtaaatcttgttctacaagaaaggaaacttgcttacagtttaaaacaatgactgtttctacacatgatcttgtatactactacacaaggaaaagggggttttgtaaacactgtagaacagtctcatattcatttttttatagaaatgttattccaatggtgcattttttgtttaataaataaagttttgatacaaa

SEQ ID NO: 6547 - DNA, 1688 bp, Homo sapiens
gatgctggaggttcgctagccgaagcggctgcatctggcgccgcgtctgccccgcgtgctcggagcggattctgcccgccgtccccggagccctcggcgccccgctgagcccgcgatcacttcctccctgtgaccaaccggcgctgcaggttagagcctggcaatgccgtttgggtgtgtgactctgggcgacaagaagaactataaccagccatcggagtgaggagttttgtgaaatcttccgggccaaggacaagacgacaggcaagctgcacacctgcaagaagttccagaagcgggacggccgcaaggtgcggaaagctgccaagaacgagataggcatcctcaagatggtgaagcatcccaacatcctacagctggtggatgtgtttgtgacccgcaaggagtactttatcttcctggagctggccacggggagggaggtgtttgactggatcctggaccagggctactactcggagcgagacacaagcaacgtggtacggcaagtcctggaggccgtggcctatttgcactcactcaagatcgtgcacaggaatctcaagctggagaacctggtttactacaaccggctgaagaactcgaagattgtcatcagtgacttccatctggctaagctagaaaatggcctcatcaaggagccctgtgggacccccgagtatctggccccagaggtggtaggccggcagcggtatggacgccctgtggactgctgggccattggagtcatcatgtacatcctgctttcaggcaatccacctttctatgaggaggtggaagaagatgattatgagaaccatgataagaatctcttccgcaagatcctggctggtgactatgagtttgactctccatattgggatgatatttcgcaggcagccaaagacctggtcacaaggctgatggaggtggagcaagaccagcggatcactgcagaagaggccatctcccatgagtggatttctggcaatgctgcttctgataagaacatcaaggatggtgtctgtgcccagattgaaaagaactttgccagggccaagtggaagaaggctgtccgagtgaccaccctcatgaaacggctccgggcaccagagcagtccagcacggctgcagcccagtcggcctcagccacagacactgccacccccggggctgcaggtggggccacagctgcagctgcgagtggagctacctcagcccctgagggtgatgctgctcgtgctgcaaagagtgataatgtggcccccgcagaccgtagtgccaccccagccacagatggaagtgccaccccagccactgatggcagtgtcaccccagccaccgatggaagcatcactccagccactgatgggagtgtcaccccagccactgacaggagcgctactccagccactgatgggagagccacaccagccacagaagagagcactgtgcccaccacccaaagcagtgccatgctggccaccaaggcagctgccacccctgagccggctatggcccagccggacagcacagccccagagggcgccacaggccaggctccaccctctagtaaaggggaagaggctgctggttatgcccaggagtctcaaagggaggaggccagctgagtaggcagcctggtgagggggggcaggggatgggcaggagggtgggagagtggatga

SEQ ID NO: 6548 - DNA, 351 bp, Homo sapiens
atccaccgcctttgtctggaaggaagcgcagggcctcacacgcgggatccatcggaagcccaagcattgtcaagctctgctgctgcacctgggtcagcaagatcaatgcaatgtcccggaatggcttccatttgccaggcctaccaacctaactgatgactttgagtttcccattgggacatatctgaactatgaatgccgccctggttattccggaagaccgttttctatcatctgcctaaaaaactcagtctggacaagtgctaaggacaagtgcaaacgtaaatcatgtcgtaatcctccagatcctgtgaatggcatggcacatgtgatcaaagacatccagttcag

SEQ ID NO: 6549 - DNA, 583 bp, Homo sapiens
tgttgcttatacattcattaatattaatacaaagaacttgagtaaattgatgtactttttcactcataatttttctattacagttaaatatgaaaggatcaaatttttggtgattgccttaaagaatgctgtggaaatatatgcttgggctcctaaaccgtatcataaattcatggcatttaagtcttttgcagatctccagcacaagcctctgctagttgatctcacggtagaagaaggtcaaagattaaaggttatttttggttcacacactggtttccatgtaattgatgttgattcaggaaactcttatgatatctacataccatctcatattcagggcaatatcactcctcatgctattgtcatcttgcctaaaacagatggaatggaaatgcttgtttgctatgaggatgagggggtgtatgtaaacacctatggccggataactaaggatgtggtgctccaatggggagaaatgcccacgtctgtgggtaggttaaccattccttatctccttcagcagttacaccccccaaatgaaacgaaaatcaagaaatgtgaaacaaccatttgattccac

SEQ ID NO: 6550 - DNA, 891 bp, Homo sapiens
actgacaggctcaagagcaaaaagcgtgggcagttggagaagaagcagccagagtgtgaagaagcccacggaaggaaagtccagggaggaggaaaagaagcagaagttttggcatctgttccctggctgtgccaagatgggcgattggagcttcctgggaaatttcctggaggaagtacacaagcactcgaccgtggtaggcaaggtctggctcactgtcctcttcatattccgtatgctcgtgctgggcacagctgctgagtcttcctggggggatgagcaggctgatttccggtgtgatacgattcagcctggctgccagaatgtctgctacgaccaggctttccccatctcccacattcgctactgggtgctgcagatcatcttcgtctccacgccctctctggtgtacatgggccacgccatgcacactgtgcgcatgcaggagaagcgcaagctacgggaggccgagagggccaaagaggtccggggctctggctcttacgagtacccggtggcagagaaggcagaactgtcctgctgggaggaagggaatggaaggattgccctccagggcactctgctcaacacctatgtgtgcagcatcctgatccgcaccaccatggaggtgggcttcattgtgggccagtacttcatctacggaatcttcctgaccaccctgcatgtctgccgcaggagtccctgtccccacccggtcaactgttacgtatcccggcccacagagaagaatgtcttcattgtctttatgctggctgtggctgcactgtccctcctccttagcctggctgaactctaccacctgggctggaagaagatcagacagcgatttgtcaaaccgcggcagcacatggctaagtgccagctttctgg

SEQ ID NO: 6551 - DNA, 1857 bp, Homo sapiens
caggaagctagcagagtttgcttctgagacgaattctgttacagtacatggcatttatgaggatcaatgtaattatgaatgaattgcctcgtgatacctgtggcaaccacactaatcagctggatggcaccaaggaagaaagagagcttccaagagttatcaagacaagtggttccatgccagatgatgcttctctcaacagtactaccctgtctgacgcatcccaggataaagaagggagttttgcggttcccaggagtgactctgtggctatacttgagaccattccagttctaccagttcattccaatggatcaccggagcctggacagccagttcagaatgcgataagtgatgatgattttctggaaaagaacattccaccagaggctgaagagctgtcatttgaagtgtcttattcagaaatggttacggaggctctaaaaagaaataaacttaagaaatcagagattaagaaagaagactatgttttaactaaatttaatgttcagaaaaccagatttggcttaactgaagcaggagatctgtctgctgaagacatgaagaaaatccgccatctctctctgattgaattgactgccttttttgatgcctttggaattcaactgaaaaggaacaaaacagagaaagtaaaaggacgagacaatgggatttttggagttccacttacagtcctcctggacggtgaccgaaagaaagaccctggagtgaaagttcccctggtattacaaaaattttttgagaaagttgaggaatcaggtctggaatctgaaggaatttttcgactttcaggatgtactgctaaagtcaagcaataccgtgaagaacttgatgccaagtttaatgctgataaatttaaatgggacaaaatgtgccatagagaagctgcagtaatgttgaaagcgtttttcagagaactacccacctctctcttccctgtggaatatatacctgccttcatcagtctaatggaaagagggcctcacgtcaaagtacagtttcaagccttacacctcatggtcatggcgctgcctgatgccaacagagatgcagctcaggccctcatgacattcttcaataaagtgattgccaatgaatcaaaaaaccgaatgagtctgtggaacatttctacagtgatggcaccaaaccttttcttcagtagaagcaaacactctgattatgaagaattactgttagcaaacactgcggcccacatcatccgcctaatgcttaagtaccagaagattttgtggaaggttccatctttcttaatcactcaagtaagaagaatgaatgaagccacgatgctattgaagaagcagctcccaagtgtcaggaagctgctcaggaggaagaccctcgagcgggagactgcaagccccaagacttcaaaggtactgcaaaaatcaccctcggcaagacgaatgtctgacgtgccggaaggagtcatacgggtccatgctccacttctctccaaggtgtccatggccattcaactcaacaatcaaaccaaagccaaagacatattggcaaaatttcaatatgaaaacagaatactgcactggcagcgagctgcactttccttcctaaatggaaaatgggttaaaaaagaaagagaagagtcgacagagaccaacaggagccccaaacatgtattcctcttcactattggcctggacatctccacataggcagtcatatagagacttgaaatatcattcaagggatttgggtatccagtagacttttagttacatatactacaaaactgactttgtactctcaagtagacctttcgtagaaagaaaatgtttctaataaaaatgtattagaact

SEQ ID NO: 6552 - DNA, 1385 bp, Homo sapiens
ggcagggtttggtttgggtgtcttcagatttccttgtcttgaggtcctcacaattactctacagctcagaacaccaactgctgaggctgccttgggaagaggatgatcctaaacaaagctctgctgctgggggccctcgctctgaccaccgtgatgagcccctgtggaggtgaagacattgtggctgaccacgttgcctcttgtggtgtaaacttgtaccagttttacggtccctctggccagtacacccatgaatttgatggagatgagcagttctacgtggacctggagaggaaggagactgcctggcggtggcctgagttcagcaaatttggaggttttgacccgcagggtgcactgagaaacatggctgtggcaaaacacaacttgaacatcatgattaaacgctacaactctaccgctgctaccaatgaggttcctgaggtcacagtgttttccaagtctcccgtgacactgggtcagcccaacaccctcatttgtcttgtggacaacatctttcctcctgtggtcaacatcacatggctgagcaatgggcagtcagtcacagaaggtgtttctgagaccagcttcctctccaagagtgatcattccttcttcaagatcagttacctcaccttcctcccttctgctgatgagatttatgactgcaaggtggagcactggggcctggaccagcctcttctgaaacactgggagcctgagattccagcccctatgtcagagctcacagagactgtggtctgtgccctggggttgtctgtgggcctcatgggcattgtggtgggcactgtcttcatcatccaaggcctgcgttcagttggtgcttccagacaccaagggccattgtgaatcccatcctggaagggaagatgttacctacaaagacatgcctggggtaagccacccggctacctaattcctcagtaacctccatctaaaatctccaaggaagcaataaattccttttatgagatctatgtcaaatttttccatctttcatccagggctgactgaaactatggctaataattggggtactcttatgtttcaatccaatttaacctcatttcccagatcatttttcatgtccagtaacacagaagccaccaagtacagtatagcctgataatatgttgatttcttagctgacattaatatttcttgcttccttgtgttcccacccttggcactgccacccacccctcaattcaggcaacaatgaaattaatggataccgtctgcccttggcccagaattgttatagcaaaaattttagaaccaaaaaataagtctgtactaatttcaatgtggcttttaaaagtatgacagagaaataagttaggataaaggaaatttgaatctca

SEQ ID NO: 6553 - DNA, 698 bp, Homo sapiens
cacgtggaggctgttaaacttttacataatctagggaaagaagggacacaaggtggcattagtctagggtcaggtgggaaaaggttatgctgaaaagtctctgcagctcaggacagctttgtgcaaagaactgaagttcacagctgctagtgcctgggagatcaaatagtataaatgagggcagacaaccctgaggggcagatggagctttccagacaatcttggcatgaggatgagtgagtttcaaatcagtcctgccgaggcagatggcttcctccagctctgcttactgaatgcgaagtcacagtcagtaagaaaactggttttcttcttcccaggcgctgccccatacctgaagaccaagtttatctgtgtgacaccaacgacctgcagcaataccattgacctgccgatgtccccccgcactttagattcattgatgcagtttggaaataatggtgaaggtgctgaaccctcagcaggagggcagtttgagtccctcacctttgacatggagttgacctcggagtgcgctacctcccccatgtgaggagctgagaacggaagctgcagaaagatacgactgaggcgcctacctgcattctgccacccctcacacagccaaaccccagatcatctgaaactactaactttgtggttccagattttttttaatctcctacttctgctatctttga

SEQ ID NO: 6554 - DNA, 2587 bp, Homo sapiens
aggttggcactcatcatgagcccctgttctcattctgcaaatggtgaagctctctattgtcctgaccccacagttcctgtcccatgaccagggccagctcaccaaggagctgcagcagcatgtaaagtcagtgacatgcccatgcgagtacctgaggaaggttatcaatactctggctgaccatcatcatcgtgggactgactttggtggaagtccttggttacatgtcattattgcgtttccgacaagttataaagttgtcattaccctctggatagtttacctttgggtgtctctcctgaagactatcttctggtctcgaaatggacatgatggatccacggatgtacagcagagagcctggaggtccaaccgccgtagacaggaagggctgaggtccatttgtatgcacacaaagaaaagagtttcttcctttcgaggaaataaaattggcctgaaagacgtcattactctacggagacatgtggaaacaaaagttagagctaaaatccgtaagaggaaggtgacaacgaaaatcaaccatcatgacaaaatcaatggaaagaggaagaccgccagaaaacagaaaatgtttcaacgtgcgcaagagttgcggcggcgagcagaggactaccacaaatgcaaaatccccccttctgcaagaaaggctctttgcaactgggtcagaatggcggcagcggagcatcgtcattcttcaggattgccctactggccctacctcacagctgaaactttaaaaaacaggatgggccaccagccacctcctccaactcaacaacattctataactgataactccctgagcctcaagacacctcccgagtgtctgctcactccccttccaccctcagcggatgataatctcaagacacctcccgagtgtgtgctcactccccttccaccctcagcggatgataatctcaagacacctcccgagtgtctactcactccccttccaccctcagctctaccctcagctccaccctcagcggatgataatctcaagacacgtgccgagtgtctgctccatccccttccaccctcagcggatgataatctcaagacaccttccgagcgtcagctcactccccttccaccctcagctccaccctcagcagatgataatatcaagacacctgccttccaccctcagcggatgataatctcaagacaccttccgagcgtcagctcactccccttccaccctcagctccaccctcagcagatgataatatcaagacacctgccgagcgtctgcgggggccgcttccaccctcagccgatgataatctcaagacaccttccgagcgtcagctcactccccttccaccctcagctccaccctcagcagatgataatatcaagacacctgctgagcgtctgcgggggccgcttccaccctgagcggatgataatctcaagacaccttccgagcgtcagctcactccccttccaccctcagctccaccctcagcagatgataatatcaagacacctgccgagcgtctgcgggggccgcttccaccctcagcggatgataatctcaagacaccttccgagcgtcagctcactccccttccaccctcagctccaccctcagcagatgataatatcaagacacctgccgagcgtctgcgggggccgcttccaccctcagcagatgataatctcaagacaccttccgagcgtcagctcactccccttccaccctcagctccaccctcagcagatgataatatcaagacacctgccgagcgtctgcgggggccgcttccaccctcagcggatgataatctcaagacaccttccgagcgtcagctcactccctttccaccctcagctccaccctcagcagatgataatatcaagacacctgccgagcgtctgcggggagcgtctgcgggggccgcttccaccctcagcggatgataatctcaagacaccttccgagcgtcagctcactccccttccaccctcagctccaccctcagcagatgataatatcaagacacctgctgagcgtctgcgggggccgcttccaccctcagcggatgataatctcaagacaccttccgagcgtcagctcactccccttccaccctcagctccaccctcagcagatgataatatcaagacacctgccgagcgtctgcgggggccgcttccaccctcagccgatgataatctcaagacacctcccttagctactcaggaggctgaggcagaaaaaccacgcaaacccaagaggcagagggcggctgagatggaaccacctcccgaacccaagaggcggagggtcggtgacgtggaaccgtcacgcaaacccaagaggcggagggccgctgacgtggaaccatcatcacccgaacccaagaggcggagggtcggtgatgtggaaccgtcacgcaaacccaagaggcggagggccgctgacgtggaaccatcatcacccgaacccaagaggcggagggtcggtgacgtggaaccgtcacgcaaacccaagaggcggagggccgctgacgtggaaccatcattacccgaacccaagaggcggaggttgagctga

SEQ ID NO: 6555 - DNA, 807 bp, Homo sapiens
gagaaatgttaaaaaagagttcactagccatgctttagattctcatatcttagattattatgaaaatccagccatcaaagaggatgtatcaacattaataggtgatgatttggcatcttgcaaagatgagactgatgaaagctcaaaagaagaaactgagcctcaagtgctgaagtttagagtcacatgcaacagggcaggagagaaacattgctttacctcaaatgaggctgcaagagattttgggggtgctgttcaagattattttaagtggaaggccgacatgaccaactttgatgtggaggttcttttgaacatccatgataatgaagtcattgtgggcattgcattgactgaagagagtctccaccgaagaaatataacacattttggacctacaactcttagatcaactcttgcctatgggatgctcagcaaaccctcctggggcttgcccatagatgctgttcagtgggatatctgcaatctgccattgagaactggctctgtggatattattgtaacagatttgccatttggaaaaaggatgggatccaagaagagaaactggaacctttatccagcttgcctacgggagatgagccgtgtctgcacacctaccacaggccgagctgtactacttactcaagacacaaaatgctttaccaaggcgttatctggaatgcgacacgtatggcgaaaggtggatacagtctgggtgaacgttggtggtcttcgtgctgcagtttacgttctgatacgtacacctcaagcttttgttcatccttcagaacaagacggagaaag

SEQ ID NO: 6556 - DNA, 1025 bp, Homo sapiens
aggctattttagcctgcaaaaccccaaagaagactgtttcctccagattagagtggaagaaactgggtcggagtgtctcctttgtctactatcaacagactcttcaaggtgattttaaaaatcgagctgagatgatagatttcaatatccggatcaaaaatgtgacaagaagtgatgcggggaaatatcgttgtgaagttagtgccccatctgagcaaggccaaaacctggaagaggatacagtcactctggaagtattagtggctccagcagttccatcatgtgaagtaccctcttctgctctgagtggaactgtggtagagctacgatgtcaagacaaagaagggaatccagctcctgaatacacatggtttaaggatggcatccgtttgctagaaaatcccagacttggctcccaaagcaccaacagctcatacacaatgaatacaaaaactggaactctgcaatttaatactgtttccaaactggacactggagaatattcctgtgaagcccgcaattctgttggatatcgcaggtgtcctgggaaacgaatgcaagtagatgatctcaacataagtggcatcatagcagccgtagtagttgtggccttagtgatttccgtttgtggccttggtgtatgctatgctcagaggaaaggctacttttcaaaagaaacctccttccaatctggcagacctaactttggctctatgggcgtagagagaagatggatgacaaactatctgaggctatggcagctgggagtggagaagatatactgaagccatggcttcagacagtttgtcatctcctaattcctttgaagaatcatctgccattgacttcctgttcccagatttctggctcaatcctggtctctcagtctcgaagagtaattcttcatctaaagccacgacaatgagtgaaaatgatttcaagcacacaaaatcctttataatttaaagactccactttagagatacaccaaagccaccgttgttacacaagttattaaactatta

SEQ ID NO: 6557 - DNA, 2275 bp, Homo sapiens
gaggccacctgtttgtgatgtgcaggcacagaagaaaggcacagctccccatcagtttcatggaaaataactcagtgcctgctgggaaccagctgctggagatccctacagagagcttccactgggggcaacccttccaggaaggagttggggagagagaaccctcactgtggggaatgctgataaaccagtcacacagctgctctattctcacacaaatctaccccttgcgtggctggaactgacgtttccctggaggtgtccagaaagctgatgtaacacagagcctataaaagctgtcggtccttaaggctgcccagcgccttgccaaaatggagcttgtaagaaggctcatgccattgaccctcttaattctctcctgtttggcggagctgacaatggcggaggctgaaggcaatgcaagctgcacagtcagtctagggggtgccaatatggcagagacccacaaagccatgatcctgcaactcaatcccagtgagaactgcacctggacaatagaaagaccagaaaacaaaagcatcagaattatcttttcctatgtccagcttgatccagatggaagctgtgaaagtgaaaacattaaagtctttgacggaacctccagcaatgggcctctgctagggcaagtctgcagtaaaaacgactatgttcctgtatttgaatcatcatccagtacattgacgtttcaaatagttactgactcagcaagaattcaaagaactgtctttgtcttctactacttcttctctcctaacatctctattccaaactgtggcggttacctggataccttggaaggatccttcaccagccccaattacccaaagccgcatcctgagctggcttattgtgtgtggcacatacaagtggagaaagattacaagataaaactaaacttcaaagagattttcctagaaatagacaaacagtgcaaatttgattttcttgccatctatgatggcccctccaccaactctggcctgattggacaagtctgtggccgtgtgactcccaccttcgaatcgtcatcaaactctctgactgtcgtgttgtctacagattatgccaattcttaccggggattttctgcttcctacacctcaatttatgcagaaaacatcaacactacatctttaacttgctcttctgacaggatgagagttattataagcaaatcctacctagaggcttttaactctaatgggaataacttgcaactaaaagacccaacttgcagaccaaaattatcaaatgttgtggaattttctgtccctcttaatggatgtggtacaatcagaaaggtagaagatcagtcaattacttacaccaatataatcaccttttctgcatcctcaacttctgaagtgatcacccgtcagaaacaactccagattattgtgaagtgtgaaatgggacataattctacagtggagataatatacataacagaagatgatgtaatacaaagtcaaaatgcactgggcaaatataacaccagcatggctctttttgaatccaattcatttgaaaagactatacttgaatcaccatattatgtggatttgaaccaaactctttttgttcaagttagtctgcacacctcagatccaaatttggtggtgtttcttgatacctgtagagcctctcccacctctgactttgcatctccaacctacgacctaatcaagagtggatgtagtcgagatgaaacttgtaaggtgtatcccttatttggacactatgggagattccagtttaatgcctttaaattcttgagaagtatgagctctgtgtatctgcagtgtaaagttttgatatgtgatagcagtgaccaccagtctcgctgcaatcaaggttgtgtctccagaagcaaacgagacatttcttcatataaatggaaaacagattccatcataggacccattcgtctgaaaagggatcgaagtgcaagtggcaattcaggatttcagcatgaaacacatgcggaagaaactccaaaccagcctttcaacagtgtgcatctgttttccttcatggttctagctctgaatgtggtgactgtagcgacaatcacagtgaggcattttgtaaatcaacgggcagactacaaataccagaagctgcagaactattaactaacaggtccaaccctaagtgagacatgtttctccaggatgccaaaggaaatgctacctcgtggctacacatattatgaataaatgaggaagggcctgaaagtgacacacaggcctgc

SEQ ID NO: 6558 - DNA, 578 bp, Homo sapiens
acttccgaggagacgccgacgatgaagacaccgtggaaggttcttctgggactgctgggtgctgctgcgcttgtcaccatcatcaccgtgcccgtggttctgctgaacaaaggcacagatgatgctacagctgacagtcgcaaaacttacactctaactgattacttaaaaaatacttatagactgaagttatactccttaagatggatttcagatcatgaatatctctacaaacaagaaaataatatcttggtattcaatgctgaatatggaaacagctcagttttcttggagaacagtacatttcatatggcaaagtggatctttctctccttcttgaaatgctccctgccttggctactttttagtctcctttgacgattcctcttcctctgcccatatttttaaatgatgagtttggacattctatcaatgattattcaatatctcctgatgggcagtttattctcttagaatacaactacgtgaagcaatggaggcattcctacacagcttcatatgacatttatgatttaaataaaaggcagctgattacagaagagaggattccaaacaac

SEQ ID NO: 6559 - DNA, 551 bp, Homo sapiens
gacacttactgggtgggcagagcaacattgttttgacagtgaaaattaccaatttataattttttaagaaaagcatgcctagcacagaccacctgattaccaagaggaagctgaagaggagattctactagaggtttcttgagtacaggcgatcaggctgcaaaggggaactatggactccttgatctcatacaagctttaagatggactagtgaaaacattggattctttggtggtgaccccttaagaatcactgtttttggatctggtgctgggggttcatgtgtcaacctgctgactttatcccattattctgaaggactttttcaacgagcaatagctcaaagtggaacagccctttccagctgggctgttagttttcaacctgcaaaatatgctagaatgttggccacaaaagttggttgcaatgtttcagatacagtagagttagtggaatgcctacagaagaagccttacaaagaacttgttgaccaagatattcaaccagctcgataccacatagcctttggacctgtgattgatggtgatgt

SEQ ID NO: 6560 - DNA, 610 bp, Homo sapiens
gacctggccccagtgctgcgtccttatcagccgagccgtcccacccccagcctggggcctctgggagccttggtcctgagcagccaacacaccagcccagacagctgcaagtcaccatggacgctgaaggcctggcgctgctgctgccgcccgtcaccctggcagccctggtggacagctggctccgagaggactgcccagggctcaactacgcagccttggtcagcggggcaggcccctcgcaggcggcgctgtgggccaaatcccctggggtactggcagggcagcctttcttcgatgccatatttacccaactcaactgccaagtctcctggttcctccccgagggatcgaagctggtgccggtggccagagtggccgaggtccggggccctgcccactgcctgctgctgggggaacgggtggccctcaacacgctggcccgctgcagtggcattgccagtgctgccgccgctgcagtggaggccgccaggggggccggctggactgggcacgtggcaggcacgaggaagaccacgccaggcttccggctggtggagaagtatgggctcctggtgggcggggccgcctcgcaccgctacgacctggg

SEQ ID NO: 6561 - DNA, 1444 bp, Homo sapiens
tccggcacggctttctcaggcctatgccggagcctcgagggctggagagcgggaagacaggcagtgctcggggagttgcagcaggacgtcaccaggagggcgaagcggccacgggaggggggccccgggacattgcgcagcaaggaggctgcaggggctcggcctgcgggcgccggtcccacgaggcactgcggcccagggtctggtgcggagagggcccacagtggacttggtgacgctgtatgccctcaccgctcagcccctggggctggcttggcagacagtacagcatccaggggagtcaagggcatggggcgagaccagactaggcgaggcgggcggggcggagtgaatgagctctcaggagggaggatggtgcaggcaggggtgaggagcgcagcgggcggcgagcgggaggcactggcctccagagcccgtggccaaggcgggcctcgcgggcggcgacggagccgggatcggtgcctcagcgttcgggctggagacgagggtgaccaggtctccagctggggtggacgtgcccaccagctgccgaaggccaagacgccaggtccggtggacgtgacaagcaggacatgacatggtccggtgtgacggcgaggacagaggaggcgcgtccggccttcctgaacaccttaggctggtggggctgcggcaagaagcgggtctgtttctttacttcctccacggagtcggcacactatggctgccctctgggctcccagaacccacaacatgaaagaaatggtgctacccagctcaagcctgggcctttgaatccggacacaaaaccctctagcttggaaatgaatatgctgcactttacaaccactgcactacctgactcaggaatcggctctggaaggtgaagctagaggaaccagacctcatcagcccaacatcaaagacaccatcggaacagcagcgcccgcagcacccaccccgcaccggcgactccatcttcatggccaccccctgcggcggacggttgaccaccagccaccacatcatcccagagctgagctcctccagcgggatgacgccgtccccaccacctccctcttcttctttttcatccttctgtctctttgtttctgagctttcctgtctttccttttttctgagagattcaaagcctccacgactctgtttcccccgtcccttctgaatttaatttgcactaagtcatttgcactggttggagttgtggagacggccttgagtctcagtacgagtgtgcgtgagtgtgagccaccttggcaagtgcctgtgcagggcccggccgccctccatctgggccgggtgactgggcgccggctgtgtgcccgaggcctcaccctgccctcgcctagtctggaagctccgaccgacatcacggagcagccttcaagcattccattacgccccatctcgctctgtgcccctc

SEQ ID NO: 6562 - DNA, 519 bp, Homo sapiens
atagaagaaagagtgaaaattcagatggagcagtggtgaactatgacaatgtagtggacacaggttctgaaacagatgaggaagacaagcttcatattgctgaggatgacggtattgccaaccctctggaccaggagacgagtccagctagtgtgcccaaccatgagtcctccccacacgtgagccaagctctgttgccaagagaggaagaggaagatgaaataagggagggtggagtggaacacccctggcacaacaacgagattctacaagcctctgtagatggtccagaagaaatgaaggaagactatgacactatggggccagaagccacgatccagaccgcaattaacaatggtacagtgaagaatgcaaattgcacatcagattttgaggaatactttgccaaaagaaaactggaggaacgcgatggtcatgcagtcagcatcgaggagtaccttcagcgcagtgacacagccattatttacccagaagcccctgaggagctgtctcgccttg

SEQ ID NO: 6563 - DNA, 1909 bp, Homo sapiens
aacggctagcctgaggagctgctgcgacagtccactacctttttcgagagtgactcccgttgtcccaaggcttcccagagcgaacctgtgcggctgcaggcaccggcgcgtcgagtttccggcgtccggaaggaccgagctcttctcgcggatccagtgttccgtttccagcccccaatctcagagccgagccgacagagagcagggaaccggcatggccaaagccgcggcgatcggcatcgacctgggcaccacctactcctgcgtgggggtgttccaacacggcaagggggagcgcaacgtgctcatctttgacctgggcgggggcaccttcgacgtgtccatcctgacgatcgacgacggcatcttcgaggtgaaggccacggccggggacacccacctgggtggggaggactttgacaacaggctggtgaaccacttcgtggaggagttcaagagaaaacacaagaaggacatcagccagaacaagcgagccgtgaggcggctgcgcaccgcctgcgagagggccaagaggaccctgtcgtccagcacccaggccagcctggagatcgactccctgtttgagggcatcgacttctacacgtccatcaccagggcgaggttcgaggagctgtgctccgacctgttccgaagcaccctggagcccgtggagaaggctctgcgcgacgccaagctggacaaggcccagattcacgacctggtcctggtcgggggctccacccgcatccccaaggtgcagaagctgctgcaggacttcttcaacgggcgcgacctgaacaagagcatcaaccccgacgaggctgtggcctacggggcggcggtgcaggcggccatcctgatgggggacaagtccgagaacgtgcaggacctgctgctgctggacgtggctcccctgtcgctggggctggagacggccggaggcgtgatgactgccctgatcaagcgcaactccaccatccccaccaagcagacgcagatcttcaccacctactccgacaaccaacccggggtgctgatccaggtgtacgagggcgagagggccatgacgaaagacaacaatctgttggggcgcttcgagctgagcggcatccctccggcccccaggggcgtgccccagatcgaggtgaccttcgacatcgatgccaacggcatcctgaacgtcacggccacggacaagagcaccggcaaggccaacaagatcaccatcaccaacgacaagggccgcctgagcaaggaggagatcgagcgcatggtgcaggaggcggagaagtacaaagcggaggacgaggtgcagcgcgagagggtgtcagccaagaacgccctggagtcctacgccttcaacatgaagagcgccgtggaggatgaggggctcaagggcaagatcagcgaggccgacaagaagaaggtgctggacaagtgtcaagaggtcatctcgtggctggacgccaacaccttggccgagaaggacgagtttgagcacaagaggaaggagctggagcaggtgtgtaaccccatcatcagcggactgtaccagggtgccggtggtcccgggcctgggggcttcggggctcagggtcccaagggagggtctgggtcaggccccaccattgaggaggtagattaggggcctttccaagattgctgtttttgttttggagcttcaagactttgcatttcctagtatttctgtttgtcagttctcaatttcctgtgtttgcaatgttgaaattttttggtgaagtactgaacttgctttttttccggtttctacatgcagagatgaatttatactgccatcttacgactatttcttctttttaatacacttaactcaggccattttttaagttggttacttcaaagtaaataaactttaaaattcaagtga

SEQ ID NO: 6564 - DNA, 4059 bp, Homo sapiens
agtcgcccagagaagcgggagtgggagaagctttgagagttgcaggggactacttttttccggtcgggcggcgggcctcatgggtgcttgtttaccgggctgggagcagggcattcaaaagctgggtgtcggagcgcactgaagtccaacacgcctgcagagaccgccctaagcctggaggtgtgtctggcttgcatccagaaccacagggtggattctcgccaccgacttggctggatgacggctggctggtggtgagctcccctgcccactggctgacctcaagcagttggccccggtaggtggaggctattcgagggggacaagctggggacgcagcgtcagctcctgccagcgcgcgggtctcctccacctccaagcagtgtggtgcgtgggacgcgcatcttcccggactatccctttccagcgcggtctgtgcggaccccgagcccggcagccaccagggacggagggcggggtgcctttctctgggctcatccgctgtcagccgtgggaactcttaactttatccagagggatctgtgcaggcgggggtgggagaggttctcctcccctggcggttacctccccctcccgggccgcccctcccccgcctcccatggcttcgctttcagagcatcctcactccgcccagttcggtgccagctgcgtgggctccagcttcgatcgttttccttggaatgctccaaaactcagcagcgactaagggaattccattggaatttgccgggcgtgctctcaccccgcacggcacccgcgccgtcagtcctcggatcccatcacttcagcccgaagattgcaactttgcagagacgaagaaatagcatggcatgaaacatggctcagttctattacaaaagaaatgttaatgctccctatagagaccgcatccctctaaggatagtaagagcagaatcagaactctcgccatcagaaaaagcctacttgaatgctgtggaaaagggagattatgccagtgtcaagaaatccctagaggaagctgaaatttattttaaaatcaatattaattgcattgatcctctcggaagaactgctctcctcattgcaattgaaaatgagaacttggagctcatcgaactactcttaagctttaatgtctatgttggagatgctctattacatgctatcagaaaagaagtcgtcggagctgttgagctgttattgaaccacaaaaaacctagtggagaaaaacaggtgcctcctatactccttgataagcagttctctgaattcactccagacattacaccaatcattttggcagcccatacaaataattatgagataataaaactcttggttcagaaaggagtctcagtgcctcgaccccacgaggtccgctgtaactgtgtggaatgcgtgtccagttcagatgtggacagcctccgtcactcacgctccagactcaacatctacaaggccttggccagtccctctctcattgcactgtcaagcgaagatccttttctcacagcctttcagttaagttgggaacttcaggaactgagcaaggtggaaaatgaattcaagtcggagtatgaagagctgtcacggcagtgcaaacaatttgctaaggacctactggatcagacgagaagttccagagaactggaaatcattcttaattaccgagatgacaatagtctcatagaagaacaaagtggaaatgatcttgcaagactaaaattggccattaagtaccgtcaaaaagagtttgttgcccagcccaattgtcaacagctgctggcatctcgctggtacgatgagtttccaggctggaggagaagacactgggcagtgaagatggtgacatgtttcataataggacttctttttcctgtcttctctgtgtgctacctgatagctcccaaaagcccacttggactgttcatcaggaagccatttatcaagtttatctgccacacagcctcctatttgacttttttgttcctgctgctgcttgcctctcagcacatcgacaggtcagacttgaacaggcaaggtccaccaccaaccatcgtcgagtggatgatattaccgtgggtcctgggcttcatatggggagaaattaaacagatgtgggatggcggacttcaggactacatccatgattggtggaatctaatggactttgtaatgaactccttatatttagcaacaatctccttgaaaattgttgcatttgtaaagtacagtgcccttaatccacgagaatcatgggacatgtggcatcccactctggtggcagaggctttatttgctattgcaaacatcttcagttctctgcgtctgatctcactgtttactgcaaattctcacctgggacctctgcaaatatctctgggaagaatgctcctggacattttgaagtttctattcatatactgccttgtgttgctagcatttgcaaatggcctaaatcaattgtacttctattatgaagaaacgaaagggttaacctgcaaaggcataagatgtgaaaagcagaataatgcattttcaacgttatttgagacactgcagtccctgttttggtcaatatttgggctcatcaatttatatgtgaccaatgtcaaagcacagcatgaatttactgagtttgttggtgccaccatgtttgggacatacaatgtcatctctctggttgttctactcaacatgttaatagctatgatgaataattcttaccaactgattgctgaccatgcagatatagaatggaaatttgcacgaacaaagctttggatgagttattttgaagaaggaggtactctgcctactcccttcaatgtcatcccgagccccaagtctctctggtacctgatcaaatggatctggacacacttgtgcaagaaaaagatgagaagaaagccagaaagttttggaacaatagggaggcgagctgctgataacttgagaagacatcaccaataccaagaagttatgaggaacctggtgaagcgatacgttgctgcaatgattagagatgctaaaactgaagaaggcctgaccgaagagaactttaaggaactaaagcaagacatttctagtttccgctttgaagtcctgggattactaagaggaagcaaactttccacaatacaatctgcgaatgcctcgaaggagtcttcaaattcggcagactcagatgaaaagagtgatagcgaaggtaatagcaaggacaagaaaaagaatttcagcctttttgatttaaccaccctgattcatccgagatcagcagcaattgcctctgaaagacataacataagcaatggctctgccctggtggttcaggagccgcccagggagaagcagagaaaagtgaattttgtgaccgatatcaaaaactttgggttatttcatagacgatcaaaacaaaatgctgctgagcaaaatgcaaaccaaatcttctctgtttcagaagaagttgctcgtcaacaggctgcaggaccacttgagagaaatattcaactggaatctcgaggattagcttcacggggtgacctgagcattcccggtctcagtgaacaatgtgtgttagtagaccatagagaaaggaatacggacacactggggttacaggtaggaaagagagtgtgtccattcaagtcagagaaggtggtggtggaggacacggttcctataataccaaaggagaaacatgcaaaagaagaggactctagtatagactatgatctaaacctcccagacacagtcacccacgaagattacgtgaccacaagattgtgatacttgaaggaggaagcgtttaccatacacatacgtattttccgtagtgctctgggtgggggaaaatgtttaaattgtattagcaaatgctaacttacactttatagcgtttatcagctgtggcatattacctgtaacatgtttaaataaggcaaaggcaatcaaaaacctttttgttttgtagcctgcttttgctttcacaatttgtcttacaattgtttttgttaataaataaatgcaccttgtattcttgtactgttgcaataa

SEQ ID NO: 6565 - DNA, 632 bp, Homo sapiens
tgcacaccagctgtgtagatgtgggagaggggtttcttccagatgcagactctcagtaatatcccttgtttctgcctccatggctcactcctgccctccactgatctggccactctctcagctcatcccactgatgacaccacgacgctctctgagagaccatccccaagcacagacgtccagacagacccccagaccctcaagccatctggttttcatgaggatgaccccttcttctatgatgaacacaccctccggaaacgggggctgttggtcgcagctgtgctgttcatcacaggcatcatcatcctcaccagtggcaagtgcaggcagctgtcccggttatgccggaatcgttgcaggtgagtccatcagaaacaggagctgacaacctgctgggcacccgaagaccaagccccctgccagctcaccgtgcccagcctcctgcatcccctcgaagagcctggccagagagggaagacacagatgatgaagctggagccagggctgccggtccgagtctcctacctcccccaaccctgcccgcccctgaaggctacctggcgccttgggggctgtccctcaagttatctcctctgctaagacaaaaagtaaagcactgtggtctttgc

SEQ ID NO: 6566 - DNA, 4402 bp, Homo sapiens
gagctctgtcagaggcgctttcggcttccaagggggaagtgctgggctataattaatgtttttattaaatttggagggaagtttttgcagcctttcgcctagcgtggccttcaggttgatagaagtccagatcctgaggaaatctccagctaaatgctcaaaatataaaatactgagctgagatttgcgaagagcagcagcatggatggattttatgaccagcaagtgccttacatggtcaccaatagtcagcgtgggagaaattgtaacgagaaaccaacaaatgtcaggaaaagaaaattcattaacagagatctggctcatgattcagaagaactctttcaagatctaagtcaattacaggaaacatggcttgcagaagctcaggtacctgacaatgatgagcagtttgtaccagactatcaggctgaaagtttggcttttcatggcctgccactgaaaatcaagaaagaaccccacagtccatgttcagaaatcagctctgcctgcagtcaagaacagccctttaaattcagctatggagaaaagtgcctgtacaatgtcagtgcctatgatcagaagccacaagtgggaatgaggccctccaacccccccacaccatccagcacgccagtgtccccactgcatcatgcatctccaaactcaactcatacaccgaaacctgaccgggccttcccagctcacctccctccatcgcagtccataccagatagcagctaccccatggaccacagatttcgccgccagctttctgaaccctgtaactcctttcctcctttgccgacgatgccaagggaaggacgtcctatgtaccaacgccagatgtctgagccaaacatccccttcccaccacaaggctttaagcaggagtaccacgacccagtgtatgaacacaacaccatggttggcagtgcggccagccaaagctttccccctcctctgatgattaaacaggaacccagagattttgcatatgactcaggctgtatgtttgaaaagggccccaggcagttttatgatgacacctgtgttgtcccagaaaaattcgatggagacatcaaacaagagccaggaatgtatcgggaaggacccacataccaacggcgaggatcacttcagctctggcagtttttggtagctcttctggatgacccttcaaattctcattttattgcctggactggtcgaggcatggaatttaaactgattgagcctgaagaggtggcccgacgttggggcattcagaaaaacaggccagctatgaactatgataaacttagccgttcactccgctattactatgagaaaggaattatgcaaaaggtggctggagagagatatgtctacaagtttgtgtgtgatccagaagcccttttctccatggcctttccagataatcagcgtccactgctgaagacagacatggaacgtcacatcaacgaggaggacacagtgcctctttctcactttgatgagagcatggcctacatgccggaagggggctgctgcaacccccacccctacaacgaaggctacgtgtattaacacaagtgacagtcaagcagggcgtttttgcgcttttccttttttctgcaagatacagagaattgctgaatctttgttttatttctgttgtttgtattttatttttaaataataatacacaaaaaggggcttttcctgttgcattattctatggtctgccatggactgtgcactttatttgagggtgggtgggagtaatctaaacatttattctgtgtaacaggaagctaatgggtgaatgggcagagggatttggggattactttttacttaggcttgggatggggtcctacaagttttgagtatgatgaaactatatcatgtctgtttgatttcataacaacataagataatgtttattttatcggggtatctatggtacagttaatttcacgttgtgtaaatatccacttggagactatttgccttgggcattttcccctgtcatttatgagtctctgcaggtgtacaaaaaaaccccaatctactgtaaatggcagtttaattgttagaaatgactgtttttgcaccacttgtaaaaaggtatttagcgattgcatttgctgtttgttgttttattttgctttatatatgacttgcagaggataaccataaaatgggtaattctctctgaagttgaataatcaccatgactgtaaatgaggggcacaattttggactctggcgccaaactgagtcataggccagtagcattacgtgtatctggtgccaccttgctgtttagatacaaatcataccgtcttttaaatattttgaagcccatttcagttaaataatgacatgtcatggtcctttggaatcttcatttaaatgttaaatctggaatcaaaatgaagcaaaaaatatctgtctccttttcactttcttcagtacataaatacattatttaatcaataagaattaactgtactaaatcatgtattatgctgttctagttacagcaaacactctttaagaaaaatatccaatacactaaataggtactatagtaatttttagacatggtacccattgatatgcatttaaaccttttactgctgtgttatgttgataacatatataaatattagataatgctaatgcttctgctgctgtcttttctgtaatattctctttcatgctgaatttactatgaccatttataagcagtgcagttaactacagatagcatttcaggacaaaatagatgactcaaaccatttattgcttaaaaaatagcttacgccatgctatgctataagcagcttttatgcacattgacaaatgaagagtaagcttcagcttgctaaaggaaactgtggaaccttttgtaacttttggtgatatggaaaattatttacaaaccgtcaaagaatatgaggaagttgctgtatgacatagtgctggcactgatattatccatcatctctttttggacacttctgtaaatgtgattggattgtttgaaagaagatttaaagtttcaaagttttttgttctgtttttgctttgcatttggagaaaatattgaaagcagggtatgttgtttcattcaccttgaaaaaaccatgagtaaatggggatatagaatctctgaatagctcgctaaaagattcaagcaagggacatgaattttgttccatctatcaataatatccagaagaacaacttttttaaagagtctatagcaaaaagcaaaaaaaaaaaaaaattctaaacacaaagtcaaaataaacctattgtaaaagcatttcgtgatgagcatgaaaaagattgtttaaagatgatccccccagctacccattttccaaaactacacagatcacagctcatttctctaagtggagcagttatcaagaaacccaaacaccaaaattgctactcttcacatttaatcctacaaaaagtactccaatttcaaaatatgtatgtaacctgcgatttcaatgattgttgttcatatacatcatgtattattttggcccattttgggcctaaaaaagaaaactatgccttaaaaatcagaaccttttctccccactatgcttatgtggccatctacagcacttagaataaaaacagatgttaaaatattcagtgaaagttttattggaaaaaggaattgagatatataattgagatttggtgaaattgaaggagaaaatttaagtgagtctttaaaatatattctgaatgaaaactgtattgaggattcatttttgttccttttttttctttttctcttttctcctttttcttctttttaatagtctagttttagtcagtcagtgaggaagaattgggccatgctaacgttatcacaagagaacaatggcagaaatggtattagttatataatatttaaggacaaactatatgttttgctgttttaacgtagtgactcactgaactaaatacataattgaccaacattaagtgtatttccaatacagaagggttgaaaatattacattataaactcttttgaaaaatgtatctaaaattttttaagttctgttttgattccactttttggttgagtttttatgtttttgttttcaggtagattaataaatctggcagctgatttctgcaagattcttgtgttttgaatttctcattgaattggctactcaaacatagaaatcatttgttaatgatgtaatgtcttctctcagcttttatcttcactgctgtttgctgtctcttgatgatgacatgttaatacccaatagattaattgcaacaaacacttatactcaaataactaagtaaaaataatttttcttgttatgtccatgaaaagtgcttcagaataaaaatccacaagactgac

SEQ ID NO: 6567 - DNA, 3584 bp, Homo sapiens
gccgcgagcgccgcgccacggcgccgccgccgccgtcgccgccgccggagtcctcgccccgccgcgctgcgcccggctcgcgctgcgctagtcgctccgcttcccacaccccgccggggactggcagccgccgccgcacatctgccgccacagcctccgccggctacccgaacgttctcggggccagcgccgagtggatcaccggggaccgcgaggcacccgcgcgccgcagaccccgcgcgggctggagcacccggcagagcgcgccacagcgccgtggcctctgctgcccgggctgcgccagagccgcggacgggcgcgcagagcgccggggactccggagccgatccctagcgccgcgatgcggagcacctactgcaggagatcgggggcctgggacgcgctggccgaggtgtgatcggaccccaggctagccacaaagggcacttggccccagggctaggagagcgaggggagagcacagccacccgcctcggcggcccgggactcggctcgactcgccggagaatgcgcccgaggacgacggggcgccagagccgcggtgctttcaactggcgagcgcgaatgggggtgcactggagtaaggcagagtgatgcgggggggcaactcgcctggcaccgagatcgccgccgtgcccttccctggacccggcgtcgcccaggatggctgccccgagccatgggccgcggcggagctagcgcggagcgcccgaccctcgacccccgagtcccggagccggccccgcgcggggccacgcgtccctcgggcgctggttcctaaggaggacgacagcaccagcttctcctttctcccttcccttccctgccccgcactcctccccctgctcgctgttgttgtgtgtcagcacttggctggggacttcttgaacttgcagggagaataacttgcgcaccccactttgcgccggtgcctttgccccagcggagcctgcttcgccatctccgagccccaccgcccctccactcctcggccttgcccgacactgagacgctgttcccagcgtgaaaagagagactgcgcggccggcacccgggagaaggaggaggcaaagaaaaggaacggacattcggtccttgcgccaggtcctttgaccagagtttttccatgtggacgctctttcaatggacgtgtccccgcgtgcttcttagacggactgcggtctcctaaaggtcgaccatggtggccgggacccgctgtcttctagcgttgctgcttccccaggtcctcctgggcggcgcggctggcctcgttccggagctgggccgcaggaagttcgcggcggcgtcgtcgggccgcccctcatcccagccctctgacgaggtcctgagcgagttcgagttgcggctgctcagcatgttcggcctgaaacagagacccacccccagcagggacgccgtggtgcccccctacatgctagacctgtatcgcaggcactcaggtcagccgggctcacccgccccagaccaccggttggagagggcagccagccgagccaacactgtgcgcagcttccaccatgaagaatctttggaagaactaccagaaacgagtgggaaaacaacccggagattcttctttaatttaagttctatccccacggaggagtttatcacctcagcagagcttcaggttttccgagaacagatgcaagatgctttaggaaacaatagcagtttccatcaccgaattaatatttatgaaatcataaaacctgcaacagccaactcgaaattccccgtgaccagacttttggacaccaggttggtgaatcagaatgcaagcaggtgggaaagttttgatgtcacccccgctgtgatgcggtggactgcacagggacacgccaaccatggattcgtggtggaagtggcccacttggaggagaaacaaggtgtctccaagagacatgttaggataagcaggtctttgcaccaagatgaacacagctggtcacagataaggccattgctagtaacttttggccatgatggaaaagggcatcctctccacaaaagagaaaaacgtcaagccaaacacaaacagcggaaacgccttaagtccagctgtaagagacaccctttgtacgtggacttcagtgacgtggggtggaatgactggattgtggctcccccggggtatcacgccttttactgccacggagaatgcccttttcctctggctgatcatctgaactccactaatcatgccattgttcagacgttggtcaactctgttaactctaagattcctaaggcatgctgtgtcccgacagaactcagtgctatctcgatgctgtaccttgacgagaatgaaaaggttgtattaaagaactatcaggacatggttgtggagggttgtgggtgtcgctagtacagcaaaattaaatacataaatatatatatatatatatattttagaaaaaagaaaaaaacaaacaaacaaaaaaaccccaccccagttgacactttaatatttcccaatgaagactttatttatggaatggaatggaaaaaaaaacagctattttgaaaatatatttatatctacgaaaagaagttgggaaaacaaatattttaatcagagaattattccttaaagatttaaaatgtatttagttgtacattttatatgggttcaaccccagcacatgaagtataatggtcagatttattttgtatttatttactattataaccactttttaggaaaaaaatagctaatttgtatttatatgtaatcaaaagaagtatcgggtttgtacataattttccaaaaattgtagttgttttcagttgtgtgtatttaagatgaaaagtctacatggaaggttactctggcaaagtgcttagcacgtttgcttttttgcagtgctactgttgagttcacaagttcaagtccagaaaaaaaaagtggataatccactctgctgactttcaagattattatattattcaattctcaggaatgttgcagagtgattgtccaatccatgagaatttacatccttattaggtggaatatttggataagaaccagacattgctgatctattatagaaactctcctcctgccccttaatttacagaaagaataaagcaggatccatagaaataattaggaaaacgatgaacctgcaggaaagtgaatgatggtttgttgttcttctttcctaaattagtgatcccttcaaaggggctgatctggccaaagtattcaataaaacgtaagatttcttcattattgatattgtggtcatatatatttaaaattgatatctcgtggccctcatcaagggttggaaatttatttgtgttttacctttacctcatctgagagctctttattctccaaagaacccagttttctaactttttgcccaacacgcagcaaaattatgcacatcgtgttttctgcccaccctctgttctctgacctatcagcttgcttttctttccaaggttgtgtgtttgaacacatttctccaaatgttaaacctatttcagataataaatatcaaatctctggcatttcattctataaagtc

SEQ ID NO: 6568 - DNA, 1844 bp, Homo sapiens
aagttaaaagtggatgcagaagcgagcacagacggggctaggggtttcagagaaagtaattgagagtgctggcaacagcagctgaaatatagagaagttgtaggattaactttttcgcccaaagcagcttcagcccacgttttattcccatcgagggagggagaatgggtgccgctgagtgggcgggggagtggtccctgaaaggaggtggagtgctacagcccctccccgttggctctcgctgtttgtccgttgttggtttatactaatttgacaacagccgcctgttgagtctcctccagatcgcagctgaaggatctgttgagcgcttcaggaaaggcggtgagatccggtaccgcagcagagcactctcagctctgggtcttgcaggcgcagggctcccccatgccagcagaaagatttcctctggtgaagaggaccgtcgaatctgtcctcctcaagacacctcttgtacagaatttattcgaatgccacggccaaggtcttccttgaaaaatgttaaccgatgtgtgctttttgtcttttgtcatcctttctttaggacaggcgacactaacaggtgaagatctcgggagaccatgactaagaaaagaattgctgtgattgggggaggagtgagcgggctctcttccatcaagtgctgcgtagaagaaggcttggaacctgtctgctttgaaaggactgatgacatcggagggctctggaggttccaggaaaatcctgaagaaggaagggccagtatttacaaatcagtgatcatcaatacttctaaagagatgatgtgcttcagtgactatccaatcccagatcattatcccaacttcatgcataatgcccaggtcctggagtatttcaggatgtatgccaaagaatttgaccttctaaagtatattcgatttaagaccactgtgtgcagtgtgaagaagcagcctgattttgccacttcaggccaatgggaagtggtcactgaatctgaagggaaaaaggagatgaatgtctttgatggagtcatggtttgcactggccatcacaccaatgctcatctacctctggaaagcttccctggaattgagaagttcaaagggcagtacttccacagtcgagactataagaacccagagggattcactggaaagagagtcattataattggcattgggaattctggaggggatctggctgtagagattagccaaacagccaagcaggttttcctcagcaccaggagaggggcttggatcctgaatcgtgtaggggactacggatatcctgctgatgtgttgttctcttctcgacttacacattttatatggaagatctgtggccaatcattagcaaacaaatatttggaaaaaaagataaaccaaaggtttgaccatgaaatgtttggcctgaagcctaaacacaggtatgttcccaggatgggagtgcagggatagtggccaaagcacaagaataaggactcttcacactggctaatagtaaagccacctctacccatacattaagaaaacccacagtggctgggcatggtggctcacgcctgtaatcccagcactttgggaggcggaggcgggtggatcacctgagctcaggagtttgagaccatcctggccaacacggtgaaaccccatctctactaaaaacacaaaattagccaggtgtggtggcacctgtctgtagtcccagctattcaggaggctgaggcaggagaatcacctgagccctggaggcagaggttgcagtgagctgagattgcaccactgcactccagcctgggcaacagactctgtctcaaaaagaaaaaaaaaaaaaaagaaaag

SEQ ID NO: 6569 - DNA, 838 bp, Homo sapiens
aaagagggcacccagcccttccccctccctcatcctcccatcccagtaaaccctgccaaattggaatcctggacttaatttaggagaaaggccctgtaaccaagatactgactgaacatggctggcggactcaggctggggtctgcagtgcagcattaatgggccgctgacatgaatatggagtagttttctctagcaaagagtaatgtgggccatggagtcaggccacctcctctgggctctgctgttcatgcagtccttgtggcctcaactgactgatggagccactcgagtctactacctgggcatccgggatgtgcagtggaactatgctcccaagggaagaaatgtcatcacgaaccagcctctggacagtgacatagtggcttccagcttcttaaagtctgacaagaaccggatagggggaacctacaagaagaccatctataaagaatacaaggatgactcatacacagatgaagtggcccagcctgcctggttgggcttcctggggccagtgttgcaggctgaagtgggggatgtcattcttattcacctgaagaattttgccactcgtccctataccatccaccctcatggtgtcttctacgagaaggactctgaaggttccctatacccagatggctcctctgggccactgaaagctgatgactctgttcccccggggggcagccatatctacaactggaccattccagaaggccatgcacccaccgatgctgacccagcgtgcctcacctggatctaccattctcatgtagatgctccacgagacattgcaactggcctaattgggcctctcatcacctgtaaaaga

SEQ ID NO: 6570 - DNA, 745 bp, Homo sapiens
agatgctggcggatccccgctccttcgactccaacgccttcacgcttctcctccgggcggcattccagagtctgctggacgcccaggcggacgaggccgtgttaggattttttatcaagcagaaatgcatcgaacaacgagaatcaagatcactgagctaaatccccacctgatgtgtgtgctttgtggagggtacttcattgatgccacaaccataatagaatgtctacattccttctgtaaaacgtgtattgttcgttacctggagaccagcaagtattgtcctatttgtgatgtccaagttcacaagaccagaccactactgaatataaggtcagataaaactctccaagatattgtatacaaattagttccagggcttttcaaaaatgaaatgaagagaagaagggatttttatgcagctcatccttctgctgatgctgccaatggctctaatgaagatagaggagaggttgcagatgaagataagagaattataactgatgatgagataataagcttatccattgaattctttgaccagaacagattggatcggaaagtaaacaaagacaaagagaaatctaaggaggaggtgaatgataaaagatacttacgatgcccagcagcaatgactgtgatgcacttaagaaagtttctcagaagtaaaatggacatacctaatactttccagattgatgtcatgtatgaggaggaacctttaaaggattattatacactaatg

SEQ ID NO: 6571 - DNA, 1128 bp, Homo sapiens
agtatgctgggagcggtgaagatggaagggcacgagccgtccgactggagcagctactatgcagagcccgagggctactcctccgtgagccgcgcccgcgaccccaagacctacaggcgcagctacacgcacgcaaagccgccctactcgtacatctcgctcatcaccatggccatccagcagagccccaacaagatgctgacgctgagcgagatctaccagtggatcatggacctcttccccttctaccggcagaaccagcagcgctggcagaactccatccgccactcgctctccttcaacgactgtttcctgaaggtgccccgctcgcccgacaagcccggcaagggctccttctggaccctgcaccctgactcgggcaacatgttcgagaacggctgctacctgcgccgccagaagcgcttcaagtgcgagaagcagctggcgctgaaggaggccgcaggcgccgccggcagcggcaagaaggcggccgccggagcccaggcctcacaggctcaactcggggaggccgccgggccggcctccgagactccggcgggcaccgagtcgcctcactcgagcgcctccccgtgccaggagcacaagcgagggggcctgggagagctgaaggggacgccggctgcggcgctgagccccccagagccggcgccctctcccgggcagcagcagcaggccgcggcccacctgctgggcccgccccaccacccgggcctgccgcctgaggcccacctgaagccggaacaccactacgccttcaaccacccgttctccatcaacaacctcatgtcctcggagcagcagcaccaccacagccaccaccaccaccaaccccacaaaatggacctcaaggcctacgaacaggtgatgcactaccccggctacggttcccccatgcctggcagcttggccatgggcccggtcacgaacaaaacgggcctggacgcctcgcccctggccgcagatacctcctactaccagggggtgtactcccggcccattatgaactcctcttaagaagacgacggcttcaggcccggctaactctggcaccccggatcgaggacaagtgagagagcaagtgggggtcgagactttggggagacggtg

SEQ ID NO: 6572 - DNA, 1122 bp, Homo sapiens; identical to SEQ ID NO: 3150

SEQ ID NO: 6573 - DNA, 708 bp, Homo sapiens
caaagcgcaaaaagataaatcagaattcaagtaaagagaagattaataatggacaagaagtcaaaatcgatcagagaaatgttaaaaaagagttcactagccatgctttagattctcatatcttagattattatgaaaatccagccatcaaagaggatgtatcaacattaataggtgatgatttggcatcttgcaaagatgagactgatgaaagctcaaaagaagaaactgagcctcaagtgctgaagtttagagtcacatgcaacagggcaggagagaaacattgctttacctcaaatgaggctgcaagagattttgggggtgctgttcaagattattttaagtggaaggccgacatgaccaactttgatgtggaggttcttttgaacatccatgataatgaagtcattgtgggcattgcattgactgaagagagtctccaccgaagaaatataacacattttggacctacaactcttagatcaactcttgcctatgggatgctcaggctctgtgatcctctaccttatgatataatagtcgatccaatgtgtggaactggggcaataccaatagagggggccactgaatggtctgactgtttccatattgctggtgataataatccactggctgtgaatagagcagcaaataacattgcatctttattgaccaagagccaaattaaagaagggtaaaaatttaaaa

SEQ ID NO: 6574 - DNA, 4395 bp, Homo sapiens
gtgctccgcgccctgattggctgcgcaggcctctcgctgattggttgcggcggatgcctcgcgggccggtggctatggaggcggcggcggttgatggttgaccgttggctccggggtgggggtcgccgttcgagtgatctgctcagacccgaccagagggcgcgggctgctgatgcttggcttggagcccgtgggggagacctagttcggctccgccatgccggccgccgggagtaacgagccggacggcgtcctcagctatcagagaccagatgaagaagctgtggtggatcagggtgggaccagtacaattctcaacattcactatgaaaaagaagagctggaaggtcacagaactctgtatgtgggagttcggatgccgcttggccggcagagccatcggcatcaccgcactcatggccagaagcaccggagacgagggcggggcaaaggagccagccagggggaggaaggcctggaagccctggcccacgacacaccatctcagcgtgttcagttcattcttggcaccgaggaagatgaagagcatgtgcctcatgagctgtttacagagctggatgagatctgtatgaaagagggagaagatgctgagtggaaggaaacagccaggtggctgaagtttgaagaagatgttgaagatgggggagaacgctggagcaagccttatgtggcaaccctttcattgcacagcctgtttgagctaaggagctgccttattaatggaacagtcctcctggatatgcatgcaaatagcatagaagaaatttcagacctgatcctggatcagcaagaactgtccagtgacctgaatgacagcatgagggttaaagtgcgggaagcccttctcaaaaagcatcatcatcagaatgaaaagaagagaaacaacctcattcccattgttcgctcctttgctgaggttggcaagaagcagtctgatcctcatttgatggataaacatggtcaaaccgtgtctcctcagtctgttccaactacaaatcttgaagtaaaaaatggagtgaattgtgaacatagtcctgtggatttaagcaaggtagaccttcatttcatgaaaaaaattcctactggggccgaggcctccaatgtcctggttggagaggtggatattttggaccgtcccattgttgcctttgtgaggctgtctccagctgttcttctctcaggcctaacagaagtgccaatcccaacaagatttttgtttatcttattgggtccagtagggaaaggtcagcagtaccatgagattggcagatccatggccaccatcatgacagatgagatttttcatgacgtagcatataaggcaaaagagcgagatgatctcctggcggggattgatgagttcctagaccaggtgacggtgctccctccaggagagtgggatccctccattagaattgagccacccaaaaatgtcccttcccaggagaaaaggaaaatgcctggagttccaaatggaaatgtttgccacatagaacaggaaccacatgggggtcacagtgggccagaacttcagcgcactgggcggctatttgggggcttggtgctggacatcaagcggaaggccccctggtactggagcgactaccgagatgcactcagcttacagtgtttggcttcctttctgttcctgtactgtgcctgcatgtcacctgtcatcacctttgggggactgcttggagaagccactgagggacgcataagtgcaattgaatccttgtttggagcttccatgactgggattgcttattccttgtttgcgggacaggctctcaccatcctgggaagtactggaccagtgcttgtgtttgaaaagattttgttcaaattctgcaaagactatgctctttcatacctctccctgcgagcttgtattggactgtggaccgctttcctgtgtattgtccttgtggcaactgatgccagttcccttgtctgctacattacccgtttcactgaagaagcatttgcctccctaatttgcattattttcatctatgaagcaatagaaaaactgattcacctggcagagacctaccccatccacatgcacagccagctggaccaccttagcctctattactgcaggtgtactctgccagagaatccaaacaatcacaccctccagtactggaaggaccacaacatcgtgacagcagaagtccactgggctaacctgactgtcagtgaatgccaggagatgcatggagagttcatgggatctgcgtgcggccatcatggaccctacactcctgatgtcctcttttggtcctgtattctctttttcaccaccttcatcctctcaagcaccttaaagacgtttaagacgagccgttatttcccaaccagagtacgctccatggtgagtgactttgctgttttcctcactatcttcacaatggtgattattgattttttgattggagtcccatcaccaaagcttcaagttcccagtgtgttcaagccaacaagggatgatcgcggatggattattaatcccattggccccaatccctggtggactgtgatagctgcaattatcccagctcttctctgtactatcttgatattcatggatcagcagatcacagccgtcattattaacaggaaggaacataagctcaagaaaggctgtggctaccacctggacctactgatggtggccatcatgctgggtgtctgctccatcatgggcctgccctggtttgtagctgcaactgtcttgtccatcacacatgtgaacagcctcaagctagaatctgaatgctctgctcctggagaacagcccaagttcctgggcatccgagaacagagagtgacaggccttatgatctttgtgctgatgggctgctcagtcttcatgacggctatcttaaagtttattccaatgccagtactctacggagttttcctttacatgggagtttcttcactacagggaattcagttctttgatcgtctaaagctctttgggatgcccgcaaagcaccagccagatttcatctacctgcggcatgtgccgctgcgcaaagtgcacctcttcaccctcatccagttgacctgtctcgtcctgctctgggtcatcaaggcatctccagctgccattgttttcccaatgatggttttggccttggtctttgtcaggaaagtcatggatctctgtttctctaagcgagagctgagctggctagatgatctcatgcctgaaagcaaaaagaagaagttggatgatgccaaaaagaaggccaaggaggaagaggaggctgagaaaatgttagaaattgggggagacaagtttcccttagagagcaggaagttactaagtagtcctggaaagaacatcagttgcagatgtgacccctctgagattaatatatctgatgaaatgcctaaaactacagtttggaaagctctcagtatgaattctggaaatgcaaaggaaaagagtctcttcaactaagagtctttgctgggatggaagatttgggccgtgtggtgcctcagggaagttctggttacagagaaaatggcgagtctctcagagaagaagcaagaccaagtctggccctgtccttggtcatctcaaagccatgccgaagcattcagttattcttggtgtgcattggaaggcatccagctatccccataccagcagccagtcaccagatgtgaatgtggaagcagaagaccacctcctgttggttcttctcctcttccttctttttctctttagaacggccaccattgaagacctagcttcccattttccagacgttttctctgaaattctctgctggcctgccaagccatatggattcattctgccactgaggagtccttcagtgaggtccctcttcctaaaggacagagtggggagtaggaggggaacagagaggacatcctctctggctctccagtgctcttagtgtctacaggctcctaggcagccctgggccttggtttgattacctcccctgggggatgctggtcagacccagaggttgtcaggaggtcagctaccaggaagatccatgatctgggcattggcagtgcctgccaccacagccaggaagatgcctctgacctgggtgcatctccatcactccttagcagcagcctgcataactggcaagaatcttggatgatacaagagccaagaagggacatttgagttgtgtcgcttagataggaaagggatccagggaaaatcaacagtaagtgaggatgagcagtgtctcttggttttcattgaggatagagtaagagattgagtttagattgcaacagaaggaattagtttagataccaggaagaacttcctagcctgaagatttgtcatagtgtctgctttctaga

SEQ ID NO: 6575 - DNA, 1389 bp, Homo sapiens
gcggctgcacggacaagagcggaggcctggagaaatcaacttttcagtaattggtcagtatgtggattatcttgtgaaagaacagggagtgaagaacatttttgtgaatggcacaacaggagaaggcctgtccctgagcgtctcagagcgtcgccaggttgcagaggagtgggtgacaaaagggaaggacaaaagggcagccaaactgctagacacacctgccacccagaggttccgctgggaaactgcttcttacctgtctacaaggccagtcccctcacagttacccgtctttgggctgaaaggctggatcaggtgataattcacgtaggagcactgagcttgaaggagtcacaggaactggcccaacatgcagcagaaataggagctgatggcatcgctgtcattgcaccgttcttcctcaagccatggaccaaagatatcctgattaatttcctaaaggaagtggctgctgccgcccctgccctgccattttattactatcacattcctgccttgacaggggtaaagacaactgttgagtgctctggtgatgggagcaactggagcagtgggcagttttgtatccagagatttatcaactttgttgtcaaactaggttttggagtgtcacagaccaaagccatcatgactctggtctctgggattccaatgggcccaccccggcttccactgcagaaagcctccagggagtttactgatagtgctgaagctaaactgaagagcctggatttcctttctttcactgatttaaaggatggaaacttggaagctggtagctagtgcctctctatcaaatcagggtttgcaccttgagacataatctaccttaaatagtgcatttttttctcagggaattttagatgaacttgaataaactctcctagcaaatgaaatctcacaataagcattgaggtaccttttgtgagccttaaaaagtcttattttgtgaaggggcaaaaactctaggagtcacaactctcagtcattcatttcacagatttttttgtggagaaatttctgtttatatggatgaaatggaatcaagaggaaaattgtaattgattaattccatctgtctttaggagctctcattatctcggtctctggttcctaatcctattttaaagttgtctaattttaaaccactataatatgtcttcattttaataaatattcatttggaatctaggaaaactctgagctactgcatttaggcaggcactttaataccaaactgtaacatgtctcaactgtatacaactcaaaatacaccagctcatttggctgctcagtctaactctagaatggatgcttttgaattcatttcgatgtcaccacttttcgctctttaaaaacactgggtca

SEQ ID NO: 6576 - DNA, 2480 bp, Homo sapiens
acattatctctgagagcactcgcagatgctgagcctgcagagacagagaaactggcagctgaccagggtcagggatggtcatgtattcaaatattgtgggttttagtcaagtgtgctccacccgattcaacaatgtgatgtgactgctcctagcaactattttgatatggtgaatgttgttaagcataggacctaagaagaggtggcagtctctttcctctccgcacttggcaggccacccactcattcctgataatcacatttaagagagctctggacaagctggaatgcatccaagagaatccctcaacatgctggtggctttctagaagatgaccatagaggaccttccagattttccattagaaggaaatcctttgtttggaagatacccatttatattttctgcttctgataccccagttatcttttccatttctgcagcaccaatgccttcagactgtgaattttctttctttgatcctaatgatgcatcatgccaggaaattctttttgatcccaaaacttcagtttcagaattatttgccattttgagacagtgggttcctcaggtccaacaaaacattgacattattggaaatgagattcttaagagaggttgcaatgtgaatgatagagatggattgacagatatgactcttttacattatacctgcaaatctggagctcatggtattggtgatgtggaaacagctgtaaaatttgcaactcagcttattgacctgggagcagacattagtttgcggagtcgctggacaaacatgaatgctttgcattatgctgcttattttgatgtccctgaacttataagagtgattttgaaaacatcgaaaccaaaagatgtggatgccacttgcagtgattttaattttggaacagctttgcatattgcagcatacaacttgtgtgcaggtgctgtgaagtgcctcttggagcagggagcaaatcctgcatttaggaatgacaaaggacagatccctgctgatgttgttccagacccagtagatatgccgttagagatggctgacgccgcagccactgctaaggaaatcaagcagatgcttctagatgcggtgcctctgtcatgtaacatctcaaaggccatgctcccaaattatgatcatgtcactggcaaggcaatgcttacgtcacttggcctgaagttgggggatcgtgttgttattgcaggacagaaggttggtacattaagattttgtggaacaactgaatttgcaagtgggcagtgggctggcattgaactggatgaaccagaaggaaaaaataatggaagtgttggaaaagtccagtactttaaatgtgcccccaagtatggtatttttgcacctctttcaaagataagtaaagcaaaaggtcgaaggaagaatataacacacactccttctacaaaagctgctgtacctctcatcaggtcccagaaaattgacgtagctcatgtgacgtcaaaagtaaatactggattaatgacatcaaaaaaagatagtgcttctgagtcaacactttcattgcctcctggtgaagaacttaaaactgtgacagagaaagatgttgccctgcttggatctgtcagcagctgctcctctacatcttctttggaacacagacagagctaccccaagaaacagaatgcaatcagcagtaacaagaagacaatgagcaaaagcccttccctttcatccagagccagtgctggtttgaattcctcagcaacatctacagcaaataatagccgttgcgagggggaactccgcctcggagagagagtgttagtggtaggacagagactgggcaccattaggttctttgggacaacaaacttcgctccaggatattggtatggtatagagcttgaaaaaccccatggcaagaatgatggttcagttggaggtgtgcagtattttagctgttctccaagatatggaatatttgctcccccatccagggtgcaaagagtaacagattccctggataccctttcagaaatttcttcaaataaacagaaccattcttatcctggttttaggagaagttttagcacaacttctgcttcttcccaaaaggagattaacagaagaaatgctttttccaaatcgaaagctgctttgcgtcgcagttggagcagcacccccaccgcaggtggcattgaagggagcgtgaagctgcacgaggggtctcaggtcctgctcacgagctccaatgagatgggtactgttaggtatgtgggccccactgactttgcttcaggtatctggcttggacttgagctccgaagcgccaagggaaaaaatgatgggtcagtgggtgacaagcgctatttcacctgtaagccgaaccatggagtcttagttcgaccgagcagagtgacctatcggggaattaatgggtcaaaacttgtggatgagaattgttaagcttctaaaatattaaataagctcaaatat

SEQ ID NO: 6577 - DNA, 8208 bp, Homo sapiens
gtctatgggaagttcggggacttgacagccgctgccgccgcagggcatttttggtcgaagagagctgaagtaatgagaagacatcatggaggcccagtcccacagctccacgaccactgaaaagaaaaaagttgagaattccatagtgaagtgctccactcgaacagatgtgagcgagaaagccgttgcctccagcaccacttctaatgaggatgaaagtcctggacagacttatcacagagagagaagaaacgcaatcactatgcagccacagaatgtccaggggctcagcaaagtcagtgaggaaccttcaacatcgagtgacgagagggcctcattgatcaagaaagagatccatgggtccctgccacacgtggcggagccctctgtgccgtaccgcgggacggtgtttgccatggaccccaggaatggttacatggagccccactaccaccctcctcatcttttccctgccttccatcctcctgtaccaattgatgccagacatcatgagggccgttaccattacgatccatctccgattcctccattgcatatgacttccgccttatctagtagccctacgtatccggacctgcccttcattaggatctccccacaccggaaccccactgctgcttccgagtctcccttcagccctccacatccctacattaatccctacatggactatatccgctccttgcacagcagcccatcgctctccatgatctcagcaacccgtgggctgagccctacagatgcgccccatgcaggagtcagcccagcagaatactatcatcagatggccctgctaactggccagcgcagcccctatgcagacattattccctcagctgccaccgccggcacgggggccatccacatggaatatcttcatgctatggatagcaccagattctccagccccaggctgtcagccaggccgagccgaaaacgtacactgtccatatcaccactctccgatcatagctttgaccttcagaccatgataaggacgtctcccaactccttggtcacgattctcaataattcccgtagcagctcttcagcaagtggctcctatggtcacttatctgcaagtgcaatcagccctgccttgagcttcacctactcttccgcgcccgtctctctccacatgcatcagcagatcctaagccgacaacagagcttaggttcagcctttggacacagccctccactcatccaccctgccccaacttttccaacacagaggcctattccagggatccctacggttctgaaccccgtccaggtcagctccggcccttctgagtcctcacagaacaagcccacgagtgagtctgcagtgagcagcactggtgacccgatgcacaacaagaggtccaagatcaaacccgatgaagacctccccagcccaggggctcgggggcagcaggaacagcccgaaggaacaacccttgtcaaggaggaaggggacaaagatgaaagcaaacaggagcctgaagtcatctatgagacaaactgccactgggaaggctgcgcgagggagttcgacacccaagagcagcttgtgcaccatataaataacgaccatattcatggagagaagaaggagttcgtgtgcaggtggctggactgctcaagagagcagaaacccttcaaagcccagtatatgttggtagtgcatatgagaagacacacgggcgagaagcctcacaaatgcacttttgaaggttgcacaaaggcctactcgagactagaaaacttgaaaacacacttgagatctcacactggagagaaaccatacgtctgtgagcacgaaggttgcaacaaggctttctcaaatgcctctgatcgcgccaaacaccaaaacagaacgcattccaatgagaaaccatatgtgtgcaaaatcccaggctgcactaagcgttacacagacccaagctccctccggaaacatgtgaagacagtgcatggcccagaggctcatgtcaccaagaagcagcgaggggacatccatcctcggccgccacccccgagagattccggcagccattcacagtccaggtcgcctggccgaccgactcagggagcccttggtgagcagcaggacctcagcaacactacctcaaagcgggaagaatgcctccaggtgaaaaccgtcaaggcagagaagccaatgacatctcagccaagccctggtggtcagtcttcatgcagcagccaacagtcccccatcagcaactattccaacagtgggctcgagcttcctctgaccgatggaggtagtataggagacctcagtgccatcgatgaaaccccaatcatggactcaaccatttccactgcaaccacagcccttgctttgcaagccaggagaaacccggcagggaccaaatggatggagcacgtaaaactagaaaggctaaaacaagtgaatggaatgtttccgcgactgaaccccattctaccccctaaagcccctgcggtctctcctctcataggaaatggcacacagtccaacaacacctgcagcttgggtgggcccatgacgcttctcccgggcagaagcgacctctctggggtggacgtcactatgctgaacatgctcaacagaagggacagcagcgccagcaccatcagctcggcctacctgagcagccgccgctcctcagggatctcgccctgcttctccagccgccgctccagcgaggcgtcacaggccgagggccggccgcagaacgtgagcgtggccgactcctacgaccccatctccaccgacgcctcgcgccgctccagcgaagccagccagagcgacggcctgcccagcctgctcagcctcacgcccgcccagcagtaccgcctcaaggccaagtacgcggctgccacaggagggccgccgccgacgcccctgcccaacatggagaggatgagcctgaagacgcgcctggcgctgctcggggatgccctcgagcctggcgtggccctgcctccagttcatgccccgaggaggtgcagcgacgggggagcccacggctacgggcggcgccacctgcagccgcacgatgcgccgggccacggcgtgaggagggccagcgacccggtgcggacaggctccgagggcctggccctgcctcgtgtgccgcgcttcagcagcctcagcagctgcaaccccccggcgatggccacgtccgcggagaagcgcagtctcgtgcttcagaattacacgcggcccgagggcggccagtcccgaaacttccactcgtccccctgtcctcccagcatcaccgagaacgtcaccctggagtccctgaccatggacgctgatgccaacctgaacgatgaggatttcctgccggacgacgtggtgcagtatttaaattcccagaaccaagcagggtacgagcagcacttccccagcgccctcccggacgacagcaaagtgccccacgggcccggtgactttgacgcgcccgggctgccagacagccacgctggccagcagttccatgccctcgagcagccctgccccgagggcagcaaaaccgacctgcccattcagtggaacgaagtcagctccggaagcgccgacctgtcctcctccaagctcaagtgtgggccgcggcccgctgtgccgcagactcgcgcctttgggttctgcaacggcatggtcgtccacccgcagaaccccttgaggagcgggcctgctgggggctatcagaccctcggggagaacagcaacccctacggtggcccagagcacttgatgctccacaacagccccggaagtggcaccagtggaaacgccttccatgaacagccctgtaaggccccgcagtatgggaactgtctcaacaggcagccagtggcccctggtgcactcgacggtgcctgtggtgccgggattcaagcctcaaagctgaagagcacccccatgcaagggagcgggggccagctgaatttcggcctgccggtagcgccaaatgagtcagctggcagcatggtgaatggcatgcagaaccaggacccagtgggacaggggtacctggctcaccagctcctcggcgacagcatgcagcacccgggggcaggccgccccggtcagcagatgcttgggcagattagtgctacctcacacatcaacatctaccaagggccagagagctgcctgccaggggctcacggcatgggcagccagccgtcaagcttggcagttgtcaggggctaccagccatgtgccagctttgggggcagcaggcgccaggctatgccgagggacagccttgctctgcagtcaggacagctcagtgacacaagtcagacctgcagggtgaatggtatcaagatggagatgaaagggcagccccatccgctgtgctctaatctgcagaattactctggtcagttctatgaccaaaccgtgggcttcagtcagcaagacacgaaagctggttcattctctatttcagacgccagctgcctgctacaggggaccagcgccaaaaactctgagttactttccccaggtgctaatcaggtgacaagcacagtggacagcctcgacagccatgacctggaaggggtacagattgacttcgatgccatcatagacgatggggaccactccagcctgatgtcgggggccctgagcccaagtatcattcagaacctttcccatagctcctcccgcctcaccacgcctcgggcgtccctcccattcccagcgctgtccatgagcaccaccaacatggctatcggggacatgagttctttgctgacctccctagcggaagaaagcaaattccttgcagttatgcaataggctttaggaaaaaaagactgcaaccaacggaaatcaataggagttgaagagattaaactgactttgttttggctgtttttttagttctgtatgtattttagcaatctcatctcacctaactgagatgtgtttcaattatattccttttatggaaaaggactctgaaaaaccctaaagtattctagggagaaactgtcttccatttcagttttgaatcagtattgttacactcaaaccaccctctttttaaaaaaaaaaaaaaaaactgtaagccccgccccctttttagtaaaccgatgtaaatttgtgatgtgcatattcttctttcttttagaagagcagtcaaattaaaggatttgacatgttttgctgttgctcaaaggaaataggagttggtgtgcttgtgaccaaggggttacacttccagcttttaaaattctcctttacatgtgctcagtgttttgttttgtgttttggtttctgttttttattttaattcccacattgggcacaagaatcagaatatggatagctagtttaagaaacttttgtgggtgcactgtagcatagatgacagaatattgatgttccccccatctccaattcagttcagggcattccacagttaaacagaaatgggaacgtggggctcttataaatgaaatgggcgctcacagttttggttttcagctcttcatgtctgtaagtgtgctttgggggaggctatgtctgtatggtcgattctcagttatcacatttgcctctcctcccactaccttcatgaacattcagtgctgtttcgcactgcagttagagagaagggacggacagttggtgacactcagccacattgctacttttatctgttctggtaagaagttagatagatggtagattgaagcaattgggtagaattagttgggggaatatttatgagttgctgtgtttgttgattagttccatctctttcccattttaactgagaattgattatatatagctctaagtatataggtatttaaacaaccccacaagcggctgtatcagtaacatttattaattccactatagtgagggaggatttccattctaaataccttattttgagggatttataaaacttagttgtaaaagagaaagcccacatagtgggaataaattgcttcagccatttttagtatttgagagcactagggaagatgtttagtagctgtgtggatgccttttttcacaccctgtctattgaatgctgcatccattcacgaagttaaatgttacatgcagttagtccttaatgtggactggatctgtacttttgttttggattaaaacatttaaagatttttgaagtgcagctactccccacgtgcatttgatacacataaaagtcatactgtgtgtgcacaaagagtacatggattttccagcatattgctttaaaaaattatataaactgttaaaatattaacacctcaggctacctgctgtattctgtcccattgacccctggaattggatttactgcaagtgattgataattcaattatgtggcttttcccctttaatcttgccatttaaattacagtagaaagacaaaatcaagtaaaataaagtgttagataatagaaagagtgttaagaccagcccacttttctcatgtttatgttctttcatttggaccaagaatctccgcatggaggttgatttgccactggggactttggctaagactattaggtttgctttcaactagatgttcctgagacaagcagagggacactgcaattccccttccatgcctgctgttctcccccatgtaagtcttctttgaaattaacggatgtgtctcctttggaacagccccataacaaaagagaactactgatctgagcataggaaagtagaggctctaccacttttcagttgaaaaagcaagactttctctgtgtttctgaaacaaggcataatgttgtcacagaatcagagatccagtctcacttttccacaaatctccaaatctccagtcttatcttgtgtgctctaatggtttggttcaatccctttccaactcttgttttcaaagcatggggcctgagtgttctccactcctcctaagaaaggagcttgggtggaagggaccatgctgacctcctccatcagagggctcttccagtagtattctcggatgcaacctccatttctcagttaccattatttcctgtatcagctttgtccttcctggagggatgcacagtgatccggcccaccactgttgttgtcttgtgcttctgctctttcctatggtttcaggttattttctgggtttcccctattcttcttttatttctttttttttttatatttgctttcctttctactgcttttagatttgcaggagatgcaagtttcagctcaatgtttggcttctctcaatatggaaatttcagaaggacagaggagaggagggaggaagaagaaagtatactcctccagaatttcagtgatctgttgtggcagtccagtggaaggaaggtcttttgaggtcacttagaagcatctttttgggacatccttttgggatctctgtaggctaggcatctcatatcttgagactcacccccagcctccaagcctctctccatttctctaacctatgcattttagagcgagaggaccgcctcactagtgtcaccatcctgccttttctaaaacatgcaggctcacacattctactcctgcttaatgtctgtgttaaacgttttctaaccatttttgttttatttttctgaaaaagttaacccctcccaactcctcacacattggctcttcctcttgagccacaaagttttgattcttgcgatgtatgtgccttattttatgttaatcttgtcaatgagagggaccagttggtgttgcccaatcagcactccaaggctgtgtgtgcaccagccagagagcgcacggtggtagcagagtcgaggctgtcttgtatcctggtttcatgtgttgttttgaactgataggaggatgttctcttctgacaagttacccttgtgtatcctgcagacatgtaaaataaaatacaagttcatttttttcaccttttttagatttttttaaaaaataaaatgtgtaatcctttttttaaaagaaacacatgtaaatacatttaagtattgtaggcatagcgttcagatgtgactggcccaggcgttcctcggacaagcctgcattccccgtgatcacgcccacctcaagcccaggggctgcagcccagccacagatgaactctacctttgctttcagaaccacttagtccttttgtaacaaagaaaaaaaaatgtttcttacaatgtcaataaaaaattctttgtatggaa

SEQ ID NO: 6578 - DNA, 1903 bp, Homo sapiens
gtcattctctctgggtgaatccagctgacatgttgtgaggacactcaagcagctttatggaaaagcccacatggtgagcaactgaggcctcctaccaacagccaacaagaaaccggggcctttgccaacagccaagaaataagaatcagaaagaaggacacaccattccatagcacagaacacaagtagatggctcccatgaagaatctagcatcatggtatggcagaagcagaatggactcaggaatcatggtgcctacactggaatttcagatcggccactgacacaatggacacattattcaacatttccaaatcttggcattcttatccacaaagtgaagataataattgtcaattcacaggtgattatgatttaaagagattacttttgaagagttcctaacacattcagtcaacatttaatgatgcttcaggcactgtgttcattgctagtgagcgtatgacacacacagccatacggtcacagagctttcaatgaaaagtaacataattgctcatttcaccaggcccccggcttggggcgccttccttccccatggcgggacacctggcttcggatttcgccttctcgccccctccaggcggtgggggtgatgggccatggggggcggagccgggctgggttgatcctctgacctggctaagcttccaaggccctcctggagggccaggaatcgggccgggggttgggccaggctctgaggtgtgggggattcccccttgccccccgccgtatgagttatgtggggggatggcgtactgtgggcctcaggttggagtggggctagtgccccaaggcggcttggagacctctcagcctgagagcgaagcaggagtcggggtggagagcaactccaatggggcctccccggaaccctgcaccgtcccccctggtgccgtgaagctggagaaggagaagctagagcaaaacccggagaagtcccaggacatcaaagctctgcagaaagaactcgagcaatttgccaagctcctgaagcagaagaggatcaccctgggatatacacaggccgatgtggggctcatcctgggggttctatttgggaaggtgttcagccaaaagaccatctgccgctttgaggctctgcagcttagcttcaagaacatgtgtaagctgcggcccttgctgcagaagtgggtggaggaagctgacaacaatgaaaatcttcaggagatatgcaaagcagaaaccctcatgcaggcccgaaagagaaagcgaaccagtatcgagaaccgagtgagaggcaacctggagaatttgttcctgcagtgcccgaaacccacactgcagatcagccacatcgcccagcagcttgggctcgagaaggatgtggtccgagtgtggttctgtaaccggcgccagaagggcaagcgatcaagcagcgactatgcacaacgagaggattttgaggctgctgggtctcctttctcagggggaccagtgtcctttcctccggccccagggccccattttggtaccccaggctatgggagccctcacttcactgcactgtactcctcagtccctttccctgagggggaagtctttcccccagtctccgtcatcactctgggctctcccatgcattcaaactgaggtgcctgcccttctaggaatggggaacaggggaggggaggagctagggaaagagaacctggagtttgtggcagggcttttgggattaagttcttcattcactaaggaaggaattgggaacactaagggtgggggcaggggagtttggggcaactggttggagggaaggtgaagttcaatgatgctcttgattttaatcccacatcatgtatcacttttttcttaaataaagaagcctgggacacagtaaaaaaaaaaaaaaaa

SEQ ID NO: 6579 - DNA, 3134 bp, Homo sapiens
agagcggcgcgcgcggcagccccgaggcagcagagcgcggagccgggagcgcggggagcgcgggccggcggcggcgagggaggacgggggcgcagacggccggcgcgcggcgcggctaccatgggcgtgcggtgagcagccgctcgggacgacttcctcggctgcgcggcgctcgcgcggagctccccggccggcggtgcgtccccacggtcaccatgaaagacgacttcgcagaggaggaggaggtgcaatccttcggttacaagcggtttggtattcaggaaggaacacaatgtaccaaatgtaaaaataactgggcactgaagttttctatcatattattatacattttgtgtgccttgctaacaatcacagtagccattttgggatataaagttgtagagaaaatggacaatgtcacaggtggcatggaaacatctcgccaaacctatgatgacaagctcacagcagtggaaagtgacctgaaaaaattaggtgaccaaactgggaagaaagctatcagcaccaactcagaactctccaccttcagatcagacattctagatctccgtcagcaacttcgtgagattacagaaaaaaccagcaagaacaaggatacgctggagaagttacaggcgagcggggatgctctggtggacaggcagagtcaattgaaagaaactttggagaataactctttcctcatcaccactgtaaacaaaaccctccaggcgtataatggctatgtcacgaatctgcagcaagataccagcgtgctccagggcaatctgcagaaccaaatgtattctcataatgtggtcatcatgaacctcaacaacctgaacctgacccaggtgcagcagaggaacctcatcacgaatctgcagcggtctgtggatgacacaagccaggctatccagcgaatcaagaacgactttcaaaatctgcagcaggtttttcttcaagccaagaaggacacggattggctgaaggagaaagtgcagagcttgcagacgctggctgccaacaactctgcgttggccaaagccaacaacgacaccctggaggatatgaacagccagctcaactcattcacaggtcagatggagaacatcaccactatctctcaagccaacgagcagaacctgaaagacctgcaggacttacacaaagatgcagagaatagaacagccatcaagttcaaccaactggaggaacgcttccagctctttgagacggatattgtgaacatcattagcaatatcagttacacagcccaccacctgcggacgctgaccagcaatctaaatgaagtcaggaccacttgcacagatacccttaccaaacacacagatgatctgacctccttgaataataccctggccaacatccgtttggattctgtttctctcaggatgcaacaagatttgatgaggtcgaggttagacactgaagtagccaacttatcagtgattatggaagaaatgaagctagtagactccaagcatggtcagctcatcaagaattttacaatactacaaggtccaccgggccccaggggtccaagaggtgacagaggatcccagggaccccctggcccaactggcaacaagggacagaaaggagagaagggggagcctggaccacctggccctgcgggtgagagaggcccaattggaccagctggtccccccggagagcgtggcggcaaaggatctaaaggctcccagggccccaaaggctcccgtggttcccctgggaagcccggccctcagggctccagtggggacccaggccccccgggcccaccaggcaaagagggactccccggccctcagggccctcctggcttccagggacttcagggcaccgttggggagcctggggtgcctggacctcggggactgccaggcttgcctggggtaccaggcatgccaggccccaagggcccccccggccctcctggcccatcaggagcggtggtgcccctggccctgcagaatgagccaaccccagcaccggaggacaatggctgcccgcctcactggaagaacttcacagacaaatgctactatttttcagttgagaaagaaatttttgaggatgcaaagcttttctgtgaagacaagtcttcacatcttgttttcataaacactagagaggaacagcaatggataaaaaaacagatggtagggagagagagccactggatcggcctcacagactcagagcgtgaaaatgaatggaagtggctggatgggacatctccagactacaaaaattggaaagctggacagccggataactggggtcatggccatgggccaggagaagactgtgctgggttgatttatgctgggcagtggaacgatttccaatgtgaagacgtcaataacttcatttgcgaaaaagacagggagacagtactgtcatctgcattataacggactgtgatgggatcacatgagcaaattttcagctctcaaaggcaaaggacactcctttctaattgcatcaccttctcatcagattgaaaaaaaaaaagcactgaaaaccaattactgaaaaaaaattgacagctagtgttttttaccatccgtcattacccaaagacttgggaactaaaatgttccccagggtgatatgctgattttcattgtgcacatggactgaatcacatagattctcctccgtcagtaaccgtgcgattatacaaattatgtcttccaaagtatggaacactccaatcagaaaaaggttatcattggtcgttgagttatgggaagaacttaagcatatactgtgtaaacagtgccatacatttctaaaatcccaagtgtaggaaaaatatgcagacatacagatatataggccaactattagtaataatatgaaatatacttaaagagcttttaaaactttgtatttttgtacaaaatatttgtcttttacaatttttttcctttttttttttttgtcattttaccgacataatacatggagccaaagaaaacaataatggtactaataaaaactcctagggtttcctgtcagatttaattctacccagtggcaaagaattttttcaattgtggctttaaaaaaataattaaatatacatgtgtatatatata

SEQ ID NO: 6580 - DNA, 443 bp, Homo sapiens
gccccctcccctgactatcaaagcagcggccggctgttggggtccaccacgccttccacctgccccactgcttcttcgcttctctcttggaaagtccagtctctcctcggcttgcaatggaccccaactgctcctgcgccgctgcaggtgtctcctgcacctgcgctggttcctgcaagtgcaaagagtgcaaatgcacctcctgcaagaagagctgctgctcctgctgccccgtgggctgtagcaagtgtgcccagggctgtgtttgcaaaggggcgtcagagaagtgcagctgctgcgactgatgccaggacaacctttctcccagatgtaaacagagagacatgtacaaacctggattttttttttataccaccttgacccatttgctacattccttttcctgtgaaatatgtgagtgataattaaacactttagacctg

SEQ ID NO: 6581 - DNA, 731 bp, Homo sapiens
atatggaacttatgaagttaacaccagaaaaggtacagaactggaacagtgaaattcttgctaagcaaaaacctcttattgccaaaccttctgcaaagctactctttgtcaacagactgaaggggaaaaaatacaaaacgaattcctccactaaagttctccaagatgccagtaattctattgaccaccgaattccaaattctcagaggaaaatcagtgcagatactattggagatgaagggttctttgacttattaagccgatttcaaagcaataggatggatgatcagagatgttgcttacaagaaaagaactgccatacagcttcaacaacaacttcttccactccccctaaaatgatgctaaaaacatcatctgttcctgtggtatcccccaacacggatgagtttttagatcttcttgccagctcacagagtcgccgtctggatgaccagagggctagtttcagtaatttgccagggcttcgtctaacacaaaacagccagtcggtacttagccacctgatgactaatgacaacaaagaggctgatgaagatttctttgacatccttgtaaaatgtcaagtatgtctgtatatttttttcgttctgcatacagctcagataccactgaaaacattggtagtgttataattctcattcaggaagggcttattttgtattagagagttattattgtccatcattcagtaaaaaattattgaacaccga

SEQ ID NO: 6582 - DNA, 2248 bp, Homo sapiens
aggatgggaactaggagtggcagcaatcctttctttcagctggagtgctcctcaggagccagccccacccttagaaaagatgttttccatgaggatcgtctgcctggtcctaagtgtggtgggcacagcatggactgcagatagtggtgaaggtgactttctagctgaaggaggaggcgtgcgtggcccaagggttgtggaaagacatcaatctgcctgcaaagattcagactggcccttctgctctgatgaagactggaactacaaatgcccttctggctgcaggatgaaagggttgattgatgaagtcaatcaagattttacaaacagaataaataagctcaaaaattcactatttgaatatcagaagaacaataaggattctcattcgttgaccactaatataatggaaattttgagaggcgatttttcctcagccaataaccgtgataatacctacaaccgagtgtcagaggatctgagaagcagaattgaagtcctgaagcgcaaagtcatagaaaaagtacagcatatccagcttctgcagaaaaatgttagagctcagttggttgatatgaaacgactggaggtggacattgatattaagatccgatcttgtcgagggtcatgcagtagggctttagctcgtgaagtagatctgaaggactatgaagatcagcagaagcaacttgaacaggtcattgccaaagacttacttccctctagagataggcaacacttaccactgataaaaatgaaaccagttccagacttggttcccggaaattttaagagccagcttcagaaggtacccccagagtggaaggcattaacagacatgccgcagatgagaatggagttagagagacctggtggaaatgagattactcgaggaggctccacctcttatggaaccggatcagagacggaaagccccaggaaccctagcagtgctggaagctggaactctgggagctctggacctggaagtactggaaaccgaaaccctgggagctctgggactggagggactgcaacctggaaacctgggagctctggacctggaagtactggaagctggaactctgggagctctggaactggaagtactggaaaccaaaaccctgggagccctagacctggtagtaccggaacctggaatcctggcagctctgaacgcggaagtgctgggcactggacctctgagagctctgtatctggtagtactggacaatggcactctgaatctggaagttttaggccagatagcccaggctctgggaacgcgaggcctaacaacccagactggggcacatttgaagaggtgtcaggaaatgtaagtccagggacaaggagagagtaccacacagaaaaactggtcacttctaaaggagataaagagctcaggactggtaaagagaaggtcacctctggtagcacaaccaccacgcgtcgttcatgctctaaaaccgttactaagactgttattggtcctgatggtcacaaagaagttaccaaagaagtggtgacctccgaagatggttctgactgtcccgaggcaatggatttaggcacattgtctggcataggtactctggatgggttccgccataggcaccctgatgaagctgccttcttcgacactgcctcaactggaaaaacattcccaggtttcttctcacctatgttaggagagtttgtcagtgagactgagtctaggggctcagaatctggcatcttcacaaatacaaaggaatccagttctcatcaccctgggatagctgaattcccttcccgtggtaaatcttcaagttacagcaaacaatttactagtagcacgagttacaacagaggagactccacatttgaaagcaagagctataaaatggcagatgaggccggaagtgaagccgatcatgaaggaacacatagcaccaagagaggccatgctaaatctcgccctgtcagaggtatccacacttctcctttggggaagccttccctgtccccctagactaagttaaatatttctgcacagtgttcccatggccccttgcatttccttcttaactctctgttacacgtcattgaaactacacttttttggtctgtttttgtgctagactgtaagttccttgggggcagggcctttgtctgtctcatctctgtattcccaaatgcctaacagtacagagccatgactcaataaatacatgttaaatggatgaatgaattcctctgaaactct

SEQ ID NO: 6583 - DNA, 3285 bp, Homo sapiens; identical to SEQ ID NO: 689

SEQ ID NO: 6584 - DNA, 858 bp, Homo sapiens
atagcagatctgaggcatgcatggtgtttgacatttctgtcttttaagtagggggacttcaaaaagtcgtgggcatccccctaggcaaagtgcagtgggcagggaccaggcagggtgcgggcgcaaggcgaacgcgcagaccacgagtgtcctggcgcaggtgccgggggcggcggctgcaactccgcagcgtccgctcgggaggagagttcgcggctgatctccggatgccttgcagatgcaaaatgtgtctctggccagcaggaggaaggaagaggaagtgagagcagcggcagccggcggtgcagcagccggccgacccagagtgtaagtgcgtgtgctggggcgagcgggagcgggcgaggatgggcacaggatagaggcagagccacccacgccgccgcggccccacgctgggcgacagagcctccagttccccttcaatggtggcgggtcgccggagctctgatcgccgggaacccttgccgctgctgtcctgcgaccccaagcagggggcagagcagggagcacttataccatacaaggcagagaagatacagatcaagatatgcccaaggcccttctagttcagcctctccttggagtaggtatagacacgtgtggccgtttacgctgtaggatcctcattcccactggctttgaacattttggggacttacaatgccgccacccgcggacatcgtcaaggtggccatagaatggccgggcgcctaccccaaactcatggaaattgatcagaaaaaaccactgtctgcaataataaaggaagtctgtgatgggtggtctcttgccaaccatgaatattttgcactccagcatgccgatagttcaaacttc

SEQ ID NO: 6585 - DNA, 565 bp, Homo sapiens
acatgaaaaggatggtttcttggagcttccacaaacttaaaaccatgaaacatctattattgctactattgtgtgtttttctagttaagtcccaaggtgtcaacgacaatgaggagatgagaaaactggggcacagataaagcaacttgcccaaggtctcatagctggtttcttcagtgcccgtggtcatcgaccccttgacaagaagagagaagaggctcccagcctgaggcctgccccaccgcccatcagtggaggtggctatcgggctcgtccagccaaagcagctgccactcaaaagaaagtagaaagaaaagcccctgatgctggaggctgtcttcacgctgacccagacctgggggtgttgtgtcctacaggatgtcagttgcaagaggctttgctacaacaggaaaggccaatcagaaatagtgttgatgagttaaataacaatgtggaagctgtttcccagacctcctcttcttcctttcagtacatgtatttgctgaaagacctgtggcaaaagaggcagaagcaagtaaaagataatgaaaatgtagtcaatgag

SEQ ID NO: 6586 - DNA, 1240 bp, Homo sapiens
acagacgttcgcacacctgggtgccagcgccccagaggtcccgggacagcccgaggcgccgcgcccgccgccccgagctccccaagccttcgagagcggcgcacactcccggtctccactcgctcttccaacacccgctcgttttggcggcagctcgtgtcccagagaccgagttgccccagagaccgagacgccgccgctgcgaaggaccaatgagagccccgctgctaccgccggcgccggtggtgctgtcgctcttgatactcggctcaggccattatgctgctggattggacctcaatgacacctactctgggaagcgtgaaccattttctggggaccacagtgctgatggatttgaggttacctcaagaagtgagatgtcttcagggagtgagatttcccctgtgagtgaaatgccttctagtagtgaaccgtcctcgggagccgactatgactactcagaagagtatgataacgaaccacaaatacctggctatattgtcgatgattcagtcagagttgaacaggtagttaagcccccccaaaacaagacggaaagtgaaaatacttcagataaacccaaaagaaagaaaaagggaggcaaaaatggaaaaaatagaagaaacagaaagaagaaaaatccatgtaatgcagaatttcaaaatttctgcattcacggagaatgcaaatatatagagcacctggaagcagtaacatgcaaatgtcagcaagaatatttcggtgaacggtgtggggaaaagtccatgaaaactcacagcatgattgacagtagtttatcaaaaattgcattagcagccatagctgcctttatgtctgctgtgatcctcacagctgttgctgttattacagtccagcttagaagacaatacgtcaggaaatatgaaggagaagctgaggaacgaaagaaacttcgacaagagaatggaaatgtacatgctatagcataactgaagataaaattacaggatatcacattggagtcactgccaagtcatagccataaatgatgagtcggtcctctttccagtggatcataagacaatggaccctttttgttatgatggttttaaactttcaattgtcactttttatgctatttctgtatataaaggtgcacgaaggtaaaaagtattttttcaagttgtaaataatttatttaatatttaatggaagtgtatttattttacagctcattaaacttttttaaccaaacaga

SEQ ID NO: 6587 - DNA, 1909 bp, Homo sapiens
tattagtaatatgctgcctttggaagatgaaaacaaactagtgccaaggaggcgtattcttcaatatttggaatagacgtgttctcaagacaatggcttcaaaggtctcctgtttgtatgttttgacagttgtgtgctgggccagcgctctctggtacttgagtataactcgccctacttcttcttacactggctccaaaccattcagccacctaacagttgccaggaaaaacttcacctttggcaacataagaactcgacctatcaacccacattcttttgaatttcttatcaacgagcccaataaatgtgagaaaaacattccttttcttgttatcctcatcagcaccactcacaaggaatttgatgcccgtcaggcaatcagagagacgtggggggatgagaacaactttaaggggatcaagatagccaccctgttcctcctgggcaagaatgctgatcctgttctcaatcagatggtggagcaagagagccaaatcttccatgatatcatcgtggaggactttattgactcctaccataaccttaccctcaaaacattaatggggatgagatgggtggccactttttgttcaaaagccaagtatgtcatgaaaacagacagcgacatttttgtaaacatggacaatcttatttataaattactgaaaccctccaccaagccacgaagaaggtattttactggctatgtcattaatggaggaccgattcgggatgtccgcagtaagtggtatatgcccagggatttgtacccagacagtaactacccacctttctgttcggggactggctacatcttttcagccgatgtagctgaactcatttacaagacctcactccacacaaggctgcttcaccttgaagacgtatatgtgggactgtgtcttcgaaagctgggcatacatcctttccagaacagtggcttcaatcactggaaaatggcctacagtttgtgtaggtatcgccgagttatcactgtgcatcagatctctccagaagaaatgcacagaatctggaatgacatgtcaagcaagaaacatctcagatgttaggatttttaccaatgtaaatatgtttcttttctttttttaagaaatgggacctaaggtgttggtattttccaggtgtcgggggaaatgaactggtgaaggggttttgtaaagtttttgcttcctgctataagttcttttcttggattaccaatttatgaatgttagactctggtcatagaaacaataaatgagttagaagggccagatttcattctcagtcccagagcattgctatttatctcaaaaagtgacttccaaacaactcttaggattgacgtaccgtgcatctgagataaaaatttggttctgggaaactgaaactcacagtaatgtgtcatatcatccctgcaaaaattaatacacaaatagaaaccattttcaaaagcaattcagaaaggatgcacagtcaggaagacacactggatgtgattattaatatcgtgtgtgttgttacattatatttttacatatattcccatgtaatgtgtacagtctttgcagttccaccaagaaatgaacttggtacctgcagagtggctgcagttaaatagatgggagtttaaatttgagaatcaaacattctatgtgtttggaagacaactctgcttgctcatccaaggattaaatctggtcagcaggtggaatgtgtataaaatgctacttaacaaagtaaacaaaagattttttttttctttttttttctttcttttttgttttgctctttcagaacaaacattaaatggtgcctccaaggaaactttgccaaatataatctcacctgcttccttccagacagtgtcgctaagtgcatttcacagtttttggatctggcaggc

SEQ ID NO: 6588 - DNA, 470 bp, Homo sapiens
cccgcgctcgtccgcccgcccgcccgcccgcccgcgccatgaacgccaaggtcgtggtcgtgctggtcctcgtgctgaccgcgctctgcctcagcgacgggaagcccgtcagcctgagctacagatgcccatgccgattcttcgaaagccatgttgccagagccaacgtcaagcatctcaaaattctcaacactccaaactgtgcccttcagattgtagcccggctgaagaacaacaacagacaagtgtgcattgacccgaagctaaagtggattcaggagtacctggagaaagctttaaacaaggggcgcagagaagaaaaagtggggaaaaaagaaaagataggaaaaaagaagcgacagaagaagagaaaggctgcccagaaaaggaaaaactagttatctgccacctcgagatggaccacagttcacttgctctcggcgctttgtaaatttgctcgatcctcctcc

SEQ ID NO: 6589 - DNA, 1351 bp, Homo sapiens; identical to SEQ ID NO: 6333

SEQ ID NO: 6590 - DNA, 3133 bp, Homo sapiens
atggcttctcacgcttgtgctgcatatcccacaccaattagacccaaggatcagttggaagtttccaggacatcttcattttatttccaccctcaatccacatttccagatgtctctgcagcaaagcgaaattccaggagaagaggacaaagatactcagagagaaaaagtaaaagaccgaagaaggaggctggagagaccaggatccttccagctgaacaaagtcagccacaaagcagactagccagccggctacaattggagtcagagtcccaaagacatgggcttgttagagtgctgtgcaagatgtctggtaggggccccctttgcttccctggtggccactggattgtgtttctttggggtggcactgttctgtggctgtggacatgaagccctcactggcacagaaaagctaattgagacctatttctccaaaaactaccaagactatgagtatctcatcaatgtgatccatgccttccagtatgtcatctatggaactgcctctttcttcttcctttatggggccctcctgctggctgagggcttctacaccaccggcgcagtcaggcagatctttggcgactacaagaccaccatctgcggcaagggcctgagcgcaacggtaacagggggccagaaggggaggggttccagaggccaacatcaagctcattctttggagcgggtgtgtcattgtttgggaaaatggctaggacatcccgacaagtttgtgggcatcacctatgccctgaccgttgtgtggctcctggtgtttgcctgctctgctgtgcctgtgtacatttacttcaacacctggaccacctgccagtctattgccttccccagcaagacctctgccagtataggcagtctctgtgctgatgccagaatgtatggtgttctcccatggaatgctttccctggcaaggtttgtggctccaaccttctgtccatctgcaaaacagctgagttccaaatgaccttccacctgtttattgctgcatttgtgggggctgcagctacactggtttccctgctcaccttcatgattgctgccacttacaactttgccgtccttaaactcatgggccgaggcaccaagttctgatcccccgtagaaatccccctttctctaatagcgaggctctaaccacacagcctacaatgctgcgtctcccatcttaactctttgcctttgccaccaactggccctcttcttacttgatgagtgtaacaagaaaggagagtcttgcagtgattaaggtctctctttggactctcccctcttatgtacctcttttagtcattttgcttcatagctggttcctgctagaaatgggaaatgcctaagaagatgacttcccaactgcaagtcacaaaggaatggaggctctaattgaattttcaagcatctcctgaggatcagaaagtaatttcttctcaaagggtacttccactgatggaaacaaagtggaaggaaagatgctcaggtacagagaaggaatgtctttggtcctcttgccatctataggggccaaatatattctctttggtgtacaaaatggaattcattctggtctctctattaccactgaagatagaagaaaaaagaatgtcagaaaaacaataagagcgtttgcccaaatctgcctattgcagctgggagaagggggtcaaagcaaggatctttcacccacagaaagagagcactgaccccgatggcgatggactactgaagccctaactcagccaaccttacttacagcataagggagcgtagaatctgtgtagacgaagggggcatctggccttacacctcgttagggaagagaaacagggtgttgtcagcatcttctcactcccttctccttgataacagctaccatgacaaccctgtggtttccaaggagctgagaatagaaggaaactagcttacatgagaacagactggcctgaggagcagcagttgctggtggctaatggtgtaacctgagatggccctctggtagacacaggatagataactctttggatagcatgtctttttttctgttaattagttgtgtactctggcctctgtcatatcttcacaatggtgctcatttcatgggggtattatccattcagtcatcgtaggtgatttgaaggtcttgatttgttttagaatgatgcacatttcatgtattccagtttgtttattacttatttggggttgcatcagaaatgtctggagaataattctttgattatgactgttttttaaactaggaaaattggacattaagcatcacaaatgatattaaaaattggctagttgaatctattgggattttctacaagtattctgcctttgcagaaacagatttggtgaatttgaatctcaatttgagtaatctgatcgttctttctagctaatggaaaatgattttacttagcaatgttatcttggtgtgttaagagttaggtttaacataaaggttattttctcctgatatagatcacataacagaatgcaccagtcatcagctattcagttggtaagcttccaggaaaaaggacaggcagaaagagtttgagacctgaatagctcccagatttcagtcttttcctgtttttgttaactttgggttaaaaaaaaaaaaagtctgattggttttaattgaaggaaagatttgtactacagttcttttgttgtaaagagttgtgttgttcttttcccccaaagtggtttcagcaatatttaaggagatgtaagagctttacaaaaagacacttgatacttgttttcaaaccagtatacaagataagcttccaggctgcatagaaggaggagagggaaaatgttttgtaagaaaccaatcaagataaaggacagtgaagtaatccgtaccttgtgttttgttttgatttaataacataacaaataaccaacccttccctgaaaacctcacatgcatacatacacatatatacacacacaaagagagttaatcaactgaaagtgtttccttcatttctgatatagaattgcaattttaacacacataaaggataaacttttagaaacttatcttacaaagtgtattttataaaattaaagaaaataaaattaagaatgttctcaatc

SEQ ID NO: 6591 - DNA, 1515 bp, Homo sapiens
gaccgaagaggctggtaagtcctcaagctggcaggtggtcgggggagcggccggagaggagctgccgggagttcgtgccctgcaggacatgacaccagtggcatatcacggccatggggtctcagcattccgctgctgctcgcccctcctcctgcaggcgaaagcaagaagatgacagggacggtttgctggctgaacgagagcaggaagaagccattgctcagttcccatatgtggaattcaccgggagagatagcatcacctgtctcacgtgccaggggacaggctacattccaacagagcaagtaaatgagttggtggctttgatcccacacagtgatcagagattgcgccctcagcgaactaagcaatatgtcctcctgtccatcctgctttgtctcctggcatctggtttggtggttttcttcctgtttccgcattcagtccttgtggatgatgacggcatcaaagtggtgaaagtcacatttaataagcaagactcccttgtaattctcaccatcatggccaccctgaaaatcaggaactccaacttctacacggtggcagtgaccagcctgtccagccagattcagtacatgaacacagtggtcagtacatatgtgactactaacgtctcccttattccacctcggagtgagcaactggtgaattttaccgggaaggccgagatgggaggaccgttttcctatgtgtacttcttctgcacggtacctgagatcctggtgcacaacatagtgatcttcatgcgaacttcagtgaagatttcatacattggcctcatgacccagagctccttggagacacatcactatgtggattgtggaggaaattccacagctatttaacaactgctattggttcttccacacagcgcctgtagaagagagcacagcatatgttcccaaggcctgagttctggacctacccccacgtggtgtaagcagaggaggaattggttcacttaactcccagcaaacatcctcctgccacttaggaggaaacacctccctatggtaccatttatgtttctcagaaccagcagaatcagtgcctagcctgtgcccagcaaatagttggcactcaataaagatttgcagaatttaatacagatcttttcagctgttcttagggcattataaatggaaatcataacgtggttctaggttatcaaaccatggagtgatgtggagctaggattgtgagtgacctgcaggccattatcagtgcctcatctgtgcagaagtggcagcagagagggaccatccaaatacctaagagaaaacagacctagtcaggatatgaatttgtttcagctgttcccaaaggcctgggagctttttgaaaagaaagaaaaaagtgtgttggctttttttttttttagaaagttagaattgtttttaccaagagtctatgtggggcttgattcacccttcatccattggctggaacatggattggggatttgatagaaaaataaaccctgcttttgattca

SEQ ID NO: 6592 - DNA, 2703 bp, Homo sapiens
ggagagagcgaagtcaagtctccagggccgctggcgacttcggaagccgcgcgcccggcgctctcggccgcccccggccgctcgcccccgccgcgccgccgccctcgcccccgggctcgcccttggcccccggcggccgcgaaagggtgcgggagacgcggagccggaggaggaggcgcagccgctgcccgagccgcagccgcagccggagcccgagccgcggggcgggtgcgaagatgcacacgacccagaaggacacgacgtacaccaagatcttcgtcggggggctgccctaccacaccaccgacgccagcctgcgcaagtacttcgaggtcttcggcgagatcgaggaggcggtggtcatcaccgaccggcagacgggcaagtcccggggctatggatttgtcaccatggctgaccgggctgctgccgaaagggcctgcaaggatcccaatcccatcattgatggcagaaaggccaacgtgaacctggcatacttaggagcaaaaccaaggatcatgcaaccaggttttgcctttggtgttcaacaacttcatccagcccttatacaaagacctttcgggatacctgcccactatgtctatccgcaggcttttgtgcagccgggagtggtcattccacacgtccagccgacagcagctgccgcctccaccaccccttacattgattacactggagctgcatacgcacaatactcagcagctgctgctgctgccgccgccgctgctgcctatgaccagtacccctatgcagcctctccagctgctgcaggatatgttactgctgggggctatggctacgcagtccagcagccaatcaccgcagcggcacctgggacagctgccgccgccgctgcagcagctgctgccgctgcagcatttggccagtaccagcctcagcagctgcagacagaccgaatgcaatagaccagccatctgatcaaagttgaattgttttctctttccctcccaattttccaatttttagtagctaataagagagttaacattgacttaacagctttaaaaaaaaaaacagccatgctattgtgaagcagagttattattttttttatactccaggtagtgttctagatgagaaagaggtaagaatgaggggaatgggcacaattttggaaatcaatcccaaagagcctgagtaaatgaaaggccactacgaaatgacgccaggagtaacaacggaacttcacttttgtaacgggatttttatttttgctctttttatagtatcagggaagcaaactgccttttacaagttagaaaatgctgtttgaatctagttgaaccagggaatacagagcgagcaatatgtagcttgaattacatttaaaagcagattttttacaaacaaaatggcgaaagcactgattgtcatttttagcagtcacttaaggcctatagaacttttttcaagtcggaaggtcctgttcttactatctcaaaaatgggcatcgaacaatcaatctaggagcgtggcagtgggtaaaatggtggacaggcaccaaagctattttctcatctgtcctgtggatgagtggaactgtggaacaagtgatgtggaattaatgggtgcaacagctgtacagacaatcaataacacacacagttctggaaagaacacatcacttgtgcttgtttgatgagcttgtcacattctaatccctctccccatcctgtttcaattttgggaaacttgtatctgctggtgtcagcaattctgattctgaaataggatcaggcttttactacaacagccttctctttctatttattgtgtcgactcgtggcttatgaataaaggcaggcaaagtttgcagaactgtcttaaggacatttattttttttccctttttaagtaattttacactttagtatctatttcagagtcatatttaaaactatttattagtgactacagtacatgagacaacaaggttactgagattacaattcttcaaaggttaatgataatgtggtttatactgtgccttaatagtaatgctatttaagatatttatttttaagttttactatgctgcactctaaagaaaggaactttagatgtgacactgtaaaattatgtattcatctcatggcataaattatttagtaagtctagatgtagcgtattaaatattaacctattcaactaaagatgttgacttggatttatttaaattcatatgtgcactgtataagagagtactcttacattaacacattttagtttagtttttagatttttttttaaacgatatattgctagtttcatgcttcctcctctgattttgcctgtgtagatttcatttattggtaattcattagtttaacactattatgtagtttttaaatgctgctttacatttttcttctgaaactgcaatacttgcaatttttattcttaaactaaattgaatactattttacactgtattggatttttatacttgaacaatttcatacaagggaagacaggttagcatttttatggactttctccattatcactggatttactttaagtattcccatactagacagtgttatgtaatgtagacatgactctcctgtgcaaattatttattcgttgtgtatattgctttataacatttcagatcttctaatctattcacttgtattaaatataatttttaaaaacttc

SEQ ID NO: 6593 - DNA, 1235 bp, Homo sapiens
gaaaaccagatctgcaacaagcaggactgtccaattgatggatgcctgtccaatccctgctttgccggcgtgaagtgtactagctaccctgatggcagctggaaatgtggtgcttgtccccctggttacagtggaaatggcatccagtgcacagatgttgatgagtgcaaagaagtgcctgatgcctgcttcaaccacaatggagagcaccggtgtgagaacacggaccccggctacaactgcctgccctgccccccacgcttcaccggctcacagcccttcggccagggtgtcgaacatgccacggccaacaaacaggtgtgcaagccccattccactctgcctttgtcacagagcagggtgctattgtgaggccatctctgagcagtggactcaaaagcattttcaggcatgtcagagaagggaggactcactagaattagcaaacaaaaccaccctgacatcctccttcaggaacacggggagcagaggccaaagcactaaggggagggcgcatacccgagacgattgtatgaagaaaatatggaggaactgttacatgttcggtactaagtcattttcaggggattgaaagactattgctggatttcatgatgctgactggcgttagctgattaacccatgtaaataggcacttaaatagaagcaggaaagggagacaaagactggcttctggacttcctccctgatccccacccttactcatcacctgcagtggccagaattagggaatcagaatcaaaccagtgtaaggcagtgctggctgccattgcctggtcacattgaaattggtggcttcattctagatgtagcttgtgcagatgtagcaggaaaataggaaaacctaccatctcagtgagcaccagctgcctcccaaaggaggggcagccgtgcttatatttttatggttacaatggcacaaaattattatcaacctaactaaaacattccttttctcttttttcctgaattatcatggagttttctaattctctcttttggaatgtagattttttttaaatgctttacgatgtaaaatatttattttttacttattctggaagatctggctgaaggattattcatggaacaggaagaagcgtaaagactatccatgtcatctttgttgagagtcttcgtgactgtaagattgtaaatacagattatttattaactctgttctgcctggaaatttaggcttcatacggaaagtg

SEQ ID NO: 6594 - DNA, 228 bp, Homo sapiens
atgaaggccactatcatcctccttctgcttgcacaagtttcctgggctggaccgtttcaacagagaggcttatttgactttatgctagaagatgaggcttctgggataggcccagaagttcctgatgaccgcgacttcgagccctccctaggcccagtgtgccccttccgctgtcaatgccatcttcgagtggtccagtgttctgatttgggttgtctaccttcataa

SEQ ID NO: 6595 - DNA, 299 bp, Homo sapiens
atactcatgcgtggctcccttcactactgggtgtcagtctggcctgtgctcaaggtgtggcatctggttggagtttcaatatgtaggatccactaccagggttttcgtgagattaagaaggaggtgctatctccagttccttgcactcctgttaacaagcacctcagcgagagcagcagcagcgatagcagccgcagaagagccagcggggtcgcctagtgtcatgaccagggcgggagatcacaaccgccagagaggatgctgtggatccttggccgactacctgacctctgcaaaat

SEQ ID NO: 6596 - DNA, 488 bp, Homo sapiens
agatgcctgctgatgtgaatttatcccagaagcctcaggtcctgggtccagagaagcaggatggatcttgcgaggcatcagtgtcatttgaggacgtgaccgtggacttcagcagggaggagtggcagcaactggaccctgcccagagatgcctgtaccgggatgtgatgctggagctctatagccatctcttcgcagtggggtatcacattcccaacccagaggtcatcttcagaatgctaaaagaaaaggagccgcgtgtggaggaggctgaagtctcacatcagaggtgtcaaggattagctcagcttgccccccctttccatctccaccatctatagtgagcctctccataattagtgccaaccattagtctcgttcatatttttacaccaggagtcaacaaactgtggccattggccaaatatggcctcccaactgtttttttaaaataaagttttattggaacacagccatgttcatttgga

SEQ ID NO: 6597 - DNA, 672 bp, Homo sapiens
agacgccttctggattcaagaagacgaggtgagctgaggtacctggctttagtgaagaccctgtgggggcttcctggctgcggcttcgacgtgcctgactccacacgcccctaaggctcacctgttactcggcctcccagaaagatggataggagaaatgactacggatatagggtgcctctatttcagggccctctgcctcccccggggagcctggggcttcccttccctccagatatacagactgagaccacagaagaggacagtgtcctgctgatgcataccctgttggcggcaaccaaggactccctggccatggacccaccagttgtcaaccggcctaagaaaagcaagaccaagaaggcccctataaagactattactaaggctgcacctgctgcccctccagtcccagctgccaatgagattgccaccaacaagcccaaaataacttggcaggctttaaacctgccagtcattacccagatcagccaggctttacctaccactgaggtaaccaatactcaggcttcttcagtcactgctcagcctaagaaagccaacaagatgaagagagttactgccaaggcagcccaaggctcccaatccccaactggccatgagggtggcactatacagctgaagtcacccttgcaggtcctaaagctacca

SEQ ID NO: 6598 - DNA, 7507 bp, Homo sapiens
gttcttttgttcttttctctctgcccccattttgtgggcccccaaattattatgggtcctgggcaccgtccctaatggataagccagccctgatctgagacacagagaggctgagggtctctaagaccactaagctagctacagcagagctcagacaagagcaactaggtctagacctctttctacatttgcgactatgaaaactatggagaaggctctgctcaagaggattcgcccaaaatgaggacttccctgcaggcagtggcactctggggacagaaggcccctccccacagcatcactgccatcatgatcactgatgaccagcgaacgattgtgactggaagtcaagagggtcagctctgtctctggaatctctcacatgaactaaagatttcagcgaaagaactcctatttggtcattcagcttcggtaacatgtttggcaagagcaagggacttctctaaacagccctacattgttagtgctgctgaaaatggggagatgtgtgtttggaatgtcaccaatggacagtgcatggagaaggctacacttccttacaggcacactgcaatctgttattaccactgctcattccggatgacaggagaaggctggcttctttgttgtggagaatatcaagatgtccttataattgatgccaaaactttggctgttgttcacagttttagatcatctcagtttcctgactggatcaactgcatgtgcattgttcactccatgagaattcaagaagattctctcttggtggtatcagtagctggtgagctcaaagtatgggatctttcctcatctatcaacagcattcaggaaaagcaagatgtctatgaaaaagaatccaagtttcttgagtccttgaactgccagacaattcgattttgcacatatactgagagacttctattggtggtattttctaaatgttggaaggtttatgattattgtgatttttcccttctgctgactgaagttagtagaaatgggcagttctttgctggtggagaagtgattgctgctcacagaatcctcatctggacagaagatggtcacagttacatctatcagctgctgaacagtgggctttcaaaaagcatataccctgctgatggaagagtgcttaaagagaccatttatcctcatttactgtgctctacttctgtgcaggaaaataaggaacagagccgtccctttgttatgggctacatgaatgaaaggaaagagcctttttacaaggtacttttctctggagaagtctcaggaagaattactttgtggcacatccctgatgttcctgtatccaagtttgatggttctcctagagagataccagtaactgccacctggactcttcaagataattttgataagcatgatactatgtcacaaagtattattgactatttctctgggcttaaagatggggcaggaactgctgtagtcacttcatcagagtatattccaagtcttgataaactaatatgtggctgtgaagatgggacaattatcattacccaggctttgaatgctgccaaagcaagacttctggaaggtggttctttagtaaaagattctccccctcataaagttcttaaaggccaccaccaaagtgtcacttcattactctatccacatggtctctcttcgaaattagaccaaagttggatgttgtctggggacctggactcatgtgtgatcttgtgggatatctttactgaagaaattttgcataaattctttttggaagctggtccagtaacaagtcttttgatgtcaccagagaagtttaaactaaggggtgagcagataatttgctgtgtgtgcggtgaccattccgtggctctccttcaccttgagggaaagagttgcctcctgcatgcccggaagcacctttttcctgtgaggatgataaaatggcacccggttgagaattttttaattgttggatgtgcagatgactcagtttatatctgggaaattgaaacaggcactttggaaagacatgagacaggagaaagagcacgaattattcttaattgttgtgatgattcacagcttgtgaagtctgtacttcccattgcctcagagacacttaagcacaaaagtatagaacagagatcctccagcccctaccagcttgggccattaccttgccctggtctgcaggtggagtcttcatgtaaggttactgatgccaaattttgcccaagaccttttaatgtcttgcctgtgaagacaaaatggagtaacgttggctttcatattcttctatttgatctggaaaaccttgttgaacttttgctaccaactccactcagtgatgttgactcttccagttcattctatggtggtgaggtcctgagaagagccaagagcacagtggagaagaagacactgacactgagaaaaagtaaaactgcctgtggtcctctttcagcagaggcactagccaagcctattactgaaagcctggcccaaggagataataccatcaaattctcagaagaaaatgatggcattaaaaggcagaagaaaatgaagatctccaaaaaaatgcagcctaagccatcaagaaaagtagatgccagtctcacaatagacacagcaaaattgtttctgtcttgccttttgccatggggagtggataaagatttagattatctttgcattaagcacctcaatattttaaagcttcagggtcctatttctttgggaatttctttgaatgaagataatttctcactgatgttgccaggttgggatttatgcaatagtggaatgataaaagactattcaggagtaaatttattttccaggaaagttttggacttgtcagataaatacacagccactcttccaaatcaggttggaattccaagaggattggaaaataattgtgattctttgcgagagtcagatactatagtttatttgttgagcagactatttttagttaataaattagttaacatgcctttagaattggcatgtagagttggcagttctttcagaatggaaagtatacataataagatgagaggtgctgggaatgacattttaaatatgtcaagcttctacagttgcttacgaaatggtaagaatgaatcccatgtacctgaggctgacctttcacttttgaagctaatttcctgttggagagaccagtctgtgcaggtaactgaagcaatacaagctgttctcttggcggaagttcaacaacacatgaagagtttgggaaagatacccgtcaatagtcaaccagtgtccatggcagagaatggtaactgtgagatgaagcagatgctgccaaagctggaatggacagaagaactagagttacagtgtgttagaaacactttgcctctgcaaactccagtcagcccggtcaagcatgacagcaactcaaactcggcaaacttccaagacgtggaggacatgcctgacagatgtgccttggaagagtctgagagtccaggtgagccaaggcatcattcatggatagcaaaggtctgcccctgcaaggtgtcttaaatggaatctcatcagtaggagctgaatttggacaaattaagaaatccaaaagatgccatttgtttattactgtataaaagcattgttgttattggtcaagttattaggctgtagtggatttgctaatactttagccaacatgtattaaagtgattttaatacatgctgattacaatgcaatacatactgattgaaaatattcatattcatctaattttagaaaaatattgcctagatcattctctattcctgtttcttactttttctgttaatatttccaacagggaatgccagtccacagacacaaatttaatactgctttaaattttctcctatccttttagtccctgaattatataataaacaatgttaaaaccaatgtagtacacaatacttacttacaaatttaatactgcttcaaggtatttaatctaaaattttaccaactttgatttgtctggttaggatattttgttttagtggatatgctttaattcggatcaattactgcagtaaatctcatccctaagcatgaaatgttgtcaacaaatacccagttccatttagttatcaattagcccaaataagagatacaaagtataacagtgaccaaccttgtactgttgagttaatttgaacttctaatgacattgaggctaatgtctttagctcaaggttgatcttgttggccatatagatgtgaactagggaaggggaatcaacttacagcatatcacaattgatccttattaagtataaactcttgtaggtcttttcccagaaagaagcttgactagcaggaattctaaaactgaaatatatcaaacagcataaataggaatagacataaagtgctcttctattaaagcctttggtgatctatttactatgatttatattgtacagttcctcgatttacagaaaatcatcaaaattattaatctacatatcttatgtatataaatattgcctaatccatagaaaaaaggatataaagtattaaatatgtgatatatagctatatctatctatctatgtatctaatagggaagtccaagtcacttcaattgaagaaacatatctctgagcataggagcagcctcaggtcctatggtgggatgcagtggacaggagagggggaaattagaaaagagaactatataattgaaaaagggatataaagcattaaatatatgatatatagctatatctatgtatgtatctaacagagaagttcaagtcacttcaattaaagaaacatttttgagcatgggaccagcctcaggtcttatgctgggatgcagtagacaggagatggggaaattagaaaagagaactgtgtaattgaaatgacgtgggctgcacccttaaggaacttataattaatgatgatctgaataaacataccaggataaagatgtcaaatgagtgtgactcccttaaagtagattaaagtgtgcattctttgtttcctaaaatatgattttactgcttgaaattacatttgagttgaagtttagaaactaacatagcattaatatgaataatcatggaaaattattatcctttgaaaactgattgataaatatattccccctcctttagaaacagtcaaaagccacttcaaacaagtttcaaaataaaggaaggtagcaagttaggcgatggattatattttcttgcttgttgtataccagttgtcaaggacattataaggactcccaaaagcattttgaaggatggcaatatcaaataagtgtatgtcctctcaaatgaggcatttttaattgttaaaatctatttggacgctcaggttatgatatgtttatgaaaaataagcttcattatttttatagctacatcctattattcccttttagaaacaagaataacaataggttttaatagttgccatacttagcatttatcagttctaatgaaaccaatattgaatctctgataaatattttctgatgttactagctatgggaaattagaactggcacaaccctgacattactaagtggaaatgttaggatttttcggcatcgcatgttagaatctctaaaatttaaacattcctgttaaatgactaaggtttgcttttatcaatatgaattctgaaggccaatatcataccattaactatgaaagcttttaattcctaaaaatagttttagagatattcaagcaatgctctcctaatatccatacgcaagtgtgtttatgacacaaattcactagtctgtttaaaaatgaattctttatattgactggtgttccacatatttcagtaatttctgttatgagaggacttgaaatagcaaattgccacacagttaactggatagaccacgtacgtggtgatcataaccacttggtactacacccagaaactcaaaattgtctttctcctgatgagatatgggtgtccttttgtacgtctaggcctaggtaaccagtggagtgattatattagcaaatgtgtttgtatccggagtcttcctgtcattgtaataaaaaatttatttaaaaattttgtcttgtgtttcttttttggtaatcatcttggtgatatttatgaatgtatttgtgtgtgtgtgtgtgtgtgtatacatacatatatatgtgtgtatatatatacacacatatatatacacatatatatgtgtgtatatatatatatatatggcatatcccccaaaggaatatcatattttcatttgcaagccttgattctttgacttgctgttgagtttcacattggctccattgtatattgcaggaaaaagtacctggaaagcctggagggttaaaagcagaggctcctcggcagcgtgtccaggccgtgtgtgcttgctgtgcttgtcagagcctcattccctcccctgtgttggagagctttctcacagggctcatccagaggtgctagaaagcaatgtgagcactattaaacacttcaaatataaggaaaaatgtataatgttagaaacacacagttaaaaagtagccccaggtatcaaacattctgttactattttagaaactaaattaaggctgctttgaacatgatggtattagaaaaatggtagaatacagtttgttaaatattaatattctatctttagatgatagcatttggtgacttttatttcttttctcatacattttttccagtgttctgtatttttaaaatcctttcataattattataatgaacactttagaaaagatactatttctcttccatccttagagggcacattataataattgagtattttaaaattaaattttatgccatgtatttaaaatgaaagttcaggttacattaattccaactgattttaaagccttattttcacagagtggactcattcaattttttaaattttatattcatacattttgattgctcagttatataaaagcggtgttatagactcctttattctccacaaaatgttgtcttatatgtaaagtgccaaaagttgtgtttaatttcctaagaaagtcattgctttgtaaacatttgcataatacttagtgttttttgtaattttaaaaaattagcttaaccaaaagagttgcaaaattaaaacttacttgagtaggtatctttcagacaaagctgcatggcttcatgtacaatagtccccagatcacctcgcactgtagtttgctcaagaaggagcctacagatggcaggtaggagaaggtaaactggaaattaacaggtctgtctgtaagagcatgccactggaaacacccatccaatttgggacccctggaagacagcatgtgtctaatgggaggcctgtcctagtacaactcctttactcttttcaccttcatcttgaccttctcagataccatctttatgtaaaatgttgatgttgtggagtttttgcagtaatttaatttttataaatattgtattaaaatatatttatcttga

SEQ ID NO: 6599 - DNA, 1921 bp, Homo sapiens
gttaggtgtgcctcaaccctgaagcaggtccctcagtctgcagatatttagagatatttaaaggaaaaccaggaaggagccaagagagaatgaagcctaaggtgtcctgagaccctcagagaactcagcccaagggttaggagcttgtgtcaaggtgcagcagggactttgtttaaagaagatccgcctctggggttttatattgctctggtattcatgccaaagacacaccagccctcagtcactgggagaagaacctctcataccctcggtgctccagtccccagctcactcagccacacacaccatgtgtgaagaggagaccaccgcgctcgtgtgtgacaatggctctggcctgtgcaaggcaggcttcgcaggagatgatgccccccgggctgtcttcccctccattgtgggccgccctcgccaccagggtgtgatggtgggaatgggccagaaagacagctatgtgggggatgaggctcagagcaagcgagggatcctaactctcaaataccccattgaacacggcatcatcaccaactgggatgacatggagaagcctcttgcaggaatcttctatcagccaaatatagccagaagccagaaagcaatgaacacttgagtgatacaatgtgccttgcatcactcagtgcacaaaggcaggggagagactgtaggagagtgaagaggagggaaggtcaaatggaaataatgaacacatagaaaatactggttccaggtctgagtcctacctggggccctgttgagaaggagtataccctttaaatgtcaatcagaaatttccagggctgaccattctcctctccagatccatcccatcctgtgtaacatggtgccacactctcccagcatgggaatgtcaatgagaattttccagccattgggagtctgccaggctcatatggcttttgtctccactagatctggcaccactccttctacaatgagctgcgtgtagcacctgaagagcaccccaccctgctcacagaggctcccctaaatcccaaggccaacagggaaaagatgacccagatcatgtttgaaaccttcaatgtccctgccatgtacgtcgccattcaagctgtgctctccctctatgcctctggccgcacgacaggcatcgtcctggattcaggtgatggcgtcacccacaatgtccccatctatgaaggctatgccctgccccatgccatcatgcgcctggacttggctggccgtgacctcacggactacctcatgaagatcctcacagagagaggctattcctttgtgaccacagctgagagagaaattgtgcgagacatcaaggagaagctgtgctatgtggccctggattttgagaatgagatggccacagcagcttcctcttcctccctggagaagagctatgagctgccagatgggcaggttatcaccattggcaatgagcgcttccgctgccctgagaccctcttccagccttcctttattggcatggagtccgctggaattcatgagacaacctacaattccatcatgaagtgtgacattgacatccgtaaggacttatatgccaacaatgtcctctctgggggcaccaccatgtaccctggcattgctgacaggatgcagaaggagatcacagccctggcccccagcaccatgaagatcaagattattgctcccccagagcggaagtactcagtctggatcgggggctctatcctggcctctctctccaccttccagcagatgtggatcagcaagcctgagtatgatgaggcagggccctccattgtccacaggaagtgcttctaaagtcagaacaggttctccaaggatcccctcgagactactctgttaccagtcatgaaacattaaaacctacaagccttacttctctgtgtggggctctttt

SEQ ID NO: 6600 - DNA, 3016 bp, Homo sapiens
atggttgagcctcatcaggaacccaggcacagtaaagttggtctacaggacaatccttggttctgtgactgtcatatttccaaaatgattgagttgtcaaaggtcgttgaccctgctatagtgcttctggatccactgatgacttgcagtgaacctgagcgcctcacaggaattttgtttcagcgggctgaattggagcattgtctgaaaccatcagtgatgacctcagccaccaaaatcatgtctgctctgggcagtaatgttctactgcggtgtgatgccactggcttccccaccccacagatcacatggaccagatctgacagctcgccagttaattatacagtaatacaagaatctccagaggaaggagtcagatggtccataatgagcttgacaggcatttcttccaaagacgctggggattacaaatgtaaggccaaaaatctggctgggatgtcagaagctgtggttactgtgacagtgcttggcattaccacaactccaataccaccagacacttctgaaagaactggagatcatcctgagtgggatgtccagccgggatctggaagatctacatctgtatctagcgcatcatcatatctttggtcctcttccttctcccccacatcttctttttctgcttctactttgtctcctccctctactgcttccttctctttatctcctttctcctcctccactgtttcttcaaccacaactctgagcacaagcatctcagcaagtaccaccatggccaacaagcgatcattccagctccaccaaggtgggaaaagaaatttaaaggtggcaaagaatggaagtaagcttcctccagccagcacaagtaagaaagaagagctggcattgttggatcaaacaatgcttacggagacaaatgccgcaatagaaaacctcagggtggtcagtgagactaaagagagtgtgacattgacgtggaatatgatcaacaccacacataactctgcagtgactgtgttgtattccaagtatggtgggaaggacctgctgctgttgaatgcagactccagcaagaaccaagtaaccatagatggcttggaacccggtgggcaatacatggcctgtgtctgtccaaaaggagtgcctccccagaaagaccaatgcatcaccttttctactgaaagagttgaaggagatgattctcaatggtctctccttctcgtggtgaccagtactgcctgtgttgttatcttaccattgatttgtttcttgttgtacaaagtttgcaaactgcaatgtaaatcagaacctttttgggaagatgatttggcaaaggagacttatatccaatttgagaccctgtttcccaggtctcaaagtgtaggtgagctctggacacgaagccacagggatgactcagagaaattgctgctttgttctaggtcaagtgtggaatctcaggtgacttttaaaagtgaaggttccagaccagagtattattgctaaggttctgcagctcaggtgcatgtgagctacaaaactagcatctaagggtataattgaccctaggtttggatgacttttggacagactttcacattgtacatgaaaatcacaaatggaatgcttttaagtatgtttaaaaaataccatgagacctctgaactgaaaagacaaataatgttgattttttttcttgtgtggaaaaggtctacagaaataatttttagagtggtgcttaataaattattaatactttttagggtaatgttttagttcttaaaaataagttcatgtgaaagtagcaagtgaactctgtatttaaaaatatagttttttgagtcatgaggaaacattagcaaaaccagctaagccttgatgtttattcatgttcgaagtgcattatagcatttgctgtggatgttttctgacattgcctaatggagagcgtgggatcataaaggattttgtgttcactaaggttaaatctaactcacgggagagagagggctctgtctcttggtaccattatgcattgtgatactatagagttgtgttcatatttcttgtaagaaaaatttttgcttttctttagaaatataggtattagcaaaagtaagtatacaaagaggattatgacaaatagaccatttctttaaaaatggtaactgttgcatttaaacacatcgactgacagattatatggatatttaaaaataactttaaatcaatcttttaatattttgctgtttgctcttatgttctcccttctttcttccttccttgtcttccctccctttccttccttcattctttctttcttctgctctgtcagaagatatacaagtagccaaagcatcacgagccaagctgtttgtcttttgccatattgtcttttgattctcttgataaagagaaagcttttgaaattacttactgccctttgaaagtctgttttacaaccccaaaggatattttaggactttaaaagggaagcttcagtggattcatttggttagattcttttcctaggttaaaaacatcggggaacttaaatacataggaaaggagttcacaaataaaatttagtttttttagaaagagaatattttaataactgtagtatactacaagaaacatctcatggctttaagattaacgatagcgataaggcccactcaagcatctcacagtggtgatattacatgtcacttagcaggatgcaacctggcctagggatttccagaagacaaggccacctcagcacagatgcaactttcataaattttagaacaaagcctaaccttactagattaaacttgctctatgaaagaaacacttggtaattgacccagactgaatacatgtataagaaatgggaaagatctcccaaactctgagaacggtcctcaaatagaagctctcctagtcagttggtcatctgacctctgactatatccggcctatgacaccagccagctcctgctttctgtcttgtaagagcactgctggaataaactacttgagcatt

SEQ ID NO: 6601 - DNA, 564 bp, Homo sapiens
tgcataaatgagtttcagatccctgttttcaagaaaatctttgagctttgtccatgtagaaaaaaattccttcagtacgtttcatcttgacctgaactttccacattcctgagctgatctatgtccttcactctagattagtggtaattacagaaatttgatggcataaaatgttgttgcccacaccttaaaatttaattgcccccaccaatttttgattcagtagtactgggtagtgaaattaaagacctaaaaatttaaagtattttctaaatatttagaaatgtctgttataaattagtaatttgggattaatttactagaatatgctatgacattctctttactgagcacattagtagtttggtaattggagaatatgagcaagattcatgttatttatttttaataaaacaggtattgctgtctctaagcctcacctgataacctgtttggagcaaggaaaagagccctggaataggaagagacaggagatggtagccaaacccccagttatatattctcatttcactgaagacctttggccagagcatagcataaaag

SEQ ID NO: 6602 - DNA, 663 bp, Homo sapiens
tggcttctggggtgctctgcagtggaggcctgtgctgtccacgtgtaatgtcagcccggtgaggcgaggacaggtcacggcagctcagccagggatgctgtgtccgtacgccgacctgcgctggggctcccttgagctggctgtcccaccgcctcattcccggggcacccacgtgggaaagctctgagacgtgtcccagggtgggcttgggggacccctttctccatgctgtgcatctgggggccgccagactcaggagcagaggccgcccctcctatgcgatcatgggaccccttcccccgggggctggatgcaagcaggtgtgcccgggagctgtgttcagctgccgccccatcctctcctctccctagtacacgctgtgggcagccgtctgggtcacctggaacgtcttcatcatctgcttctacctggaagtcggtggcctcttaaaggacagcgagctactgaccttcagcctctcccggcatcgctcctggtggcgtgagcgctggccaggctgtctgcatgaggaggtgccagcagtgggcctcggggccccccatggccaggccctggtgtcaggtgctggctgtgccctggagcccagctatgtggaggccctacacagttgcctgcagatcctgatcgcgcttctgggctttg

SEQ ID NO: 6603 - DNA, 1351 bp, Homo sapiens; identical to SEQ ID NO: 6333

SEQ ID NO: 6604 - DNA, 1082 bp, Homo sapiens
tttttaagttagtgctggaacgtggaagagctgctgcctccgaagcagtaaaccagcccctctgtttgtttgtttgctttgcccttagttccactgctccaaacccacccaccaaggactctgaacctgtccaccccgggcgcatcaagatcttccagctgggtacccccgatttgggccgactttgcacctccaaacaaccttagcatgatgtcttatcttaagcaaccgccttacgcagtcaatgggctgagtctgaccacttcgggtatggacttgctgcacccctccgtgggctacccggccaccccccggaaacagcgccgggagaggacgacgttcactcgggcgcagctagatgtgctggaagcactgtttgccaagacccggtacccagacatcttcatgcgagaggaggtggcactgaaaatcaacttgcccgagtcgagggtgcaggtatggtttaagaatcgaagagctaagtgccgccaacaacagcaacaacagcagaatggaggtcaaaacaaagtgagacctgccaaaaagaagacatctccagctcgggaagtgagttcagagagtggaacaagtggccaattcactcccccctctagcacctcagtcccgaccattgccagcagcagtgctcctgtgtctatctggagcccagcttccatctccccactgtcagatcccttgtccacctcctcttcctgcatgcagaggtcctatcccatgacctatactcaggcttcaggttatagtcaaggatatgctggctcaacttcctactttgggggcatggactgtggatcatatttgacccctatgcatcaccagcttcccggaccaggggccacactcagtcccatgggtaccaatgcagtcaccagccatctcaatcagtccccagcttctctttccacccagggatatggagcttcaagcttgggttttaactcaaccactgattgcttggattataaggaccaaactgcctcctggaagcttaacttcaatgctgactgcttggattataaagatcagacatcctcgtggaaattccaggttttgtgaagacc

SEQ ID NO: 6605 - DNA, 2174 bp, Homo sapiens
agctaaggcgcgctggatccccggagggcggaggacctccacggtgcacccagcttttcccagccaccttccagcggggccctcccccgcgtacccccatttggcagatgagaaaattgaggctcccagaggccaagtgattctcaaggtcacacgaggaagcggtagagccaggcggggacggctctgggtggctcttaggaaaagtccgcctgagaactccgtacaggagctcccctgtcctccagcctgggggagtgagtatgtgtagggccggggtacctttccgtggggcaaggctctgccaaaatctgggagtgaggggagtcagggagctggggccgcagggcgggccctgcaccgcaaatgggaggggggcgacggaatgggcgtgcgcacccatgggggtgtgtgcatgtgtgtgggagtgtacatgcgtggagaggcactgccttgcgtgtgtgcacacgtgtgaggatgtcagcgcctgtgtggccgcgggactcaaggctggcctggctcaagtgaacagcacgtccaggaggcgacctcgtccgcgggtttgcattctggggtggacgagctgggtatgtgtgcctgagggtttcttcgtgcaggtgtgcacagggtgtgggtgccattgtgtgtgagagacggaggatgggaggccggtgcctgtggcccggtgcgtgtaagtgcggacgcctgcacctccacttaggtccccggcctccgacgaataacttgggtgtggagtgtttgcccctgccagggtgcgtatgaccccgccagtgaccggagttgctaatggtgtcatgcacccaccggccacccttggcgcgagcgcccccctctggacaccctgctccgtgcgcgctcacagttcgcctgtgcggggccggggccagggtcaggagccggggatagggaggaagagggcctgtggacaagctgagccgggacccctgggacctttgcggaggtggcctgggagcgctcagttcccaggctcaggcttcccgctgacgcctcctggccgcagcgggctccccccgccccaggaatgttcctctcccatccagtccgcctcccctagggcaggccccctgggggctgccgcagccccgcctcgccttcctgggctcccgggagggggcgaggcgggcaggacgcctgggttctctccccccacctcccataccagggagaaattcctccgaggtcccctcaggctctgggttcccaaaataaccctgcgggggaagggaggctgtggagggagggaagcgggaggggcgcagagccgagctgcggggtgctgcaggtgcctctggggagagggcgcgaggagaaggcgccctgcggggggctgggcgccagccagtcctgggatcttggttcgtccccatcctcgtgaagcccctcggccttcccgcgactccgagggtgggccggaagcctctctgcgggtccgtttcccaactggcgggttgcaccatcccgggccagaccgtttaaccccgggagtggccgcgggggacaactccgcccctgtccagcagggggcgtgcccgccccgccccgtttctgcccgcggggccgctcccccgcccgcgactccgcagactcccgctctgcctctcccgggacaggggttcggtccgagcccggtgggaggctcccggagcgcagcctgggcccagcccaccccgcgccggcggccatggcaggcaccctggacctggacaagggctgcacggtggaggagctgctccgcgggtgcatcgaagccttcgatgactccgggaaggtgcgggacccgcagctggtgcgcatgttcctcatgatgcacccctggtacatcccctcctctcagctggcggccaagctgctccacatctaccaacaatcccggaaggacaactccaattccctgcaggtgaaaacgtgccacctggtcaggtactggatctccgccttcccagcggagtttgacttgaacccggagttggctgagcagatcaaggagctgaaggctctgctagaccaagaagggaaccgacggcacagcagcctaatcgacatagacagcgtgtgcgtggggggagcacagagggctgggggggcactcagtatcctataccatctgtgcttaataaatgtctgttgaactg

SEQ ID NO: 6606 - DNA, 756 bp, Homo sapiens
agttccaggtgcaggggctttaagactattacaaaatgcgaatttgacttaatcgccaattttttcattgaccttttatgtcacaaaacgagaggacacaaaaagctatatgaattgtttatcattatcaatatatgtgtatgttatctttaaaaaaacaaagcttaatgagaacctaattgtcttaaccacacacatacatacataactgcatattgaatttatagtaattattatcgctttttcttcacttctatttaaaaattgaaaattctatacacatttttcacaggcattaagtatcagaatattagcatatacttacaagtattttatgcccaacttctaggatggctaacatttgacttttagaaaagtaattgtttcgtttagagaaaaaaaaatatgactcctgtaaagtaataaacctacatgcaaaaataaggatgcagggggaggccgagagcattaaatttgcctctataatatcatatcaacacattttaatctctcaaccagggctaataattcactcactgtctccaggggactacattaacagttcttccaatattgggcctttatatcatcagctaaccatatgcttccctgagcgcctgagtgatcccagtttctggaacactattcctttctctcaaattcagtaaataaaaagttaaagcgctatattgttttatatgagtacgacctttaagattcactgatgactatttctcaacagttgttaaatatttt

SEQ ID NO: 6607 - DNA, 491 bp, Homo sapiens
cccgcgctgcgcccctgcattccccgcttcgtcccgctgtccacggcgccggcctcccgcgagcagcccgcagcgggcccagcggccgtgccaggaggtgggtcggccacggcagtgcggccgccggtgcccgccgtggacttcggcaacgcgcaggaggcgtaccgcagccggcgaacctgggagctggcgcggagcctgctggtgctgcgcttgtgcgcctggcccgcgctgctggcgcgccacgagcaggtcctgcacctcagctgcggagagggatggcagtggcacgaataagcgggacaagcaataccaggcccactgggccttcggggaccgcaggaatggtgtcatcagtgcccgcacctacttctacgccaatgaggccaagtgcgacagccacatggagacattcttgcgctgcatcgaagcctcagctgcagttctcagaggtgctggccaagtggaggtgcttctttcaccaaatggct

SEQ ID NO: 6608 - DNA, 3634 bp, Homo sapiens
gcgccctgcacggccgccagccggcctcccgccagccagccccgacccgcggctccgccgcccagccgcgccccagccagccctgcggcaggaaagcatgaagggagacaccaggcatctcaatggagaggaggacgccggcgggagggaagactcgatcctcgtcaacggggcctgcagcgaccagtcctccgactcgcccccaatcctggaggctatccgcaccccggagatcagaggccgaagatcaagctcgcgactctccaagagggaggtgtccagtctgctaagctacacacagtccctgagacggcgggcaacagcatcggcaggaacgccatggccgtcccctcccagctcttaccttaccatcgacctcacagacgacacagaggacacacatgggacgccccagagcagcagtaccccctacgcccgcctagcccaggacagccagcaggggggcatggagtccccgcaggtggaggcagacagtggagatggagacagttcagagtatcaggatgggaaggagtttggaataggggacctcgtgtggggaaagatcaagggcttctcctggtggcccgccatggtggtgtcttggaaggccacctccaagcgacaggctatgtctggcatgcggtgggtccagtggtttggcgatggcaagttctccgaggtctctgcagacaaactggtggcactggggctgttcagccagcactttaatttggccaccttcaataagctcgtctcctatcgaaaagccatgtaccatgctctggagaaagctagggtgcgagctggcaagaccttccccagcagccctggagactcattggaggaccagctgaagcccatgttggagtgggcccacgggggcttcaagcccactgggatcgagggcctcaaacccaacaacacgcaaccagagaacaagactcgaagacgcacagctgacgactcagccacctctgactactgccccgcacccaagcgcctcaagacaaattgctataacaacggcaaagaccgaggggatgaagatcagagccgagaacaaatggcttcagatgttgccaacaacaagagcagcctggaagatggctgtttgtcttgtggcaggaaaaaccccgtgtccttccaccctctctttgagggggggctctgtcagacatgccgggatcgcttccttgagctgttttacatgtatgatgacgatggctatcagtcttactgcactgtgtgctgcgagggccgagagctgctgctttgcagcaacacgagctgctgccggtgtttctgtgtggagtgcctggaggtgctggtgggcacaggcacagcggccgaggccaagcttcaggagccctggagctgttacatgtgtctcccgcagcgctgtcatggcgtcctgcggcgccggaaggactggaacgtgcgcctgcaggccttcttcaccagtgacacggggcttgaatatgaagcccccaagctgtaccctgccattcccgcagcccgaaggcggcccattcgagtcctgtcattgtttgatggcatcgcgacaggctacctagtcctcaaagagttgggcataaaggtaggaaagtacgtcgcttctgaagtgtgtgaggagtccattgctgttggaaccgtgaagcacgaggggaatatcaaatacgtgaacgacgtgaggaacatcacaaagaaaaatattgaagaatggggcccatttgacttggtgattggcggaagcccatgcaacgatctctcaaatgtgaatccagccaggaaaggcctgtatgagggtacaggccggctcttcttcgaattttaccacctgctgaattactcacgccccaaggagggtgatgaccggccgttcttctggatgtttgagaatgttgtagccatgaaggttggcgacaagagggacatctcacggttcctggagtgtaatccagtgatgattgatgccatcaaagtttctgctgctcacagggcccgatacttctggggcaacctacccgggatgaacaggatctttggctttcctgtgcactacacagacgtgtccaacatgggccgtggtgcccgccagaagctgctgggaaggtcctggagcgtgcctgtcatccgacacctcttcgcccctctgaaggactactttgcatgtgaatagttccagccaggccccaagcccactggggtgtgtggcagagccaggacccaggaggtgtgattcctgaaggcatccccaggccctgctcttcctcagctgtgtgggtcataccgtgtacctcagttccctcttgctcagtgggggcagagccacctgactcttgcaggggtagcctgaggtgccgcctccttgtgcacaaatcagacctggctgcttggagcagcctaacacggtgctcattttttcttctcctaaaactttaaaacttgaagtaggtagcaacgtggctttttttttttcccttcctgggtctaccactcagagaaacaatggctaagataccaaaaccacagtgccgacagctctccaatactcaggttaatgctgaaaaatcatccaagacagttattgcaagagtttaatttttgaaaactggctactgctctgtgtttacagacgtgtgcagttgtaggcatgtagctacaggacatttttaagggcccaggatcgttttttcccagggcaagcagaagagaaaatgttgtatatgtcttttacccggcacattccccttgcctaaatacaagggctggagtctgcacgggacctattagagtattttccacaatgatgatgatttcagcagggatgacgtcatcatcacattcagggctattttttcccccacaaacccaagggcaggggccactcttagctaaatccctccccgtgactgcaatagaaccctctggggagctcaggaaggggtgtgctgagttctataatataagctgccatatattttgtagacaagtatggctcctccatatctccctcttccctaggagaggagtgtgaagcaaggagcttagataagacaccccctcaaacccattccctctccaggagacctaccctccacaggcacaggtccccagatgagaagtctgctaccctcatttctcatctttttactaaactcagaggcagtgacagcagtcagggacagacatacatttctcataccttccccacatctgagagatgacagggaaaactgcaaagctcggtgctccctttggagattttttaatccttttttattccataagaagtcgtttttagggagaacgggaattcagacaagctgcatttcagaaatgctgtcataatggtttttaacaccttttactcttcttactggtgctattttgtagaataaggaacaacgttgacaagttttgtggggctttttatacactttttaaaatctcaaacttctatttttatgtttaacgttttcattaaaattttttttgtaactggagccacgacgtaacaaatatggggaaaaaactgtgccttgtttcaacagtttttgctaatttttaggctgaaagatgacggatgcctagagtttaccttatgtttaattaaaatcagtatttgtct

SEQ ID NO: 6609 - DNA, 705 bp, Homo sapiens
tgatctcatcaatctagcgggagagacaggataacctgtccgagagtatagcgccactatgactccgccggaaaaattactttaaaaatcgccaaaaattacttggagcaaagggcagtcggcggagcttcgccaaggctggcgcagtcggttttgacctgtagcagagaaccaattctggagaacagcctcacttctttgattgaatacttacataatgcattggaacatgacatgagattaagtgtataaagccaaatgtcccatttaaagtttgacatttgcaatagcattctatttaaaaggtttaataatgatagaatgaagaccacaataaaagagacctctacttagctcagcaattcttacctttcttacctatttgatgaagatgtcttttgaaaggtgtactgcaaggaacaaaatgtttgtaaattctccttttaccaaggtggataattactgtaccttcctcatggaaaaagttttatttaaagtgttatttctcattgaatactatcaaaaaggaaaaaaaaatgacctaaacttttgagatagatttggctctagtaagtatttagttatatcacttgcatatctgggagaagaaataagagactatcatcagtacattcccatctactaaaaaaatttattttacacatgtcaagggattacttataacttccattttattactaatag

SEQ ID NO: 6610 - DNA, 2615 bp, Homo sapiens
gggaacaagccccaaccggatcctggacaggcaccccggcttggcgctgtctctccccctcggctcggagaggcccttcggcctgagggagcctcgccgcccgtccccggcacacgcgcagccccggcctctcggcctctgccggagaaacagggcatatgcggccagcaaagaatcacatgccactttggtgtttcataatctcctgggagagattgaccagcagtatagccgcttcctgcaagagtcgaatgttctctatcagcacaatctacgaagaatcaagcagtttcttcagagcaggtatcttgagaagccaatggagattgcccggattgtggcccggtgcctgtgggaagaatcacgccttctacagactgcagccactgcggcccagcaagggggccaggccaaccaccccacagcagccgtggtgacggagaagcagcagatgctggagcagcaccttcaggatgtccggaagagagtgcaggatctagaacagaaaatgaaagtggtagagaatctccaggatgactttgatttcaactataaaaccctcaagagtcaaggagacatgcaagatctgaatggaaacaaccagtcagtgaccaggcagaagatgcagcagctggaacagatgctcactgcgctggaccagatgcggagaagcatcgtgagtgagctggcggggcttttgtcagcgatggagtacgtgcagaaaactctcacggacgaggagctggctgactggaagaggcggcaacagattgcctgcattggaggcccgcccaacatctgcctagatcggctagaaaactggataacgtcattagcagaatctcaacttcagacccgtcaacaaattaagaaactggaggagttgcagcaaaaagtttcctacaaaggggaccccattgtacagcaccggccgatgctggaggagagaatcgtggagctgtttagaaacttaatgaaaagtgcctttgtggtggagcggcagccctgcatgcccatgcatcctgaccggcccctcgtcatcaagaccggcgtccagttcactactaaagtcaggttgctggtcaaattccctgagttgaattatcagcttaaaattaaagtgtgcattgacaaagactctggggacgttgcagctctcagaggatcccggaaatttaacattctgggcacaaacacaaaagtgatgaacatggaagaatccaacaacggcagcctctctgcagaattcaaacacttgaccctgagggagcagagatgtgggaatgggggccgagccaattgtgatgcttccctgattgtgactgaggagctgcacctgatcacctttgagaccgaggtgtatcaccaaggcctcaagattgacctagagacccactccttgccagttgtggtgatctccaacatctgtcagatgccaaatgcctgggcgtccatcctgtggtacaacatgctgaccaacaatcccaagaatgtaaacttttttaccaagcccccaattggaacctgggatcaagtggccgaggtcctgagctggcagttctcctccaccaccaagcgaggactgagcatcgagcagctgactacactggcagagaaactcttgggacctggtgtgaattattcagggtgtcagatcacatgggctaaattttgcaaagaaaacatggctggcaagggcttctccttctgggtctggctggacaatatcattgaccttgtgaaaaagtacatcctggccctttggaacgaagggtacatcatgggctttatcagtaaggagcgggagcgggccatcttgagcactaagcctccaggcaccttcctgctaagattcagtgaaagcagcaaagaaggaggcgtcactttcacttgggtggagaaggacatcagcggtaagacccagatccagtccgtggaaccatacacaaagcagcagctgaacaacatgtcatttgctgaaatcatcatgggctataagatcatggatgctaccaatatcctggtgtctccactggtctatctctatcctgacattcccaaggaggaggcattcggaaagtattgtcggccagagagccaggagcatcctgaagctgacccaggtagcgctgccccatacctgaagaccaagtttatctgtgtgacaccaacgacctgcagcaataccattgacctgccgatgtccccccgcactttagattcattgatgcagtttggaaataatggtgaaggtgctgaaccctcagcaggagggcagtttgagtccctcacctttgacatggagttgacctcggagtgcgctacctcccccatgtgaggagctgagaacggaagctgcagaaagatacgactgaggcgcctacctgcattctgccacccctcacacagccaaaccccagatcatctgaaactactaactttgtggttccagattttttttaatctcctacttctgctatctttgagcaatctgggcacttttaaaaatagagaaatgagtgaatgtgggtgatctgcttttatctaaatgcaaataaggatgtgttctctgagacccatgatcaggggatgtggcggggggtggctagagggag

SEQ ID NO: 6611 - DNA, 3626 bp, Homo sapiens
gggctgcgccgcgcggctggcggaccttcccgggttggagaagtgcgcacgtccgcacctcaccctgcggctgacatctcctgcccaggagatgggcgctgaagcttgagcgcctgagtccctggagccacacctgcgaacaccctttgcttctattgagctgtgcccagccgcccagtgacagaattccagaataaatgattcccactgatccacccacttttgccaccccaggatgcaattttctggagagaagattagtggacaaagagatcttcaaaaatcaaaaatgaggttcacatttacaagccggtgcttggcactgtttcttcttctaaatcacccaaccccaattcttcctgccttttcaaatcaaacctatccaacaatagagcccaagccatttctttacgtcgtaggacgaaagaagatgatggatgcacagtacaaatgctatgaccgaatgcagcagttacccgcataccaaggagaaggtccatattgcaatcgcacctgggatggatggctgtgctgggatgacacaccggctggagtattgtcctatcagttctgcccagattattttccggattttgatccatcagaaaaggttacaaaatactgtgatgaaaaaggtgtttggtttaaacatcctgaaaacaatcgaacctggtccaactatactatgtgcaatgctttcactcctgagaaactgaagaatgcatatgttctgtactatttggctattgtgggtcattctttgtcaattttcaccctagtgatttccctggggattttcgtgtttttcagaaaattgacaactatttttcctttgaattggaaatataggaaggcattgagccttggctgccaaagggtaaccctgcacaagaacatgtttcttacttacattctgaattctatgattatcatcatccacctggttgaagtagtacccaatggagagctcgtgcgaagggacccggtgagctgcaagattttgcattttttccaccagtacatgatggcctgcaactatttctggatgctctgtgaagggatctatcttcatacactcattgtcgtggctgtgtttactgagaagcaacgcttgcggtggtattatctcttgggctgggggttcccgctggtgccaaccactatccatgctattaccagggccgtgtacttcaatgacaactgctggctgagtgtggaaacccatttgctttacataatccatggacctgtcatggcggcacttgtggtcaatttcttctttttgctcaacattgtccgggtgcttgtgaccaaaatgagggaaacccatgaggcggaatcccacatgtacctgaaggctgtgaaggccaccatgatccttgtgcccctgctgggaatccagtttgtcgtctttccctggagaccttccaacaagatgcttgggaagatatatgattacgtgatgcactctctgattcatttccagggcttctttgttgcgaccatctactgcttctgcaacaatgaggtccaaaccaccgtgaagcgccaatgggcccaattcaaaattcagtggaaccagcgttgggggaggcgcccctccaaccgctctgctcgcgctgcagccgctgctgcggaggctggcgacatcccaatttacatctgccatcaggagctgaggaatgaaccagccaacaaccaaggcgaggagagtgctgagatcatccctttgaatatcatagagcaagagtcatctgcttgaatgtgaagcaaacacagcatcgtgatcactgagccatcatttcctgggagaaagaccatgcatttaaagtattctccatcctcccaggaaccgaacatatcatttgtgaagaattattcagtgaatttgtccattgtaaatctgaagaaagttattcttggtactgttgctttgggagacagtctaggaatggagtctcccactgcaacttgtgaactccatcattcatccaggactgagatgcaaatgtcacagtaatgcaagcaaagtatcaaagaaaaacaatgaaattgacctagttcagatacagggtgctccttgtcaatactgagccatttatacctttgaaatattaaaatcactgtcaatatttttatttttaactctggattttgaattagattatttctgtatttggctatggatctgatttttaatttttttaaatttcagtcaattctgatgttactgagatgttttaccatccttacaatgtaaaccacatgaactacgtgacctctgcaagacaaagcggctttctaatagagagattagtaaatatgtgaagaaaaagacctgcatttggcaggaagatgtatgctttgaatgcaaaagaaatttagagtcaatttgctgaaaacattacatgctcagcttggttttggacaagcctgtccattgggcaggacctagctgttgtaaagaattggtcttaatgttgaatgtattttggttgctgatgtttataaactgagaggtcacaaagaatctatcactaaaaatttttacaaaactgccaaaaatataattcttagtggaagacaatactccctttaaagagagtttgccactcccctaaactccaggatttataaagcaaattactccaaggtttataaagcagattacctcttgcccttgggtgctatctagcagtaaaagataaatttgttgaatattggtaattaaaagactccacataagtccattaactgctttccacccagcttcaaagcttaaaaagagctcaggcttttccaggaagatccaggagggctaattagaaatcaacttgtggttgaccgcttgtttcttgttattaccaaaacaggaggggaaaaaattaactgctccaaatttaaccataaatcaattcatgtttaacgtttctcattaaaatccagtattatattatcatatctctctttacttcccagtataagatttttgaaaatcctgaataaaccagtatcgttactggcacctgaaattaatttgtgaatttgcaacagtaatcagagttaccattatttaatttgtatgctaaatgaggaggtacattgaaaccctccaaatctccagtctcatctatgtcatattttgccactgcctttcagaagtgatttagttgtggaaagataataaattgatttgttatggttacatatttagcgcacccagagaaaattaattatatttctacagagaaaatgaatttgggatactaaagtagtttaagtctcctttactgaatgtaagggggggatcgaaaagaaggtatttttccaatcacagtgttatgtagtattgttctatttttgtttacaaacatggaaaacagagtatttctggcagctgtggtacaaatgtgataatatattgctaaaatattttagatgttattatgctaatatagtaggggttgaagaaaacaaaatagcttattatagaattgcacatagttctgcccaaattatgtgaaatgcttatgcttgtgtatatgtataaattaatacagagtacgttaaaagcaaaaagatgtatatttgcatatttttctaaagaaatatattattcatctttt

SEQ ID NO: 6612 - DNA, 453 bp, Homo sapiens
gggttcggtccgagcccggtgggaggctcccggagcgcagcctgggcccagcccaccccgcgccggcggccatggcaggcaccctggacctggacaagggctgcacggtggaggagctgctccgcgggtgcatcgaagccttcgagttaagcggcctccttaaccctctccttcacctaccaacaatcccggaaggacaactccaattccctgcaggtgaaaacgtgccacctggtcaggtactggatctccgccttcccagcggagtttgacttgaacccggagttggctgagcagatcaaggagctgaaggctctgctagaccaagaagggaaccgacggcacagcagcctaatcgacatagacagcgtgtgcgtggggggagcacagagggctgggggggcactcagtatcctataccatctgtgcttaataaatgtctgttgaactgaa

SEQ ID NO: 6613 - DNA, 1306 bp, Homo sapiens
ctctgctggagcaggacttcagagtgtttgttttcagcctgcttttaaagtgatttgaagagagtggctttgaagattatcgcggaacacctgcccattaatcttgaccctgttaaaacaataactgcctatccagatatgccacacttctgcctgctgttggcaaccctcctggactaggctgctcttgttaatcacatggatgttatataagagttcggaccgcccagcacacaaggtcagcatgctgctcctctgtcacgctctcgctatagctgttgtccagatcgttatcttctcagaaagctgggcatttgccaagaacatcaacttctataatgtgaggcctcctctcgaccctacaccatttccaaatagcttcaagtgctttacttgtgaaaacgcaggggataattataactgcaatcgatgggcagaagacaaatggtgtccacaaaatacacagtactgtttgacagttcatcacttcaccagccacggaagaagcacatccatcaccaaaaagtgtgcctccagaagtgaatgtcattttgtcggttgccaccacagccgagattctgaacatacggagtgtaggtcttgctgtgaaggaatgatctgcaatgtagaattacccaccaatcacactaatgcagtgtttgccgtaatgcacgctcagagaacatctggcagcagtgcccccacactctacctaccagtgcttgcctgggtctttgtgcttccattgctgtgatgccaccattcctaggagaggcagagaccagcctctaaagcacaagccaaaaactgtgtgaacggtgaactttggagtgaagatcaatcttgcacttggtgaagagtgcacattggacctcaaggcgaaagccagtggtttgcttggataaaatgttcccgcatgaggccacaggactgaggatgggaatttggcagggcctgagaagatggtctgacttccaggcttcctggtcaaagagagctacgtttgggcagttctgcagagaggatcctggcaactagtcccacctgactaggcctttagctgaaaggatttcttgacctccttgactgcctcagaggctgccaggtcaaaccctcttgtttatgtgattagctcagagcatctctatgaaatctaacccttcccctcatgagaaagcagttttccccaccaacagcatagtcaatgagaaaggcaactgtacgaagaaaacttccagtggaactaatatgaaatctatttgcaaattatggggggaaataaagcttttaaattatacaatgtaaa

SEQ ID NO: 6614 - DNA, 4803 bp, Homo sapiens
gcgcccagcctcgccgccgccgagcgcccgacgcgccacgccgcgctgggcagctggagagctggcggcggagcgggccgggagcggcgggggcggcgccgaggccgcgggcggggggaggagggccgcagccccggagaggggaaaaggcgggccggacggcgccagcagccagccccgaggacgcgagcggcaggtgtgcacagaggttctccactttgttttctgaactcgcggtcaggatggttttctctgtcaggcagtgtggccatgttggcagaactgaagaagttttactgacgttcaagatattccttgtcatcatttgtcttcatgtcgttctggtaacatccctggaagaagatactgataattccagtttgtcaccaccacctgaggttgaaacaacaagcctcaatgatgttactttaagcttactcccttcaaacgaaacagaaaaaactaaaatcactatagtaaaaaccttcaatgcatcaggcgtcaaaccccagagaaatatctgcaatttgtcatctatttgcaatgactcagcattttttagaggtgagatcatgtttcaatatgataaagaaagcactgttccccagaatcaacatataacgaatggcaccttaactggagtcctgtctctaagtgaattaaaacgctcagagctcaacaaaaccctgcaaaccctaagtgagacttactttataatgtgtgctacagcagaggcccaaagcacattaaattgtacattcacaataaaactgaataatacaatgaatgcatgtgctgtaatagctgctttggaaagagtaaagattcgaccaatggaacactgctgctgttctgtcaggataccctgcccttcctccccagaagagttggaaaagcttcagtgtgacctgcaggatcccattgtctgtcttgctgaccatccacgtggcccaccattttcttccagccaatccatcccagtggtgcctcgggccactgtgctttcccaggtccccaaagctacctcttttgctgagcctccagattattcacctgtgacccacaatgttccctctccaataggggagattcaacccctttcaccccagccttcagctcccatagcttccagccctgccattgacatgcccccacagtctgaaacgatctcttcccctatgccccaaacccatgtctccggcaccccacctcctgtgaaagcctcattttcctctcccaccgtgtctgcccctgcgaatgtcaacactaccagcgcacctcctgtccagacagacatcgtcaacaccagcagtatttctgatcttgagaaccaagtgttgcagatggagaaggctctgtccttgggcagcctggagcctaacctcgcaggagaaatgatcaaccaagtcagcagactccttcattccccgcctgacatgctggcccctctggctcaaagattgctgaaagtagtggatgacattggcctacagctgaacttttcaaacacgactataagtctaacctccccttctttggctctggctgtgatcagagtgaatgccagtagtttcaacacaactacctttgtggcccaagaccctgcaaatcttcaggtttctctggaaacccaagctcctgagaacagtattggcacaattactcttccttcatcgctgatgaataatttaccagctcatgacatggagctagcttccagggttcagttcaatttttttgaaacacctgctttgtttcaggatccttccctggagaacctctctctgatcagctacgtcatatcatcgagtgttgcaaacctgaccgtcaggaacttgacaagaaacgtgacagtcacattaaagcacatcaacccgagccaggatgagttaacagtgagatgtgtattttgggacttgggcagaaatggtggcagaggaggctggtcagacaatggctgctctgtcaaagacaggagattgaatgaaaccatctgtacctgtagccatctaacaagcttcggcgttctgctggacctatctaggacatctgtgctgcctgctcaaatgatggctctgacgttcattacatatattggttgtgggctttcatcaatttttctgtcagtgactcttgtaacctacatagcttttgaaaagatccggagggattacccttccaaaatcctcatccagctgtgtgctgctctgcttctgctgaacctggtcttcctcctggactcgtggattgctctgtataagatgcaaggcctctgcatctcagtggctgtatttcttcattattttctcttggtctcattcacatggatgggcctagaagcattccatatgtacctggcccttgtcaaagtatttaatacttacatccgaaaatacatccttaaattctgcattgtcggttggggggtaccagctgtggttgtgaccatcatcctgactatatccccagataactatgggcttggatcctatgggaaattccccaatggttcaccggatgacttctgctggatcaacaacaatgcagtattctacattacggtggtgggatatttctgtgtgatatttttgctgaacgtcagcatgttcattgtggtcctggttcagctctgtcgaattaaaaagaagaagcaactgggagcccagcgaaaaaccagtattcaagacctcaggagtatcgctggccttacatttttactgggaataacttggggctttgccttctttgcctggggaccagttaacgtgaccttcatgtatctgtttgccatctttaataccttacaaggatttttcatattcatcttttactgtgtggccaaagaaaatgtcaggaagcaatggaggcggtatctttgttgtggaaagttacggctggctgaaaattctgactggagtaaaactgctactaatggtttaaagaagcagactgtaaaccaaggagtgtccagctcttcaaattccttacagtcaagcagtaactccactaactccaccacactgctagtgaataatgattgctcagtacacgcaagcgggaatggaaatgcttctacagagaggaatggggtctcttttagtgttcagaatggagatgtgtgccttcacgatttcactggaaaacagcacatgtttaacgagaaggaagattcctgcaatgggaaaggccgtatggctctcagaaggacttcaaagcggggaagcttacactttattgagcaaatgtgattcctttcttctaaaatcaaagcatgatgcttgacagtgtgaaatgtccaattttaccttttacacaatgtgagatgtatgaaaatcaactcattttattctcggcaacatctggagaagcataagctaattaagggcgatgattattattacaagaagaaaccaagacattacaccatggtttttagacatttctgatttggtttcttatctttcattttataagaaggttggttttaaacaatacactaagaatgactcctataaagaaaacaaaaaaaggtagtgaactttcagctaccttttaaagaggctaagttatctttgataacatcatataaagcaactgttgacttcagcctgttggtgagtttagttgtgcatgcctttgttgtatataagctaaattctagtgacccatgtgtcaaaaatcttacttctacatttttttgtatttattttctactgtgtaaatgtattcctttgtagaatcatggttgttttgtctcacgtgataattcagaaaatccttgctcgttccgcaaatcctaaagctccttttggagatgatataggatgtgaaatacagaaacctcagtgaaatcaagaaataatgatcccagccagactgagaaaatgtaagcagacagtgccacagttagctcatacagtgcctttgagcaagttaggaaaagatgcccccactgggcagacacagccctatgggctcatggtttgacaaacagagtggagagaccatattttagccccactcaccctcttgggtgcacgacctgtacagccaaacacagcatccaatatgaatacccatcccctgaccgcatccccagtagtcagattatagaatctgcaccaagatgtttagctttataccttggccacagagagggatgaactgtcatccagaccatgtgtcaggaaaattgtgaacgtagatgaggtacatacactgccgcttctcaaatccccagagcctttaggaacaggagagtagactaggattccttctcttaaaaaggtacatatatatggaaaaaaatcatattgccgttctttaaaaggcaactgcatggtacattgttgattgttatgactggtacactctggcccagccagagctataattgttttttaaatgtgtcttgaagaatgcacagtgacaaggggagtagctattgggaacagggaactgtcctacactgctattgttgctacatgtatcgagccttgattgctcctagttatatacagggtctatcttgcttcctacctacatctgcttgagcagtgcctcaagtacatccttattaggaacatttcaaaccccttttagttaagtctttcactaaggttctcttgcatatatttcaagtgaatgttggatctcagactaaccatagtaataatacacatttctgtgagtgctgacttgtctttgcaatatttcttttctgatttatttaattttcttgtatttatatgttaaaatcaaaaatgttaaaatcaatgaaataaatttgcagttaagatcttt

SEQ ID NO: 6615 - DNA, 7111 bp, Homo sapiens; identical to SEQ ID NO: 3756

SEQ ID NO: 6616 - DNA, 6740 bp, Homo sapiens
gtatccccaggcgccttaacaataagcagcgggttacagaggaaatcgagtctctccgtggcgcttccaggctgaggacccagcgcctaccggccgagcaccccctagggcagaggggcgagggagacccgcgggaaggggcagcaagccgcctgattgacagcccgaaatctgatcttgtgaaagagacgcggagccaatgggaggcagcgatccatcagtttggattggaggcccctggaggagaagtagaggaaaaaccaccgaattgagctctgtcagaggcgctttcggcttccaagggggaagtgctgggctataattaatgtttttattaaatttggagggaagtttttgcagcctttcgcctagcgtggccttcagtcccgttaggtgcaaagcaagtctcgttgatcgccattgctagttttgcacacgtttgcgaatcagagctgcccggggtacaccgaccgcgcagggaaacatcgagagtgtaaataaatacatcgcctcttgttcggatttttgctactaccgaaaatatgtaaattgtgaactctgttggctctctttggatccaggttgatagaagtccagatcctgaggaaatctccagctaaatgctcaaaatataaaatactgagctgagatttgcgaagagcagcagcatggatggattttatgaccagcaagtgccttacatggtcaccaatagtcagcgtgggagaaattgtaacgagaaaccaacaaatgtcaggaaaagaaaattcattaacagagatctggctcatgattcagaagaactctttcaagatctaagtcaattacaggaaacatggcttgcagaagctcaggtacctgacaatgatgagcagtttgtaccagactatcaggctgaaagtttggcttttcatggcctgccactgaaaatcaagaaagaaccccacagtccatgttcagaaatcagctctgcctgcagtcaagaacagccctttaaattcagctatggagaaaagtgcctgtacaatgtcagtgcctatgatcagaagccacaagtgggaatgaggccctccaacccccccacaccatccagcacgccagtgtccccactgcatcatgcatctccaaactcaactcatacaccgaaacctgaccgggccttcccagctcacctccctccatcgcagtccataccagatagcagctaccccatggaccacagatttcgccgccagctttctgaaccctgtaactcctttcctcctttgccgacgatgccaagggaaggacgtcctatgtaccaacgccagatgtctgagccaaacatccccttcccaccacaaggctttaagcaggagtaccacgacccagtgtatgaacacaacaccatggttggcagtgcggccagccaaagctttccccctcctctgatgattaaacaggaacccagagattttgcatatgactcagaagtgcctagctgccactccatttatatgaggcaagaaggcttcctggctcatcccagcagaacagaaggctgtatgtttgaaaagggccccaggcagttttatgatgacacctgtgttgtcccagaaaaattcgatggagacatcaaacaagagccaggaatgtatcgggaaggacccacataccaacggcgaggatcacttcagctctggcagtttttggtagctcttctggatgacccttcaaattctcattttattgcctggactggtcgaggcatggaatttaaactgattgagcctgaagaggtggcccgacgttggggcattcagaaaaacaggccagctatgaactatgataaacttagccgttcactccgctattactatgagaaaggaattatgcaaaaggtggctggagagagatatgtctacaagtttgtgtgtgatccagaagcccttttctccatggcctttccagataatcagcgtccactgctgaagacagacatggaacgtcacatcaacgaggaggacacagtgcctctttctcactttgatgagagcatggcctacatgccggaagggggctgctgcaacccccacccctacaacgaaggctacgtgtattaacacaagtgacagtcaagcagggcgtttttgcgcttttccttttttctgcaagatacagagaattgctgaatctttgttttatttctgttgtttgtattttatttttaaataataatacacaaaaaggggcttttcctgttgcattattctatggtctgccatggactgtgcactttatttgagggtgggtgggagtaatctaaacatttattctgtgtaacaggaagctaatgggtgaatgggcagagggatttggggattactttttacttaggcttgggatggggtcctacaagttttgagtatgatgaaactatatcatgtctgtttgatttcataacaacataagataatgtttattttatcggggtatctatggtacagttaatttcacgttgtgtaaatatccacttggagactatttgccttgggcattttcccctgtcatttatgagtctctgcaggtgtacaaaaaaaccccaatctactgtaaatggcagtttaattgttagaaatgactgtttttgcaccacttgtaaaaaggtatttagcgattgcatttgctgtttgttgttttattttgctttatatatgacttgcagaggataaccataaaatgggtaattctctctgaagttgaataatcaccatgactgtaaatgaggggcacaattttggactctggcgccaaactgagtcataggccagtagcattacgtgtatctggtgccaccttgctgtttagatacaaatcataccgtcttttaaatattttgaagcccatttcagttaaataatgacatgtcatggtcctttggaatcttcatttaaatgttaaatctggaatcaaaatgaagcaaaaaatatctgtctccttttcactttcttcagtacataaatacattatttaatcaataagaattaactgtactaaatcatgtattatgctgttctagttacagcaaacactctttaagaaaaatatccaatacactaaataggtactatagtaatttttagacatggtacccattgatatgcatttaaaccttttactgctgtgttatgttgataacatatataaatattagataatgctaatgcttctgctgctgtcttttctgtaatattctctttcatgctgaatttactatgaccatttataagcagtgcagttaactacagatagcatttcaggacaaaatagatgactcaaaccatttattgcttaaaaaatagcttacgccatgctatgctataagcagcttttatgcacattgacaaatgaagagtaagcttcagcttgctaaaggaaactgtggaaccttttgtaacttttggtgatatggaaaattatttacaaaccgtcaaagaatatgaggaagttgctgtatgacatagtgctggcactgatattatccatcatctctttttggacacttctgtaaatgtgattggattgtttgaaagaagatttaaagtttcaaagttttttgttctgtttttgctttgcatttggagaaaatattgaaagcagggtatgttgtttcattcaccttgaaaaaaccatgagtaaatggggatatagaatctctgaatagctcgctaaaagattcaagcaagggacatgaattttgttccatctatcaataatatccagaagaacaacttttttaaagagtctatagcaaaaagcaaaaaaaaaaaaaaattctaaacacaaagtcaaaataaacctattgtaaaagcatttcgtgatgagcatgaaaaagattgtttaaagatgatccccccagctacccattttccaaaactacacagatcacagctcatttctctaagtggagcagttatcaagaaacccaaacaccaaaattgctactcttcacatttaatcctacaaaaagtactccaatttcaaaatatgtatgtaacctgcgatttcaatgattgttgttcatatacatcatgtattattttggcccattttgggcctaaaaaagaaaactatgccttaaaaatcagaaccttttctccccactatgcttatgtggccatctacagcacttagaataaaaacagatgttaaaatattcagtgaaagttttattggaaaaaggaattgagatatataattgagatttggtgaaattgaaggagaaaatttaagtgagtctttaaaatatattctgaatgaaaactgtattgaggattcatttttgttccttttttttctttttctcttttctcctttttcttctttttaatagtctagttttagtcagtcagtgaggaagaattgggccatgctaacgttatcacaagagaacaatggcagaaatggtattagttatataatatttaaggacaaactatatgttttgctgttttaacgtagtgactcactgaactaaatacataattgaccaacattaagtgtatttccaatacagaagggttgaaaatattacattataaactcttttgaaaaatgtatctaaaattttttaagttctgttttgattccactttttggttgagtttttatgtttttgttttcaggtagattaataaatctggcagctgatttctgcaagattcttgtgttttgaatttctcattgaattggctactcaaacatagaaatcatttgttaatgatgtaatgtcttctctcagcttttatcttcactgctgtttgctgtctcttgatgatgacatgttaatacccaatagattaattgcaacaaacacttatactcaaataactaagtaaaaataatttttcttgttatgtccatgaaaagtgcttcagaataaaaatccacaagactgacagtgcagaacatttttctcaaatcatgggcggatcttggaggtctagtttcccgtagatgctgtaaccaattaccacaacttcagtaatttacacaaatttatcttatagttctggaggcagaagttcaaaagaagccttaagagactaaaaccaagatgtccttaggtctggttccttctggaggctccaggggagattcttccagctttcacttctagagtctgctgacattccttggctcctggctacatcacttcaatctctgcttccatggtcacatactcttctactatagtcaaatttccttcctgcctcttataaggatgcttgtgattacatttaggggatgctcagataatccaggacaatctctccatctcaagatccttaacttaatgacgtgtgccaagtccctttggctagataattattcataggtcccagggattaggacatggatgtaaggggtgagggcagggctgttattcagaacaccgcacggaggaggaagactgtgtagcaaagactctaattgatttactcaggaacagtggagttctgctgagggatctaggatttgaaagtactagagtttgcttttatttaccactgagatattttccccttattctgcataaataattttgaaaactttctatattaaatttcaactattccactaaaatgtctggtaatcacatcaagcctttagattattcaaatccttccccagcccccaggaaaacactaagtcatgaaacagaaaaacagaaggtatgataataatagtaataacagttaaatcagtggtctaatccagattttattttttaatacatttcttttggtgttaatatgggttactatgtgatcttatcatttgctagtgattattacttattaggtaagaacaatgtgtaaaatatgtctattactcaaaagaacaattgcaaaatgagtcaacttatctttatataaccaggaaagaaatatattgccagaagctacagaattttgccagatgatagggatttctaaaatgagccactttgtctatcatgcagccttttcagagcttgtaatgagaaaacattacagaggagaaggtcatttggatgtttgttacttggaatcctagaaaacaaaaactaaaatttaaaaataagaagtgagtaagctattttccatttgcgatttggtatggagaagagaggaaatagaattattaaaaaaatacaaattgggtaaaagtgatggtggaaaaaatataaagaaggcaaatgtacatattaagcaattctactaagaattggaaaaatcaagtttcaaaaagatggtaatagttgggcatgatactagaaaatttcacccagtttattcagagctcaactagtacttttaggacttctttttttatatacatgagactcactttgacatacttaaaaaaaaaacagtttatggaaagtacagtttaagaggagaatttgattagactaagtggatatctttatagaaatattaatgatttcagaattttcagttacaagtgtatataccgtggctattgtttatggattcatatgtaaggtagggtcttttttgcatatagactccagtattagttactttcattctaaaattatatttatgcttctatggggaagaaaatttttaattcacttggttgtattaaaattatacttacggtttgagaaaacatgctatgaaaatcatgattatagcaaattaaatatgctcaaaatttaaatctaaaataaaagcccagaaactgaaaat

SEQ ID NO: 6617 - DNA, 4779 bp, Homo sapiens
gcgcccagcctcgccgccgccgagcgcccgacgcgccacgccgcgctgggcagctggagagctggcggcggagcgggccgggagcggcgggggcggcgccgaggccgcgggcggggggaggagggccgcagccccggagaggggaaaaggcgggccggacggcgccagcagccagccccgaggacgcgagcggcaggtgtgcacagaggttctccactttgttttctgaactcgcggtcaggatggttttctctgtcaggcagtgtggccatgttggcagaactgaagaagttttactgacgttcaagatattccttgtcatcatttgtcttcatgtcgttctggtaacatccctggaagaagatactgataattccagtttgtcaccaccacctgatgttactttaagcttactcccttcaaacgaaacagaaaaaactaaaatcactatagtaaaaaccttcaatgcatcaggcgtcaaaccccagagaaatatctgcaatttgtcatctatttgcaatgactcagcattttttagaggtgagatcatgtttcaatatgataaagaaagcactgttccccagaatcaacatataacgaatggcaccttaactggagtcctgtctctaagtgaattaaaacgctcagagctcaacaaaaccctgcaaaccctaagtgagacttactttataatgtgtgctacagcagaggcccaaagcacattaaattgtacattcacaataaaactgaataatacaatgaatgcatgtgctgtaatagctgctttggaaagagtaaagattcgaccaatggaacactgctgctgttctgtcaggataccctgcccttcctccccagaagagttggaaaagcttcagtgtgacctgcaggatcccattgtctgtcttgctgaccatccacgtggcccaccattttcttccagccaatccatcccagtggtgcctcgggccactgtgctttcccaggtccccaaagctacctcttttgctgagcctccagattattcacctgtgacccacaatgttccctctccaataggggagattcaacccctttcaccccagccttcagctcccatagcttccagccctgccattgacatgcccccacagtctgaaacgatctcttcccctatgccccaaacccatgtctccggcaccccacctcctgtgaaagcctcattttcctctcccaccgtgtctgcccctgcgaatgtcaacactaccagcgcacctcctgtccagacagacatcgtcaacaccagcagtatttctgatcttgagaaccaagtgttgcagatggagaaggctctgtccttgggcagcctggagcctaacctcgcaggagaaatgatcaaccaagtcagcagactccttcattccccgcctgacatgctggcccctctggctcaaagattgctgaaagtagtggatgacattggcctacagctgaacttttcaaacacgactataagtctaacctccccttctttggctctggctgtgatcagagtgaatgccagtagtttcaacacaactacctttgtggcccaagaccctgcaaatcttcaggtttctctggaaacccaagctcctgagaacagtattggcacaattactcttccttcatcgctgatgaataatttaccagctcatgacatggagctagcttccagggttcagttcaatttttttgaaacacctgctttgtttcaggatccttccctggagaacctctctctgatcagctacgtcatatcatcgagtgttgcaaacctgaccgtcaggaacttgacaagaaacgtgacagtcacattaaagcacatcaacccgagccaggatgagttaacagtgagatgtgtattttgggacttgggcagaaatggtggcagaggaggctggtcagacaatggctgctctgtcaaagacaggagattgaatgaaaccatctgtacctgtagccatctaacaagcttcggcgttctgctggacctatctaggacatctgtgctgcctgctcaaatgatggctctgacgttcattacatatattggttgtgggctttcatcaatttttctgtcagtgactcttgtaacctacatagcttttgaaaagatccggagggattacccttccaaaatcctcatccagctgtgtgctgctctgcttctgctgaacctggtcttcctcctggactcgtggattgctctgtataagatgcaaggcctctgcatctcagtggctgtatttcttcattattttctcttggtctcattcacatggatgggcctagaagcattccatatgtacctggcccttgtcaaagtatttaatacttacatccgaaaatacatccttaaattctgcattgtcggttggggggtaccagctgtggttgtgaccatcatcctgactatatccccagataactatgggcttggatcctatgggaaattccccaatggttcaccggatgacttctgctggatcaacaacaatgcagtattctacattacggtggtgggatatttctgtgtgatatttttgctgaacgtcagcatgttcattgtggtcctggttcagctctgtcgaattaaaaagaagaagcaactgggagcccagcgaaaaaccagtattcaagacctcaggagtatcgctggccttacatttttactgggaataacttggggctttgccttctttgcctggggaccagttaacgtgaccttcatgtatctgtttgccatctttaataccttacaaggatttttcatattcatcttttactgtgtggccaaagaaaatgtcaggaagcaatggaggcggtatctttgttgtggaaagttacggctggctgaaaattctgactggagtaaaactgctactaatggtttaaagaagcagactgtaaaccaaggagtgtccagctcttcaaattccttacagtcaagcagtaactccactaactccaccacactgctagtgaataatgattgctcagtacacgcaagcgggaatggaaatgcttctacagagaggaatggggtctcttttagtgttcagaatggagatgtgtgccttcacgatttcactggaaaacagcacatgtttaacgagaaggaagattcctgcaatgggaaaggccgtatggctctcagaaggacttcaaagcggggaagcttacactttattgagcaaatgtgattcctttcttctaaaatcaaagcatgatgcttgacagtgtgaaatgtccaattttaccttttacacaatgtgagatgtatgaaaatcaactcattttattctcggcaacatctggagaagcataagctaattaagggcgatgattattattacaagaagaaaccaagacattacaccatggtttttagacatttctgatttggtttcttatctttcattttataagaaggttggttttaaacaatacactaagaatgactcctataaagaaaacaaaaaaaggtagtgaactttcagctaccttttaaagaggctaagttatctttgataacatcatataaagcaactgttgacttcagcctgttggtgagtttagttgtgcatgcctttgttgtatataagctaaattctagtgacccatgtgtcaaaaatcttacttctacatttttttgtatttattttctactgtgtaaatgtattcctttgtagaatcatggttgttttgtctcacgtgataattcagaaaatccttgctcgttccgcaaatcctaaagctccttttggagatgatataggatgtgaaatacagaaacctcagtgaaatcaagaaataatgatcccagccagactgagaaaatgtaagcagacagtgccacagttagctcatacagtgcctttgagcaagttaggaaaagatgcccccactgggcagacacagccctatgggctcatggtttgacaaacagagtggagagaccatattttagccccactcaccctcttgggtgcacgacctgtacagccaaacacagcatccaatatgaatacccatcccctgaccgcatccccagtagtcagattatagaatctgcaccaagatgtttagctttataccttggccacagagagggatgaactgtcatccagaccatgtgtcaggaaaattgtgaacgtagatgaggtacatacactgccgcttctcaaatccccagagcctttaggaacaggagagtagactaggattccttctcttaaaaaggtacatatatatggaaaaaaatcatattgccgttctttaaaaggcaactgcatggtacattgttgattgttatgactggtacactctggcccagccagagctataattgttttttaaatgtgtcttgaagaatgcacagtgacaaggggagtagctattgggaacagggaactgtcctacactgctattgttgctacatgtatcgagccttgattgctcctagttatatacagggtctatcttgcttcctacctacatctgcttgagcagtgcctcaagtacatccttattaggaacatttcaaaccccttttagttaagtctttcactaaggttctcttgcatatatttcaagtgaatgttggatctcagactaaccatagtaataatacacatttctgtgagtgctgacttgtctttgcaatatttcttttctgatttatttaattttcttgtatttatatgttaaaatcaaaaatgttaaaatcaatgaaataaatttgcagttaagatcttt

SEQ ID NO: 6618 - DNA, 904 bp, Homo sapiens
atcttccagggtacctaacacattgcagatattcatggtatgtttgttaaataaatgaacttgatagatttgaccctcatagagttatttggacttgcaaaaagtttgtagttaactccaatctgtgatgtgggagagacttctaggcaggttcctttctccagggcatgttcttatatttcccattacccaccacccccctgcaaaaggactgggcctatttcaggaaggtgactgatgcctgcactgtagcacaggggttgtgtattgtgccttgcaggaacaaaattttcaataaagtaaatgtttgtttgtttgtttttgagacggagttttgctttttgagccgagatcgcactgctgtacccagcctgggccacagtgcaagactccatctcaaaaaaaaaagaaaagaaaaagcctgtttaatgcacaggtgtgagtggattgcttatggctatgagataggttgatctcgcccttaccccggggtctggtgtatgctgtgctttcctcagcagtatggctctgacatctcttagatgtcccaacttcagctgttgggagatggtgatattttcaaccctacttcctaaacatctgtctggggttcctttagtcttgaatgtcttatgctcaattatttggtgttgagcctctcttccacaagagctcctccatgtttggatagcagttgaagaggttgtgtgggtgggctgttgggagtgaggatggagtgttcagtgcccatttctcattttacattttaaagtcgttcctccaacatagtgtgtattggtctgaagggggtggtgggatgccaaagcctgctcaagttatggacattgtggccaccatgtggcttaaatgattttttctaactaataaagtggaatatatattt

SEQ ID NO: 6619 - DNA, 2348 bp, Homo sapiens
agttagaaaaagcccgggctaggaccgaggagcagggtgagggagggggtgggatgggtggggggtaacgggggaaactggggaagtggggaaccgaggggcaaccaggggaagatggggtgctggaggagagcttgtgggagccaaggagcaccttggacatctggagtctggcaggagtgatgacgggtggaggggctagctcgaggcagggctggtggggcctgaggccagtgaggagtgtggagtaggcgcccaggcatcgtgcagacagggcgacatcagctggggacgatgggcctgagctagggctggaaagaagggggagccaggcattcatcccggtcacttttggttacaggacgtggcagctggttggacgaggggagctggtgggcagggtttgatcccagggcctgggcaacggaggtgtagctggcagcagcgggcaggtgaggaccccatctgccgggcaggtgagtcccttccctccccaggcctcgcttccccagccttctgaaagaaggaggtttaggggatcgagggctggcggggagaagcagacaccctcccagcagaggggcaggatgggggcaggagagttagcaaaggtgacatcttctcggggggagccgagactgcgcaaggctggggggttatgggcccgttccaggcagaaagagcaagagggcagggagggagcacaggggtggccagcgtagggtccagcacgtggggtggtaccccaggcctgggtcagacagggacatggcaggggacacaggacagaggggtccccagctgccacctcacccaccgcaattcatttagtagcaggcacaggggcagctccggcacggctttctcaggcctatgccggagcctcgagggctggagagcgggaagacaggcagtgctcggggagttgcagcaggacgtcaccaggagggcgaagcggccacgggaggggggccccgggacattgcgcagcaaggaggctgcaggggctcggcctgcgggcgccggtcccacgaggcactgcggcccagggtctggtgcggagagggcccacagtggacttggtgacgctgtatgccctcaccgctcagcccctggggctggcttggcagacagtacagcatccaggggagtcaagggcatggggcgagaccagactaggcgaggcgggcggggcggagtgaatgagctctcaggagggaggatggtgcaggcaggggtgaggagcgcagcgggcggcgagcgggaggcactggcctccagagcccgtggccaaggcgggcctcgcgggcggcgacggagccgggatcggtgcctcagcgttcgggctggagacgaggccaggtctccagctggggtggacgtgcccaccagctgccgaaggccaagacgccaggtccggtggacgtgacaagcaggacatgacatggtccggtgtgacggcgaggacagaggaggcgcgtccggccttcctgaacaccttaggctggtggggctgcggcaagaagcgggtctgtttctttacttcctccacggagtcggcacactatggctgccctctgggctcccagaacccacaacatgaaagaaatggtgctacccagctcaagcctgggcctttgaatccggacacaaaaccctctagcttggaaatgaatatgctgcactttacaaccactgcactacctgactcaggaatcggctctggaaggtgaagctagaggaaccagacctcatcagcccaacatcaaagacaccatcggaacagcagcgcccgcagcacccaccccgcaccggcgactccatcttcatggccaccccctgcggcggacggttgaccaccagccaccacatcatcccagagctgagctcctccagcgggatgacgccgtccccaccacctccctcttcttctttttcatccttctgtctctttgtttctgagctttcctgtctttccttttttctgagagattcaaagcctccacgactctgtttcccccgtcccttctgaatttaatttgcactaagtcatttgcactggttggagttgtggagacggccttgagtctcagtacgagtgtgcgtgagtgtgagccaccttggcaagtgcctgtgcagggcccggccgccctccatctgggccgggtgactgggcgccggctgtgtgcccgaggcctcaccctgccctcgcctagtctggaagctccgaccgacatcacggagcagccttcaagcattccattacgccccatctcgctctgtgcccctccccaccagggcttcagcaggagccctggactcatcatcaataaacactgttacagcaa

SEQ ID NO: 6620 - DNA, 723 bp, Homo sapiens
tacctgtacaccttgaatgacaatgctcggagctcccctgtggtcatcgacgcctccactgccattgatgcaccatccaacctgcgtttcctggccaccacacccaattccttgctggtatcatggcagccgccacgtgccaggattaccggctacatcatcaagtatgagaagcctgggtctcctcccagagaagtggtccctcggccccgccctggtgtcacagaggctactattactggcctggaaccgggaaccgaatatacaatttatgtcattgccctgaagaataatcagaagagcgagcccctgattggaaggaaaaagacagttcaaaagacccctttcgtcacccaccctgggtatgacactggaaatggtattcagcttcctggcacttctggtcagcaacccagtgttgggcaacaaatgatctttgaggaacatggttttaggcggaccacaccgcccacaacggccacccccataaggcataggccaagaccatacccgccgaatgtaggtgaggaaatccaaattggtcacatccccagggaagatgtagactatcacctgtacccacacggtccgggactcaatccaaatgcctctacaggacaagaagctctctctcagacaaccatctcatgggccccattccaggacacttctgagtacatcatttcatgtcatcctgttggcactgatgaagaacccttacag

SEQ ID NO: 6621 - DNA, 1966 bp, Homo sapiens
ccagctcctgggggctccaggcatccctgggcttgtggccgcgtcattccaggctctgtctccgtctccacgtggccttctcctctgtgtctgtgtctcctctcctgtctcttagaaggacacctgtcgaccactgcttgagataatttttatgaacagggtgagggtggccccctaactggccaggcttgggccacacccctctcttgggtgattgacaggctttggccacacacccccatcttcagtgattgacaggcctgggcatcattcattacttttctctacatttgcagaagagaatcttggctgaggcaggaggatttcttgagtctaggacttggagaccagcctgagcaacaaactgcaaagcatacgtgctatttccacactcttcttttgcagcagggcaggagccacacactcaaccactttgggttttttttttttttttcaccaaatggcatttcatgttaattcttctggccacagctctgacgtctgaccccaccccagctcaggggcccaagagatgctttagctcatgttccatctgtcttcctgaagaccaggtctcctcctctgtgatggggtgggaggtccgtgacggcaaggcaatgaggggcacgtgcaggcattttaaggaatcgctcttcatccacagctggtcactaaccatgatgagaccactgtccctttccacgacaccagcttcttgctaggaacatctgcctggggtcttttctctccccgaaagcctcttgcagacattctttggaaagtactcctgagctctgtgtgtttgttgaaggctgctcttgtcacacagttgcttgagggcaggtttctcagccttagcactgctgattatcctataatcttgtgcttttcatgctttatctttcttttaaggttcttcctctcttttatttggtatgatgacgctttctctaatttctttgaagtctgttggttaaaacttttcctctcttttctcggtgtattggtttgcgacagctgccataactaaggtggttatagccagaagacaatagctggcaaaaaagggtctgtcaccggcatgcaatccctgctgcccacgaggagatgccttttgtctatttctcatcccaaccctgtaaggtccacccggaacaagactgtagtgatcactgcactcagcatctgaaccctttagaaaggggttcccagggcggaaggagaggagagagggaaggagaggagagagggaaggggagagggaaggagaggggagagggaaggagaaggaaggggaggggagaggggagagggaaggggaggggagaggggagagggaaggagagggaaaataaaaatattagctgggcagggtggcatgcacctgcagtcccaggtactcaggaggattgcttgaggccaggagtttgagaccagcctgggaaatgtagcaaaactgtgtatctataaaaaataaaaatgttagctgggctaacacaggtctattgactcacacacatgttttaagatggaaaactttacttctgttcttggcaggacatggagagagggagggattccaaaaagtctcagcctccatcaaggcgtggcagctgctgcctgcgccattgcaggtcttggcgccgcaggcggggtggggaggggcggggcgagcgccgggggcggggacggggcccgggaggcggagctgggggcggtgcttcaccaagcggccggggcggtgcccgggggggaggcgggcgggggtgtggcctgggcgtggcctcacggggagctcaatggcggcgtggcatgggcgtggcctggcggagagggcaaggaggtgtggcctgggcgtggcctggcggagcggtcaatggcggcgtgacatgggcgtggcctggcggagagggcaatggaggtgtggcctgggcgtggcctgacggagagggcaatggaggcgtgg

SEQ ID NO: 6622 - DNA, 3485 bp, Homo sapiens
cgactggttagacagattttgtttttcttcttcccgcgcgctttagctccctgtcctttggtcgcatttgtgggcgcgcggcacgcagccgggaggccgaggactcggagttcacctgcaggaaagtatgcctcagactcctcccttttcagcaatgtttgacagcagtggttacaatcgaaacctctatcagtctgcagaggacagctgtggagggttgtattaccatgacaacaacctcctctctggatccctggaagcactcatccagcacttagtacctaatgtggattactatccagatagaacatacatatttaccttcctactcagttctcggttatttatgcatccgtatgagctaatggccaaagtttgccacttatgtgttgagcaccagagactaagtgatcctgatagtgataagaaccagatgagaaaaattgcacccaaaatccttcaactcctcacggaatggacggaaacatttccctatgattttcgggatgaaagaatgatgagaaacttaaaagatctggctcaccgaatagccagtggcgaagaggttggtaacctgaatttagcgcggctgctggaattcccaggcagagcctgggtgggaaatggtgccgaattatgcatcctaatctccactgcttcctctctgttttgcctttgggcaagccctccacatcacatattggtctatttagtatgtcaagtgagaatgattataccatcccacttcaaagggatatgatctagagttttatgtgattaatttggggctatgttcatgtcaactcatgcacaggatttatgttgcaagtatgttttaattttactttacttttaccttttttcctcccaaaaaggtttgacacagctagttagatgataaatggcatgttagtagacataaacactagtggatacaaagtaaataacattattctattaaccgaggataaatagtagattaataaatcataaatagaaatagacattctgggccatggcagaaagaaaataaatacgctcctgttgagaatgagtagaggaggacaggactgctgtggtatgagtttaagttccaggtaaaagggaaatacagctggtcatgtaatattcactgtcagaaaaggggaagtatagtaattattgagggacttaaatgaaaaatttagaaactttcttctgaagaactttgtatagggtcatagaatgagatcctacaaactgctctttatggtgtttacaacataccttcctggatagaagctgagttcatagattcatgtgtaaattagcaaagataattcttgggggaggagaagactgagaaaatgaggcaagtcttccagtgctcagaagttgatttaaggatagactctagtataggtagagattaaaagtaagtctcttagataggctttcataaatatcacttccctcagttgagcctttgataagcactaactactagctgtgacaaattcaaggttatcctttttgaagcaggaccagagggctggtattctgtgttgagacttgctgggcaaggatgcccttgtagtttccatgttgcaggtcaacttctgggaacaagtcattcaggcacagatacactttcacctggaaaaagtagatgaagcatttggcaatgatgttgcattttattcgtcttaaaatgcattttccattatgaataaccttccttgagaactctttcagtggtgtgctgcaacgtataacttgataccctatcctttttttctgagacagagccttgctctgttcctcaggctagagtgtagagttgcgatcatggctcactgcatccttgacttctctggcttaatcaatcctcccacctcagcttccctagtagctgggactacaggtgcatgcaactgtgcctggctcgttttttctattttttgtagagacaaagcctcactatgttgcccaggctggtctccaacttttgggctcaagcaatccactttgggaggctgaagcaggcagatcacctgaagtcgggagttcaagaccagcctgaccaccatggagaaaccccatttctaccaaagatacacaattagccaggtgtggtggtgcatgcctataatcccagctacttgggaggctgaggcaggagaattgcttgaacccgggaggcagaaattgtggtgagccaagatcgtgccattgcactccagcctgggcaacaagagtgaaactccgcctcaagaaaaaagaattgcaaaataaaaatctttcagcagatatgctggtaaagcattgcttctcacacttggcttatacaaggatcagctgaggagcatccagagcatgtgacacaagtgcactgcagaccaagtcgatcagaatctctggggtggaacccaggctgcccccattcagcggttctgctcattgcttcccagcaggtacccttgtgtggtaccctgaatagaagtggtaatttcttactaaagtattttctgcagggatcccgggaaggggtgaggagaaggtgcatgatgtaggaatgataacatgcatggaatagcagctgaggcatagaataataaatatttttaaatgagttgttggcttttttaagtgaaaagaactttcttgtgcatgtctcatgcctgtgttatccaaaaaatcccattctgtgggaaaattttaaaacattttatttttaatatatcaagtaatataggaatatattcacttagattttgtttaaaaagaattcatacaaagcaaaagaggccaaaaaactccattcaatccagcttctctcttaaaggtaacaagtgttgtcaattttgtgtgtatccttccggcgctgctcctatgtatacaggtgttcacagaaagtagtgtgtatggcttttgtttccatgtatgtttacctagtattcatcaccctgcttgttttctctgtgttatgtcttggaaacccttccatgtcaatgtaggtagctgtatcttctttcagctgctatacagtagtccagtatgtgattgggccatgtttctttttctttttaaaaactattctattggacacaaacaagttaaatttgtttatactgaaaactcaggcgttttctgagaaagacttagcaaagaagattaagtcccttcttcatatcaaactctgtttagtaaagtagtaacatatagttgtgggttgctcttgtaaacaggctttactgactgtgaaacttcaactttgtaacatgtattttctactctgcacttgatcttagccaaaagggtgagaagcgattctaccctggatagtatatgctgtaattaagtatctccaagaaggtgtttattagccattctgagtaatacactgggaaatatttgcataattattagaagtagtatctaactctcatgtagtcatttgttatgacattttggacaaaggactgaataaaacattttaagttggt

SEQ ID NO: 6623 - DNA, 615 bp, Homo sapiens
ctttggagtataatcgtgaacatattattgtatttcccgaatgggcaaacttcctatgcatccagcaataaactcaccaactacgtgtggtattttgaaggaatctgtttctcaggcatcatgatgcttatagtaacaacagttcttctggtactggagaataataacaactataaatgttgccagagtgaaaactgcagcaaaaaatatgtggtaagagcaacagtttttttgaggatggttgagtgggctccagctttctttcctctcactcagaaacacaaaaatattgacagtattataccctcactactgttgagtacagtacagagatcaagagtttactgccaagatcatcttccattttgcttagtctttcctccacttttgttctactgatgcactttcagaaaatcagcatttaaagatacctaaaattaggaaataatacttttttttcctaactaagtttccattagtctattttttctttacaaactttattgagggctaaattacatataataagtggcatccattaaaattatgcaatatcatgagttttaacagttgactacactcatgaaaccaccattgcagtcaagataacagaat

SEQ ID NO: 6624 - DNA, 1211 bp, Homo sapiens
acagtactcggccacaccatggggcgcccactgcacctcgtcctgctcagtgcctccctggctggcctcctgctgctcggggaaagtctgttcatccgcagggagcaggccaacaacatcctggcgagggtcacgagggccaattcctttcttgaagagatgaagaaaggacacctcgaaagagagtgcatggaagagacctgctcatacgaagaggcccgcgaggtctttgaggacagcgacaagacgaatgaattctggaataaatacaaagatggcgaccagtgtgagaccagtccttgccagaaccagggcaaatgtaaagacggcctcggggaatacacctgcacctgtttagaaggattcgaaggcaaaaactgtgaattatgcatgttgatctttgcactgtgattactttttcatcaaaagccacacagagggatgtggagtgaccgtaatgtgagtgctgctggggcagggggtaccggccatcccggaggtgtgaggggcaggtacctggagcctggcttctggctacaccgggcactgcaccatgagctccccgtgacccgtgaggttgcccttcaaggcaagtgtacctgtcgcctggctctggccctttgctcaacccaatggccgctttgtggctgacaggcaagtggatgtagctggcacccttgggccagcccagcctccatttctccagctgtccccagagccaacgtgcctctcctttgcagtcacacggaagctctgcagcctggacaacggggactgtgaccagttctgccacgaggaacagaactctgtggtgtgctcctgcgcccgcgggtacaccctggctgacaacggcaaggcctgcattcccacagggccctacccctgtgggaaacagaccctggaacgcaggaagaggtcagtggcccaggccaccagcagcagcggggaggcccctgacagcatcacatggaagccatatgatgcagccgacctggaccccaccgagaaccccttcgacctgcttgacttcaaccagacgcagcctgagaggggcgacaacaacctcaccaggatcgtgggaggccaggaatgcaaggacggggagtgtccctggcaggccctgctcatcaatgaggaaaacgagggtttctgtggtggaaccattctgagcgagttctacatcctaacggcagcccactgtctctaccaag

SEQ ID NO: 6625 - DNA, 604 bp, Homo sapiens
gccttagcaagactttcctgtgcatttaagacagaaaaccaaactcgccaggtggtatgtgaccttggaaacccaatgaaggctggaactcaactcttagctggtcttcgtttcagtgtgcaccagcagtcagagatggatacttctgtgaaatttgacttacaaatccaaagctcaaatctatttgacaaagtaagcccagttgtatctcacaaagttgatcttgctgttttagctgcagttgagataagaggagtctcgagtcctgatcatgtctttcttccgattccaaactgggagcacaaggagaaccctgagactgaagaagatgttgggccagttgttcagcacatctatgaggtttgcagttgttagattttactcaaacctcgtgagcaagccaacgaagagaggaacaactaagctactttaaaaaaaaaattctatgtaatttttatgtaaactctacattggttaagtatgtgtcagagatttctttgaatattttccctatacataaattcatttttatttgacaaatagacttgtttaaataaagcagtttatataatttgttgtttaaaataaattagttctacttgaa

SEQ ID NO: 6626 - DNA, 3689 bp, Homo sapiens
gcagggtctcactctgtcacccaggctggagtgcagtggcgcagttatagctcactgcagcctcgacctcctgggctcaagtgatccttccacctcagcctccctagtagctgggaccacaggtggtgacttccaagagtgactccgtcggaggaaaatgactccccagtcgctgctgcagacgacactgttcctgctgagtctgctcttcctggtccaaggtgcccacggcaggggccacagggaagactttcgcttctgcagccagcggaaccagacacacaggagcagcctccactacaaacccacaccagacctgcgcatctccatcgagaactccgaagaggccctcacagtccatgcccctttccctgcagcccaccctgcttcccgatccttccctgaccccaggggcctctaccacttctgcctctactggaaccgacatgctgggagattacatcttctctatggcaagcgtgacttcttgctgagtgacaaagcctctagcctcctctgcttccagcaccaggaggagagcctggctcagggccccccgctgttagccacttctgtcacctcctggtggagccctcagaacatcagcctgcccagtgccgccagcttcaccttctccttccacagtcctccccacacggccgctcacaatgcctcggtggacatgtgcgagctcaaaagggacctccagctgctcagccagttcctgaagcatccccagaaggcctcaaggaggccctcggctgcccccgccagccagcagttgcagagcctggagtcgaaactgacctctgtgagattcatgggggacatggtgtccttcgaggaggaccggatcaacgccacggtgtggaagctccagcccacagccggcctccaggacctgcacatccactcccggcaggaggaggagcagagcgagatcatggagtactcggtgctgctgcctcgaacactcttccagaggacgaaaggccggagcggggaggctgagaagagactcctcctggtggacttcagcagccaagccctgttccaggacaagaattccagccaagtcctgggtgagaaggtcttggggattgtggtacagaacaccaaagtagccaacctcacggagcccgtggtgctcactttccagcaccagctacagccgaagaatgtgactctgcaatgtgtgttctgggttgaagaccccacattgagcagcccggggcattggagcagtgctgggtgtgagaccgtcaggagagaaacccaaacatcctgcttctgcaaccacttgacctactttgcagtgctgatggtctcctcggtggaggtggacgccgtgcacaagcactacctgagcctcctctcctacgtgggctgtgtcgtctctgccctggcctgccttgtcaccattgccgcctacctctgctccagggtgcccctgccgtgcaggaggaaacctcgggactacaccatcaaggtgcacatgaacctgctgctggccgtcttcctgctggacacgagcttcctgctcagcgagccggtggccctgacaggctctgaggctggctgccgagccagtgccatcttcctgcacttctccctgctcacctgcctttcctggatgggcctcgaggggtacaacctctaccgactcgtggtggaggtctttggcacctatgtccctggctacctactcaagctgagcgccatgggctggggcttccccatctttctggtgacgctggtggccctggtggatgtggacaactatggccccatcatcttggctgtgcataggactccagagggcgtcatctacccttccatgtgctggatccgggactccctggtcagctacatcaccaacctgggcctcttcagcctggtgtttctgttcaacatggccatgctagccaccatggtggtgcagatcctgcggctgcgcccccacacccaaaagtggtcacatgtgctgacactgctgggcctcagcctggtccttggcctgccctgggccttgatcttcttctcctttgcttctggcaccttccagcttgtcgtcctctaccttttcagcatcatcacctccttccaaggcttcctcatcttcatctggtactggtccatgcggctgcaggcccggggtggcccctcccctctgaagagcaactcagacagcgccaggctccccatcagctcgggcagcacctcgtccagccgcatctaggcctccagcccacctgcccatgtgatgaagcagagattcggcctcgtcgcacactgcctgtggcccccgagcccggcccagccccaggccagtcagccgcagactttggaaagcccaacgaccatggagagatgggccgttgccatggtggacggactcccgggctgggcttttgaattggccttggggactactcggctctcactcagctcccacgggactcagaagtgcgccgccatgctgcctagggtactgtccccacatctgtcccaacccagctggaggcctggtctctccttacaacccctgggcccagccctcattgctgggggccaggccttggatcttgagggtctggcacatccttaatcctgtgcccctgcctgggacagaaatgtggctccagttgctctgtctctcgtggtcaccctgagggcactctgcatcctctgtcattttaacctcaggtggcacccagggcgaatggggcccagggcagaccttcagggccagagccctggcggaggagaggccctttgccaggagcacagcagcagctcgcctacctctgagcccaggccccctccctccctcagccccccagtcctccctccatcttccctggggttctcctcctctcccagggcctccttgctccttcgttcacagctgggggtccccgattccaatgctgttttttggggagtggtttccaggagctgcctggtgtctgctgtaaatgtttgtctactgcacaagcctcggcctgcccctgagccaggctcggtaccgatgcgtgggctgggctaggtccctctgtccatctgggcctttgtatgagctgcattgcccttgctcaccctgaccaagcacacgcctcagaggggccctcagcctctcctgaagccctcttgtggcaagaactgtggaccatgccagtcccgtctggtttccatcccaccactccaaggactgagactgacctcctctggtgacactggcctagggcctgacactctcctaagaggttctctccaagcccccaaatagctccaggcgccctcggccgcccatcatggttaattctgtccaacaaacacacacgggtagattgctggcctgttgtaggtggtagggacacagatgaccgacctggtcactcctcctgccaacattcagtctggtatgtgaggcgtgcgtgaagcaagaactcctggagctacagggacagggagccatcattcctgcctgggaatcctggaagacttcctgcaggagtcagcgttcaatcttgaccttgaagatgggaaggatgttctttttacgtaccaattcttttgtcttttgatattaaaaagaagtacatgttcattgtagagaatttggaaactgtagaagagaatcaagaagaaaaataaaaatcagctgttgtaatcacctagcaaactgg

SEQ ID NO: 6627 - DNA, 373 bp, Homo sapiens
aaagaggcctgggcttcagttgtggagagggagagagccaggccgccctccccactgttaccaacatgaagctgctcgcagcaactgtgctactcctcaccatctgcagccttgaaggagctttggttcggagacaggcaaaggagccatgtgtggagagcctggtttctcagtacttccagaccgtgactgactatggcaaggacctgatggagaaggtcaagagcccagagcttcaggccgaggccaagtcttactttgttaacttcttgagctatttcgtggaacttggaacacagcctgccacccagtgaagtgtccagaccattgtcttccaaccccagctggcctctagaacacccactggccagtc

SEQ ID NO: 6628 - DNA, 1091 bp, Homo sapiens
gggggcggcagctttgtgctttttagtggccgcgtcccaggatagctggaaggttaggacgctcttgcggtcccagagtggagtggaaggtctggagctttgggaggagacggggaggacagactggaggcgtgttcctccggagttttctttttcgtgcgagccctcgcgcgcgcgtacagtcatcccgctggtctgacgattgtggagaggcggtggagaggcttcatccatcccacccggtcgtcgccggggattggggtcccagcgagacctccccgggagaagcagtgcccaggaggttttctgaagccggggaagctgtgcagccgaagccgccgccgcgccggagcccgggacaccggccaccctccgcgccacccaccctcgccggctccggcttcctctggcccaggcgccgcgcggacccggcagctgtctgcgcacgccgagctccacggtgaaaaaaaagtgaaggtgtaaaagcagcacaagtgcaataagagatatttcctcaaatttgcctcaagatggaaaccctttgcctcagggcatccttttggctggcactggttggatgtgtaatcagtgataatcctgagagatacagcacaaatctaagcaatcatgtggatgatttcaccacttttcgtggcacagagctcagcttcctggttaccactcatcaacccactaatttggtcctacccagcaatggctcaatgcacaactattgcccacagcagactaaaattacttcagctttcaaatacattaacactgtgatatcttgtactattttcatcgtgggaatggtggggaatgcaactctgctcaggatcatttaccagaacaaatgtatgaggaatggccccaacgcgctgatagccagtcttgcccttggagaccttatctatgtggtcattgatctccctatcaatgtatttaagctgctggctgggcgctggccttttgatcacaatgactttggcgtatttctttgcaagctgttcccctttttgcagaagtcctcggtggggatcaccgtcctcaacctctgcgctcttagtgttgacagaaagactgaaatg

SEQ ID NO: 6629 - DNA, 2725 bp, Homo sapiens
agactagatttaagacaggtgaaactgagatgctttcttagtttgtcttagacagatttaagtagctaattgaccgattgtgaagttttccggttgctgataaaactattgagcgggtacagtcgagtagcaacctgtcatccgtgggattggtgcaccatttttctcactgtggaagggcagcaaaggtgtttgctaagtaaaactgagtggatgagattggtatggaaatcatggttgatctctgagcgggatgttagtgtttaagatccacggagtcaggcgcaaaatgagcacatttctctcagtattcagaaatgagtagataatttttttcgtctttgatttttgtcacaatggtgaatgggcagaaaagggaaagatgctctactgcactgtcgattttgaacggagtcacaggctcggtcgctgaatggggactgtcagacccaaactagttacctgcctttgcattccgtgttcgccatccggaatctggggttaaaaaatgtaaatcaaggcaggatggggaagcagaatagcaaactggcccctgaagtgatggaggacctggtgaagagcacagagtttaatgagcatgaactcaagcagtggtacaaaggatttctcaaggactgtccaagtgggaggctaaatctcgaggaatttcagcagctctatgtgaagttctttccttatggagacgcctccaagtttgcccagcatgccttccgaaccttcgacaagaatggggacggcaccattgacttccgagagttcatctgcgctctgtccatcacctccaggggcagctttgagcagaagctgaactgggccttcaatatgtatgacctggatggtgatggcaagatcacccgagtggagatgctggagatcatcgaggctatctacaaaatggtaggcactgtgatcatgatgaaaatgaatgaggatggcctgacgcctgagcagcgagtagacaagattttcagcaagatggataagaacaaagatgaccagattacactggatgaattcaaagaagctgcaaagagcgacccttccattgtattacttctgcagtgcgacatccagaaatgagctgatgtcaatgctatggactgcacaaaagtctcaatgttccattcagtctgcagctattcacacacacacacacacacacacacacacacacacacacacacacaaatattgcttggactacctataaatggacttgcttcttgtgtttgaaacactcgtgtgcatgagaatgtcatttgctaatgaattttaaaagcatatataaaacaaaacaaacaacctgccacaatgtgatatgtgtaatatcatttcataaaaatccctcttcctccaaagcctgggcagaaatgtgctgcaaagagttatatgacttcttgttcatgttttgctaatgctcgtatctccttgattacataatgttagtagcactgagacccccatggtaatgtaacttaattataagctatgtcactaccctcctgtaaaatactattggacagacacagagggacccttggctcctgtgtctggtccacacaccacagaagcttgtattatcagtgaatataaatgtactacatttgcatgccttttgggtttgccttaattcttacctcatttgcatcctatcgatctggaaagagctgttttggatgaatgcagtataaaatgtaaaaaccctgctaaatgacttattgattaagtatatctatctatatatacatatacacaaagatattatttatcgaaagtaaaaaagatggaagtgtattggtttctgtttgaattttcaaaggcttccaatgtggtggcaataaatgtcccaaataaatttataacaattgattttccccctaattcttattttataattttaaaattgcagcagttgctagcaacaacttactaaatctactcttaaatatacaactttggaatttgaagaattaatgacaacaaaagggaaaaaagcaactttccaacttttcatccaggctcccaaaagagggacaacgaacatggcatgtgaaaagtaaaacagatttgttcattccgaaaaaaaaatgttcattctatgacaataaattttatctcagtgtgactttggtgctaacaacgtatgttcagtgcaactacgtggagctgtgcacacacagcaggtaggctgcaggtgtcccccaacataagtcagtaggaaagaagacatctgtcttcccaaatctaaagtaggcaaaaaataacagaagtagctatttttaataacagaacagaactctgactcttttgatcttgaaggaggcagaagagattccatcaaaacctctaaaagcaggtttgcattttcagaacatgcccccctagagagttgagttttttacacagcactacccggtagtactttctctgatgatgggaaggtctacatctgcacagcacgctagctataactgcacatatggctactgagcacttcaagtatggctagcgtgactaaggaactgaattttatactgtaattaagtgtaatttgccacatatagctagtggctttagtaacagacagtttagtgctatattatttattcaagtactttttatcaaattcgttttttaccgaattcgttttttaccattctttatttgtcttaggatcattacataacactaaactagggtctaa

SEQ ID NO: 6630 - DNA, 1909 bp, Homo sapiens
aacggctagcctgaggagctgctgcgacagtccactacctttttcgagagtgactcccgttgtcccaaggcttcccagagcgaacctgtgcggctgcaggcaccggcgcgtcgagtttccggcgtccggaaggaccgagctcttctcgcggatccagtgttccgtttccagcccccaatctcagagcggagccgacagagagcagggaaccggcatggccaaagccgcggcgatcggcatcgacctgggcaccacctactcctgcgtgggggtgttccaacacggcaagggggagcgcaacgtgctcatctttgacctgggcgggggcaccttcgacgtgtccatcctgacgatcgacgacggcatcttcgaggtgaaggccacggccggggacacccacctgggtggggaggactttgacaacaggctggtgaaccacttcgtggaggagttcaagagaaaacacaagaaggacatcagccagaacaagcgagccgtgaggcggctgcgcaccgcctgcgagagggccaagaggaccctgtcgtccagcacccaggccagcctggagatcgactccctgtttgagggcatcgacttctacacgtccatcaccagggcgaggttcgaggagctgtgctccgacctgttccgaagcaccctggagcccgtggagaaggctctgcgcgacgccaagctggacaaggcccagattcacgacctggtcctggtcgggggctccacccgcatccccaaggtgcagaagctgctgcaggacttcttcaacgggcgcgacctgaacaagagcatcaaccccgacgaggctgtggcctacggggcggcggtgcaggcggccatcctgatgggggacaagtccgagaacgtgcaggacctgctgctgctggacgtggctcccctgtcgctggggctggagacggccggaggcgtgatgactgccctgatcaagcgcaactccaccatccccaccaagcagacgcagatcttcaccacctactccgacaaccaacccggggtgctgatccaggtgtacgagggcgagagggccatgacgaaagacaacaatctgttggggcgcttcgagctgagcggcatccctccggcccccaggggcgtgccccagatcgaggtgaccttcgacatcgatgccaacggcatcctgaacgtcacggccacggacaagagcaccggcaaggccaacaagatcaccatcaccaacgacaagggccgcctgagcaaggaggagatcgagcgcatggtgcaggaggcggagaagtacaaagcggaggacgaggtgcagcgcgagagggtgtcagccaagaacgccctggagtcctacgccttcaacatgaagagcgccgtggaggatgaggggctcaagggcaagatcagcgaggccgacaagaagaaggtgctggacaagtgtcaagaggtcatctcgtggctggacgccaacaccttggccgagaaggacgagtttgagcacaagaggaaggagctggagcaggtgtgtaaccccatcatcagcggactgtaccagggtgccggtggtcccgggcctgggggcttcggggctcagggtcccaagggagggtctgggtcaggccccaccattgaggaggtagattaggggcctttccaagattgctgtttttgttttggagcttcaagactttgcatttcctagtatttctgtttgtcagttctcaatttcctgtgtttgcaatgttgaaattttttggtgaagtactgaacttgctttttttccggtttctacatgcagagatgaatttatactgccatcttacgactatttcttctttttaatacacttaactcaggccattttttaagttggttacttcaaagtaaataaactttaaaattcaagtga

SEQ ID NO: 6631 - DNA, 644 bp, Homo sapiens
tcttcttgatcggggattcaggaaggagcccaggagcagaggtcaatttctgctgtcaatgtgattgtggacatctttatgtcttacaggaagtagagagagagacaacatgttacatctgcaccattcttgtttgtgtttcaggagctggctgccagcgatgctcgctgtactgctaagtttggcaccatcagcttccagcgacatttccgcctcccgaccgaacatccttcttctgatggcggacgaccttggcattggggacattggctgctatggcaacaacaccatgaggactccgaatattgaccgccttgcagaggacggcgtgaagctgacccaacacatctctgccgcatctttgtgcaccccaagcagagccgccttcctcacgggcagataccctgtgcgatcagggatggtttccagcattggttaccgtgttcttcagtggaccggagcatctggaggtcttccaacaaatgagacaacttttgcaaaaatactgaaagagaaaggctatgccactggactcattggaaaatggcatctgggtctcaactgtgagtcagccagtgatcattgccaccaccctctccatcatggctttgaccatttctacggaatgcctttctccttgatgg

SEQ ID NO: 6632 - DNA, 682 bp, Homo sapiens
acagacgcggacagcgccgggactcgccgccccgggactcgcgcagcccgcagcgctccggctcctcctctcgcgaccgccctccgcagcgatggacggagacggtgacccagagagcgtgggccagcccgaggaggcaagcccggaggagcagccagaggaggcgagtgctgaggaggagcggccggaggaccagcaggaggaggaggcggcggccgccgccgcgtacctggacgagctgcccgagccgctgctgctgcgcgtgctggccgcactgccggccgccgagctggtgcaggcctgccgcctggtgtgcctgcgctggaaggagctggtggacggcgccccgctgtggctgctcaagtgccagcaggaggggctggtgcccgagggcggcgtggaggaggagcgcgaccactggcagcagttctacttcctgagcaagcggcgccgcaaccttctgcgtaacccgtgtggggaagaggacttggaaggctggtgtgacgtggagcatggtggggacggctggagggtggaggagctgcctggagacagtggggtggagttcacccacgatgagagcgctccagttctcccaggtggtgtcgcaaagcacagagggctactgggaggagctgctggacacgactcagccggccatcgtggtgaaggactggtgaga

SEQ ID NO: 6633 - DNA, 2525 bp, Homo sapiens
ggaaaacggccagcctgaggagctgctgcgagggtccgcttcgtctttcgagagtgactcccgcggtcccaaggctttccagagcgaacctgtgcggctgcaggcaccggcgtgttgagtttccggcgttccgaaggactgagctcttgtcgcggatcccgtccgccgtttccagcccccagtctcagagcggagcccacagagcagggcaccggcatggccaaagccgcggcgatcggcatcgacctgggcaccacctactcctgcgtgggggtgttccaacacggcaaggtggagatcatcgccaacgaccagggcaaccgcaccacccccagctacgtggccttcacggacaccgagcggctcatcggggatgcggccaagaaccaggtggcgctgaacccgcagaacaccgtgtttgacgcgaagcggctgatcggccgcaagttcggcgacccggtggtgcagtcggacatgaagcactggcctttccaggtgatcaacgacggagacaagcccaaggtgcaggtgagctacaagggggagaccaaggcattctaccccgaggagatctcgtccatggtgctgaccaagatgaaggagatcgccgaggcgtacctgggctacccggtgaccaacgcggtgatcaccgtgccggcctacttcaacgactcgcagcgccaggccaccaaggatgcgggtgtgatcgcggggctcaacgtgctgcggatcatcaacgagcccacggccgccgccatcgcctacggcctggacagaacgggcaagggggagcgcaacgtgctcatctttgacctgggcgggggcaccttcgacgtgtccatcctgacgatcgacgacggcatcttcgaggtgaaggccacggccggggacacccacctgggtggggaggactttgacaacaggctggtgaaccacttcgtggaggagttcaagagaaaacacaagaaggacatcagccagaacaagcgagccgtgaggcggctgcgcaccgcctgcgagagggccaagaggaccctgtcgtccagcacccaggccagcctggagatcgactccctgtttgagggcatcgacttctacacgtccatcaccagggcgaggttcgaggagctgtgctccgacctgttccgaagcaccctggagcccgtggagaaggctctgcgcgacgccaagctggacaaggcccagattcacgacctggtcctggtcgggggctccacccgcatccccaaggtgcagaagctgctgcaggacttcttcaacgggcgcgacctgaacaagagcatcaaccccgacgaggctgtggcctacggggcggcggtgcaggcggccatcctgatgggggacaagtccgagaacgtgcaggacctgctgctgctggacgtggctcccctgtcgctggggctggagacggccggaggcgtgatgactgccctgatcaagcgcaactccaccatccccaccaagcagacgcagatcttcaccacctactccgacaaccaacccggggtgctgatccaggtgtacgagggcgagagggccatgacgaaagacaacaatctgttggggcgcttcgagctgagcggcatccctccggcccccaggggcgtgccccagatcgaggtgaccttcgacatcgatgccaacggcatcctgaacgtcacggccacggacaagagcaccggcaaggccaacaagatcaccatcaccaacgacaagggccgcctgagcaaggaggagatcgagcgcatggtgcaggaggcggagaagtacaaagcggaggacgaggtgcagcgcgagagggtgtcagccaagaacgccctggagtcctacgccttcaacatgaagagcgccgtggaggatgaggggctcaagggcaagatcagcgaggcggacaagaagaaggttctggacaagtgtcaagaggtcatctcgtggctggacgccaacaccttggccgagaaggacgagtttgagcacaagaggaaggagctggagcaggtgtgtaaccccatcatcagcggactgtaccagggtgccggtggtcccgggcctgggggcttcggggctcagggtcccaagggagggtctgggtcaggccctaccattgaggaggtggattaggggcctttgttctttagtatgtttgtctttgaggtggactgttgggactcaaggactttgctgctgttttcctatgtcatttctgcttcagctctttgctgcttcacttctttgtaaagttaagttgtaacctgatggtaattagctggcttcattatttttgtagtacaaccgatatgttcattagaattctttgcatttaatgttgatactgtaagggtgtttcgttccctttaaatgaatcaacactgccaccttctgtacgagtttttttttttttttttttttttttttttttgcttggcgaaaacactacaaaggctgggaatgtatgtttttataatttgtttatttaaatatgaaaaataaaatgttaaactttt

SEQ ID NO: 6634 - DNA, 926 bp, Homo sapiens
gtgaatctggtttacaccggctcctgccctgccttcactcttctcccctgattcaagactcctctgctttggactgaagcactgcaggagtttgtgaccaagaacttcaagagtcaagacagaaggaagccaagggagcagtgcaatggatttctcagtaaaggtagacatagagaaggaggtgacctgccccatctgcctggagctcctgacagaacctctgagcctagattgtggccacagcttctgccaagcctgcatcactgcaaagatcaaggagtcagtgatcatctcaagaggggaaagcagctgtcctgtgtgtcagaccagattccagcctgggaacctccgacctaatcggcatctggccaacatagttgagagagtcaaagaggtcaagatgagcccacaggaggggcagaagagagatgtctgtgagcaccatggaaaaaaactccagatcttctgtaaggaggatggaaaagtcatttgctgggtttgtgaactgtctcaggaacaccaaggtcaccaaacattccgcataaacgaggtggtcaaggaatgtcaggtaggctccaagatagaggaagagagagcagagagcagaagatggtacctaatgtgaaatctccactttttttgtcctgctttattccccttgtcaccatagaacggagagccctgtgatctctttccatactctttgcttagtttctgatgcctgaaggacactgctgcacattgttttatttaaaaaagagtacaaatttttagcaaggaaaagttgaatgaatggagaattgctttgtaagataagctttcattgcccctccaagaagaacagtatttttgggaacacgtctggttagatgtgggaagagtggcaatgaaaggacgtctttccttactgcagggtctgctttttc

SEQ ID NO: 6635 - DNA, 3602 bp, Homo sapiens
attacagaggaaggagctcgctatataagccagccaaagttggctgcaccggccacagcctgcctactgtcacccgcctctcccgcgcgcagatacacgcccccgcctccgtgggcacaaaggcagcgctgctggggaactcgggggaacgcgcacgtgggaaccgccgcagctccacactccaggtacttcttccaaggacctaggtctctcgcccatcggaaagaaaataattctttcaagaagatcagggacaactgatttgaagtctactctgtgcttctaaatccccaattctgctgaaagtgagataccctagagccctagagccccagcagcacccagccaaacccacctccaccatgggggccatgactcagctgttggcaggtgtctttcttgctttccttgccctcgctaccgaaggtggggtcctcaagaaagtcatccggcacaagcgacagagtggggtgaacgccaccctgccagaagagaaccagccagtggtgtttaaccacgtttacaacatcaagctgccagtgggatcccagtgttcggtggatctggagtcagccagtggggagaaagacctggcaccgccttcagagcccagcgaaagctttcaggagcacacagtggatggggaaaaccagattgtcttcacacatcgcatcaacatcccccgccgggcctgtggctgtgccgcagcccctgatgttaaggagctgctgagcagactggaggagctggagaacctggtgtcttccctgagggagcaatgtactgcaggagcaggctgctgtctccagcctgccacaggccgcttggacaccaggcccttctgtagcggtcggggcaacttcagcactgaaggatgtggctgtgtctgcgaacctggctggaaaggccccaactgctctgagcccgaatgtccaggcaactgtcaccttcgaggccggtgcattgatgggcagtgcatctgtgacgacggcttcacgggcgaggactgcagccagctggcttgccccagcgactgcaatgaccagggcaagtgcgtaaatggagtctgcatctgtttcgaaggctacgccggggctgactgcagccgtgaaatctgcccagtgccctgcagtgaggagcacggcacatgtgtagatggcttgtgtgtgtgccacgatggctttgcaggcgatgactgcaacaagcctctgtgtctcaacaattgctacaaccgtggacgatgcgtggagaatgagtgcgtgtgtgatgagggtttcacgggcgaagactgcagtgagctcatctgccccaatgactgcttcgaccggggccgctgcatcaatggcacctgctactgcgaagaaggcttcacaggtgaagactgcgggaaacccacctgcccacatgcctgccacacccagggccggtgtgaggaggggcagtgtgtatgtgatgagggctttgccggtgtggactgcagcgagaagaggtgtcctgctgactgtcacaatcgtggccgctgtgtagacgggcggtgtgagtgtgatgatggtttcactggagctgactgtggggagctcaagtgtcccaatggctgcagtggccatggccgctgtgtcaatgggcagtgtgtgtgtgatgagggctatactggggaggactgcagccagctacggtgccccaatgactgtcacagtcggggccgctgtgtcgagggcaaatgtgtatgtgagcaaggcttcaagggctatgactgcagtgacatgagctgccctaatgactgtcaccagcacggccgctgtgtgaatggcatgtgtgtttgtgatgacggctacacaggggaagactgccgggatcgccaatgccccagggactgcagcaacaggggcctctgtgtggacggacagtgcgtctgtgaggacggcttcaccggccctgactgtgcagaactctcctgtccaaatgactgccatggccagggtcgctgtgtgaatgggcagtgcgtgtgccatgaaggatttatgggcaaagactgcaaggagcaaagatgtcccagtgactgtcatggccagggccgctgcgtggacggccagtgcatctgccacgagggcttcacaggcctggactgtggccagcactcctgccccagtgactgcaacaacttaggacaatgcgtctcgggccgctgcatctgcaacgagggctacagcggagaagactgctcagaggtgtctcctcccaaagacctcgttgtgacagaagtgacggaagagacggtcaacctggcctgggacaatgagatgcgggtcacagagtaccttgtcgtgtacacgcccacccacgagggtggtctggaaatgcagttccgtgtgcctggggaccagacgtccaccatcatccaggagctggagcctggtgtggagtactttatccgtgtatttgccatcctggagaacaagaagagcattcctgtcagcgccagggtggccacgtacttacctgcacctgaaggcctgaaattcaagtccatcaaggagacatctgtggaagtggagtgggatcctctagacattgcttttgaaacctgggagatcatcttccggaatatgaataaagaagatgagggagagatcaccaaaagcctgaggaggccagagacctcttaccggcaaactggtctagctcctgggcaagagtatgagatatctctgcacatagtgaaaaacaatacccggggccctggcctgaagagggtgaccaccacacgcttggatgcccccagccagatcgaggtgaaagatgtcacagacaccactgccttgatcacctggttcaagcccctggctgagatcgatggcattgagctgacctacggcatcaaagacgtgccaggagaccgtaccaccatcgatctcacagaggacgagaaccagtactccatcgggaacctgaagcctgacactgagtacgaggtgtccctcatctcccgcagaggtgacatgtcaagcaacccagccaaagagaccttcacaacaggcctcgatgctcccaggaatcttcgacgtgtttcccagacagataacagcatcaccctggaatggaggaatggcaaggcagctattgacagttacagaattaagtatgcccccatctctggaggggaccacgctgaggttgatgttccaaagagccaacaagccacaaccaaaaccatcactgccaagttcacaacagacctcgattctccaagagacttgactgctactgaggttcagtcggaaactgccctccttacctggcgacccccccgggcatcagtcaccggttacctgctggtctatgaatcagtggatggcacagtcaaggaagtcattgtgggtccagataccacctcctacagcctggcagacctgagcccaccatccctttttttacatttcatacaacagaaaccagaaaagcaatactgtttccattttaaggatatgattaatattattaatataataatgatgatgatgatgatgaaaactaaggatttttcaagagatctttctttccaaaacatttctggacagtacctgattgtattttttttttaa

SEQ ID NO: 6636 - DNA, 476 bp, Homo sapiens
aaagtatttacttgtattgacatttactctttgatgtcatcaaggcctaagtctgctttgctttcagacaggatatctgcagagctcacgacaaatgtgataccttaggcctggctgaactgggaaccatttgtgatccctatagaagctgttctattagtgaagatagtggattgagtacagcttttacgatcgcccatgagctgggccatgtgtttaacatgcctcatgatgacaacaacaaatgtaaagaagaaggagttaagagtccccagcatgtcatggctccaacactgaacttctacaccaacccctggatgtggtcaaagtgtagtcgaaaatatatcactgagtttttagagtaagacttgaacattcttttagcacaaacttctagtgcctggcctacatgtagtgaactaattgtgggaaagacaatatgaagtcaaacattccttttgagttatttttgttga

SEQ ID NO: 6637 - DNA, 761 bp, Homo sapiens
agagtggactgagcagccagtaggggagagagcagttaaggcacacagagcaccagctccctcctgcctgaagatgttccaccaaatttgggcagctctgctctacttctatggtattatccttaactccatctaccagtgccctgagcacagtcaactgacaactctgggcgtggatgggaaggagttcccagaggtccacttgggccagtggtactttatcgcaggggcagctcccaccaaggaggagttggcaacttttgaccctgtggacaacattgtcttcaatatggctgctggctctgccccgatgcagctccaccttcgtgctaccatccgcatgaaagatgggctctgtgtgccccggaaatggatctaccacctgactgaagggagcacagatctcagaactgaaggccgccctgacatgaagactgagctcttttccagctcatgcccaggtggaatcatgctgaatgagacaggccagggttaccagcgctttctcctctacaatcgctcaccacatcctcccgaaaagtgtgtggaggaattcaagtccctgacttcctgcctggactccaaagccttcttattgactcctaggaatcaagaggcctgtgagctgtccaataactgacctgtaacttcatctaagtccccagatgggtacaatgggagctgagttgttggagggagaagctggagacttccagctccagctcccactcaagataataaagataatttttcaatcctca

SEQ ID NO: 6638 - DNA, 1025 bp, Homo sapiens
cagatctctgggtgctgggcggtcatggcgctactagatgtatgcggagccccccgagggcagcggccggaatcggctctcccggttgcgggaagcgggcgtcgctcggacccaggacactacagtttctctatgcgatctccagagctcgctttaccccggggaatgcagcccacagaattcttccagtccctgggtggggacggagaaaggaacgttcagattgagatggcccatggcaccaccacgctcgccttcaagttccagcatggagtgattgcagcagtggattctcgggcctcagctgggtcctacattaactgtcagtactgggagcgcctgctggccaaggaatgcaggctgtactatctgcgaaatggagaacgtatttcagtgtcggcagcctccaagctgctgtccaacatgatgtgccagtaccggggcatgggcctctctatgggcagtatgatctgtggctgggataagaagggtcctggactctactacgtggatgaacatgggactcggctctcaggaaatatgttctccacgggtagtgggaacacttatgcctacggggtcatggacagtggctatcggcctaatcttagccctgaagaggcctatgaccttggccgcagggctattgcttatgccactcacagagacagctattctggaggcgttgtcaatatgtaccacatgaaggaagatggttgggtgaaagtagaaagtacagatgtcagtgacctgctgcaccagtaccgggaagccaatcaataatggtggtggtggcagctgggcaggtctcctctgggaggtcttggccgactcagggacctaagccacgttaagtccaaggagaagaagaggcctagcctgagccaaagagagagtacgggctcagcagccagaggaggccggtgaagtgcatcttctgcgtgttctctatttgaacaagcatttcccccagggaagtttctgggtgccccactaagtagaataaagaaaaacggttataaata

SEQ ID NO: 6639 - DNA, 1583 bp, Homo sapiens
aacatttccaaatcttggcattcttatccacaaagtgaagataataattgtcaattcacaggtgattatgatttaaagagattacttttgaagagttcctaacacattcagtcaacatttaatgatgcttcaggcactgtgttcattgctagtgagcgtatgacacacacagccatacggtcacagagctttcaatgaaaagtaacataattgctcatttcaccaggcccccggcttggggcgccttccttccccatggcgggacacctggcttcggatttcgccttctcgccccctccaggcggtgggggtgatgggccatggggggcggagccgggctgggttgatcctctgacctggctaagcttccaaggccctcctggagggccaggaatcgggccgggggttgggccaggctctgaggtgtgggggattcccccttgccccccgccgtatgagttatgtggggggatggcgtactgtgggcctcaggttggagtggggctagtgccccaaggcggcttggagacctctcagcctgagagcgaagcaggagtcggggtggagagcaactccaatggggcctccccggaaccctgcaccgtcccccctggtgccgtgaagctggagaaggagaagctagagcaaaacccggagaagtcccaggacatcaaagctctgcagaaagaactcgagcaatttgccaagctcctgaagcagaagaggatcaccctgggatatacacaggccgatgtggggctcatcctgggggttctatttgggaaggtgttcagccaaaagaccatctgccgctttgaggctctgcagcttagcttcaagaacatgtgtaagctgcggcccttgctgcagaagtgggtggaggaagctgacaacaatgaaaatcttcaggagatatgcaaagcagaaaccctcatgcaggcccgaaagagaaagcgaaccagtatcgagaaccgagtgagaggcaacctggagaatttgttcctgcagtgcccgaaacccacactgcagatcagccacatcgcccagcagcttgggctcgagaaggatgtggtccgagtgtggttctgtaaccggcgccagaagggcaagcgatcaagcagcgactatgcacaacgagaggattttgaggctgctgggtctcctttctcagggggaccagtgtcctttcctccggccccagggccccattttggtaccccaggctatgggagccctcacttcactgcactgtactcctcagtccctttccctgagggggaagtctttcccccagtctccgtcatcactctgggctctcccatgcattcaaactgaggtgcctgcccttctaggaatggggaacaggggaggggaggagctagggaaagagaacctggagtttgtggcagggcttttgggattaagttcttcattcactaaggaaggaattgggaacactaagggtgggggcaggggagtttggggcaactggttggagggaaggtgaagttcaatgatgctcttgattttaatcccacatcatgtatcacttttttcttaaataaagaagcctgggacacagt

SEQ ID NO: 6640 - DNA, 8240 bp, Homo sapiens
tgttgtgcgggttaatacaacaaactgtcacaagtgtttgttgtccgggacgtacattttcgcggtcctgctagtatgcgtggtgttccactctggcgcccaggagaaaaactacaccatccgagaagaaattccagaaaacgtcctgataggcaacttgttgaaagaccttaacttgtcgctgattccaaacaagtccttgacaactactatgcagttcaagctagtgtacaagaccggagatgtgccactgattcgaattgaagaggatactggtgagatcttcactaccggcgctcgcattgatcgtgagaaattatgtgctggtatcccaagggatgagcattgcttttatgaagtggaggttgccattttgccggatgaaatatttagactggttaagatacgttttctgatagaagatataaatgataatgcaccattgttcccagcaacagttatcaacatatcaattccagagaactcggctataaactctaaatatactctcccagcggctgttgatcctgacgtaggcataaacggagttcaaaactacgaactaattaagagtcaaaacatttttggcctcgatgtcattgaaacaccagaaggagacaagatgccacaactgattgttcaaaaggagttagatagggaagagaaggatacctatgtgatgaaagtaaaggttgaagatggtggctttcctcaaagatccagtactgctattttgcaagtaagtgttactgatacaaatgacaaccacccagtctttaaggagacagagattgaagtcagtataccagaaaatgctcctgtaggcacttcagtgacacagctccatgccacagatgctgacataggtgaaaatgccaagatccacttctctttcagcaatctagtctccaacattgccaggagattatttcacctcaatgccaccactggacttatcacaatcaaagaaccactggatagggaagaaacaccaaaccacaagttactggttttggcaagtgatggtggattgatgccagcaagagcaatggtgctggtaaatgttacagatgtcaatgataatgtcccatccattgacataagatacatcgtcaatcctgtcaatgacacagttgttctttcagaaaatattccactcaacaccaaaattgctctcataactgtgacggataaggatgcggaccataatggcagggtgacatgcttcacagatcatgaaattcctttcagattaaggccagtattcagtaatcagttcctcctggagaatgcagcatatcttgactatgagtccacaaaagaatatgccattaaattactggctgcagatgctggcaaacctcctttgaatcagtcagcaatgctcttcatcaaagtgaaagatgaaaatgacaatgctccagttttcacccagtctttcgtaactgtttctattcctgagaataactctcctggcatccagttgatgaaagtaagtgcaacggatgcagacagtgggcctaatgctgagatcaattacctgctaggccctgatgctccacctgaattcagcctggatcgtcgtacaggcatgctgactgtagtgaagaaactagatagagaaaaagaggataaatatttattcacaattctggcaaaagataatggggtaccacccttaaccagcaatgtcacagtctttgtaagcattattgatcagaatgacaatagcccagttttcactcacaatgaatacaaattctatgtcccagaaaaccttccaaggcatggtacagtaggactaatcactgtaactgatcctgattatggagacaattctgcagttacgctctccattttagatgagaatgatgacttcaccattgattcacaaactggtgtcatccgaccaaatatttcatttgatagagaaaaacaagaatcttacactttctatgtaaaggctgaggatggtggtagagtatcacgttcttcaagtgccaaagtaaccataaatgtggttgatgtcaatgacaacaaaccagttttcattgtccctccttacaactattcttatgaattggttctaccgtccactaatccaggcacagtggtctttcaggtaattgctgttgacaatgacactggcatgaatgcagaggttcgttacagcattgtaggaggaaacacaagagatctgtttgcaatcgaccaagaaacaggcaacataacattgatggagaaatgtgatgttacagaccttggtttacacagagtgttggtcaaagctaatgacttaggacagcctgattctctcttcagtgttgtaattgtcaatctgttcgtgaatgagtcagtgaccaatgctacactgattaatgaactggtgcgcaaaagcattgaagcaccagtgaccccaaatactgagatagctgatgtatcctcaccaactagtgactatgtcaagatcctggttgcagctgttgctggcaccataactgtcgttgtagttattttcatcactgctgtagtaagatgtcgccaggcaccacaccttaaggctgctcagaaaaacatgcagaattctgaatgggctaccccaaacccagaaaacaggcagatgataatgatgaagaaaaagaaaaagaagaagaagcattcccctaagaacctgctgcttaatgttgtcactattgaagaaactaaggcagatgatgttgacagtgatggaaacagagtcacactagaccttcctattgatctagaagagcaaacaatgggaaagtacaattgggtaactacacctactactttcaagcctgacagccctgatttggcccgacactacaaatctgcctctccacagcctgccttccaaattcagcctgaaactcccctgaatttgaagcaccacatcatccaagaactgcctctcgataacacctttgtggcctgtgactctatctccaattgttcctcaagcagttcagatccctacagcgtttctgactgtggctatccagtgacaaccttcgaggtacctgtgtccgtacacaccagaccgtcccagcggcgtgtcacatttcacctgccagaaggctctcaggaaagcagcagtgatggtggactgggagaccatgatgcaggcagccttaccagcacatcccatggcctgccccttggctatcctcaggaggagtactttgatcgtgctacacccagcaatcgcactgaaggggatggcaactccgatcctgaatctactttcatacctggactaaagaaagaaataactgttcaaccaactgtggaagaggcctctgacaactgcactcaagaatgtctcatctatggccattctgatgcctgctggatgccggcatctctggatcattccagctcttcacaagcacaggcctctgctctatgccacagcccaccactgtcacaggcctctactcagcaccacagcccaccagtgacacagaccattgttctctgccacagccctccagtgacacagaccatcgcattgtgccacagcccaccaccgatacaggtgtctgctctccaccacagtcctcctctagtgcagggtactgcacttcaccacagcccaccatcagcacaggcctcagccctctgctacagccctcctttagcacaggctgctgcaatcagccacagctcttctctgccacaggttattgccctccatcgtagtcaggcccaatcatcagtcagtttgcagcaaggttgggtgcaaggtgctaatggactatgctctgttgatcagggagtgcaaggtagtgcaacatctcagttttacaccatgtctgaaagacttcatcccagtgatgattcaattaaagtcattcctttgacaaccttcgctccacgccaacaggccagaccgtccagaggtgattcccccattatggaaacacatcccttgtaaagctaaaatagttacttcaaattttcagaaaagatgtatatagtcaaaatttaagatacaattccaatgagtattctgattatcagatttgtaaataactatgtaaatagaaacagataccagaataaatctacagctagacccttagtcaatagttaaccaaaaaattgcaatttgtttaattcagaatgtgtatttaaaaagaaaaggaatttaacaatttgcatccccttgtacagtaaggcttatcatgacagagcgtactatttctgatgtacagtattttttgttgtttttatcatcatgtgcaatattactgatttgtttccatgctgattgtgtggaaccagtatgtagcaaatggaaagcctagaaatatcttattttctaagtttacctttagtttacctaaacttttgttcagataatgttaaaaggtatacgtactctagccttttttggggctttctttttgatttttgtttgtggttttcagtttttttgttgttgttagtgagtctcccttcaaaatacacagtaggtagtgtaaatactgcttgtttgtgtctctctgctgtcatgttttctaccttattccaatactatattgttgataaaatttgtatatacattttcaataaagaatatgtataaactgtacagatctagatctacaacctatttctctactctttagtagagttcgagacacagaagtgcaataactgccctaattaagcaactatttgttaaaaagggcccctttttactttaatagtttagtgtaaagtacatcagaaataaaactgtatctgacattttaagcctgtagtccattattacttgggtctttacttctgggaatttgtatgtaacagcctagaaaattaaaaggaggtggatgcatccaaagcacgagtcacttaaaatatcgacggtaaactactattttgtagagaaactcaggaagatttaaatgttgatttgacagctcaataggctgttaccaaagggtgttcagtaaaaataacaaatacatgtaactgtagataaaaccacatactaaatctataagactaagggatttttgttattctagctcaacttactgaagaaaaccactaataacaacaagaatatcaggaaggaacttttcaagaaatgtaattataaatctacatcaaacagaattttaaggaaaaatgcagagggagaaataaggcacatgactgcttcttgcagtcaagaagaaataccaataacacacacagaacaaaaaccatcaaaatctcatatatgaaataaaatatattcttctaagcaaagaaacagtactattcatagaaaacattagttttctcctgttgtctgttatttccttcttttatcctcttaactggccattatcttgtatgtgcacattttataaatgtacagaaacatcaccaacttgattttcttccatagcaaaactgagaaaataccttgtttcagtataacactaaaccaagagacaattgatgtttaatgggggcggttggggttgggggggagtcaatatctcctattgattaacttagacatagattttgtaatgtataacttgatatttaatttatgattaaactgtaattttgtaacataaactgtggtaattgcataatttcattggtgaggatttcctttgaatattgagaaagtttcttttcatgtgcccagcaggttaagtagcgttttcagaatatacattattcccatccattgtaaagttccttaagtcatatttgactgggcgtgcagaataacttcttaactattaactatcagagtttgattaataaaattaattaattttttttctccttcgtgttgttaatgttccaagggatttggagcatactggttttccaggtgcatgtgaatcccgaaggactgatgatatttgaatgtttattaaattattatcacacaaatgtgttgatattgtggctattgttgatgttgaaaattgtaaacttggggaagattaagaaaagaaccaatagtgacaaaaatcagtgcttccagtagattttagaacattctttgcctcaaaaaacctgcaaagatgatgtgagattttttcttgtgttttaattattttcacattttctctctgcaaacctttagttttctgatgatctacacacacacatacacacacacacacacacacgtgcacacacacacatttaaaggatataaaaagaagaggttgaaagattattaaataacttatcaggcatctcaatggttactatctatgttagtgaaaatcaaataggactcaaagttggatatttgggatttttcttctgacagtataatttattgagttactagggaggttcttaaatcctcatatctggaaacttgtgaagttttgacacctttcctatagatataggaatgaaccaatacgcttttattaccctttctaactctgattttataatcagacttagattgtgtttagaatattaaatgactgggcaccctcttcttggtttttaccagagaggctttgaatggaagcaggctgagagtagccaaagaggcaaggggtattagcccagttattctcccctatgccttctcttcctaagcgtccactaggtctggccttggaaatctgttacttctacggcttcagatctgatgatatctttttcatcacattacaagttatttctttgactgaatagacagtggtataggttgacacagcacacaagtggctattgtgatgtatgatgtatgtagtcccacaactgcaaaacgtcttactgaagcaacaatcgaaaaatggttctgttttaaaaaggattttgtttgatttgaaattaaaacttcaaactgaatgacttatatgagaataatatgttcaatcaaagtagttattctattttgtgtccatattccattagattgtgattattaattttctagctatggtattactatatcacacttgtgagtatgtattcaaatactaagtatcttatatgctacgtgcatacacattcttttcttaaactttacctgtgttttaactaatattgtgtcagtgtattaaaaattagcttttacatatgatatctacaatgtaataaatttagagagtaattttgtgtattcttatttacttaacattttacttttaattatgtaaatttggttagaaaataataataaatggttagtgctattgtgtaatggtagcagttacaaagagcctctgccttcccaaactaatatttatcacacatggtcattaaatgggaaaaaaatagactaaacaaatcacaaattgttcagttcttaaaatgtaattatgtcacacacacaaaaaaatccttttcaatcctgagaaaattaaaggtgttttactcacatggatatttcaacattagttttttttgtttgtttctttttcatggtattactgaaggtgtgtatactccctaatacacatttatgaaaatctacttgtttagacttttatttatactcttctgatttatattttttattataattattatttcttatcttcttttatattttttggaaaccaaatttatagttagtttaggtaaactttttattatgaccattagaaactattttgaatgtttccaactggctcaattggctgggaaaacatgggaacaagagaagctgaaatatatttctgcaagaacctttctatattatgtgccaattaccacaccagatcaattttatgcagaggccttaaaatattctttcacagtagctttcttacactaaccgtcatgtgcttttagtaaatatgatttttaaaagcagttcaagttgacaacagcagaaacagtaacaaaaaaatctgctcagaaaaatgtatgtgcacaaataaaaaaaattaatggcaattgtttagtgactgtaagtgatactttttaaagagtaaactgtgtgaaatttatactatccctgcttaaaatattaagatttttatgaaatatgtatttatgtttgtattgtgggaagattcctcctctgtgatatcatacagcatctgaaagtgaacagtatcccaaagcagttccaagcatgctttggaagtaagaaggttgactattgtatggccaaggatggcagtatgtaatccagaagcaaacttgtattaattgttctatttcaggttctgtattgcatgttttcttattaatatatattaataaaagttatgagaaataaa

SEQ ID NO: 6641 - DNA, 5476 bp, Homo sapiens
gggcctctgggggcggccccggggcgggccacgctggtgtgagggctgcaggcgcagctccggagcgcctagagcgcggcgcggggcgggagcttggtggagcaggagcggctgggcatcctcctgagactccggggtcagacgcccactccagatttctttaaagactcgtgcagcacatcattatcgctggatgcccggacatgtaatacacctgacagcatgtgaagtgctcagaatggggcaggatgtcacctggaatcagcactaagtgattcagactttccttacttttaaatgtgctgctcttcatttcaagatgccgttgcagctctgataaatgcaaactgacaaccttcaaggccacgacggagggaaaatcattggtgcttggagcatagaagactgcccttcacaaaggaaatccctgattattgtttgaaatgctgaggacgttgctgcgaaggagacttttttcttatcccaccaaatactactttatggttcttgttttatccctaatcaccttctccgttttaaggattcatcaaaagcctgaatttgtaagtgtcagacacttggagcttgctggggagaatcctagtagtgatattaattgcaccaaagttttacagggtgatgtaaatgaaatccaaaaggtaaagcttgagatcctaacagtgaaatttaaaaagcgccctcggtggacacctgacgactatataaacatgaccagtgactgttcttctttcatcaagagacgcaaatatattgtagaaccccttagtaaagaagaggcggagtttccaatagcatattctatagtggttcatcacaagattgaaatgcttgacaggctgctgagggccatctatatgcctcagaatttctattgcattcatgtggacacaaaatccgaggattcctatttagctgcagtgatgggcatcgcttcctgttttagtaatgtctttgtggccagccgattggagagtgtggtttatgcatcgtggagccgggttcaggctgacctcaactgcatgaaggatctctatgcaatgagtgcaaactggaagtacttgataaatctttgtggtatggattttcccattaaaaccaacctagaaattgtcaggaagctcaagttgttaatgggagaaaacaacctggaaacggagaggatgccatcccataaagaagaaaggtggaagaagcggtatgaggtcgttaatggaaagctgacaaacacagggactgtcaaaatgcttcctccactcgaaacacctctcttttctggcagtgcctacttcgtggtcagtagggagtatgtggggtatgtactacagaatgaaaaaatccaaaagttgatggagtgggcacaagacacatacagccctgatgagtatctctgggccaccatccaaaggattcctgaagtcccgggctcactccctgccagccataagtatgatctgtctgacatgcaagcagttgccaggtttgtcaagtggcagtactttgagggtgatgtttccaagggtgctccctacccgccctgcgatggagtccatgtgcgctcagtgtgcattttcggagctggtgacttgaactggatgctgcgcaaacaccacttgtttgccaataagtttgacgtggatgttgacctctttgccatccagtgtttggatgagcatttgagacacaaagctttggagacattaaaacactgaccattacgggcaattttatgaacaagaagaaggatacacaaaacgtacccttatctgtttccccttccttgtcagcatcgggaagatggtatgaagtcctctttggggcagggactctagtagatcttcttgtcagagaagctgcatggtttctgcagagcacagttagctagaaaggtgatagcattaaatgttcatctagagttaatagtgggaggagtaaaggtagccttgaggccagagcaggtagcaaggcattgtggaaagaggggaccagggtggctggggaagaggccgatgcataaagtcagcctgttcaaagtgctcagggacttagcaaaatgagaagatgtgacctgtgccaaaactattttgagaattttaaatgtgaccatttttctggtatgaataaacttacagcaacaaataatcaaagatacaattaatctgatattatatttgttgaaatagaaatttgattgtactataaatgatttttgtaaataatttatattctgctctaatactgtactgtgtagtgtgtctccgtatgtcatctcagggagcttaaaatgggcttgatttaacattgtttttgtgttatttttgcttgaaacaacgcacacattttcaacaaccaaaaaatgacaatttctagtttagttaatttctacaaatcatcttatgttattagcaaggttaagacatcttttttaaaaaaattatagcttctaccaagagaaacactcaatttttctagagatttgcctctatcttcctttcctcagtcttcccagactgctatcaagctgtgtaaaaatttactttcactggaccctaaattattgtctctgctatctgactgccagtaattagtgcagaaaactaagacaggatgatacaggtttgaggggctggggagtgggaggggggagaaaaggaatgtatttaaacaatttccgatgcccatgatgagtttaaaaaccagcattgacaccatccccaaaattaaggctgtcgcttattgaatccacttgtgtccaacctcccaggattgttttatcctaatgtcacctgtatattcatttgaaaggacttggccctgttcttgggtcttcccgttacctgccccctgggtggtaagtttcctcctttctcaaccttccacgaggaggaaagaagtgtgcagtcattccacatggcctgttggaaggcctggggagggaactttgggtttgggacagatttttttttttgtttttggtatcattcacagcatacgatttttactctctccatcttcaccataagacagataatttggggttgctataatgctgtcacacatctcaaagtacattcaaatcttaaaaagaaattctcgtacttttgccatgttgatactgttcagcaaacaagctaccaggaactgtgaggctttgtcatttagcattagactttaaacaagaattaaaatcatgtgctgtatttttaaaatctagccaaattaaatagtacatgagaaattcagagtattagacagttttaaggcattcaactgagaaaactttatttgtcaaagtcagaaaacattttcatcttattgagagatatgtttttaaacttttatcatcatttgtaaatgtggaagttggtggattgctgtgtttttgcatgattagcatgggagtctgttggagcaagaggaacatgcttgttttgaaaactcgagatgatgagggtggtacatgcagtgtgttctctctttattggcttctaaaccagttttgtcctttaatgcatgtcaaatatttctcccatgcttctcttagcagaaaagtttttacctataagacagggcaccttttaactctaaaactagtgatactcagtgacatagactttgtcttataaacattttttcattttttattttgaaaaattgcaaatctacagcaaaagtaaaacagtagagtgaacaccatgtaaccctcacctggtgttaacattgtaccctatttgctttaagttgtatgtatttctgaacttggcaaaattggaaattaaaatttttaaaaattacaaatatacaaagttatttatcttagcacatttattatgtgtgactgcatctgatttatatttaaattggcaggttttgagggatttttttcttcatcataaatgtaaacataggattttagagtctatttccccaagcgccacattataactgtaaacttaccatcttctatgtagctgtgatatctcatctttctaaaatggaacttgttaaaaagtgttcaaacactatccctaatgcctgcggcagaatttatatacgatccattcattggggctcaaagtatcttttagacttttaaggacaatttacagcaaatgaaatttatgatgctgtgacaagaaatttaaagaatcaaaacgatggtttgaaaaggaaacctatgatacatgcaggagaagcaaaacccaagtgattggtgagaaatatagaaattatttaaattactttatagtaattattaaacactaatttttgtactgtcattgaaggtgttttatagagaaatctgagaaatcacattcacaaattagaagtcaaacatggccaggcacagtggctcacacctgtaatcttcaggatttcaagaccagcctagccaacatgacgaaaccccatctctactgaaaatagaaaaaaaaaattagccaggcttgcacctgtaatcccagttacctgggaggctgaggcaggagaatctcttgagcccaggaggcggaggttgcagtgagctgagatgccaccaccacaccagcctgggtgacagagtgaaactcgtatctccaaacaaacaaacaaaaagtccttaaacatatgtgaacaaaaattttgtgatggaaggattctagttaatgagtattgcatcaagatttacatctttcttactaaggaaaagagttaataaaaattgttctttattttacaggcagttactgaggctcttcccagatctcagtaaacagccactcagccttgaaaatggagtgttgttgtttctaaacatatatttatgtcatttattaagtacagttcacttaaataacataagtagattttctcttgtagtgatttgggtaggaagaggccatgtttcagttcgttttctctgtagggtcgattgaattggaccttttcagttgttcagaaaaataaaaataatttctcatattaaatacagacgctcctcaacttatgatgtgggtaggtcccagtaaacccattataatttgaaaatatcacattgaaaatgcatttaatatctcttacctgaaatcataacttagccaagcctaccttaaatgttctcagaacatttagcctgcagttgggcaaaaccatttaacacaaagcctattttataatgaagtgttgaatagctcatgttatttactgaatactgttgtgaaagtgaaaaacaatgattgtatgggtactcaaagtataatttctactgaatgcatatcacttgtgcactgttgtaaagctgaaaaaccgttaagcctctacgatttttaagtaagttggggaccatcagtttaaaataaatgcaatactatttcatgataaacatggtcactgtaagttttactcttttgaatgagggtgcgacagaatgcagttagaatcagttcatatcaccattaaaatcatccattcagaaacc

SEQ ID NO: 6642 - DNA, 3210 bp, Homo sapiens
ctcttcggggactaactgcaacggagagactcaagatgattccctttttacccatgttttctctactattgctgcttattgttaaccctataaacgccaacaatcattatgacaagatcttggctcatagtcgtatcaggggtcgggaccaaggcccaaatgtctgtgcccttcaacagattttgggcaccaaaaagaaatacttcagcacttgtaagaactggtataaaaagtccatctgtggacagaaaacgactgtgttatatgaatgttgccctggttatatgagaatggaaggaatgaaaggctgcccagcagttttgcccattgaccatgtttatggcactctgggcatcgtgggagccaccacaacgcagcgctattctgacgcctcaaaactgagggaggagatcgagggaaagggatccttcacttactttgcaccgagtaatgaggcttgggacaacttggattctgatatccgtagaggtttggagagcaacgtgaatgttgaattactgaatgctttacatagtcacatgattaataagagaatgttgaccaaggacttaaaaaatggcatgattattccttcaatgtataacaatttggggcttttcattaaccattatcctaatggggttgtcactgttaattgtgctcgaatcatccatgggaaccagattgcaacaaatggtgttgtccatgtcattgaccgtgtgcttacacaaattggtacctcaattcaagacttcattgaagcagaagatgacctttcatcttttagagcagctgccatcacatcggacatattggaggcccttggaagagacggtcacttcacactctttgctcccaccaatgaggcttttgagaaacttccacgaggtgtcctagaaaggatcatgggagacaaagtggcttccgaagctcttatgaagtaccacatcttaaatactctccagtgttctgagtctattatgggaggagcagtctttgagacgctggaaggaaatacaattgagataggatgtgacggtgacagtataacagtaaatggaatcaaaatggtgaacaaaaaggatattgtgacaaataatggtgtgatccatttgattgatcaggtcctaattcctgattctgccaaacaagttattgagctggctggaaaacagcaaaccaccttcacggatcttgtggcccaattaggcttggcatctgctctgaggccagatggagaatacactttgctggcacctgtgaataatgcattttctgatgatactctcagcatggatcagcgcctccttaaattaattctgcagaatcacatattgaaagtaaaagttggccttaatgagctttacaacgggcaaatactggaaaccatcggaggcaaacagctcagagtcttcgtatatcgtacagctgtctgcattgaaaattcatgcatggagaaagggagtaagcaagggagaaacggtgcgattcacatattccgcgagatcatcaagccagcagagaaatccctccatgaaaagttaaaacaagataagcgctttagcaccttcctcagcctacttgaagctgcagacttgaaagagctcctgacacaacctggagactggacattatttgtgccaaccaatgatgcttttaagggaatgactagtgaagaaaaagaaattctgatacgggacaaaaatgctcttcaaaacatcattctttatcacctgacaccaggagttttcattggaaaaggatttgaacctggtgttactaacattttaaagaccacacaaggaagcaaaatctttctgaaagaagtaaatgatacacttctggtgaatgaattgaaatcaaaagaatctgacatcatgacaacaaatggtgtaattcatgttgtagataaactcctctatccagcagacacacctgttggaaatgatcaactgctggaaatacttaataaattaatcaaatacatccaaattaagtttgttcgtggtagcaccttcaaagaaatccccgtgactgtctatacaactaaaattataaccaaagttgtggaaccaaaaattaaagtgattgaaggcagtcttcagcctattatcaaaactgaaggacccacactaacaaaagtcaaaattgaaggtgaacctgaattcagactgattaaagaaggtgaaacaataactgaagtgatccatggagagccaattattaaaaaatacaccaaaatcattgatggagtgcctgtggaaataactgaaaaagagacacgagaagaacgaatcattacaggtcctgaaataaaatacactaggatttctactggaggtggagaaacagaagaaactctgaagaaattgttacaagaagacacacccgtgaggaagttgcaagccaacaaaaaagttcaaggatctagaagacgattaagggaaggtcgttctcagtgaaaatccaaaaaccagaaaaaaatgtttatacaaccctaagtcaataacctgaccttagaaaattgtgagagccaagttgacttcaggaactgaaacatcagcacaaagaagcaatcatcaaataattctgaacacaaatttaatatttttttttctgaatgagaaacatgagggaaattgtggagttagcctcctgtggtaaaggaattgaagaaaatataacaccttacaccctttttcatcttgacattaaaagttctggctaactttggaatccattagagaaaaatccttgtcaccagattcattacaattcaaatcgaagagttgtgaactgttatcccattgaaaagaccgagccttgtatgtatgttatggatacataaaatgcacgcaagccattatctctccatgggaagctaagttataaaaataggtgcttggtgtacaaaactttttatatcaaaaggctttgcacatttctatatgagtgggtttactggtaaattatgttattttttacaactaattttgtactctcagaatgtttgtcatatgcttcttgcaatgcatattttttaatctcaaacgtttcaataaaaccatttttcagatataaagagaattacttcaaattgagtaattcagaaaaactcaagatttaagttaaaaagtggtttggacttgggaacaggactttatacctcttttactgtaacaagtactcattaaaggaaattgaatgaaa

SEQ ID NO: 6643 - DNA, 2658 bp, Homo sapiens
attggcagctcttcacttgtatcttttcatatcaaaaatgggaggtgacacccagtttaaggaaaattccaaggcatttgtctcgactaatgtgaaagatgattacagtggccagaggactgccaaggctccttctcaagctgcttgagtcaatgagggtagacgcaccctctgaagatggtgactccctcctgagaagctggaccccttggtaaaagacaaggccttctccaagaagaatatgaaagtgttactcagacttatttgtttcatagctctactgatttcttctctggaggctgataaatgcaaggaacgtgaagaaaaaataattttagtgtcatctgcaaatgaaattgatgttcgtccctgtcctcttaacccaaatgaacacaaaggcactataacttggtataaagatgacagcaagacacctgtatctacagaacaagcctccaggattcatcaacacaaagagaaactttggtttgttcctgctaaggtggaggattcaggacattactattgcgtggtaagaaattcatcttactgcctcagaattaaaataagtgcaaaatttgtggagaatgagcctaacttatgttataatgcacaagccatatttaagcagaaactacccgttgcaggagacggaggacttgtgtgcccttatatggagttttttaaaaatgaaaataatgagttacctaaattacagtggtataaggattgcaaacctctacttcttgacaatatacactttagtggagtcaaagataggctcatcgtgatgaatgtggctgaaaagcatagagggaactatacttgtcatgcatcctacacatacttgggcaagcaatatcctattacccgggtaatagaatttattactctagaggaaaacaaacccacaaggcctgtgattgtgagcccagctaatgagacaatggaagtagacttgggatcccagatacaattgatctgtaatgtcaccggccagttgagtgacattgcttactggaagtggaatgggtcagtaattgatgaagatgacccagtgctaggggaagactattacagtgtggaaaatcctgcaaacaaaagaaggagtaccctcatcacagtgcttaatatatcggaaattgaaagtagattttataaacatccatttacctgttttgccaagaatacacatggtatagatgcagcatatatccagttaatatatccagtcactaatttccagaagcacatgattggtatatgtgtcacgttgacagtcataattgtgtgttctgttttcatctataaaatcttcaagattgacattgtgctttggtacagggattcctgctatgattttctcccaataaaagcttcagatggaaagacctatgacgcatatatactgtatccaaagactgttggggaagggtctacctctgactgtgatatttttgtgtttaaagtcttgcctgaggtcttggaaaaacagtgtggatataagctgttcatttatggaagggatgactacgttggggaaggtatgtgtgtaatggaacagagtaaaggcttattgttgtaaaactacttagtaaaatgtggattccatctttctagaagatcgtggcataggggtatatgtttcacaattttaagaacctcttcagaagtgtatgatgatttttacatttattaaatgcatttacttctctcatattttgtcagagcaataattaagtgattttcatttagttttgaaaaacttaatgactagttaaacccaacagttgctttacaactgatacaattaaacaggagtggtagagatcaaatgattgaataataagtttttaaaattccaacaaagttttctgagttctaaatgaaatatttgtcttttgagggccaatttttgagttagtctataaaatgggaggtttgcagtggctcatgccttttatctcagtacaaccctgggaggccagggtgagagggtcacttgagcctaggagtttgaggctgcagtgatccaagatcacgccactgcgctccagtgtgagcaacagaacaagagactgtctcttaaaattaattaattaaaaacatgggaaactcctttaattttaagtaagacaagaaaaaggcattaggagccatacggttgtgaaaagccttgtgtggctttggttcaggagagaatgatgataaatagaattttacttactatattgtgcttcctgtttttcagacattgttgaggtcattaatgaaaacgtaaagaaaagcagaagactgattatcattttagtcagagaaacatcaggcttcagctggctgggtggttcatctgaagagcaaatagccatgtataatgctcttgttcaggatggaattaaagttgtcctgcttgagctggagaaaatccaagactatgagaaaatgccagaatcgattaaattcattaagcagaaacatggggctatccgctggtcaggggactttacacagggaccacagtctgcaaagacaaggttctggaagaatgtcaggtaccacatgccagtccagcgacggtcaccttcatctaaacaccagttactgtcaccagccactaaggagaaactgcaaagagaggctcacgtgcctctcgggtag

SEQ ID NO: 6644 - DNA, 1970 bp, Homo sapiens
actcacacacaatgtgccatcctgacaaggcttttacttctgataagctccaatgtgtgtttaatgaatacaaagccgcggtctgggtgccgcctcggccgcggccgctctcccgcgctcctttgccagaagatcgtactgagaagcactccacaatgccagactcacctgtggatgtgaagacgcaatctaggctgactcctccaacaatgccacctcccccaactactcaaggagctccaagaaccagttcatttacaccgacaacgttaactaatggcacgagccattctcctacagccttgaatggcgccccctcaccacccaatggcttcagcaatgggccttcctcttcttcctcctcctctctggctaatcaacagctgcccccagcctgtggtgccaggcaactcagcaagctgaaaaggttccttactaccctgcagcagtttggcaatgacatttcacccgagataggagaaagagttcgcaccctcgttctgggactagtgaactccactttgacaattgaagaatttcattccaaactgcaagaagctactaacttcccactgagaccttttgtcatcccatttttgaaggccaacttgcccctgctgcagcgtgagctcctccactgcgcaagactggccaaacagaaccctgcccagtacctcgcccagcatgaacagctgcttctggatgccagcaccacctcacctgttgactcctcagagctgcttctcgatgtgaacgaaaacgggaagaggcgaactccagacagaaccaaagaaaatggctttgacagagagcctttgcactcagaacatccaagcaagcgaccatgcactattagcccaggccagcggtacagtccaaataacggcttatcctaccagcccaatggcctgcctcaccctaccccacctccacctcagcattaccgtttggatgatatggccattgcccaccactacagggactcctatcgacaccccagccacagggacctcagggacagaaacagacctatggggttgcatggcacacgtcaagaagaaatgattgatcacagactaacagacagagaatgggcagaagagtggaaacatcttgaccatctgttaaactgcataatggacatggtagaaaaaacaaggcgatctctcaccgtactaaggcggtgtcaagaagcagaccgggaagaattgaattactggatccggcggtacagtgacgccgaggacttaaaaaaaggtggcggcagtagcagcagccactctaggcagcagagtcccgtcaacccagacccagttgcactagacgcgcatcgggaattccttcacaggcctgcgtctggatacgtgccagaggagatctggaagaaagctgaggaggccgtcaatgaggtgaagcgccaggcgatgacggagctgcagaaggccgtgtctgaggcggagcggaaagcccacgacatgatcacaacagagagggccaagatggagcgcacggtcgccgaggccaaacggcaggcggcggaggacgcactggcagttatcaatcagcaggaggattcaagcgagagttgctggaattgtggccgtaaagcgagtgaaacctgcagtggctgtaacacagcccgatactgtggctcattttgccagcacaaagactgggagaagcaccatcacatctgtggacagaccctgcaggcccagcagcagggagacacacctgcagtcagctcctctgtcacgcccaacagcggggctgggagcccgatggacacaccaccagcagccactccgaggtcaaccaccccgggaaccccttccaccatagagacaacccctcgctagacgtgaactcagaactgtcggaggaaagacaacacaaccaacgcgaaaccaattcctcatcctcagatgctcaaagttgttttttttgtttgtttgtttattagatgaatt

SEQ ID NO: 6645 - DNA, 3465 bp, Homo sapiens
gcgagtgctacatcttggctgtctgaagcgattggctcctctctggggagtggagggtgttcagttattaatgaccgctgagcaggcagcaccatgtcagtgtgacaactgatcgggtgaacgatgcaccactaaccaccatggaaacaaggaaaaataaagccagctcacaggatctctcttcactggattgagagcctcagcctgccgactgagaaaaagagttccaggaaaaagaaggaatcccggctgcagcctcctgccttcctttatattttaaaatagagagataagattgcgtgcatgtgtgcatatctatagtatatattttgtacactttgttacacagacacacaaatgcacctatttataccgggcaagaacacaaccatgtgattatctcaaccaaggaactgaggaatccagcacgcaaggacatcggaggtgggctagcactgaaactgcttttcaagcatcatgctgctattcctgcaaatactgaagaagcatgggatttaaatattttacttctaaataaatgaattactcaatctcctatgaccatctatacatactccaccttcaaaaagtacatcaatattatatcattaaggaaatagtaaccttctcttctccaatatgcatgacatttttggacaatgcaattgtggcactggcacttatttcagtgaagaaaaactttgtggttctatggcattcatcatttgacaaatgcaagcatcttccttatcaatcagctcctattgaacttactagcactgactgtggaatccttaagggcccattacatttctgaagaagaaagctaagatgaaggacatgccactccgaattcatgtgctacttggcctagctatcactacactagtacaagctgtagataaaaaagtggattgtccacggttatgtacgtgtgaaatcaggccttggtttacacccagatccatttatatggaagcatctacagtggattgtaatgatttaggtcttttaactttcccagccagattgccagctaacacacagattcttctcctacagactaacaatattgcaaaaattgaatactccacagactttccagtaaaccttactggcctggatttatctcaaaacaatttatcttcagtcaccaatattaatgtaaaaaagatgcctcagctcctttctgtgtacctagaggaaaacaaacttactgaactgcctgaaaaatgtctgtccgaactgagcaacttacaagaactctatattaatcacaacttgctttctacaatttcacctggagcctttattggcctacataatcttcttcgacttcatctcaattcaaatagattgcagatgatcaacagtaagtggtttgatgctcttccaaatctagagattctgatgattggggaaaatccaattatcagaatcaaagacatgaactttaagcctcttatcaatcttcgcagcctggttatagctggtataaacctcacagaaataccagataacgccttggttggactggaaaacttagaaagcatctctttttacgataacaggcttattaaagtaccccatgttgctcttcaaaaagttgtaaatctcaaatttttggatctaaataaaaatcctattaatagaatacgaaggggtgattttagcaatatgctacacttaaaagagttggggataaataatatgcctgagctgatttccatcgatagtcttgctgtggataacctgccagatttaagaaaaatagaagctactaacaaccctagattgtcttacattcaccccaatgcatttttcagactccccaagctggaatcactcatgctgaacagcaatgctctcagtgccctgtaccatggtaccattgagtctctgccaaacctcaaggaaatcagcatacacagtaaccccatcaggtgtgactgtgtcatccgttggatgaacatgaacaaaaccaacattcgattcatggagccagattcactgttttgcgtggacccacctgaattccaaggtcagaatgttcggcaagtgcatttcagggacatgatggaaatttgtctccctcttatagctcctgagagctttccttctaatctaaatgtagaagctgggagctatgtttcctttcactgtagagctactgcagaaccacagcctgaaatctactggataacaccttctggtcaaaaactcttgcctaataccctgacagacaagttctatgtccattctgagggaacactagatataaatggcgtaactcccaaagaagggggtttatatacttgtatagcaactaacctagttggcgctgacttgaagtctgttatgatcaaagtggatggatcttttccacaagataacaatggctctttgaatattaaaataagagatattcaggccaattcagttttggtgtcctggaaagcaagttctaaaattctcaaatctagtgttaaatggacagcctttgtcaagactgaaaattctcatgctgcgcaaagtgctcgaataccatctgatgtcaaggtatataatcttactcatctgaatccatcaactgagtataaaatttgtattgatattcccaccatctatcagaaaaacagaaaaaaatgtgtaaatgtcaccaccaaaggtttgcaccctgatcaaaaagagtatgaaaagaataataccacaacacttatggcctgtcttggaggccttctggggattattggtgtgatatgtcttatcagctgcctctctccagaaatgaactgtgatggtggacacagctatgtgaggaattacttacagaaaccaacctttgcattaggtgagctttatcctcctctgataaatctctgggaagcaggaaaagaaaaaagtacatcactgaaagtaaaagcaactgttataggtttaccaacaaatatgtcctaaaaaccaccaaggaaacctactccaaaaatgaacaaaaaaaaaaaaagcgaaagactgcagttgtgctaaaaacaaaacaaaacaaacaaacaaacaaaaaagtaaaaaaagattactttcgagagagaagtttaagcttcaccaatgctgctcctgaccaatggaaatatgtacaacttcagcattttaagtaactggcttcaaggggtactgtggcaaccaaataaaataactccattttctaaaactttcatgtaacttttatgtctggactacagttcaagtggacaaaaacatttctgtattttttttaagtaaataagagtagttgaactgagcaatacctcctcctgtgttgtattacacatattagccacgagtttttgcagtgaccagataaacttgaattgacacgtggtgtaataaaatggacaaattctgtagagtagacacagtgagtatgtggacctcttttataaggaaaaatacattttggattaaaatcaa

SEQ ID NO: 6646 - DNA, 4334 bp, Homo sapiens
attctgccccagctgatgtttgagccagcatgtcgcggaggaagcaagcgaagcctcaacatttccaatccgaccccgaagtggcctcgctcccccggcgagatggagacacagaaaagggtcaaccgagtcgccctactaagagcaaggatgcccacgtctgtggccggtgctgtgccgagttctttgaattatcagatcttctgctccacaagaagaactgtactaaaaatcaattagttttaatcgtaaatgaaaatccagcctccccacccgaaaccttctcccccagcccccctcctgataatcctgatgaacaaatgaatgacacagttaacaaaaccggcagccacagcagtaccgccccaagcagcagcagcagcagcagcagcagcagcggcggcggcggcagctcctccacaggtacctcagcgatcacaacctctctacctcaactcggggacctgacaacactgggcaacttctccgtaatcaacagcaacgtcatcatcgagaacctccagagcaccaaggtggcggtggcccagttctcccaggaagcgaggtgcggcggggcctctgggggcaagctggccgtcccagccctcatggaacaactcctagctctgcagcagcagcagatccaccagctgcaattgatcgaacagattcgtcaccaaatattgctgttggcttctcagaatgcagacttgccaacatcttctagtccttctcaaggtactttacgaacatctgccaaccccttgtccacgctaagttcccatttatctcagcagctggcagcagcagctggattggcacagagcctcgccagccaatctgccagcattagtggtgtgaaacagctacccccaatccagctacctcagagcagttctggcaacaccatcattccatccaacagcggctcttctcccaatatgaacatattggcagcggcagttaccaccccgtcctctgaaaaagtggcttcaagtgctggggcctcccatgtcagcaacccagcggtctcatcatcgtcctcaccagcttttgcaataagcagtttattaagtcctgcgtctaatccacttctacctcagcaagcctccgctaactcggttttccccagccctttgcccaacatcggaacaactgcagaggatttaaactccttgtctgccttggcccagcaaagaaaaagcaagccaccaaatgtcactgcctttgaagcgaaaagtacttccgatgaggcattcttcaaacacaagtgcaggttctgcgcgaaggtctttgggagtgacagtgccttgcagatccacttgcgttcccataccggagagaggccattcaagtgcaacatctgcgggaacaggttctccaccaaggggaatctgaaagtccactttcagcgccacaaagagaaataccctcatatccagatgaacccctatcctgtgcctgagcatttggacaatatccccacgagtactggcatcccatatggcatgtccatccctccagagaagccagtcaccagctggctagacaccaaaccagtcctgcctactctgaccacttcagtcggcctgccgttgcccccaaccctcccaagcctcatacccttcatcaagacggaagagccagcccccatccccatcagccattctgccaccagccccccaggctcagtcaaaagtgactccgggggccctgagtcagccacaagaaacctaggtgggctcccagaggaagccgaagggtccactctgccaccctctggtggcaaaagcgaagagagtggcatggtcaccaactcagtcccgacggcgagcagtagcgtcctgagctccccagcggcagactgcggccccgcgggcagtgccaccaccttcaccaaccctttgttgccgctcatgtccgagcagttcaaggccaagtttccttttgggggactcctggactcagctcaggcatcagagacgtccaagcttcagcaactggtagaaaacattgacaagaaggccactgaccccaatgagtgcatcatctgccaccgggttctcagctgccagagcgccttgaaaatgcactacaggacacacactggggagaggccctttaagtgtaagatctgtggccgggctttcaccacgaaagggaatcttaaaacccactacagtgtccatcgtgctatgcccccgctcagagtccagcattcctgccccatctgccagaagaagttcacgaacgctgtggtcctgcagcagcacatccgaatgcatatgggaggccagatccccaacaccccagtccccgacagctactctgagtccatggagtctgacacaggttcctttgatgagaaaaattttgatgacctagacaacttctctgatgaaaacatggaagactgtcctgagggcagcatccctgatacacctaagtctgcagacgcctcccaagacagcttatcctcttcgcctttgcccctcgagatgtcgagcatcgctgctttggaaaatcagatgaagatgatcaatgctggcctggcagagcagctacaggccagcctgaagtcagtggagaatgggtccatcgagggggatgtcctgaccaatgattcatcctcagtgggtggtgacatggaaagccaaagtgctggcagcccagccatctcagagtctacctcttccatgcaggctctgtccccgtccaacagcacgcaggagttccacaagtcacccagcattgaggagaaaccacagagagcggtcccaagcgagtttgccaatggtttgtctcccaccccagtgaatggtggggctttggatttgacatctagtcacgcagagaaaatcatcaaagaagattctttggggatcctcttcccttttagagaccggggtaaatttaaaaacactgcttgtgacatttgtggcaaaacatttgcttgtcagagtgccttggacattcactatagaagtcataccaaagagagaccatttatttgcacagtttgcaatcgtggcttttccacaaagggtaatttgaagcagcacatgttgacacatcagatgcgagatctgccatcccagctctttgagcccagttccaaccttggccccaatcagaactcagcggtgattcccgccaactcgttgtcatctctcatcaagacagaggtcaacggcttcgtgcatgtttctcctcaggacagtaaggacacccccaccagtcacgtcccgtctgggcctctgtcttcctctgccacatccccagttctgctccctgctctgcccaggagaactcccaagcagcactactgcaacacatgtggcaaaaccttctcctcatcgagtgccctgcagattcacgagagaactcacactggagagaaaccctttgcttgcactatttgtggaagagctttcacgactaaaggcaatcttaaggtacacatgggcactcacatgtggaatagcacccctgcacgacggggtcggcggctctctgtggatggccccatgacatttctaggaggcaatcccgtcaagttcccagaaatgttccagaaggatttggcggcaagatcaggaagtggggatccttccagcttctggaatcagtatgcagcagcgctctccaacgggctggcgatgaaggccaacgagatctccgtcattcagaacggtggcatccctccaattcctggaagcctcggcagtgggaacagctcacctgttagtgggctgacgggaaacctggagaggctccagaactcagagcccaatgctcccctggccggcctggagaaaatggcaagcagtgagaacggaaccaacttccgcttcacccgcttcgtggaggacagcaaggagatcgtcacgagttaaagcagctcgggctggagacatagcattcattcctgttcagaatgcgacctatggtggcctcctactccttgccccccaccccgccccgccccttccttctgttccccagatctatgaactacaacattatgaagacattcttttgtaccttgttcaactttagagttctaagaaagcttatttattagcgatataaccttgctttgcaaacagaatgcaagcgttaactttggtcttctgtattttggactaaatactaattgactagagtgctgtaaacttgctgtaacatttatggcaattgcaagttgccctgctaggcagttgtaatctggcattaacttattttctatatccagtttaatatgaatctggtgttgatgcaatgcctcagtgatgcattagatctctaataaagtctgtatatacatgtacact

SEQ ID NO: 6647 - DNA, 928 bp, Homo sapiens
agcaatcctttctttcagctggagtgctcctcaggagccagccccacccttagaaaagatgttttccatgaggatcgtctgcctggtcctaagtgtggtgggcacagcatggactgcagatagtggtgaaggtgactttctagctgaaggaggaggcgtgcgtggcccaagggttgtggaaagacatcaatctgcctgcaaagattcagactggcccttctgctctgatgaagactggaactacaaatgcccttctggctgcaggatgaaagggttgattgatgaagtcaatcaagattttacaaacagaataaataagctcaaaaattcactatttgaatatcagaagaacaataaggattctcattcgttgaccactaatataatggaaattttgagaggcgatttttcctcagccaataaccgtgataatacctacaaccgagtgtcagaggatctgagaagcagaattgaagtcctgaagcgcaaagtcatagaaaaagtacagcatatccagcttctgcagaaaaatgttagagctcagttggttgatatgaaacgactggaggtggacattgatattaagatccgatcttgtcgagggtcatgcagtagggctttagctcgtgaagtagatctgaaggactatgaagatcagcagaagcaacttgaacaggtcattgccaaagacttacttcccgtggtaaatcttcaagttacagcaaacaatttactagtagcacgagttacaacagaggagactccacatttgaaagcaagagctataaaatggcagatgaggccggaagtgaagccgatcatgaaggaacacatagcaccaagagaggccatgctaaatctcgccctgtcagaggtatccacacttctcctttggggaagccttccctgtccccctagactaagttaa

SEQ ID NO: 6648 - DNA, 403 bp, Homo sapiens
gctgttatgtgagaacattaggccacagcaacatgtcattgtgaatataaatagtttctggaaaggacactgacaacttcaaagcaaaatgaagctcttttggttgcttttcaccattgggttctgctgggctcagtattcctcaaatacacaacaaggacgaacatctattgttcatctgtttgaatggcgatgggttgatattgctcttgaatgtgagcgatatttagctcccaagggatttggaggggttcaggtctctccaccaaatgaaaatgttgccattcacaaccctttcagaccttggtgggaaagataccaaccagttagctataaattatgcacaagatctggaaatgaagatgaatttagaaacatggtgactagatgcaacaatgttggg

SEQ ID NO: 6649 - DNA, 1046 bp, Homo sapiens; identical to SEQ ID NO: 6403

SEQ ID NO: 6650 - DNA, 1634 bp, Homo sapiens; identical to SEQ ID NO: 4163

SEQ ID NO: 6651 - DNA, 932 bp, Homo sapiens
ggaaaggccaggacttttgcctacctcaacaagggaccaagttcagtgaaagaagggttggcatccttgattgggcagcagatttatcagaagagctgtggcttcagggctgctcacctccccacccccaccctgcatctttccccagggctgggaaggatgcctaccagggacaaaaggagatgtgggaactggagccctaagcttgctagctgtcagaaggactggtgccacttgatgcccaggactcatgccaaggactgctgccctgttcccagccccttgcttgatggggaggccatttggcccatctggccaggagaggcagcagagggtgaggtctggcttttttatcttgtctccactccagggagctgtcaccatgcctcactcgtacccagccctttctgctgagcagaagaaggagttgtctgacattgccctgcggattgtagccccgggcaaaggcattctggctgcggatgagtctgtaggcagcatggccaagcggctgagccaaattggggtggaaaacacagaggagaaccgccggctgtaccgccaggtcctgttcagtgctgatgaccgtgtgaaaaagtgcattggaggcgtcattttcttccatgagaccctctaccagaaagatgataatggtgttcccttcgtccgaaccatccaggataagggcatcgtcgtgggcatcaaggttgacaagggtgtggtgcctctagctgggactgatggagaaaccaccactcaagggctggatgggctctcagaacgctgtgcccaatacaagaaggatggtgctgactttgccaagtggcgctgtgtgctgaaaatcagtgagcgtacaccctctgcacttgccattctggagaacgccaacgtgctggcccgttatgccagtatctgccagcaggtgtgtgtgt

SEQ ID NO: 6652 - DNA, 1929 bp, Homo sapiens
cctgggcaacggaggtgtagctggcagcagcgggcaggtgaggaccccatctgccgggcaggtgagtcccttccctccccaggcctcgcttccccagccttctgaaagaaggaggtttaggggatcgagggctggcggggagaagcagacaccctcccagcagaggggcaggatgggggcaggagagttagcaaaggtgacatcttctcggggggagccgagactgcgcaaggctggggggttatgggcccgttccaggcagaaagagcaagagggcagggagggagcacaggggtggccagcgtagggtccagcacgtggggtggtaccccaggcctgggtcagacagggacatggcaggggacacaggacagaggggtccccagctgccacctcacccaccgcaattcatttagtagcaggcacaggggcagctccggcacggctttctcaggcctatgccggagcctcgagggctggagagcgggaagacaggcagtgctcggggagttgcagcaggacgtcaccaggagggcgaagcggccacgggaggggggccccgggacattgcgcagcaaggaggctgcaggggctcggcctgcgggcgccggtcccacgaggcactgcggcccagggtctggtgcggagagggcccacagtggacttggtgacgctgtatgccctcaccgctcagcccctggggctggcttggcagacagtacagcatccaggggagtcaagggcatggggcgagaccagactaggcgaggcgggcggggcggagtgaatgagctctcaggagggaggatggtgcaggcaggggtgaggagcgcagcgggcggcgagcgggaggcactggcctccagagcccgtggccaaggcgggcctcgcgggcggcgacggagccgggatcggtgcctcagcgttcgggctggagacgagggtctccagctggggtggacgtgcccaccagctgccgaaggccaagacgccaggtccggtggacgtgacaagcaggacatgacatggtccggtgtgacggcgaggacagaggaggcgcgtccggccttcctgaacaccttaggctggtggggctgcggcaagaagcgggtctgtttctttacttcctccacggagtcggcacactatggctgccctctgggctcccagaacccacaacatgaaagaaatggtgctacccagctcaagcctgggcctttgaatccggacacaaaaccctctagcttggaaatgaatatgctgcactttacaaccactgcactacctgactcaggaatcggctctggaaggtgaagctagaggaaccagacctcatcagcccaacatcaaagacaccatcggaacagcagcgcccgcagcacccaccccgcaccggcgactccatcttcatggccaccccctgcggcggacggttgaccaccagccaccacatcatcccagagctgagctcctccagcgggatgacgccgtccccaccacctccctcttcttctttttcatccttctgtctctttgtttctgagctttcctgtctttccttttttctgagagattcaaagcctccacgactctgtttcccccgtcccttctgaatttaatttgcactaagtcatttgcactggttggagttgtggagacggccttgagtctcagtacgagtgtgcgtgagtgtgagccaccttggcaagtgcctgtgcagggcccggccgccctccatctgggccgggtgactgggcgccggctgtgtgcccgaggcctcaccctgccctcgcctagtctggaagctccgaccgacatcacggagcagccttcaagcattccattacgccccatctcgctctgtgcccctccccaccagggcttcagcaggagccctggactcatcatcaataaacactgttacagcaa

SEQ ID NO: 6653 - DNA, 675 bp, Homo sapiens
agtgcggtcacatacttccagaagagcggaccagggctgctgccagcacctgccactcagagcgcctctgtcgctgggacccttcagaactctctttgctcacaagttaccaaaaaaaaaagagccaacatgttggtattgctggctggtatctttgtggtccacatcgctactgttattatgctatttgttagcaccattgccaatgtctggttggtttccaatacggtagatgcatcagtaggtctttggaaaaactgtaccaacattagctgcagtgacagcctgtcatatgccagtgaagatgccctcaagacagtgcaggccttcatgattctctctatcatcttctgtgtcattgccctcctggtcttcgtgttccagctcttcaccatggagaagggaaaccggttcttcctctcaggggccaccacactggtgtgcttcattatgcgaatcgtgatggaacgcagtatcaccacggctattcctacatcctgggctggatctgcttctgcttcagcttcatcatcggcgttctctatctggtcctgagaaagaaataaggccggacgagttcatggggatctggggggtggggaggaggaagccgttgaatctgggagggaagtggaggttgctgtacaggaaaaaccgagataggggaggggggag

SEQ ID NO: 6654 - DNA, 1088 bp, Homo sapiens
cgagaaggaggtgcgtcctgctgcctgccccggtcactctggctccccagctcaaggttcaggccttgccccaggccgggcctctgggtacctgaggtcttctcccgctctgtgcccttctcctcacctggctgcaatgagtgggggagcacggggcttctgcatgctgaaggcaccccactcagccaggcccttcttctcctccaggtcccccacggcccttcaggatgaaagctgcggtgctgaccttggccgtgctcttcctgacggggagccaggctcggcatttctggcagcaagatgaacccccccagagcccctgggatcgagtgaaggacctggccactgtgtacgtggatgtgctcaaagacagcggcagagactatgtgtcccagtttgaaggctccgccttgggaaaacagctaaacctaaagctccttgacaactgggacagcgtgacctccaccttcagcaagctgcgcgaacagctcggccctgtgacccaggagttctgggataacctggaaaaggagacagagggcctgaggcaggagatgagcaaggatctggaggaggtgaaggccaaggtgcagccctacctggacgacttccagaagaagtggcaggaggagatggagctctaccgccagaaggtggagccgctgcgcgcagagctccaagagggcgcgcgccagaagctgcacgagctgcaagagaagctgagcccactgggcgaggagatgcgcgaccgcgcgcgcgcccatgtggacgcgctgcgcacgcatctggccccctacagcgacgagctgcgccagcgcttggccgcgcgccttgaggctctcaaggagaacggcggcgccagactggccgagtaccacgccaaggccaccgagcatctgagcacgctcagcgagaaggccaagcccgcgctcgaggacctccgccaaggcctgctgcccgtgctggagagcttcaaggtcagcttcctgagcgctctcgaggagtacactaagaagctcaacacccagtgaggcgcccgccgccgccccccttcccggtgctcagaataaacgtttccaaagtgggaa

SEQ ID NO: 6655 - DNA, 3269 bp, Homo sapiens
tgacttccaggaccgtaagtttgcagaattactctcctatgatggcacagaaatcacaaggatctgacaaccttcaggaaggccaggaaaagagcaagagagagatcctgaagtgcaccaaaagcgcgtgggctccgctggatgagtggctgccccctgaccctgaggaggaaagccagagtctcaccatccccatgctggaagattccaagcaagaaagtattcagcagtggctggactctggattctttgtctctgcaaatgaaaactttcaacaagtcattgaccgcactgtttctttgtatgaacaagggatggttcaaatgactgtgaaagactacatgagatctttgcatcagttttcagaaactcccatcctatccagagggaccagtttcaactcttgctattctactgcaagtgtaccacaaagcattcctgaatggctggaattttgggagatagatccagtggagattctcttggatctggggtttggtgctgatgagccagacatctgcatgcaaatcccagccagattccttggttgtggctcagcagccagaggaatcaacatccgtgtttttcttgaagctcaaaagcagcgaatggacattgagaaccccaacttgtacggtcgtttccgacagctggaaatcctggaccatgtgaccaatgccttctcatctctgctgagtgatgtcagcatcctgccaaacagagctgaagagaaagctggaggagagagtgtgcaaagaacctcagtgagtgccgccaaagagcatcgaagaagaatgggtaaactcttaaggagagcttccaaacagaacatcaggcgggattgtaacccagaggtatcagagtccttcaaggtgaaggatgaagtttttgttccctttacaaaaccatgggattgtggagcagagctagcagcaacctcaatcaaccacaagcaaaatcatttgtctctgtcagtagaacatcagtctctccaagcctgtgatgatttgctaccttatcctcctcatggtcttctgagcaagcagtggccttgctcatctatgccggccaagcaggctcctccttcctgtgtgtctgaggggtcagtcaagggcagaactcagaaggagaacttatttcagactaacaagctcaagagcttgtctcatcttgcaggcaaaggaccagactcatttgaaatggaagaggtccaaagctttgaagaagagactggtaatcctcttgacatgacttcaggaactgtaggtgccagggtggacagagcaaatagctgccagtctgacagcagcgggttcctggaggagccgctggaaccgctgcccctccagatgccttccttgccaaacagccagagtcctgctgagaatggaggtagaaagccaagagatcagagccacagcttagtatcatcccaggactgtcagctagagtcggatgggccagattccaaaagtagggcgagcatgtctttttcaagccaagaagcgaatgccttggaacaaagggcctcagtatctgtgatggaggaagagtttctgcttgaggccatggaggggccaccagagctgtatatcccagacatggcctgtgccaagaccaccacgaggggagaatgcccaaggaaagacagccatctgtggcagcttctgccaatgccccatgctgagtatgaggtcaccagacccacagccacttccaaatatgatcatcctctggggtttatggtaacccacgtcacagaaatgcaggacagttttgtgaggcctgagggagctggcaaagtgcaaagccaccacaatgagtctcaaaggtcacctggaaatgatcatactcaagacaagttccttcatgttgactctgaggccccacgagaagaggaaagcagtggattctgtcctcacaccaaccacagcttactcgtaccagaaagctcatcacagtgtatccccaagcacagtgaaatcacaccttatgcaactgaccttgctcaaacatctgaaaagctcattccccacctccataaactgcctggagatcctgcccaggtgaagtcaaggtctggtactttgggtcagatactacctgggacagaagctgagatggaaaaccttcctctaaatactggcagctccaggtctgtaatgacccagatgtcctccagcctggtgtcggctgctcagagggctgtggccttggggactggtcccagaggaacatctttagaatgcactgtgtgtgatcctgttaccgcaacagaaacaagactggggacaaaagcaagacagttaaatgatgcttccattcagacttcagctctaagcaacaagaccttgacacatgggccccagcccctcaccaaatccgtctctctagactcaggcttctctagtatctgcccaatgggcacctgccatgctatacctgcccactgctgcatctgctgtcatcaccaccctcactgccacggggagaggcaaagccctggccctgaaccctcagtctgtaggcactgcctgtgttcactaactggtcaccaggaagcccagttcatgacgactttgaaagcccttcaggacactacagtgagggagctatgttcctgcacagtccatgagatggaagccatgaagacgatatgccaaagtttccgggagtatttagaagaaattgaacagcaccttatgggacagcaggccctcttttccagggacatgtcagaggaggaaagggaggaggccgagcaactgcaaacgttacgtgaggccctgaggcagcaggtggcagagttggaatttcagttaggagaccgggctcagcaaatcagagaagggattttactgcagctggaggttctcacagcagagccacctgaacactattcaaatctgcatcaatataactggatagaagaaagcaatgggcagacttcatgttctaaaatccacccaggcatggccccgaggactgtgtttcctcccgatgatggccaggaggctccctgttcaggtgggacccagttggctgccttcactccacccaccttggagaacagcaccaggatgtctccttcatcatcagcttgggcaaagttaggtccaacccctttgtcaaattgtcctgttggagaaaaggatgcagatgtcttcctctagatcagagcaggtttgttaaccttcatacaaaatataaaggcccagaacagatgtagcaaggaaatttcaattttccccaaggagaagggtctgcca

SEQ ID NO: 6656 - DNA, 618 bp, Homo sapiens
ccccgacccgcgctcgtccgcccgcccgcccgcccgcccgcgccatgaacgccaaggtcgtggtcgtgctggtcctcgtgctgaccgcgctctgcctcagcgacgggaagcccgtcagcctgagctacagatgcccatgccgattcttcgaaagccatgttgccagagccaacgtcaagcatctcaaaattctcaacactccaaactgtgcccttcagattgtagcccggctgaagaacaacaacagacaagtgtgcattgacccgaagctaaagtggattcaggagtacctggagaaagctttaaacaattgctagaatatggctgtacggcaatgctgagacatcacgctgagcgagagtggacatcctcattttattcctacccttaccgtggatctctcctgtgcttcaccactcagtataatgctggctgagctcttctgacaaataccttccaagatgtgaggaaaacacacgtaggtgcagttgttgaattgtatgatctgccactgaagtaattagtgtgataattacttggattttctcctttaacaaattattgttataaattatattaatatatgtcatgctaataaattatttccatattcctagg

SEQ ID NO: 6657 - DNA, 4453 bp, Homo sapiens
tggggccgtcgtgccccgccccagtgcggccggggcgcgggttcgagctgctgctcggcaagcctgggtgtctagggcatgagcggagtgtggggggccggcgggcctcggtgccaggaggcgctcgcggtcctcgcctcgctgtgccgggcccggccgccccctctcgggctggacgtggagacttgtcggagcttcgagctgcagcccccagagcggagtcccagcgcggcaggcgcaggcacctctgtcagcctcctcgcagttgtagttattgtgtgtggcgtggccctggtggcagtttttctctttctcttttggaagctgtgctggatgccctggaggaacaaggaggcctccagtccctcttctgctaatccccccttggaagccctccagagccccagcttcagaggcaacatggcggacaagctgaaggaccccagcaccctgggcttcctggaggcggccgtgaagatcagccacacgtccccagatatcccagctgaggtgcagatgtcggtcaaggagcacatcatgcgtcacacccggctgcagcggcaaactacagagccagcgtcatccaccaggcacacgtccttcaagcgccacctgccaaggcagatgcatgtctccagtgtagactatggcaatgagcttccaccagcagcagagcagcccaccagcattggccgcatcaagcctgagctctacaagcagaagtcggtggatggggaggatgccaagtctgaggccaccaagagctgcgggaagatcaacttcagcctacgctacgattacgagaccgagaccctgattgtgcgtatcctgaaggcttttgacctccctgccaaggacttttgtggaagctctgacccttatgtcaagatctacctcctgcctgaccgcaaatgcaagctgcagacccgggtgcaccgcaagaccctgaaccccacctttgatgagaacttccacttccctgtgccctatgaggagctggctgaccgcaagctgcatctcagtgtcttcgactttgaccgcttctcccgccatgacatgattggcgaggtcatcctggacaacctctttgaggcctctgacctgtctcgggaaacctccatctggaaggatatccaatatgccacaagtgaaagcgtggacttgggagagatcatgttctccctttgctacctgcccactgcaggcaggctcaccctcacagtgattaagtgtcggaacctcaaggcgatggacatcacaggctattcagatccctatgtgaaagtgtccttgctctgtgatgggcggaggctgaagaagaagaaaacaaccataaagaaaaacactctcaatcctgtctacaatgaggccatcatctttgacattcccccggaaaacatggatcaagtcagcctgctcatctcagtcatggactatgatcgagtgggccacaatgagatcataggagtctgtcgtgtggggatcactgctgaaggcctgggcagggaccactggaacgagatgctggcatacccccggaagcccatcgcacactggcactccttggtggaggtaaagaaatccttcaaagagggaaaccctcggttgtgatttcattcacgtggatgctgcaagcagagagactgccacctggagttaggatggcagggccgagctgctagcttcgacagtgagagctcgtgcccatctccgaaaccacctccaacaccatgagatgtgcagccaaataacacaaatgggactcagcaatgttctctttgcacttgttcaaccgtctaaacagtgttgtgcagtcgcagtggcggcagcagcggcagccgtccgtcactccagagtcttacctgctcctgtgtaggtcaaagctgagacacttgtcatgtggtcagatctgtcttagtcttttgtgtctcccaaggtgatgtttttgtggtttttcactttttatgggtctgctggtaagaaaagggaaaaaaaaaaagagtaggaaaagacaaagggtggaaagcccagaagttggttctagaaaatacaaggtacagttttttggaaagaggtggattgagtttctgaaatgctgcgtctccagcaagctccacaaccctggaaaaggaggaggcgtggtgggactgcggctgcattttcagtgccctgcaggaatggggtgaatccatggaagagcctttgtgaggtgaattactagtctttgaagctcttcgctggcaggacataaaccacgctgggaccctcagtcccgtgttgaaatcacaagacctctgaggcgcttgtgagccttcagctgatgtgcagggttcctcgctccccttcctcgctggctttccccatgaattgaaaacgtcttgattcctcatgggaacttagtcactttctttaggaatgattcagttcagccgaaactaaacacgccatatgttttctgatgcgccacagttaatgatcacatttgtttgaaaacaggatctttgtcctcagaaataatcttgattgtaaagtaagagagaaacatatgttctggaatgatttctgcattatacatagctttataattccatgaagtatcaagctgctgtttaaaatgcctaaacagattaaagaaaaacctagattaaatgttcttttccaaatggggagttttgaaatccaaatagcagtttgagtccatctttctatgaagagtatgtttttgattgaaaccgagtcagcgtaagcctatttcagcccctttggctctttgacaatattcatcttaaactttagttctataaattactaagtacttcagtgttgtttgtttcagtggttgtgagggtttcttgtttcctttagatctttaccttaggccaaactcagtttaggaaaaaaaaaattgtttgaactattctgtgttgtaatagcacatttctgttgagttaatagtggtcttcccaccaacccctaaaaccaggttgatttgctcaatctcagtttgtataaccccagtaagcgcatggaggtgagtttctacttcgacttgtggcgacacagtgccagtttcctgagctgtgtgtactacttgcaagaggcaagtctgctgaagaaccccttcttttaacagtggaaaatcaagaacagaaaatctgttcacacacctgtgtcttattctttatatatgctacatggtagaggagcagcgaccaataaagtatccctcattttaaaccaagttgtcagatttctctgctgatagaacgctgcatagtatcttctagccctaaaaatgaccaggttgggcatgagttaacaggatattgtggcaaaaggaattttctgcttagaaaagtaaatgtagataaacctaaactccaccctgtactgagccttaggctagggactcatgtgtaaagatgacttttctccccagatatcttgtcattgacaggccttcctagtctggtagtcctacatttgggtgttctcctgagagtgagaaaaaacccaaggtcatgacaagattcctggcaggtgacagacttcattatgattctgactctagactgaccccatcaagatagtcgtttccgtcagtgaacagatgctgaaggccttgccattacaaaggagacaactgagttccctgggtcataaggagtccagaaattagtgtgagaaggtccttctggaagtgaactcaaaattcatgtccagctgtcatcgttaaacccttaggcaggtgagtataacccattctaacctcttggagaagggagtgtgatcaatgtgaatcacaatagtattgctcatctgagacattcctcttatatccaagcagctatctcccatgagtgaacatcccagtggtttcagaaaatcatgtcctgaacagattctagccagccccacaccaccctggccaactgcaaccgctgctgctctagcagtctgggtcaattcctacaggcttgggagcccaccccagggaggcttttatctcctgcagcctcatccccagcaccctcaaggtagactactcctcagcctgaatcatgaatgaaacctgaacatctgccaacttcattatctagcccagtatctcttccctcacagagaagaagaaaatgaaatacaaagttgatccatttgttggctttctctggccggagaaacctctcgggttgttgctgtgagctttgatgaagttgtgataaccagggccatttgcacataggtttttttaaaaaacatgaaaagttcccttctcctttatttagcagtgtttccgggctgaaagacgccctcctccccctctgcgcttacccaggacgttaattaattgcactgtcatttaaaatattatgttgttaattactcgtttgtgtcttcccacccgtgtcacagcctggagtttttattcaattaaatctctgtctcttgccca

SEQ ID NO: 6658 - DNA, 1980 bp, Homo sapiens; identical to SEQ ID NO: 6515

SEQ ID NO: 6659 - DNA, 4768 bp, Homo sapiens
cgggagcggcgggggcggcgccgaggccgcgggcggggggaggagggccgcagccccggagaggggaaaaggcgggccggacggcgccagcagccagccccgaggacgcgagcggcaggtgtgcacagaggttctccactttgttttctgaactcgcggtcaggatggttttctctgtcaggcagtgtggccatgttggcagaactgaagaagttttactgacgttcaagatattccttgtcatcatttgtcttcatgtcgttctggtaacatccctggaagaagatactgataattccagtttgtcaccaccacctgctaaattatctgttgtcagttttgccccctcctccaatggtactccagaggttgaaacaacaagcctcaatgatgttactttaagcttactcccttcaaacgaaacagaaaaaactaaaatcactatagtaaaaaccttcaatgcatcaggcgtcaaaccccagagaaatatctgcaatttgtcatctatttgcaatgactcagcattttttagaggtgagatcatgtttcaatatgataaagaaagcactgttccccagaatcaacatataacgaatggcaccttaactggagtcctgtctctaagtgaattaaaacgctcagagctcaacaaaaccctgcaaaccctaagtgagacttactttataatgtgtgctacagcagaggcccaaagcacattaaattgtacattcacaataaaactgaataatacaatgaatgcatgtgctgtaatagctgctttggaaagagtaaagattcgaccaatggaacactgctgctgttctgtcaggataccctgcccttcctccccagaagagttggaaaagcttcagtgtgacctgcaggatcccattgtctgtcttgctgaccatccacgtggcccaccattttcttccagccaatccatcccagtggtgcctcgggccactgtgctttcccaggtccccaaagctacctcttttgctgagcctccagattattcacctgtgacccacaatgttccctctccaataggggagattcaacccctttcaccccagccttcagctcccatagcttccagccctgccattgacatgcccccacagtctgaaacgatctcttcccctatgccccaaacccatgtctccggcaccccacctcctgtgaaagcctcattttcctctcccaccgtgtctgcccctgcgaatgtcaacactaccagcgcacctcctgtccagacagacatcgtcaacaccagcagtatttctgatcttgagaaccaagtgttgcagatggagaaggctctgtccttgggcagcctggagcctaacctcgcaggagaaatgatcaaccaagtcagcagactccttcattccccgcctgacatgctggcccctctggctcaaagattgctgaaagtagtggatgacattggcctacagctgaacttttcaaacacgactataagtctaacctccccttctttggctctggctgtgatcagagtgaatgccagtagtttcaacacaactacctttgtggcccaagaccctgcaaatcttcaggtttctctggaaacccaagctcctgagaacagtattggcacaattactcttccttcatcgctgatgaataatttaccagctcatgacatggagctagcttccagggttcagttcaatttttttgaaacacctgctttgtttcaggatccttccctggagaacctctctctgatcagctacgtcatatcatcgagtgttgcaaacctgaccgtcaggaacttgacaagaaacgtgacagtcacattaaagcacatcaacccgagccaggatgagttaacagtgagatgtgtattttgggacttgggcagaaatggtggcagaggaggctggtcagacaatggctgctctgtcaaagacaggagattgaatgaaaccatctgtacctgtagccatctaacaagcttcggcgttctgctggacctatctaggacatctgtgctgcctgctcaaatgatggctctgacgttcattacatatattggttgtgggctttcatcaatttttctgtcagtgactcttgtaacctacatagcttttgaaaagatccggagggattacccttccaaaatcctcatccagctgtgtgctgctctgcttctgctgaacctggtcttcctcctggactcgtggattgctctgtataagatgcaaggcctctgcatctcagtggctgtatttcttcattattttctcttggtctcattcacatggatgggcctagaagcattccatatgtacctggcccttgtcaaagtatttaatacttacatccgaaaatacatccttaaattctgcattgtcggttggggggtaccagctgtggttgtgaccatcatcctgactatatccccagataactatgggcttggatcctatgggaaattccccaatggttcaccggatgacttctgctggatcaacaacaatgcagtattctacattacggtggtgggatatttctgtgtgatatttttgctgaacgtcagcatgttcattgtggtcctggttcagctctgtcgaattaaaaagaagaagcaactgggagcccagcgaaaaaccagtattcaagacctcaggagtatcgctggccttacatttttactgggaataacttggggctttgccttctttgcctggggaccagttaacgtgaccttcatgtatctgtttgccatctttaataccttacaaggatttttcatattcatcttttactgtgtggccaaagaaaatgtcaggaagcaatggaggcggtatctttgttgtggaaagttacggctggctgaaaattctgactggagtaaaactgctactaatggtttaaagaagcagactgtaaaccaaggagtgtccagctcttcaaattccttacagtcaagcagtaactccactaactccaccacactgctagtgaataatgattgctcagtacacgcaagcgggaatggaaatgcttctacagagaggaatggggtctcttttagtgttcagaatggagatgtgtgccttcacgatttcactggaaaacagcacatgtttaacgagaaggaagattcctgcaatgggaaaggccgtatggctctcagaaggacttcaaagcggggaagcttacactttattgagcaaatgtgattcctttcttctaaaatcaaagcatgatgcttgacagtgtgaaatgtccaattttaccttttacacaatgtgagatgtatgaaaatcaactcattttattctcggcaacatctggagaagcataagctaattaagggcgatgattattattacaagaagaaaccaagacattacaccatggtttttagacatttctgatttggtttcttatctttcattttataagaaggttggttttaaacaatacactaagaatgactcctataaagaaaacaaaaaaaggtagtgaactttcagctaccttttaaagaggctaagttatctttgataacatcatataaagcaactgttgacttcagcctgttggtgagtttagttgtgcatgcctttgttgtatataagctaaattctagtgacccatgtgtcaaaaatcttacttctacatttttttgtatttattttctactgtgtaaatgtattcctttgtagaatcatggttgttttgtctcacgtgataattcagaaaatccttgctcgttccgcaaatcctaaagctccttttggagatgatataggatgtgaaatacagaaacctcagtgaaatcaagaaataatgatcccagccagactgagaaaatgtaagcagacagtgccacagttagctcatacagtgcctttgagcaagttaggaaaagatgcccccactgggcagacacagccctatgggctcatggtttgacaaacagagtggagagaccatattttagccccactcaccctcttgggtgcacgacctgtacagccaaacacagcatccaatatgaatacccatcccctgaccgcatccccagtagtcagattatagaatctgcaccaagatgtttagctttataccttggccacagagagggatgaactgtcatccagaccatgtgtcaggaaaattgtgaacgtagatgaggtacatacactgccgcttctcaaatccccagagcctttaggaacaggagagtagactaggattccttctcttaaaaaggtacatatatatggaaaaaaatcatattgccgttctttaaaaggcaactgcatggtacattgttgattgttatgactggtacactctggcccagccagagctataattgttttttaaatgtgtcttgaagaatgcacagtgacaaggggagtagctattgggaacagggaactgtcctacactgctattgttgctacatgtatcgagccttgattgctcctagttatatacagggtctatcttgcttcctacctacatctgcttgagcagtgcctcaagtacatccttattaggaacatttcaaaccccttttagttaagtctttcactaaggttctcttgcatatatttcaagtgaatgttggatctcagactaaccatagtaataatacacatttctgtgagtgctgacttgtctttgcaatatttcttttctgatttatttaattttcttgtatttatatgttaaaatcaaaaatgttaaaatcaatgaaataaatttgcagttaaga

SEQ ID NO: 6660 - DNA, 3209 bp, Homo sapiens; identical to SEQ ID NO: 3293

SEQ ID NO: 6661 - DNA, 1107 bp, Homo sapiens
ctctccgactactcaccccgagtgtaaagaaccttcggctcgcgtgcttctgagctgctgtggatggcctcggctctctggactgtccttccgagtaggatgtcactgagatccctcaaatggagcctcctgctgctgtcactcctgagtttctttgtgatgtggtacctcagccttccccactacaatgtgatagaacgcgtgaactggatgtacttctatgaaatccatttggatgtctgtcaactgagacgtgtgattgcagcccatggcttttcttccaaggagatcatcactttttggcaggtcatgctaaggaacaccacatgccattattaacttcacattctacaaaaagcctagaaggacaggatactttgtggaaagtgttaaataaagtaggtactgtggaaaattcatggggaggtcagtgtgctggcttacactgaactgaaactcatgaaaaacccagactggagactggagggttacacttgtgatttattagtcaggcccttcaaagatgatatgtggaggaattaaatataaaggaattggaggtttttgctaaagaaattaataggaccaaacaatttggacatgtcattctgtagactagaatttcttaaaagggtgttactgagttataagctcactaggctgtaaaaacaaaacaatgtagagttttatttattgaacaatgtagtcacttgaaggttttgtgtatatcttatgtggattaccaatttaaaaatatatgtagttctgtgtcaaaaaacttcttcactgaagttatactgaacaaaattttacctgtttttggtcatttataaagtacttcaagatgttgcagtatttcacagttattattatttaaaattacttcaactttgtgtttttaaatgttttgacgatttcaatacaagataaaaaggatagtgaatcattctttacatgcaaacattttccagttacttaactgatcagtttattattgatacatcactccattaatgtaaagtcataggtcattattgcatatcagtaatctcttggactttgttaaatattttactgtggtaatatagagaagaattaaagcaagaa

SEQ ID NO: 6662 - DNA, 2520 bp, Homo sapiens
ggaaaacggccagcctgaggagctgctgcgagggtccgcttcgtctttcgagagtgactcccgcggtcccaaggctttccagagcgaacctgtgcggctgcaggcaccggcgtgttgagtttccggcgttccgaaggactgagctcttgtcgcggatcccgtccgccgtttccagcccccagtctcagagcggagcccacagagcagggcaccggcatggccaaagccgcggcgatcggcatcgacctgggcaccacctactcctgcgtgggggtgttccaacacggcaaggtggagatcatcgccaacgaccagggcaaccgcaccacccccagctacgtggccttcacggacaccgagcggctcatcggggatgcggccaagaaccaggtggcgctgaacccgcagaacaccgtgtttgacgcgaagcggctgattggccgcaagttcggcgacccggtggtgcagtcggacatgaagcactggcctttccaggtgatcaacgacggagacaagcccaaggtgcaggtgagctacaagggggagaccaaggcattctaccccgaggagatctcgtccatggtgctgaccaagatgaaggagatcgccgaggcgtacctgggctacccggtgaccaacgcggtgatcaccgtgccggcctacttcaacgactcgcagcgccaggccaccaaggatgcgggtgtgatcgcggggctcaacgtgctgcggatcatcaacgagcccacggccgccgccatcgcctacggcctggacagaacgggcaagggggagcgcaacgtgctcatctttgacctgggcgggggcaccttcgacgtgtccatcctgacgatcgacgacggcatcttcgaggtgaaggccacggccggggacacccacctgggtggggaggactttgacaacaggctggtgaaccacttcgtggaggagttcaagagaaaacacaagaaggacatcagccagaacaagcgagccgtgaggcggctgcgcaccgcctgcgagagggccaagaggaccctgtcgtccagcacccaggccagcctggagatcgactccctgtttgagggcatcgacttctacacgtccatcaccagggcgaggttcgaggagctgtgctccgacctgttccgaagcaccctggagcccgtggagaaggctctgcgcgacgccaagctggacaaggcccagattcacgacctggtcctggtcgggggctccacccgcatccccaaggtgcagaagctgctgcaggacttcttcaacgggcgcgacctgaacaagagcatcaaccccgacgaggctgtggcctacggggcggcggtgcaggcggccatcctgatgggggacaagtccgagaacgtgcaggacctgctgctgctggacgtggctcccctgtcgctggggctggagacggccggaggcgtgatgactgccctgatcaagcgcaactccaccatccccaccaagcagacgcagatcttcaccacctactccgacaaccaacccggggtgctgatccaggtgtacgagggcgagagggccatgacgaaagacaacaatctgttggggcgcttcgagctgagcggcatccctccggcccccaggggcgtgccccagatcgaggtgaccttcgacatcgatgccaacggcatcctgaacgtcacggccacggacaagagcaccggcaaggccaacaagatcaccatcaccaacgacaagggccgcctgagcaaggaggagatcgagcgcatggtgcaggaggcggagaagtacaaagcggaggacgaggtgcagcgcgagagggtgtcagccaagaacgccctggagtcctacgccttcaacatgaagagcgccgtggaggatgaggggctcaagggcaagatcagcgaggcggacaagaagaaggttctggacaagtgtcaagaggtcatctcgtggctggacgccaacaccttggccgagaaggacgagtttgagcacaagaggaaggagctggagcaggtgtgtaaccccatcatcagcggactgtaccagggtgccggtggtcccgggcctggcggcttcggggctcagggtcccaagggagggtctgggtcaggccctaccattgaggaggtggattaggggcctttgttctttagtatgtttgtctttgaggtggactgttgggactcaaggactttgctgctgttttcctatgtcatttctgcttcagctctttgctgcttcacttctttgtaaagttgtaacctgatggtaattagctggcttcattatttttgtagtacaaccgatatgttcattagaattctttgcatttaatgttgatactgtaagggtgtttcgttccctttaaatgaatcaacactgccaccttctgtacgagtttgtttgttttttttttttttttttttttttgcttggcgaaaacactacaaaggctgggaatgtatgtttttataatttgtttatttaaatatgaaaaataaaatgttaaacttt

SEQ ID NO: 6663 - DNA, 668 bp, Homo sapiens
ggttacatgatggaaaatcgaatctcaggcttaaagtgtgacacagatgtgtttgccacttttgaaggtgacgatgttgttatgcttcaggttgtggggcgggaactgctggcccaatacaccaaacagtatgaagaaaaaccactctttggcctgctccaaaactgggctgaatctgtgggggacaagctgagaaccagtttcctggcatttaacatggacacagttgatgatctcgcctttctgttgaaagcagtgaaatttcgtgaaagggttcttcagcggggtttggtggccagaatttattataagttaccttagagcagttctccctagcagtgaagagctgtcctgaccaagaggaccagactttgttaatgaagttttgtctgttgtatggaaccaagctggtgtttcaggagcgggcctggtatttagaacataaatacttgactcccatggccagcacgaggatcaggaatcaggagatgtggcttggaggaagaatgcgcagaagtgtggtagacaccaggcccccaagccaggatgctgcttggctcctttgaacgtagaagatggattacactcgtttactattttaatctaagcataaagtataaatgcagtcactgcttagtgtcacaaaggcttgtgattaaagaacacac

SEQ ID NO: 6664 - DNA, 4364 bp, Homo sapiens
tgcaaatgaatgccttccactgaaccgaggtagacggggtcgagtttcttgcgcgatggtgggcttgtatgtgtgtgtgtgtgtgtgtgtgtggggggggggggtgacgaggttggcattgaggatccataccctttgcgcccaaagaaaggtgacgtggactagtgtcgtgcctttggacaggcagagtaagaggagggagaagaaacaggtagagctgctggccttgtcggggacacctttggacgtgctggagggcaacgacgccctagttttctgtgaagttaagtagcttctgcaggactgggttcagtatttctagtaccttctcaggatccctcctccgccaacgaattcctcaaccacgggccaagcaaactactcccccgcccactgtcagcagcagtctctgttgaatgggaatactgcaccttcaggcttaacgccacgtgggctcctttgctgtcctccaggcactgttatagaagaatggaagaagatacagattatagaatcaggtttagttctttgtgtttctttaatgatcacgttggatttcatggcactataaaaagctcaccaagtgactttattgttattgaaattgatgaacagggacagttagttaataagaccatcgatgagcctattttcaagattagtgaaatacaacttgagccaaataattttcccaaaaaaccaaaactagatcttcaaaatctgtccttagaagatggaagaaaccaagaagttcatactttgattaagtacactgatggtgaccaaaatcatcagtctggttcagaaaaggaagatactatcgttgatggaacttccaaatgtgaagaaaaagctgatgttttaagctcctttttggatgaaaaaactcatgagttactgaataattttgcctgtgatgtaagagagaagtggctttctaaaacagagctaattggactacctcctgaattctcaataggcagaatccttgacaaaaaccagagggctagtttacacagtgccattaggcagaaatttccatttttagtaactgtaggaaaaaacagtgaaattgttgtaaaaccaaatcttgaatataaagaactttgtcatttggtatctgaagaggaagcatttgacttttttaaatatttggatgcaaagaaagaaaattccaaatttacctttaaacctgatacaaacaaagaccacagaaaagctgtccaccattttgtcaacaaaaagtttggaaaccttgtggaaaccaaatctttttctaaaatgaattgcagtgctggtaatccgaatgtggtggtaacagtaagatttcgggaaaaagcacacaaacgtgggaaaaggcctctttctgaatgccaagaaggaaaagttatatatacagcttttaccctacgaaaggaaaacctggaaatgtttgaagcgattggttttttagctatcaaacttggtgttattccttcggattttagttatgcaggccttaaagacaagaaagccatcacctatcaagcaatggttgttagaaaagtgactccagagaggttgaaaaatattgaaaaagaaattgaaaagaaaagaatgaatgtctttaatattcggtctgtagatgattccctgagacttggtcagctcaaaggaaatcactttgatattgtcattagaaatttaaaaaaacaaataaatgattctgcaaacctgagggagagaattatggaagcaatagaaaatgttaagaaaaaaggctttgtgaattactatggaccacagagatttgggaagggaaggaaagttcacacagaccaaattggactagctttgctgaagaatgaaatgatgaaagccataaaattgtttcttacaccagaagacttggatgatcctgtaaatagagcaaagaagtattttcttcaaactgaggatgctaaaggcacactttcattgatgcctgaattcaaagtgcgtgagagagcattgttggaggcattgcaccgctttggcatgaccgaggaaggttgtatccaggcatggttctctttaccccattccatgcgcatattctatgttcacgcatataccagcaaaatttggaatgaggcagtatcttacagacttgaaacctatggagcaagagtagtgcagggtgatttggtctgtttggatgaagacattgatgacgagaatttcccaaatagtaaaattcacctggtaactgaagaggagggatcagctaatatgtatgcaatacatcaggtggttcttccagtacttggatacaatattcagtacccgaagaacaaagtagggcagtggtaccatgacatacttagcagagatggactacagacatgtaggtttaaagtacctactctgaaactgaatataccaggttgctatagacagattttgaaacatccctgtaatctctcataccaactaatggaagatcatgacattgatgtcaaaacgaaaggttcccacattgatgaaacagctttgtctcttttgatctcttttgatcttgatgcttcatgctatgctaccgtttgtctgaaggaaataatgaagcatgacgtttaaaactgatacccttggtataaccatatatatgtcactctttgaaggaaagggggctaaaatgtcttaagcaccttccatgtgttaggaacttcataattgttatctcttttaattttcacagcatcctgagaagttaggatttgatactgtaattttatagaggatatgtaagtgtcagggtccaaatttaaggtccatgtgaccccaaagcctgtgttttttttctattatatgtttcagtgacctttattctgtgtcataaagttacaatcttttaaaaccattaggaatatatataatactgcaagataacatttaagaaaaaaagttgtgaatattcatatcctccagctccttgcttagaacactagtaaaattaggtcgcagtgaagcaaatgttggagagaaagatagatgaagcattttgctaattattattgtccccctttcctgtttttgaaattattgatcagaacaatatacaagggaaatgccatacctctgtttgtgatagataccccagagtagttattacctctttgtgagataagtaatctttgatgaagattgaaatacaatttctcatccaatttttatatcttggcatacgctgaccctcttgaccatttgtaattttttcatattatctaaaacaggtgttagagtcagacagattcattcttagattctagctctgacacttactagtgattttgagtatgttgttgatttttttgtgtgtggttactgatagaatcaagacaattacaacttcataaatgacaaataataggattatctccacattttctgttgctggaggaacaaaacattgtgcccatttgaaaattttaatttttgttggtttaactatcccacattataaatcatccttcaccattttatatcagttaaatatgggtgtgttggggaggaatgactggcatgtagacatgtattgatttaggaagatctgagcatttctttcattgttggtaagatataatgatgaaatttaaaaagcagtatggagcattatatatcagtaatgtgatatatatacttaagccagtttaaccattttgggaaatgttagcattaggaaataaaatccaaaagaaggaagagaagctatatgcaatgcaaaatttgcttattgcaatattttcatatacagacactaaaaacagttttcaaagtccagcattacgtaactaaagtaagtaaaatgatgtgtatcaacttgatggtaaaatatgtagttatttaaaaaagcaatgaacaatttagtttcatgagaaaatgttgccccctaaaagtagaacacatatgttacaactgcaataatactctgaattcatctttcacaaataagagacatgttagcatagtgattaaaagcacagatattggagacaaactaacccagtttgaaccctggcactgccacgtatagcactgcagccttgggaaagttatttaaactcatgggcttcagtttcaacatctgtaaaatgggcatgttaacattgcctacctcataggattactgtgagaattttctaagttaatatatgtaaagcaactttaaaaagtgcctggcacttagttattgttaagtaagtgtctgcagatgcaagtttggaagagaaaagcaaataaatgaaaatcccttcctgttaagatgatggggtatttggattttttttaatactaaaaagttttttttgttatatgttttggcaataaataattctcaatacacaaaa

SEQ ID NO: 6665 - DNA, 995 bp, Homo sapiens; identical to SEQ ID NO: 4378

SEQ ID NO: 6666 - DNA, 835 bp, Homo sapiens
tggcatatagagtgcttggttatagaactgtttcagtatatccatggactatttattggcccagatatgaatcattgcatgtgttttgtaagcttgtcccttttgttaaacagttgatttcaagtttgtttttcctttttcatttctaaagttcgatgactttaccaaagtggtttcctaattccaatgttcttgtggtaatattaattcttttgttcactttttatgtctcatatttgaacccccatgttaccaacatcttcctctccaatttcagcctgaaatctttcatcttatagggtcctggactctactacgtggatgaacatgggactcggctctcaggaaatatgttctccacgggtagtgggaacacttatgcctacggggtcatggacagtggctatcggcctaatcttagccctgaagaggcctatgaccttggccgcagggctattgcttatgccactcacagagacagctattctggaggcgttgtcaatatgtaccacatgaaggaagatggttgggtgaaagtagaaagtacagatgtcagtgacctgctgcaccagtaccgggaagccaatcaataatggtggtggtggcagctgggcaggtctcctctgggaggtcttggccgactcagggacctaagccacgttaagtccaaggagaagaagaggcctagcctgagccaaagagagagtacgggctcagcagccagaggaggccggtgaagtgcatcttctgcgtgttctctatttgaacaagcatttcccccagggaagtttctgggtgccccactaagtagaataaagaaaaacggttataaata

SEQ ID NO: 6667 - DNA, 604 bp, Homo sapiens
gatgggtactcttctgcacccagatactcccagccagatactctcctccatccagatactctgtttccagatactctccctgcagctagttatccccttgagtccagatgctgcctgcttccagatactcctctgtatccagatactcctctaaatccaggtactccctacatccagatactgtacttcctaagatagacctctttccggtcacaagttcagtcacaagacagagaccccagagttagcgttgtctacctgggacatctcccagccccccttcaccctcacaaattctgcagtgtgtttttaatgatgtgtctttgggtgatgagtatgctctgggactaggtggaggtggtggttgcatctcccatgtagctcatggtcaatacaggtggtgattgtacaatattgtgaatatatgaaacaccattgaaggaggggggaaggaaagaaagaaaaataggagaagaaaggaagaaagaaagctgggggtctagtgaaaaccattttacagaagtaaagtaggcaaaaagttaaaaggataaatggttgcaggaaagtaaacagttccaggtgcaggggctttaagactattaca

SEQ ID NO: 6668 - DNA, 1909 bp, Homo sapiens
aacggctagcctgaggagctgctgcgacagtccactacctttttcgagagtgactcccgttgtcccaaggcttcccagagcgaacctgtgcggctgcaggcaccggcgcgtcgagtttccggcgtccggaaggaccgagctcttctcgcggatccagtgttccgtttccagcccccaatctcagagcggagccgacagagagcagggaaccggcatggccaaagccgcggcgatcggcatcgacctgggcaccacctactcctgcgtgggggtgttccaacacggcaagggggagcgcaacgtgctcatctttgacctgggcgggggcaccttcgacgtgtccatcctgacgatcgacgacggcatcttcgaggtgaaggccacggccggggacacccacctgggtggggaggactttgacaacaggctggtgaaccacttcgtggaggagttcaagagaaaacacaagaaggacatcagccagaacaagcgagccgtgaggcggctgcgcaccgcctgcgagagggccaagaggaccctgtcgtccagcacccaggccagcctggagatcgactccctgtttgagggcatcgacttctacacgtccatcaccagggcgaggttcgaggagctgtgctccgacctgttccgaagcaccctggagcccgtggagaaggctctgcgcgacgccaagctggacaaggcccagattcacgacctggtcctggtcgggggctccacccgcatccccaaggtgcagaagctgctgcaggacttcttcaacgggcgcgacctgaacaagagcatcaaccccgacgaggctgtggcctacggggcggcggtgcaggcggccatcctgatgggggacaagtccgagaacgtgcaggacctgctgctgctggacgtggctcccctgtcgctggggctggagacggccggaggcgtgatgactgccctgatcaagcgcaactccaccatccccaccaagcagacgcagatcttcaccacctactccgacaaccaacccggggtgctgatccaggtgtacgagggcgagagggccatgacgaaagacaacaatctgttggggcgcttcgagctgagcggcatccctccggcccccaggggcgtgccccagatcgaggtgaccttcgacatcgatgccaacggcatcctgaacgtcacggccacggacaagagcaccggcaaggccaacaagatcaccatcaccaacgacaagggccgcctgagcaaggaggagatcgagcgcatggtgcaggaggcggagaagtacaaagcggaggacgaggtgcagcgcgagagggtgtcagccaagaacgccctggagtcctacgccttcaacatgaagagcgccgtggaggatgaggggctcaagggcaagatcagcgaggcggacaagaagaaggtgctggacaagtgtcaagaggtcatctcgtggctggacgccaacaccttggccgagaaggacgagtttgagcacaagaggaaggagctggagcaggtgtgtaaccccatcatcagcggactgtaccagggtgccggtggtcccgggcctgggggcttcggggctcagggtcccaagggagggtctgggtcaggccccaccattgaggaggtagattaggggcctttccaagattgctgtttttgttttggagcttcaagactttgcatttcctagtatttctgtttgtcagttctcaatttcctgtgtttgcaatgttgaaattttttggtgaagtactgaacttgctttttttccggtttctacatgcagagatgaatttatactgccatcttacgactatttcttctttttaatacacttaactcaggccattttttaagttggttacttcaaagtaaataaactttaaaattcaagtga

SEQ ID NO: 6669 - DNA, 588 bp, Homo sapiens
taggggaggcgtgggcacttggagttgtcttaggactgatgtctgaattaactaaatgaacttgtctggtttgcagagtgctgatggcagagattggtgaggatttggataaatctgatgtgtcctcattaattttcctcatgaaggattacatgggccgaggcaagataagcaaggagaagagtttcttggaccttgtggttgagttggagaaactaaatctggttgccccagatcaactggatttattagaaaaatgcctaaagaacatccacagaatagacctgaagacaaaaatccagaagtacaagcagtctgttcaaggagcagggacaagttacaggaatgttctccaagcagcaatccaaaagagtctcaaggatccttcaaataacttcaggctccataatgggagaagtaaagaacaaagacttaaggaacagcttggcgctcaacaagaaccagtgaagaaatccattcaggaatcagaagcttttttgcctcagagcatacctgaagagagatacaagatgaagagcaagcccctaggaatctgcctgataatcgattgcattggcaatgagacag

SEQ ID NO: 6670 - DNA, 1450 bp, Homo sapiens
gcctgtcccagtgaggacagggacacagtactcggccacaccatggggcgcccactgcacctcgtcctgctcagtgcctccctggctggcctcctgctgctcggggaaagtctgttcatccgcagggagcaggccaacaacatcctggcgagggtcacgagggccaattcctttcttgaagagatgaagaaaggacacctcgaaagagagtgcatggaagagacctgctcatacgaagaggcccgcgaggtctttgaggacagcgacaagacgaatgaattctggaataaatacaaagatggcgaccagtgtgagaccagtccttgccagaaccagggcaaatgtaaagacggcctcggggaatacacctgcacctgtttagaaggattcgaaggcaaaaactgtgaattattcacacggaagctctgcagcctggacaacggggactgtgaccagttctgccacgaggaacagaactctgtggtgtgctcctgcgcccgcgggtacaccctggctgacaacggcaaggcctgcattcccacagggccctacccctgtgggaaacagaccctggaacgcaggaagaggtcagtggcccaggccaccagcagcagcggggaggcccctgacagcatcacatggaagccatatgatgcagccgacctggaccccaccgagaaccccttcgacctgcttgacttcaaccagacgcagcctgagaggggcgacaacaacctcaccaggatcgtgggaggccaggaatgcaaggacggggagtgtccctggcaggccctgctcatcaatgaggaaaacgagggtttctgtggtggaaccattctgagcgagttctacatcctaacggcagcccactgtctctaccaagccaagagattcaaggtgagggggaccggaacacggagcaggaggagggcggtgaggcggtgcacgaggtggaggtggtcatcaagcacaaccggttcacaaaggagacctatgacttcgacatcgccgtgctccggctcaagacccccatcaccttccgcatgaacgtggcgcctgcctgcctccccgagcgtgactgggccgagtccacgctgatgacgcagaagacggggattgtgagcggcttcgggcgcacccacgagaagggccggcagtccaccaggctcaagatgctggaggtgccctacgtggaccgcaacagctgcaagctgtccagcagcttcatcatcacccagaacatgttctgtgccggctacgacaccaagcaggaggatgcctgccagggggacagcgggggcccgcacgtcacccgcttcaaggacacctacttcgtgacaggcatcgtcagctggggagagggctgtgcccgtaaggggaagtacgggatctacaccaaggtcaccgccttcctcaagtggatcgacaggtccatgaaaaccaggggctt

SEQ ID NO: 6671 - DNA, 536 bp, Homo sapiens
agctcacctgggagactccaagtggaagccgagcctcggttctgcctctccaggcaacgcgggaggcccagcgggaaggcaggaggcggcggcggaggaggagctctactgagccgcaactgtggcgacagcaaccggagtcgcagccgccgccacctgcacctggcgcctagcccacgtccagcgcctgcccggccgccgcttcccgccaccctgccctgcccacccgccaggggttccttcaggagtcacaagtactattgggttggaaaatctgggagaataatagtttacttactgatgaaactgctgtattatcattcattaagctggagcagatcacagtttgagggtactaccattaaagataccttcttctcagcaaatctatgataaaaaatataagtaacagaagaagaaataactgttatttgtcaagtgacaagcttttaatgtcagaatggctcacctaaagcgactagtaaaattacacattaaaagacattaccataaaaagttctggaagcttggtgcag

SEQ ID NO: 6672 - DNA, 2050 bp, Homo sapiens
aagtggcttcagagatgcagccctcactgcttaacgtcctagttattgtccttgaaacccgagccatctcaccgctcgcccccaaccctgggctctggctgtttaaaagctggagaggaagtgaaagcgtcaagtacatcccgttaggtgcaaagcaagtctcgttgatcgccattgctagttttgcacacgtttgcgaatcagagctgcccggggtacaccgaccgcgcagggaaacatcgagagtgtaaataaatacatcgcctcttgttcggatttttgctactaccgaaaatatgtaaattgtgaactctgttggctctctttggatccaggttgatagaagtccagatcctgaggaaatctccagctaaatgctcaaaatataaaatactgagctgagatttgcgaagagcagcagcatggatggattttatgaccagcaagtgccttacatggtcaccaatagtcagcgtgggagaaattgtaacgagaaaccaacaaatgtcaggaaaagaaaattcattaacagagatctggctcatgattcagaagaactctttcaagatctaagtcaattacaggaaacatggcttgcagaagctcaggtacctgacaatgatgagcagtttgtaccagactatcaggctgaaagtttggcttttcatggcctgccactgaaaatcaagaaagaaccccacagtccatgttcagaaatcagctctgcctgcagtcaagaacagccctttaaattcagctatggagaaaagtgcctgtacaatgtcagtgcctatgatcagaagccacaagtgggaatgaggccctccaacccccccacaccatccagcacgccagtgtccccactgcatcatgcatctccaaactcaactcatacaccgaaacctgaccgggccttcccagctcacctccctccatcgcagtccataccagatagcagctaccccatggaccacagatttcgccgccagctttctgaaccctgtaactcctttcctcctttgccgacgatgccaagggaaggacgtcctatgtaccaacgccagatgtctgagccaaacatccccttcccaccacaaggctttaagcaggagtaccacgacccagtgtatgaacacaacaccatggttggcagtgcggccagccaaagctttccccctcctctgatgattaaacaggaacccagagattttgcatatgactcagaagtgcctagctgccactccatttatatgaggcaagaaggcttcctggctcatcccagcagaacagaaggctgtatgtttgaaaagggccccaggcagttttatgatgacacctgtgttgtcccagaaaaattcgatggtttttcaaatgttgccctttctgtaattattttaagaggtatatgtctctctactgaccataggagacatcaaacaagagccaggaatgtatcgggaaggacccacataccaacggcgaggatcacttcagctctggcagtttttggtagctcttctggatgacccttcaaattctcattttattgcctggactggtcgaggcatggaatttaaactgattgagcctgaagaggtggcccgacgttggggcattcagaaaaacaggccagctatgaactatgataaacttagccgttcactccgctattactatgagaaaggaattatgcaaaaggtggctggagagagatatgtctacaagtttgtgtgtgatccagaagcccttttctccatggcctttccagataatcagcgtccactgctgaagacagacatggaacgtcacatcaacgaggaggacacagtgcctctttctcactttgatgagagcatggcctacatgccggaagggggctgctgcaacccccacccctacaacgaaggctacgtgtattaacacaagtgacagtcaagcagggcgtttttgcgcttttccttttttctgcaagatacagagaattgctgaatctttgttttatttctgttgtttgtattttatttttaaataataatacacaaaaaggggc

SEQ ID NO: 6673 - DNA, 1444 bp, Homo sapiens
ccgtgcaccgtgtgtgcgcgcggcgttgaaatgccctgcacgtcggggcagcgggacagatcccagggtgcccagggagtctccaagtgcctcactcctcccgccgcaaacatgacagagaactccgacaaagttcccattgccctggtgggacctgatgacgtggaattctgcagccccccggcgtacgctacgctgacggtgaagccctccagccccgcgcggctgctcaaggtgggagccgtggtcctcatttcgggagctgtgctgctgctctttggggccatcggggccttctacttctggaaggggagcgacagtcacatttacaatgtccattacaccatgagtatcaatgggaaattacaagatgggtcaatggaaatagacgctgggaacaacttggagacctttaaaatgggaagtggagctgaagaagcaattgcagttaatgatttccagaatggcatcacaggaattcgttttgctggaggagagaagtgctacattaaagcgcaagtgaaggctcgtattcctgaggtgggcgccgtgaccaaacagagcatctcctccaaactggaaggcaagatcatgccagtcaaatatgaagaaaattctcttatctgggtggctgtagatcagcctgtgaaggacaacagcttcttgagttctaaggtgttagaactctgcggtgaccttcctattttctggcttaaaccaacctatccaaaagaaatccagagggaaagaagagaagtggtaagaaaaattgttccaactaccacaaaaagaccacacagtggaccacggagcaacccaggcgctggaagactgaataatgaaaccagacccagtgttcaagaggactcacaagccttcaatcctgataatccttatcatcaggaaggggaaagcatgacattcgaccctagactggatcacgaaggaatctgttgtatagaatgtaggcggagctacacccactgccagaagatctgtgaacccctggggggctattacccatggccttataattatcaaggctgccgttcggcctgcagagtcatcatgccatgtagctggtgggtggcccgtatcttgggcatggtgtgaaatcacttcatatatcatgtgctgtaaaataagaactagctgaagagacaaccaaagaagcattaaggcaggttgatgctgataggaccacaaaatatttttacactcaacctgagcggttattcttgacactcttaacagaattttttcaattgttttccagaactttagtatatgcaaatgtactgaaagggtagttcaagtctaaaatgccataacccctttattatttgttattttttatttgcattgctttgccataagtcttcccttgcttgtatcttccaaagctattttgaaataaacatgaaaatttacagtttgccaaaaa

SEQ ID NO: 6674 - DNA, 1858 bp, Homo sapiens
attggcagctcttcacttgtatcttttcatatcaaaaatgggaggtgacacccagtttaaggaaaattccaaggcatttgtctcgactaatgtgaaagatgattacagtggccagaggactgccaaggctccttctcaagctgcttgagtcaatgagggtagacgcaccctctgaagatggtgactccctcctgagaagctggaccccttggtaaaagacaaggccttctccaagaagaatatgaaagtgttactcagacttatttgtttcatagctctactgatttcttctctggaggctgataaatgcaaggaacgtgaagaaaaaataattttagtgtcatctgcaaatgaaattgatgttcgtccctgtcctcttaacccaaatgaacacaaaggcactataacttggtataaagatgacagcaagacacctgtatctacagaacaagcctccaggattcatcaacacaaagagaaactttggtttgttcctgctaaggtggaggattcaggacattactattgcgtggtaagaaattcatcttactgcctcagaattaaaataagtgcaaaatttgtggagaatgagcctaacttatgttataatgcacaagccatatttaagcagaaactacccgttgcaggagacggaggacttgtgtgcccttatatggagttttttaaaaatgaaaataatgagttacctaaattacagtggtataaggattgcaaacctctacttcttgacaatatacactttagtggagtcaaagataggctcatcgtgatgaatgtggctgaaaagcatagagggaactatacttgtcatgcatcctacacatacttgggcaagcaatatcctattacccgggtaatagaatttattactctagaggaaaacaaacccacaaggcctgtgattgtgagcccagctaatgagacaatggaagtagacttgggatcccagatacaattgatctgtaatgtcaccggccagttgagtgacattgcttactggaagtggaatgggtcagtaattgatgaagatgacccagtgctaggggaagactattacagtgtggaaaatcctgcaaacaaaagaaggagtaccctcatcacagtgcttaatatatcggaaattgaaagtagattttataaacatccatttacctgttttgccaagaatacacatggtatagatgcagcatatatccagttaatatatccagtcactaatttccagaagcacatgattggtatatgtgtcacgttgacagtcataattgtgtgttctgttttcatctataaaatcttcaagattgacattgtgctttggtacagggattcctgctatgattttctcccaataaaagtcttgcctgaggtcttggaaaaacagtgtggatataagctgttcatttatggaagggatgactacgttggggaagacattgttgaggtcattaatgaaaacgtaaagaaaagcagaagactgattatcattttagtcagagaaacatcaggcttcagctggctgggtggttcatctgaagagcaaatagccatgtataatgctcttgttcaggatggaattaaagttgtcctgcttgagctggagaaaatccaagactatgagaaaatgccagaatcgattaaattcattaagcagaaacatggggctatccgctggtcaggggactttacacagggaccacagtctgcaaagacaaggttctggaagaatgtcaggtaccacatgccagtccagcgacggtcaccttcatctaaacaccagttactgtcaccagccactaaggagaaactgcaaagagaggctcacgtgcctctcgggtag

SEQ ID NO: 6675 - DNA, 1368 bp, Homo sapiens
cagggaacaaggcaacggacggcgcaacccagccccggctgacggacgctggcgactcagacatggacagtagctgccacaacgcgactaccaaaatgttagcgactgctccagctcggggcaacatgatgagcacgtccaaacccttggctttctccattgaacgaatcatggcgcgcaccccagagcccaaggccctgccagtcccccacttcctgcagggagccttacccaagggggaacccaagcactctctgcatctcaactcgtcgatcccctgcatgatccccttcgtgcctgtggcctacgacacgagccccaaggcaggagtgacgggctccgagccgcggaaggccagtctggaggccccggcggcgcccgcggcggtgccctcggctcccgcattcagctgcagcgacctgctcaactgcgcactgagtctcaagggcgacctggcccgcgacgcgctgccgctgcagcagtacaagctgccaaaaacgtatttagccgaaaggaataaactggtggtcccggcggtggagaaatacccttctggagtagctttcaaagacctgtcccaggctcagctgcagcattacatgaaagaaagcgcccagcttctgtcggaaaaaatcgcgttcaaaacctcggatttcagccgaggctctcctaatgccaagcccaaagttttcacttgcgaagtgtgtggaaaggtctttaatgcgcactataacttaacccgtcacatgccagtgcacacaggagccagacccttcgtttgcaaagtgtgcggaaaaggtttcaggcaagcaagcaccctgtgcaggcacaagatcattcacacgcaggaaaaacctcacaaatgtaaccagtgtggcaaagcatttaatagaagttccactttaaacactcatacccgaatacacgcgggctacaaaccgtttgtgtgtgaattctgtggcaaagggtttcatcaaaaagggaattacaaaaaccacaagttgacccacagcggggagaagcagttcaagtgcaatatctgcaacaaggctttccaccaggtttacaacctcaccttccacatgcacacccacaacgacaagaagcctttcacctgccccacgtgcggcaagggtttctgcaggaactttgacctcaagaagcatgtccgcaagctgcacgacagcagcctggggctggcccgcacgccagctggcgaaccaggcactgaaccgccgcccccgctaccgcagcagccgccgatgacgctgcctcctctgcagccgccgctgccaaccccggggcccctgcagcccgggctccaccagggccaccagtgatcgaggctaagggtcctcccagcctcag

SEQ ID NO: 6676 - DNA, 4938 bp, Homo sapiens
cagaggagggtggagagggcggtgggaggcgtgtgcctgagtgggctctactgccttgttccatattatttggtgcacattttccctggcactctgggttgctagccccgccgggcactgggcctcagacactgcgcggttccctcggagcagcaagctaaagaaagcccccagtgccggcgaggaaggaggcggcggggaaagatgcgcggcgttggctggcagatgctgtccctgtcgctggggttagtgctggcgatcctgaacaaggtggcaccgcaggcgtgcccggcgcagtgctcttgctcgggcagcacagtggactgtcacgggctggcgctgcgcagcgtgcccaggaatatcccccgcaacaccgagagactggatttaaatggaaataacatcacaagaattacgaagacagattttgctggtcttagacatctaagagttcttcagcttatggagaataagattagcaccattgaaagaggagcattccaggatcttaaagaactagagagactgcgtttaaacagaaatcaccttcagctgtttcctgagttgctgtttcttgggactgcgaagctatacaggcttgatctcagtgaaaaccaaattcaggcaatcccaaggaaagctttccgtggggcagttgacataaaaaatttgcaactggattacaaccagatcagctgtattgaagatggggcattcagggctctccgggacctggaagtgctcactctcaacaataacaacattactagactttctgtggcaagtttcaaccatatgcctaaacttaggacttttcgactgcattcaaacaacctgtattgtgactgccacctggcctggctctccgactggcttcgccaaaggcctcgggttggtctgtacactcagtgtatgggcccctcccacctgagaggccataatgtagccgaggttcaaaaacgagaatttgtctgcagtggtaagggagaaggtcaccagtcatttatggctccttcttgtagtgttttgcactgccctgccgcctgtacctgtagcaacaatatcgtagactgtcgtgggaaaggtctcactgagatccccacaaatcttccagagaccatcacagaaatacgtttggaacagaacacaatcaaagtcatccctcctggagctttctcaccatataaaaagcttagacgaattgacctgagcaataatcagatctctgaacttgcaccagatgctttccaaggactacgctctctgaattcacttgtcctctatggaaataaaatcacagaactccccaaaagtttatttgaaggactgttttccttacagctcctattattgaatgccaacaagataaactgccttcgggtagatgcttttcaggatctccacaacttgaaccttctctccctatatgacaacaagcttcagaccatcgccaaggggaccttttcacctcttcgggccattcaaactatgcatttggcccagaacccctttatttgtgactgccatctcaagtggctagcggattatctccataccaacccgattgagaccagtggtgcccgttgcaccagcccccgccgcctggcaaacaaaagaattggacagatcaaaagcaagaaattccgttgttcaggtacagaagattatcgatcaaaattaagtggagactgctttgcggatctggcttgccctgaaaagtgtcgctgtgaaggaaccacagtagattgctctaatcaaaagctcaacaaaatcccggagcacattccccagtacactgcagagttgcgtctcaataataatgaatttaccgtgttggaagccacaggaatctttaagaaacttcctcaattacgtaaaataaactttagcaacaataagatcacagatattgaggagggagcatttgaaggagcatctggtgtaaatgaaatacttcttacgagtaatcgtttggaaaatgtgcagcataagatgttcaagggattggaaagcctcaaaactttgatgttgagaagcaatcgaataacctgtgtggggaatgacagtttcataggactcagttctgtgcgtttgctttctttgtatgataatcaaattactacagttgcaccaggggcatttgatactctccattctttatctactctaaacctcttggccaatccttttaactgtaactgctacctggcttggttgggagagtggctgagaaagaagagaattgtcacgggaaatcctagatgtcaaaaaccatacttcctgaaagaaatacccatccaggatgtggccattcaggacttcacttgtgatgacggaaatgatgacaatagttgctccccactttctcgctgtcctactgaatgtacttgcttggatacagtcgtccgatgtagcaacaagggtttgaaggtcttgccgaaaggtattccaagagatgtcacagagttgtatctggatggaaaccaatttacactggttcccaaggaactctccaactacaaacatttaacacttatagacttaagtaacaacagaataagcacgctttctaatcagagcttcagcaacatgacccagctcctcaccttaattcttagttacaaccgtctgagatgtattcctcctcgcacctttgatggattaaagtctcttcgattactttctctacatggaaatgacatttctgttgtgcctgaaggtgctttcaatgatctttctgcattatcacatctagcaattggagccaaccctctttactgtgattgtaacatgcagtggttatccgactgggtgaagtcggaatataaggagcctggaattgctcgttgtgctggtcctggagaaatggcagataaacttttactcacaactccctccaaaaaatttacctgtcaaggtcctgtggatgtcaatattctagctaagtgtaacccctgcctatcaaatccgtgtaaaaatgatggcacatgtaatagtgatccagttgacttttaccgatgcacctgtccatatggtttcaaggggcaggactgtgatgtcccaattcatgcctgcatcagtaacccatgtaaacatggaggaacttgccacttaaaggaaggagaagaagatggattctggtgtatttgtgctgatggatttgaaggagaaaattgtgaagtcaacgttgatgattgtgaagataatgactgtgaaaataattctacatgtgtcgatggcattaataactacacatgcctttgcccacctgagtatacaggtgagttgtgtgaggagaagctggacttctgtgcccaggacctgaacccctgccagcacgattcaaagtgcatcctaactccaaagggattcaaatgtgactgcacaccagggtacgtaggtgaacactgcgacatcgattttgacgactgccaagacaacaagtgtaaaaacggagcccactgcacagatgcagtgaacggctatacgtgcatatgccccgaaggttacagtggcttgttctgtgagttttctccacccatggtcctccctcgtaccagcccctgtgataattttgattgtcagaatggagctcagtgtatcgtcagaataaatgagccaatatgtcagtgtttgcctggctatcagggagaaaagtgtgaaaaattggttagtgtgaattttataaacaaagagtcttatcttcagattccttcagccaaggttcggcctcagacgaacataacacttcagattgccacagatgaagacagcggaatcctcctgtataagggtgacaaagaccatatcgcggtagaactctatcgggggcgtgttcgtgccagctatgacaccggctctcatccagcttctgccatttacagtgtggagacaatcaatgatggaaacttccacattgtggaactacttgccttggatcagagtctctctttgtccgtggatggtgggaaccccaaaatcatcactaacttgtcaaagcagtccactctgaattttgactctccactctatgtaggaggcatgccagggaagagtaacgtggcatctctgcgccaggcccctgggcagaacggaaccagcttccacggctgcatccggaacctttacatcaacagtgagctgcaggacttccagaaggtgccgatgcaaacaggcattttgcctggctgtgagccatgccacaagaaggtgtgtgcccatggcacatgccagcccagcagccaggcaggcttcacctgcgagtgccaggaaggatggatggggcccctctgtgaccaacggaccaatgacccttgccttggaaataaatgcgtacatggcacctgcttgcccatcaatgcgttctcctacagctgtaagtgcttggagggccatggaggtgtcctctgtgatgaagaggaggatctgtttaacccatgccaggcgatcaagtgcaagcatgggaagtgcaggctttcaggtctggggcagccctactgtgaatgcagcagtggatacacgggggacagctgtgatcgagaaatctcttgtcgaggggaaaggataagagattattaccaaaagcagcagggctatgctgcttgccaaacaaccaagaaggtgtcccgattagagtgcagaggtgggtgtgcaggagggcagtgctgtggaccgctgaggagcaagcggcggaaatactctttcgaatgcactgacggctcctcctttgtggacgaggttgagaaagtggtgaagtgcggctgtacgaggtgtgtgtcctaaacacactcccggcagctctgtctttggaaaaggttgtatacttcttgaccgtgtgggactaatgaatgcttcatagtggaaatatttgaaatatattgtaaaatacagaacagacttatttttattatgagaataaagactttttttctgcatttg

SEQ ID NO: 6677 - DNA, 2311 bp, Homo sapiens
agtaacgctttcttgttaccagatgacagagagtcaggctgtcagagttcacgactttaggtgcacagtttcaccctgtctggtccttgggagacggagaaggggtcaggagaaaacgtgggtgaagaggcagcaaagccgcaggagatatgaactaattgctcaacgtgggtgtagcacggattaggccttttacagcaagcgctgccagcagggaactggtggatgtactcttgaccacgctcggctggactctggggagcccaagacgggtggctttctagaagatgaccatagaggaccttccagattttccattagaaggaaatcctttgtttggaagatacccatttatattttctgcttctgataccccagttatcttttccatttctgcagcaccaatgccttcagactgtgaattttctttctttgatcctaatgatgcatcatgccaggaaattctttttgatcccaaaacttcagtttcagaattatttgccattttgagacagtgggttcctcaggtccaacaaaacattgacattattggaaatgaggtgatgtggaaacagctgtaaaatttgcaactcagcttattgacctgggagcagacattagtttgcggagtcgctggacaaacatgaatgctttgcattatgctgcttattttgatgtccctgaacttataagagtgattttgaaaacatcgaaaccaaaagatgtggatgccacttgcagtgattttaattttggaacagctttgcatattgcagcatacaacttgtgtgcaggtgctgtgaagtgcctcttggagcagggagcaaatcctgcatttaggaatgacaaaggacagatccctgctgatgttgttccagacccagtagatatgccgttagagatggctgacgccgcagccactgctaaggaaatcaagcagatgcttctagatgcggtgcctctgtcatgtaacatctcaaaggccatgctcccaaattatgatcatgtcactggcaaggcaatgcttacgtcacttggcctgaagttgggggatcgtgttgttattgcaggacagaaggttggtacattaagattttgtggaacaactgaatttgcaagtgggcagtgggctggcattgaactggatgaaccagaaggaaaaaataatggaagtgttggaaaagtccagtactttaaatgtgcccccaagtatggtatttttgcacctctttcaaagataagtaaagcaaaaggtcgaaggaagaatataacacacactccttctacaaaagctgctgtacctctcatcaggtcccagaaaattgacgtagctcatgtgacgtcaaaagtaaatactggattaatgacatcaaaaaaagatagtgcttctgagtcaacactttcattgcctcctggtgaagaacttaaaactgtgacagagaaagatgttgccctgcttggatctgtcagcagctgctcctctacatcttctttggaacacagacagagctaccccaagaaacagaatgcaatcagcagtaacaagaagacaatgagcaaaagcccttccctttcatccagagccagtgctggtatctatggctttttcaaccaggctttcttggtgttttttatcttggtttgtttgtttgaattcctcagcaacatctacagcaaataatagccgttgcgagggggaactccgcctcggagagagagtgttagtggtaggacagagactgggcaccattaggttctttgggacaacaaacttcgctccaggatattggtatggtatagagcttgaaaaaccccatggcaagaatgatggttcagttggaggtgtgcagtattttagctgttctccaagatatggaatatttgctcccccatccagggtgcaaagagtaacagattccctggataccctttcagaaatttcttcaaataaacagaaccattcttatcctggttttaggagaagttttagcacaacttctgcttcttcccaaaaggagattaacagaagaaatgctttttccaagtgagtattaagaagatttagaaaaacacctttcaagatgaacatgatgggattctgtgaagaaagaaaagtggagtgctgtatcttttgcattgcttggtagagttttaacacgtaggagaaaaggtgtgataagtgtattgagaagcgttcttcctccctcctttgcaagcgcaattaaaaatgtcaccagtgactaaaactagtgcactgcatatattttatcttcatagaggtcagaactgttaataaaagttaaaggaattt

SEQ ID NO: 6678 - DNA, 921 bp, Homo sapiens
gcacggggaccacagccgtcttgagggcgcgcccgagaaaggactctagccttgtcacctcatcttgcccccttggttttggaagtcctgaagagttggtctggaggaggaggaggacattgatgtgcttggtgtgtggccagtggtgaagagatggctgctcctgtcccgtgggcctgctgtgctgtgcttgccgccgccgccgcagttgtctacgcccagagacacagtccacaggaggcaccccatgtgcagtacgagcgcctgggctctgacgtgacactgccatgtgggacagcaaactgggatgctgcggtgacgtggcgggtaaatgggacagacctggcccctgacctgctcaacggctctcagctggtgctccatggcctggaactgggccacagtggcctctacgcctgcttccaccgtgactcctggcacctgcgccaccaagtcctgctgcatgtgggcttgccgccgcgggagcctgtgctcagctgccgctccaacacttaccccaagggcttctactgcagctggcatctgcccacccccacctacattcccaacaccttcaatgtgactgtgctgcatggctccaaaattatggtctgtgagaaggacccagccctcaagaaccgctgccacattcgctacatgcacctgttctccaccatcaagtacaaggtctccataagtgtcagcaatgccctgggccacaatgccacagctatcacctttgacgagttcaccattgtgaagcctgatcctccagaaaatgtggtagcccggccagtgcccagcaaccctcgccggctggaggtgacgtggcagaccccctcgacctggcctgaccctgagtcttttcctctcaagttctttctgcgctaccgacccctcatcctggaccagtggcagcat

SEQ ID NO: 6679 - DNA, 2414 bp, Homo sapiens
cctcattgcccagcggaccccagcctctgccaggttcggtccgccatcctcgtcccgtcctccgccggcccctgccccgcgcccagggatcctccagctcctttcgcccgcgccctccgttcgctccggacaccatggacaagttttggtggcacgcagcctggggactctgcctcgtgccgctgagcctggcgcagatcgatttgaatataacctgccgctttgcaggtgtattccacgtggagaaaaatggtcgctacagcatctctcggacggaggccgctgacctctgcaaggctttcaatagcaccttgcccacaatggcccagatggagaaagctctgagcatcggatttgagacctgcaggtatgggttcatagaagggcacgtggtgattccccggatccaccccaactccatctgtgcagcaaacaacacaggggtgtacatcctcacatccaacacctcccagtatgacacatattgcttcaatgcttcagctccacctgaagaagattgtacatcagtcacagacctgcccaatgcctttgatggaccaattaccataactattgttaaccgtgatggcacccgctatgtccagaaaggagaatacagaacgaatcctgaagacatctaccccagcaaccctactgatgatgacgtgagcagcggctcctccagtgaaaggagcagcacttcaggaggttacatcttttacaccttttctactgtacaccccatcccagacgaagacagtccctggatcaccgacagcacagacagaatccctgctaccactttgatgagcactagtgctacagcaactgagacagcaaccaagaggcaagaaacctgggattggttttcatggttgtttctaccatcagagtcaaagaatcatcttcacacaacaacacaaatggctggtacgtcttcaaataccatctcagcaggctgggagccaaatgaagaaaatgaagatgaaagagacagacacctcagtttttctggatcaggcattgatgatgatgaagattttatctccagcaccatttcaaccacaccacgggcttttgaccacacaaaacagaaccaggactggacccagtggaacccaagccattcaaatccggaagtgctacttcagacaaccacaaggatgactgcagatgtagacagaaatggcaccactgcttatgaaggaaactggaacccagaagcacaccctcccctcattcaccatgagcatcatgaggaagaagagaccccacattctacaagcacaatccaggcaactcctagtagtacaacggaagaaacagctacccagaaggaacagtggtttggcaacagatggcatgagggatatcgccaaacacccaaagaagactcccattcgacaacagggacagctgcagcctcagctcataccagccatccaatgcaaggaaggacaacaccaagcccagaggacagttcctggactgatttcttcaacccaatctcacaccccatgggacgaggtcatcaagcaggaagaaggatggatatggactccagtcatagtataacgcttcagcctactgcaaatccaaacacaggtttggtggaagatttggacaggacaggacctctttcaatgacaacgcgtaataggaatgatgtcacaggtggaagaagagacccaaatcattctgaaggctcaactactttactggaaggttatacctctcattacccacacacgaaggaaagcaggaccttcatcccagtgacctcagctaagactgggtcctttggagttactgcagttactgttggagattccaactctaatgtcaatcgttccttatcaggagaccaagacacattccaccccagtggggggtcccataccactcatggatctgaatcagatggacactcacatgggagtcaagaaggtggagcaaacacaacctctggtcctataaggacaccccaaattccagaatggctgatcatcttggcatccctcttggccttggctttgattcttgcagtttgcattgcagtcaacagtcgaagaaggtgtgggcagaagaaaaagctagtgatcaacagtggcaatggagctgtggaggacagaaagccaagtggactcaacggagaggccagcaagtctcaggaaatggtgcatttggtgaacaaggagtcgtcagaaactccagaccagtttatgacagctgatgagacaaggaacctgcagaatgtggacatgaagattggggtgtaacacctacaccattatcttggaaagaaacaaccgttggaaacataaccattacagggagctgggacacttaacagatgcaatgtgctactgattgtttcattgcgaatcttttttagcataaaattttctactctt

SEQ ID NO: 6680 - DNA, 1796 bp, Homo sapiens
tggggaagtggggaaccgaggggcaaccaggggaagatggggtgctggaggagagcttgtgggagccaaggagcaccttggacatctggagtctggcaggagtgatgacgggtggaggggctagctcgaggcagggctggtggggcctgaggccagtgaggagtgtggagtaggcgcccaggcatcgtgcagacagggcgacatcagctggggacgatgggcctgagctagggctggaaagaagggggagccaggcattcatcccggtcacttttggttacaggacgtggcagctggttggacgaggggagctggtgggcagggtttgatcccagggcctgggcaacggaggtgtagctggcagcagcgggcaggtgaggaccccatctgccgggcaggtgagtcccttccctccccaggcctcgcttccccagccttctgaaagaaggaggtttaggggatcgagggctggcggggagaagcagacaccctcccagcagaggggcaggatgggggcaggagagttagcaaaggtgacatcttctcggggggagccgagactgcgcaaggctggggggttatgggcccgttccaggcagaaagagcaagagggcagggagggagcacaggggtggccagcgtagggtccagcacgtggggtggtaccccaggcctgggtcagacagggacatggcaggggacacaggacagaggggtccccagctgccacctcacccaccgcaattcatttagtagcaggcacaggggcagctccggcacggctttctcaggcctatgccggagcctcgagggctggagagcgggaagacaggcagtgctcggggagttgcagcaggacgtcaccaggagggcgaagcggccacgggaggggggccccgggacattgcgcagcaaggaggctgcaggggctcggcctgcgggcgccggtcccacgaggcactgcggcccagggtctggtgcggagagggcccacagtggacttggtgacgctgtatgccctcaccgctcagcccctggggctggcttggcagacactgagtgggacctcactccttccccatccacagaaatggtgctacccagctcaagcctgggcctttgaatccggacacaaaaccctctagcttggaaatgaatatgctgcactttacaaccactgcactacctgactcaggaatcggctctggaaggtgaagctagaggaaccagacctcatcagcccaacatcaaagacaccatcggaacagcagcgcccgcagcacccaccccgcaccggcgactccatcttcatggccaccccctgcggcggacggttgaccaccagccaccacatcatcccagagctgagctcctccagcgggatgacgccgtccccaccacctccctcttcttctttttcatccttctgtctctttgtttctgagctttcctgtctttccttttttctgagagattcaaagcctccacgactctgtttcccccgtcccttctgaatttaatttgcactaagtcatttgcactggttggagttgtggagacggccttgagtctcagtacgagtgtgcgtgagtgtgagccaccttggcaagtgcctgtgcagggcccggccgccctccatctgggccgggtgactgggcgccggctgtgtgcccgaggcctcaccctgccctcgcctagtctggaagctccgaccgacatcacggagcagccttcaagcattccattacgccccatctcgctctgtgcccctccccaccagggcttcagcaggagcc

SEQ ID NO: 6681 - DNA, 486 bp, Homo sapiens
ggacaacgccctggcgagggcgaggtggggtgtgcgccgcgcctgagaggcgggtccctgcctcgccgcaggtgacgggctcccctccccaggtgtgtgggcgcagccggccgccgccgacctcttcggccccctgagaggtgccctctcctcccgagctccctcccccacgaagagtcgggtgcagggctgggccccgcggtgacaggcgcggtgtctacgaagaccgtgtggctggaagatcggccttgctggtatgatttaagcttggatgaaatgagagctttgacagttcagagagtgaagtttgccatggacctgcctctgttaaaacgtgcaggtcaggatctggcagagaaaacaaagaattttgtcagccgaagccttgtcataggagaagtcctctccatggcggacatggccacaggagtgaagtgcggaataatttattggctatttggtggtgctatcaggaatctcggaagc

SEQ ID NO: 6682 - DNA, 1280 bp, Homo sapiens; identical to SEQ ID NO: 6462

SEQ ID NO: 6683 - DNA, 3667 bp, Homo sapiens
gtaactgaagtcaggcttttcatttgggaagccccctcaacagaattcggtcattctccaagttatggtggacgtacttctgttgttctccctctgcttgctttttcacattagcagaccggacttaagtcacaacagattatctttcatcaaggcaagttccatgagccaccttcaaagccttcgagaagtgaaactgaacaacaatgaattggagaccattccaaatctgggaccagtctcggcaaatattacacttctctccttggctggaaacaggattgttgaaatactccctgaacatctgaaagagtttcagtcccttgaaactttggaccttagcagcaacaatatttcagagctccaaactgcatttccagccctacagctcaaatatctgtatctcaacagcaaccgagtcacatcaatggaacctgggtattttgacaatttggccaacacactccttgtgttaaagctgaacaggaaccgaatctcagctatcccacccaagatgtttaaactgccccaactgcaacatctcgaattgaaccgaaacaagattaaaaatgtagatggactgacattccaaggccttggtgctctgaagtctctgaaaatgcaaagaaatggagtaacgaaacttatggatggagctttttgggggctgagcaacatggaaattttgcagctggaccataacaacctaacagagattaccaaaggctggctttacggcttgctgatgctgcaggaacttcatctcagccaaaatgccatcaacaggatcagccctgatgcctgggagttctgccagaagctcagtgagctggacctaactttcaatcacttatcaaggttagatgattcaagcttccttggcctaagcttactaaatacactgcacattgggaacaacagagtcagctacattgctgattgtgccttccgggggctttccagtttaaagactttggatctgaagaacaatgaaatttcctggactattgaagacatgaatggtgctttctctgggcttgacaaactgaggcgactgatactccaaggaaatcggatccgttctattactaaaaaagccttcactggtttggatgcattggagcatctagacctgagtgacaacgcaatcatgtctttacaaggcaatgcattttcacaaatgaagaaactgcaacaattgcatttaaatacatcaagccttttgtgcgattgccagctaaaatggctcccacagtgggtggcggaaaacaactttcagagctttgtaaatgccagttgtgcccatcctcagctgctaaaaggaagaagcatttttgctgttagcccagatggctttgtgtgtgatgattttcccaaaccccagatcacggttcagccagaaacacagtcggcaataaaaggttccaatttgagtttcatctgctcagctgccagcagcagtgattccccaatgacttttgcttggaaaaaagacaatgaactactgcatgatgctgaaatggaaaattatgcacacctccgggcccaaggtggcgaggtgatggagtataccaccatccttcggctgcgcgaggtggaatttgccagtgaggggaaatatcagtgtgtcatctccaatcactttggttcatcctactctgtcaaagccaagcttacagtaaatatgcttccctcattcaccaagacccccatggatctcaccatccgagctggggccatggcacgcttggagtgtgctgctgtggggcacccagccccccagatagcctggcagaaggatgggggcacagacttcccagctgcacgggagagacgcatgcatgtgatgcccgaggatgacgtgttctttatcgtggatgtgaagatagaggacattggggtatacagctgcacagctcagaacagtgcaggaagtatttcagcaaatgcaactctgactgtcctagaaacaccatcatttttgcggccactgttggaccgaactgtaaccaagggagaaacagccgtcctacagtgcattgctggaggaagccctccccctaaactgaactggaccaaagatgatagcccattggtggtaaccgagaggcacttttttgcagcaggcaatcagcttctgattattgtggactcagatgtcagtgatgctgggaaatacacatgtgagatgtctaacacccttggcactgagagaggaaacgtgcgcctcagtgtgatccccactccaacctgcgactcccctcagatgacagccccatcgttagacgatgacggatgggccactgtgggtgtcgtgatcatagccgtggtttgctgtgtggtgggcacgtcactcgtgtgggtggtcatcatataccacacaaggcggaggaatgaagattgcagcattaccaacacagatgagaccaacttgccagcagatattcctagttatttgtcatctcagggaacgttagctgacaggcaggatgggtacgtgtcttcagaaagtggaagccaccaccagtttgtcacatcttcaggtgctggatttttcttaccacaacatgacagtagtgggacctgccatattgacaatagcagtgaagctgatgtggaagctgccacagatctgttcctttgtccgtttttgggatccacaggccctatgtatttgaagggaaatgtgtatggctcagatccttttgaaacatatcatacaggttgcagtcctgacccaagaacagttttaatggaccactatgagcccagttacataaagaaaaaggagtgctacccatgttctcatccttcagaagaatcctgcgaacggagcttcagtaatatatcgtggccttcacatgtgaggaagctacttaacactagttactctcacaatgaaggacctggaatgaaaaatctgtgtctaaacaagtcctctttagattttagtgcaaatccagagccagcgtcggttgcctcgagtaattctttcatgggtacctttggaaaagctctcaggagacctcacctagatgcctattcaagctttggacagccatcagattgtcagccaagagccttttatttgaaagctcattcttccccagacttggactctgggtcagaggaagatgggaaagaaaggacagattttcaggaagaaaatcacatttgtacctttaaacagactttagaaaactacaggactccaaattttcagtcttatgacttggacacatagactgaatgagaccaaaggaaaagcttaacatactacctcaagtgaacttttatttaaaagagagagaatcttatgttttttaaatggagttatgaattttaaaaggataaaaatgctttatttatacagatgaaccaaaattacaaaaagttatgaaaatttttatactgggaatgatgctcatataagaatacctttttaaactattttttaactttgttttatgcaaaaaagtatcttacgtaaattaatgatataaatcatgattattttatgtatttttataatgccagatttctttttatggaaaatgagttactaaagcattttaaataatacctgccttgtaccattttttaaatagaagttacttcattatattttgcacattatatttaataaaatgtgtcaatttgatgccaa

SEQ ID NO: 6684 - DNA, 1873 bp, Homo sapiens
aacacttaaggcttccgggcatgcgcacagcgttgtgcaaatgaatgccttccactgaaccgagcttttaccctacgaaaggaaaacctggaaatgtttgaagcgattggttttttagctatcaaacttggtgttattccttcggattttagttatgcaggccttaaagacaagaaagccatcacctatcaagcaatggttgttagaaaagtgactccagagaggttgaaaaatattgaaaaagaaattgaaaagaaaagaatgaatgtctttaatattcggtctgtagatgattccctgagacttggtcagctcaaaggaaatcactttgatattgtcattagaaatttaaaaaaacaaataaatgattctgcaaacctgagggagagaattatggaagcaatagaaaatgttaagaaaaaaggctttgtgaattactatggaccacagagatttgggaagggaaggaaagttcacacagaccaaattggactagctttgctgaagaatgaaatgatgaaagccataaaattgtttcttacaccagaagacttggatgatcctgtaaatagagcaaagaagtattttcttcaaactgaggatgctaaaggcacactttcattgatgcctgaattcaaagtgcgtgagagagcattgttggaggcattgcaccgctttggcatgaccgaggaaggttgtatccaggcatggttctctttaccccattccatgcgcatattctatgttcacgcatataccagcaaaatttggaatgaggcagtatcttacagacttgaaacctatggagcaagagtagtgcagggtgatttggtctgtttggatgaagacattgatgacgagaatttcccaaatagtaaaattcacctggtaactgaagaggagggatcagctaatatgtatgcaatacatcaggtggttcttccagtacttggatacaatattcagtacccgaagaacaaagtagggcagtggtaccatgacatacttagcagagatggactacagacatgtaggtttaaagtacctactctgaaactgaatataccaggttgctatagacagattttgaaacatccctgtaatctctcataccaactaatggaagatcatgacattgatgtcaaaacgaaaggttcccacattgatgaaacagctttgtctcttttgatctcttttgatcttgatgcttcatgctatgctaccgtttgtctgaaggaaataatgaagcatgacgtttaaaactgatacccttggtataaccatatatatgtcactctttgaaggaaagggggctaaaatgtcttaagcaccttccatgtgttaggaacttcataattgttatctcttttaattttcacagcatcctgagaagttaggatttgatactgtaattttatagaggatatgtaagtgtcagggtccaaatttaaggtccatgtgaccccaaagcctgtgttttttttctattatatgtttcagtgacctttattctgtgtcataaagttacaatcttttaaaaccattaggaatatatataatactgcaagataacatttaagaaaaaaagttgtgaatattcatatcctccagctccttgcttagaacactagtaaaattaggtcgcagtgaagcaaatgttggagagaaagatagatgaagcattttgctaattattattgtccccctttcctgtttttgaaattattgatcagaacaatatacaagggaaatgccatacctctgtttgtgatagataccccagagtagttattacctctttgtgagataagtaatctttgatgaagattgaaatacaatttctcatccaatttttatatcttggcatacgctg

SEQ ID NO: 6685 - DNA, 831 bp, Homo sapiens
ctctccggccgcgcagccgctgccgcccacccgcacccgccgtcatgctccgggccgcgctgcccgcgctcctgctgccgttgctgggcctcgccgctgctgccgtcgcggactgtccttcatctacttggattcagttccaagacagttgttacatttttctccaagaagccatcaaagtagaaagcatagaggatgtcagaaatcagtgtactgaccatggagcggacatgataagcatacataatgaagaagaaaatgcttttatactggatactttgaaaaagcaatggaaaggcccagatgatatcctactaggcatgttttatgacacagatgtcccatacaaaaggaaatatttatcagataaccacattttaatatcagcattggtgattgctagcacggtaattttgacagttttgggagcaatcatttggttcctgtacaaaaaacattctgattctcgtttcaccacagttttttcaaccgcaccccaatcaccttataatgaagactgtgttttggtagttggagaagaaaatgaatatcctgttcaatttgactaagtttttggtaatcttgcactaagacatcaacaaaatgccctggcagagataacttgggaaagattttaatataaaacttgacattggatattagagctttaatggtattccttattccagtaacatttttatgtactcatctgctgtgaaaagtctttaggttcattaaaaaaacaggttttagaaatgatcttagatctaatatagtgattttaagcatcccgtcaaaggcagaatctgtcacttgaatgaaggaaagctt

SEQ ID NO: 6686 - DNA, 3159 bp, Homo sapiens
attccaagtcgctgctgtgcagagcagcaagtgctccgtgcagggctgttgctatcacttggaggtgaacagcctcttttgccggtattcagtgaagaaagcaagtctaaatatgcagttctctcactggagtgaaagatgttttgttcatttctaatcaactatgctagacagctgcaagctgaaaagtgcctgcaatttgccatttatttgtaataagaaaataataaacactgctggaaccagtaatgcagaagtccccttggctgatcccggaatgtaccagctggacattacattaagaaggggtcaaagtttagctgctcgagatcgaggagggacgagtgatccatatgtgaagtttaaaatcggaggaaaagaagtttttagaagtaagataatacacaagaacctcaaccctgtgtgggaagaaaaagcttgtattctggttgatcatcttagggagccattgtatataaaggtatttgactatgattttggactacaggatgactttatgggctcagcctttctggatctgacacaattggagttaaacaggcccacagatgtgacccttactctgaaagatcctcattatcctgaccatgatcttggaatcattttgctctcagtcatccttacccctaaagaaggagagtccagggatgtgacaatgctaatgaggaagagttggaaaagatcaagtaagtttcagacccaaagtttacgcctatcagacctacacagaaaatcgcatctttggagaggaatagtcagcatcaccttgattgaagggagagacctcaaggccatggattccaacgggttgagcgatccctacgtgaagttccggcttgggcatcagaagtacaagagcaagattatgccaaaaacgttgaatcctcagtggagggaacaatttgattttcacctttatgaagaaagaggaggagtcattgatatcactgcatgggacaaagatgctgggaaaagggatgatttcattggcaggtgccaggtcgacctgtcagccctcagtagggaacagacgcacaagctggagttgcagctggaagagggtgagggacacctggtgctgctggtcactctgacagcatcagccacagtcagcatctctgacctgtctgtcaactccctggaggaccagaaggaacgagaggagatattaaagagatatagcccattgaggatatttcacaacctgaaagatgtgggatttctccaggtgaaagtcatcagagcggaagggttaatggctgccgacgtcactggaaaaagtgacccattttgtgtggtagaactgaacaacgatagactgctaacacatactgtctacaaaaatctcaatcctgagtggaataaagtcttcacgttcaacattaaagatatccattcagttcttgaagtgacagtttatgatgaagatcgggatcgaagtgctgactttctgggcaaagttgctataccattgctgtctattcaaaatggtgaacagaaagcctacgtcttgaaaaacaagcagctgacagggccaacaaagggggtcatctatcttgaaatagatgtgatttttaatgctgtgaaagccagcttacgaacattaatacccaaagaacagaagtacattgaagaggaaaacagactctctaaacagctgctactaagaaactttatcagaatgaaacgttgtgtcatggtgctggtaaatgctgcatactacgttaatagttgctttgattgggattcacccccaaggagtctcgctgcttttgtggtagtggaggacatgctagaggacgaggaagaagaagatgacaaagatgacaaggacagtgaaaaaaagggatttataaataaaatctatgccatccaggaggtatgtgtcagtgtccagaacatcctagatgaagtggcttcctttggcgaaaggataaagaatactttcaactggactgtcccattcttaagctggctggccattgtagccctctgtgtgttcacagccatcctgtactgcattccgctgagatacattgtccttgtctggggcatcaataaatttacaaaaaagcttcggagtccatatgcaattgataacaatgaactacttgacttcctttccagagtcccttcagatgtacaagtggtgcaataccaagaactgaaaccagatccttctcatagcccatataaaagaaagaaaaacaatcttggctagccagctcccagcactgaggagaccagcatctgtttgggaagataaaagaaaaagccctcagcctcagcagcatttcctttctttctgctttttatttattttgcctttttatcatgatcgagagaatctgtaaatagtgtacaaaggcatatgtctttgaatatatacttctattgtacagactcaacttgataaaggttttgctactgctgtgtcaaaaccttgttagctgtggataataatataacacactgaaagaacaaatataagaatgataacactggaagatatattcttatctaattactagtggattaaatactcacctgtgctctgattaaatctacatcaattgtaaatgtcgatttgattttaaagtttttttttaatgcgactattttttatctgaaaagtaatccattacacttttctatgttttatacatttcaaaagggagggaaattccaaagcctgaataatggaatggatacatttcaatttaacatatattctggctttagatcccgacattcactcctgtgcaaattacttaggtatgacttaggctaattttaagctaataagtgaaggtacattcactccctcaagagaatcaatactcagaaggttacaaagttttctttatagaatttcaatcaatcattccatctaaaaccttaaaatctctacaggactacataacataaatactgccagtttataaacgattgcctatctgaatttttatacctaccactactttaatttatacagttagttagcaaattagcaacccagtaagtacagttatcaaaaatactaggaaactatatccatatcgcttttggtgtcagattgtatctgtgcatctaaaaatattttaataaatactcaagtgctctcagagaaaaaaaaaa

SEQ ID NO: 6687 - DNA, 2822 bp, Homo sapiens
tttttcctggcactgctgagccacctgcagttgcgagagccgctgggagggataagagggaagaggacgcccggtgaaggggctccagcctggcagtttctgcgtgttagcatttctagaatagagtgggtgggaactgacccaagtaaagtcccagagactcgaacactgacgcacaggaaagcctcaagtgggaggagaaatgcaaatcccctactgatgatggcgtcagcggctttctcctagggactgtgaggggcgcttctgactttggacttgagcactgcctgggacctgtgctgagagagcgctagcatgtctcagtggaatcaagtccaacagttagaaatcaagtttttggagcaggtggatcaattctatgatgacaactttcccatggaaattcggcatctgttggcccaatggattgaaaatcaagactgggaggcagcttctaacaatgaaaccatggcaacgattcttcttcaaaacttgttaatacaactggatgaacagttaggtcgtgtttccaaagagaaaaacctactcttgatacacaatctaaaaagaattaggaaggtccttcagggaaaatttcatggaaatccaatgcatgtagctgtggttatttcaaactgtttaagggaagagaggagaatattggctgcagccaacatgcctgtccaggggcctctagagaaatccttacaaagttcttcagtttcagaaagacagaggaatgtggagcacaaagtggctgccattaaaaacagtgtgcagatgacagaacaagataccaaatacttagaagatctgcaagacgaatttgactacaggtataaaacaattcagacaatggatcagagtgacaagaatagtgccatggtgaatcaggaagttttgacactgcaggaaatgcttaacagcctcgatttcaagagaaaggaggctctcagtaaaatgacccaaatcatccatgagacagacctgttaatgaacaccatgctcatagaagagctgcaagactggaagcggcggcagcaaatcgcctgcatcgggggtccactccacaatgggctcgaccagcttcagaactgctttacactattggcagaaagtcttttccaactgagaaggcaattggagaaactagaggagcaatctaccaaaatgacatatgaaggtgatcccattccaatgcaaagaactcacatgctagaaagagtcaccttcttgatctacaaccttttcaagaactcatttgtggttgagcgacagccatgtatgccaacccaccctcagaggccgttggtacttaaaaccctaattcagttcactgtaaaactaaggctactaataaaattgccagaactaaactatcaggtaaaggttaaggcatcaattgacaagaatgtttcaactctaagcaaccgaagatttgtactttgtggaactaatgtcaaagccatgtctattgaagaatcttccaatgggagtctctcagtagaatttcgacatttgcaaccaaaggaaatgaagtccagtgctggaggtaaaggaaatgagggctgtcacatggtgactgaagaacttcattccataacgtttgaaacacagatctgcctctatggcctgaccatagatttggagaccagctcattgcctgtggtgatgatttccaatgtcagtcagttacctaatgcttgggcatccatcatttggtacaacgtgtcaaccaacgattcccagaacttggttttctttaataatcctccacctgccacattgagtcaactactggaggtgatgagctggcagttttcatcgtacgttggtcgtggtcttaactcagatcaactccatatgctggcagagaagcttacagtccaatctagctacagtgatggtcacctcacctgggccaagttctgcaaggaacatttacctggtaaatcatttaccttttggacatggcttgaagcaatattggatctaattaagaaacacattcttcccctttggattgatgggtatgtcatgggctttgttagcaaagagaaggaacggctgttgctaaaggataaaatgcctggcacctttttattaagattcagtgaaagccatctcggaggaataactttcacctgggtggaccattctgaaagtggggaagtgagattccactctgtagaaccctacaataaaggccggttgtctgctctgccattcgctgacatcctgcgagactacaaagttattatggctgaaaacattcctgaaaaccctctgaagtacctatatcctgacattcccaaagacaaagccttcggtaaacactacagctctcagccttgcgaagtttcaagaccaacagaaaggggtgacaaaggttatgttccttctgtttttatccccatctcaacaatccgaagtgattcaacagagccacattctccatcagaccttcttcccatgtctccaagtgtgtatgcggtgttgagagaaaacctgagtcccacaacaattgaaactgcaatgaagtctccttattctgctgaatgacaggataaactctgacgcaccaagaaaggaagcaaatgaaaaagtttaaagactgttctttgcccaataaccacattttatttcttcagctttgtaaataccaggttctaggaaatgtttgacatctgaagctctcttcacactcccgtggcactcctcaattgggagtgttgtgactgaaatgcttgaaaccaaagcttcagataaacttgcaagataagacaactttaagaaaccagtgttaataacaatattaacag

SEQ ID NO: 6688 - DNA, 2093 bp, Homo sapiens
cccagtcttgctgtctttcaatggggcagccactgctcagttgctgccattcagaaatatgaacccagtatcaccagaacttttgatttttcaagagaaaccaagattccagatttgtaggtgatatcttccatttttcagataaaacaaaggaaccagaaccacatccactgatcggatttgcctggggaggaggggtgctctctcctttgatcttctcttctggaagagatggaccaaaagcctctccagcaataatccgaaatgattcttgaagactatctttccagcttgtcacatatgcaaggtgtatttacaggagacagcaatggaaacctggtcagttgagcaggtctgcagttggttggtggagaaaaatttaggagagctagttcatagatttcaagaggaagaagtaagtggggccgctcttcttgcacttaatgatcggatggttcagcaactggtaaagaaaattgggcaccaggctgttctgatggatttaattaaaaaatacaagcagaacactcaaggactgaagtccccagaaaaccccaaaaaggcagccctggtcatgcaaacagaagcagctcgagattacagggatgaagagtcctccagtccagccaggcatggggagcagatgccatctttctatccagctgaaaaccttgataatggactaattgaccaaagagtattgaaacagagaagaaatgtgaaacaaattctagcaagaagcaaagcattacagtggacgaagtcctatgttttaccagagtttccctatgatgtcaaatgcatgttagcagagcagaagtgcccggatcacagcatgaggataaggatcattgagtttctccaggccgacatgactaagtatctggaaggctcactgtaccccagcacccagcagtacaatgacgtggttaatgccctgctgcaggcccaccctttcctggatgaggatggctgtggcttctttttatggaaacgagccctcaaagatcgctttaaatatgttcgaagacccatagaagatgatgagcaagtgattagaaataagtgtaaatttggacaccgaagaggccagacaaggaaatctcttgctgatataagatttgatgaaattaaacttgtccagataaaagaagaagctgtttgttttgattctgagctagatgaacatattaagtggttccagcaagaatacgtgaaaacagaaaaggactggagagaaattgacaagagaatgagccaaactttggaaataagaagaaagatgattggcagccgaacacctctgaaggacattcttaaactgtttcctttcttgaagtgcccttatcagatgttcagagaattccaacttcttacaagaacagatatttataagaaaacaaggcacattttggaatcctattcagaaaatatactgacttctttttcagtggtggacaatccaatcaatattgtattgcaagaaaaaatgaaacattacacagatgaagacatgttgaaatacatgaagatgacagccacatgtttactcctcccagatgtttttggggatgatcccagcctttttgtcatcatgaatgaacaggtgcaagtgtccacacctgtgttggaagttaaaaaccctttcaacatggaggtctgcgaattttctttatatttagaaagggagaggctcacaaaggtggacgactgtgttacagccttggctgcgctagtagctgcctttcatgtatttaggattgagtgtccaagaagactgtcccaaactttcaacttcctagaaacgctgattttcgatatgcacagtccttattttccttctttgaaagaaaaggaaaacgaagtaggatttcagcacccactcacttaatagcatgccaaatattgtactggaatttacctctgggaaaactgaagcttcataagaaattgttttgatttagggttgtggtagaggtaggtatgagaaaatcatcttgtatttatagatgctaatgaatttcaatgctttctatctttacacttagatattaagttctttgtgaaattctgtaataaaattctacttcatt

SEQ ID NO: 6689 - DNA, 1099 bp, Homo sapiens
gggtgacctcacgccggcccggccaccgcggccattagacccggtccaattgctggggctgcagcgctgcctccgagaccgcgagacatctacgcagcgaaatcgagcctggccttgagggtccacaccgcgagggaagatgcgtgcgcccattccagagcctaagcctggagacctgattgagatttttcgccctttctacagacactgggccatctatgttggcgatggatatgtggttcatctggcccctccaagtgaggtcgcaggagctggtgcagccagtgtcatgtccgccctgactgacaaggccatcgtgaagaaggaattgctgtatgatgtggccgggagtgacaagtaccaggtcaacaacaaacatgatgacaagtactcgccgctgccctgcagcaaaatcatccagcgggcggaggagctggtggggcaggaggtgctctacaagctgaccagtgagaactgcgagcactttgtgaatgagctgcgctatggagtcgcccgcagtgaccaggtcagagatgtcatcatcgctgcaagcgttgcaggaatgggcttggcagccatgagccttattggagtcatgttctcaagaaacaagcgacaaaagcaataactgaaaaagactgtcctgtcagcgatgactttatacatcaagggggtcttgttttgctagagagtttggggtttggtttgtggatttcattgtgatttataataaggcttattttcacagaataaaataaagcaaaacgagggaggattttattgggggaagtgcagcaagaactgcctggtgtgaagtctgttcagggaacagccgggctgtcttcctggtcagggattgtctttcactttctttttgcgtgctgtgttctttgcattgcaggaggcagagtccagctccagttatctcaagtagagggcgtttctggtcgtcaggatacatgcggggcggaagggagacagaaagacataatacacaagaacagaaagcagcagacagccaggacccttggcccggaactagatctaggatggcctctgagactcagcagctggagtctgtagatgttcagctgagttg

SEQ ID NO: 6690 - DNA, 3556 bp, Homo sapiens
aaaagcagcaactagggagctggtgaagaaggatgtctcagcagtgtttactaggcctccaacactagagcccatcccccagctccgaaaagcttcctggaaatgtccttgttatcacttcccctctcgggctgggcgctgggagcgggcggtctcctccgcccccggctgttccgccgaggctcgctgggtcgctggcgccgccgcgcagcacggctcagaccgaggcgcacaggctcgcagctccgcggcgcctagcgctccggtccccgccgcgacgcgccaccgtccctgccggcgcctccgcgcgcttcgaaatgagggtcctgggtgggcgctgcggggcgctgctggcgtgtctcctcctagtgcttcccgtctcagaggcaaactttttgtcaaagcaacaggcttcacaagtcctggttaggaagcgtcgtgcaaattctttacttgaagaaaccaaacagggtaatcttgaaagagaatgcatcgaagaactgtgcaataaagaagaagccagggaggtctttgaaaatgacccggaaacggattatttttatccaaaatacttagtttgtcttcgctcttttcaaactgggttattcactgctgcacgtcagtcaactaatgcttatcctgacctaagaagctgtgtcaatgccattccagaccagtgtagtcctctgccatgcaatgaagatggatatatgagctgcaaagatggaaaagcttcttttacttgcacttgtaaaccaggttggcaaggagaaaagtgtgaatttgacataaatgaatgcaaagatccctcaaatataaatggaggttgcagtcaaatttgtgataatacacctggaagttaccactgttcctgtaaaaatggttttgttatgctttcaaataagaaagattgtaaagatgtggatgaatgctctttgaagccaagcatttgtggcacagctgtgtgcaagaacatcccaggagattttgaatgtgaatgccccgaaggctacagatataatctcaaatcaaagtcttgtgaagatatagatgaatgctctgagaacatgtgtgctcagctttgtgtcaattaccctggaggttacacttgctattgtgatgggaagaaaggattcaaacttgcccaagatcagaagagttgtgaggttgtttcagtgtgccttcccttgaaccttgacacaaagtatgaattactttacttggcggagcagtttgcaggggttgttttatatttaaaatttcgtttgccagaaatcagcagattttcagcagaatttgatttccggacatatgattcagaaggcgtgatactgtacgcagaatctatcgatcactcagcgtggctcctgattgcacttcgtggtggaaagattgaagttcagcttaagaatgaacatacatccaaaatcacaactggaggtgatgttattaataatggtctatggaatatggtgtctgtggaagaattagaacatagtattagcattaaaatagctaaagaagctgtgatggatataaataaacctggacccctttttaagccggaaaatggattgctggaaaccaaagtatactttgcaggattccctcggaaagtggaaagtgaactcattaaaccgattaaccctcgtctagatggatgtatacgaagctggaatttgatgaagcaaggagcttctggaataaaggaaattattcaagaaaaacaaaataagcattgcctggttactgtggagaagggctcctactatcctggttctggaattgctcaatttcacatagattataataatgtatccagtgctgagggttggcatgtaaatgtgaccttgaatattcgtccatccacgggcactggtgttatgcttgccttggtttctggtaacaacacagtgccctttgctgtgtccttggtggactccacctctgaaaaatcacaggatattctgttatctgttgaaaatactgtaatatatcggatacaggccctaagtctatgttccgatcaacaatctcatctggaatttagagtcaacagaaacaatctggagttgtcgacaccacttaaaatagaaaccatctcccatgaagaccttcaaagacaacttgccgtcttggacaaagcaatgaaagcaaaagtggccacatacctgggtggccttccagatgttccattcagtgccacaccagtgaatgccttttataatggctgcatggaagtgaatattaatggtgtacagttggatctggatgaagccatttctaaacataatgatattagagctcactcatgtccatcagtttggaaaaagacaaagaattcttaaggcatcttttctctgcttataataccttttccttgtgtgtaattatacttatgtttcaataacagctgaagggttttatttacaatgtgcagtctttgattattttgtggtcctttcctgggatttttaaaaggtcctttgtcaaggaaaaaaattctgttgtgatataaatcacagtaaagaaattcttacttctcttgctatctaagaatagtgaaaaataacaattttaaatttgaatttttttcctacaaatgacagtttcaatttttgtttgtaaaactaaattttaattttatcatcatgaactagtgtctaaatacctatgtttttttcagaaagcaaggaagtaaactcaaacaaaagtgcgtgtaattaaatactattaatcataggcagatactattttgtttatgtttttgtttttttcctgatgaaggcagaagagatggtggtctattaaatatgaattgaatggagggtcctaatgccttatttcaaaacaattcctcagggggaacagctttggcttcatctttctcttgtgtggcttcacatttaaaccagtatctttattgaattagaaaacaagtgggacatattttcctgagagcagcacaggaatcttcttcttggcagctgcagtctgtcaggatgagatatcagattaggttggataggtggggaaatctgaagtgggtacattttttaaattttgctgtgtgggtcacacaaggtctacattacaaaagacagaattcagggatggaaaggagaatgaacaaatgtgggagttcatagttttccttgaatccaacttttaattaccagagtaagttgccaaaatgtgattgttgaagtacaaaaggaactatgaaaaccagaacaaattttaacaaaaggacaaccacagagggatatagtgaatatcgtatcattgtaatcaaagaagtaaggaggtaagattgccacgtgcctgctggtactgtgatgcatttcaagtggcagttttatcacgtttgaatctaccattcatagccagatgtgtatcagatgtttcactgacagtttttaacaataaattcttttcactgtattttatatcacttataataaatcggtgtataattttaaaatgcatgtgaatatctttattatatcaactgtttgaataaaacaaaattacataatagacatttaactcttca

SEQ ID NO: 6691 - DNA, 5706 bp, Homo sapiens
agtgtgccaccgccatctttaccggctgtggctcagcatggtcagtgccgtttaacctttattgtggtggagtccaccccgctgtgattcataagctgccctgaggcgatcttggcatcaagaaagacagcattgaggcacatctcaccatcagcttcagaggatgtcagcctttgatatgtcccatgggttttttcccagggaaccaatctgtccttttgaagaaaagacaaagataggaacgatggtagaggaccaccggtcaaattcttaccaggattcagtgacgtttgatgatgtggctgtggagttcaccccagaggagtgggctttactggacacaactcagaaatacctctacagagatgtgatgctggagaactacatgaacctggcctctgtggatttctttttctgcttaacttcagaatgggaaatacaacctagaaccaaacggtcatcacttcagcagggttttttgaagaatcaaatattcactgggatacaaatgcagacaagaagctacagtggatggaaactctgtgagaattgtggagaggtcttcagtgaacagttttgccttaagacacacatgagagctcagaatggagggaacacttttgagggtaattgttatggaaaagacagcatcagtgtgcacaaggaagcctctattggacaagaactttccaaatttaatccatgtggaaaagtcttcaccttaactccaggccttgctgtgcatcttgaaattctcaatggaagacaaccctacaaatgtaaggaatgtggaaaaggctttaagtattttgcaagccttgataatcacatgggaatccacattggagagaaactctgtgaatttcaggaatgtgagagagccatcacaacttcctcacacttaaagcagtgtgtagcagttcatactggaaagaaatccgaaaagactaagaactgtgggaaatccttcactaatttttctcaactttctgcacatgcaaaaactcataaaggagagaagtcctttgaatgtaaagaatgtggaagatcctttagaaattcctcatcctttaatgttcacattcaaattcacactggaataaaaccacacaaatgtacggaatgtgggaaagccttcactagatcaactcaccttactcaacatgtaagaactcacactggaataaaaccctatgaatgtaaggaatgtggccaagccttcactcagtacacgggccttgctatacacatacgaaatcacactggagagaaaccctatcagtgtaaggaatgtgggaaagccttcaatagatcttcaacgcttactcaacatagaagaattcacacaggagagaagccttatgaatgtgttgaatgtgggaagaccttcattacttcttcccatcgtagtaaacatttgaaaactcacagtggagaaaggtaaatgcaagatatgtgggaaagaatttctgtattcctcaccccacctgtgaactcctaccagagagaaaccttttgtatgtaaagaatttgggaaagcatttgctctttcctcatgcctaagtatgcatgaaagaattcacactggggagaaatactatgaatgtaaggatatgagtgttgttaccatttagcccattggttgccatctttaattattggcagtgcaaagatcatcagattagtcctaaatgccttttggaggttgtaatggctcacagattggccttagatgcatcccgagggtctgaaattaaacctacaggttctgaatacaacatcatggttacctgagtctgggcatctgtgaagaagggtcatggatggtgaggtcagtactgcaggctgcctcaccttggtgattagattcctaagatcatagcattaacaagttctgtacgagataaatcatgcagattgatcccagcccctgttggttagtggctgccagtgtggcacattcatgtcaaaatttaccagaagccaagatgatgtaggccccagaggtggattgttaaaaagatgctcctccaaggttctcttctgttcccatggatcctgcagagcatgtcaggagtgaaaccatccataactgccagtgccctttcacagctgattatttctatgtccccttcttgtaaaataagaagtgtgacaaccttgactgttctgttctgtcttctctgtccattttaggtggcacaatgtaagtggcagtgtctcttatagtataatccagtctctcttctcacttctgttaagatggctgatatagtccatgaatcccactcatgatctctttatcaaatgattgttcagccacactttgaggattctcttcagtacaagttttctaatttttgcagtatggataggctgagaattttccaaatctccaagttctggttcctttttccttaacaatttcttctgcaattcaggtctccttttgcatttttgccgagaccagctgggtcgtggagaccctaacccagtggctctagaggaattaagacaaagacacagaaatatagtgcagagtgggaatcggggctcacagccttcagagctgagcttgaacagagtttgacccacatatttattgacagtaagcctgtgataaacattattcctatagattgtagatcagctataagtattccttatgagaaagaaagggacaggctctggcttgttatctgcaacaggaatatgtccttaaggcacaaatcactcatgctattgtttgtggtttaggaatgccttgagcagttttccagttttctgccctgggtgggccaggtgttgcttgccctcattctggtaaaccagcagcctccagcatgggcgtcatagccatcacgagcatgtcacagtgctgcagagattttgtttatggccagtttctcattgcctgtttatggccagatttggggggcctgttcccagcacattttcctgtaagcactcaggaataatgaagcttcctgtgtcctttaacactttaattacagatcttagtgatacataccattttatctgtctcaagctctaccttccgtaaaatgctagaatacagttctgccaagttcttcaccactttatatcaagggttgtcttttcttcatttcccaatagcatgttcctcattccccaatgacacctcaccagaataacccttaccaaccttatttccagcttgcacatcagaatttttccagcctctactcatttgtcagtttcaaagctgcttcacatttttagtttttttgtttgtttttaattgcagtacctcacttctcagtaccaatatctgccttagtcagctcagacaaccataagagaataccgcagaccaaatggcttagaaattaatttaattttaaatcaatgaggttaaaaacacaggattttttttttttttttttttttttttttgagatggagttttgctcttgttgcccaggctggagtgcaatggtatgatcttggctcaccgcaacctccacctcctgagttccagtgattctcctgcctcaccctcagtagctgggattattggcatgcaccacaaaccttagctaagtttgtatttttagtagagacagggtttctccatgttggttaggctgatctccatgttggtcagatctgacctttggtgatccacctgccttggcctcccaaagtgctgggattacaggcctgagccaccgtatctggcccaaaacacaaatttatattctcacatatctggaggctggaagtctgagatcagagtgccagcatggtcaacctctagtgagagctctcttcctggcatgtaagtgcccacttcctcatgttttcacacgatggagaccaacaaataggtcggtcggtctcccccctccccgcccccttctcttttcacatacagtcacattgaggtttggaacttcatatgaaatttggggggtcactgtgtgtgtgtgtgtgtgtgtgtgtatgtgtatatatatatacatatatatacacatatgtatgtatacctaactcctaaagtggaacagtaagagtcattatttatagattatctgattctctatgtggaaagagaaaagaatcatattaagtactttggactgaacaatgacccccaaaattcgtatgatgatgaagctctctctaaatattttcttgctttactggactgattttaacccgctgcacaacaccaactaaaagtagtaataccagcatacttgtctttgcagttctggtgagatatgcactctattttgttggtttggctgtaggcttttatttcttttttattttttgaagaggttatgtcctgtcagggaaccagccccgatattcacataggttcttttctattttccctaagtgtcagccaacttgagaaataaagggacagagtacaaaagagagaaattttaaagctgggtgtccggggcagacatcacatgtcggtaggttccgtgatgccccacaagccgcaaaaaccagcaagtttttattagggattttcaaaaggggagggagtgtgcaaataggtgtgggtcacagacatcaagtactttacaaggtaatagaatatcacaaggcaagtggaggcagggcgagatcacaggaccaaggtgaaattaaaattgctaatgaagttttgggcaccattgtcattgataacatcttatcaggagacggttttgagatcaactggtctgactaaaatttattaggtgggaatttcctcttcctaataagcctgggagtgctatgggagactggggtctatttcacccctgcagtctcgaccataagagatggctacacccaggggggccagttcagagacccactcccaggtgtgcattctctttctcaaggatgttccttgctgagaaaaagaattcagtgatatttctcccatttgcttgtgaaagaagagaaatgtggctttgttccacctggctcaccggcggtcagaatttaaggttatctctcttgtttcctaaacattgctgttatcctgttcttttttcaaggtgcccagatttcatattgctcaaacacacatgctgtataatttgtgcagttaatgcaattattacagggtcctgaggtaatatacatcctcctcagctgacaggattgagagattaaagtaaagacaggcataggaaatcacaagggtattgactggggaagtgataagtgtccatgaaatctttacaatttatgtttagagattgcagtaaagacaggcataagaaattataaaagtattaatttggggaactaataaatgtccatgaaaccttcacaatccatgtttttctgccatggcttcagccagtccccccgtttggggtccctgacttcctgcaacaatgtcctgcaggaaaagttttttctttatatccagtttttacatgatgaattatttcccaatatttcatagtttatgaggctgaattcctcttgaatttattaaatgcttccttcacatcctctgtgatgatcatgtttatttactgataaaactcaatacctagaactgcacctagctcatgatggtacctaataaatacttcaatgaaatgatgtggtgatgcatgcctatagttttagctacttgggagggtggcctgagcccaggggttctagaccagcttaggcaacatagcaagaccccatctc

SEQ ID NO: 6692 - DNA, 1270 bp, Homo sapiens
gtagccatcactgagaaatctggattttcaagcaatgattttcaacaattataaaatggaagttgtagactggataagagatgctcagctaagggagttcctggatggtctttagattgatacaccaatcctctgaaattgcatgcaaaaatgttttcctgggatcagctgcactccttagcaaaagtatattggagaatcaactgagaaagtaactgagacatttcaatcatttctaggtgtaaagaaagaccagatcccaggaaaatattacggtgacttcccaagtatgcctggccacaatacctccaggaattcctcttgcgatcctatagtgacaccccacttaatcagcctctacttcatagtgcttattggcgggctggtgggtgtcatttccattcttttcctcctggtgaaaatgaacacccggtcagtgaccaccatggcggtcattaacttggtggtggtccacagcgtttttctgctgacagtgccatttcgcttgacctacctcatcaagaagacttggatgtttgggctgcccttctgcaaatttgtgagtgccatgctgcacatccacatgtacctcacgttcctattctatgtggtgatcctggtcaccagatacctcatcttcttcaagtgcaaagacaaagtggaattctacagaaaactgcatgctgtggctgccagtgctggcatgtggacgctggtgattgtcattgtggtacccctggttgtctcccggtatggaatccatgaggaatacaatgaggagcactgttttaaatttcacaaagagcttgcttacacatatgtgaaaatcatcaactatatgatagtcatttttgtcatagccgttgctgtgattctgttggtcttccaggtcttcatcattatgttgatggtgcagaagctacgccactctttactatcccaccaggagttctgggctcagctgaaaaacctattttttataggggtcatccttgtttgtttccttccctaccagttctttaggatctattacttgaatgttgtgacgcattccaatgcctgtaacagcaaggttgcattttataacgaaatcttcttgagtgtaacagcaattagctgctatgatttgcttctctttgtctttgggggaagccattggtttaagcaaaagataattggcttatggaattgtgttttgtgccgttagccacaaactacagtattcatatttgcttcctttatattgggaataaaaatgggtataggggag

SEQ ID NO: 6693 - DNA, 2052 bp, Homo sapiens
ctgaagagccggtgcagagcgggcggcggcggcggcggcagcggaggcggcggctccagccggcgcggcgcgaggctcggcggtgggatccggcgggcggtgctagctccgcgctccctgcctcgctcgctgccgggggcggtcggaaggcgcggcgcgaagcccgggtggcccgagggcgcgactctagccttgtcacctcatcttgcccccttggttttggaagtcctgaagagttggtctggaggaggaggaggacattgatgtgcttggtgtgtggccagtggtgaagagatggctgctcctgtcccgtgggcctgctgtgctgtgcttgccgccgccgccgcagttgtctacgcccagagacacagtccacaggaggcaccccatgtgcagtacgagcgcctgggctctgacgtgacactgccatgtgggacagcaaactgggatgctgcggtgacgtggcgggtaaatgggacagacctggcccctgacctgctcaacggctctcagctggtgctccatggcctggaactgggccacagtggcctctacgcctgcttccaccgtgactcctggcacctgcgccaccaagtcctgctgcatgtgggcttgccgccgcgggagcctgtgctcagctgccgctccaacacttaccccaagggcttctactgcagctggcatctgcccacccccacctacattcccaacaccttcaatgtgactgtgctgcatggctccaaaattatggtctgtgagaaggacccagccctcaagaaccgctgccacattcgctacatgcacctgttctccaccatcaagtacaaggtctccataagtgtcagcaatgccctgggccacaatgccacagctatcacctttgacgagttcaccattgtgaagcctgatcctccagaaaatgtggtagcccggccagtgcccagcaaccctcgccggctggaggtgacgtggcagaccccctcgacctggcctgaccctgagtcttttcctctcaagttctttctgcgctaccgacccctcatcctggaccagtggcagcatgtggagctgtccgacggcacagcacacaccatcacagatgcctacgccgggaaggagtacattatccaggtggcagccaaggacaatgagattgggacatggagtgactggagcgtagccgcccacgctacgccctggactgaggaaccgcgacacctcaccacggaggcccaggctgcggagaccacgaccagcaccaccagctccctggcacccccacctaccacgaagatctgtgaccctggggagctgggcagcggcgggggaccctcggcacccttcttggtcagcgtccccatcactctggccctggctgccgctgccgccactgccagcagtctcttgatctgagcccggcaccccatgaggacatgcagagcacctgcagaggagcaggaggccggagctgagcctgcagaccccggtttctattttgcacacgggcaggaggaccttttgcattctcttcagacacaatttgtggagaccccggcgggcccgggcctgccgccccccagccctgccgcaccaagctggccctccttcctccctcaggggaggtgggccatgcagctaacccacccaccaaagaccccctcaccctggccccttgggctggaccctccaatgccagcgactcccaggagcccttgggggacgtgaggggagcctctcacatccgatttctcctcctgccccagcctcctgtctatcccagggtctctgttgccaccatcagattataagctcctgatgctgggggggcccagccatccccctccccccagcacccacaattttcagtcccctcccctctgccctgttttgtatacccctcccctgaccctgctcctatcccacagtatttaatgccctgtcagtcccttctagtctgactcaatggtaacttgctgtatttgaattttttatagatgtatatacagggtggggggagtgggcggttctcattaaacgtcaccatttcatgag

SEQ ID NO: 6694 - DNA, 1123 bp, Homo sapiens
actcccaaaagagcgcccaagaagaaaatggccataagtggagtccctgtgctaggatttttcatcatagctgtgctgatgagcgctcaggaatcatgggctatcaaagaagaacatgtgatcatccaggccgagttctatctgaatcctgaccaatcaggcgagtttatgtttgactttgatggtgatgagattttccatgtggatatggcaaagaaggagacggtctggcggcttgaagaatttggacgatttgccagctttgaggctcaaggtgcattggccaacatagctgtggacaaagccaacctggaaatcatgacaaagcgctccaactatactccgatcaccaatgacaagttcaccccaccagtggtcaatgtcacgtggcttcgaaatggaaaacctgtcaccacaggagtgtcagagacagtcttcctgcccagggaagaccaccttttccgcaagttccactatctccccttcctgccctcaactgaggacgtttacgactgcagggtggagcactggggcttggatgagcctcttctcaagcactgggagtttgatgctccaagccctctcccagagactacagagaacgtggtgtgtgccctgggcctgactgtgggtctggtgggcatcattattgggaccatcttcatcatcaagggagtgcgcaaaagcaatgcagcagaacgcagggggcctctgtaaggcacatggaggtgatggtgtttcttagagagaagatcactgaagaaacttctgctttaatgactttacaaagctggcaatattacaatccttgacctcagtgaaagcagtcatcttcagcgttttccagccctatagccaccccaagtgtggttatgcctcctcgattgctccgtactctaacatctagctggcttccctgtctattgccttttcctgtatctattttcctctatttcctatcattttattatcaccatgcaatgcctctggaataaaacatacaggagtctgtctctgctatggaatgccccatggggcatctcttgtgtacttattgtttaaggtttcctcaaactgtgatttttctgaacacaataaactattttgatgatcttgggtggaa

SEQ ID NO: 6695 - DNA, 3903 bp, Homo sapiens
ggtgttgatgaacctgtgtgtgcagtcatagatacatcgtgtgtgtttgcaaaaatggcgaatgaggaaagatccagctctgacagaataatgagttgtgcaaagtgaaggccaaatgacatcaccggagatagcagtagttcaaagaaagcaaagcagaggaattgaactgctgcaaaatgcacgattcctccggcctcagatgaccaggcaccactagatacagaacactgtgctttccttctccaagtcacttcctgccttgtgaccacacacccaggcttgacaaagctgttctgcagatcagaaagaaggggttcctggtcatacaccagtactaccaaggacagcttttttcctgcaagatctgttacctaaagcaataaaaaatggccagaggatcagtgtccgatgaggaaatgatggagctcagagaagcttttgccaaagttgatactgatggcaatggatacatcagcttcaatgagttgaatgacttgttcaaggctgcttgcttgcctttgcctgggtatagagtacgagaaattacagaaaacctgatggctacaggtgatctggaccaagatggaaggatcagctttgatgagtttatcaagattttccatggcctaaaaagcacagatgttgccaagacctttagaaaagcaatcaataagaaggaagggatttgtgcaatcggtggtacttcagagcagtctagcgttggcacccaacactcctattcagaggaagaaaagtatgcctttgtcaactggataaacaaagccctggaaaatgatcctgattgtcggcatgtcatcccaatgaacccaaacacgaatgatctctttaatgctgttggagatggcattgtcctttgtaaaatgatcaacctgtcagtgccagacacaattgatgaaagaacaatcaacaaaaagaagctaacccctttcaccattcaggaaaatctgaacttggctctgaactctgcctcagccatcgggtgccatgtggtcaacataggggctgaggacctgaaggaggggaagccttatctggtcctgggacttctgtggcaagtcatcaagattgggttgtttgctgacattgaactcagcagaaatgaagctctgattgctcttttgagagaaggtgagagcctggaggatttgatgaaactctcccctgaagagctcttgctgaggtgggctaattaccacctggaaaatgcaggctgcaacaaaattggcaacttcagtactgacatcaaggactcaaaagcttattaccacctgcttgagcaggtggctccaaaaggagatgaagaaggtgttcctgctgttgttattgacatgtcaggactgcgggagaaggatgacatccagagggcagaatgcatgctgcagcaggcggagaggctgggctgccggcagtttgtcacagccacagatgttgtccgagggaaccccaagttgaacttggcttttattgccaacctctttaacagataccctgccctgcacaaaccagagaaccaggacattgactggggggctcttgaaggtgagacgagagaagagcggacatttaggaactggatgaactccctgggtgttaaccctcgagtcaatcatttgtacagtgacttatcagatgccctggtcatcttccagctctatgaaaagatcaaagttcctgttgactggaacagagtaaacaaaccgccataccccaaactgggaggcaatatgaagaagcttgagaattgtaactacgcggtagaattggggaagaatcaagcgaagttctccctggttggcatcggtggacaagatctcaatgaaggaaaccgcactctcacactggccttgatttggcagctaatgagaaggtatacactgaatatcctcgaagaaattggtggtggccagaaggtcaatgatgacattattgtcaactgggtgaatgaaacattgagggaagcaaagaaaagttcatccatctctagtttcaaggacccgaagattagtacaagtctgcctgttctggacctcatcgatgccatccaaccaggttccattaactatgaccttctgaagacagaaaatctgaatgatgatgagaaactcaacaatgcaaaatatgccatctctatggcccgaaaaattggagcaagagtgtatgccctgccagaagacctggttgaagtgaaccccaaaatggtcatgaccgtgtttgcctgcctcatggggaaaggaatgaagagggtgtgaggcccaatggggctgggtgggaggcggtgcactcactcctgactgcccggcacagatgctccagggatgattcaagccattccaaagttcaacttggtgacactctataagattccaaaaagcacatattagtgcagccaagtagcctctcctgtatttaacaaaaagtgcttcattctttgcaggaggcccaacctcctatatataggtttctattcttgatttatttgcttcttcgaaaatctagaggaaaagaaagaagttattttccaggtacccttctcgcttttgccattagccaaggatagaagctgcagtggtattaattttgatataatctttcaaaccagcttcatgtggcttcccttttctttgttcaagatgagggccaggaggggaaacatcacacctgccctaaaccctgttcctggaggtcagcatttgatctgttgcaagcccctctttctgtcccctcttcctaccctgcctcccttgactttgctcctcacacttttggaaccatgccttccgggggggcccatctcttctggccgtccttgtctctgggccacttggagtgtgtgataaatcagtcaagctgttgaagtctcaggagtctctggtagcctgcagaagtaagcctcatcatcagagcctttcctcaaaactggagtcccaaatgtcatcaggttttgttttttttcagccactaagaacccctctgcttttaactctagaatttgggcttggaccagatctaacatcttgaatactctgccctctagagccttcagccttaatggaaggttggatccaaggagggtgtaatggagcatcaagccactcggcggcagcatggagctataactaagcatcctttagggttctgcctctccaggcatttagccctcacattagatctagttactgtggtatggctaatacctgtcaacatttggaggcaatcctaccttgcttttgcttctagagcttagcatatctgattgttgtcaggccatattatcaatgtttacttttttggtactataaaagctttctgccacccctaaactccaggggggacaatatgtgccaatcaatagcacccctactcacatacacacacacctagccagctgtcaagggcagaatgaatctatgctggataagaaatggtggaactgcgttatgaagagctaatttactggacaaagaattccaaagcaaaaccagaacagtatgaatttgagcaggtctcataggttgagcaatttccccctaaaccaactgaaggctaaaaagcaacaggccattgtgaaccaatgcaagacgccctctatcatggtgaaaagctccatcaatgaggtatcttctttagtggtggtatgtaatggaacttagccatttttcaaagcaattgaaatgcattgctctggatctgttccttggcagtggactcagaaagccaacatgtggctcctcccagcccataaccagtatttttgctgcttctgaatacaaattggttggttttgacttcagattgaacttactgtagcctcagatgatttcccccctccgcctccaggaagaaagaatgttactgccttaataaaaaatgaaaagagaa

SEQ ID NO: 6696 - DNA, 416 bp, Homo sapiens
aggcacagacaccaaggacagagacgctggctaggccgccctccccactgttaccaacatgaagctgctcgcagcaactgtgctactcctcaccatctgcagccttgaaggagctttggttcggagacaggcaaaggagccatgtgtggagagcctggtttctcagtacttccagaccgtgactgactatggcaaggacctgatggagaaggtcaagagcccagagcttcaggccgaggccaagtcttactttgttaacttcttgagctatttcgtggaacttggaacacagcctgccacccagtgaagtgtccagaccattgtcttccaaccccagctggcctctagaacacccactggccagtcctagagctcctgtccctacccactctttgctacaataaatgctgaatgaa

SEQ ID NO: 6697 - DNA, 766 bp, Homo sapiens
ggaggttgttcctgaaaagaaggtgcctctggtggttcccaaaaagccagaagccccacctgctaaagtgcctgaagttccaaaagaagttgttccagaaaagaaagtagctgttcccaaaaagccagaagtcccaccagcaaaagtgccagaagtgccaaagaaacctgtcttggaagagaaaccagctgttcctgttccagaaagagcggagtctcctcccccagaagtatatgaagaacctgaggaaattgctcctgaagaggaaattgctcctgaagaggaaaagccagttcctgttgcagaagaggaggaaccagaggttccacctccagcagtgcctgaagagcccaagaagatcatcccagagaagaaagttcctgtcatcaaaaaaccagaagcaccgcctcctaaagaacctgaacctgaaaaggttattgagaagccaaaactcaaaccaagacccccacctcctccacctgctccacctaaggaagatgtgaaggagaaaatattccaacttaaagctattccaaagaagaaagttcctgaaaaacctcaggttccagaaaaagtggagcttacacctctgaaagtaccagaaccaccacctccaaaacctgttgaagaggttgaagtacctactgttacaaaaagggaaaggaagattcctgaaccaacaaaagtgcctgaaatcaagccagcaatacctctccctgcacctgaaccgaaaccaaagcccgaagcagaagtgaaaacaatcaaa

SEQ ID NO: 6698 - DNA, 1280 bp, Homo sapiens; identical to SEQ ID NO: 6462

SEQ ID NO: 6699 - DNA, 777 bp, Homo sapiens
cttccatgtgaacacagtgactgatgatgactacgcaggctttctcttcagttatcaagacagtggccgcttctacgtagtcatgtggaagcagaccgagcagacctactggcaggctacacccttccgggcggttgcccagcccgggctgcagctcaaggtccccagctgctcagattccgcaacccagggccctttcccaaagctctcctctgcagccccagggcctcccccactgcttgactgggaaccctcttacccagacatctggcttggaggccggctctctggggccccagggcattttcatgaccgccttgaatccctttcccacctgcacttaccgacctgttgtctcccctcactccagttctgcagttgacccactgtctttgccaatgtctcctaggcagtgacatcagtgtctggcccaggtgagcacctccgaaatgccctgtggcatactggccacacccctgatcaggtacgactgctgtggacagacccacgaaatgtgggctggcgggacaagacctcctatcgctggcagcttctgcaccggcctcaagttggctacattcgggtgaagctctatgagggaccccagcttgtggcggattctggggtgatcattgacacatccatgcgaggggggcgtcttggtgtattctgcttctcccaagaaaacataatttggtccaatctccagtatcgatgcaatgacacagtgcctgaggactttgagccattccggaggcagctgctccagggaagggt

SEQ ID NO: 6700 - DNA, 2396 bp, Homo sapiens
attgcgcctctcctgcagtctgattggcaccggctcccattccggctccagcctccaatccgacccccatttcggctgcagcctcggacctagctccggccctcggtctatccggttgcatcctccctccctgttccggatcttatcttgcgccagcgcctactccaggatcccgtagccagacctcaagccatggctggtcccttctcccgtctgctgtccgcccgcccgggactcaggctcctggctttggccggagcggggtctctagccgctgggtttctgctccgaccggaacctgtacgagctgccagtgaacgacggaggctgtatcccccgagcgctgagtacccagacctccgaaagcacaacaactgcatggccagtcacctgaccccagcagtctatgcacggctctgcgacaagaccacacccactggttggacgctagatcagtgtatccagactggcgtggacaaccctggccaccccttcatcaagactgtgggcatggtggctggagatgaggagacctatgaggtatttgctgacctgtttgaccctgtgatccaagagcgacacaatggatatgacccccggacaatgaagcacaccacggatctagatgccagtaaaatccgttctggctactttgatgagaggtatgtattgtcctctagagtcagaactggccgaagcatccgaggactcagtctgcctccagcttgcactcgagcagagcgacgagaggtggaacgtgttgtggtggatgcactgagtggcctgaagggtgacctggctggacgttactataggctcagtgagatgacagaggctgaacagcagcagcttattgatgaccactttctgtttgataagcctgtgtccccgttgctgactgcagcaggaatggctcgagactggccagatgctcgtggaatttggcacaacaatgagaagagcttcctgatctgggtgaatgaggaggatcatacacgggtgatctccatggagaagggtggtaacatgaagagagtgtttgaaagattctgccgaggcctcaaagaggttgttgtggggattaagtgaaatacaggtaaagtacttggtccacagtaagtgcttaataagtgttaaagtgttagctgcaatattattctggatggaagagtttccccccatgttcagcatgtaagatatcccctatggcatggttccttctgaactataaagaggatccctttactcatgttgggttgtggtctttgtgaccatcattctgctagatcccttgtctcttgaactctaatagtcatcttcatgactacatggttaagtgaagccaaacgccttccccccgccccctattcctatgaatctggcttttctgctctgttttcatctttctctgcattcacacaggtgctccgttcacagctaacagaatgttatcttacctcttcctggcaaagcttacaccttcatcttctgtctgaagggacccttctaagctctaggctcattagcaaagcaaagataatcgatgcatgcagacctcattgaataatcagtcatctctcagttcagtttaccacctctgttcatttccctagatcatccttaatacaccactccttcgagttttcttcttccacataagatattttttcacaatctcattattatgcacatcataattttgcatcatgcatgcatgaaaacaataacaaacctttttcatttaaaaaaagaccaatgtcattcattcacagccaagtttctgttctagacatatttctagtgttcttgtgggtctagctaagggagggtccagggttaatgaaatatccctgatttttcgttaacaaaacctttgtggactcaggtggagagacttatccaagaacgtggctgggagttcatgtggaatgagcgtttgggatacatcttgacctgtccatctaacctgggcactggacttcgggcaggagtgcacatcaaactgcccctgctaagcaaagatagccgcttcccaaagatcctggagaacctaagactccaaaaacgtggtactggaggagtggacactgctgctacaggcggtgtctttgatatttctaatttggaccgactaggcaaatcagaggtggagctggtgcaactggtcatcgatggagtaaactatttgattgattgtgaacggcgtctggagagaggccaggatatccgcatccccacacctgtcatccacaccaagcattaactccccatcgccagctgatgactcaagattcccaggagttctgctcattctaatgatggcccattctacttgctctggacctgcccccgcatcccctgcctccatcctagtaaagactccttgctatgctgca

SEQ ID NO: 6701 - DNA, 2701 bp, Homo sapiens
gaagttgcctgaagtgaaggagggggtagcggctgcagaagctaaagcttccgccaaacaaaagaggacagcacttccggtcacgccatcgttgctgccttcttcgtcaagcccccaggctccgctcttgccagagggacaggagccatggctcagaaaatggactgtggtgcgggcctcctcggcttccaggctgaggcctccgtagaagacagcgccttgcttatgcagaccttgatggaggccatccagatctcagaggctccacctactaaccaggccaccgcagctgctagtccccagagttcacagcccccaactgccaatgagatggctgacattcaggtttcagcagctgccgctaggcctaagtcagcctttaaagtccagaatgccaccacaaaaggcccaaatggtgtctatgatttctctcaggctcataatgccaaggatgtgcccaacacgcagcccaaggcagcctttaagtcccaaaatgctaccccaaagggtccaaatgctgcctatgatttttcccaggcagcaaccactggtgagttagctgctaacaagtctgagatggccttcaaggcccagaatgccactactaaagtgggcccaaatgccacctacaatttctctcagtctctcaatgccaatgacctggccaacagcaggcctaagacccctttcaaggcttggaatgataccactaaggccccaacagctgatacccagacccagaatgtaaatcaggccaaaatggccacttcccaggctgacatagagaccgacccaggtatctctgaacctgacggtgcaactgcacagacatcagcagatggttcccaggctcagaatctggagtcccggacaataattcggggcaagaggacccgcaagattaataacttgaatgttgaagagaacagcagtggggatcagaggcgggccccactggctgcagggacctggaggtctgcaccagttccagtgaccactcagaacccacctggcgcaccccccaatgtgctctggcagacgccattggcttggcagaacccctcaggctggcaaaaccagacagccaggcagaccccaccagcacgtcagagccctccagctaggcagaccccaccagcctggcagaacccagtcgcttggcagaacccagtgatttggccaaacccagtaatctggcagaacccagtgatctggccaaaccccattgtctggcccggccctgttgtctggccgaatccactggcctggcagaatccacctggatggcagactccacctggatggcagaccccaccgggctggcagggtcctccagactggcaaggtcctcctgactggccgctaccacccgactggccactgccacctgattggccacttcccactgactggccactaccacctgactggatccccgctgattggccaattccacctgactggcagaacctgcgcccctcgcctaacctgcgcccttctcccaactcgcgtgcctcacagaacccaggtgctgcacagccccgagatgtggcccttcttcaggaaagagcaaataagttggtcaagtacttgatgcttaaggactacacaaaggtgcccatcaagcgctcagaaatgctgagagatatcatccgtgaatacactgatgtttatccagaaatcattgaacgtgcatgctttgtcctagagaagaaatttgggattcaactgaaagaaattgacaaagaagaacacctgtatattctcatcagtacccccgagtccctggctggcatactgggaacgaccaaagacacacccaagctcggtctcctcttggtgattctgggtgtcatcttcatgaatggcaaccgtgccagtgaggctgtcctctgggaggcactacgcaagatgggactgcgtcctggggtgagacatcccctccttggagatctaaggaaacttctcacctatgagtttgtaaagcagaaatacctggactacagacgagtgcccaacagcaaccccccggagtatgagttcctctggggcctccgttcctaccatgagactagcaagatgaaagtgctgagattcattgcagaggttcagaaaagagaccctcgtgactggactgcacagttcatggaggctgcagatgaggccttggatgctctggatgctgctgcagctgaggccgaagcccgggctgaagcaagaacccgcatgggaattggagatgaggctgtgtctgggccctggagctgggatgacattgagtttgagctgctgacctgggatgaggaaggagattttggagatccctggtccagaattccatttaccttctgggccagataccaccagaatgcccgctccagattccctcagacctttgccggtcccattattggtcctggtggtacagccagtgccaacttcgctgccaactttggtgccattggtttcttctgggttgagtgagatgttggatattgctatcaatcgcagtagtctttcccctgtgtgaggctgaagcctcagattccttctaaacacagctatctagagagccacatcctgttgactgaaagtggcatgcaagataaatttatttgctgttccttgtctactgctttttttccccttgtgtgctgtcaagttttggtatcagaaataaacattgaaattgcaaagtgaa

SEQ ID NO: 6702 - DNA, 3566 bp, Homo sapiens
gcggccctagtggctggtctttcctgtgcttgggatgttggccttgtagagttacttctgtaatctcaagacagaaactgacagctttgtttgatcaaaattgttacttcaccttgcacattttcaagagttctacaggtttaatgagcacagaaatctgggggaactttcactctccagggctccttcatagaggttctcaaatactccatcagcagaggggagccccagatggcaaaaggacacaggatatgtcatctttcaaatgaaccaataatccattatttgattcttctacctttgtcaaaattcctccagcaacgcctgcagaaaatcacaattcttgatacatagcttgttccaataaagcaccacagcatttctagtgactgcaggcccagctgtcaaactctttcaacttgatagagaatatgtacacaaaacctatagctgtcatcatacttaatagtgaaaaacagaatgttttccagctgacactggggacaaggtaacagtgtcagttcctgccgctcttattcaacacagaaattttagtcatcatactaagacacacaaaaaaaggaataaaaagccacgcagactggaaaggtagaaataaaactctccatatttgcagatgacatgattatctacatggaaaatgccaagtaatacacaaataacctcttaaaattaataggtgagtttgccaaggtcacaggatatgagatcaacatgagaaacacaatcacatttctgtatgctaacaacaaacatgtaaaaactgaaataaaaataataacagtttaaatctcttgagagcaaaggaaatatttaagtataaacctaacaaaacgtgataggatctgatgttgaaaaaatcacacaattctgatgaaagaagtgaaaaaaaaaaaactatttaaatagacagacataccatgttcgtgggttggaagattcaacataataaggatacaattctcaatttgatccataggttgattgcaattcctctcgaaataccaacatggctttttgtagaaacagacaagtttattctaaattttatgtgggaaggcacaagccctagaatactttaaacttgacaaagaagaataaagtgtgtggctgtaaaaccaaactgtaaaaaattaacagttcattgcttgcagtcgaaaaaatgaggaaaagatggacgatctaggaaactttcagggagctaaggtgtcggagagcaaagtatccttgtaaggaatgagacaagataaactccctcccccacacacagtattttcagagaactacattcttggtttcaacctgatgtcataggctgtgttctttgcaacggaagaagcaaagacttcaaagggagaaatcggaagatttcttttttcatcgtagggacttcacatcagcgtttccaaaaccgagtccatcgccttttccctctgcgcagcctctatcccttcctgtgtttcgcatctcaataaacgtccccgccaagtgacttcagcctgaaacatgcggcctcccggactcctctctgtgtcaccgacctcttgcgctcagttctccggagctgccggtttaacctcgcaagtcttcccggaacccgtgccctcctcctgggcagcgttaccaccacgagcgcctacctgagaggacgcctgttctcatccagcctccaccctgcagccgagcaatctccgtaaaacgaacacctggcttagtttctgctggaaaccgttgaatagtccccactgtcttctggaagggtctgggcagctcggcgtggcgtccacggccccaccaggcctctgcctcctgcaggtcccgctacttcgtcaccaaagcgcccgccgcgctcgcatctgctgtgaggctgtgctcgggccgctcccgccgagggaacggccctcccaaggctctgcgccccaattctcgctcgtttgccaagaggtagccgtgtcggggagctagagttctccggggactctctcctgcccctcgtggccctctgtggaaccctcgttttaggatctgcacgccgtttccagtcgcgcgcgcggcacggagaccgcccgctgtgccccgcgctgcgctctctccgcccctctcccgcgcaggcctccctgtgccagccggctgtcgacccaggttaggaagcccgaggtcggggcgttaccccaagggccctcccgcttcccctccgagggcagagaggcgtccgcgcccggacgcactgcgggaacacctggagcgccggcggagctcggctgtccccgcgggagggagcccgacgcgcatccttgggacccggacccggcgcccgcgcctcgggacggatttctgcctcggctgcaggcgcagcgcgcagacctgagcctgccccgcggaaccggggctcgagtcccggcccgagcgcggcgtcggggccagcggagaggggcggaagccgcaagggaccctcggcgcctcggcctggccgcgatgaagtccccgcccctcctcagcccgtgtctctcctggaagagaatggcgggcatctttttcctgccatttatctcatcaggttttgctcctcggtttaagcaggaagagaacttcatgcttggaagagcgcatccgtcccagcctaggtttaattggtctcatctgacccctctggagctgaagaatcgatctgtgggacttggaactgaaagcacaggtcggggtaagccccacttcacactggagggccacaagttcctgatcttcgggggctccatccactatttccgggtgcccagggagtactggagggaccgcctgctgaagctgaaggcctgtggcttcaatactgtcaccacctatgttccgtggaacctgcatgagccagaaagaggcaaatttgacttctctgggaacctggacctggaggccttcgtcctgatggccgcagagatcgggctgtgggtgattctgcgtccaggccgctacatctgcagtgagatggacctcgggggcttgcccagctggctcctgcaagacccccggttactgttgaggacaaccaacaagagcttcattgaagcagttgagaagtattttgaccacctgattcccagagtgattcctctccagtaccgccaggcaggccctgtcatcgcggtgcaagtggagaatgagtatggctcattcaataaggataaaacatacatgccgtatctccacaaggccctgctgagaagagggattgtggagcttctcttgacctctgatggtgagaaacatgtgctgagtggccacaccaaaggagtgttggccgccatcaatttgcaaaaacttcaccaggatactttcaatcagcttcataaagtccagggagccagtatagatgcaggactgctctcagatgcctcacaagcagcaacttcttcctccttatagttcttatctgtgattcttccataattttgtccttctaagcttctgatgcactgaattatgtaaagtgcattcccttcaccagcttgtgcaccctattctgtaactgataataaatggttggtattgca

SEQ ID NO: 6703 - DNA, 574 bp, Homo sapiens
acaccagccctcagtcactgggagaagaacctctcataccctcggtgctccagtccccagctcactcagccacacacaccatgtgtgaagaggagaccaccgcgctcgtgtgtgacaatggctctggcctgtgcaaggcaggcttcgcaggagatgatgccccccgggctgtcttcccctccattgtgggccgccctcgccaccaggtgcgtgctcatctggataccaccaggctttgagccactaggagtaagcgctgcactgtggagaccctgctgagctgggggttaggggaaggaaatgtgtgtgtgtgtgtgtgtgtgtgtgtgtgtgtgtgtgtgtgtgtgtgtctgtgcgtgtgtgtgtgtgtgtgtctgtgcatgcacatgcgtgtgtgcacgccaggtgtagggagttcttttctgattaactgatagagcaggaccctttaaatagaaatatccagggccaaaaccaacatacatcaggcacacaatgacactactatgtctggcttacatttggggggttgccaggtttggaaaagttaatttatatgggattgaacaagcct

SEQ ID NO: 6704 - DNA, 569 bp, Homo sapiens
ctggtattcttccacctgatgtaggtgcaggcaaagttcaagcagtaaatcccaggatcagcaatcttactgctgcagctgctgagacctatgccaatatcagttgggaatatgagggaccagagcatgtgaacttttatgttgaatatggtgtagcaggcacgatggcaagccggcaggtggatattgcaactcagggctggttcattggtctgatgtgtgctgttgctctccttatcttaattttgctgattgtttgcttcatcagaagaaacaagggtggtaaatatccagttaaagaaaaggaagatgcccatgctgaccctgaaatccagcctatgaaggaagatgatgggacatttggagaatacagtgatgcagaagaccacaagcctttgaaaaaaggaagtcgaactccttcagacaggactgtgaaaaaagaagatagtgacgacagcctagttgactatggagaaggggttaatggccagttcaatgaggatggctcctttattggacaatacagtggtaagaaagagaaagagccggctgaaggaaacgaaagctca

SEQ ID NO: 6705 - DNA, 1980 bp, Homo sapiens; identical to SEQ ID NO: 6515

SEQ ID NO: 6706 - DNA, 2583 bp, Homo sapiens
atgaagtccccgcccctcctcagcccgtgtctctcctggaagagaatggcgggcatctttttcctgccatttatctcatcaggttttgctcctcggtttaagcaggaagagaacttcatgcttggaagagcgcatccgtcccagcctaggtttaattggtctcatctgacccctctggagctgaagaatcgatctgtgggacttggaactgaaagcacaggtcggggtaagccccacttcacactggagggccacaagttcctgatcttcgggggctccatccactatttccgggtgcccagggagtactggagggaccgcctgctgaagctgaaggcctgtggcttcaatactgtcaccacctatgttccgtggaacctgcatgagccagaaagaggcaaatttgacttctctgggaacctggacctggaggccttcgtcctgatggccgcagagatcgggctgtgggtgattctgcgtccaggccgctacatctgcagtgagatggacctcgggggcttgcccagctggctcctgcaagacccccggttactgttgaggacaaccaacaagagcttcattgaagcagttgagaagtattttgaccacctgattcccagagtgattcctctccagtaccgccaggcaggccctgtcatcgcggtgcaagtggagaatgagtatggctcattcaataaggataaaacatacatgccgtatctccacaaggccctgctgagaagagggattgtggagcttctcttgacctctgatggtgagaaacatgtgctgagtggccacaccaaaggagtgttggccgccatcaatttgcaaaaacttcaccaggatactttcaatcagcttcataaagtccagagagataagccccttctgattatggaatactgggtcggctggttcgacagatggggagataagcaccatgttaaagatgcaaaggaggttgaacatgctgtgtctgaattcatcaaatatgagatctccttcaatgtatatatgttccatggtggaaccaactttggtttcatgaacggggccacatatttcgggaagcactcgggcattgtcaccagctatgactatgatgcagtgctcacggaggctggagattacacagaaaaatatctgaagcttcaaaaactctttcaatctgtctcagcaactcccctgccccgagtacccaaacttcctcccaaggctgtgtatccccccgtgagaccgtcgctgtacctcccgctgtgggacgccctatcctacttaaatgagccagtcaggtcgcgtcagcccgtcaacatggagaaccttcccataaacaatgggagcggccagtcctacgggcttgtcctgtatgagaagtccatctgctccggaggccgcctccgtgcccacgctcatgacgtggcacaggtgtttttggatgagacaatgatagggattctgaatgagaataataaggacctgcacattcctgaactcagggactgccgatacctgaggatcctggtggagaatcaaggacgagtcaatttttcatggcaaatacagaatgagcagaaaggaataactggatctgtcagcatcaataactcttccctggagggctttaccatctattccctggagatgaaaatgagcttctttgagaggctccgctctgccacctggaagcctgtcccagacagccaccagggcccggccttctactgtgggaccttgaaggctggcccttctcccaaggacaccttcctgagcctgctgaactggaattatggatttgtgttcatcaatggacgtaaccttgggcgatattggaatattgggcctcagaaaacactgtaccttcctggagtttggcttcatccagaagacaatgaggtcatcttgtttgagaagatgatgagtggctcagatatcaaatctacagacaagcccacgctgtaaaactgtgtctgaacatttttttttttttttgagatggagtctcactttgtcgcccaggctggagtgcagtggcacaatctctgctcactgcaagctcagcctctcgggttcacgccattctcctgcctcagcctccccagcagctgggactacaggtgcacgccaccacgcctggctaattttttgtatttttagtagagatggggtttcaccaagttagccaggatggtcccaatctcctgaccttgtgatctgctctcctcagcctcccaaagtactgggattacaggcgtgagccaccactcccggccgtgaacatattttttgggttgctggagttcatctataagtcatttttgaggaataagatttatgttaagactatcaaacacagtgttgcctacaatagcaaaaatgtgaaaataacaacaacaacaaaacagcagaggaattgttatgtattttgtagtctatctatatgatgcctatttttaggctttaaaaagtcttcaaaatctttaatgactgatttatctagttaaatgcttaatccttagcaggctcttattctttaattaaacgtgcctttgagtagatgtgaataaaataaaaacaagtttc

SEQ ID NO: 6707 - DNA, 1258 bp, Homo sapiens
cagtgcaagggagatcatgtttgactgtatggatgttctgtcagtgagtcctgggcaaatcctggatttctacactgcgagtccgtcttcctgcatgctccaggagaaagctctcaaagcatgcttcagtggattgacccaaaccgaatggcagcatcggcacactgctcaatcaattgaaacacagagcaccagctctgaggaactcgtcccaagccccccatctccacttcctccccctcgagtgtacaaaccctgcttcgtctgccaggacaaatcatcagggtaccactatggggtcagcgcctgtgagggatgtaagggctttttccgcagaagtattcagaagaatatgatttacacttgtcaccgagataagaactgtgttattaataaagtcaccaggaatcgatgccaatactgtcgactccagaagtgctttgaagtgggaatgtccaaagaatctgtcaggaatgacaggaacaagaaaaagaaggagacttcgaagcaagaatgcacagagagctatgaaatgacagctgagttggacgatctcacagagaagatccgaaaagctcaccaggaaactttcccttcactctgccagctgggtaaatacaccacgaattccagtgctgaccatcgagtccgactggacctgggcctctgggacaaattcagtgaactggccaccaagtgcattattaagatcgtggagtttgctaaacgtctgcctggtttcactggcttgaccatcgcagaccaaattaccctgctgaaggccgcctgcctggacatcctgctcctgcctttggaaatggatgacacagaaacaggccttctcagtgccatctgcttaatctgtggagaccgccaggaccttgaggaaccgacaaaagtagataagctacaagaaccattgctggaagcactaaaaatttatatcagaaaaagacgacccagcaagcctcacatgtttccaaagatcttaatgaaaatcacagatctccgtagcatcagtgctaaaggtgcagagcgtgtaattaccttgaaaatggaaattcctggatcaatgccacctctcattcaagaaatgctggagaattctgaaggacatgaacccttgaccccaagttcaagtgggaacacagcagagcacagtcctagcatctcacccagctcagtggaaaacagtggggtcagtcagtcaccactcgtgcaataagacattttctagctacttcaaacattccccagt

SEQ ID NO: 6708 - DNA, 653 bp, Homo sapiens
tgcggttctcttgctcgctttctgttctcttgcttactttcaaatgcagacgtgcactacagcgtcaccagggcatttttggtcgaagagagctgaagtaatgagaagacatcatggaggcccagtcccacagctccacgaccactgaaaagaaaaaagttgagaattccatagtgaagtgctccactcgaacagatgtgagcgagaaagccgttgcctccagcaccacttctaatgaggatgaaagtcctggacagacttatcacagagagagaagaaacgcaatcactatgcagccacagaatgtccaggggctcagcaaagtcagtgaggaaccttcaacatcgagtgacgagagggcctcattgatcaagaaagagatccatgggtccctgccacacgtggcggagccctctgtgccgtaccgcgggacggtgtttgccatggaccccaggaatggttacatggagccccactaccaccctcctcatcttttccctgccttccatcctcctgtaccaattgatgccagacatcatgagggccgttaccattacgatccatctccgattcctccattgcatatgacttccgccttatctagtagccctacgtatccggacctgcccttcattaggatctccccacaccgg

SEQ ID NO: 6709 - DNA, 3481 bp, Homo sapiens
caaccagacagtccagagttctggaaatatgacagacaaaagcagtcaggatcagctgctgtttctctttccagagttcagtcaacagagccatgggcctgggcagtccgatgatgcctgctctgagcccaccaacaagaagatgcgccgcaaccggttcaaatgggggcccgcgtcccagcaaatcttgtaccaggcctacgatcggcaaaagaaccccagcaaggaagagagagaggccttagtggaggaatgcaacagggcagaatgtttgcagcgaggggtgtccccctccaaagcccacggcctgggctccaacttggtcactgaggtccgtgtctacaactggtttgcaaaccgcaggaaggaggaggcattccggcaaaagctggccatggacgcctatagctccaaccagactcacagcctgaaccctctgctctcccacggctccccccaccaccagcccagctcctctcctccaaacaagctgtcaggtaagcaaaggttgggcctcactgcctcggcaacccaaccatcctggttcttgccacggatcttatctggtttaagggttttcagaggagcaaacgcttttgagatgatcctagggccgctctctcattgccagaatatactcccctggaaataatgtgtggctctgatcagtttcctccaactcctggttcagccattgccctgtgagggctcactcggcttccagggagccctttaccctatttgtctccttccctcttcttctccctgtgtggctgctgactcagcggtcattctacactgaggaggctgccttatgggtgggccagatccaaaccgcaggcaaacgggtcgtgatggcgtggcaaccctcactgtgttggaggatggcactccggccacctcctccatctctggccatatcctgcccctcgctcggtccggctgcctcaggagaagctcagtagcctttggggacggccactctgttggtggcctctgcttgttggcttccgtgtgtcatcagggttggtgggggtcagtcacttgaaatctttgcagcaatgagttgggaaaaactgaccgagtacctgctccatcatgcttgattgagtgctcctgtgtgctgggccctggcctggattagaatgcctctgctgtgggctttgggtttgtcaggatggaatcctacagcctcctcgggggaaagcacacctcatgctgagcgctgtgttaggcacaggctgggatggagcacttcttctggtccttcattcttctggcaaagctggcttcctagaatggatgtgctcactggggtctgtgtggtgcccatgaggacaaagtgtagcagcctcctgcctgctccaagaaaagggcttgcgaaaggaaagccaaacactgtttctaactcaggggtgattctgaaacctgttggctcccctcacctgtcggttgcccttctgatgagaaaggcctgagggctgggggctgacccaagtgttgaggggaccaaagccaccaagacaggctcggagccatcagctgggtggtgtacaagcatttgttccatgcctgctgtgccctcccatagcactgcctcttccagggcctctgggagcctgacagtgcccagcatgaaggtggggccagtgctgggggtttctgtaggtcccactcccacagaggagagaggctcagccacacaggaagaaagtcttggttacttaagaggcagagaagcccctaggcaaagactggcctgattgcagagtaacttcgcccctttagggaaattcaaagcagggttctgagggttgtggcaaatggcacatggctggcactgagcagtaccagtgtgcttgcccaccacagcgatccacggagctgaagctgggagctacagggggcgtggttggggcaaggggcattactgggaagacaatggccattgtgttgggacctgtgatctccacaccaaagtcagggagcctggaagccaaacaaaggcccagcagccttctgacaagcaagggctgtgctgaggtcaccacggggtcgttggtttaggcatcctgtgtgctgacaggagacccagagagctagggctggagggacagggagcagggcagaaaacacagcctgtgtactcctctgactggagtctaggaagggcgtgtcccatgggaagtggatactctggggtgcccctgaagtctggatctttctaaaaatcttgtaatgttagaatttggagggaatttgaagaaaggaactgaggcccagaaagaggcagtgatttgccaaagtgacacagagcaatggtagcaaaacaaggactagagctcaggcctgctggttcccactccatactttcccacagcactacgatgtgttgaatgcttaccaagtcctgggaatatgctagtgatgtacgagctgcgcgtcctgccctctgggaggttactgtctggtaggaaggatatcgggtcactgtcgagtccccagaaccagctgcagatggaggttttgtttgggggctttgtggatctttctgcggtgtaatagatcctattactgtttctggagcaacagttatgggacactgaatattatcagtggctgcctttcttctgtcttttttttttttttttttttttgagagacagggtctacctctgtcacccgagctagagtgcagtggtgcagtcttggctcactacagcctcgaactcctggtctcaagcagtcctcctgtcttagcctcccaaagtgctgggattacagttgtgagattgtgcccagcccttctgctttaattttcactctgggctcctcaacatggtccttgtcccaagcccagggactggcttctctttctctgagtgtagttatgtatctgggttctaaccagtaaggttataactgtggctaattcacataacttctctgagtctgaatttcctgcctacaaaatggagaaataggaccttccacacagggtgcatgtgaggatgaaaggagtgaatgtataaagacacctttcccgataacccatactaccctcattatgactcttaacattagagagggctaaacaagggcagtgagaagactggcaggcagcagaaatcattttctttttgatctcacacaccagggcattccccctaagaggcagtgagatgtagcctggccctggaactagaaacagaggtggctgctgtgctagtgcctgagatgcacgatgctggggtcaaagacttgtgtccccacctcaggctgccaggatggcgtgtgtgccgtgacagggctcccgagtcatgcactcaggcagacagcaggctggagcccagcattcaggggtggcttctgtctgtagagccgcatggcactcttcccacctcagtgcccacagccaaggtagggtcactaaccaagccagaaacgtaactgtgtgcagaataccgaaaaaaaaaaaaaa

SEQ ID NO: 6710 - DNA, 2501 bp, Homo sapiens
atgttgaagttgcttttaaacacagcttttctgctttacctgtccaggtagcctctgttttcatttcagtcttaatgaaaactttctaacttatatctcaagtttcttttcaaagcagtcaagaactgaaacgaatggggattgaactgctttgcctgttctttctatttctaggaaggaatgatcacgtacaaggtggctgtgccctgggaggtgcagaaacctgtgaagactgcctgcttattggacctcagtgtgcctggtgtgctcaggagaattttactcatccatctggagttggcgaaaggtgtgataccccagcaaaccttttagctaaaggatgtcaattaaacttcatcgaaaaccctgtctcccaagtagaaatacttaaaaataagcctctcagtgtaggcagacagaaaaatagttctgacattgttcagattgcgcctcaaagcttgatccttaagttgagaccaggtggtgcgcagactctgcaggtgcatgtccgccagactgaggactacccggtggatttgtattacctcatggacctctccgcctccatggatgacgacctcaacacaataaaggagctgggctcccggctttccaaagagatgtctaaattaaccagcaactttagactgggcttcggatcttttgtggaaaaacctgtatccccttttgtgaaaacaacaccagaagaaattgccaacccttgcagtagtattccatacttctgtttacctacatttggattcaagcacattttgccattgacaaatgatgctgaaagattcaatgaaattgtgaagaatcagaaaatttctgctaatattgacacacccgaaggtggatttgatgcaattatgcaagctgctgtgtgtaaggaaaaaattggctggcggaatgactccctccacctcctggtctttgtgagtgatgctgattctcattttggaatggacagcaaactagcaggcatcgtcattcctaatgacgggctctgtcacttggacagcaagaatgaatactccatgtcaactgtcttggaatatccaacaattggacaactcattgataaactggtacaaaacaacgtgttattgatcttcgctgtaacccaagaacaagttcatttatatgagaattacgcaaaacttattcctggagctacagtaggtctacttcagaaggactccggaaacattctccagctgatcatctcagcttatgaagaactgcggtctgaggtggaactggaagtattaggagacactgaaggactcaacttgtcatttacagccatctgtaacaacggtaccctcttccaacaccaaaagaaatgctctcacatgaaagtgggagacacagcttccttcagcgtgactgtgaatatcccacactgcgagagaagaagcaggcacattatcataaagcctgtggggctgggggatgccctggaattacttgtcagcccagaatgcaactgcgactgtcagaaagaagtggaagtgaacagctccaaatgtcaccacgggaacggctctttccagtgtggggtgtgtgcctgccaccctggccacatggggcctcgctgtgagtgtggcgaggacatgctgagcacagattcctgcaaggaggccccagatcatccctcctgcagcggaaggggtgactgctactgtgggcagtgtatctgccacttgtctccctatggaaacatttatgggccttattgccagtgtgacaatttctcctgcgtgagacacaaagggctgctctgcggaggtaacggcgactgtgactgtggtgaatgtgtgtgcaggagcggctggactggcgagtactgcaactgcaccaccagcacggactcctgcgtctctgaagatggagtgctctgcagcgggcgcggggactgtgtttgtggcaagtgtgtttgcacaaaccctggagcctcaggaccaacctgtgaacgatgtcctacctgtggtgacccctgtaactctaaacggagctgcattgagtgccacctgtcagcagctggccaagcccgagaagaatgtgtggacaagtgcaaactagctggtgcgaccatcagtgaagaagaagatttctcaaaggatggttctgtttcctgctctctgcaaggagaaaatgaatgtcttattacattcctaataactacagataatgaggggaaaaccatcattcacagcatcaatgaaaaagattgtccgaagcctccaaacattcccatgatcatgttaggggtttccctggctattcttctcatcggggttgtcctactgtgcatctggaagctactggtgtcatttcatgatcgtaaagaagttgccaaatttgaagcagaacgatcaaaagccaagtggcaaacgggaaccaatccactctacagaggatccacaagtacttttaaaaatgtaacttataaacacagggaaaaacaaaaggtagacctttccacagattgctag

SEQ ID NO: 6711 - DNA, 2283 bp, Homo sapiens
aaggctcctcagccgagcgccgagcggtcgatcgccgtagctcccgcagcctgcgatctccagtctgtggctcctaccagccattgtaggccaataatccgttatggagcatgcctttaccccgttggagcccctgctttccactgggaatttgaagtactgccttgtaattcttaatcagcctttggacaactattttcgtcatctttggaacaaagctcttttaagagcctgtgccgatggaggtgccaaccgcttatatgatatcaccgaaggagagagagaaagctttttgcctgaattcatcaatggagactttgattctattaggcctgaagtcagagaatactatgctactaagggatgtgagctcatttcaactcctgatcaagaccacactgactttactaagtgccttaaaatgctccaaaagaagatagaagaaaaagacttaaagggaaagcacaggttgcatgtagacactggaatggagggtgattggtgtggccttattcctgttggacagccttgtatgcaggttacaaccacaggcctcaagtggaacctcacaaatgatgtgcttgcttttggaacattggtcagtacttccaatacctacgacgggtctggtgttgtgactgtggaaactgaccacccactcctctggaccatggccatcaaaagctaacctgttgactggcatccataagtgtgcctctgccttatctcatttctcaacagttcattgctcaacaagaacgattcacctgggtttgcaagaatctaaacctctctaggggaagcccactgggtttaaagatgttagtgtttagataatacaggtaacattataaatgacagatctcaattttatagtagtgggaaagatacatgctaagaaagcaaataagctctattatattcggttggaacctaatgggaatcattccactatacaattcagtactgattattcttcttacattattaatcattccatttatcctagaaaattgtttttaatttgaatcagagaaaactgttgaggttcctcttggagtctagaacatccttaaatgtctaacaacaagggctacctctgagtaccttttagtattagttttctgtatatgatatatattatcttatactgaaaaaaaattcctttcagattggggtgttagaagtgcaccaggtcactctgaccttattactgtctttggtattgtcttaaataaatcaagaatcattgacctaattgttaaatttaaaaataggtagttagcaataggtggaaagagaaatgatgtgaaagataaatgatgattcgtggagccctactcacacattaacccccaaattcaaaagtaagaatgcaaaagtctagagggggtaacagtctgcatcatcatcacaacctaaatggagaaagctgtgcagaggaaacttaagcataaaaattgaattcgtttctgacataccttagactgaaaaactgttggttcatccagaagtgtattcatattaccagaaaatgagtttgtctatggggatacatgaacttcatatactaaggagcctaactccaaagcctgcgttctcatcccagtctgatattcacctaagtttccggacccttttccttagctgtaaaatggaagcggttggactgatggtgtctgaggttctttcccacactgaaattctaaatattgacacttagcagtcatagggctgataatacacacagttactgacttagcctaaacaacctggtgcatcgaaatgtattcacctttcttttgtaaagagaccatcttctatcttctttccacctttctctgttttatgaaaccaactgttgacatacaaaccatgattgaaggagaacctgtccaacatgttttatgtacacaaatccctatgttgctataagaaaagtgaaagtaactgttttcttcttggtgctatgacagtgtgagactcaggttgtctgtagagaatgaaaggagcagtggcccgcgtgattgtggcatttaaggagcagtggcccatgtgactgtggcattttcggcacttttcattactttctgcttgaccggaagttgaggcttagctatgtttccatcttcagtttctgaagactagttatatattccttactagaaatatattcataatatataaaagaaatatatctgtgattttaaaattttgctaccaaagaatgcatgttctgtgtgccctgaaaatgttaccagtgttaataaatggatacttatc

SEQ ID NO: 6712 - DNA, 844 bp, Homo sapiens
ggacagtggagacgcgccttctcggctctggtccgcgccctggggccctggcctccctggaggggctggggaactggaagctgggccgagagagttcccgctgcagctatcgcgcagtccctcctgcgcccgggcgcccccagcgggttccgggaggcgcccggtgagcccacgtctgttgcggcggagcgagcgcgctccgggagggccgagagccggcggggctggcaggagctctcgggcgcccgcctccctccttcgcggacggtctcccgacacgccggctgagagcccttttcgactgtgagctgcggcagctgagcagaggcggcggcgcgggacctgcagtcgccagggattccctccaggtgacgatgctctggttctccggcgtcggggctctggctgagcgttactgccgccgctcgcctgggattacgtgctgcgtcttgctgctactcaattgctcgggggtccccatgtctctggcttcctccttcttgacaggttctgttgcaaaatgtgaaaatgaaggtgaagtcctccagattccatttatcacagacaacccttgcataatgtgtgtctgcttgcatgagccaactagatggagcaatctgacacaaaacccagggttttatgactgacctagtgcgccagctgcatctggaggaaccagacgcaaacaacgcagagttgagggccaggtgaagcgggatccagctccccacttcaccccaaccccttcgactcctcaaaacctctgcaagaagctatttccttcggctggcaacttacagccagcaggtcccttcctcgtgcagaataaagccattctgggaaa

SEQ ID NO: 6713 - DNA, 3632 bp, Homo sapiens
ttcctgcagctccaaatcctcagccagcagcagcagcagcagcaacaccgattcagctacctagggatgcaccaagctcagcttaaggaaccaaatgaacagatggtcagaaatccaaactcttcttcaacgccactgagcaatacccccttgtctcctgtcaaaaacagtttttctggacaaactggtgtctcttctttcaaaccaggcccactcccacctaacctggatgatctgaaggtctctgaattaagacaacagcttcgaattcggggcttgcctgtgtcaggcaccaaaacggctctcatggaccggcttcgacccttccaggactgctctggcaacccagtgccgaactttggggatataacgactgtcacttttcctgtcacacccaacacgctgcccaattaccagtcttcctcttctaccagtgccctgtccaacggcttctaccactttggcagcaccagctccagccccccgatctccccagcctcctctgacctgtcagtcgctgggtccctgccggacaccttcaatgatgcctccccctccttcggcctgcacccgtccccagtccacgtgtgcacggaggaaagtctcatgagcagcctgaatgggggctctgttccttctgagctggatgggctggactccgagaaggacaagatgctggtggagaagcagaaggtgatcaatgaactcacctggaaactccagcaagagcagaggcaggtggaggagctgaggatgcagcttcagaagcagaaaaggaataactgttcagagaagaagccgctgcctttcctggctgcctccatcaagcaggaagaggctgtctccagctgtccttttgcatcccaagtacctgtgaaaagacaaagcagcagctcagagtgtcacccaccggcttgtgaagctgctcaactccagcctcttggaaatgctcattgtgtggagtcctcagatcaaaccaatgtactttcttccacatttctcagcccccagtgttcccctcagcattcaccgctgggggctgtgaaaagcccacagcacatcagtttgcccccatcacccaacaaccctcactttctgccctcatcctccggggcccagggagaagggcacagggtctcctcgcccatcagcagccaggtgtgcactgcacagaactcaggagcacacgatggccatcctccaagcttctctccccattcttccagcctccacccgcccttctctggagcccaagcagacagcagtcatggtgccgggggaaacccttgtcccaaaagcccatgtgtacagcaaaagcaaatgacccggagtcagcagatggatgaactcctggacgtgcttattgaaagcggagaaatgccagcagacgctagagaggatcactcatgtcttcaaaaagtcccaaagatacccagatcttcccgaagtccaactgctgtcctcaccaagccctcggcttcctttgaacaagcctcttcaggcagccagatcccctttgatccctatgccaccgacagtgatgagcatcttgaagtcttattaaattcccagagccccctaggaaagatgagtgatgtcacccttctaaaaattgggagcgaagagcctcactttgatgggataatggatggattctctgggaaggctgcagaagacctcttcaatgcacatgagatcttgccaggccccctctctccaatgcagacacagttttcaccctcttctgtggacagcaatgggctgcagttaagcttcactgaatctccctgggaaaccatggagtggctggacctcactccgccaaattccacaccaggctttagcgccctcaccaccagcagccccagcatcttcaacatcgatttcctggatgtcactgatctcaatttgaattcttccatggaccttcacttgcagcagtggtagaatgcccaatgcaccagtgctatggaagaccaatggagttccatgggggaaagcacacagccatacatactttactgtccaaaaacagaagaagaagaagagaattaaaaagaagcaatgatttctgtgccaatgaacaagaacaaaagtcatttttagaaatacatatactgtaatatttaccaacagtcagtaactgttaatgatttcaacaatgcattaaaagaatgtgctttctcagattaaggatgccaaaaaagatatttcactgccttttcaaagaccagtatattttctagcccataatttttctcaggcattgttggggcataagctcacactgtaagcttttctcatgaattcactagacataacgtggaaggaaaacgtagtcttttgggagtacagggaagccagcccctcaaagcttatggaagacatacctgcaatggaagctgttgcccaatgtctccattactatctttcaaaagagaagccagacccagcttcagatcaaaagttcttgagacagaggaacaaaaccaatcgatttccagggaagctaatcaactctcttttccctctaccacaaaactgccctgctggagtggttctgaacctgtacccaggactcgatgtggtcactaataacaattaacctgaactgagtccacagaactccactcggaactttcttcttttttaactagtggcccaatcattcccaccatctctgtgctgataagtacgtgtcctagatgagaaccctgaagaatgcagaccttcttcccccgaaggagatgccacaagctctccaacacagccccctttagttccaaagactagagatgaccacattggtagaagtatatctcgaggcacaggaagggagccccaccagggataattcagacaggactagagaataacatcatttcacataccctgggataaacaccctgggttcctatagaaggactattacttatgggagtccaacttctccttttgttttgttattatcagtttatctttctcccactccacttttccttcaaggtaccaatcctttcctgttcctcgtttggccatctttctttttctgcctccacattgggaggggaggacttctcagttctaacaagctgccatactcctaagaaagccatttttgaaaaatttaacaatccaggttcttctggagaactcattctccacacgcacagtttgctgcaaaaggaagttgcaagaatttcttgaggaagaaactggtgacttggtccatcagtcacgaagttctttctattctcgtttagttttcaagaaattattggtttgtgttgctctggggaaattggaaatcattacattgtaaagacaaatatggatgatatttacaagagagaatttcagatctgggtttttgaaagaaaacagaattgcgcattgaaaacgatggaaggaaaaagacaatggtctaatgtgcattcctcattacctctcgtggctttggctgggagttggaaaaagctaaaatttcagaacagtctctgtaaggctctctgtggctccagttcaccattttatattgttgcatgctgtagaaaggagctattgctgttgttttgtttttttatttaaatcactaaggcactgtttttatcttttgtaaaaaaaaaaaaaaa

SEQ ID NO: 6714 - DNA, 579 bp, Homo sapiens
agtctcatctctctctcaggctctctactcctttcagccttggtcctctgccctcccgtctgggtgtctgagttgtggggaattgaagtgcttcctattgctatcctcctgccaaacagggagctgtcaccatgcctcactcgtacccagccctttctgctgagcagaagaaggagttgtctgacattgccctgcggattgtagccccgggcaaaggcattctggctgcggatgagtctgtaggcagcatggccaagcggctgagccaaattggggtggaaaacacagaggagaaccgccggctgtaccgccaggtcctgttcagtgctgatgaccgtgtgaaaaagtgcattggaggcgtcattttcttccatgagaccctctaccagaaagatgataatggtgttcccttcgtccgaaccatccaggataagggcatcgtcgtgggcatcaaggttgacaagggtgtggtgcctctagctgggactgatggagaaaccaccactcaagggctggatgggctctcagaacgctgtgcccaatacaagaaggatggtgctgactttgccaagtggcgct

SEQ ID NO: 6715 - DNA, 577 bp, Homo sapiens
agtcggagagagcccctggccaggcaccaagctccagaggtcgctctggcgagcgtttgcttcgggatctgatgccctggagtcgccaactcaattcgcgggtcgcagccaggctccatgggggtagtagagccaggtcgtagtggctaggtagacgcaccctctgaagatggtgactccctcctgagaagctggaccccttggtaaaagacaaggccttctccaagaagaatatgaaagtgttactcagacttatttgtttcatagctctactgatttcttctctggaggctgataaatgcaaggaacgtgaagaaaaaataattttagtgtcatctgcaaatgaaattgatgttcgtccctgtcctcttaacccaaatgaacacaaaggcactataacttggtataaagatgacagcaagacacctgtatctacagaacaagcctccaggattcatcaacacaaagagaaactttggtttgttcctgctaaggtggaggattcaggacattactattgcgtggtaagaaattcatcttactgcctcagaattaaaataagtgcaaaatttgtgga

SEQ ID NO: 6716 - DNA, 1473 bp, Homo sapiens
aattctgggagggcttggttgtcagcagcagcaggaggaggcagagcacagcatcgtcgggaccagactcgtctcaggccagttgcagccttctcagccaaacgccgaccaaggaaaactcactaccatgagaattgcagtgatttgcttttgcctcctaggcatcacctgtgccataccagttaaacaggctgattctggaagttctgaggaaaagcagctttacaacaaatacccagatgctgtggccacatggctaaaccctgacccatctcagaagcagaatctcctagccccacagaatgctgtgtcctctgaagaaaccaatgactttaaacaagagacccttccaagtaagtccaacgaaagccatgaccacatggatgatatggatgatgaagatgatgatgaccatgtggacagccaggactccattgactcgaacgactctgatgatgtagatgacactgatgattctcaccagtctgatgagtctcaccattctgatgaatctgatgaactggtcactgattttcccacggacctgccagcaaccgaagttttcactccagttgtccccacagtagacacatatgatggccgaggtgatagtgtggtttatggactgaggtcaaaatctaagaagtttcgcagacctgacatccagtaccctgatgctacagacgaggacatcacctcacacatggaaagcgaggagttgaatggtgcatacaaggccatccccgttgcccaggacctgaacgcgccttctgattgggacagccgtgggaaggacagttatgaaacgagtcagctggatgaccagagtgctgaaacccacagccacaagcagtccagattatataagcggaaagccaatgatgagagcaatgagcattccgatgtgattgatagtcaggaactttccaaagtcagccgtgaattccacagccatgaatttcacagccatgaagatatgctggttgtagaccccaaaagtaaggaagaagataaacacctgaaatttcgtatttctcatgaattagatagtgcatcttctgaggtcaattaaaaggagaaaaaatacaatttctcactttgcatttagtcaaaagaaaaaatgctttatagcaaaatgaaagagaacatgaaatgcttctttctcagtttattggttgaatgtgtatctatttgagtctggaaataactaatgtgtttgataattagtttagtttgtggcttcatggaaactccctgtaaactaaaagcttcagggttatgtctatgttcattctatagaagaaatgcaaactatcactgtattttaatatttgttattctctcatgaatagaaatttatgtagaagcaaacaaaatacttttacccacttaaaaagagaatataacattttatgtcactataatcttttgttttttaagttagtgtatattttgttgtgattatctttttgt

SEQ ID NO: 6717 - DNA, 1299 bp, Homo sapiens
gacgttctggactctcgggcagagctttgtgagagaaacaaggctggcttcaagtgatctgcaaccagagtaattgggatttgacaaggactgtgaaaggctgactctccctgttctctttcatgctggcaccgggcagagtgtgggaactactgcctcaatacgatcatagaagccattgagatcccgcagtttatcggccgcagttacctgacgtatgacaacccagatatcttgaagagggtgtcaggatcaagatcaaatgtgttcatgaggtttaaaacaactgccaaggatggccttttgctgtggaggggagacagccccatgagacccaacagcgacttcatttccttgggccttcgggatggagccctcgtgttcagctataacctgggcagtggtgtggcatccatcatggtgaatggctccttcaacgatggtcggtggcaccgagttaaggccgttagggatggccagtcaggaaagataaccgtggatgactatggagccagaacaggcaaatccccaggcatgatgcggcagcttaacatcaatggagctctgtatgtgggtggaatgaaggaaattgctctgcacactaacaggcaatatatgagagggctcgtgggctgtatctctcacttcaccctgtccaccgattaccacatttccctcgtggaagatgccgtggatgggaaaaacatcaacacttgtggagccaagtaacaccagctggccttgtccaagggacagagccttctattctgagaatcccaggggccctcagaccctgcctgatgctatatgcagaggcccagggaccaggtgtgtttcctctcaccaagaagaaagtacacactgatgagaaactgagaaccaagacaggcatccctgggtggcctttcctgctgacactccacgagctgacccagcagaattctctgtgtaggaagcatcggactttgtccattgaatatgtagcggctgccagagatcacacatcaatgcaaattccagagcctgtctgctatagctcagtgactgtgttgtgattcatagtacattaaaaagagagagagagagaaagaatcccacagggcactattaaaatacttctctccttccctgactcatgacactcttcctgacagcagaatgactgtgtgaccttgaacttcacatttcccacattggcccttggattgttcggattaaccccttccactcctcactggctggttcactgtgttctgactagtccataaaaataaagatggaaggagatcaaacacagaa

SEQ ID NO: 6718 - DNA, 594 bp, Homo sapiens
agaaagggaagaaggcaaacaggaaaagagccagaagagcagagttcccagcagaggggaagcaagtggagaggcggtgtggaggaatcaatttggccccatctggaatggacagaaggctagaacctgcagtgcagtgagtgtgggagaaaccagctggcacaaggtgctgtaaactgcaaaccataatcctgtcttaatactgcaaacaaatcatagtggaactaaggggaacttaatttactgtttccaggttaactaaggtctcagctgtaaaccaaaagtgagaggagacattaagattttcattcttaccgggttgtcttcttcctgaagagcaatggagccgcttttacttggaagaggactaatcgtatatctaatgttcctcctgttaaaattctcaaaagcaattgaaataccatcttcagttcaacaggttccaacaatcataaaacagtcaaaagtccaagttgcctttcccttcgatgagtattttcaaattgaatgtgaagctaaaggaaatccagaaccaacattttcgtggactaaggatggcaaccctttttatttcactgaccatcggataattcc

SEQ ID NO: 6719 - DNA, 839 bp, Homo sapiens
tggaggaggggcaagcaaaggggaatgtagataactaaagtgaaatagagctgatgtatccagaggttatgttgctagagcatctttttcaatgagtgcctatgtgactgtgacttattacaatgaaaccagcaactacactgcaatagagacatgtgaatgtggcgtttatggattagcttcaccagtggctaatgctatgggagtggtaggcatccctaagaacaataactaccaagcttgtgaccacaacactgagtttagtaatactaagaagccctggattgcgctgatagaaagaggtaattgtacattttcagaaaaaattcaaacagcgggcagaagaaatgctgatgctgttgtgatttacaatgctccagagactggcaatcagacgatacagatggcaaattttggtgcagtagacattgttgcaatcatgatcggcaatctgaaaggcacaaaaattctgcaatctattcaaagaggcatacaagtgacaatggtcatagaagtagggaaaaaacatggcccttgggtgaatcactattcaatttttttcgtttctgtgtccttttttattattacggcggcaactgtgggctattttatcttttattctgctcgaaggctacggaatgcaagagctcaaagcaggaagcagaggcaattaaaggcagatgctaaaaaagctattggaaggcttcaactacgcacactgaaacaaggagacaaggaaattggccctgatggagatagttgtgctgtgtgcattgaattgtataaaccaaatgatttggtacgcatcttaacgtgcaaccatattttccataagacat

SEQ ID NO: 6720 - DNA, 489 bp, Homo sapiens
ggacggggtgggagatgcttgcgacagctgccctgaaatgagcaatcctacccagatgcagacagcgacctggtgggggatgtctgtgatactaatgaagacagcgatggggatgggcatcaggacaccaaggacaactgcccacagctgccaaatagctcccagctggactctgataacgatggacttggagatgagtgtgatggggatgatgacaatgatggcatcccagattatgtgcctcctggtcccgataactgccgcctggtacccaatcccaatcagaaggactcagatgtggccagggccttcctgagcacccagcctcactctgcccaggcaatggcgttggtgatgtgtgtgaggatgactttgacaatgatgctgtggtcgaccccctggatgtgtgtcctgaaagtgcagaggtaacgcttacggattttcgggcctatcagaccgtcgtcctggatcctgagggtgatgctcaga

SEQ ID NO: 6721 - DNA, 429 bp, Homo sapiens
gctgccgcagggaccgccgcgtgcggggcgagagggagcccccggtgggggtggcgcagccggcggggttcggtccgagcccggtgggaggctcccggagcgcagcctgggcccagcccaccccgcgccggcggccatggcaggcaccctggacctggacaagggctgcacggtggaggagctgctccgcgggtgcatcgaagccttcgatgactccgggaaggtgcgggacccgcagctggtgcgcatgttcctcatgatgcacccctggtacatcccctcctctcagctggcggccaagctgctccacatctaccaacaatcccggaaggacaactccaattccctgcaggtgaaaacgtgccacctggtcaggtactggatctccgccttcccagcggagtttgacttgaacccggagttggctga

SEQ ID NO: 6722 - DNA, 1853 bp, Homo sapiens
ccttcctcttcttgatcggggattcaggaaggagcccaggagcagaggaagtagagagagagacaacatgttacatctgcaccattcttgtttgtgtttcaggagctggctgccagcgatgctcgctgtactgctaagtttggcaccatcagcttccagcgacatttccgcctcccgaccgaacatccttcttctgatggcggacgaccttggcattggggacattggctgctatggcaacaacaccatgaggactccgaatattgaccgccttgcagaggacggcgtgaagctgacccaacacatctctgccgcatctttgtgcaccccaagcagagccgccttcctcacgggcagataccctgtgcgatcagggatggtttccagcattggttaccgtgttcttcagtggaccggagcatctggaggtcttccaacaaatgagacaacttttgcaaaaatactgaaagagaaaggctatgccactggactcattggaaaatggcatctgggtctcaactgtgagtcagccagtgatcattgccaccaccctctccatcatggctttgaccatttctacggaatgcctttctccttgatgggtgattgcgcccgctgggaactctcagagaagcgtgtcaacctggaacaaaaactcaacttcctcttccaagtcctggccttggttgccctcacactggtagcagggaagctcacacacctgatacccgtctcgtggatgccggtcatctggtcagccctttcggccgtcctcctcctcgcaagctcctattttgtgggtgctctgattgtccatgccgattgctttctgatgagaaaccacaccatcacggagcagcccatgtgcttccaaagaacgacaccccttattctgcaggaggttgcgtcctttctcaaaaggaataagcatgggcctttcctcctctttgtttcctttctacacgttcacatccctcttatcactatggagaacttcctcgggaagagtctccacgggctgtatggggacaacgtagaggagatggactggatggtaggacggatccttgacactttggacgtggagggtttgagcaacagcaccctcatttattttacgtcggatcacggcggttccctagagaatcaacttggaaacacccagtatggtggctggaatggaatttataaaggtgggaagggcatgggaggatgggaaggtgggatccgcgtgcccgggatcttccgctggcccggggtgctcccggccggccgagtgattggcgagcccacgagtctgatggacgtgttccccaccgtggtccggctggcgggcggcgaggtgccccaggacagagtgattgacggccaagaccttctgcccttgctcctggggacagcccaacactcagaccacgagttcctgatgcattattgtgagaggtttctgcacgcagccaggtggcatcaacgggacagaggaacaatgtggaaagtccactttgtgacgcctgtgttccagccagagggagccggtgcctgctatggaagaaaggtctgcccgtgctttggggaaaaagtagtccaccacgatccacctttgctctttgacctctcaagagacccttctgagacccacatcctcacaccagcctcagagcccgtgttctatcaggtgatggaacgagtccagcaggcggtgtgggaacaccagcggacactcagcccagttcctctgcagctggacaggctgggcaacatctggagaccgtggctgcagccctgctgtggcccgttccccctctgctggtgccttagggaagatgacccacaataaatgtctgcagtgaaaa

SEQ ID NO: 6723 - DNA, 3094 bp, Homo sapiens
tgggaagttcgcgcaagtgcggctctgcagggaggagggagggccgaggggaaggccctcgagagagtggagggcaacagtggccacggttcctctgtacttcgtttcttccctttatagaattgagagattgctgagcctaaatacatgttgctgcattgcctccgagaatggccggacctatccccactctcaccaaaacagagtgtgggactcactgctccctcgcctactagagcagagccactgccagaaggaaggggacaagacccagcaggacaccttctttccacgctttccagcctgtgggagcggcaggggcaacagagagaggatctggagccaggattaatgactcatttatgaagcatcttattctgcgaccgaggctcagtggtcagtggcgacgtaaatggctcgactccccgctggcattcgcttcatcatctcattctccagggatcagtggtacagagccttcatttttattttgacatttctgctgtatgcaagttttcacttatctcgaaagcctatcagcatagttaagggtgagctccacaagtactgcactgcttgggatgaagctgacgtcaggttcagcagccagaacaggaagtctgggtccgctgccccccaccagctccctgacaatgagaccgactgtggctgggcaccgtttgataagaacaactatcagcagctgcttggggccctggactactccttcctgtgcgcctatgccgtggggatgtacctcagtggcatcattggggagcgcctgccgattaggtattacctaactttcgggatgctcgccagcggagccttcaccgccctgttcggcttagggtatttctacaacatccacagtttcggattctacgtggtaactcaggtcatcaacgggctggtgcagaccaccggctggcccagcgtcgtcacctgcctcggcaactggtttggaaaaggaaggagaggtttgattatgggggtctggaactcccacacctccgtgggcaacatcttggggtcattgatcgctggctactgggtgtccacatgctggggcctgtccttcgtcgtgcctggagccatcgtggcagccatggggatagtgtgctttctcttcctcattgaacatccgaacgacgtcaggtgctcctccaccctggtgacgcactcaaaaggctatgagaatggtacaaacagattgagactccagaagcaaatcttgaagagcgaaaagaacaagcctctggacccagagatgcagtgcctgctgctctcagatgggaagggctccatccacccgaaccacgtcgtcattctccccggggacggtgggagtggcacggccgccatcagcttcacaggggccttgaaaattccaggcgtgatagagttctcactgtgtctgctgtttgccaagctggtcagctatactttcctcttctggctgcccctgtacatcacgaatgtggatcaccttgatgccaaaaaggcgggggagctctccaccctgtttgacgtgggcggaatctttggtgggatcctggcaggtgtgatctcagaccgactggagaaaagggcctccacctgcggcctgatgctgctgctcgcggcccccacgctctacatcttctccaccgtcagcaagatggggcttgaggccaccatcgccatgctgctgctcagcggagccctggtcagtgggccctacacactcatcaccaccgccgtctccgccgacctggggactcataaaagtctgaaaggcaacgcgcacgccctctccaccgtgacggccatcattgacgggacgggctctgtaggagcagccctgggccccctgctggctgggctcctctccccgtccggctggagcaatgtgttttacatgctgatgtttgcagatgcctgtgccttactgttcctgatccgcctcatacacaaggagctgagctgcccagggtcagctacgggggaccaagttccatttaaggaacagtgacaccccaccccagtcccgtggagggggtctgggcccacccttcacaactgcctttcaaggacagttcagacaaagggccctgcatggaaagagtgacctccctttgccttttgcacacgcacctggaaaagacacagaagccaacctgagaacccctggtgctattttaaaggagacatattgctgaacagcagtgagaaaagtctgcaggaactgctgcctgagccaagccagagaaccgaagacccggccggccctggcctcacaggcgtgtgcccatgcagccacccaaatgcacgcgtgacaacaaggccgggagggtggggggggtgcacaggtagccccgaccctctcaggcattccagccacagaacatcaaagtgagcgagtactgcgctggctgtggcttcagagaacctgtatgtgccacatggaaaaacaggacaccagagcccaccagacagtgccggccagcagagaagcagagagccagcgccacacaacatcaagaaggccgacaaccaggttggaaaccaagacggagctcagacccaccacatcgccccagaggcttttccagcacccatgatgtttcggactgacctaaaaactaattgtcgagaagccaagggtgaggaggcaggaagcacctccggttggaggcacccaggcttgccagccacagagcgccccaaagtcaccgtcatcccagcccctggccttcctgctgccctccggggccatggcactgctgttcagctcaggcacaggggcacagcagaggtttgggaagcggtctccccaccggcactgggattggcgggtccaagcccagcaaccggcttcgctccacaacacacaccacacctgggactgtttttaatacatagcaacagactgggttatttatttaagatgtgtattgtgtcatatgaagtttaagagacataaatggcattttgttatttattaagacaaactccaattgttctctggctgtttttttcagttgtgtctagcaaaatacttatctgccctttgaaataaaatgtttttgtttaaaaaatctcagaacactca

SEQ ID NO: 6724 - DNA, 1543 bp, Homo sapiens
cccctgatttttgggttggatgcttgagagctttgtttcccttgttccgagagtggcccagctgggtctgaatcgactccctcccctttcgaccccctcctcattttccagcccggagaaataggggagtgggggcccaagaacgagaagacgagaacgcgtcgccctgcgctatgtcagaatggggcgggtgtgaggggaacagctctcttgcgatcagctcaggagtatgagcctcccggaggacggcatgagttctggacacttcaggagtcctcagctagtgacatggtcgatatggataaactcataaacaacttggaggtccaacttaattcagaaggtggctcaatgcaggtattcaagcaggtcactgcttctgttcggaacagagatccccctgagatagaatacagaagtaatatgacttctccaacactcctggatgccaaccccatggagaacccagcactgtttaatgacatcaagattgagcccccagaagaacttttggctagtgatttcagcctgccccaagtggaaccagttgacctctcctttcacaagcccaaggctcctctccagcctgctagcatgctacaagctccaatacgtccccccaagccacagtcttctccccagacccttgtggtgtccacgtcaacatctgacatgagcacttcagcaaacattcctactgttctgaccccaggctctgtcctgacctcctctcagagcactggtagccagcagatcttacatgtcattcacactatcccctcagtcagtctgccaaataagatgggtggcctgaagaccatcccagtggtagtgcagtctctgcccatggtgtatactactttgcctgcagatgggggccctgcagccattacagtcccactcattggaggagatggtaaaaatgctggatcagtgaaagttgaccccacctccatgtctccactggaaattccaagtgacagtgaggagagtacaattgagagtggatcctcagccttgcagagtctgcagggactacagcaagaaccagcagcaatggcccaaatgcagggagaagagtcgcttgacttgaagagaagacggattcaccaatgtgactttgcaggatgcagcaaagtgtacaccaaaagctctcacctgaaagctcaccgcagaatccatacaggagagaagccttataaatgcacctgggatggctgctcctggaaatttgctcgctcagatgagctcactcgccatttccgcaagcacacaggcatcaagccttttcggtgcacagactgcaaccgcagcttttctcgttctgaccacctgtccctgcatcgccgtcgccatgacaccatgtgagccgcacaggtcacactagagaagctgcgctggtatctttcctggtcgtgtgctgaggttgggacaattttttcctctttgacttcagcttgcatatggggttgaagcagcccactgagccaagttgaggagactggaggaaaagagagctggtctcccgtggggctcttcatat

SEQ ID NO: 6725 - DNA, 1478 bp, Homo sapiens
aggacgttccagaagcatctggggacagaaccagcctcttccagggaggcctgggagctgggggtgtgtgtctggcagtccctgcagccctgggctctgcggcccctgcgtcctccgcttggctctgccactgcatctgagtgtcttctctcctcacggctccccgcatttctaactctttctgcctcctcgtctcaaagctgttccttcccccgactcaagaatccccggagcccggaggcctgcagcagcctgggcagaggagcagaataagttggtgcatggcggaccctgcgacaagacatctcacccctaccaagctgccctctacacctcgggccacttgctctgtggtggggtccttatccatccactgtgggtcctcacagctgcccactgcaaaaaaccgaatcttcaggtcttcctggggaagcataaccttcggcaaagggagagttcccaggagcagagttctgttgtccgggctgtgatccaccctgactatgatgccgccagccatgaccaggacatcatgctgttgcgcctggcacgcccagccaaactctctgaactcatccagccccttcccctggagagggactgctcagccaacaccaccagctgccacatcctgggctggggcaagacagcagatggtgatttccctgacaccatccagtgtgcatacatccacctggtgtcccgtgaggagtgtgagcatgcctaccctggccagatcacccagaacatgttgtgtgctggggatgagaagtacgggaaggattcctgccagggtgattctgggggtccgctggtatgtggagaccacctccgaggccttgtgtcatggggtaacatcccctgtggatcaaaggagaagccaggagtctacaccaacgtctgcagatacacgaactggatccaaaaaaccattcaggccaagtgaccctgacatgtgacatctacctcccgacctaccaccccactggctggttccagaacgtctctcacctagaccttgcctcccctcctctcctgcccagctctgaccctgatgcttaataaacgcagcgacgtgagggtcctgattctccctggttttaccccagctccatccttgcatcactggggaggacgtgatgagtgaggacttgggtcctcggtcttacccccaccactaagagaatacaggaaaatcccttctaggcatctcctctccccaacccttccacacgtttgatttcttcctgcagaggcccagccacgtgtctggaatcccagctccgctgcttactgtcggtgtccccttgggatgtacctttcttcactgcagatttctcacctgtaagatgaagataaggatgatacagtctccataaggcagtggctgttggaaagatttaaggtttcacacctatgacatacatggaatagcacctgggccaccatgcactcaataaagaatgaattttattatg

SEQ ID NO: 6726 - DNA, 1771 bp, Homo sapiens
atgggcccgttccaggcagaaagagcaagagggcagggagggagcacaggggtggccagcgtagggtccagcacgtggggtggtaccccaggcctgggtcagacagggacatggcaggggacacaggacagaggggtccccagctgccacctcacccaccgcaattcatttagtagcaggcacaggggcagctccggcacggctttctcaggcctatgccggagcctcgagggctggagagcgggaagacaggcagtgctcggggagttgcagcaggacgtcaccaggagggcgaagcggccacgggaggggggccccgggacattgcgcagcaaggaggctgcaggggctcggcctgcgggcgccggtcccacgaggcactgcggcccagggtctggtgcggagagggcccacagtggacttggtgacgctgtatgccctcaccgctcagcccctggggctggcttggcagacagtacagcatccaggggagtcaagggcatggggcgagaccagactaggcgaggcgggcggggcggagtgaatgagctctcaggagggaggatggtgcaggcaggggtgaggagcgcagcgggcggcgagcgggaggcactggcctccagagcccgtggccaaggcgggcctcgcgggcggcgacggagccgggatcggtgcctcagcgttcgggctggagacgaggccaggtctccagctggggtggacgtgcccaccagctgccgaaggccaagacgccaggtccggtggacgtgacaagcaggacatgacatggtccggtgtgacggcgaggacagaggaggcgcgtccggccttcctgaacaccttaggctggtggggctgcggcaagaagcgggtctgtttctttacttcctccacggagtcggcacactatggctgccctctgggctcccagaacccacaacatgaaagaaatggtgctacccagctcaagcctgggcctttgaatccggacacaaaaccctctagcttggaaatgaatatgctgcactttacaaccactgcactacctgactcaggaatcggctctggaaggtgagcaccagcgctccttccggaagcctccaggcccccgagcaccctgcccccatcccacccacgtgtcgctatctctaggtgaagctagaggaaccagacctcatcagcccaacatcaaagacaccatcggaacagcagcgcccgcagcacccaccccgcaccggcgactccatcttcatggccaccccctgcggcggacggttgaccaccagccaccacatcatcccagagctgagctcctccagcgggatgacgccgtccccaccacctccctcttcttctttttcatccttctgtctctttgtttctgagctttcctgtctttccttttttctgagagattcaaagcctccacgactctgtttcccccgtcccttctgaatttaatttgcactaagtcatttgcactggttggagttgtggagacggccttgagtctcagtacgagtgtgcgtgagtgtgagccaccttggcaagtgcctgtgcagggcccggccgccctccatctgggccgggtgactgggcgccggctgtgtgcccgaggcctcaccctgccctcgcctagtctggaagctccgaccgacatcacggagcagccttcaagcattccattacgccccatctcgctctgtgcccctccccaccagggcttcagcaggagccctggactcatcatcaataaacactgttacagcaa

SEQ ID NO: 6727 - DNA, 2173 bp, Homo sapiens
ccactcaccgacccccagtctcaatctcaacgctgtgaggaaacctcgactttgccaggtccccaagggcagcggggctcggcgagcgaggcacccttctccgtccccatcccaatccaagcgctcctggcactgacgacgccaagagactcgagtgggagttaaagcttccagtgagggcagcaggtgtccaggccgggctgcgggttcctgttgacgtcttgccctaggcaaaggtcccagttccttctcggagccggctgtcccgcgccactggaaaccgcacctccccgcaggtcacatgggcaccagcctcagcccgaacgacccttggccgctaaacccgctgtccatccagcagaccacgctcctgctactcctgtcggtgctggccactgtgcatgtgggccagcggctgctgaggcaacggaggcggcagctccggtccgcgcccccgggcccgtttgcgtggccactgatcggaaacgcggcggcggtgggccaggcggctcacctctcgttcgctcgcctggcgcggcgctacggcgacgttttccagatccgcctgggcagctgccccatagtggtgctgaatggcgagcgcgccatccaccaggccctggtgcagcagggctcggccttcgccgaccggccggccttcgcctccttccgtgtggtgtccggcggccgcagcatggctttcggccactactcggagcactggaaggtgcagcggcgcgcagcccacagcatgatgcgcaacttcttcacgcgccagccgcgcagccgccaagtcctcgagggccacgtgctgagcgaggcgcgcgagctggtggcgctgctggtgcgcggcagcgcggacggcgccttcctcgacccgaggccgctgaccgtcgtggccgtggccaacgtcatgagtgccgtgtgtttcggctgccgctacagccacgacgaccccgagttccgtgagctgctcagccacaacgaagagttcgggcgcacggtgggcgcgggcagcctggtggacgtgatgccctggctgcagtacttccccaacccggtgcgcaccgttttccgcgaattcgagcagctcaaccgcaacttcagcaacttcatcctggacaagttcttgaggcactgcgaaagccttcggcccggggccgccccccgcgacatgatggacgcctttatcctctctgcggaaaagaaggcggccggggactcgcacggtggtggcgcgcggctggatttggagaacgtaccggccactatcactgacatcttcggcgccagccaggacaccctgtccaccgcgctgcagtggctgctcctcctcttcaccaggtatcctgatgtgcagactcgagtgcaggcagaattggatcaggtcgtggggagggaccgtctgccttgtatgggtgaccagcccaacctgccctatgtcctggccttcctttatgaagccatgcgcttctccagctttgtgcctgtcactattcctcatgccaccactgccaacacctctgtcttgggctaccacattcccaaggacactgtggtttttgtcaaccagtggtctgtgaatcatgacccagtgaagtggcctaacccggagaactttgatccagctcgattcttggacaaggatggcctcatcaacaaggacctgaccagcagagtgatgattttttcagtgggcaaaaggcggtgcattggcgaagaactttctaagatgcagctttttctcttcatctccatcctggctcaccagtgcgatttcagggccaacccaaatgagcctgcgaaaatgaatttcagttatggtctaaccattaaacccaagtcatttaaagtcaatgtcactctcagagagtccatggagctccttgatagtgctgtccaaaatttacaagccaaggaaacttgccaataagaagcaagaggcaagctgaaattttagaaatattcacatcttcggagatgaggagtaaaattcagtttttttccagttcctcttttgtgctgcttctcaattagcgtttaaggtgagcataaatcaactgtccatcaggtgaggtgtgctccatacccagcggttcttcatgagtagtgggctatgcaggagcttctgggagatttttttgagtcaaagacttaaagggcccaatgaatt

SEQ ID NO: 6728 - DNA, 7492 bp, Homo sapiens
aattgagctggagaggaggcagcgtgagagcagaaacttcagacgccgctgatccgggaggagctggggtgagccgcggcggccgtctctcccacccgcagcagcatcctctctgcccttctctgccaccccggggagagccgggagctgcctctttacagcttccacgagccaggggtgcaggcagctgcccccaggaagtttgggcttctgcgtagtttaggggtgcctgcgagcgccccagagggcgaggggccgagggcgatgttgggcgccgcgcggggctgggggcgcccagaagacgtgcgagtgtccgcggtcctgctgctgtctccagtaccctccgcatcccccaagtgatgggaacaagggcccgcccaggcagccgctgtcgccgcaccgccccctcgctcgctctctgcgcgcggagtcacccagtcacactcccggcaccccgagcccttcctccggagctgctgcttctactttggctgctatcgccgccgccgcgggtggcccgctgctgactgggctcgccgggagacggagaagcactttttggccctccctcagcagctctcacaccccaactttgccgccgccgccgcgcctgccctcgcagcggcgctcggccgcacattgtgggggcgcacgccgggaggctccgcaagaccgtggaggcaggaaacggcactactgcgcttctgcctcggctctttgttgttcgctttggatggttcttgaaagtgtctgagcctcctcggaaatcctggggccggagaagacaaaccttggaattcttcctctgcaaaagtctctgagatactgacaagcgtccggaaaggtcgacgagtaattgccctgaaaactcttggctaattgacccacgttgcttatattaagcctttgtgtgtggtgtgtggcttcatacatttggggaccctatttccactccctcctcttggcatgagactgtatacaggatccacccgaggacaatgattgcggagcccgctcacttttacctgtttggattaatatgtctctgttcaggctcccgtcttcgtcaggaagattttccacctcgcattgttgaacacccttcagacctgattgtctcaaaaggagaacctgcaactttgaactgcaaagctgaaggccgccccacacccactattgaatggtacaaagggggagagagagtggagacagacaaagatgaccctcgctcacaccgaatgttgctgccgagtggatctttatttttcttacgtatagtacatggacggaaaagtagacctgatgaaggagtctatgtctgtgtagcaaggaattaccttggagaggctgtgagccacaatgcatcgctggaagtagccatacttcgggatgacttcagacaaaacccttcggatgtcatggttgcagtaggagagcctgcagtaatggaatgccaacctccacgaggccatcctgagcccaccatttcatggaagaaagatggctctccactggatgataaagatgaaagaataactatacgaggaggaaagctcatgatcacttacacccgtaaaagtgacgctggcaaatatgtttgtgttggtaccaatatggttggggaacgtgagagtgaagtagccgagctgactgtcttagagagaccatcatttgtgaagagacccagtaacttggcagtaactgtggatgacagtgcagaatttaaatgtgaggcccgaggtgaccctgtacctacagtacgatggaggaaagatgatggagagctgcccaaatccagatatgaaatccgagatgatcataccttgaaaattaggaaggtgacagctggtgacatgggttcatacacttgtgttgcagaaaatatggtgggcaaagctgaagcatctgctactctgactgttcaagctccttcagaacctccacattttgttgtgaaaccccgtgaccaggttgttgctttgggacggactgtaacttttcagtgtgaagcaaccggaaatcctcaaccagctattttctggaggagagaagggagtcagaatctacttttctcatatcaaccaccacagtcatccagccgattttcagtctcccagactggcgacctcacaattactaatgtccagcgatctgatgttggttattacatctgccagactttaaatgttgctggaagcatcatcacaaaggcatatttggaagttacagatgtgattgcagatcggcctcccccagttattcgacaaggtcctgtgaatcagactgtagccgtggatggcactttcgtcctcagctgtgtggccacaggcagtccagtgcccaccattctgtggagaaaggatggagtcctcgtttcaacccaagactctcgaatcaaacagttggagaatggagtactgcagatccgatatgctaagctgggtgatactggtcggtacacctgcattgcatcaacccccagtggtgaagcaacatggagtgcttacattgaagttcaagaatttggagttccagttcagcctccaagacctactgacccaaatttaatccctagtgccccatcaaaacctgaagtgacagatgtcagcagaaatacagtcacattatcgtggcaaccaaatttgaattcaggagcaactccaacatcttatattatagaagccttcagccatgcatctggtagcagctggcagaccgtagcagagaatgtgaaaacagaaacatctgccattaaaggactcaaacctaatgcaatttaccttttccttgtgagggcagctaatgcatatggaattagtgatccaagccaaatatcagatccagtgaaaacacaagatgtcctaccaacaagtcagggggtggaccacaagcaggtccagagagagctgggaaatgctgttctgcacctccacaaccccaccgtcctttcttcctcttccatcgaagtgcactggacagtagatcaacagtctcagtatatacaaggatataaaattctctatcggccatctggagccaaccacggagaatcagactggttagtttttgaagtgaggacgccagccaaaaacagtgtggtaatccctgatctcagaaagggagtcaactatgaaattaaggctcgccctttttttaatgaatttcaaggagcagatagtgaaatcaagtttgccaaaaccctggaagaagcacccagtgccccaccccaaggtgtaactgtatccaagaatgatggaaacggaactgcaattctagttagttggcagccacctccagaagacactcaaaatggaatggtccaagagtataaggtttggtgtctgggcaatgaaactcgataccacatcaacaaaacagtggatggttccaccttttccgtggtcattccctttcttgttcctggaatccgatacagtgtggaagtggcagccagcactggggctgggtctggggtaaagagtgagcctcagttcatccagctggatgcccatggaaaccctgtgtcacctgaggaccaagtcagcctcgctcagcagatttcagatgtggtgaagcagccggccttcatagcaggtattggagcagcctgttggatcatcctcatggtcttcagcatctggctttatcgacaccgcaagaagagaaacggacttactagtacctacgcgggtatcagaaaagtaacttaccagagaggaggcgaagctgtcagcagtggagggaggcctggacttctcaacatcagtgaacctgccgcgcagccatggctggcagacacgtggcctaatactggcaacaaccacaatgactgctccatcagctgctgcacggcaggcaatggaaacagcgacagcaacctcactacctacagtcgcccagctgattgtatagcaaattataacaaccaactggataacaaacaaacaaatctgatgctccctgagtcaactgtttatggtgatgtggaccttagtaacaaaatcaatgagatgaaaaccttcaatagcccaaatctgaaggatgggcgttttgtcaatccatcagggcagcctactccttacgccaccactcagctcatccagtcaaacctcagcaacaacatgaacaatggcagcggggactctggcgagaagcactggaaaccactgggacagcagaaacaagaagtggcaccagttcagtacaacatcgtggagcaaaacaagctgaacaaagattatcgagcaaatgacacagttcctccaactatcccatacaaccaatcatacgaccagaacacaggaggatcctacaacagctcagaccggggcagtagtacatctgggagtcaggggcacaagaaaggggcaagaacacccaaggtaccaaaacagggtggcatgaactgggcagacctgcttcctcctcccccagcacatcctcctccacacagcaatagcgaagagtacaacatttctgtagatgaaagctatgaccaagaaatgccatgtcccgtgccaccagcaaggatgtatttgcaacaagatgaattagaagaggaggaagatgaacgaggccccactccccctgttcggggagcagcttcttctccagctgccgtgtcctatagccatcagtccactgccactctgactccctccccacaggaagaactccagcccatgttacaggattgtccagaggagactggccacatgcagcaccagcccgacaggagacggcagcctgtgagtcctcctccaccaccacggccgatctcccctccacatacctatggctacatttcaggacccctggtctcagatatggatacggatgcgccagaagaggaagaagacgaagccgacatggaggtagccaagatgcaaaccagaaggcttttgttacgtgggcttgagcagacacctgcctccagtgttggggacctggagagctctgtcacggggtccatgatcaacggctggggctcagcctcagaggaggacaacatttccagcggacgctccagtgttagttcttcggacggctcctttttcactgatgctgactttgcccaggcagtcgcagcagcggcagagtatgctggtctgaaagtagcacgacggcaaatgcaggatgctgctggccgtcgacattttcatgcgtctcagtgccctaggcccacaagtcccgtgtctacagacagcaacatgagtgccgccgtaatgcagaaaaccagaccagccaagaaactgaaacaccagccaggacatctgcgcagagaaacctacacagatgatcttccaccacctcctgtgccgccacctgctataaagtcacctactgcccaatccaagacacagctggaagtacgacctgtagtggtgccaaaactcccttctatggatgcaagaacagacagatcatcagacagaaaaggaagcagttacaaggggagagaagtgttggatggaagacaggttgttgacatgcgaacaaatccaggtgatcccagagaagcacaggaacagcaaaatgacgggaaaggacgtggaaacaaggcagcaaaacgagaccttccaccagcaaagactcatctcatccaagaggatattctaccttattgtagacctacttttccaacatcaaataatcccagagatcccagttcctcaagctcaatgtcatcaagaggatcaggaagcagacaaagagaacaagcaaatgtaggtcgaagaaatattgcagaaatgcaggtacttggaggatatgaaagaggagaagataataatgaagaattagaggaaactgaaagctgaagacaaccaagaggcttatgagatctaatgtgaaaatcatcactcaagatgcctcctgtcagatgacacatgacgccagataaaatgttcagtgcaatcagagtgtacaaattgtcgtttttattcctcttattgggatatcattttaaaaactttattgggtttttattgttgttgtttgatccctaaccctacaaagagccttcctattcccctcgctgttggagcaaaccattataccttacttccagcaagcaaagtgctttgacttcttgcttcagtcatcagccagcaagagggaacaaaactgttcttttgcattttgccgctgagatatggcattgcactgcttatatgccaagctaatttatagcaagatattgatcaaatatagaaagttgatattcaacctcacaagggctctcaaagtataatctttctatagccaactgctaatgcaaattaaaacatatttcattttaacatgatttcaaaatcagtttttcatactaccctttgctggaagaaactaaaaatatagcaaatgcagaaccacaaacaattcgaatggggtagaaacattgtaaatatttactctttgcaaaccctggtggtattttattttggcttcatttcaatcattgaagtatattcttattggaaatgtacttttggataagtagggctaagccagttggatctctggttgtctagtcattgtcataagtaaacctagtaaaaccttgttctatttttcaatcatcaaaaagtaattataaatacgtattacaaacaagtggatgtttttaatgaccaattgagtaagaacatccctgtcttaactggcctaaatttcttctggtagtgtcagttcaactttcagaagtgccacttaaggaagtttgatttttgtttttgtaatgcactgtttttaatctctctctctttttttttttttttttggttttaaaagcacaatcactaaactttatttgtaaaccattgtaactattaaccttttttgtcttattgaaaaaaaaaatgttgagaagcgtttttaacctgttttgttaatgctctatgtttgtatttggaatatttgaataatgacagatggtgaagtaacatgcatactttattgtgggccatgaaccaaatggttcttacttttcctggacttaaagaaaaaaagaggtttaagtttgttgtggccaatgtcgaaacctacaagatttccttaaaatctctaatagaggcattacttgctttcaattgacaaatgatgccctctgactagtagatttctatgatccttttttgtcattttatgaatatcattgattttataattggtgctatttgaagaaaaaaatgtacatttattcatagatagataagtatcaggtctgaccccagtggaaaacaaagccaaacaaaactgaaccacaaaaaaaaaggctggtgttcaccaaaaccaaacttgttcatttagataatttgaaaaagttccatagaaaaggcgtgcagtactaagggaacaatccatgtgattaatgttttcattatgttcatgtaagaagccccttatttttagccataattttgcatactgaaaatccaataatcagaaaagtaattttgtcacattatttattaaaaatgttctcaaatac

SEQ ID NO: 6729 - DNA, 2658 bp, Homo sapiens
atatagagcaggcgccgcgggtcgcagcacagtgcggagaccgcagccccggagcccgggccagggtccacctgtccccgcagcgccggctcgcgccctcctgccgcagccaccgagccgccgtctagcgccccgacctcgccaccatgagagccctgctggcgcgcctgcttctctgcgtcctggtcgtgagcgactccaaagtgagtgcgctcttgctttgactgatgctgcccaaggacctctgatcagcaccaggggagaggaggggctgctcagggagctggggtcctccggattccatccacagcagggccagactctccccaggaaatgggacagggtggcagcggaggcttgagaaccacgggggttggcactggctggcaagggaggaagaggccgccgggactgccccagcctgcgggcatctggtagatgaagcttgcttgggtcaatccatttctcctggctggaaacccatggtcttccatttgagaactagatacgaacaggcgaactgtgactgtctaaatggaggaacatgtgtgtccaacaagtacttctccaacattcactggtgcaactgcccaaagaaattcggagggcagcactgtgaaatagataagtcaaaaacctgctatgaggggaatggtcacttttaccgaggaaaggccagcactgacaccatgggccggccctgcctgccctggaactctgccactgtccttcagcaaacgtaccatgcccacagatctgatgctcttcagctgggcctggggaaacataattactgcaggaacccagacaaccggaggcgaccctggtgctatgtgcaggtgggcctaaagctgcttgtccaagagtgcatggtgcatgactgcgcagatggaaaaaagccctcctctcctccagaagaattaaaatttcagtgtggccaaaagactctgaggccccgctttaagattattgggggagaattcaccaccatcgagaaccagccctggtttgcggccatctacaggaggcaccgggggggctctgtcacctacgtgtgtggaggcagcctcatcagcccttgctgggtgatcagcgccacacactgcttcattgattacccaaagaaggaggactacatcgtctacctgggtcgctcaaggcttaactccaacacgcaaggggagatgaagtttgaggtggaaaacctcatcctacacaaggactacagcgctgacacgcttgctcaccacaacgacattgccttgctgaagatccgttccaaggagggcaggtgtgcgcagccatcccggactatacagaccatctgcctgccctcgatgtataacgatccccagtttggcacaagctgtgagatcactggctttggaaaagagaattctaccgactatctctatccggagcagctgaaaatgactgttgtgaagctgatttcccaccgggagtgtcagcagccccactactacggctctgaagtcaccaccaaaatgctgtgtgctgctgacccacagtggaaaacagattcctgccagggagactcagggggacccctcgtctgttccctccaaggccgcatgactttgactggaattgtgagctggggccgtggatgtgccctgaaggacaagccaggcgtctacacgagagtctcacacttcttaccctggatccgcagtcacaccaaggaagagaatggcctggccctctgagggtccccagggaggaaacgggcaccacccgctttcttgctggttgtcatttttgcagtagagtcatctccatcagctgtaagaagagactgggaagataggctctgcacagatggatttgcctgtgccacccaccagggcgaacgacaatagctttaccctcaggcataggcctgggtgctggctgcccagacccctctggccaggatggaggggtggtcctgactcaacatgttactgaccagcaacttgtctttttctggactgaagcctgcaggagttaaaaagggcagggcatctcctgtgcatgggtgaagggagagccagctcccccgacggtgggcatttgtgaggcccatggttgagaaatgaataatttcccaattaggaagtgtaacagctgaggtctcttgagggagcttagccaatgtgggagcagcggtttggggagcagagacactaacgacttcagggcagggctctgatattccatgaatgtatcaggaaatatatatgtgtgtgtatgtttgcacacttgtgtgtgggctgtgagtgtaagtgtgagtaagagctggtgtctgattgttaagtctaaatatttccttaaactgtgtggactgtgatgccacacagagtggtctttctggagaggttataggtcactcctggggcctcttgggtcccccacgtgacagtgcctgggaatgtattattctgcagcatgacctgtgaccagcactgtctcagtttcactttcacatagatgtccctttcttggccagttatcccttccttttagcctagttcatccaatcctcactgggtggggtgaggaccactcctgtacactgaatatttatatttcactatttttatttatatttttgtaattttaaataaaagtgatcaataaaatgtgatttttctgatg

SEQ ID NO: 6730 - DNA, 892 bp, Homo sapiens
catatcagactaataaaaagaaattagaaaccaagtacttttttttttttacttaaatattttgccgtgggtggatgttaaagaaggccgtggtaatttacaggatgggttccaagttctcttcttctggggctttaaggcagatttccagcagacctctttccggtcacaagttcagtcacaagcccttcaccctcacaaattctgcagtgtgtttttaatgatgtgtctttgggtgatgagtatgctctgggactaggtggaggtggtggttgcatctcccatgtagctcatggtcaatacaggtggtgattgtacaatattgtgaatatatgaaacaccattgaaggaggggggaaggaaagaaagaaaaataggagaagaaaggaagaaagaaagctgggggtctagtgaaaaccattttacagaagtaaagtaggcaaaaagttaaaaggataaatggttgcaggaaagtaaacagttccaggtgcaggggctttaagactattacaggctaacatttgacttttagaaaagtaattgtttcgtttagagaaaaaaaaatatgactcctgtaaagtaataaacctacatgcaaaaataaggatgcagggggaggccgagagcattaaatttgcctctataatatcatatcaacacattttaatctctcaaccagggctaataattcactcactgtctccaggggactacattaacagttcttccaatattgggcctttatatcatcagctaaccatatgcttccctgagcgcctgagtgatcccagtttctggaacactattcctttctctcaaattcagtaaataaaaagttaaagcgctatattgttttatatgagtacgacctttaagattcactgatgactat

SEQ ID NO: 6731 - DNA, 6534 bp, Homo sapiens
atttttccacccagcaggatgggtgatgctgagagctgcctgctcagacaacagacacgcgaggtcaggaagaagccgcttataaattaccgcttccttcgcgccgccgccaacgccgagccccgaggaccgcaagcccagaggacaagctgcgccaagagggagtgctggagctgttcacccagcgggtcagagagcgagccgggcaggccagcccccggccggcggaaccctggcacagcctgagcagatgctgcgggcggcgccgcagccaccccagatccagaaccagaaccacagcccttctgaggagctcccaaaccaaggagatggccaccaaggagaagctgcagtgtctgaaagatttccacaaggacatcctgaagccctcaccagggaagagcccaggcacgcggcctgaggacgaggctgagggaaaacctccgcagagggagaagtggtctagcaagatcgactttgtgctctctgtggctggcggcttcgtgggcttgggcaacgtctggcgcttcccgtacctctgctacaagaatggtggaggtgcgtttctcataccgtattttattttcctgtttgggagcggcctgcctgtgtttttcttggagatcatcataggccagtacacctctgaagggggcatcacctgctgggaaaagatctgccccttgttctctggtatcggctatgcctccgttgtaattgtgtccctcctgaatgtctactacatcgtcatcctggcctgggccacatactacctgttccagtccttccagaaggagctgccctgggcacactgcaaccacagctggaacacacctcactgcatggaggacaccatgcgcaagaacaagagtgtctggatcaccatcagctccaccaacttcacctcccctgtcatcgagttctgggagcgcaacgtgctgagcttgtcccctggaatcgaccacccaggctctctgaaatgggacctcgctctctgccttcttttagtctggctagtgtgtttcttctgcatctggaagggcgtcaggtccactgggaaggtcgtctacttcacagccacttttccattcgccatgctcctggtgctgctggtccgagggctgacgctgccgggcgcgggcgcaggcatcaagttctatctgtatcctgacatcacccgccttgaggacccacaggtgtggattgacgctgggactcagatattcttctcttatgccatctgcctgggggctatgacctcgctggggagctacaacaagtacaagtataactcgtacagggactgtatgctgctgggatgcctgaacagtggtaccagttttgtgtctggcttcgcaattttttccatcctgggcttcatggcacaagagcaaggggtggacattgctgatgtggctgagtcaggtcctggcctggccttcattgcctacccaaaagctgtgacaatgatgccgctgcccacattttggtccattcttttttttattatgcttctcttgcttggactggatagccagtttgttgaagttgaaggacagatcacatccttggttgatctttacccatccttcctaaggaagggttatcgtcgggaaatcttcatcgccttcgtgtgtagcatcagctacctgctggggctgacgatggtgacggagggtggcatgtatgtgtttcagctctttgactactatgcagctagcggtgtatgccttttgtgggttgcattctttgaatgttttgttattgcctggatatatggaggtgataacctttatgatggtattgaggacatgattggctatcggcccgggccctggatgaagtacagctgggctgtgatcactccagttctctgtgttggatgtttcatcttctcgctcgtcaagtacgtacccctgacctacaacaaaacatacgtgtaccccaactgggccattgggctgggctggagcctggccctttcctccatgctctgcgttcccttggtcatcgtcatccgcctctgccagactgaggggccgttccttgtgagagtcaagtacctgctgaccccaagggaacccaaccgctgggctgtggagcgcgagggagccacaccttacaactctcgcaccgtcatgaacggcgctctcgtgaaaccgacccacatcattgtggagaccatgatgtgagctctctcgggtcgacggggccggcggctttcctgctgtttactaacattagattctcataggaccaggtttacagagctttatatttgcactaggatttttttttttttgtaattgtcacagaaaatgtaattgtgggtatgtgtgcgtgcgtgtgtgtgtgtgtgtgtatcgtgtgtgtgtgttttgttttgatttgggggatattttgtacaaaaagaaaacccacgggaagatgtccgtggagaggcagagctttcatactgaattagatgtattttatgggaatttggtaaatttttctttgtatttttttttttacatataagtatatatacacttagagattgtcatatacttttaccacttgaattgatcttcttgccagcaatagatctcattttcaaaagcaattcttcggtgctgtgtagctggcagaaagttctgtccagtaaacgcaggatggaattttcctgggactctacacccatcttaaggtggtataccttccaaatcctggttcagatggaagaaatagcaggagagaggacccattagctggcagacccagggggaagaaaggagggctgtgaggagatacctcattaaacttggcttagtgaagaagagagatgccaaaggaatgaaccaacccttcacataaaggagactggctgaagctgaatgaggaggccctatagcagaagtctgattctaagagcagtagaaacttgtaccagaagcaaaatcccacttttaattttgagatggtgagtggatagtcagtagaccgtcagaaccactggccagagagggagctgctagagatccaagaaggctggcaggagtgaggctcacaactcagcctcgcaagaggtggcagaggcacaggaggccacagtccttcctggggcattccaggcagagaaggagcagaggctctcccggcaggagctggggtctcagggctcagatgagtctgttgcatttgaatggggtcatagcaggttctggtcattccccaagcaacatctcagcatctcttaaagttgcctgcaggaatgaagcatgacatacctgttgagggactaggggagtggtggggaggtgagtggaccaaaggatataggccccaggcatgcagatgggcccggtgtcggggaggggtgctttctttcctcatctccccactccccactctcagcctgggagactcctgccaagccctcattaaagatgccaccctgggctgccctggcacctagcaaggcacaccaagaacagcttttgagtctgtatcctccactgggggaagtgctcccagttcagaacaagggcagcccgtggtgctgacctaggatataacaaagctcttcacttcaaaacccctgcaatagctgggtttacagacatttaccacctgcggacccaaaagagaaggcctaggagagttttctagaaggttgggattgtcagggtcctggcccctcagaactggcttgatcaagggccttatgtggagcagaggttgtctctgaaccaggagagaaggtactatacctttcaaatccccagggcagacacacccccacccagcccctatttggacctaaactgtgccatttgaacagtcacttccaagctcagtctaaatgaaaccgaaacgtgaccacgcacaaaggcagtcactgcctcgaggggtgcagaccgcagaattttcacagcaggggctcttggaaccctggaaacccccttcttaaatttgggaggaggagtatgcctttggtgtccccctcccaaggggcaattctgaaccccatctttggcaggcatacatatttcactgtttccaaagctatctactctgccaaacaacacccagtcctattccaaactctcaacgattctatcttgttcctgtttttctatgtatttatggttgccgtttgtgtctgatttgattttactgttttttccctgattttatggagtagcattgtgacctgttttcctttgtcttatataactttagtaaactaaccactgtcaatgattgagggcaggtggcacgtggggaagaggggacttggcacgcagtggctacctgggcatttgtggtcatttcagtttccatctccccagcgggggctccctgggtgaaaggccacagtattttgggttggtaggcaaattgcaacattctggacatggcctgaggaaggcctcttcttataagattctcagaccaaattctagaccaaagacacaggcagaccaagtccccaggccccgcctggaaggaagtcgttcctcaactctccccaaggcacctgtctccaatcagagccctctcgcccagccagccctggctctgtgtgcagagcatagctctgcgagtacctgtgtaataatgctcaaccttcatgtctccgtataaacgaaactttccatgagagctcatgactctggtccacctgtctatagagaatgggcaaagtccttcacctgctttctgcttgggatgggtcagaaatgctgatgcccgcacatagcccagccagccagatctggaaaggaagcgagggggttgtttaaatcaattttttaagatgaagaagtgggagacactgcgttgagatgggccatgctagggccacagagatttcctgacggtcagggagagaagggcctccagggtcccctaacccaacgcccttgttgtaaatgaggtaactgaggctcagggaggcactgtgagccaggaatggattttcttgaaacagctctagctgcaggttctccgaggtaggtgcagggaatggtgagtgtctaaccagggctacatccagcaacatcctcaaggtcttcctgacaaccaaagacaagcctttatggaaaaggaaatgcgctcccctccatgttcagggatgaggggagcagcagcagccacactcccaccatcctcacagaattcctggacccatgcggtggctccgtgagctgggtgactccagcctcacctgcacaccccagccctgcacggggccctccttcctcccagcagcccttggtgagctaggaattgagatccctgtttgtgaaagagggaactgaggtgcagagaagccagaggtgtgccagatccttaggcaggatttagatgaagtcgccctggctccagactgaccccgaggctctgcggggagtttccaggcagcaggaagtggccttggatgctctccttccaggacagcataacccctgggccatgtgcagctccttcactgccccctggatccccagcatacccccaaagacagtggggaaacacaaggggagagcacagcatggcccctccagcccacttcagggcactcttgtatcacccgggtaccgccacactggtcccccacccagccagcatctcccagcacagcccctctccctggggaaatgctctgggtagccagtctaaaggcagaggcacctaactgctccccgcagcccaccccacccaagattcagacacaagccaggaaaggacccaagagaaaatccttcaaggtggcctgaggtcccatccctccctcagacccatgtggtcccaggccaggctgcctgggacacggtaaataccactgtgtgcaaaaatcgaagtacaaaaccacaagactaaacaaaacaaacccagagagccaaacttgtagaggtgggcagtccagaaagcagggggcagccctccccctttccttctctccctgatcctcagaatatatattgttgtaataggaagcatttttgcattgttctcttgtgggtgtcactacagacatgttctggcgtgttctccgagggatggagcatcctgttatatatttgacttcaaattgagatgttggcttcattttttttttttacccaattaatctcccaatccctagcaactgtgactctgtatttagcacaagagaaagctgagaatgtgggtcttgcctccttccagaaatatgtctggctcatcaggacatttttttaaaacttcaaaatatttttaagatattttaaacttttataaaaaaaaaatcaaccaacaagagacttttctgaggaggaacatttgtatttgaacaagatccttggtgtgtagttcagtcttgcagtatacaagcttttgtgtataaatgttttatgatatgattccctgtattttgcaggggtttttttctcttttgctttttagataaatatgtatatcaatattttaaattcatctttgctttttttagaggagtttgtaatcaccttataacatgaaaataaacatttcctttttaacatccaa

SEQ ID NO: 6732 - DNA, 2687 bp, Homo sapiens
aacagatttctaaaaaatactgaaaatggcaacagccttgcaaggacagtttagcctctaaaagcagttcctttgaagagaaaatactcaattagatgtatacattctgttctgtttaaaactcagttttgtatttttctcattatacttaatgtaaaatgtatcctgttaacagtgaatactttaattggtttgggaatttgtttttattgagaatatatagtgaaaataactgtgaacacagtgttcaccaggggtttttagcatttaatgtgatgattattcagatttctctacttgaattttttaatgaatgaagatttttcaaagttaattattcatataattcctgattaataattgacagatcctaatttggggccacatgtaaaatatatgaaagctcacataacgtggcaattttttactctgagagactgcagcagttcccatctccccttaacctattgccaccaacaccattgatttgttttccagcgatggcaagccggcaggtggatattgcaactcagggctggttcattggtctgatgtgtgctgttgctctccttatcttaattttgctgattgtttgcttcatcagaagaaacaagggtggtaaatatccagttaaagaaaaggaagatgcccatgctgaccctgaaatccagcctatgaaggaagatgatgggacatttggagaatacagtgatgcagaagaccacaagcctttgaaaaaaggaagtcgaactccttcagacaggactgtgaaaaaagaagatagtgacgacagcctagttgactatggagaaggggttaatggccagttcaatgaggatggctcctttattggacaatacagtggtaagaaagagaaagagccggctgaaggaaacgaaagctcagaggcaccttctcctgtcaacgccatgaattcctttgtttaatttttaagctctttgccaatattccatttctctagaatgtttatcctaagcacttgtttgtcagccctctcatactatgaacatatgggtagagagtatattttctgctgtatgttagtattatgagaatagttacagcaaaaacataactcagtcaaatgatatgttaatatgaactggaatgcaaagtgcatactttttcattcaaaatgggtattcttgatttcctcagaactgataaaaaataatgcaacatcaccaacagatcctgttatttcctctgcaggatacagttcaatatgatgcatgaaaaatgctccacatttaaaggacatacccgtgtatgttatgaaaacatggtttgatactttgtttatactaccctcagctgaacccctatatatgaattccgttttcattgtcaagaatgttactgtagtattctctagaacttcaatgtctttgtggacattgttgtgaaattggtgactatgtatagctgtcgttagtctttttgggagactgttaggaacagtttgtacagtatatacttgctaaatgagttcattatgacagtcacattgctgatgcttactgagaactattacctactcttggctcctgttactccgtaggcttcttaatcttccaggcattacagcagcacagtgttctactttttacatcatttctatgttcggttgtttttaggcataaacaatgtgtattgcagtgcatttcggcatttgtgccatactgaaagaatcaaaaacaaatcatccaaattaaatttcaaacattatttcagagaacacagggcaagacacatacagtgccttcagatattaagcattccacaacatcgtgcattctgtatcagctggtccagtccattctgggtcctagattactgtcattgtctaaaagtaacttttaaaaagcagagttcatgaaaactgcaatgctgggaaaagaaggaaacatgaaaataaaaataagacagtttattagaaatagcatttcctcataagcataaaaagaaaatctttgttgccaactgaagcacatgatgattttgtggtcctttatggtttctattacattcagtaagaaagatgtcaacatgctagaaaattaattttaaaactaagttattccaacactaaaagcatacaacagcatgccaacagtaatatattattctccaagactttacctatgtaagtgttcaaaactctgcagcattaaacaacgtgtatgcaaattgttatggatacatttcagaatctaagaaatcaggcaagtgcttaaaaggccaacggtccaagggattacatctgcagtttaaaaagtaaatatatattctatcgtattcatttttcacagatccacctgtctcttgaaaatataaaaagacaaaacaggtttgccttggcatcagagagcacaaagattaaaagttactttaaatttgccaatattttgggagaacaataaaactacattttttcctcttccatactggtagatgcgaaatttatctgtgcatgaaagggtcacttctgtaatagtgcaacagatttggtattaaaaattaaatgtggttttaaaagttcctctctcttttgtaatttatgttcccaattgagtgtgaatgtccaagtaatggtgtatgtaatggtacaggcaaatgtgactggatttccctcaaaaaagtaactattaaacagtcttgatctc

SEQ ID NO: 6733 - DNA, 1763 bp, Homo sapiens
ggtgcatttgcatgttgcggagtgattagtgggtttgaaaagggaaccgtggctcggcctcatttcccgctctggttcaggcgcaggaggaagtgttttgctggaggatgatgacagaggaatctgagaattgctctcacacaccaacccagcaacatccgtggagaaaactctcaccagcaactcctttaaaacaccgtcatttcaaaccattgtggtcttcaagcaacaacagcagcacaaaaaaccccaaccaaacaaaactcttgacagaagctgtgacaaccagaaaggatgcctcataaagggggaagactttaactaggggcgcgcagatgtgtgaggccttttattgtgagagtggacagacatccgagatttcagagccccatattcgagccccgtggaatcccgcggcccccagccagagccagcatgcagaacagtcacagcggagtgaatcagctcggtggtgtctttgtcaacgggcggccactgccggactccacccggcagaagattgtagagctagctcacagcggggcccggccgtgcgacatttcccgaattctgcagacccatgcagatgcaaaagtccaagtgctggacaatcaaaacgtgtccaacggatgtgtgagtaaaattctgggcaggtattacgagactggctccatcagacccagggcaatcggtggtagtaaaccgagagtagcgactccagaagttgtaagcaaaatagcccagtataagcgggagtgcccgtccatctttgcttgggaaatccgagacagattactgtccgagggggtctgtaccaacgataacataccaagcgtgtcatcaataaacagagttcttcgcaacctggctagcgaaaagcaacagatgggcgcagacggcatgtatgataaactaaggatgttgaacgggcagaccggaagctggggcacccgccctggttggtatccggggacttcggtgccagggcaacctacgcaagatggctgccagcaacaggaaggagggggagagaataccaactccatcagttccaacggagaagattcagatgaggctcaaatgcgacttcagctgaagcggaagctgcaaagaaatagaacatcctttacccaagagcaaattgaggccctggagaaagagtttgagagaacccattatccagatgtgtttgcccgagaaagactagcagccaaaatagatctacctgaagcaagaatacaggtatggttttctaatcgaagggccaaatggagaagagaagaaaaactgaggaatcagagaagacaggccagcaacacacctagtcatattcctatcagcagtagtttcagcaccagtgtctaccaaccaattccacaacccaccacaccggtttcctccttcacatctggctccatgttgggccgaacagacacagccctcacaaacacctacagcgctctgccgcctatgcccagcttcaccatggcaaataacctgcctatgcaacccccagtccccagccagacctcctcatactcctgcatgctgcccaccagcccttcggtgaatgggcggagttatgatacctacacccccccacatatgcagacacacatgaacagtcagccaatgggcacctcgggcaccacttcaacaggactcatttcccctggtgtgtcagttccagttcaagttcccggaagtgaacctgatatgtctcaatactggccaagattacagtaaaaaaaaaaaaaaaaaaa

SEQ ID NO: 6734 - DNA, 922 bp, Homo sapiens; identical to SEQ ID NO: 6503

SEQ ID NO: 6735 - DNA, 5460 bp, Homo sapiens
gcttggagccgccgcacccgggacggtgcgtagcgctggaagtccggccttccgagagctagctgtccgccgcggcccccgcacgccgggcagccgtccctcgccgcctcgggcgcgccaccatggggccccggctcagcgtctggctgctgctgctgcccgccgcccttctgctccacgaggagcacagccgggccgctgcgaagggtggctgtgctggctctggctgtggcaaatgtgactgccatggagtgaagggacaaaagggtgaaagaggcctcccggggttacaaggtgtcattgggtttcctggaatgcaaggacctgaggggccacagggaccaccaggacaaaagggtgatactggagaaccaggactacctggaacaaaagggacaagaggacctccgggagcatctggctaccctggaaacccaggacttcccggaattcctggccaagacggcccgccaggccccccaggtattccaggatgcaatggcacaaagggggagagagggccgctcgggcctcctggcttgcctggtttcgctggaaatcccggtgatccaggtgagatacttggccatgtgcccgggatgctgttgaaaggtgaaagaggatttcccggaatcccagggactccaggcccaccaggactgccagggcttcaaggtcctgttgggcctccaggatttaccggaccaccagtaagttttgggggctgtctctccgagtttggacatggcggaatcagcttccctcttactaaacgtcgacagggtgaccaaggggtcagtgggcctccaggagtaccaggacaagctcaagttcaagaaaaaggagacttcgccaccaagggagaaaagggccaaaaaggtgaacctggatttcaggggatgccaggggtcggagagaaaggtgaacccggaaaaccaggacccagaggcaaacccggaaaagatggtgacaaaggggaaaaagggagtcccggttttcctggtgaacccgggtacccaggactcataggccgccagggcccgcaggtaaacgctggcactattgcttatccccttcctccttgtccggttataggcacaggacctttgggagaaaaaggagagaggggctaccctggaactccggggccaagaggagagccaggcccaaaaggtagctttcttgcctttttcccccctcctcctactccccctccttttgcaggcctccctgtacctgggcaggctggtgcccctggcttccctggtgaaagaggagaaaaaggtgaccgaggatttcctggtacatctctgccaggaccaagtggaagagatgggctcccgggtcctcctggttcccctgggccccctgggcagcctggctacacaaatggaattgtggaatgtcagcccggacctccaggtgaccagggtcctcctggaattccagggcagccaggatttataggcgaaattggagagaaaggtcaaaaaggagagagttgcctcatctgtgatatagacggatatcgggggcctcccgggccacagggacccccgggagaaataggtttcccagggcagccaggggccaaaggactccctggcataacgggacagtcggggctccctggccttcctggacagcagggggctcctgggattcctgggtttccaggttccaagggagaaatgggcgtcatggggacccccgggcagccgggctcaccaggaccagtgggtgctcctggattaccgggtgaaaaaggggaccatggctttccgggctcctcaggacccaggggagaccctggcttgaaaggtgataagggggatgtcggtctccctggcaagcctggctccatggataaggtggacatgggcagcatgaagggccagaaaggagaccaaggagagaaaggacaaattggaccaattggtgagaagggatcccgaggagaccctgggaccccaggagtgcctggaaaggacgggcaggcaggacagcctgggcagccaggacctaaaggtgatccaggtataagtggaaccccaggtgctccaggacttccgggaccaaaaggatctgttggtggaatgggcttgccaggaacacctggagagaaaggtgtgcctggcatccctggcccacaaggttcacctggcttacctggagacaaaggtgcaaaaggagagaaagggcaggcaggcccacctggcataggcatcccagggctgcgaggtgaaaagggagatcaagggatagcgggtttcccaggaagccctggagagaagggagaaaaaggaagcattgggatcccaggaatgccagggtccccaggccttaaagggtctcccgggagtgttggctatccaggaagtcctgggctacctggagaaaaaggtgacaaaggcctcccaggattggatggcatccctggtgtcaaaggagaagcaggtcttcctgggactcctggccccacaggcccagctggccagaaaggggagccaggcagtgatggaatcccggggtcagcaggagagaagggtgaaccaggtctaccaggaagaggattcccagggtttccaggggccaaaggagacaaaggttcaaagggtgaggtgggtttcccaggattagccgggagcccaggaattcctggatccaaaggagagcaaggattcatgggtcctccggggccccagggacagccggggttaccgggatccccaggccatgccacggaggggcccaaaggagaccgcggacctcagggccagcctggcctgccaggacttccgggacccatggggcctccagggcttcctgggattgatggagttaaaggtgacaaaggaaatccaggctggccaggagcacccggtgtcccagggcccaagggagaccctggattccagggcatgcctggtattggtggctctccaggaatcacaggctctaagggtgatatggggcctccaggagttccaggatttcaaggtccaaaaggtcttcctggcctccagggaattaaaggtgatcaaggcgatcaaggcgtcccgggagctaaaggtctcccgggtcctcctggccccccaggtccttacgacatcatcaaaggggagcccgggctccctggtcctgagggccccccagggctgaaagggcttcagggactgccaggcccgaaaggccagcaaggtgttacaggattggtgggtatacctggacctccaggtattcctgggtttgacggtgcccctggccagaaaggagagatgggacctgccgggcctactggtccaagaggatttccaggtccaccaggccccgatgggttgccaggatccatggggcccccaggcaccccatctgttgatcacggcttccttgtgaccaggcatagtcaaacaatagatgacccacagtgtccttctgggaccaaaattctttaccacgggtactctttgctctacgtgcaaggcaatgaacgggcccatggccaggacttgggcacggccggcagctgcctgcgcaagttcagcacaatgcccttcctgttctgcaatattaacaacgtgtgcaactttgcatcacgaaatgactactcgtactggctgtccacccctgagcccatgcccatgtcaatggcacccatcacgggggaaaacataagaccatttattagtaggtgtgctgtgtgtgaggcgcctgccatggtgatggccgtgcacagccagaccattcagatcccaccgtgccccagcgggtggtcctcgctgtggatcggctactcttttgtgatgcacaccagcgctggtgcagaaggctctggccaagccctggcgtcccccggctcctgcctggaggagtttagaagtgcgccattcatcgagtgtcacggccgtgggacctgcaattactacgcaaacgcttacagcttttggctcgccaccatagagaggagcgagatgttcaagaagcctacgccgtccaccttgaaggcaggggagctgcgcacgcacgtcagccgctgccaagtctgtatgagaagaacataatgaagcctgactcagctaatgtcacaacatggtgctacttcttcttctttttgttaacagcaacgaaccctagaaatatatcctgtgtacctcactgtccaatatgaaaaccgtaaagtgccttataggaatttgcgtaactaacacaccctgcttcattgacctctacttgctgaaggagaaaaagacagcgataagctttcaatagtggcataccaaatggcacttttgatgaaataaaatatcaatattttctgcaatccaatgcactgatgtgtgaagtgagaactccatcagaaaaccaaagggtgctaggaggtgtgggtgccttccatactgtttgcccattttcattcttgtattataattaattttctacccccagagataaatgtttgtttatatcactgtctagctgtttcaaaatttaggtcccttggtctgtacaaataatagcaatgtaaaaatggttttttgaacctccaaatggaattacagactcagtagccatatcttccaaccccccagtataaatttctgtctttctgctatgtgtggtactttgcagctgcttttgcagaaatcacaattttcctgtggaataaagatggtccaaaaatagtcaaaaattaaatatatatatatattagtaatttatatagatgtcagcaattaggcagatcaaggtttagtttaacttccactgttaaaataaagcttacatagttttcttcctttgaaagactgtgctgtcctttaacataggtttttaaagactaggatattgaatgtgaaacatccgttttcattgttcacttctaaaccaaaaattatgtgttgccaaaaccaaacccaggttcatgaatatggtgtctattatagtgaaacatgtactttgagcttattgtttttattctgtattaaatattttcagggttttaaacactaatcacaaactgaatgacttgacttcaaaagcaacaaccttaaaggccgtcatttcattagtattcctcattctgcatcctggcttgaaaaacagctctgttgaatcacagtatcagtattttcacacgtaagcacattcgggccatttccgtggtttctcatgagctgtgttcacagacctcagcagggcatcgcatggaccgcaggagggcagattcggaccactaggcctgaaatgacatttcactaaaagtctccaaaacatttctaagactactaaggccttttatgtaatttctttaaatgtgtatttcttaagaattcaaatttgtaataaaactatttgtataaaaattaagcttttattaatttgttgctagtattgccacagacgcattaaaagaaacttactgcacaagctgctaataaatttgtaagctttgcatacctt

SEQ ID NO: 6736 - DNA, 621 bp, Homo sapiens
cctccacctcctgggttcaagtgattctcctgtctcagcctcccgagtagctggaattacaggcgcaccccaccctgcctggctactttttgtatttttagtagagatgggatttcaccatgttggccaggctggtcttgaacttctgaccaccagtgaaccacctgcctcggcctcccaaagtgctgggattacaggcatgagccaccacacccagcctggtcacatgtttaatatcagcttgtcttatgaacctgttttgttcactggaacaatgaggaaaaacctggatccctttaatgagcacacggatgaggaactgtggaatgccttacaagaggtacaacttaaagaaaccattgaagatcttcctggtaaaatggatactgaattagcagaatcaggatccaattttagtgttggacaaagacaactggtgtgccttgccagggcaattctcaggaaaaatcagatattgattattgatgaagcgacggcaaatgtggatccaagaactgatgagttaatacaaaaaaaaatccgggagaaatttgcccactgcaccgtgctaaccattgcacacagattgaacaccattattgacagcgacaagataatggt

SEQ ID NO: 6737 - DNA, 3310 bp, Homo sapiens
aaagaagataactcattcaaggtcaatcagcaatgtctgaagaagaaagaagaggacaggaaagaaacttcagtctgagggttgaggacacgtcccggagcagaggaggaccaagctcccaagccccctgtcaccttgacacgcagacggttccccaggactgcgaagaggggggcaaccagcgccccgccccgccccgctgcgccgcccgccattggccggtccgaaagacgcggggcgttgtcggtttgaatgagagcgcctggagccggggcgcaggcgcagaggagggcggtgttgagaccggcggagcggcgggacccctaggtggcggagggacgctccgggaaagcgaggggcgctacgagctctggcccacgtgacctgccgggggcgggagcagggggcgcgccggcctcctgcggtgcccctgccttggggaggggccgtgaccacccgtctgtcgcccgaggcggccgccgctgcaccttcaccgcgtacccgggacccgcccgcccgcgggagaaatgttgctgaagtgctgctgaaagggccagagatgcaaggatttgggatacattttgaacctttaagctgtctgacattgacctcctttcattattaataaagaagaatcaggagcttaggatgtattaacaccaactcattaatatactaaccggacaatgttctacaaacaattctacattgtaaaggactggattggcacaaaataaaataattttattttattcagcttataatatgactcgatggaggaaaatttgataagcatgagagaagaccattcttttcatgttcgttacagaatggaagcttcttgcctagagctggccttggaaggggaacgtctatgtaaatcaggagactgccgcgctggcgtgtcattctttgaagctgcagttcaagttggaactgaagacctaaaaacacttagcgctatttacagccagttgggcaatgcttatttctatttgcatgattatgccaaagcattagaatatcaccatcatgatttaacccttgcaaggactattggagaccagctgggggaagcgaaagctagtggtaatctgggaaacaccttaaaagttcttgggaattttgacgaagccatagtttgttgtcagcgacacctagatatttccagagagcttaatgacaaggtgggagaagcaagagcactttacaatcttgggaatgtgtatcatgccaaagggaaaagttttggttgccctggtccccaggatgtaggagaatttccagaagaagtgagagatgctctgcaggcagccgtggatttttatgaggaaaacctatcattagtgactgctttgggtgaccgagcggcacaaggacgtgcctttggaaatcttggaaacacacattacctccttggcaacttcagggatgcagttatagctcatgagcagcgtctccttattgcaaaagaatttggagataaagcagctgaaagaagagcatatagcaaccttggaaatgcatatatatttcttggtgaatttgaaactgcctcggaatactacaagaagacactactgttggcccgacagcttaaagaccgagctgtagaagcacagtcttgttacagtcttggaaatacatatactttacttcaagactatgaaaaggccattgattatcatctgaagcacttagcaattgctcaagagctgaatgatagaattggtgaaggaagagcatgttggagcttaggaaatgcatacacagcactaggaaatcatgatcaagcaatgcattttgctgaaaagcacttggaaatttcaagagaggttggggataaaagtggtgaactaacagcacgacttaatctctcagaccttcaaatggttcttggtctgagctacagcacaaataactccataatgtctgaaaatactgaaattgatagcagtttgaatggtgtacgccccaagttgggacgccggcatagtatggaaaatatggaacttatgaagttaacaccagaaaaggtacagaactggaacagtgaaattcttgctaagcaaaaacctcttattgccaaaccttctgcaaagctactctttgtcaacagactgaaggggaaaaaatacaaaacgaattcctccactaaagttctccaagatgccagtaattctattgaccaccgaattccaaattctcagaggaaaatcagtgcagatactattggagatgaagggttctttgacttattaagccgatttcaaagcaataggatggatgatcagagatgttgcttacaagaaaagaactgccatacagcttcaacaacaacttcttccactccccctaaaatgatgctaaaaacatcatctgttcctgtggtatcccccaacacggatgagtttttagatcttcttgccagctcacagagtcgccgtctggatgaccagagggctagtttcagtaatttgccagggcttcgtctaacacaaaacagccagtcggtacttagccacctgatgactaatgacaacaaagaggctgatgaagatttctttgacatccttgtaaaatgtcaaggatccagattagatgatcaaagatgtgctccaccacctgctaccacaaagggtccgacagtaccagatgaagactttttcagccttattttacggtcccagggaaagagaatggatgaacagagagttcttttacaaagagatcaaaacagagacactgactttgggctaaaggactttttgcaaaataatgctttgttggagtttaaaaattcagggaaaaaatcggcagaccattagttactatggatttattttttttcctttcaaacacggtaaggaaacaatctattacttttttccttaaaaggagaatttatagcactgtaatacagcttaaaatatttttagaatgatgtaaatagttaaccttcagtagtctattaaggcattaatacttctctggacatgcgcgtttgagggtggaggggtcctgtaaggtgcttcatcgtctgtgattactgcttgggatgtgttctttggcagcttgtgagattactttacctagtgtttataaagtaggaagttaagtgaatcatagattagaatttaatactcttatggaaataattttttaacatcttaattgacaatggcgtttttttatacataaccatggatgtagtgggaaacaatgttgtttggtaaaaataatgtacttgatcaatgtaaaaaagtatataaaatagtcttactaaaaatctaggtttttttttcctcca

SEQ ID NO: 6738 - DNA, 802 bp, Homo sapiens
aggcagagacggggcggccgtggctccgagggcgggagctgagccgggccccgggaccgaagtttggcggcggctccgggaggcagagcgggctccccgggcgacttccaggcccctctcgcgtcctcgccccggacccgtgggcagccggggggaacggaagccgcggccgggccaactccgaggcggggacgccgcgacgggaacttgaggtgggaactttgcgcgctgcagcctcgccgggcgccaccaaagcgcgaaccggaccccgagcctgcaaactcgggctcgggggcggctgcacgtggccgtggccctgaactccctgcgggggcctcgaaacccgcctgcggggaggccagggcgacagaggactcgggagtcaccgctggtgcgtggcggcgtggagcgcgcttgttacggccaagggagcaggctgcctaatgaaggagccaggcttgcacacagacaattctagaactggtggcccgagagggatgtgaaggcccaaaatgaccctcttaccgggagacaattctgactacgactacagcgcgctgagctgcacctcggacgcctccttccacccggccttcctcccgcagcgccaggccatcaagggcgcgttctaccgccgggcgcagcggctgcggccgcaggatgagccccgccagggctgtcagcccgaggaccgccgccgtcggatcatcatcaacgtaggcggcatcaagtactcgctgccctggaccacgctggacgagttcccgctgacgcgcctgggccagctcaaggcctgcaccaa

SEQ ID NO: 6739 - DNA, 1037 bp, Homo sapiens
gttgactaagtcaataatcagaatcagcaggtttgcagtcagattggcagggataagcagcctagctcaggagaagtgagtataaaagccccaggctgggagcagccatcacagaagtccactcattcttggcaggatggcttctcatcgtctgctcctcctctgccttgctggactggtatttgtgtctgaggctggccctacgggcaccggtgaatccaagtgtcctctgatggtcaaagttctagatgctgtccgaggcagtcctgccatcaatgtggccgtgcatgtgttcagaaaggctgctgatgacacctgggagccatttgcctctgggaaaaccagtgagtctggagagctgcatgggctcacaactgaggaggaatttgtagaagggatatacaaagtggaaatagacaccaaatcttactggaaggcacttggcatctccccattccatgagcatgcagaggtgagtatacagaccttcgaggcattccaggaaatattatacaagaaaaaattcacaacactttggcactggacttccggtggtcagtcattttttcgggctctggtggaagtggtattcacagccaacgactccggcccccgccgctacaccattgccgccctgctgagcccctactcctattccaccacggctgtcgtcaccaatcccaaggaatgagggacttctcctccagtggacctgaaggacgagggatgggatttcatgtaaccaagagtattccatttttactaaagcagtgttttcacctcatatgctatgttagaagtccaggcagagacaataaaacattcctgtgaaaggcacttttcattccactttaacttgattttttaaattcccttattgtcccttccaaaaaaaagagaatcaaaattttacaaagaatcaaaggaattctagaaagtatctgggcagaacgctaggagagatccaaatttccattgtcttgcaagcaaagcacgtattaaatatgatctgcagccattaaaaagacacattctgt

SEQ ID NO: 6740 - DNA, 2988 bp, Homo sapiens
tagcccggcgctctcgccggccacacggagcggcgcccgggagctatgagccatgaagccgcccggcagcagctcgcggcagccgcccctggcgggctgcagccttgccggcgcttcctgcggcccccaacgcggccccgccggctcggtgcctgccagcgccccggcccgcacgccgccctgccgcctgcttctcgtccttctcctgctgcctccgctcgccgcctcgtcccggccccgcgcctggggggctgctgcgcccagcgctccgcattggaatgaaactgcagaaaaaaatttgggagtcctggcagatgaagacaatacattgcaacagaatagcagcagtaatatcagttacagcaatgcaatgcagaaagaaatcacactgccttcaagactcatatattacatcaaccaagactcggaaagcccttatcacgttcttgacacaaaggcaagacaccagcaaaaacataataaggctgtccatctggcccaggcaagcttccagattgaagccttcggctccaaattcattcttgacctcatactgaacaatggtttgttgtcttctgattatgtggagattcactacgaaaatgggaaaccacagtactctaagggtggagagcactgttactaccatggaagcatcagaggcgtcaaagactccaaggtggctctgtcaacctgcaatggacttcatggcatgtttgaagatgataccttcgtgtatatgatagagccactagagctggttcatgatgagaaaagcacaggtcgaccacatataatccagaaaaccttggcaggacagtattctaagcaaatgaagaatctcactatggaaagaggtgaccagtggccctttctctctgaattacagtggttgaaaagaaggaagagagcagtgaatccatcacgtggtatatttgaagaaatgaaatatttggaacttatgattgttaatgatcacaaaacgtataagaagcatcgctcttctcatgcacataccaacaactttgcaaagtccgtggtcaaccttgtggattctatttacaaggagcagctcaacaccagggttgtcctggtggctgtagagacctggactgagaaggatcagattgacatcaccaccaaccctgtgcagatgctccatgagttctcaaaataccggcagcgcattaagcagcatgctgatgctgtgcacctcatctcgcgggtgacatttcactataagagaagcagtctgagttactttggaggtgtctgttctcgcacaagaggagttggtgtgaatgagtatggtcttccaatggcagtggcacaagtattatcgcagagcctggctcaaaaccttggaatccaatgggaaccttctagcagaaagccaaaatgtgactgcacagaatcctggggtggctgcatcatggaggaaacaggggtgtcccattctcgaaaattttcaaagtgcagcattttggagtatagagactttttacagagaggaggtggagcctgccttttcaacaggccaacaaagctatttgagcccacggaatgtggaaatggatacgtggaagctggggaggagtgtgattgtggttttcatgtggaatgctatggattatgctgtaagaaatgttccctctccaacggggctcactgcagcgacgggccctgctgtaacaatacctcatgtctttttcagccacgagggtatgaatgccgggatgctgtgaacgagtgtgatattactgaatattgtactggagactctggtcagtgcccaccaaatcttcataagcaagacggatatgcatgcaatcaaaatcagggccgctgctacaatggcgagtgcaagaccagagacaaccagtgtcagtacatctggggaacaaaggctgcagggtctgacaagttctgctatgaaaagctgaatacagaaggcactgagaagggaaactgcgggaaggatggagaccggtggattcagtgcagcaaacatgatgtgttctgtggattcttactctgtaccaatcttactcgagctccacgtattggtcaacttcagggtgagatcattccaacttccttctaccatcaaggccgggtgattgactgcagtggtgcccatgtagttttagatgatgatacggatgtgggctatgtagaagatggaacgccatgtggcccgtctatgatgtgtttagatcggaagtgcctacaaattcaagccctaaatatgagcagctgtccactcgattccaagggtaaagtctgttcgggccatggggtgtgtagtaatgaagccacctgcatttgtgatttcacctgggcagggacagattgcagtatccgggatccagttaggaaccttcacccccccaaggatgaaggacccaaggaaatgtcaagaagagaaggttcgatcctactcagcaaggccccatctgaatcagctgcgctggatggacaccgccttgcactgttggattctgggtatgacatactcgcagcagtgttactggaactattaagtttgtaaacaaaacctttgggtggtaatgactacggagctaaagttggggtgacaaggatggggtaaaagaaaactgtctcttttggaaataatgtcaaagaacacctttcaccacctgtcagtaaacgggggagggggcaaaagaccatgctataaaaagaactgttccagaatcttttttttccctaatggacgaaggaacaacacacacacaaaaattaaatgcaataaaggaatcattaaaaaaaatagtaaatgattttttttccctcagcctgctggcacttaatatcttctaaatgatttggcatgatttttttttctttactaccgatgacaaactccagtggcatgaagatctaattttcaaaagggtaaaaactgcatggcatatatacaacaagctagcaagccaattctcagcaaaacctgcaacagaattc

SEQ ID NO: 6741 - DNA, 3544 bp, Homo sapiens
acggccgagggattaaagccctaagaggctgtgacacagccatctccaaaaccccactttctccttcctttgagcctccgtaccagctggggcgtccggcaagatgtgagttgtcactctgctgcggcacagacctgaattaacaactctagctagggctgacttcaaaaagcactttcgttttttaataaccaacatcagctcagcaggcttcatttgggaaaagaaaccttgtcggattaccccgacattctccacctcctgggaggccagccattcccaaatgccccaaggatgaagaacggagacggtagacgcaccctctgaagatggtgactccctcctgagaagctggaccccttggtaaaagacaaggccttctccaagaagaatatgaaagtgttactcagacttatttgtttcatagctctactgatttcttctctggaggctgataaatgcaaggaacgtgaagaaaaaataattttagtgtcatctgcaaatgaaattgatgttcgtccctgtcctcttaacccaaatgaacacaaaggcactataacttggtataaagatgacagcaagacacctgtatctacagaacaagcctccaggattcatcaacacaaagagaaactttggtttgttcctgctaaggtggaggattcaggacattactattgcgtggtaagaaattcatcttactgcctcagaattaaaataagtgcaaaatttgtggagaatgagcctaacttatgttataatgcacaagccatatttaagcagaaactacccgttgcaggagacggaggacttgtgtgcccttatatggagttttttaaaaatgaaaataatgagttacctaaattacagtggtataaggttgcagtgagccgagtttgggccactgcactctagcctggcaacagagcaagactccgtctcaaaaaaagggcaataaatgccctctctgaatgtttgaactgccaagaaaaggcatggagacagcgaactagaagaaagggcaagaaggaaatagccaccgtctacagatggcttagttaagtcatccacagcccaagggcggggctatgccttgtctggggaccctgtagagtcactgaccctggagcggctctcctgagaggtgctgcaggcaaagtgagactgacacctcactgaggaagggagacatattcttggagaactttccatctgcttgtattttccatacacatccccagccagaagttagtgtccgaagaccgaattttattttacagagcttgaaaactcacttcaatgaacaaagggattctccaggattccaaagttttgaagtcatcttagctttccacaggagggagagaacttaaaaaagcaacagtagcagggaattgatccacttcttaatgctttcctccctggcatgaccatcctgtcctttgttattatcctgcattttacgtctttggaggaacagctccctagtggcttcctccgtctgcaatgtcccttgcacagcccacacatgaaccatccttcccatgatgccgctcttctgtcatcccgctcctgctgaaacacctcccaggggctccacctgttcaggagctgaagcccatgctttcccaccagcatgtcactcccagaccacctccctgccctgtcctccagcttcccctcgctgtcctgctgtgtgaattcccaggttggcctggtggccatgtcgcctgcccccagcactcctctgtctctgctcttgcctgcacccttcctcctcctttgcctaggaggccttctcgcattttctctagctgatcagaattttaccaaaattcagaacatcctccaattccacagtctctgggagactttccctaagaggcgacttcctctccagccttctctctctggtcaggcccactgcagagatggtggtgagcacatctgggaggctggtctccctccagctggaattgctgctctctgagggagaggctgtggtggctgtctctgtccctcactgccttccaggagcaatttgcacatgtaacatagatttatgtaatgctttatgtttaaaaacattccccaattatcttatttaatttttgcaattattctaattttatatatagagaaagtgacctattttttaaaaaaatcacactctaagttctattgaacctaggacttgagcctccatttctggcttctagtctggtgttctgagtacttgatttcaggtcaataacggtcccccctcactccacactggcacgtttgtgagaagaaatgacattttgctaggaagtgaccgagtctaggaatgcttttattcaagacaccaaattccaaacttctaaatgttggaattttcaaaaattgtgtttagattttatgaaaaactcttctactttcatctattctttccctagaggcaaacatttcttaaaatgtttcattttcattaaaaatgaaagccaaatttatatgccaccgattgcaggacacaagcacagttttaagagttgtatgaacatggagaggacttttggtttttatatttctcgtatttaatatgggtgaacaccaacttttatttggaataataattttcctcctaaacaaaaacacattgagtttaagtctctgactcttgcctttccacctgctttctcctgggcccgctttgcctgcttgaaggaacagtgctgttctggagctgctgttccaacagacagggcctagctttcatttgacacacagactacagccagaagcccatggagcagggatgtcacgtcttgaaaagcctattagatgttttacaaatttaattttgcagattattttagtctgtcatccagaaaatgtgtcagcatgcatagtgctaagaaagcaagccaatttggaaacttaggttagtgacaaaattggccagagagtgggggtgatgatgaccaagaattacaagtagaatggcagctggaatttaaggagggacaagaatcaatggataagcgtgggtggaggaagatccaaacagaaaagtgcaaagttattccccatcttccaagggttgaattctggaggaagaagacacattcctagttccccgtgaacttcctttgacttattgtccccactaaaacaaaacaaaaaacttttaatgccttccacattaattagattttcttgcagtttttttatggcatttttttaaagatgccctaagtgttgaagaagagtttgcaaatgcaacaaaatatttaattaccggttgttaaaactggtttagcacaatttatattttccctctcttgcctttcttatttgcaataaaaggtattgagccattttttaaatgacatttttgataaattatgtttgtactagttgatgaaggagttttttttaacctgtttatataattttgcagcagaagccaaattttttgtatattaaagcaccaaattcatgtacagcatgcatcacggatcaatagactgtacttattttccaataaaattttcaaactttg

SEQ ID NO: 6742 - DNA, 533 bp, Homo sapiens
ttaaccttgactataaataggccatcaatgacctttccagagaatgttcagagacctcaactttgtttagagatcttgtgtgggtggaacttcctgtttgcacacagagcagcataaagcccagttgctttgggaagtgtttgggaccagatggattgtagggagtagggtacaatacagtctgttctcctccagctccttctttctgcaacatggggaagaacaaactccttcatccaagtctggttcttctcctcttggtcctcctgcccacagacgcctcagtctctggaaaaccgcagtatatggttctggtcccctccctgctccacactgagaccactgagaagggctgtgtccttctgagctacctgaatgagacagtgactgtaagtgcttccttggagtctgtcaggggaaacaggagcctcttcactgacctggaggcggagaatgacgtactccactgtgtcgccttcgctaagtgattcctgtccatgccaactttccctgctgagaacaagggagtgaag

SEQ ID NO: 6743 - DNA, 1481 bp, Homo sapiens
gggggtaacgggggaaactggggaagtggggaaccgaggggcaaccaggggaagatggggtgctggaggagagcttgtgggagccaaggagcaccttggacatctggagtctggcaggattgcagcaggacgtcaccaggagggcgaagcggccacgggaggggggccccgggacattgcgcagcaaggaggctgcaggggctcggcctgcgggcgccggtcccacgaggcactgcggcccagggtctggtgcggagagggcccacagtggacttggtgacgctgtatgccctcaccgctcagcccctggggctggcttggcagacagtacagcatccaggggagtcaagggcatggggcgagaccagactaggcgaggcgggcggggcggagtgaatgagctctcaggagggaggatggtgcaggcaggggtgaggagcgcagcgggcggcgagcgggaggcactggcctccagagcccgtggccaaggcgggcctcgcgggcggcgacggagccgggatcggtgcctcagcgttcgggctggagacgaggccaggtctccagctggggtggacgtgcccaccagctgccgaaggccaagacgccaggtccggtggacgtgacaagcaggacatgacatggtccggtgtgacggcgaggacagaggaggcgcgtccggccttcctgaacaccttaggctggtggggctgcggcaagaagcgggtctgtttctttacttcctccacggagtcggcacactatggctgccctctgggctcccagaacccacaacatgaaagaaatggtgctacccagctcaagcctgggcctttgaatccggacacaaaaccctctagcttggaaatgaatatgctgcactttacaaccactgcactacctgactcaggaatcggctctggaaggtgaagctagaggaaccagacctcatcagcccaacatcaaagacaccatcggaacagcagcgcccgcagcacccaccccgcaccggcgactccatcttcatggccaccccctgcggcggacggttgaccaccagccaccacatcatcccagagctgagctcctccagcgggatgacgccgtccccaccacctccctcttcttctttttcatccttctgtctctttgtttctgagctttcctgtctttccttttttctgagagattcaaagcctccacgactctgtttcccccgtcccttctgaatttaatttgcactaagtcatttgcactggttggagttgtggagacggccttgagtctcagtacgagtgtgcgtgagtgtgagccaccttggcaagtgcctgtgcagggcccggccgccctccatctgggccgggtgactgggcgccggctgtgtgcccgaggcctcaccctgccctcgcctagtctggaagctccgaccgacatcacggagcagccttcaagcattccattacgccccatctcgctctgtgccc

SEQ ID NO: 6744 - DNA, 565 bp, Homo sapiens
gtccttcccccaccccctctcgcccctataactcgctccctccgtccctctcggactcggactcggggccggtgcgcgactgagctggcgcctctagccgactttgccaagagggcgcctcctgcccgatccgcgctgaccctgcgcgggacgcagccccaggcggctgcctagccgaggcgggagcccgagctgagtcgagctcgccggagcgggcacctctgtcagcctcctcgcagttgtagttattgtgtgtggcgtggccctggtggcagtttttctctttctcttttggaagctgtgctggatgccctggaggaacaaggaggcctccagtccctcttctgctaatccccccttggaagccctccagagccccagcttcagaggcaacatggcggacaagctgaaggaccccagcaccctgggcttcctggaggcggccgtgaagatcagccacacgtccccagatatcccagctgaggtgcagatgtcggtcaaggagcacatcatgcgtcacacccggctgcagcggcaaactacagagccagcgtcatccaccagg

SEQ ID NO: 6745 - DNA, 455 bp, Homo sapiens
tgagccatcaccaatcagcataggaatctgagaattgctctcacacaccaacccagcaacatccgtggagaaaactctcaccagcaactcctttaaaacaccgtcatttcaaaccattgtggtcttcaagcaacaacagcagcacaaaaaaccccaaccaaacaaaactcttgacagaagctgtgacaaccagaaaggatgcctcataaagggggaagactttaactaggggcgcgcagatgtgtgaggccttttattgtgagagtggacagacatccgagatttcagagccccatattcgagccccgtggaatcccgcggcccccagccagagccagcatgcagaacagtcacagcggagtgaatcagctcggtggtgtctttgtcaacgggcggccactgccggactccacccggcagaagattgtagagctagctcacagcggggcccggcc

SEQ ID NO: 6746 - DNA, 1526 bp, Homo sapiens
aggacgttccagaagcatctggggacagaaccagcctcttccagggaggcctgggagctgggggtgtgtgtctggcagtccctgcagccctgggctctgcggcccctgcgtcctccgcttggctctgccactgcatctgagtgtcttctctcctcacggctccccgcatttctaactctttctgcctcctcgtctcaaagctgttccttcccccgactcaagaatccccggagcccggaggcctgcagcaggagcggccatgaagaagctgatggtggtgctgagtctgattgctgcagcctgggcagaggagcagaataagttggtgcatggcggaccctgcgacaagacatctcacccctaccaagctgccctctacacctcgggccacttgctctgtggtggggtccttatccatccactgtgggtcctcacagctgcccactgcaaaaaaccgaatcttcaggtcttcctggggaagcataaccttcggcaaagggagagttcccaggagcagagttctgttgtccgggctgtgatccaccctgactatgatgccgccagccatgaccaggacatcatgctgttgcgcctggcacgcccagccaaactctctgaactcatccagccccttcccctggagagggactgctcagccaacaccaccagctgccacatcctgggctggggcaagacagcagatggtgatttccctgacaccatccagtgtgcatacatccacctggtgtcccgtgaggagtgtgagcatgcctaccctggccagatcacccagaacatgttgtgtgctggggatgagaagtacgggaaggattcctgccagggtgattctgggggtccgctggtatgtggagaccacctccgaggccttgtgtcatggggtaacatcccctgtggatcaaaggagaagccaggagtctacaccaacgtctgcagatacacgaactggatccaaaaaaccattcaggccaagtgaccctgacatgtgacatctacctcccgacctaccaccccactggctggttccagaacgtctctcacctagaccttgcctcccctcctctcctgcccagctctgaccctgatgcttaataaacgcagcgacgtgagggtcctgattctccctggttttaccccagctccatccttgcatcactggggaggacgtgatgagtgaggacttgggtcctcggtcttacccccaccactaagagaatacaggaaaatcccttctaggcatctcctctccccaacccttccacacgtttgatttcttcctgcagaggcccagccacgtgtctggaatcccagctccgctgcttactgtcggtgtccccttgggatgtacctttcttcactgcagatttctcacctgtaagatgaagataaggatgatacagtctccataaggcagtggctgttggaaagatttaaggtttcacacctatgacatacatggaatagcacctgggccaccatgcactcaataaagaatgaattttattatg

SEQ ID NO: 6747 - DNA, 400 bp, Homo sapiens
gccggggtacctttccgtggggcaaggctctgccaaaatctgggagtgaggggagtcagggagctggggccgcagggcgggccctgcaccgcaaatgggaggggggcgacggaatgggcgtgcgcacccatgggggtgtgtgcatgtgtgtgggagtgtacatgcgtggagaggcactgccttgcgtgtgtgcacacgtgtgaggatgtcagcgcctgtgtggccgcgggactcaaggctggcctggctcaagtgaacagcacgtccaggaggcgacctcgtccgcgggggttcggtccgagcccggtgggaggctcccggagcgcagcctgggcccagcccaccccgcgccggcggccatggcaggcaccctggacctggacaagggctgcacggtgga

SEQ ID NO: 6748 - DNA, 1890 bp, Homo sapiens
gccagtaacaaacatggctccctgaagccgctcaggctcaagagcaacatggaggtctgcacttaatcgctcctctccgggggcggccatactgaggaggcatctcttccgtgcaggcaggctctcctggggacctcagagattctctccagcggcagcagaaaacgggcaatgggtggattcgggtccagattctggcaggagggagtttgggatcgagatctggaaaaaagcactagactggaagaggacgcgatggagtcggagccgctggcgggtacaaaaaccagaggccggggaaggcgccggtgggaggcaaggcacggatggactttacctgcgcacgcgtcgcagccatctccgcgcacagtggtggccaccgcgactggtgctgaagtgtcggcgtgtgccgggcgctccgctgggacccgggttgctcgccctgagtctcagctttctcatctgtacggttgggacaagtacagtaaccctcgcccgtcaagacgggccagggctgtggcgagggtccacgccttagagcaggcacctatcttgtgcagggccctgagatggggtctgactcagttcctgcggggaacttcaccagtgacccagtcagtgcccttcagttaaagaccaccaggagcacacttatatcatggaaatcaggacagtagcagttgggattgtggcaatcaaaggggtggaaagtgaattctatcttgcaacgaacgaggaaggaaaactctatgcaaagaaggaatgcaatgaagattgtaacttcaaagatctaattctggaaaaccattacaacacatatgcagcagctaaatggacaaacaacggaggggaaatgtttgtggccttaaatcaaaaggggattcctgtaagaggaaaaaaaacaaagaaagaacaaaaaacagcccactttcttcctatggcaataacttaattgcatatggtatataaagaaccagttccagcagggagatttctttaagtggactgttttctttcttctcaaaattttctttccttttattttctagtaatcaagaaaggctggaaaactactgaaaaactgatcaagctggacttgcgcatttatgtttgttttaagacactgcattaaagagacatttgaaaagtatacacaaaaatcagatttagtaactaaaggttgtacaaaattgtaaaactggttgtacaatcatgatgttagtaatagtaatttttttcttaaattaatttacccttaagagtatgttagatttgattatctgataatgattatttaaatattcctatctgcttataaaatggctgctataataataataatgcagatgatgttatataaggtatatcagacctacaggctgctggcaggatttgtcagataatcaagccacactaactatggaaaatgagcagcattttaaatgctttctagtgaaaaattataatctacttaaactctaatcagaaaaaaagaatattctcaaaaaaatctattatgaaagtcaataaaatagataatttaacaaaagtacaggattagaacatgcttatacctattaacaagaacaaaatttctaatgctgctcaagtggaaagggtattgctaaaaggatgtttccaaaaatcttgtatataagatagcaacagtgattgatgataatactgtacttcatcttacttgccactaaataacattttataattcctcaaagtaaaattgagaaatctttaagtttttttcaagtaacataatctatctttgtataattcatatttgggaatatggcttttaataatgttcttcccacaaataatcacgcttttttcctatggttactgcattaaactctatattaagttgtttttgaa

SEQ ID NO: 6749 - DNA, 599 bp, Homo sapiens
agacacaaggagaggcttggagagagcagacgccttctggattcaagaagacgaggtgagctgaggtacctggctttagtgaagaccctgtgggggcttcctggctgcggcttcgacgtgcctgactccacacgcccctaaggctcacctgttactcggcctcccagaaagatggataggagaaatgactacggatatagggtgcctctatttcaggtgaggcctctctgcattctctctaggccatctgccccatcctgagttcacttactgctcttcagaccccttccaccgtgtagtttcataattccctgcctaactcgtctcagtcctcccttacatggtgaaggagaggagaggaaaacctgcctgactctattccttccttgctccctaccccattttaattaaccactgctcagaggaagggaaggcctttgtggaaagggatgggctttagcgaggccaaatggcccagaggatggtaatcctaagtgtgtagggccctctgcctcccccggggagcctggggcttcccttccctccagatatacagactgagaccacagaagaggacagtgtcctgctgatgcataccc

SEQ ID NO: 6750 - DNA, 1351 bp, Homo sapiens; identical to SEQ ID NO: 6333

SEQ ID NO: 6751 - DNA, 1816 bp, Homo sapiens
cttggtcccaaaccagggagaccattcagctcacctgcctaggccgcagcagcatttccttcctaatcaggctcaccagggggatcattaccgtctctcccaacctggcctgagtcagcagcagcagcaacagcagcagcagcaccatcatcaccatcaccaccaacaacagcagcagcagcagccacagcagcagccaggagaagcctattcagctatgcctcgggctcagccatcctctgcttcttatcagccagtgccagcagacccttttgccattgtttccagagcccagcagatggttgagatcctctcagacgagaaccggaacttgaggcaagagttggaaggatgctatgagaaggtggcaagactgcagaaggtggagacagaaatccagcgcgtctcggaggcatatgagaacctcgtgaagtcatcctccaaaagagaggccctagagaaagccatgagaaacaagctagagggcgagattcggaggatgcatgatttcaacagggatctgagagagcgtctagagactgccaacaagcagcttgcagagaaggaatatgaggggtcagaggacaccagaaaaaccatctcgcagctctttgcaaaaaataaagaaagccagcgtgagaaggagaagctggaagcggagctggccactgcccgttctaccaatgaggaccaaagacgacacatcgaaatccgagatcaggccctgagtaatgcccaggccaaggtggtaaagctggaagaagagctgaaaaagaagcaagtgtacgttgacaaggtggagaagatgcagcaggcccttgtacagctccaggcagcatgtgaaaaacgtgagcagctagagcaccgtctccggacacgactggagagggaactggaatccctgagaatccagcagcgtcagggcaactgtcagcccaccaacgtttcagaatacaatgctgctgcactgatggagctccttcgggagaaagaggagaggattctggctctggaagctgatatgacaaagtgggagcagaaatatttggaggagaatgtgatgagacattttgctctggatgctgctgcaactgtggctgctcagagggacacaacagtcatcagtcactctcctaacaccagctatgacacagctctagaagctcgcatccagaaagaggaggaagaaatcttgatggccaataagcgttgccttgacatggagggcaggattaagaccctccatgcccagattattgagaaggatgccatgatcaaagtactccagcagcgttcccggaaggagccgagcaagacagagcagctgtcgtgcatgcggccagcgaagtctctgatgtccatttccaatgctggatcaggcttgctctcccactcatccaccctgactggctcccccatcatggaagaaaagcgagacgacaagagctggaaggggagcctaggcattctcctgggtggagactaccgtgctgaatatgtcccttccacaccctcgcctgtgccaccctcgactcccctgctctcggctcactccaagacaggcagccgagactgcagtacccaaactgaacgtgggacggaatcgaacaaaactgcagctgttgctcccatctctgttcctgctccagttgctgctgccgccactgctgccgccatcactgccactgctgccaccatcaccaccaccatggctgctgctgctgccccgtctccagccactgccgctgctactgctgctgctgtttctccagctgctgctggtcagattccagctgctgcctctgttgcctcagct

SEQ ID NO: 6752 - DNA, 722 bp, Homo sapiens
gggggataggctcagacacaaggagaggcttggagagagcagacgccttctggattcaagaagacgaggcccattcccctcaggctcacctgttactcggcctcccagaaagatggataggagaaatgactacggatatagggtgcctctatttcaggtgaggcctctctgcattctctctaggccatctgccccatcctgagttcacttactgctcttcagaccccttccaccgtgtagtttcataattccctgcctaactcgtctcagtcctcccttacatggtgaaggagaggagaggaaaacctgcctgactctattccttccttgctccctaccccattttaattaaccactgctcagaggaagggaaggcctttgtggaaagggatgggctttagcgaggccaaatggcccagaggatggtaatcctaagtgtgtagggccctctgcctcccccggggagcctggggcttcccttccctccagatatacagactgagaccacagaagaggacagtgtcctgctgatgcataccctgttggcggcaaccaaggactccctggccatggacccaccagttgtcaaccggcctaagaaaagcaagaccaagaaggcccctataaagactattactaaggctgcacctgctgcccctccagtcccagctgccaatgagattgccaccaacaagcccaaaataacttggcaggctttaaac

SEQ ID NO: 6753 - DNA, 1653 bp, Homo sapiens
taaagcacagcccagggaaacctcctcacagttttcatccagccacgggccagcatgtctgggggcaaatacgtagactcggaggtaggcatccgtgggggggcgccggctcgggcgtgcggggagtgtccgcttctgctatctgcctctccaaatatcccgactgctgccctggccccagccctctctccacttcggagcactcctctggcgttggcaccgctgaggaatgggcctgggcggggaggtgaagagaagccaggaatgttttatgttttcctaatggagagggggcctagggagcccctgagctaggaggacacggaaaaggggattggggtcctgagattgggtctgttgggcccaggacgcgttttctggatgggtctaggatgctcccttgtcgcgggacccccgcggtccggccctgcctgctgggggttcgaagaggtggagtgcagggtggaggtgttatttacccgagtcctggggacagtccccgggactctccgccaggcgcccagaccggcaggtcccgcaggcggcgcgcggtgtgtttgcactttccaaagttcttgaaccatctcaagaactccttctgcatcttggcgtctggcaggggtgttccgagagaggtagacctcccctccccaaactgccaccatcacttccaacgccctccacgcgctggagctctgcccgggtgtggaaacctcgtcttccaacacgtagctgcccttcagccacccgcccgcagcctgggagtgccctgagggtgggtcgggggagctgcgcagggacatctctacaccgttcccatccgggaacagggcaacatctacaagcccaacaacaaggccatggcagacgagctgagcgagaagcaagtgtacgacgcgcacaccaaggagatcgacctggtcaaccgcgaccctaaacacctcaacgatgacgtggtcaagattgactttgaagatgtgattgcagaaccagaagggacacacagttttgacggcatttggaaggccagcttcaccaccttcactgtgacgaaatactggttttaccgcttgctgtctgccctctttggcatcccgatggcactcatctggggcatttacttcgccattctctctttcctgcacatctgggcagttgtaccatgcattaagagcttcctgattgagattcagtgcatcagccgtgtctattccatctacgtccacaccgtctgtgacccactctttgaagctgttgggaaaatattcagcaatgtccgcatcaacttgcagaaagaaatataaatgacatttcaaggatagaagtatacctgattttttttccttttaattttcctggtgccaatttcaagttccaagttgctaatacagcaacaatttatgaattgaattatcttggttgaaaataaaaagatcactttctcagttttcataagtattatgtctcttctgagctatttcatctatttttggcagtctgaatttttaaaacccatttaaatttttttccttacctttttatttgcatgtggatcaaccatcgctttattggctgagatatgaacatattgttgaaaggtaatttgagagaaatatgaagaactgaggaggaaaaaaaaaaaaaagaaaagaa

SEQ ID NO: 6754 - DNA, 744 bp, Homo sapiens
caaccggggtccccctccagcgaccctaaagcttcccagacttccgcttcaattcctgtccgcaccccacgcccacctcaacgtggagcgcagtggtctccgaggagcgccggagctgccccgcctgcccagcggggtcagcacttcgcatcaaggcccaagaaaagcaagtcctccagcgttctgagcacccgggcctgagggaaggtcctaacagcccccgggagccagtctccaacgcctcccgcagcagcccgccgctcccagaatcctgtgaagcagctccagctatgtgtgaagaagaggacagcactgccttggtgtgtgacaatggctctgggctctgtaaggccggctttgctggggacgatgctcccagggctgttttcccatccattgtgggacgtcccagacatcagggggtgatggtgggaatgggacaaaaagacagctacgtgggtgacgaagcacagagcaaaagaggaatcctgaccctgaagtacccgatagaacatggcatcatcaccaactgggacgacatggaaaagatctggcaccactctttctacaatgagcttcgtgttgcccctgaagagcatcccaccctgctcacggaggcacccctgaaccccaaggccaaccgggagaaaatgactcaaattatgtttgagactttcaatgtcccagccatgtatgtggctatccaggcggtgctgtctctctatgcctctggacgcacaactg

SEQ ID NO: 6755 - DNA, 1189 bp, Homo sapiens; identical to SEQ ID NO: 5720

SEQ ID NO: 6756 - DNA, 2993 bp, Homo sapiens
cgggccggattctcggcaccctgcgggggtggaggagggcgggcggggccttcaggcccaggagcgccagagacctatggggttcgcctgaagcccccggaatgtgtgagacacttcttactagtaaatgggcttcagtatcccccatccctgcactcctgcaggaaggtgagaatcgggacagtcgcaggctgggagacgctctgcttttcctgcgtcctgctgggagctgcgcgctccaggtatcctggcctgccgccctagccggcccaaggtgaagtggaggttctggatccgaacgaccctttaggaccccttgatgggcaggacggcccgattccaactctgaaaggttactttctgaattttctggagccagtaaacaatatcaccattgtccaaggccagacggcaattctgcactgcaaggtggcaggaaacccaccccctaacgtgcggtggctaaagaatgatgccccggtggtgcaggagccgcggcggatcatcatccggaagacagaatatggttcacgactgcgaatccaggacctggacacgacagacactggctactaccagtgcgtggccaccaacgggatgaagaccattaccgccactggcgtcctgtttgtgcggctgggtccaacgcacagcccaaatcataactttcaggatgattaccacgaggatgggttctgccagccttaccggggaattgcctgtgcacgcttcattggcaaccggaccatttatgtggactcgcttcagatgcagggggagattgaaaaccgaatcacagcggccttcaccatgatcggcacgtctacgcacctgtcggaccagtgctcacagttcgccatcccatccttctgccacttcgtgtttcctctgtgcgacgcgcgctcccggacacccaagccgcgtgagctgtgccgcgacgagtgcgaggtgctggagagcgacctgtgccgccaggagtacaccatcgcccgctccaacccgctcatcctcatgcggcttcagctgcccaagtgtgaggcgctgcccatgcctgagagccccgacgctgccaactgcatgcgcattggcatcccagccgagaggctgggccgctaccatcagtgctataacggctcaggcatggattacagaggaacggcaagcaccaccaagtcaggccaccagtgccagccgtgggccctgcagcacccccacagccaccacctgtccagcacagacttccctgagcttggaggggggcacgcctactgccggaaccccggaggccagatggagggcccctggtgctttacgcagaataaaaacgtacgcatggaactgtgtgacgtaccctcgtgtagtccccgagacagcagcaagatggggattctgtacatcttggtccccagcatcgcaattccactggtcatcgcttgccttttcttcttggtttgcatgtgccggaataagcagaaggcatctgcgtccacaccgcagcggcgacagctgatggcctcgcccagccaagacatggaaatgcccctcattaaccagcacaaacaggccaaactcaaagagatcagcctgtctgcggtgaggttcatggaggagctgggagaggaccggtttgggaaagtctacaaaggtcacctgttcggccctgccccgggggagcagacccaggctgtggccatcaaaacgctgaaggacaaagcggaggggcccctgcgggaggagttccggcatgaggctatgctgcgagcacggctgcaacaccccaacgtcgtctgcctgctgggcgtggtgaccaaggaccagcccctgagcatgatcttcagctactgttcgcacggcgacctccacgaattcctggtcatgcgctcgccgcactcggacgtgggcagcaccgatgatgaccgcacggtgaagtccgccctggagccccccgacttcgtgcaccttgtggcacagatcgcggcggggatggagtacctatccagccaccacgtggttcacaaggacctggccacccgcaatgtgctagtgtacgacaagctgaacgtgaagatctcagacttgggcctcttccgagaggtgtatgccgccgattactacaagctgctggggaactcgctgctgcctatccgctggatggccccagaggccatcatgtacggcaagttctccatcgactcagacatctggtcctacggtgtggtcctgtgggaggtcttcagctacggcctgcagccctactgcgggtactccaaccaggatgtggtggagatgatccggaaccggcaggtgctgccttgccccgatgactgtcccgcctgggtgtatgccctcatgatcgagtgctggaacgagttccccagccggcggccccgcttcaaggacatccacagccggctccgagcctggggcaacctttccaactacaacagctcggcgcagacctcgggggccagcaacaccacgcagaccagctccctgagcaccagcccagtgagcaatgttgtaaggatgcgaggcagcgggaggcagtgctggatgacggagacgccaaacgctttgttgtggcataatgtgtctggagttggttcctgccggtgggttcgtggtctcgctgacttcaaggatgaagccaccgactttcgcgttatgccacgggaccccagcctgcactgccatgtgacttcaaccgcatgacagaccctgggcccagagcactcagactcatgaacaaaatagattcagcattcccatatttgaaatgggaagaagtttcatgtccattctggcttcatgtggttggaagaggaagccccatgaatatttttatggatgccccagtgctgttgagtgcctatcaacaccaccacgagcttggccacttcacatcaacagcagatttaatttgggatctctaaacactatttgtggttgtgtagacagaaagaatttttctaataaaataaaaattaaatgtg

SEQ ID NO: 6757 - DNA, 3428 bp, Homo sapiens; identical to SEQ ID NO: 1344

SEQ ID NO: 6758 - DNA, 747 bp, Homo sapiens
cagaatttggtacttatgaagactgtttaatttgtaggtctctccaccaaatgaaaatgttgccattcacaaccctttcagaccttggtgggaaagataccaaccagttagctataaattatgcacaagatctggaaatgaagatgaatttagaaacatggtgactagatgcaacaatgttggggttcgtatttatgtggatgctgtaattaatcatatgtgtggtaatgctgtgagtgcaggaacaagcagtacctgtggaagttacttcaaccctggaagtagggactttccagcagtcccatattctggatgggattttaatgatggtaaatgtaaaactggaagtggagatatcgagaactataatgatgctactcaggtcagagattgtcgtctgtctggtcttctcgatcttgcactggggaaggattatgtgcgttctaagattgccgaatatatgaaccatctcattgacattggtgttgcagggttcagaattgatgcttccaagcacatgtggcctggagacataaaggcaattttggacaaactgcataatctaaacagtaactggttcccggaaggtagtaaacctttcatttaccaggaggtaattgatctgggtggtgagccaattaaaagcagtgactactttggtaatggccgggtgacagaattcaagtatggtgcaaaactcggcacagttattcgcaagtggaatggagagaagatgtcttacttaaa

SEQ ID NO: 6759 - DNA, 1081 bp, Homo sapiens
ctgacggacagacagacagacaccgcccccagccccagctaccacctcctccccggccggcggcggacagtggacgcggcggcgagccgcgggcaggggccggagcccgcgcccggaggcggggtggagggggtcggggctcgcggcgtcgcactgaaacttttcgtccaacttctgggctgttctcgcttcggaggagccgtggtccgcgcgggggaagccgagccgagcggagccgcgagaagtgctagctcgggccgggaggagccgcagccggaggagggggaggaggaagaagagaaggaagaggagagggggccgcagtggcgactcggcgctcggaagccgggctcatggacgggtgaggcggcggtgtgcgcagacagtgctccagccgcgcgcgctccccaggccctggcccgggcctcgggccggggaggaagagtagctcgccgaggcgccgaggagagcgggccgccccacagcccgagccggagagggagcgcgagccgcgccggccccggtcgggcctccgaaaccatgaactttctgctgtcttgggtgcattggagccttgccttgctgctctacctccaccatgccaagtggtcccaggctgcacccatggcagaaggaggagggcagaatcatcacgaagtggtgaagttcatggatgtctatcagcgcagctactgccatccaatcgagaccctggtggacatcttccaggagtaccctgatgagatcgagtacatcttcaagccatcctgtgtgcccctgatgcgatgcgggggctgctgcaatgacgagggcctggagtgtgtgcccactgaggagtccaacatcaccatgcagattatgcggatcaaacctcaccaaggccagcacataggagagatgagcttcctacagcacaacaaatgtgaatgcagaccaaagaaagatagagcaagacaagaaaatccctgtgggccttgctcagagcggagaaagcatttgtttgtacaagatccgcagacgtgtaaatgttcctgcaaaaacacagactcgcgttgcaagatgtgacaagccgaggcggtga

SEQ ID NO: 6760 - DNA, 561 bp, Homo sapiens
gggcagagcaacattgttttgacagtgaaaattaccaatttataattttttaagaaaagcatgcctagcacagaccacctgattaccaagaggaagctgaagaggagattctactagagatcacaatcaagtagaagacttagactttaaagaaggaaagataaatgcatgaaaaatgaggtttcttgagtacaggcgatcaggctgcaaaggggaactatggactccttgatctcatacaagctttaagatggactagtgaaaacattggattctttggtggtgaccccttaagaatcactgtttttggatctggtgctgggggttcatgtgtcaacctgctgactttatcccattattctgaaggactttttcaacgagcaatagctcaaagtggaacagccctttccagctgggctgttagttttcaacctgcaaaatatgctagaatgttggccacaaaagttggttgcaatgtttcagatacagtagagttagtggaatgcctacagaagaagccttacaaagaacttgttgaccaagatattcaaccagctcgat

SEQ ID NO: 6761 - DNA, 1677 bp, Homo sapiens
agacccccatccctgggctggaggacccgcctcttggcagccagctgagaaggcgccccggggagggggaaactgacatcccatctagagccgtccctcctcttcctcccctcccgactctctgctcctttcccgccccagaagttcaagggcccccggcctcctgcgctcctgccgccgggaccctcgacctcctcagagcagccggctgccgccccgggaagatggcgaggaggagccgccaccgcctcctcctgctgctgctgcgctacctggtggtcgccctgggctatcataaggcctatgggttttctgccccaaaagaccaacaagtagtcacagcagtagagtaccaaggtgattttaaaaatcgagctgagatgatagatttcaatatccggatcaaaaatgtgacaagaagtgatgcggggaaatatcgttgtgaagttagtgccccatctgagcaaggccaaaacctggaagaggatacagtcactctggaagtattagtggctccagcagttccatcatgtgaagtaccctcttctgctctgagtggaactgtggtagagctacgatgtcaagacaaagaagggaatccagctcctgaatacacatggtttaaggatggcatccgtttgctagaaaatcccagacttggctcccaaagcaccaacagctcatacacaatgaatacaaaaactggaactctgcaatttaatactgtttccaaactggacactggagaatattcctgtgaagcccgcaattctgttggatatcgcaggtgtcctgggaaacgaatgcaagtagatgatctcaacataagtggcatcatagcagccgtagtagttgtggccttagtgatttccgtttgtggccttggtgtatgctatgctcagaggaaaggctacttttcaaaagaaacctccttccagaagagtaattcttcatctaaagccacgacaatgagtgaaaatgatttcaagcacacaaaatcctttataatttaaagactccactttagagatacaccaaagccaccgttgttacacaagttattaaactattataaaactctgctttgtccgacatttgcaaagaggtacacgaggaaatggaattggtatttcattttaattttcatgactactaactcacctgaacttgctattttaaacaaatagttctgtcgacacctaaaatataatctggcttcttgtgtctggactaagttaaaagaattaaaatactttgtaatgtcctgggctttgggaaatgttaaccacgtcctaacttctagagaacgttactaaaatataacatactgattgtgaagtcaatccacaggtcatgaaaatataaatcagactctgcacgagagtctgatttagggggtccaacaaatactctgacagatgcaaaaggaacctctggtctcatttctgccagaatcctcttttctcccctaatatcatccttattctgatgctcgttcatcactaacacacccacagaaaggaggaagcgggatgggtcttatgcccaaggatttgcactttgtgtttacttccattcctgggaactaaaagcaacatcaaaagaaatgcctaatggctggagcccacaggtgtgcaccacaggatttgcctggtgtgtgtcactgatttcttcatt

SEQ ID NO: 6762 - DNA, 2477 bp, Homo sapiens
atggatttctcagtaaaggtagacatagagaaggaggtgacctgccccatctgcctggagctcctgacagaacctctgagcctagattgtggccacagcttctgccaagcctgcatcactgcaaagatcaaggagtcagtgatcatctcaagaggggaaagcagctgtcctgtgtgtcagaccagattccagcctgggaacctccgacctaatcggcatctggccaacatagttgagagagtcaaagaggtcaagatgagcccacaggaggggcagaagagagatgtctgtgagcaccatggaaaaaaactccagatcttctgtaaggaggatggaaaagtcatcttggacaatgaggagcagagagagctgcaaaagctggaggaaggtgaggtgaatgtgctggataacctggcagcagctacagaccagctggtccagcagaggcaggatgccagcacgctcatctcagatctccagcggaggttgaggggatcgtcagtagagatgctgcaggatgtgattgacgtcatgaaaaggagtgaaagctggacattgaagaagccaaaatctgtttccaagaaactaaagagtgtattccgagtaccagatctgagtgggatgctgcaagttcttaaagagctgacagatgtccagtactactgggtggacgtgatgctgaatccaggcagtgccacttcgaatgttgctatttctgtggatcagagacaagtgaaaactgtacgcacctgcacatttaagaattcaaatccatgtgatttttctgcttttggtgtcttcggctgccaatatttctcttcggggaaatattactgggaagtagatgtgtctggaaagattgcctggatcctgggcgtacacagtaaaataagtagtctgaataaaaggaagagctctgggtttgcttttgatccaagtgtaaattattcaaaagtttactccagatatagacctcaatatggctactgggttataggattacagaatacatgtgaatataatgcttttgaggactcctcctcttctgatcccaaggttttgactctctttatggctgtgcctccctgtcgtattggggttttcctagactatgaggcaggcattgtctcatttttcaatgtcacaaaccacggagcactcatctacaagttctctggatgtcgcttttctcgacctgcttatccgtatttcaatccttggaactgcctagtccccatgactgtgtgcccaccgagctcctgagtgttctcattcctttacccacttctgcatagtagcccttgtgctgagactcagattctgcacctgagttcatctctactgagaccatctcttcctttctttccccttcttttacttagaatgtctttgtattcatttgctagggcttccatagcaaagcatcatagattgctgatttaaactgtaattgtattgccgtactgtgggctggaaatcccaaatctagattccagcagagttggttctttctgaggtctgcaaggaagggctctgttccatgcctctctccttggcttgtagaaggcatcttgtccctatgactcttcacattgtctttatgtacatctctgtgcccaagttttccctttttattaagacaccagtcatactggctcagggcccaccgctaatgccttaatgaaatcattttaacattatattctctacaaagaccttatttccaaataagataatatttggaggtattgggaataaaaactccaacatataaatttgaggaaggcacgatttcactcataacaatcttaccctttcttgcaagagatgcttgtacattattttcctaataccttggtttcactagtagtaaacattattattttttttatatttgcaaaggaaacatatctaatccttcctatagaaagaacagtattgctgtaattccttttcttttcttcctcatttcctctgccccttaaaagattgaagaaagagaaacttgtcaactcatatccacgttatctagcaaagtacataagaatctatcactaagtaatgtatccttcagaatgtgttggtttaccagtgacaccccatattcatcacaaaattaaagcaagaagtccatagtaatttatttgctaatagtggatttttaatgctcagagtttctgaggtcaaattttatcttttcacttacaagctctatgatcttaaataatttacttaatgtattttggtgtattttcctcaaattaatattggtgttcaagactatatctaattcctctgatcactttgagaaacaaacttttattaaatgtaaggcacttttctatgaattttaaatataaaaataaatattgttctgattattactgaaaagatgtcagccatttcaatgtcttgggaaacaattttttgtttttgttctgttttctttttgcttcaataaaacaatagctggctct

SEQ ID NO: 6763 - DNA, 1215 bp, Homo sapiens; identical to SEQ ID NO: 880

SEQ ID NO: 6764 - DNA, 2706 bp, Homo sapiens; identical to SEQ ID NO: 346

SEQ ID NO: 6765 - DNA, 922 bp, Homo sapiens; identical to SEQ ID NO: 6503

SEQ ID NO: 6766 - DNA, 558 bp, Homo sapiens
agatggctcaggagtggagcttttgtggcagttagtttgcagaattactctcctatgatggcacagaaatcacaaggatctgacaaccttcaggaaggccaggaaaagagcaagagagagatcctgaagtgcaccaaaagcgcgtgggctccgctggatgagtggctgccccctgaccctgaggaggaaagccagagtctcaccatccccatgctggaagattccaagcaagaaagtattcagcagtggctggactctggattctttgtctctgcaaatgaaaactttcaacaagtcattgaccgcactgtttctttgtatgaacaagggatggttcaaatgactgtgaaagactacatgagatctttgcatcagttttcagaaactcccatcctatccagagggaccagtttcaactcttgctattctactgcaagtgtaccacaaagcattcctgaatggctggaattttgggagatagatccagtggagattctcttggatctggggtttggtgctgatgagccagacatctgcatgcaaatcccagccagattc

SEQ ID NO: 6767 - DNA, 1184 bp, Homo sapiens
cacagctagttttccctctaacgacttcttcaagatcaggggctatgtcttattcgtttttttatgtccccggggattagctagttcttgggaaacaactgggacttgggattcaaaacagtttgctaagtgaatgaatgagaggcccagtcaagctacttcccttcagtgctgcacagtgcaacaaataaccagctcagatacaggttcaaagaccacaggcttctccctggacagctcagctctcctcataactcctgagaaaccctggacatgccagggtgtactatggagtggttgcatccggaagagggggaggaagtcccaaacactaagtaatccaggtttgggttggaaaacaaggttgaagttactcattagcaggtgaaagggtcaagggtcgaacgcaagggagctgaaagcagagtggactgagcagccagtaggggagagagcagttaaggcacacagagcaccagctccctcctgcctgaagatgttccaccaaatttgggcagctctgctctacttctatggtattatccttaactccatctaccagtgccctgagcacagtcaactgacaactctgggcgtggatgggaaggagttcccagaggtccacttgggccagtggtactttatcgcaggggcagctcccaccaaggaggagttggcaacttttgaccctgtggacaacattgtcttcaatatggctgctggctctgccccgatgcagctccaccttcgtgctaccatccgcatgaaagatgggctctgtgtgccccggaaatggatctaccacctgactgaagggagcacagatctcagaactgaaggccgccctgacatgaagactgagctcttttccagctcatgcccaggtggaatcatgctgaatgagacaggccagggttaccagcgctttctcctctacaatcgctcaccacatcctcccgaaaagtgtgtggaggaattcaagtccctgacttcctgcctggactccaaagccttcttattgactcctaggaatcaagaggcctgtgagctgtccaataactgacctgtaacttcatctaagtccccagatgggtacaatgggagctgagttgttggagggagaagctggagacttccagctccagctcccactcaagataataaagataatttttcaatcctca

SEQ ID NO: 6768 - DNA, 571 bp, Homo sapiens
atcaaattgatgaacagtcattgttgcctgaatcgattattatcattgctgctacttcctggagcttaatgcgctttgcttttttggctctaacctctctcggctagacgagcttccccaactggtaacccttccacaccccaatcttcatggaccagagatcttggatgttccttccacagttcaaaagacccctttcgtcacccaccctgggtatgacactggaaatggtattcagcttcctggcacttctggtcagcaacccagtgttgggcaacaaatgatctttgaggaacatggttttaggcggaccacaccgcccacaacggccacccccataaggcataggccaagaccatacccgccgaatgtaggacaagaagctctctctcagacaaccatctcatgggccccattccaggacacttctgagtacatcatttcatgtcatcctgttggcactgatgaagaacccttacagttcagggttcctggaacttctaccagtgccactctgacaggcctcaccagaggtgccacctacaacgtcatagtggaggcactgaaagac

SEQ ID NO: 6769 - DNA, 1475 bp, Homo sapiens
ggcgatgctggaggttcgctagccgaagcggctgcatctggcgccgcgtctgccccgcgtgctcggagcggattctgcccgccgtccccggagccctcggcgccccgctgagcccgcgatcacttcctccctgtgaccaaccggcgctgcaggttagagcctggcaatgccgtttgggtgtgtgactctgggcgacaagaagaactataaccagccatcggaggtgactgacagatatgatttgggacaggtcatcaagactgaggagttttgtgaaatcttccgggccaaggacaagacgacaggcaagctgcacacctgcaagaagttccagaagcgggacggccgcaaggtgcggaaagctgccaagaacgagataggcatcctcaagatggtgaagcatcccaacatcctacagctggtggatgtgtttgtgacccgcaaggagtactttatcttcctggagctgaatctcaagctggagaacctggtttactacaaccggctgaagaactcgaagattgtcatcagtgacttccatctggctaagctagaaaatggcctcatcaaggagccctgtgggacccccgagtatctggccccagaggtggtaggccggcagcggtatggacgccctgtggactgctgggccattggagtcatcatgtacatcctgctttcaggcaatccacctttctatgaggaggtggaagaagatgattatgagaaccatgataagaatctcttccgcaagatcctggctggtgactatgagtttgactctccatattgggatgatatttcgcaggcagccaaagacctggtcacaaggctgatggaggtggagcaagaccagcggatcactgcagaagaggccatctcccatgagtggatttctggcaatgctgcttctgataagaacatcaaggatggtgtctgtgcccagattgaaaagaactttgccagggccaagtggaagaaggctgtccgagtgaccaccctcatgaaacggctccgggcaccagagcagtccagcacggctgcagcccagtcggcctcagccacagacactgccacccccggggctgcagaccgtagtgccaccccagccacagatggaagtgccaccccagccactgatggcagtgtcaccccagccaccgatggaagcatcactccagccactgatgggagtgtcaccccagccactgacaggagcgctactccagccactgatgggagagccacaccagccacagaagagagcactgtgcccaccacccaaagcagtgccatgctggccaccaaggcagctgccacccctgagccggctatggcccagccggacagcacagccccagagggcgccacaggccaggctccaccctctagtaaaggggaagaggctgctggttatgcccaggagtctcaaagggaggaggccagctgagtaggcagcctggtgagggggggca

SEQ ID NO: 6770 - DNA, 576 bp, Homo sapiens
gtatagacacgtgtggccgtttacgctgtaggatcctcattcccactggctttgaacattttggggacttacaatgccgccacccgcggacatcgtcaaggtggccatagaatggccgggcgcctaccccaaactcatggaaattgatcagaaaaaaccactgtctgcaataataaaggaagtctgtgatgggtggtctcttgccaaccatgaatattttgcactccagcatgccgatagttcaaacttctatatcacagaaaagaaccgcaatgagataaaaaatggcactatccttcgattaaccacatctccagctcagaacgcccagcagctccatgaacgaatccagtcctcgagtatggatgccaagctggaagccctgaaggacttggccagcctctcccgggatgtcacgtttgcccaggagtttataaacctggacggtatctctctcctcacgcagatggtggagagcggcactgactttggagacatgctgtccttcaccctgacggccttcgttgagctgatggaccatggcatagtgtcctgggatacattttcggtggcgtt

SEQ ID NO: 6771 - DNA, 2388 bp, Homo sapiens
cggacgcccgcgccggctgtgctgcacagggggaggagagggaaccccaggcgcgagcgggaagaggggacctgcagccacaacttctctggtcctctgcatcccttctgtccctccacccgtccccttccccaccctctggcccccaccttcttggaggcgacaacccccgggaggcattagaagggatttttcccgcaggttgcgaagggaagcaaacttggtggcaacttgcctcccggtgcgggcgtctctcccccaccgtctcaacatgcttaggggtccggggcccgggctgctgctgctggccgtccagtgcctggggacagcggtgccctccacgggagcctcgaagagcaagaggcaggctcagcaaatggttcagccccagtccccggtggctgtcagtcaaagcaagcccggttgttatgacaatggaaaacactatcagataaatcaacagtgggagcggacctacctaggcaatgcgttggtttgtacttgttatggaggaagccgaggttttaactgcgagagtaaacctgaagctgaagagacttgctttgacaagtacactgggaacacttaccgagtgggtgacacttatgagcgtcctaaagactccatgatctgggactgtacctgcatcggggctgggcgagggagaataagctgtaccatcgcaaaccgctgccatgaagggggtcagtcctacaagattggtgacacctggaggagaccacatgagactggtggttacatgttagagtgtgtgtgtcttggtaatggaaaaggagaatggacctgcaagcccatagctgagaagtgttttgatcatgctgctgggacttcctatgtggtcggagaaacgtgggagaagccctaccaaggctggatgatggtagattgtacttgcctgggagaaggcagcggacgcatcacttgcacttctagaaatagatgcaacgatcaggacacaaggacatcctatagaattggagacacctggagcaagaaggataatcgaggaaacctgctccagtgcatctgcacaggcaacggccgaggagagtggaagtgtgagaggcacacctctgtgcagaccacatcgagcggatctggccccttcaccgatgttcgtgcagctgtttaccaaccgcagcctcacccccagcctcctccctatggccactgtgtcacagacagtggtgtggtctactctgtggggatgcagtggctgaagacacaaggaaataagcaaatgctttgcacgtgcctgggcaacggagtcagctgccaagagacagctgtaacccagacttacggtggcaactcaaatggagagccatgtgtcttaccattcacctacaatggcaggacgttctactcctgcaccacagaagggcgacaggacggacatctttggtgcagcacaacttcgaattatgagcaggaccagaaatactctttctgcacagaccacactgttttggttcagactcgaggaggaaattccaatggtgccttgtgccacttccccttcctatacaacaaccacaattacactgattgcacttctgagggcagaagagacaacatgaagtggtgtgggaccacacagaactatgatgccgaccagaagtttgggttctgccccatggctgcccacgaggaaatctgcacaaccaatgaaggggtcatgtaccgcattggagatcagtgggataagcagcatgacatgggtcacatgatgaggtgcacgtgtgttgggaatggtcgtggggaatggacatgcattgcctactcgcagcttcgagatcagtgcattgttgatgacatcacttacaatgtgaacgacacattccacaagcgtcatgaagaggggcacatgctgaactgtacatgcttcggtcagggtcggggcaggtggaagtgtgatcccgtcgaccaatgccaggattcagagactgggacgttttatcaaattggagattcatgggagaagtatgtgcatggtgtcagataccagtgctactgctatggccgtggcattggggagtggcattgccaacctttacagacctatccaagctcaagtggtcctgtcgaagtatttatcactgagactccgagtcagcccaactcccaccccatccagtggaatgcaccacagccatctcacatttccaagtacattctcaggtggagacctgtgagtatcccacccagaaaccttggatactgagtctcctaatcttatcaattctgatggtttctttttttcccagcttttgagccaacaactctgattaactattcctatagcatttactatatttgtttagtgaacaaacaatatgtggtcaattaaattgacttgtagactga

SEQ ID NO: 6772 - DNA, 2427 bp, Homo sapiens
ataaaagcccaggggcaagcggtccggataacggctagcctgaggagctgctgcgacagtccactacctttttcgagagtgactcccgttgtcccaaggcttcccagagcgaacctgtgcggctgcaggcaccggcgcgtcgagtttccggcgtccggaaggaccgagctcttctcgcggatccagtgttccgtttccagcccccaatctcagagcggagccgacagagagcagggaaccggcatggccaaagccgcggcgatcggcatcgacctgggcaccacctactcctgcgtgggggtgttccaacacggcaaggtggagatcatcgccaacgaccagggcaaccgcaccacccccagctacgtggccttcacggacaccgagcggctcatcggggatgcggccaagaaccaggtggcgctgaacccgcagaacaccgtgtttgacgcgaagcggctgattggccgcaagttcggcgacccggtggtgcagtcggacatgaagcactggcctttccaggtgatcaacgacggagacaagcccaaggtgcaggtgagctacaagggggagaccaaggcattctaccccgaggagatctcgtccatggtgctgaccaagatgaaggagatcgccgaggcgtacctgggctacccggtgaccaacgcggtgatcaccgtgccggcctacttcaacgactcgcagcgccaggccaccaaggatgcgggtgtgatcgcggggctcaacgtgctgcggatcatcaacgagcccacggccgccgccatcgcctacggcctggacagaacgggcaagggggagcgcaacgtgctcatctttgacctgggcgggggcaccttcgacgtgtccatcctgacgatcgacgacggcatcttcgaggtgaaggccacggccggggacacccacctgggtggggaggactttgacaacaggctggtgaaccacttcgtggaggagttcaagagaaaacacaagaaggacatcagccagaacaagcgagccgtgaggcggctgcgcaccgcctgcgagagggccaagaggaccctgtcgtccagcacccaggccagcctggagatcgactccctgtttgagggcatcgacttctacacgtccatcaccagggcgaggttcgaggagctgtgctccgacctgttccgaagcaccctggagcccgtggagaaggctctgcgcgacgccaagctggacaaggcccagattcacgacctggtcctggtcgggggctccacccgcatccccaaggtgcagaagctgctgcaggacttcttcaacgggcgcgacctgaacaagagcatcaaccccgacgaggctgtggcctacggggcggcggtgcaggcggccatcctgatgggggacaagtccgagaacgtgcaggacctgctgctgctggacgtggctcccctgtcgctggggctggagacggccggaggcgtgatgactgccctgatcaagcgcaactccaccatccccaccaagcagacgcagatcttcaccacctactccgacaaccaacccggggtgctgatccaggtgtacgagggcgagagggccatgacgaaagacaacaatctgttggggcgcttcgagctgagcggcatccctccggcccccaggggcgtgccccagatcgaggtgaccttcgacatcgatgccaacggcatcctgaacgtcacggccacggacaagagcaccggcaaggccaacaagatcaccatcaccaacgacaagggccgcctgagcaaggaggagatcgagcgcatggtgcaggaggcggagaagtacaaagcggaggacgaggtgcagcgcgagagggtgtcagccaagaacgccctggagtcctacgccttcaacatgaagagcgccgtggaggatgaggggctcaagggcaagatcagcgaggcggacaagaagaaggtgctggacaagtgtcaagaggtcatctcgtggctggacgccaacaccttggccgagaaggacgagtttgagcacaagaggaaggagctggagcaggtgtgtaaccccatcatcagcggactgtaccagggtgccggtggtcccgggcctgggggcttcggggctcagggtcccaagggagggtctgggtcaggccccaccattgaggaggtagattaggggcctttccaagattgctgtttttgttttggagcttcaagactttgcatttcctagtatttctgtttgtcagttctcaatttcctgtgtttgcaatgttgaaattttttggtgaagtactgaacttgctttttttccggtttctacatgcagagatgaatttatactgccatcttacgactatttcttctttttaatacacttaactcaggccattttttaagttggttacttcaaagtaaataaactttaaaattc

SEQ ID NO: 6773 - DNA, 5560 bp, Homo sapiens; identical to SEQ ID NO: 3841

SEQ ID NO: 6774 - DNA, 555 bp, Homo sapiens
aatggggaggaggggtgtctgaggagcactccctctccctgggagctctgcagaggaagagggtctctggcaatcagcatcctctacctccacctctccagcgggcgacccctcagagaaggtctcccacgataagtgtttcggtgttcctgcgtgcggatttgtgctctccggggaggtctgcggcccagaagcccagtgcggcgccaggagccggacccgcgcccgcaccgctcccgggaccgcgaccccggccgcccagagatgaccgcgaccgaagccctcctgcgcgtcctcttgctcctgctggctttcggccacagcacctatggggctgaatgcttcccggcctgcaacccccaaaatggattctgcgaggatgacaatgtttgcaggtgccagcctggctggcagggtcccctttgtgaccagtgcgtgacctctcccggctgccttcacggactctgtggagaacccgggcagtgcatttgcaccgacggctgggacggggagctctgtgatagagatgttcgggcctgctcctcggccccctgt

SEQ ID NO: 6775 - DNA, 3161 bp, Homo sapiens
gggtcgtcgcggccgccgaaccggggggcggggggccggggtgagcgctaagatggccgccccggctcgggctgttttcagatgcttcaagtgttgtgaacagagacttgtttggattatgcatttctcagctagactaaataaatgctagcaatggatacgtgcaaacatgttgggcagctgcagcttgctcaagaccattccagcctcaaccctcagaaatggcactgtgtggactgcaacacgaccgagtccatttgggcttgccttagctgctcccatgttgcctgtggaagatatattgaagagcatgcactcaagcactttcaagaaagcagtcatcctgttgcattggaggtgaatgagatgtacgttttttgttacctttgtgatgattatgttctgaatgataacacaactggagacctgaagttactacgacgtacattaagtgccatcaaaagtcaaaattatcactgcacaactcgtagtgggaggtttttacggtccatgggtacaggtgatgattcttatttcttacatgacggtgcccaatctctgcttcaaagtgaagatcaactgtatactgctctttggcacaggagaaggatactaatgggtaaaatctttcgaacatggtttgaacaatcacccattggaagaaaaaagcaagaagaaccatttcaggaaaaaatagtagtaaaaagagaagtaaagaaaagacggcaggaattggagtatcaagttaaagcagaattggaaagtatgcctccaagaaagagtttacgtttacaagggctcgctcagtcgaccataatagaaatagtttctgttcaggtgccagcacaaacgccagcatcaccagcaaaagataaagtactctctacctcagaaaatgaaatatctcaaaaagtcagtgactcctcagttaaacgaaggccaatagtaactcctggtgtaacaggattgagaaatttgggaaatacttgctatatgaattctgttcttcaggtgttgagtcatttacttatttttcgacaatgttttttaaagcttgatctgaaccaatggctggctatgactgctagcgagaagacaagatcttgtaagcatccaccagtcacagatacagtagtatatcaaatgaatgaatgtcaggaaaaagatacaggttttgtttgctccagacaatcaagtctgtcatcaggactaagtggtggagcatcaaaaggtagaaagatggaacttattcagccaaaggagccaacttcacagtacatttctctttgtcatgaattgcatactttgttccaagtcatgtggtctggaaagtgggcgttggtctcaccatttgctatgctacactcagtgtggagactcattcctgcctttcgtggttacgcccaacaagacgctcaggaatttctttgtgaacttttagataaaatacaacgtgaattagagacaactggtaccagtttaccagctcttatccccacttctcaaaggaaactcatcaaacaagttctgaatgttgtaaataacatttttcatggacaacttcttagtcaggttacatgtcttgcatgtgacaacaaatcaaataccatagaacctttctgggacttgtcattggagtttccagaaaggtatcaatgcagtggaaaagatattgcttcccagccatgtctggttactgaaatgttggccaaatttacagaaactgaagctttagaaggaaaaatctacgtatgtgaccagtgtaactcaaagcgtagaaggttttcctccaaaccagttgtactcacagaagcccagaaacaacttatgatatgccacctacctcaggttctcagactgcacctcaaacgattcaggtggtcaggacgtaataaccgagagaagattggtgttcatgttggctttgaggaaatcttaaacatggagccctattgctgcagggagaccctgaaatccctcagaccagaatgctttatctatgacttgtccgcggtggtgatgcaccatgggaaaggatttggctcagggcactacactgcctactgctataattctgaaggagggttctgggtacactgcaatgattccaaactaagcatgtgcactatggatgaagtatgcaaggctcaagcttatatcttgttttatacccaacgagttactgagaatggacattctaaacttttgcctccagagctcctgttggggagccaacatcccaatgaagacgctgatacctcgtctaatgaaatccttagctgatccaaagacaatggggttttcttcctgtgatttatatatatactttttaaaagactgatgtaccattttaaacttcattttttcttgtgaatcagtgtatactacatttatacattttatatctaacaatttttttttttacaaagtataaatgtatatatcaactgaaggtaactacttttttcatatttggagttttaaacttttggtgtttacctcagactgatgttacctcttttatatttttatgtcttaattggctcggatgatgaacttgtgcaatcttctaccaacaaagttcaagtggcatcattttatatacatgtatctttttcaggtattttctatacaaattcttaatagatggaaaattagactctactttggtcactaatagtctttcatttgtatattgaagttaccttgccccttggagttattgaagtgacatgtcaaggtatcacctaaatattcttcagtcacactcactggtatttctgaggctttgtgtgttaacaggccttgtaattgacattattttggttaatgtaaccccaaaattgctttagtaattgctctttggcatagtcaaactataaatgaaaatggcagctttacaaatagtatatttaagtgaactctggaactatggacatgaaaaaaatgatggctgggatttatgatttttgtctggcagcaaacaggtttgtccagaagtctaataattaagcagtcataaaaagtctgaatttagtaaaccagtgtatgatgttattcaaatagtttaccttgggtatgagttcattttataatgtctgatgacattagatctcttaaaactttatgtattttttttagttcaaaggaatagagtcttg

SEQ ID NO: 6776 - DNA, 1893 bp, Homo sapiens
aactcgctgtagtaattccagcgagaggcagagggagcgagcgggcggccggctagggtggaagagccgggcgagcagagctgcgctgcgggcgtcctgggaagggagatccggagcgaatagggggcttcgcctctggcccagccctcccgctgatcccccagccagcggtccgcaacccttgccgcatccacgaaactttgcccatagcagcgggcgggcactttgcactggaacttacaacacccgagcaaggacgcgactctcccgacgcggggaggctattctgcccatttggggacacttccccgccgctgccaggacccgcttctctgaaaggctctccttgcagctgcttagacgctggatttttttcgggtagtggaaaaccagcagcctcccgcgacgatgcccctcaacgttagcttcaccaacaggaactatgacctcgactacgactcggtgcagccgtatttctactgcgacgaggaggatatctggaagaaattcgagctgctgcccaccccgcccctgtcccctagccgccgctccgggctctgctcgccctcctacgttgcggtcacacccttctcccttcggggagacaacgacggcggtggcgggagcttctccacggccgaccagctggagatggtgaccgagctgctgggaggagacatggtgaaccagagtttcatctgcgacccggacgacgagaccttcatcaaaaacatcatcatccaggactgtatgtggagcggcttctcggccgccgccaagctcgtctcagagaagctggcctcctaccaggctgcgcgcaaagacagcggcagcccgaaccccgcccgcggccacagcgtctgctccacctccagcttgtacctgcaggatctgagcgccgccgcctcagagtgcatcgacccctcggtggtcttcccctaccctctcaacgacagcagctcgcccaagtcctgcgcctcgcaagactccagcgccttctctccgtcctcggattctctgctctcctcgacggagtcctccccgcagggcagccccgagcccctggtgctccatgaggagacaccgcccaccaccagcagcgactctgaggaggaacaagaagatgaggaagaaatcgatgttgtttctgtggaaaagaggcaggctcctggcaaaaggtcagagtctggatcaccttctgctggaggccacagcaaacctcctcacagcccactggtcctcaagaggtgccacgtctccacacatcagcacaactacgcagcgcctccctccactcggaaggactatcctgctgccaagagggtcaagttggacagtgtcagagtcctgagacagatcagcaacaaccgaaaatgcaccagccccaggtcctcggacaccgaggagaatgtcaagaggcgaacacacaacgtcttggagcgccagaggaggaacgagctaaaacggagcttttttgccctgcgtgaccagatcccggagttggaaaacaatgaaaaggcccccaaggtagttatccttaaaaaagccacagcatacatcctgtccgtccaagcagaggagcaaaagctcatttctgaagaggacttgttgcggaaacgacgagaacagttgaaacacaaacttgaacagctacggaactcttgtgcgtaaggaaaagtaaggaaaacgattccttctaacagaaatgtcctgagcaatcacctatgaacttgtttcaaatgcatgatcaaatgcaacctcacaaccttggctgagtcttgagactgaaagatttagccataatgtaaactgcctcaaattggactttgggcataaaagaacttttttatgcttaccatcttttttttttctttaacagatttgtatttaaga

SEQ ID NO: 6777 - DNA, 562 bp, Homo sapiens
aatctgcagcagagatttacccgagcgtgttgcggcagcggctgggcttgcaaggcgcgatccaagagggatttaagcagcccagagctccagagaaaaagagagcgagagagaaccacacacagagacggcttaagcgtttacccgaattaaatatatatttttaaaaagaactgttgagttttatcattttcgttaagtgaccgtgcgcagcgctgtaactgacttactggattatttccaggcaggatggggaagcagaatagcaaactggcccctgaagtgatggaggacctggtgaagagcacagagtttaatgagcatgaactcaagcagtggtacaaaggatttctcaaggactgtccaagtgggaggctaaatctcgaggaatttcagcagctctatgtgaagttctttccttatggagacgcctccaagtttgcccagcatgccttccgaaccttcgacaagaatggggacggcaccattgacttccgagagttcatctgcgctctgtccatcacctccaggggcagctttgagcagaagctgaactgggcct

SEQ ID NO: 6778 - DNA, 3050 bp, Homo sapiens
attggctgaggccgataccacgcgccccgatacccggcgcaggagccacctccctgagccccgcggaccacgcctcagtccgcctgcgctcctcagcctgacggtccgcctttcggggctcctcagccttgtcacccgctcttggttttccttttctcttcatctttggctcctttgaccactcgaagccgcgcagcgggttccagcggacctcacagcagccccagaagtggtgcgccaagcacagcctctgctcctcctggagccggtcgggaactgctgcctgccgccatcatgtctactgcaaatcctgaaactccaaactcaaccatctccagagaggccagcacccagtcctcatcagctgcaaccagccaaggctatattttaccagaaggcaaaatcatgccaaacactgtttttgttggaggaattgatgttaggatggatgaaactgagattagaagcttctttgctagatatggttcagtgaaagaagtgaagataatcactgatcgaactggtgtgtccaaaggctatggatttgtttcattttttaatgacgtggatgtgcagaagatagtagaatcacagataaatttccatggtaaaaagctgaagctgggccctgcaatcaggaaacaaaatttatgtgcttatcatgtgcagccacgtcctttggtttttaatcatcctcctccaccacagtttcagaatgtctggactaatccaaacactgaaacttatatgcagcccacaaccacgatgaatcctataactcagtatgttcaggcatatcctacttacccaaattcaccagttcaggtcatcactggatatcagttgcctgtatataattatcagatgccaccacagtggcctgttggggagcaaaggagctatgttgtacctccggcttattcagctgttaactaccactgtaatgaagttgatccaggagctgaagttgtgccaaatgaatgttcagttcatgaagctactccaccctctggaaatggcccacaaaagaaatctgtggaccgaagcatacaaacggtggtatcttgtctgtttaatccagagaacagactgagaaactctgttgttactcaagatgactacttcaaggataaaagagtgcatcactttagaagaagtcgggcaatgcttaaatctgtttgatcctcctggcttatctagttacatgggaagttgctggttttgaatattaagctaaaaggtttccactattatagaaattctgaattttggtaaatcacactcaaactttgtgtataagttgtattattagactctctagttttatcttaaactgttcttcattagatgtttatttagaaactggttctgtgttgaaatatagttgaaagtaaaaaaataattgagactgaaagaaactaagatttatctgcaaggattttttaaaaattggcattttaagtgtttaaaagcaaatactgattttcaaaaaaatgtttttaaaaacctattttgaaaggtcagaattttgttggtctgaatacaaacatttcacttctccaacaagtacctgtgaacagtacagtatttacagtattgagctttgcatttatgatttctccagaaatttaccacaaaagcaaaatttttaaaactgcatttttaatcagtggaactcaatatatagttagctttattgaagtcttcttatctaaacccagcaaaacagattcaaagcgaacagtccaatcagtgggtcatatgtttattcaaaatattttatcttttagctagaatccacacatatatatcctatttgattagggtagtaattaggataactaaaattctgggcctaattttttaaagaatccaagacaaactaaactttactaggtacataagcttctcaatgagtcaccattcttcttttttgtaaaaacttttttctttgaaatgctaaacttggctgtatgtcaaattgtgcaaaatattggtattaaagaatgctgcaacttttttatgtctcttagaggttaatcagagtatctgaagggaattgtttttataaaaacattgaaatattagttacttgctataaatagatttagtctgttatatttccttttgtaaagtaaaatatgtccagaagagtcaaagtagttagttttggttatttctaaaccacaaaagttgtttaataagtatatcttaagaatgtgctagagttaaaagttagcattgtttctagattagctggtgtcttcattttacattgtgacaaacagctagagcatcagagcccttttgctataccacagtctttcgtttccagcctttgtcactagtctttgaggaggtttgctcctagaactggtgatataaagaatgaaagtagctgtatgagcagagcagttcaagggccaaaccctggaacggtagcaatgggatataatacctttctaagggaaaaagttgtatcagtaccatttgatctgccatggacatgagtttaaagcggctttctggcccttctttcagtgacttcttccctaaaatgtagaaattctaacttaatgtagttactgtgagccatattactagtgccccctagggtctataattccttaaaattttcattctgaatctgaaggagagagtcttttaactttagaattcccaagagggctttattacacctcagaaattgaaagcactatgaatttgtccatttaaaaatgatctgtagtttttttggtgctataacattctgacacatatcattctgtgattaaatctccagcttactataaatgatatctatattctaaagagctacttctaattattccaatatgaccttaaggaaaagtaagggaataaatttttgtctttgttggagtgaagcatttaaaagagtaagggtaaaaaagataaagtcctgaacctttcaaaatggaaaattaattctaaacttagaaatatgcttctgcctattgctgatactgtctttgcatacatgaataaaaataaagtttttttcttcaaaa

SEQ ID NO: 6779 - DNA, 1459 bp, Homo sapiens; identical to SEQ ID NO: 763

SEQ ID NO: 6780 - DNA, 3078 bp, Homo sapiens
ctgagctgcctggcgccgtcttgatactttcagaaagaatgcattccctgtaaaaaaaaaaaaaaaatactgagagagggagagagagagagaagaagagagagagacggagggagagcgagacagagcgagcaacgcaatctgaccgagcaggtcgtacgccgccgcctcctcctcctctctgctcttcgctacccaggtgacccgaggagggactccgcctccgagcggctgaggaccccggtgcagaggagcctggctcgcagaattgcagagtcgtcgcccctttttacaacctggtcccgttttattctgccgtacccagtttttggatttttgtcttccccttcttctctttgctaaacgacccctccaagataatttttaaaaaaccttctcctttgctcacctttgcttcccagccttcccatccccccaccgaaagcaaatcattcaacgacccccgaccctccgacggcaggagccccccgacctcccaggcggaccgccctccctccccgcgcgcgggttccgggcccggcgagagggcgcgagcacagccgaggccatggaggtgacggcggaccagccgcgctgggtgagccaccaccaccccgccgtgctcaacgggcagcacccggacacgcaccacccgggcctcagccactcctacatggacgcggcgcagtacccgctgccggaggaggtggatgtgctttttaacatcgacggtcaaggcaaccacgtcccgccctactacggaaactcggtcagggccacggtgcagaggtaccctccgacccaccacgggagccaggtgtgccgcccgcctctgcttcatggatccctaccctggctggacggcggcaaagccctgggcagccaccacaccgcctccccctggaatctcagccccttctccaagacgtccatccaccacggctccccggggcccctctccgtctaccccccggcctcgtcctcctccttgtcggggggccacgccagcccgcacctcttcaccttcccgcccaccccgccgaaggacgtctccccggacccatcgctgtccaccccaggctcggccggctcggcccggcaggacgagaaagagtgcctcaagtaccaggtgcccctgcccgacagcatgaagctggagtcgtcccactcccgtggcagcatgaccgccctgggtggagcctcctcgtcgacccaccaccccatcaccacctacccgccctacgtgcccgagtacagctccggactcttcccccccagcagcctgctgggcggctcccccaccggcttcggatgcaagtccaggcccaaggcccggtccagcacagaaggcagggagtgtgtgaactgtggggcaacctcgaccccactgtggcggcgagatggcacgggacactacctgtgcaacgcctgcgggctctatcacaaaatgaacggacagaaccggcccctcattaagcccaagcgaaggctgtctgcagccaggagagcagggacgtcctgtgcgaactgtcagaccaccacaaccacactctggaggaggaatgccaatggggaccctgtctgcaatgcctgtgggctctactacaagcttcacaatattaacagacccctgactatgaagaaggaaggcatccagaccagaaaccgaaaaatgtctagcaaatccaaaaagtgcaaaaaagtgcatgactcactggaggacttccccaagaacagctcgtttaacccggccgccctctccagacacatgtcctccctgagccacatctcgcccttcagccactccagccacatgctgaccacgcccacgccgatgcacccgccatccagcctgtcctttggaccacaccacccctccagcatggtcaccgccatgggttagagccctgctcgatgctcacagggcccccagcgagagtccctgcagtccctttcgacttgcatttttgcaggagcagtatcatgaagcctaaacgcgatggatatatgtttttgaaggcagaaagcaaaattatgtttgccactttgcaaaggagctcactgtggtgtctgtgttccaaccactgaatctggaccccatctgtgaataagccattctgactcatatcccctatttaacagggtctctagtgctgtgaaaaaaaaaatgctgaacattgcatataacttatattgtaagaaatactgtacaatgactttattgcatctgggtagctgtaaggcatgaaggatgccaagaagtttaaggaatatgggagaaatagtgtggaaattaagaagaaactaggtctgatattcaaatggacaaactgccagttttgtttcctttcactggccacagttgtttgatgcattaaaagaaaataaaaaaaagaaaaaagagaaaagaaaaaaaaagaaaaaagttgtaggcgaatcatttgttcaaagctgttggcctctgcaaaggaaataccagttctgggcaatcagtgttaccgttcaccagttgccgttgagggtttcagagagcctttttctaggcctacatgctttgtgaacaagtccctgtaattgttgtttgtatgtataattcaaagcaccaaaataagaaaagatgtagatttatttcatcatattatacagaccgaactgttgtataaatttatttactgctagtcttaagaactgctttctttcgtttgtttgtttcaatattttccttctctctcaatttttggttgaataaactagattacattcagttggcctaaggtggttgtgctcggagggtttcttgtttcttttccattttgtttttggatgatatttattaaatagcttctaagagtccggcggcatctgtcttgtccctattcctgcagcctgtgctgagggtagcagtgtatgagctaccagcgtgcatgtcagcgaccctggcccgacaggccacgtcctgcaatcggcccggctgcctcttcgccctgtcgtgttctgtgttagtgatcactgcctttaatacagtctgttggaataatattataagcataataataaagtgaaaatattttaaaacta

SEQ ID NO: 6781 - DNA, 1989 bp, Homo sapiens
attctgaggtactggcggttaggacttcgacacagaaattttgggaggacacaattcagcccataacagagcccatgctggaagacagtccctgaaacactgagtggacatcatggataatactcttttgatggatggcttctctatctgctcctgaaatatcagtgttccttaggaacccatctgtggcctataacctgtctcaccctacaacacccctgggctataaattcaacaactttctatataaaggtgcccattatttttggcttcacttttacaacatcctccaggctggacccctttcaattcactccaagagaactttgaagatcctggcacttacagtctatctgctgcttaaagtctgcagtgactctccattgcctacagggtttttgttctttaagctacgactcctcagcctgacctttgaagacttgttctcaagtgcctgcctccctgtccagcctcatttgcctcagtctgtaaaatccatgaggacagggcccaggtgtgtttcagctcacacgcctcacatggtggactcggaactgccccctctctgagctggagaaggaggcccacgagagcacaccggagatatccgagaggccagccggggagtgccctgcaggaggtggagcggcagagaactcgagcctgggccaggagcagcctgaagccccaagcaggtcctggggaaagttgctctggagctggttctgtgggctctctggaacaccggagcaggccctgagcccagcagagaaggctgcgctagaacagaagctgacaagcattgaggaggagccactctggagacatgtctgcaacatcaatgctgtccttttgctggccatcaacatcttcctctggggctattttgcgtgattccacagacctggcttcagtgtagacagattaaacaaagcccaagcctgtcagccacagaaacaggctctcctcttactttgctgtctaaactggagatcacagaagtcaagactgcaagctcccctgaagagaatccaactcaacctgcacacttgacaagtggagaaacagaagcccagagagagcactgggtttgttcaggaccacccagaaggtgtcacacggggtttccccactctttctgatatattgccttacagacctacctcaaacacactgtttccaccctcttcttgaatgtattcagtagcctttactgaatgtgtgtcttgagagtagaaaaatggaggatacaagaaaaggagcaggaagaaatttgcaaaaatccaagagcacctttgctcccccttatcctccttcctcttcccctttctagttcccctacctctctatctttctattctcaccaataatctctttgttgcatgaatttacccaggagagtcctatatttccattggtggctccacagtggtggctgtcagacccgaaggggtggggagccaagggtggactttaagcatggtgacagatggtattttgggcagaaagctcttagacaatggactatccaaagcactatttaaattctgcctcttcctactctctaacccaaatatgcacaaactctctatggccttgagaagcagttggagagacatgacttgttaaaacctcaaggaatcaagacatgttactctgtatttaagggtaagccccacagcgggcagcacaaacagcctgggagccactgtgcctgtgcttctctgtccttctccctttgcttgccatgaatccgcataccttggaatacactgtgaccccagttaagtgtcccttcgccaggaagctgccgcaacgtccagacctgggtcaagttcccactcctgctcccatagccttgacctgcttctgtcacagcactgatcacactgagatggaagactccagggggcaaggaccaagggccatatcccaagtgactttgtacccagaaaataacagctgttcaataaatgtgtattgagttaa

SEQ ID NO: 6782 - DNA, 1115 bp, Homo sapiens
ataggctcagacacaaggagaggcttggagagagcagacgccttctggattcaagaagacgaggctcacctgttactcggcctcccagaaagatggataggagaaatgactacggatatagggtgcctctatttcagtccaagcatctgaatggggatgagagaagtggcagtaattacaggcggatcccatggggccggaggcctgcaccaccgcgagatgtggccattttacaagaaagggctaataagttggtgaaatacctgttggttaaggaccagacaaagatccccatcaaacgctcagacatgctgagggatgtcatccaagaatatgatgaatatttcccagaaatcattgaacgagcaagctacactctggagaagatgtttcgagtcaatctgaaagaaattgataagcaaagtagcttgtatattctcatcagcactcaggaatcctctgcaggcatactgggaacgaccaaggacacacccaagctgggtctcctcatggtgattctgagtgtcatttttatgaatggcaacaaggccagtgaggctgtcatctgggaggtgctgcgcaagttggggctgcgccctggggtgaggcattcactctttggggaagtgaggaagctcatcacagacgagtttgtgaagcagaagtacctggagtacaagagggtccctaacagcagaccacctgaatatgagttcttctggggcttgcgctcctaccacgagactagcaagatgaaagtcctcaagtttgcatgcagggtgcagaagaaagaccccaaggactgggctgtgcagtaccgcgaggcagtggagatggaagtccaagctgcagctgtggctgtggctgaggctgaagccagggctgagatttattccccatgtttacagataccgctaataaattgcagtagtccttcccatggagccaaagtacatccttggaatctttgtccacacagcagtcaaggcagttatggccaatcagctgagggtgtcatgtgatggaaaaatctgtttgctgttcctgctttattgtttgctttctgtgtgctgtcatattttggtatcagagttacattaaatttgcaaaatgaa

SEQ ID NO: 6783 - DNA, 2398 bp, Homo sapiens
gagacggctgcagaccatggggcagggagcatatggagcacggatatgccagacagagggatgattcatatcccaggcaggatggagcagggcagtgtgctatttcatcgtgctactcagaacttatgaattgtttatttctggaatttcccatttaatatttttggactgtggttgatcgagggtaaatgaaattgcagaaagcaaaaatacagataagggggactgcttgctgtacaaagatagagacaagaggaaggagctgtcctcaagggccttttgtgtgaagacatctggcacacagatacgctgcatgcaggtggcttgagagaacatgcatccaggtttaattgtggaactggggttgccatcatcgtaagtgagaccaaaatcaaactagggggttggcacacggttatgctctacagagatgggctgaacgggctgctgcagctgaacaatggcaccccagtgacaggccagtctcaggggaatgcagcagtggaatctgtgatgaggcctcgtgcatccatggtggcacctgcacagcaatcaaagccgactcctacatttgcctctgtccccttgggtttaaaggtcgacactgtgaagatgctttcaccttgaccattcctcagttcagagagtctctgagatcttacgctgcaactccctggccactggagccccagcattacctttccttcatggaatttgagatcacatttcggccagactcaggagatggtgtcctcctgtacagctatgacacaggcagcaaagacttcctgtccatcaacttggcagggggccacgtggagttccgctttgactgtggctctgggaccggtgtcctcaggagtgaagatcccctcaccctgggcaactggcacgagcttcgtgtatctcgcacagcaaagaatggaatcttacaggtggataagcagaagatagtggagggaatggcagagggaggcttcacacagattaagtgcaacacagacattttcattggcggagtccccaattatgatgatgtgaagaagaactcgggtgtcctgaagcctttcagcgggagcatccagaagatcatcctgaatgaccgaaccatccatgtgaagcatgacttcacctccggagtgaatgtggagaatgcggcccacccctgtgtgagagccccttgtgcccatgggggcagctgccggcccaggaaggagggctatgactgtgactgccccttgggctttgaggggcttcactgccagaaagcgatcatagaagccattgagatcccgcagtttatcggccgcagttacctgacgtatgacaacccagatatcttgaagagggtgtcaggatcaagatcaaatgtgttcatgaggtttaaaacaactgccaaggatggccttttgctgtggaggggagacagccccatgagacccaacagcgacttcatttccttgggccttcgggatggagccctcgtgttcagctataacctgggcagtggtgtggcatccatcatggtgaatggctccttcaacgatggtcggtggcaccgagttaaggccgttagggatggccagtcaggaaagataaccgtggatgactatggagccagaacaggcaaatccccaggcatgatgcggcagcttaacatcaatggagctctgtatgtgggtggaatgaaggaaattgctctgcacactaacaggcaatatatgagagggctcgtgggctgtatctctcacttcaccctgtccaccgattaccacatttccctcgtggaagatgccgtggatgggaaaaacatcaacacttgtggagccaagtaacaccagctggccttgtccaagggacagagccttctattctgagaatcccaggggccctcagaccctgcctgatgctatatgcagaggcccagggaccaggtgtgtttcctctcaccaagaagaaagtacacactgatgagaaactgagaaccaagacaggcatccctgggtggcctttcctgctgacactccacgagctgacccagcagaattctctgtgtaggaagcatcggactttgtccattgaatatgtagcggctgccagagatcacacatcaatgcaaattccagagcctgtctgctatagctcagtgactgtgttgtgattcatagtacattaaaaagagagagagagagaaagaatcccacagggcactattaaaatacttctctccttccctgactcatgacactcttcctgacagcagaatgactgtgtgaccttgaacttcacatttcccacattggcccttggattgttcggattaaccccttccactcctcactggctggttcactgtgttctgactagtccataaaaataaagatggaaggagatcaaa

SEQ ID NO: 6784 - DNA, 3129 bp, Homo sapiens
tcgagcggggtccagagggtggaaccggtgaatttttcaacttccaagttttgcaacgaaagaaagcaagagagggagggaaaaaaaagagcctagagcagaaaagagaggagtttggagccgagcgggagagcgggatttatcgtttggaatttttcaggagatcgttttgatacccctgggctctgggcagcggcggcaacagcagcctccacgctcggccgggtcagacgcggggcgaggcgggcgggcgggcggccgggcgccgaagacccggcgcgggcggcggcggctgctgctgccggggaccacgcgccgcgagcctcttccgccccagagatcagcgctcgcgccccctccctcaccccggcctctcccttctcccccatcccaccccgcccccaccccggccctctcccgcgcgcgccccgccacccgcgcgcactcgctcacgctgcccctcgcgcacacacatggtcggctcgcggcaaagtttcgcctgcgatcaccactccgggatcctgccgcagtgcttggggctgtaaccttgaactttcccagcgcggtgacacattctccccgctctccctcccgcccgcccgctcgccctcctgcgccctcccgcgcccccctccccgccttttttgaaaaagcattttaccaccaaccaccaccccaatccaacccacaccgaaccttcgcgcaccccctacaccccaacaacaacaacaactgcaaaatagaaaacaaatccccaaacccaggcgaaaagcagccaacaccggcggcggcggcggcctcggcaagcacggccagcgcgctcggactgcaagagggttaaaagtgtagattggatttcacccctggaaatctagcacgccgagtgaacttgaatctttggctatttaaggaggactgggtttgttgtgaagttgcggtgatccagcgcagagccccgtcctgattgatcgcatcgcggggctcagatgactgtaaaatgaatagatgaaattcttgcttctcgaagattttcttgggcatctcccggaaagtgcgttttaaggcgaagtcatgatgtattctcccatctgtctcactcaggatgaatttcacccattcatcgaggcacttcttccacatgtccgtgcaattgcctatacttggttcaacctgcaggctcgaaaacgcaagtactttaaaaagcatgagaagcgaatgtcaaaggatgaagaaagagcagtcaaagatgagcttctcagtgaaaagcctgaaatcaaacagaagtgggcatccaggctccttgccaaactgcgcaaagatattcgccaggagtatcgagaggactttgtgctcaccgtgactggcaagaagcacccgtgctgtgtcttatccaatcccgaccagaagggtaagattaggagaatcgactgcctgcgacaggcagacaaagtctggcgtctggatctagtcatggtgatcctgttcaaaggcatccccttggaaagtaccgatggagagcggctcatgaaatccccacattgcacaaacccagcactttgtgtccagccacatcatatcacagtatcagttaaggagcttgatttgtttttggcatactacgtgcaggagcaagattctggacaatcaggaagtccaagccacaatgatcctgccaagaatcctccaggttaccttgaggatagttttgtaaaatctggagtcttcaatgtatcagaacttgtaagagtatccagaacgcccataacccagggaactggagtcaacttcccaattggagaaatcccaagccaaccatactatcatgacatgaactcgggggtcaatcttcagaggtctctgtcttctccaccaagcagcaaaagacccaaaactatatccatagatgaaaatatggaaccaagtcctacaggagacttttacccctctccaagttcaccagctgctggaagtcgaacatggcacgaaagagatcaagatatgtcttctccgactactatgaagaagcctgaaaagccattgttcagctctgcatctccacaggattcttccccaagactgagcactttcccccagcaccaccatcccggaatacctggagttgcacacagtgtcatctcaactcgaactccacctccaccttcaccgttgccatttccaacacaagctatccttcctccagccccatcgagctacttttctcatccaacaatcagatatcctccccacctgaatcctcaggatactctgaagaactatgtaccttcttatgacccatccagtccacaaaccagccagctgaggatttgtgactggaccatgaatcaaaacggcaggcatttataccccagtaccagtgaggatacattgggaattacttggcaaagtcctggtacctgggctagcttggttcctttccaagtgtcaaataggacacccatcttaccggccaatgtccaaaattacggtttgaacataattggagaacctttccttcaagcagaaacaagcaactgagggaaaaagaaacacaacaatagtttaagaaattttttttttaaataaaaaaaaaggaaaagaggaagactggacaaaacaacacaaaggcagaaaggaaagaaactgaagaaagaagataatagaccagcaattgcagcacttacaatcactaattcccttaaggttgaaactgtaatgacataaaaagggtcgatgatatttcactgatggtagatcgcagcccctgcaacgtagcctttgttacatgaagtccgctgggaaatagatgttctgtctctatgacaatatattttaactgactttctagatgccttaatatttgcatgataagctagttttattggtttagtattcttgttgtttacgcatggaatcactattcctggttatctcaccaacgaaggctaggaggcggcgtcagaggtgctgggtgacagagccatgagccagccattttataagcactctgatttctaaaagttaaaaaaaatatatgaaatctctgtagcctttagttatcagtacagatttattaaatttcggcccttaacccagccttttccagtgtgtaacccagtttgaaatcttaaa

SEQ ID NO: 6785 - DNA, 434 bp, Homo sapiens
aggcctcatccctgctctgccatttatctcgggagagcatggtgcctctcccagcctgtttccttctctgtaaatggatgccttacctccaggggtcactggggcggtccaaggagcttgggacacatcaggtactttaataaaagagagcgtgggccagcccgaggaggcaagcccggaggagcagccagaggaggcgagtgctgaggaggagcggccggaggaccagcaggaggaggaggcggcggccgccgccgcgtacctggacgagctgcccgagccgctgctgctgcgcgtgctggccgcactgccggccgccgagctggtgcaggcctgccgcctggtgtgcctgcgctggaaggagctggtggacggcgccccgctgtggctgctcaagtgccagcaggaggggctggtgcccgagggcggcgtgg

SEQ ID NO: 6786 - DNA, 6970 bp, Homo sapiens
attataacagccaatgcagccgccatccacgcacaagcaaagaagcatgtcccatttaaatacacccacgcagccccagcgcccttagccgatcggggcgctcagcccacacgcaccgctgctcggggcttggagatccgcgcaggctgggctcccggacccggcggaccgacgcgcggaggatcgggatccggcgctgtggggctggggtgggcgggggaggctgggcccggggcctctggcgcgacacccgcatgaggacgcgagtgaaatagaccaaggtggaatttccaagggaaaagcttcggggtggttttggtccatttctccagcgaagaagtagacatggcgagcgactccccggctcgaagcctggatgaaatagatctctcggctctgagggaccccgcagggatctttgaattggtggaacttgttggaaatggaacatacgggcaagtttataagggtcgtcatgtcaaaacgggccagcttgcagccatcaaggttatggatgtcacaggggatgaagaggaagaaatcaaacaagaaattaacatgttgaagaaatattctcatcaccggaatattgctacatactatggtgcttttatcaaaaagaacccaccaggcatggatgaccaactttggttggtgatggagttttgtggtgctggctctgtcaccgacctgatcaagaacacaaaaggtaacacgttgaaagaggagtggattgcatacatctgcagggaaatcttacgggggctgagtcacctgcaccagcataaagtgattcatcgagatattaaagggcaaaatgtcttgctgactgaaaatgcagaagttaaactagtggactttggagtcagtgctcagcttgatcgaacagtgggcaggaggaatactttcattggaactccctactggatggcaccagaagttattgcctgtgatgaaaacccagatgccacatatgatttcaagagtgacttgtggtctttgggtatcaccgccattgaaatggcagaaggtgctccccctctctgtgacatgcaccccatgagagctctcttcctcatcccccggaacccagcgcctcggctgaagtctaagaagtggtcaaaaaaattccagtcatttattgagagctgcttggtaaagaatcacagccagcgaccagcaacagaacaattgatgaagcatccatttatacgagaccaacctaatgagcgacaggtccgcattcaactcaaggaccatattgatagaacaaagaagaagcgaggagaaaaagatgagacagagtatgagtacagtggaagtgaggaagaagaggaggagaatgactcaggagagcccagctccatcctgaatctgccaggggagtcgacgctgcggagggactttctgaggctgcagctggccaacaaggagcgttctgaggccctacggaggcagcagctggagcagcagcagcgggagaatgaggagcacaagcggcagctgctggccgagcgtcagaagcgcatcgaggagcagaaagagcagaggcggcggctggaggagcaacaaaggcgagagaaggagctgcggaagcagcaggagagggagcagcgccggcactatgaggagcagatgcgccgggaggaggagaggaggcgtgcggagcatgaacaggaatacatcaggcgacagttagaggaggagcagagacagttagagatcttgcagcagcagctactgcatgaacaagctctacttctggaatataagcgcaaacaattggaagaacagagacaagcagaaagactgcagaggcagctaaagcaagaaagagactacttagtttcccttcagcatcagcggcaggagcagaggcctgtggagaagaagccactgtaccattacaaagaaggaatgagtcctagtgagaagccagcatgggccaaggaggtagaagaacggtcaaggctcaaccggcaaagttcccctgccatgcctcacaaggttgccaacaggatatctgaccccaacctgcccccaaggtcggagtccttcagcattagtggagttcagcctgctcgaacaccccccatgctcagaccagtcgatccccagatcccacatctggtagctgtaaaatcccagggacctgccttgaccgcctcccagtcagtgcacgagcagcccacaaagggcctctctgggtttcaggaggctctgaacgtgacctcccaccgcgtggagatgccacgccagaactcagatcccacctcggaaaatcctcctctccccactcgcattgaaaagtttgaccgaagctcttggttacgacaggaagaagacattccaccaaaggtgcctcaaagaacaacttctatatccccagcattagccagaaagaattctcctgggaatggtagtgctctgggacccagactaggatctcaacccatcagagcaagcaaccctgatctccggagaactgagcccatcttggagagccccttgcagaggaccagcagtggcagttcctccagctccagcacccctagctcccagcccagctcccaaggaggctcccagcctggatcacaagcaggatccagtgaacgcaccagagttcgagccaacagtaagtcagaaggatcacctgtgctcccccatgagcctgcgaaggtgaaaccagaagaatccagggacattacccggcccagtcgaccagctagctacaaaaaagctatagatgaggatctgacggcattagccaaagaactaagagaactccggattgaagaaacaaaccgcccaatgaagaaggtgactgattactcctcctccagtgaggagtcagaaagtagcgaggaagaggaggaagatggagagagcgagacccatgatgggacagtggctgtcagcgacatacccagactgataccaacaggagctccaggcagcaacgagcagtacaatgtgggaatggtggggacgcatgggctggagacctctcatgcggacagtttcagcggcagtatttcaagagaaggaaccttgatgattagagagacgtctggagagaagaagcgatctggccacagtgacagcaatggctttgctggccacatcaacctccctgacctggtgcagcagagccattctccagctggaaccccgactgagggactggggcgcgtctcaacccattcccaggagatggactctgggactgaatatggcatggggagcagcaccaaagcctccttcaccccctttgtggaccccagagtataccagacgtctcccactgatgaagatgaagaggatgaggaatcatcagccgcagctctgtttactagcgaacttcttaggcaagaacaggccaaactcaatgaagcaagaaagatttcggtggtaaatgtaaacccaaccaacattcggcctcatagcgacacaccagaaatcagaaaatacaagaaacgattcaactcagaaatactttgtgcagctctgtggggtgtaaaccttctggtggggactgaaaatggcctgatgcttttggaccgaagtgggcaaggcaaagtctataatctgatcaaccggaggcgatttcagcagatggatgtgctagagggactgaatgtccttgtgacaatttcaggaaagaagaataagctacgagtttactatctttcatggttaagaaacagaatactacataatgacccagaagtagaaaagaaacaaggctggatcactgttggggacttggaaggctgtatacattataaagttgttaaatatgaaaggatcaaatttttggtgattgccttaaagaatgctgtggaaatatatgcttgggctcctaaaccgtatcataaattcatggcatttaagtcttttgcagatctccagcacaagcctctgctagttgatctcacggtagaagaaggtcaaagattaaaggttatttttggttcacacactggtttccatgtaattgatgttgattcaggaaactcttatgatatctacataccatctcatattcagggcaatatcactcctcatgctattgtcatcttgcctaaaacagatggaatggaaatgcttgtttgctatgaggatgagggggtgtatgtaaacacctatggccggataactaaggatgtggtgctccaatggggagaaatgcccacgtctgtggcctacattcattccaatcagataatgggctggggcgagaaagctattgagatccggtcagtggaaacaggacatttggatggagtatttatgcataagcgagctcaaaggttaaagtttctatgtgaaagaaatgataaggtattttttgcatccgtgcgatctggaggaagtagccaagtgtttttcatgaccctcaacagaaattccatgatgaactggtaacagaagagcacttggcacttatcttcatggcgttatttctaatttaaaagaacataactcatgtggacttatgccagtctagaggcagaatcagaaggcttggttgaacatatcgctttccctttttcctctccctccgcccctcccagtacagtccatctttcaatgttgcagcctggttgagaaggagagaaaaaggtggcaggaatttccaggagatccccaagaatgctgccttgtctgtggacaaagatggaccatgtgcccttcggaattagggatagaaacaaatattgtgtgctcttaacgattaagctgtgttatggtgggttttcaggtttttaccttttttctttacccctttactctgcaagaatggggaaagaatgcatactgcgaaaatgagtcttttaaattctgtctgcctactagttttaagtatatggtatgttgtaaaatttccaatgatgagagacagcacaataaatgtaccttatctccttaggctgaaggccataactacatagtggagtaatttaagaactctcttgccttcaccaacccaaaaggttgctttttgatagcaactggctaatgaatttttaaaaagagaagaaaaatactagttttcccctcttttgggaaatagattttaaatggctaaactactagccttaaaactactagtctaataaaatcaactaccacttttgtgaatctgacaggccacatttttatatggccctttacagaatggagtgtgttgaacaggatactaacgccattgagttgagctggcctagcgatggagggacactctaacacaactttccctcagctattatgcaacagatcagggaaaaagatgggatgacagatggggtcagacagaaagagcttctgggaaacaagcttacatagtcttttttaaaatgcacaaagcctcccagctaagaggtcacttggtttgggcttcattaggactgagactttgttgagttctttctgggacttggagagtggatgatattcaggctctgaacattcccagcgctctcccgagggtgccactttctcaagatgaaaactgtgactgaaaaaattaataataaatgtttctgagctgcctgtgttctccctgtgtgggtgagagaagggactagactcctaagcctgcctcagatacaagaggcatcattggctccaattttagagaacttgaaagcaaggctttggacaaaattttgagaccctaatcactttaccttcctccaaattacccaacatacggtaaacaacatttgtgcagaagtatgtatgtatttagttcaggttgacttgtgtccttataaactcttactcaaatgatttgaacttttatgcgactgggattttttttttccaaagctacaagcatggccgcctgtggtatcgaggtgttgcaaacaatatctgtgttgcgcttcctgttttaacctacctcgttttgtttgtttttgtttcactgttcatcacagcagtgttatctccaggagacatatagagagctcaaccggcaatctcaggtgcatttaacatttttaaaacgaaacagtagttgaccaaatttttcttcttaaaaaattggaagtggggggaatccaatgacaaaaactaatgtggcttgtttctggagaaaataattactgtaaatggaacaacaacaacaaaaaaaactacgatcttactgactttgcctaaatacacaagcagctgatgtactattaatgagaacgaaatacacattaggaaaatggagccatttcaatctagtggtttgggcaagatggggaagagaaggggaaacattctagtttctggattacattattatgcccctcctgaaaaggtggttgtcatttgcatttatttaaagcaggtaatatgcaggaatgtaactgaggattatcttcaggcaatcagcaagatatcctcctcatggtccctttagctctcaaaagcaatgaaatcctcctgttctcatttttactgctgtggttgtgctgctgaacaatactatcttctcaaattccatgccacaaattcagcaataactttttggattgaatttaacaactactgtaattggatgctgatgtggacaaaatatattgatttcgatttcactcccgaatgtgattgccaccagctctttatattgctgctgtggtattttaaaccagaagcttctttaaattatgttgcaaactgatctttgtttttatgttttgttttgtttttatttctaagtgataagtttgaaacacacagctttaaatgatttttttattgtgggattttgggtacagttaagaaataaaagggaatcattgtgtttaaacataaggtagtttgtgaatgtattttttaaaatctagagtcattgaaacaaatcataagaaaacaatattaatgcagtcttgtttacagtatgtacagtgacataacatagaacatgagcttttctggtgccaacaacaataaaacacacgttaaacatcaa

SEQ ID NO: 6787 - DNA, 3507 bp, Homo sapiens
gttgttgtgatcccatggctacagaggatcaggagttgacatagatactctttggatttcataccatgtggaggctttcttacttccacgtgaccttgactgagttttgaatagcgcccaacccaagttcaaaggctgataagagagaaaatctcatgaggaggttttagtctagggaaagtcattcagtggatgtgatcttggctcacaggggacgatgtcaagctcttcctggctccttctcagccttgttgctgtaactgctgctcagtccaccattgaggaacaggccaagacatttttggacaagtttaaccacgaagccgaagacctgttctatcaaagttcacttgcttcttggaattataacaccaatattactgaagagaatgtccaaaacatgaataatgctggggacaaatggtctgcctttttaaaggaacagtccacacttgcccaaatgtatccactacaagaaattcagaatctcacagtcaagcttcagctgcaggctcttcagcaaaatgggtcttcagtgctctcagaagacaagagcaaacggttgaacacaattctaaatacaatgagcaccatctacagtactggaaaagtttgtaacccagataatccacaagaatgcttattacttgaaccaggtttgaatgaaataatggcaaacagtttagactacaatgagaggctctgggcttgggaaagctggagatctgaggtcggcaagcagctgaggccattatatgaagagtatgtggtcttgaaaaatgagatggcaagagcaaatcattatgaggactatggggattattggagaggagactatgaagtaaatggggtagatggctatgactacagccgcggccagttgattgaagatgtggaacatacctttgaagagattaaaccattatatgaacatcttcatgcctatgtgagggcaaagttgatgaatgcctatccttcctatatcagtccaattggatgcctccctgctcatttgcttggtgatatgtggggtagattttggacaaatctgtactctttgacagttccctttggacagaaaccaaacatagatgttactgatgcaatggtggaccaggcctgggatgcacagagaatattcaaggaggccgagaagttctttgtatctgttggtcttcctaatatgactcaaggattctgggaaaattccatgctaacggacccaggaaatgttcagaaagcagtctgccatcccacagcttgggacctggggaagggcgacttcaggatccttatgtgcacaaaggtgacaatggacgacttcctgacagctcatcatgagatggggcatatccagtatgatatggcatatgctgcacaaccttttctgctaagaaatggagctaatgaaggattccatgaagctgttggggaaatcatgtcactttctgcagccacacctaagcatttaaaatccattggtcttctgtcacccgattttcaagaagacaatgaaacagaaataaacttcctgctcaaacaagcactcacgattgttgggactctgccatttacttacatgttagagaagtggaggtggatggtctttaaaggggaaattcccaaagaccagtggatgaaaaagtggtgggagatgaagcgagagatagttggggtggtggaacctgtgccccatgatgaaacatactgtgaccccgcatctctgttccatgtttctaatgattactcattcattcgatattacacaaggaccctttaccaattccagtttcaagaagcactttgtcaagcagctaaacatgaaggccctctgcacaaatgtgacatctcaaactctacagaagctggacagaaactgttcaatatgctgaggcttggaaaatcagaaccctggaccctagcattggaaaatgttgtaggagcaaagaacatgaatgtaaggccactgctcaactactttgagcccttatttacctggctgaaagaccagaacaagaattcttttgtgggatggagtaccgactggagtccatatgcagaccaaagcatcaaagtgaggataagcctaaaatcagctcttggagataaagcatatgaatggaacgacaatgaaatgtacctgttccgatcatctgttgcatatgctatgaggcagtactttttaaaagtaaaaaatcagatgattctttttggggaggaggatgtgcgagtggctaatttgaaaccaagaatctcctttaatttctttgtcactgcacctaaaaatgtgtctgatatcattcctagaactgaagttgaaaaggccatcaggatgtcccggagccgtatcaatgatgctttccgtctgaatgacaacagcctagagtttctggggatacagccaacacttggacctcctaaccagccccctgtttccatatggctgattgtttttggagttgtgatgggagtgatagtggttggcattgtcatcctgatcttcactgggatcagagatcggaagaagaaaaataaagcaagaagtggagaaaatccttatgcctccatcgatattagcaaaggagaaaataatccaggattccaaaacactgatgatgttcagacctccttttagaaaaatctatgtttttcctcttgaggtgattttgttgtatgtaaatgttaatttcatggtatagaaaatataagatgataaagatatcattaaatgtcaaaactatgactctgttcagaaaaaaaattgtccaaagacaacatggccaaggagagagcatcttcattgacattgctttcagtatttatttctgtctctggatttgacttctgttctgtttcttaataaggattttgtattagagtatattagggaaagtgtgtatttggtctcacaggctgttcagggataatctaaatgtaaatgtctgttgaatttctgaagttgaaaacaaggatatatcattggagcaagtgttggatcttgtatggaatatggatggatcacttgtaaggacagtgcctgggaactggtgtagctgcaaggattgagaatggcatgcattagctcactttcatttaatccattgtcaaggatgacatgctttcttcacagtaactcagttcaagtactatggtgatttgcctacagtgatgtttggaatcgatcatgctttcttcaaggtgacaggtctaaagagagaagaatccagggaacaggtagaggacattgctttttcacttccaaggtgcttgatcaacatctccctgacaacacaaaactagagccaggggcctccgtgaactcccagagcatgcctgatagaaactcatttctactgttctctaactgtggagtgaatggaaattccaactgtatgttcaccctctgaagtgggtacccagtctcttaaatcttttgtatttgctcacagtgtttgagcagtgctgagcacaaagcagacactcaataaatgctagatttacacactc

SEQ ID NO: 6788 - DNA, 1125 bp, Homo sapiens
gctttcacttcctcctccgagagcggacagatctctgggtgctgggcggtcatggcgctactagatgtatgcggagccccccgagggcagcggccggaatcggctctcccggttgcgggaagcgggcgtcgctcggacccaggacactacagtttctctatgcgatctccagagctcgctttaccccggggaatgcagcccacagaattcttccagtccctgggtggggacggagaaaggaacgttcagattgagatggcccatggcaccaccacgctcgccttcaagttccagcatggagtgattgcagcagtggattctcgggcctcagctgggtcctacattagtgccttacgggtgaacaaggtgattgagattaacccttacctgcttggcaccatgtctggctgtgcagcagactgtcagtactgggagcgcctgctggccaaggaatgcaggctgtactatctgcgaaatggagaacgtatttcagtgtcggcagcctccaagctgctgtccaacatgatgtgccagtaccggggcatgggcctctctatgggcagtatgatctgtggctgggataagaagggtcctggactctactacgtggatgaacatgggactcggctctcaggaaatatgttctccacgggtagtgggaacacttatgcctacggggtcatggacagtggctatcggcctaatcttagccctgaagaggcctatgaccttggccgcagggctattgcttatgccactcacagagacagctattctggaggcgttgtcaatatgtaccacatgaaggaagatggttgggtgaaagtagaaagtacagatgtcagtgacctgctgcaccagtaccgggaagccaatcaataatggtggtggtggcagctgggcaggtctcctctgggaggtcttggccgactcagggacctaagccacgttaagtccaaggagaagaagaggcctagcctgagccaaagagagagtacgggctcagcagccagaggaggccggtgaagtgcatcttctgcgtgttctctatttgaacaagcatttcccccagggaagtttctgggtgccccactaagtagaataaagaaaaacggttataaatac

SEQ ID NO: 6789 - DNA, 684 bp, Homo sapiens
ggcaggcgtgagggtgtgacggccgcgcattcgccagacgagagcgatggctgagaacgccgcaccaggtctgatctcagagctgaagctggctgtgccctggggccacatcgcagccaaagcctggggctccctgcagggccctccagttctctgcctgcacggctggctggacaatgccagctccttcgacagactcatccctcttctcccgcaagacttttattacgttgccatggatttcggaggtcatgggctctcgtcccattacagcccaggtgtcccatattacctccagacttttgtgagtgagatccgaagagttgtggcagccttgaaatggaatcgattctccattctgggccacagcttcggtggcgtcgtgggcggaatgtttttctgtaccttccccgagatggtggataaacttatcttgctggacacgccgctctttctcctggaatcagatgaaatggagaacttgctgacctacaagcggagagccatagagcacgtgctgcaggtagaggcctcccaggagccctcgcacgtgttcagcctgaagcagctgctgcagaggcagagaacagcattgacttcgtcagcagggagctgtgtgcgcattccatcaggaagctgcaggcccatgtcctgttgatcaaagcagtccacggatattttgat

SEQ ID NO: 6790 - DNA, 3143 bp, Homo sapiens
agggcaaagccagctcccgtctcagcctcccgtaggaagatctcccggcctcacctgagcgccccgcagccctgggtacctctgctcccgcccagggtcctatggcccctcctcccagcacccaacactgggaccccacctgtacccaggctggcctccctcccccgcagcttcctttgcagccgccgtccgcgggtctccaggcgtggccacacctcccggggccccgcaagggttaaggcagcagagaggagaggtttgggctgacgtcgctctggctgaaggtggttcccctcagatgaggatgggagagcctggcgagctgaaacccgagctcccgctcagctggggctcggggaggtccctgtaaaacccgcctgcccccggcctccctgggtccctcctctccctccccagtagacgctcgggcaccagccgcggcaaggatggagctgggttgctggacgcagttggggctcacttttcttcagctccttctcatctcgtccttgccaagagagtacacagtcattaatgaagcctgccctggagcagagtggaatatcatgtgtcgggagtgctgtgaatatgatcagattgagtgcgtctgccccggaaagagggaagtcgtgggttataccatcccttgctgcaggaatgaggagaatgagtgtgactcctgcctgatccacccaggttgtaccatctttgaaaactgcaagagctgccgaaatggctcatgggggggtaccttggatgacttctatgtgaaggggttctactgtgcagagtgccgagcaggctggtacggaggagactgcatgcgatgtggccaggttctgcgagccccaaagggtcagattttgttggaaagctatcccctaaatgctcactgtgaatggaccattcatgctaaacctgggtttgtcatccaactaagatttgtcatgttgagcctggagtttgactacatgtgccagtatgactatgttgaggttcgtgatggagacaaccgcgatggccagatcatcaagcgtgtctgtggcaacgagcggccagctcctatccagagcataggatcctcactccacgtcctcttccactccgatggctccaagaattttgacggtttccatgccatttatgaggagatcacagcatgctcctcatccccttgtttccatgacggcacgtgcgtccttgacaaggctggatcttacaagtgtgcctgcttggcaggctatactgggcagcgctgtgaaaatctccttgaagaaagaaactgctcagaccctgggggcccagtcaatgggtaccagaaaataacagggggccctgggcttatcaacggacgccatgctaaaattggcaccgtggtgtctttcttttgtaacaactcctatgttcttagtggcaatgagaaaagaacttgccagcagaatggagagtggtcagggaaacagcccatctgcataaaagcctgccgagaaccaaagatttcagacctggtgagaaggagagttcttccgatgcaggttcagtcaagggagacaccattacaccagctatactcagcggccttcagcaagcagaaactgcagagtgcccctaccaagaagccagcccttccctttggagatctgcccatgggataccaacatctgcatacccagctccagtatgagtgcatctcacccttctaccgccgcctgggcagcagcaggaggacatgtctgaggactgggaagtggagtgggcgggcaccatcctgcatccctatctgcgggaaaattgagaacatcactgctccaaagacccaagggttgcgctggccgtggcaggcagccatctacaggaggaccagcggggtgcatgacggcagcctacacaagggagcgtggttcctagtctgcagcggtgccctggtgaatgagcgcactgtggtggtggctgcccactgtgttactgacctggggaaggtcaccatgatcaagacagcagacctgaaagttgttttggggaaattctaccgggatgatgaccgggatgagaagaccatccagagcctacagatttctgctatcattctgcatcccaactatgaccccatcctgcttgatgctgacatcgccatcctgaagctcctagacaaggcccgtatcagcacccgagtccagcccatctgcctcgctgccagtcgggatctcagcacttccttccaggagtcccacatcactgtggctggctggaatgtcctggcagacgtgaggagccctggcttcaagaacgacacactgcgctctggggtggtcagtgtggtggactcgctgctgtgtgaggagcagcatgaggaccatggcatcccagtgagtgtcactgataacatgttctgtgccagctgggaacccactgccccttctgatatctgcactgcagagacaggaggcatcgcggctgtgtccttcccgggacgagcatctcctgagccacgctggcatctgatgggactggtcagctggagctatgataaaacatgcagccacaggctctccactgccttcaccaaggtgctgccttttaaagactggattgaaagaaatatgaaatgaaccatgctcatgcactccttgagaagtgtttctgtatatccgtctgtacgtgtgtcattgcgtgaagcagtgtgggcctgaagtgtgatttggcctgtgaacttgggctgtgccagggcttctgacttcagggacaaaactcagtgaagggtgagtagacctccattgctggtaggctgatgccgcgtccactactaggacagccaattggaagatgccagggcttgcaagaagtaagtttcttcaaagaagaccatatacaaaacctctccactccactgacctggtggtcttccccaactttcagttatacgaatgccatcagcttgaccagggaagatctgggcttcatgaggccccttttgaggctctcaagttctagagagctgcctgtgggacagcccagggcagcagagctgggatgtggtgcatgcctttgtgtacatggccacagtacagtctggtccttttccttccccatctcttgtacacattttaataaaataagggttggcttctgaactacaaaacaaa

SEQ ID NO: 6791 - DNA, 650 bp, Homo sapiens
gaccatgacttcctgggcaatctgtccttcctcagactgttgagtgccagacgtttatatgcatgtctggacagagagtgagcctggctcattcagaccctgggcaccattcagagcagaactcagtggtatagacacgtgtggccgtttacgctgtaggatcctcattcccactggctttgaacattttggggacttacaatgccgccacccgcggacatcgtcaaggtggccatagaatggccgggcgcctaccccaaactcatggaaattgatcagaaaaaaccactgtctgcaataataaaggaagtctgtgatgggtggtctcttgccaaccatgaatattttgcactccagcatgccgatagttcaaacttctatatcacagaaaagaaccgcaatgagataaaaaatggcactatccttcgattaaccacatctccagctcagaacgcccagcagctccatgaacgaatccagtcctcgagtatggatgccaagctggaagccctgaaggacttggccagcctctcccgggatgtcacgtttgcccaggagtttataaacctggacggtatctctctcctcacgcagatggtggagagcggcactgagcgataccagaaattgcagaagatcatgaagccttg

SEQ ID NO: 6792 - DNA, 8466 bp, Homo sapiens
aattagccccgcacggcgaggggggaggcgccagttttctggggacactggctgccactgtactcctacccaggggagctcacggagagttggatgaattctgggttgttagctgcggtcagctgggctcccgggagcctgttgctggtggagaacagggggcgcctggccaagggaccagcggcttgctgagactcaacatgacactcctggggtctgagcattccttgctgattaggagcaagttcagatcagttttacagttaagacttcaacaaagaaggacccaggaacaactggctaaccaaggcataataccaccactgaaacgtccagctgaattccatgagcaaagaaaacatttggatagtgacaaggctaaaaattccctgaagcgcaaagccagaaacaggtgcaacagtgccgacttggttaatatgcacatactccaagcttccactgcagagaggtccattccaactgctcagatgaagctgaaaagagcccgactcgccgatgatctcaatgaaaaaattgctctacgaccagggccactggagctggtggaaaaaaacattcttcctgtggattctgctgtgaaagaggccataaaaggtaaccaggtgagtttctccaaatccacggatgcttttgcctttgaagaggacagcagcagcgatgggctttctccggatcagactcgaagtgaagacccccaaaactcagcgggatccccgccagacgctaaagcctcagataccccttcgacaggttctctggggacaaaccaggatcttgcttctggctcagaaaatgacagaaatgactcagcctcacagcccagccaccagtcagatgcggggaagcaggggcttggcccccccagcacccccatagccgtgcatgctgctgtaaagtccaaatccttgggtgacagtaagaaccgccacaaaaagcccaaggaccccaagccaaaggtgaagaagcttaaatatcaccagtacattcccccagaccagaaggcagagaagtcccctccacctatggactcagcctacgctcggctgctccagcaacagcagctgttcctgcagctccaaatcctcagccagcagcagcagcagcagcaacaccgattcagctacctagggatgcaccaagctcagcttaaggaaccaaatgaacagatggtcagaaatccaaactcttcttcaacgccactgagcaatacccccttgtctcctgtcaaaaacagtttttctggacaaactggtgtctcttctttcaaaccaggcccactcccacctaacctggatgatctgaaggtctctgaattaagacaacagcttcgaattcggggcttgcctgtgtcaggcaccaaaacggctctcatggaccggcttcgacccttccaggactgctctggcaacccagtgccgaactttggggatataacgactgtcacttttcctgtcacacccaacacgctgcccaattaccagtcttcctcttctaccagtgccctgtccaacggcttctaccactttggcagcaccagctccagccccccgatctccccagcctcctctgacctgtcagtcgctgggtccctgccggacaccttcaatgatgcctccccctccttcggcctgcacccgtccccagtccacgtgtgcacggaggaaagtctcatgagcagcctgaatgggggctctgttccttctgagctggatgggctggactccgagaaggacaagatgctggtggagaagcagaaggtgatcaatgaactcacctggaaactccagcaagagcagaggcaggtggaggagctgaggatgcagcttcagaagcagaaaaggaataactgttcagagaagaagccgctgcctttcctggctgcctccatcaagcaggaagaggctgtctccagctgtccttttgcatcccaagtacctgtgaaaagacaaagcagcagctcagagtgtcacccaccggcttgtgaagctgctcaactccagcctcttggaaatgctcattgtgtggagtcctcagatcaaaccaatgtactttcttccacatttctcagcccccagtgttcccctcagcattcaccgctgggggctgtgaaaagcccacagcacatcagtttgcccccatcacccaacaaccctcactttctgccctcatcctccggggcccagggagaagggcacagggtctcctcgcccatcagcagccaggtgtgcactgcacagaactcaggagcacacgatggccatcctccaagcttctctccccattcttccagcctccacccgcccttctctggagcccaagcagacagcagtcatggtgccgggggaaacccttgtcccaaaagcccatgtgtacagcaaaagatggctggtttacactcttctgataaggtggggccaaagttttcaattccatccccaactttttctaagtcaagttcagcaatttcagaggtaacacagcctccatcctatgaagatgccgtaaagcagcaaatgacccggagtcagcagatggatgaactcctggacgtgcttattgaaagcggagaaatgccagcagacgctagagaggatcactcatgtcttcaaaaagtcccaaagatacccagatcttcccgaagtccaactgctgtcctcaccaagccctcggcttcctttgaacaagcctcttcaggcagccagatcccctttgatccctatgccaccgacagtgatgagcatcttgaagtcttattaaattcccagagccccctaggaaagatgagtgatgtcacccttctaaaaattgggagcgaagagcctcactttgatgggataatggatggattctctgggaaggctgcagaagacctcttcaatgcacatgagatcttgccaggccccctctctccaatgcagacacagttttcaccctcttctgtggacagcaatgggctgcagttaagcttcactgaatctccctgggaaaccatggagtggctggacctcactccgccaaattccacaccaggctttagcgccctcaccaccagcagccccagcatcttcaacatcgatttcctggatgtcactgatctcaatttgaattcttccatggaccttcacttgcagcagtggtagaatgcccaatgcaccagtgctatggaagaccaatggagttccatgggggaaagcacacagccatacatactttactgtccaaaaacagaagaagaagaagagaattaaaaagaagcaatgatttctgtgccaatgaacaagaacaaaagtcatttttagaaatacatatactgtaatatttaccaacagtcagtaactgttaatgatttcaacaatgcattaaaagaatgtgctttctcagattaaggatgccaaaaaagatatttcactgccttttcaaagaccagtatattttctagcccataatttttctcaggcattgttggggcataagctcacactgtaagcttttctcatgaattcactagacataacgtggaaggaaaacgtagtcttttgggagtacagggaagccagcccctcaaagcttatggaagacatacctgcaatggaagctgttgcccaatgtctccattactatctttcaaaagagaagccagacccagcttcagatcaaaagttcttgagacagaggaacaaaaccaatcgatttccagggaagctaatcaactctcttttccctctaccacaaaactgccctgctggagtggttctgaacctgtacccaggactcgatgtggtcactaataacaattaacctgaactgagtccacagaactccactcggaactttcttcttttttaactagtggcccaatcattcccaccatctctgtgctgataagtacgtgtcctagatgagaaccctgaagaatgcagaccttcttcccccgaaggagatgccacaagctctccaacacagccccctttagttccaaagactagagatgaccacattggtagaagtatatctcgaggcacaggaagggagccccaccagggataattcagacaggactagagaataacatcatttcacataccctgggataaacaccctgggttcctatagaaggactattacttatgggagtccaacttctccttttgttttgttattatcagtttatctttctcccactccacttttccttcaaggtaccaatcctttcctgttcctcgtttggccatctttctttttctgcctccacattgggaggggaggacttctcagttctaacaagctgccatactcctaagaaagccatttttgaaaaatttaacaatccaggttcttctggagaactcattctccacacgcacagtttgctgcaaaaggaagttgcaagaatttcttgaggaagaaactggtgacttggtccatcagtcacgaagttctttctattctcgtttagttttcaagaaattattggtttgtgttgctctggggaaattggaaatcattacattgtaaagacaaatatggatgatatttacaagagagaatttcagatctgggtttttgaaagaaaacagaattgcgcattgaaaacgatggaaggaaaaagacaatggtctaatgtgcattcctcattacctctcgtggctttggctgggagttggaaaaagctaaaatttcagaacagtctctgtaaggctctctgtggctccagttcaccattttatattgttgcatgctgtagaaaggagctattgctgttgttttgtttttttatttaaatcactaaggcactgtttttatcttttgtaaaaaaaaaaaaaaagttgttcactgtgcacttatagaaaaaataatcaaaaatgttgggattttagaagctctctttttgataaaccaaagatttagaagtcattccattgttaacttgtaaaaatgtgtgaacacagagagtttttggtgattgctactctgaaagctgccagatcttattctgggggtgggatgtggaggaatacacatacacacacaaacatacatgtatgtataatagatatatacatatgtgtatattatatctgtgtgtgcatgtatctccaaaagcggcgttacagagttctacaccaaaagcctttaacccttaatctgctgtgaatgatacctggcctttctcactatgaatttctgattaaccaaccagactacacgttgcctctctgtgtatgactaacggctccaacccgatgactcacagctacttgcttatcgtgaacaagctcatcttggcaatgaatatggatgtgaaaagacagaacagcttcaccattagtagctggaaatggtatcacagtctcttatagaggaatatgaaaggaacaagaaaatcattttacattccttttatctgtattgtgctttaaaagatccacatggtaaattttttattttgcttttatgtcagtcatcagaaccaaaaaaatccagaagaaaaaattgccagtgtttcctttgaagatgaagctactggggaagaaaaccttattaatacactccacacatttgttcattcctcagctgttggtgttttcttggggtcttgacaaagcttgctggtcagtgcacttttcaggtgtcacgttttgctgtttgtatgttttttcttccccttacttcctttggaaaacaaactcacacagtgcccctactctgagacctgggactgagtgttaattattttttccttgggtatttctatctgagagactagacctagttaggaggcctctgtacttctccagattgtacctttttatggggatctttgaggctatgacccaggactgatagatatgccttacggaagacaaaagataaaatggttcctatatcctaatgcaaaccaacacagttaaaagagcagatctctggataactgctctcaacctgcttctacagtctccacaaaccgcattcaccctctctcttcatagctcagacatgaaatttgagggagaaaactggagataattgggagaaaattgatgaagttggctgcttccagtagatcagataatccatgaatttgtctcccattgagaattttattttaaattcttttaaactcttcgttgtgtcttttgtgatgacaaatcaggcatgactaaaagatgtacagagacttacgaagatggtcacattcaagttccctaatgctcttagaacctgaagatgaccatgtgtagttttcttaagacctctgaacccccatggtgatgaagacttgaagacatttgcagctatctgctgcagtctggtagattcatacttatctaaagaagtcaaaaaatttattcgtgcaagtgcttgcaggaagccagtgcttattagtagtgaccctgcttctatcaacgttattgagacaacacatattctattctaagggagaaagagggaggaagagagggagggagggaggaagaagagggagggagcgaggaaggaagataggagatgggtaggggggtaaagagaaaaggagggagaagggaaggaaggaaagaagagaggaaagaaaggagggaaggaaaaaagggccaaactttctgatctatgaacttctcagttcagctgtcacattatgagaagtaaatcagaatttttttaaggagaagtcattcttagcactacaataattgtaccagtaattgaggaaaccaagacaatcttcacctgaataatagagggtctgagaactgtcagccttttgccattcaaaaacatttatgtccaacctgaaaaaaaagcatcaataaaacctatcccaagcattcaaaatagtcctttccaaatgttatttattttaaagtcaatcagctcttttagaaacagattctggtctggctgaaaactcccacaacaaatttactcatccagtggctaatatttaatgcccaccatgggcagagcacacaaatcttcagataaacaatactgaattgattcagcacagattgttcagatttgaatgaccagggagttgtatttgcacatgcaagaacactaagaatctcccagtcctcaaactagaaacctttcagctacgatgaaaaaaaaaaaggggtcttcatttttccaagagggggtggaggtggggatcactttttagctaaaagctatctctcacttcaaaattcttgtctttttctttgtggacaaacaccagtagtctatcacttggagatcttttaatatctcccatcatttaaaacatccacgagagtttgaagatttgtgttgattgccagatacagaagccccttgaaaataaggaaagggtggaggaagcatttttgtgtcctatccctacttatcgtagcagctctatagacaaaagggacacttactggtgagcctctggcccttaaaagaaaatcatctaagaatatgaaggcaatttgatttccccccacagccctcagctgccttcctcacagaaggaagttcccaaaattgctggtacacagtttgcaatcaaatatcagatatgagaaaacctgtagtgaagagtctgggttcttggttttctcataaatccaatataaatttgtaggttggttcagggtcaaaattgccagtgctttattagacagatgatactgatagacacacagagcccaggtcctggaacaagacaatcctgtagtgccaagatctggtcagttgcgttaaggagctgggtttgattctagagtccaggtttatagagaaaccctggctagattgagcctacccatggggagacgatttcaagacaggatgagatctgggaagaattttgttgtcatctgccagggaaattatcacaggactcattgaatgcaataacatgtgagtaagttcccttttgattctgggaatcagcgattttccctgtggattaagacaaaccaacgccagaaggtctcctgtgcttattttaaccatctgctcccatcgtgaaccctggagcatgcatttcctagaagtggtttcatagctcctgtgtgttcatggaaaaggggagtataatgatggggatgctggaagcttttttaatgttttccaaaggaaaggaacccacactgctccccagagttcctttccaatggccctgcagtaagaacggaggacaatgtattgctgggtgcttaaaatcctccctcagtgaagcacaaagagacactttgtaaagaaaaaaagagcaagcataggttctctgtgggaccttgtggagtggtgttttcacgttggtctctttggctcaattgagcataatcagaaagaaatgtgggttattgggaagagacaaaaagcagtggctaaaataccaaagttggcatgtgttcttttttaaaaaaaaaaaaaaatgcatatatttttaaataaaatgtttattttaaaaagaaa

SEQ ID NO: 6793 - DNA, 2116 bp, Homo sapiens
cccagcctcgcctcgggtgtagggattgcatagaaaagcaaaactacacagtcttgactgtgtagttttgtttttaggattagaggctcaccgattcatgtcggagatggtcagaaaaaccaactctccataggacgtcgtttcagaagcaaccttgggcttagtcccaccctttttaggcactcttgagaaatcagagtgcctagaaagatgacaactcaagcaccgacgtttacgcagccgttacaaagcgttgtggtactggagggtagtaccgcaacctttgaggctcacattagtggttttccagttcctgaggtgagctggtttagggatggccaggtgatttccacttccactctgcccggcgtgcagatctcctttagcgatggccgcgctaaactgacgatccccgccgtgactaaagccaacagtggacgatattccctgaaagccaccaatggatctggacaagcgactagtactgctgagcttctcgtgaaagctgagacagcaccacccaacttcgttcaacgactgcagagcatgaccgtgagacaaggaagccaagtgagactccaagtgagagtgactggaatccctacacctgtggtgaagttctaccgggatggagccgaaatccagagctcccttgatttccaaatttcacaagaaggcgacctctacagcttactgattgcagaagcataccctgaggactcagggacctattcagtaaatgccaccaatagcgttggaagagctacttcgactgctgaattactggttcaaggtgaagaagaagtacctgctaaaaagacaaagacaattgtttcgactgctcagatctcagaatcaagacaaacccgaattgaaaagaagattgaagcccactttgatgccagatcaattgcaacagttgagatggtcatagatggtgccgctgggcaacagctgccacataaaacacctcccaggattcctccgaagccaaagtcaagatccccaacaccaccgtctattgctgccaaagcacagctggctcggcagcagtccccatcgcccataagacactccccttccccggtcagacacgtgcgggcaccgaccccatctccggtcaggtaaagctgccatagagagagcagattattgcacattttggaactaggttttgaaacgagaaagattcccttgtccccctcgcagggcatgcgacgcggagagtggttcgcttcttcagtgtcccgctgctcaaacctctaggggagcatacaaacgggcaggttgtggggctccgtgttcctctggacatccagccgcttgtgtgtctgcctactagggtctcaggggtttttataggcatagggtgtgggcgtggcaggtcagggtgatcttgggaaatgcaacatttgggcgggaaggcaggagtgtttgtcctcacctaggtccatgggcacaggcctcgctagggaccacgcacttctcttcccagcacttccctgccctcctcccgtgtaagtttcatgcactcaaaaatgtagcaggtgacaaaggaggtaaaccaagaagttactgaatatgattttcacaaatcctcactgtccacaggtaaattgaagacccttataaacttctgaattcttatttatatttcatgtaataaatatctactttaggggccaaaatatggcacagtgaaaggagaagagcacagaagttagagttcaaagccctaaggacaaatcagcctgatcacttaacagtttgatttagggcaataagtataaataataaaataattgttattatatatggatcacttcctctatcagattggaactatacatacattatctcattaaatgttcacaacctgtaagaattattatcctcaatgttattgataggtaactggaattaaagaagttaagcagtttatttaaggtttcagttgtgtcatctgtaaattaaagagagtcacaataagaatgatctcaagctgcattttggggcttcaatgagataattagttgaaagtgccttgtaaatagaaaataattatgccaatattcttatattcagatggtaagtaaaaccttttaaatattttgca

SEQ ID NO: 6794 - DNA, 390 bp, Homo sapiens
tgcacctgaaaactaagcccctttagcctgaagggtggggaagtgacctgggccaggcccagtggggtctgggccctgacatgcccatctctgctgtatctttacaggaaatcagtacgctgaggggccaagtgggaggccaggtcagtgtggaggtggattccgctccgggcaccgatctcgccaagatcctgagtgacatgcgaagccaatatgaggtcatggccgagcagaaccggaaggatgctgaagcctggttcaccagccggactgaagaattgaaccgggaggtcgctggccacacggagcagctccagatgagcaggtccgaggttactgacctgcggcgcacccttcagggtcttgagattgagctgcagtcacagctga

SEQ ID NO: 6795 - DNA, 2822 bp, Homo sapiens
aaaaaacgagcgtgcaagcagagatgctgctccacaccgctcaggccgcgagcagcagcaaggcgcaccgccactgtcgccgctgcagccagggctgctccgaaggccggcgtggcggcaaccggcacctctgtccccgccgcgcttctcctcgccgcccacgccgtggggtcaggaacgcggcgtctggcgctgcagacgcccgctgagttgcagaagcccacggagcggcgcccggcgcgccacggcccgtagcagtccggtgctgctctccgcccgcgtccggctcgtggccccctacttcgggcaccatggacacctcccggctcggtgtgctcctgtccttgcctgtgctgctgcagctggcgaccgggggcagctctcccaggtctggtgtgttgctgaggggctgccccacacactgtcattgcgagcccgacggcaggatgttgctcagggtggactgctccgacctggggctctcggagctgccttccaacctcagcgtcttcacctcctacctagacctcagtatgaacaacatcagtcagctgctcccgaatcccctgcccagtctccgcttcctggaggagttacgtcttgcgggaaacgctctgacatacattcccaagggagcattcactggcctttacagtcttaaagttcttatgctgcagaataatcagctaagacacgtacccacagaagctctgcagaatttgcgaagccttcaatccctgcgtctggatgctaaccacatcagctatgtgcccccaagctgtttcagtggcctgcattccctgaggcacctgtggctggatgacaatgcgttaacagaaatccccgtccaggcttttagaagtttatcggcattgcaagccatgaccttggccctgaacaaaatacaccacataccagactatgcctttggaaacctctccagcttggtagttctacatctccataacaatagaatccactccctgggaaagaaatgctttgatgggctccacagcctagagactttagatttaaattacaataaccttgatgaattccccactgcaattaggacactctccaaccttaaagaactaggatttcatagcaacaatatcaggtcgatacctgagaaagcatttgtaggcaacccttctcttattacaatacatttctatgacaatcccatccagtttgttgggagatctgcttttcaacatttacctgaactaagaacactgactctgaatggtgcctcacaaataactgaatttcctgatttaactggaactgcaaacctggagagtctgactttaactggagcacagatctcatctcttcctcaaaccgtctgcaatcagttacctaatctccaagtgctagatctgtcttacaacctattagaagatttacccagtttttcagtctgccaaaagcttcagaaaattgacctaagacataatgaaatctacgaaattaaagttgacactttccagcagttgcttagcctccgatcgctgaatttggcttggaacaaaattgctattattcaccccaatgcattttccactttgccatccctaataaagctggacctatcgtccaacctcctgtcgtcttttcctataactgggttacatggtttaactcacttaaaattaacaggaaatcatgccttacagagcttgatatcatctgaaaactttccagaactcaaggttatagaaatgccttatgcttaccagtgctgtgcatttggagtgtgtgagaatgcctataagatttctaatcaatggaataaaggtgacaacagcagtatggacgaccttcataagaaagatgctggaatgtttcaggctcaagatgaacgtgaccttgaagatttcctgcttgactttgaggaagacctgaaagcccttcattcagtgcagtgttcaccttccccaggccccttcaaaccctgtgaacacctgcttgatggctggctgatcagaattggagtgtggaccatagcagttctggcacttacttgtaatgctttggtgacttcaacagttttcagatcccctctgtacatttcccccattaaactgttaattggggtcatcgcagcagtgaacatgctcacgggagtctccagtgccgtgctggctggtgtggatgcgttcacttttggcagctttgcacgacatggtgcctggtgggagaatggggttggttgccatgtcattggttttttgtccatttttgcttcagaatcatctgttttcctgcttactctggcagccctggagcgtgggttctctgtgaaatattctgcaaaatttgaaacgaaagctccattttctagcctgaaagtaatcattttgctctgtgccctgctggccttgaccatggccgcagttcccctgctgggtggcagcaagtatggcgcctcccctctctgcctgcctttgcttcctcatgatgaccattgcctacaccaagctctactgcaatttggacaagggagacctggagaatatttgggactgctctatggtaaaacacattgccctgttgctcttcaccaactgcatcctaaactgccctgtggctttcttgtccttctcctctttaataaaccttacatttatcagtcctgaagtaattaagtttatccttctggtggtagtcccacttcctgcatgtctcaatccccttctctacatcttgttcaatcctcactttaaggaggatctggtgagcctgagaaagcaaacctacgtctggacaagatcaaaacacccaagcttgatgtcaattaactctgatgatgtcga

SEQ ID NO: 6796 - DNA, 5701 bp, Homo sapiens
ggggctagggggtggggctgcagccgggacggggccttcggcagggcctgcgggggcgggacggagcggacccgagtgatacccgggagactagcttggccacaggagacaacgttgaggtacagacaggattattcaagatcaggttgtagccattttcaacaaggatcactgatcaaaattttctttttacaaagagatttacaagttaaacatgaagggaaaatactggaatcatttggattctgacaggataaagaatacaatatttcacatttacttgtaatggaacctttgtaagattcatcacttgtcattcacccagttgggaacatggatgttggtttttctcgtactactgttcagacactgtcaagaagccactgcaaaaacatcaaacaaaaaatttctcaatgggaaggaagggctaatggtatatctaatccagaaaagtggtgtccaaaggactttggagtgagatataactgtcaccaagagatccgtcttaagaaaaatcctatagctgagagaaagagcaaaaacttggatgtaaccagccgtgaaaatgtgggtctagatataaatgaaaataccaaaagccatgatcaaagtgagaatgaaaataagaaacatgaatatgacgatacacacttctttaaaaatgaatcagaatccaactgggtatgttctcgggtcaaagaaattgaaagctgtaaagaagatgtcttagatccagagacttcattacctccaggaaacttctatacctcacaaatactgtggaagaaaatagaagcacttcccccagataaactcttaaatttggctttagaacattgtgactcttcagaaaaagaactgaacttcagagttctggatagttcatacggaataaccaagagcttagaaaatatttactctgaacctgaggggcaagaatgtggaccttccataaatcctttgccaaaacctcgtaggacattcagatatttatccgaatctggtgttacgccgtataaagaaagaaactgtgacaaaaaatactgtgaaaataactcttgtgcacaatcttctttggcctcttctcaggaacctgaaccaaagaaatatggtggaaaaatcagaggaagatctaaaaggaaatcctttgaatttgaggatattcagcactttcgaaatcggaactcacagacgattcgtgaagaacttggaagaaattctgggtcagcactttattacacacagtctgaggacaatatctatgaagatatcatatatcccaccaaagaaaatccatatgaagatattccagtgcagcctttacctatgtggagatccccttcagcatggaagctaccacccgctaaaagtgcttttaaagcacccaagcttgtattgaaaatagatgacatatttgaatctaaaagagggaagaagaaggtaaagttacattcttacactggaaaggaattacctccgacaaaaggtgaaaccagtgggaacgaaagtgatgccgagtatctgccaaagaatcgccataaacgcttagcacaactgcaaccgtcttccaagaggaatcctcactaccagaccttggagcgggatcttattgaattacaggagcagcagctgtttgaactttttgtggtggtgtctctacagaagaaaccatcaggaataagctatattccccaggtcatacaacaattccctggcaaggatgatcatggctataagcagtccaaagacatggaagagagacttaaagttattccaaaattttgttttcctgattcaaaggactggatgccaacctcagaactcaagagtgaaacattctcctttgtcttgactggtgaagatggaagccggtggtttggttactgtaagaagctcttgccagtaggcaaaggaaagcgactccctgaggtatactgcatggttagtcgcctaggctgcttcaatcttttttcaaagattctggatgaagtagagaagagaagagaaatgtctccagcccttgtttacccattcatgcgaagtgtcatggaagctcctttcccagctcctggacgcaccatcacagttaagagttacctccctggggctggagatgagtccattgaactctgccgaccactagattcccgattggaacatgttgattttaaatgtctctttaagtgcctgagtgtgtgtcatctcatccgggtctgtgcctctctccttttggagcgtagggtaatctttgttgccaacagcctaagcaccctgtcaaaatgtggccatgctgtggtagctacactgtatccgttcacctggcagcatacctatatcccagtcctgccagcatctatgattgacatcgtgtgctcacctacaccattccttattggaatcctgtcttgctccttaccacagctccaggacctacccattgaagaggtgctgatagttgatctctgtgcagacaagttcttacaggaggtatctgatgaggatgaaattctaccaccaaaacttcaagctgccctgatgcagattttggaagaacgaaatgaaatcttgactcaggagcagaatttttcacaagatgtgacactcaactctctggtgtccgaagcatttgtcaggttttttgtggagttggtaggacattattctttgaacatgactgtcactgagcgtggggagcgtgttttccaaagggaaccattccgtaagtcccacacctcccgaagtgtacgccacttcctggatctcttcatggaaactcagatgtttgcaggattcatccaggaccgagagcttcggaaaagtggagttaaaggtttgtttgagatccgggccatccagtatttggaaacaattcctgagtcggagcccagtgggatgaatagaattttgcggagtcttggaagcaaaatgaaatttctgcaaaagaaatgaaatctctgattgtctccatcctgaatatacaacagaaagtgccaaagaaaatatttttctaagggtcaggatcccatgaagtattctacaaaattcttgaaattttaaaaggttaaagagcgagtcaggctgttagaggaggattctcctgttgctgctgtagtaatcactggagaattgttgggaatggtctggcaccatgccatctttactctgtctccattttttttttatagcagccttttctatgtgattcttgggctcattctctgttttgtgctttgtctgtgaaagtagttgtgtttcacaaggaaaagccttgttgttgttacatttaaaaaatagctcaaagatgagaataatgagagaaatgctgagtttaaggtagtagagagacatgatggaaatggagaacactagccttatacacataattctcatcactgaactatcatggcccctttaaacccatgggctgtttgacctgggctaaggaatagactcatcacatatctccattgttttgccttatattatatctaggggaatctcacttaggaggaagccctacttgtaatattataaggtactgttattaagtaccttataaaattagacatcttgcaactcctcctccaaattatgtggcatttgagtagtttgcttgtgcctcacatgtcaacattaaactttgtggaggctggatgcagtggctcacacctgtaatctccaccactttgggaggctaaggcaggagtttgagggtgggagtttgagactagcctgggcaacatagcaagatcccatctctacaaaaacattttaaaaataagtaaataaatttaaactttgtgaaattatagctaatatgaaaatgtcctttcaagggcatgggagccacctttattttttagtgtccaccatgtgccatgcactgtggtatatgtatgcatatcatctcaaccaatccttaaatcaaccttatgagatagatatttgcatctccattttactaataaactgaggctgggtgctatggctcacgtctgtaatcccagcactatgggagtccaaggcgagtggatcatttgaggtcaggagttcgagaccagcctggcaacatggtgaaactctgtctctactaaaaatacacacaaaaaattagctgggtgtggtggcaggtgcctgtaatcctggctgctcgggaggctgagccatgagaatcgcttgagcccaggaggcagaggttgcagtgagccgagatcgcgccactgcattccagccagggtgacagagcgagactccatctcaaaaaaaagaaaaaaggaaaagaaaaaagaaaaaaacaaattcaaagaagttaaatacgttgcccaaagttgtacaacacagaactgaagccaagacttttatggacacagaaaaagttggttagtcctacagatggaaatttcatctcagtaggattatatagctatttcttttattaataaaaattttctattaagtgtaccagagccacttttcagctctgaggataaggaactttataggtgcctagatgagactctttttattcccctagaaatgttgaaatttttgctctaattaaattagactcaaaatatgaacattccttgaacatataccacttagtcatccagacctttaatatctaaagtagtagtagtagtgattggaaagagaaagttttcagtgatggtgcagtgttttttttgtgtgtgtatgtgtgtgtgtgtgtgttttgtttcggttttttttttttttttttgagatggagtttcgctctttttgcccaggctggagtgcaatggtgtgatctcggctcactgcaacctccgcctcccggcttcaagcaattctcctgcctcagcctcctgagtagctggaattataggcacccgccaccacacctggctaattttgtacttttagtggagacgggggtttcaccatgttggccaggctggtctcgaactcctgacctcaggtgatccacccaccttggcctcccaaagtgctgggattacaggcatgagtcactgcacccggcctgtgtgtgtgtgtgtgtgtgtgtgtgtgtgttttcaaactcatgggcaaattcaagttcagatggtgcacttttcattgattaatgttatagcaaatgtcagtttgttttcttcagtttctgctgatggttttaactggcacagaaagtatttattcaaccttacaaaactgtgtaagttgtattgtgatacagtttattgacttgtacagtattgtcattacaacccattcaggtatgcatgaatctgaagcagaacaccatttaagactggtgctgtataatataattcctacagatgtgggtccagggaatagaactgagcctgtcttttttttaatgttaagcaggttacccccagtggggcttctactagacatctctccatttggtctcttcttacactccaacccagcaggaacagttaataattggatgtttataaaatgggggtaaaagggtttactgtgatggatcctggctatccctctaggaggagacctttgcttcagcaatggtgtcttcatcctcgcagcctgaagctgcttcatttccttaggtctgttgtgttttctgtaaagtgttaggaattctggatatttttgtaaaagaatcaagatttgtataaaatgttgtttacagatcttttaatgaataaatacataaaccccccacaga

SEQ ID NO: 6797 - DNA, 385 bp, Homo sapiens
ggaagtgggagttgggtcgtgatgtgacagtcaaaggacttagccggaaagggtagagttaatgcatgacagacaaggggactctcatctgaaaatttgtgtgtctttgtttcttctcaggttctccttactatgacaatgtccgccccctctcttaccctgattcggatgctgtgctgatttgctttgacatcagtagaccagagaccctggacagtgtcctcaaaaagtggaaaggtgaaatccaggaattttgtccaaataccaaaatgctcttggtcggctgcaagtctgatctgcggacagatgttagtacattagtagagctctccaatcacaggcagacgccagtgtcctatgaccagggggcaaatatggccaaaca

SEQ ID NO: 6798 - DNA, 397 bp, Homo sapiens
ggcggccctgtacccgagcacggacctctcgggcgcctcctcctcctccctgccttcctctccatcctcttcctcgccgaacgaggtgatggcgctgaaggatgtgcgggaggtgaaggaggagaatacgctgaatgagaagcttttcttgctggcgtgcgacaaggaaactaatggaacgaattcagaatcctgagtattcaacaactatggatgttgcacctgtcattttagctgctcatcgtaacaactatgaaattcttacaatgctcttaaaacaggatgtatctctacccaagccccatgcagttggctgtgaatgcacattgtgttctgcaaaaaacaaaaaggatagcctccggcattccaggtttcgtcttgatatatatcgatgttt

SEQ ID NO: 6799 - DNA, 2416 bp, Homo sapiens
aaaataaatgggaatattcaaaagggagaattaattacatataacttgacagagctaattaaaccagaagcttatgaagtccgactgactcctctcaccaaatttggtgaaggagattcaacaattcgtgtgatcaaatatagtggagaatttcattgtggatttgaagatggtaatatttgtttgttcactcaagatgatacagataattttgactggacaaagcaaagtacagcaacaagaaatacaaaatatactcctaatacaggacctaatgctgaccgtagtggctccaaagaaggtttttatatgtacattgagacatcacgacccagattggaaggcgaaaaggctcgacttctcagccctgttttcagcatagctcccaaaaacccttatggacccacaaacactgcatattgtttcagcttcttttatcacatgtatggacaacatataggtgtcttaaatgtttatctacgtttgaaagggcaaacaacaatagagaatccactgtggtcttcaagtgggaataaaggacaaagatggaatgaggctcatgttaatatatacccaattacttcatttcagctcatttttgaaggtatccgaggtcctggaatagaaggtgacattgctattgatgatgtatcaattgcagaaggagaatgtgcaaaacaagacctagcaactaagaattccgttgatggtgctgttgggattttggttcatatatggctttttcccattatcgtcctcatctctatcttaagtcctcgaaggtgaccttatcctggcagaggctataaaagattcaccaggcactggcatgaagaaagagtctttgtaaatggacattgaacaaacaaactaccaaagattcctccactgactactgactcaaaaataaaataataaaaacaaatttttttaagcactggggataaaaagacatcatggaagtataacttattccagactaaacataaaagataatcttgacctgagtagagaagagaccttcaggtgcttttgtggctaaaaagattacagcgtcatctggttgaactctggaaaaaaaaaaaaaaatgaaaaaaagaaaaaaaaaagagctatagaaatccttgtcaaagcacaaagtcatggctggttttgtttcaaatgaatagtttgcttgttaccatggaaacctaatggcctgccaacaaaaacctcactgtaaacagggtacgtgaagagctggcatttattttccttacgagaaggttttcgtagagaattaaataaatgtaggcccttttacctttggctgttacccttccttgaaaataacccgaactcagaattatttaaagcattcatgtttctccccaccttatccccatcccacctttattattattatttttctcccatggctaagctagataactgtatgctgtctctttttgcatgcactactatccaggatggtaaacctgggcttacatgttacacaggcttatcggagtttgcttgcggccacttgaacacccaaactacgtcatctgttccaatgaagaaaccaaaccaccatcttttataaattgccatggaaaccaagtgccttcaatgaaacaagcctgaataattttcaactcagaagcttgcactgctaagagtggtttgtgtaaaactattttataaacaaactacagagcctaaatgtgcaaattacaggcaagacaacaaagccgcttctgaagaagaaaggaccgaagctgctgcgtaagcccatgcagacaagatatttgttgtttaacctcctagacagccatggcctttcggcttattgtccattagaaaatcacttccattgagaccagacatggagcaacactttttttcttccaggttattaaatgggtcaaccagagcaaaaggttattaagaatacttagtgcagaaggtggtaaaacacaaaagtgatttttttactctaacctccatttgaaatgaaattggccctagctttagagggaacaagaaaatgtttgggattgcagtgcatactaactctacagtggaactgggcctgaaaaatctggctttattctaaactctgagggtaatatgcctctgccctttagtcagactctgtgcaaattgtgaaatattattttattattttaccaagattataaaaacacttttacaaaaaaacaaaaacctgtaaaaataattttgagctacctgacgacaaatcatatctttaaccagccagttttccaatgcattgtaaatttcacttaaacctgttggttatgaaaatttgaagatcattttccttaaattatctcagcttttaacttcatttaaaaagacttttgtctaagaagaatattattattatatgttctttcaacaccccaggatt

SEQ ID NO: 6800 - DNA, 5289 bp, Homo sapiens
aggctatctccagccgtggccgatggccgtgccgggggcagagcccgctcccctccgcgcgttgctacgtgcggggatgacatggatccagacgccgtcaactacgggaaggaggaggcgagagttggagcgcgtgggagcgcagaggccggaggagggagggggggacaccgagcgcggagagcgcggagagcgcggagggaggcgcgcgcgggagcgaacaccctcccggatccagagcccggcggcggcgaagcagcagctgcggccgcgcccttgccagagccggtgcgtccgcctagccccgctccgcctgaggccgtcagggctcccgaggatggaagattcccaggagacatcgccgtcctccaacaactcctcggaggagctcagctctgctctgcacctgtccaagggcatgtcgatcttcctcgacatactgaggagagcagacaaaaatgatgatggaaaattatcctttgaagaattcaaagcatattttgcagatggtgttctcagtggagaagaattacacgagcttttccataccattgatacacataatactaataatcttgacacagaagagctatgtgaatatttttctcagcacttgggcgagtatgagaatgtactagcagcacttgaagacctgaatctttccatcctgaaggcaatgggcaaaacaaagaaagactaccaagaagcctccaatttggaacaattcgtaactagatttttattgaaggaaaccctgaatcagctgcagtctctccagaattccctggaatgtgccatggaaactactgaggagcaaacccgtcaagaaaggcaagggccagccaagccagaagtcctgtcgattcaatggcctggaaaacgatcaagccgccgagtccagagacacaacagcttctccccaaacagccctcagtttaatgtcagcggtccaggcttattagaagaagacaaccagtggatgacccagataaatagactccagaaattaattgatagactggaaaagaaggatctcaaactcgaaccaccagaagaagaaattattgaagggaatactaaatctcacatcatgcttgtgcagcggcagatgtctgtgatagaagaggacctggaagaattccagctcgctctgaaacactacgtggagagtgcttcctcccaaagtggatgcttgcgtatttctatacagaagctttcaaatgaatctcgctacatgatctatgagttctgggagaatagtagtgtatggaatagccaccttcagacaaattatagcaagacattccaaagaagtaatgtggatttcttggaaactccagaactcacatctacaatgctagttcctgcttcgtggtggatcctgaacaactagatgttcctagacattttctttatggttccaagtgcaaaacaggtgttcttatctaaaacgtcaattagaaaattatctgcggttgttaatctactgtatatttttgtttggtatatttactaagtgcactctttcaaaacttattctataactttatcaattcatgtgaattttagctcaattttcaaagttcactaatattctcaatatttaatgctaaatgctttgctacattgtaactcacctaaaaccttttagtgacaaaatcctaatatgtggaaaaaagcatatgcataaaggaataatattgtgaaaatgaatctgttatgataaagaaaaaataaagtggaaacttttagagtattacttcatagggcagattttgtaaactgtcgtatactgtaaagggttaaatcagcgttttgtgatttttaagtaactgtgagtgaagtttattcttcaacaatgtctactccatccccaacccaactcacagccctatgactactatctttgcattagttaaaaagttagtatataggcatcaaacaaccttggctgtaacctatagaatctctatccacgtatcaggttatagactggtttttcaaaagtgaacaatcctgtgataagttggagtaccatttagtaatacagcaacattgtgtcatttattagcatcataattctttgttatgtaagttaaatatatcaagaaagaagagactgtttggaaaaatgtggttcaagttttatgctatatagttttggtatgcgatacagacagctaacttttcttatgaaaaatacatatttgcatgtaaacaatgatttcaaaatacttgaaaaataaaattttaacccaaatgaataactaagaaatataaaacaagcacaaaatcttagggaagtcataaaatagtagtgaaagtattagacagaagacatctgttttcgaatttcaacactagaatgactaaaactatctacctatagaactatctgtagatagtatactatctacactctgctcaacaagctcagaaattaaatatttttaataataaaaatctgttctggttataaaccttgctaatgaaaatacaatacatataaaaatgtatagccatgttattttctagtataaattcctttgaaactataagtctttgaggaaaattataaggtaaaattttcctgtttttccccctttgaaaaactcaggaaaaaaggaagattgaactaataaaattttatttcttaaatataaatttgacctaaaatattttctcaaactaattcatgaaacagcaacttttaccaatacctttgtatactctcagttctcattcagtataaataaaattttaaaatcctttcatagttctattagaaataagtagtaaattttgatatattgtacatacacacgtgtgtgtgtgtgtgtgtgtgtgtgtgtgtgtgtgtgtgtgtatttgtgtgcctctggtcaactctaaggatgacagacactgtgtaacaacacctgggtcaactcttttaatttatatacaaagcaaagaacaacattaatggagatgcacaatgattattcaaacaagctatatatatgtacaaaggcaaacagacacataacagtctctgcagactgattgtatatagtaagaaaagatcaaaagactttaaaacctaaatgacttttgacatacaaactcttcttgagaatgtttgttgtaaatggtttcaaaaatacaaattatagccaatcaaaacattgctttggttggtgcatttaagtatccaactcaaaaagcatatcaaatattttgggtactaggcagtttccaaagtagcatggtagtattacttgttaaaagggttctgttttcattaacagtactaagtggaagggatctgcagattccaaactggaataagctctatcatattctgaaacaagaattagaatgacttgagaacgggcaaataacaaagcaaaccaatataattatatggtcattctgaccccagctcttatacaaattatacatgtatttttgtgtatgtttgtgagagttgtatgtatgtgaatgtgtgtgagtgtgtattcacatacacatatatactggaacctatagtagaaaaggaaactagtagggccaaaaaaaaaaagaaaaagaaaaagaaaaaagaaaaaaaaagaaaaaactgggacctaagtataaatatctcatcctaaagtaaacaataagtttatagttaacgaagatttttttctatttaaaaccccattttcctaaagaacaaagtagtaaaataaaaaaaaatttaaaaaattaaaaaataaaaaaaagaggtcactaaaagaccaagatgggaaacgtaacatggaatacaagcttgaatctgggaaacaagctcaaaaaacagtgaaaaaaaaagtactggtttaggagttcaaaattcagtgaaacaaactttttgccaatagacctagggatctaagaaatagaattagggagagtttacacttacttacctatatatcagcagatttttctggaagaaaccctttttttttttttttttaaacagtaacatccagagtgacaaattgcaggagatttaatgtataaaatttctaggaattaaaagcttaaacccaaaaattgttcatccatatataagaaattatcgaattaaaacttaatgtatgtcaattattttcaaatgtctaaattcctttggaaataaaaatatcagttttactttgaaattgctcaacttctgctattcatatggtctgattagtgacataagtagcagccgtttttcaacttcagtttcattcactaccattgtttccaaattatcaatctctgctagtaattatgaatttaagaccatattattatcaaaaacctagagaccaatcatatatctgaaaagaaatacccattaaaaattctgcctcctgtttattgagaactatgcattgaacattctgaatcattctaagcctctggagagactgtaatgatccattcatgagctggtatgaaatcagtgggaagcagaacaacagaaggaactttaaaagcaacaagcaattatgtaccatatatacactgtagcaaatattttatatttgagagtctttacagcttacatttccattccattattacaagtgatgaaaaacaaaaaattgcaagtagtatgcaaattataaatatacagtcttcccacttcactaaccaaattcctactttccagtgttacttcccaatttatgcaggaaacctcctgcaaagctgaaactgattagaaaattctttatattttaaaatagctctttctcatttttagagaagtcaaatagccaaccatcaaaattaagaataaattgaattgtcacagtccattacagttattgttgctagatccacctcatttgcagatgtccaaacttaaattcatctgttcttaaaatgctacttaaaactttggttgttttcctgtaatataaaagaaaaagttaatttatcaattgattgaatacagtttttactaattagtttatcaaaccaaatactgtgaacgtaccaggtgtttacagatttaaatgcatgttaccatagaaactattaaagtaactagaactgtcaaataacaaaacggctcatgtttttaaaatatatgtaactcattttaaaatatattaaattgtattccaaacctgttcttctgtttctgtggcacctaggtttaaaatatgtattaatgtgtaaatcacaagtaaaatgaattctaatgtacaagtttgttttaaaaagtgtatgtcaagcttttatttacacaataaaatgttattaaagatggaaagtctacaaatg

SEQ ID NO: 6801 - DNA, 1163 bp, Homo sapiens; identical to SEQ ID NO: 6354

SEQ ID NO: 6802 - DNA, 684 bp, Homo sapiens
gaacgccgcgcccaccaattcggttgccggccgggggccccaggcttgcggccacccgcctccggctggagggctgaattcgagtcgaaagcccgtgtcgggctggaaagaagaaaccgccaacctgagaacgctttcggtggcatggaatattcacatgggagagccgcatgaggccgcccaccacgcttcctgaaggatgcccgtgtggaagaattttgacgtgccagtgtcctcgttctacagggtgttccattcttccgcaatctcagaaaaatgggactaaaagaaactattttgtaaaataagaagacttccatttttaatgaccaacatgtattaagatggacacctactctacgaaacacgaagttctatggtctcgaagaagcccgtgcctgtttaaaactgatcctaactaaaaacagacttgagtggatatgagaatgttggttagtggcagaagagtcaaaaaatggcagttaattattcagttatttgctacttgttttttagcgagcctcatgtttttttgggaaccaatcgataatcacattgtgagccatatgaagtcatattcttacagatacctcataaatagctatgactttgtgaatgataccctgtctcttaagcacacctcagcggggcctcgctaccaatacttgattaaccacaaggaaa

SEQ ID NO: 6803 - DNA, 549 bp, Homo sapiens
cttcttggaggatggcccatgaagacctccaaacaagctggaggggccagtcacttgctgaagactagcgaagtggagggggaaagcccgagggagctgcagactcgaccactgcgccctcccctcctctccctgcaaggagcccaaggtagacgcaccctctgaagatggtgactccctcctgagaagctggaccccttggtaaaagacaaggccttctccaagaagaatatgaaagtgttactcagacttatttgtttcatagctctactgatttcttctctggaggctgataaatgcaaggaacgtgaagaaaaaataattttagtgtcatctgcaaatgaaattgatgttcgtccctgtcctcttaacccaaatgaacacaaaggcactataacttggtataaagatgacagcaagacacctgtatctacagaacaagcctccaggattcatcaacacaaagagaaactttggtttgttcctgctaaggtggaggattcaggacattactattgcgtggtaagaaattcatcttactgcctcaga

SEQ ID NO: 6804 - DNA, 1954 bp, Homo sapiens
acatgagccagcagttgctgccctcccgaagtggtcctcggaggcagcgcaccccttcattttggcgaaccgaggaggaagggaggaaccgtgtgggggaaatctagaacttctggttccccaaggacccagcagactgtgttctggctacaaggtgatcactgccaccaggtcagtgcaggattcctccaatgtagatgggccgggagccacaacttgcgcggagcagcagcctcgccgaccactcagagagaagccgcgcgacagccaggcttggcccggacggcgcccccaccctgcgcgcgcgatccaaggttctcacctggagcgctcaggggttccttcaggagtcacaagtactattgggttggaaaatctgggagaataatagtttacttactgatgaaactgctgtattatcattcattaagctggagcagatcacagtttgagggtactaccattaaagataccttcttctcagcaaatctatgataaaaaatataagtaacagaagaagaaataactgttatttgtcaagtgacaagcttttaatgtcagaatggctcacctaaagcgactagtaaaattacacattaaaagacattaccataaaaagttctggaagcttggtgcagtaatttttttctttataatagttttggttttaatgcaaagagaagtaagtgttcaatattccaaagaggaatcaaggatggaaaggaacatgaaaaacaaaaacaagatgttggatttaatgctagaagctgtaaacaatattaaggatgccatgccaaaaatgcaaataggagcacctgtcaggcaaaacattgatgctggtgagagaccttgtttgcaaggatattatacagcagcagaattgaagcctgtccttgaccgtccacctcaggattcaaatgcacctggtgcttctggtaaagcattcaagacaaccaatttaagtgttgaagagcaaaaggaaaaggaacgtggggaagctaaacactgctttaatgctttcgcaagtgacaggatttctttgcaccgagatcttggaccagacactcgacctcctgaatgtattgaacaaaaatttaagcgctgccctcccctgcccaccaccagtgtcataatagtttttcataatgaagcgtggtccacgttgcttagaactgtccacagtgtgctctattcttcacctgcaatactgctgaaggaaatcattttggtggatgatgctagtgtagatgagtacttacatgataaactagatgaatatgtaaaacaattttctatagtaaaaatagtcagacaaagagaaagaaaaggtctgatcactgctcggttgctaggagcaacagtcgcaacagctgaaacgctcacatttttagatgctcactgtgagtgtttctatggttggctagaacctctgttggccagaatagctgagaactacacggctgtcgtaagtccagatattgcatccatagatctgaacacgtttgaattcaacaaaccttctccttatggaagtaaccataaccgtggaaattttgactggagtctttcatttggctgggagtcgcttcctgatcatgagaagcaaagaaggaaagatgaaacctacccaattaaaacacccacttttgcaggaggacttttttccatatcaaaagaatattttgagtatattggaagctatgatgaagaaatggaaatctggggaggtgaaaatatagaaatgtctttcagagtatggcaatgtggtgggcagttggagattatgccttgctctgttgttggacatgtttttcgcagcaaaagccctcatagctttccaaaaggcactcaggtgattgctagaaaccaagttcgccttgcagaagtctggatggatgaatacaaggaaatattttataggagaaatacagatgcagcaaaaattgttaaacaa

SEQ ID NO: 6805 - DNA, 545 bp, Homo sapiens
ttgcgcctctcctgcagtctgattggcaccggctcccattccggctccagcctccaatccgacccccatttcggctgcagcctcggacctagctccggccctcggtctatccggttgcatcctccctccctgttccggatcttatcttgcgccagcgcctactccaggatcccgtagccagacctcaagccatggctggtcccttctcccgtctgctgtccgcccgcccgggactcaggctcctggctttggccggagcggggtctctagccgctgggtttctgctccgaccggaacctgtacgagctgccagtgaacgacggaggctgtatcccccgaggtatttgctgacctgtttgaccctgtgatccaagagcgacacaatggatatgacccccggacaatgaagcacaccacggatctagatgccagtaaaagtcagaactggccgaagcatccgaggactcagtctgcctccagcttgcactcgagcagagcgacgagaggtggaacgtgttgtggtggatgcactgagtggcctgaag

SEQ ID NO: 6806 - DNA, 3281 bp, Homo sapiens
tggccgaagtgaggttcgcgagtctctgggtcgcgacgggaaggagtgaaacacctctctgcgcctgcgcgctccgtgcctgcgaagcaaacccggcctcaccttttcctgcccgaagcagaagattctcgcagtcctggtttctccctccagaagaccccccacccaaatcctctgtagctcctggtagtgccctgacccctgctgccaccgtccttcagagagcaacggaagagcttcccggagggcgaggaaaagagggaaagtagccagcaatgtcgaacgcaatgtataataagatgtggcatcagacccaagaagccctcggtgctttactcgataaagagcctcagaagatgattgaaccacaaagaaatcaggttttcatctttcaaacattagccaccttctacgtaaagtatgtgcagatctttagaaacctagagaatgtctacgaccagttcgtccacccccagaaacgaatactgatcaggaaagtcctggacggggtgatgggccgcatcctggagctgaagaacgagatggtggagctggaactcacggagttccattatttcgatgatatcctgcaggatctcaagctggccccccaacaattagatattcccatacccaagtattttttgaaggagaagttggaagtaataaaaggaagagagaaaattcttgctcaaatattagcggacagcggaatagatacatctgacatgaaataccctgtaaagagtatccctttcgatgaggctgttaaattaatccagattgctgagagggcacggcaaggtcgcctaagggctttattcatgaagcaaatctatctgcaagaatatagagcaaagcaatccaagatgcttggcaagaaagtgacagatacctgggctgctgcactccgcattcagaaggtttggcgacgtttccatcaacgtaaggaaactgaaaaactgagagaagaggagatgatcttcctgggtatgaatccacctcctctctttaatgaagtcagtgctacagtaatccaggctgaaaaggtggaccgcctgcggaatgaggtgcagataaagcatgaagaggactacagggaagccctggttaccatcaagaatgacctaaagttgatagaaggcgtggatatcaaggagaaccttcaagaccagatccggcattggttcatcgaatgcagaaatttaaccgggacatttcctgactaccctgacgttgaagaaggagggtcagctattattttttctgacaagaccatacaacaggttattgaggatatcatagcaaaccaagaggaagaagaaaaaaacaaaaagaagaagaagaaaaaggaaaaacaacccaagaaagccaaaaaacaaaagaaaggaacaaaggagaaaaataaggaagaagacgaaaaatggaaaatgtcaccaagtctttttcttcctgcaatgaaggaaggatgtaacgcatacaaagaaatctggatgaaaaaagatgagtcttggaatttctctcaggactatgatccagaactgatcaaagaggagaaacgaaaagaattacagtcagagatcaggatacaggttgatgagttgatgagacaggaacttaaaaacttaaagctagctgtggacagagaaagggagcgcccagtgaaagcaggaaagaaaaaggacaagaaaggaaagaaaggcaaaaagaaagagaagaaggcaaagaaggataaagatctgacagctgacaggaccatcgagtctctgtataaggaactggtggaagaaggattactgatccaggctctgaaagtcaacctctctgattacattggtgagtacagctacctggggactactcttcgccaggtgtccatagaacccatgccctccctcctggatgtcagacagctcatcacattgtacggaatctggccattaggttctgcagcagtgcatgagaaagctcctttggtgaaatcgctactgttagccgggccgtctggggtagggaagaaaatgctggtccatgccatctgcaccgaaacgggagccaacctcttcaacttgtcctcctctaacattgctgggaaataccctggcaaaaatggcctccaaatgatgctgcatgcagtcttcaaggtggctcgacagctccagccctccgtggtgtggattgaagacacagaaaaaaccttctacaaaaaagttcccaacgcagaaaagatgaatgaacctaaacgcctgaaaaaacaccttccccaaatcctgaaactcctgaaaccagatgaccggattctgattgtggggaccacacggcgtcccttcgatgctgaactccaatctttctgcaaagtttaccagaaaattattttggtgcccagaccagactatgcttccagatacgttctgtggaagcaaatcattgaacgcaatggaggagtcctcaccagtgccttgaatgtcagctgcctggcgaaggtcactgacggcttcacccaaggacatatagtcgaagtggttaaaggcgtgctcacagatcagagaatccggcggcaaattcataaacctctcactgcagttgagtttattacggcgataaccagcatgaatccagtgtacaaagaggaagaagagagctttaagaactggtatgccaaaactcctctgggtaaaaaacgtgccttggcgataacaggaggcagcacagaaaaggcaaaggacaaagggaaaaggaaataaaagaaagagaaaaaggcaaaaaagaaaaagtaatgcctttctgaagaaccatgcttgagtctctctgggatggagaggaccccaactcgccaaagaaaagattcaccattgcccgcctgaagaagccctcaggggaaggaacttagcagtgtgcaggtgagctgatgccgcaaacccgctaaccactgcatgtgctgttatgcctttcccaggctggacacctagctgggtgttcatcataactttccacagctttaatccacgccaagtttgtatataactgaaattcactcttgacaccctccacagtctttccaagttggactcttcctctcatcagtactagttgtcaaatttaaaatgtgacagttaaagaatattctagtttgacaattagtaagcaatgagtatatcatcagtacactagctttttattaatccatgtacactgtatagtatcttgcatctattttaataaattaattctttgctctagtaatagattttatataatgaaataaaggtgttgtccttgaa

SEQ ID NO: 6807 - DNA, 810 bp, Homo sapiens
cctggacaaggagagagtgcggctgctgagagccgagcccagcaatcccgatcctctgagtcgtgaagaagggaggcagcgagggggttggggttggggcctgaggcaaggctgaggcctccgtagaagacagcgccttgcttatgcagaccttgatggaggccatccagatctcagaggctccacctactaaccaggccaccgcagctgctagtccccagagttcacagcccccaactgccaatgagatggctgacattcaggtttcagcagctgccgctaggcctaagtcagcctttaaagtccagaatgccaccacaaaaggcccaaatggtgtctatgatttctctcaggctcataatgccaaggatgtgcccaacacgcagcccaaggcagcctttaagtcccaaaatgctaccccaaagggtccaaatgctgcctatgatttttcccaggcagcaaccactggtgagttagctgctaacaagtctgagatggccttcaaggcccagaatgccactactaaagtgggcccaaatgccacctacaatttctctcagtctctcaatgccaatgacctggccaacagcaggcctaagacccctttcaaggcttggaatgataccactaaggccccaacagctgatacccagacccagaatgtaaatcaggccaaaatggccacttcccaggctgacatagagaccgacccaggtatctctgaacctgacggtgcaactgcacagacatcagcagatggttcccaggctcagaatctggagtcccggacaataattcggggcaagagga

SEQ ID NO: 6808 - DNA, 2291 bp, Homo sapiens; identical to SEQ ID NO: 2627

SEQ ID NO: 6809 - DNA, 5967 bp, Homo sapiens
gcggccgcttcccaccgtccctctccccttactggcagagcgcgctgcgggcggactcccgggcccggagcagcccaccggccaccccaccgcccacccggctcccggtgtctcctcccggccgctctacccagcaactttccgtgctttgttccccgactggaaatgctttacggaagcgtcttggacagggtctccgccaggcgacaagagctcggtgctgagatgtgttacgttctcatctccccatcaattatggatggaaacaaataaggaagagtcaattttgctgagccccttctccggcaacgagaggcgttctgcagccgggagggagccgccgctcgcgccggcagccgctggcaggggcatggtgaggaggaaggtagctcagtggcatttctgagcaggggccaccctgacttcaccttggcccaccatgagggtcttcctgctttgtgcctacatactgctgctgatggtttcccagttgagggcagtcagctttcctgaagatgatgaaccccttaatactgtcgactatcactattcaaggcaatatccggtttttagaggacgcccttcaggcaatgaatcgcagcacaggctggactttcagctgatgttgaaaattcgagacacactttatattgctggcagggatcaagtttatacagtaaacttaaatgaaatgcccaaaacagaagtaatacccaacaagaaactgacatggcgatcaagacaacaggatcgagaaaactgtgctatgaaaggcaagcataaagatgaatgccacaactttatcaaagtatttgttccaagaaacgatgagatggtttttgtttgtggtaccaatgcattcaatcccatgtgtagatactacaggttgagtaccttagaatatgatggggaagaaattagtggcctggcaagatgcccatttgatgccagacaaaccaatgttgccctctttgctgatgggaagctgtattctgccacagtggctgacttcttggccagcgatgccgttatttatcgaagcatgggtgatggatctgcccttcgcacaataaaatatgattccaaatggataaaagagccacactttcttcatgccatagaatatggaaactatgtctatttcttctttcgagaaatcgctgtcgaacataataatttaggcaaggctgtgtattcccgcgtggcccgcatatgtaaaaacgacatgggtggttcccagcgggtcctggagaaacactggacttcatttctaaaggctcggctgaactgttctgtccctggagattcgtttttctactttgatgttctgcagtctattacagacataatacaaatcaatggcatccccactgtggtcggggtgtttaccacgcagctcaatagcatccctggttctgctgtctgtgcatttagcatggatgacattgaaaaagtattcaaaggacggtttaaggaacagaaaactccagattctgtttggacagcagttcccgaagacaaagtgccaaagccaaggcctggctgttgtgcaaaacacggccttgccgaagcttataaaacctccatcgatttcccggatgaaactctgtcattcatcaaatctcatcccctgatggactctgccgttccacccattgccgatgagccctggttcacaaagactcgggtcaggtacagactgacggccatctcagtggaccattcagccggaccctaccagaactacacagtcatctttgttggctctgaagctggcatggtacttaaagttctggcaaagaccagtcctttctctttgaacgacagcgtattactggaagagattgaagcctacaaccatgcaaagtgcagtgctgagaatgaggaagacaaaaaggtcatctcattacagttggataaagatcaccacgctttatatgtggcgttctctagctgcattatccgcatccccctcagtcgctgtgagcgttatggatcatgtaaaaagtcttgtattgcatctcgtgacccgtattgtggctggttaagccagggatcctgtggtagagtgaccccagggatgctgctgttaaccgaagacttctttgctttccataaccacagtgctgaaggatatgaacaagacacagaattcggcaacacagctcatctaggggactgccatgaaattttgcctacttcaactacaccagattacaaaatatttggcggtccaacatctggtgtacgatgggaagtccagtctggagagtccaaccagatggtccacatgaatgtcctcatcacctgtgtctttgctgcttttgttttgggggcattcattgcaggtgtggcagtatactgctatcgagacatgtttgttcggaaaaacagaaagatccataaagatgcagagtccgcccagtcatgcacagactccagtggaagttttgccaaactgaatggtctctttgacagccctgtcaaggaataccaacagaatattgattctcctaaactgtatagtaacctgctaaccagtcggaaagagctaccacccaatggagatactaaatccatggtaatggaccatcgagggcaacctccagagttggctgctcttcctactcctgagtctacacccgtgcttcaccagaagaccctgcaggccatgaagagccactcagaaaaggcccatggccatggagcttcaaggaaagaaacccctcagttttttccgtctagtccgccacctcattccccattaagtcatgggcatatccccagtgccattgttcttccaaatgctacccatgactacaacacgtctttctcaaactccaatgctcacaaagctgaaaagaagcttcaaaacattgatcaccctctcacaaagtcatccagtaagagagatcaccggcgttctgttgattccagaaataccctcaatgatctcctgaagcatctgaatgacccaaatagtaaccccaaagccatcatgggagacatccagatggcacaccagaacttaatgctggatcccatgggatcgatgtctgaggtcccacctaaagtccctaaccgggaggcatcgctatactcccctccttcaactctccccagaaatagcccaaccaagcgagtggatgtccccaccactcctggagtcccaatgacttctctggaaagacaaagaggttatcacaaaaattcctcccagaggcactctatatctgctatgcctaaaaacttaaactcaccaaatggtgttttgttatccagacagcctagtatgaaccgtggaggatatatgcccacccccactggggcgaaggtggactatattcagggaacaccagtgagtgttcatctgcagccttccctctccagacagagcagctacaccagtaatggcactcttcctaggacgggactaaagaggacgccgtccttaaaacctgacgtgccaccaaagccttcctttgttcctcaaaccccatctgtcagaccactgaacaaatacacatactaggcctcaagtgtgctattcccatgtggctttatcctgtccgtgttgttgagaggatgatgttgtaagggtaccttaaaacaagagactcgcttgtattttaagagaaccaagtggccaaagaaactctttctaactttggcaacatcagaacttgccacatgtagctactgcagcaaggcttctgtgtacttgcctgaaaacaaaggaaggtgctggtcattccatttcttttgtttgaagctaaagagatgtgtagctcacaggggctaccttaccagtataaagagctgataacagtactcagaagaatctgtgaacaaatacttgaaaatgggttcaatgtagactgccattatgtgtggtcttcccattaaatgtgaacattttaatatgtatgcattcaccttgcctcttgcacaaatgtcaaaaaaaagatggtaatatctcaaagaaatgaacttgtagattaccaagcagtttgctaaaaattcaatctttgacccaagctgtagcatttttttttcatgtgtggcatctttttcatgccaccaacaaacttgttgtgtgtgtgcgtgtgtgtgtgtgtgtgtgtgtgtgtgtgtgtgttctgtacccactaggatttgtttaggtgcccattgcatctttttgtgctatggagttgtttacattaagcatgaccgaacgagagacaatactatttcccacaggagtccattgggttcagctttgaaagaggaatagaatcgaggctcctttgaccatcaaaatgatgaactttacttatgtggtacccaatgccagaatgtaagagttgcaagtgattttgtgctgctattcattaaaacttgtattccagtcttgccagcttaaggagatcaagatattaagaggtatccttgatttattttccagtattcagtagtaaaattttcctgtccactgtgaatcaaagcctgagtcactctatttaaccttggacacactaataaggttttattttgattgtgttcgtttccccccccccaatagtaaaatttctcctcctttaactcctcctaccccccaaggtaagaaacaaaaaacaaacaaacaaacaaaaatagaagacaaaagaaagacatatgaaaggaattgtaattggcttaacagaaacagtctgtaaaaacctaacagtggtgcaatcatgttgtctgtgttgtgttatgtgagaattttctcctaagtcatgcaggtaatgacaatatactgtaaataccacatgtgagtttacctgaatctgtgcattttgtgccttattcatgagaatgatagaagtactaaaatctgtcaagtgttttcagtatagcacattatttactgagtgccagttgtaaatgtttttcaaccagcacctaaaaagactcttttcaaaaaatcacagaaacaacctaggacaattatttgttacataatccgacctcatagcagcattacattctttgccgtgataaacattccactcctgctttcctaaggatgaaacagtgataatgtgaactcaaatgaggtttcctgggtaatgtgacacctgcagaaactatagagcgtcatttatacgtagtttggcagaaaccacttacggctgatgatgcgcaaccctgctgactgtttcagttaatatgctgcacaccacacacttgtttagtgaaccaaatctagaaagtaccaaggcagaggtatgctcctgctgtaatcaggcaaatgagttcaactggatttcttttgacaatactgttggtacctattacttgggggaggacatgttgcagaagaccagatcatttttatacagaatgtgaaatactgatacagttattcttttttttaaagaacattgttttataaagaacgtgatttccagtgatctctggaagcgctaaagctaaaatttctgttcttgaaacacttcagctttgcaactaaaatattacagattaataataaattaaaccaaccaatgataaacactactcagtccaccaacaacaaacgtgtttgaattcaccttaccaatattaatcccagcgtgtgtaaaacagaacagtaactctatgtgaccccagataacattttgtaacattgtgcttccttgtagtttgtaatgtgagttcaatcagtatttatgttgaaatttctaacattaaatctagtctctatcctgttaatttaatttttaaatgctttatccatttgtgcaaaggtaaacgcagattgtatcttttttaatggtacggcataaaaagtaaccctcaagtgaagtgtctctatactgttttatagagtactttaacatgaatagataccttgtaaacttgtattgtggatgtgtaaataatatgtactttgggtttttaacaccgcatgtaaagtcaaaataaaatatacaaatcatt

SEQ ID NO: 6810 - DNA, 501 bp, Homo sapiens
aaaactggcattattgattatggaatccgtctcaataggagtgaaagatgggatgcctattgctacaacccacacgcaaaggagtgtggtggcgtctttacagatccaaagcaaatttttaaatctccaggcttcccaaatgagtacgaagataaccaaatctgctactggcacattagactcaagtatggtcagcgtattcacctgagttttttagattttgaccttgaagatgacccaggttgcttggctgattatgttgaaatatatgacagttacgatgatgtccatggctttgtgggaagatactgtggagatgagcttccagatgacatcatcagtacaggtaaggttttaaattgaggaccaaaactatgatttgtttctttacagtgtccctgaaagtaaagggacactgttaaatagtaaatagtagttattattcactttttaaagttgaaagaaccaacaccagatgcagcttgctaggttgtaaaatgc

SEQ ID NO: 6811 - DNA, 2286 bp, Homo sapiens
aacagctgcagccggcgctgggcccgcctggaatgcgggaacaggctgcacaccaggacttttatggaaacttgctgctggagacggcggcggcggcggcggcagcggcagccagaggactcccagcggctggagcagaagtgttagcggccagagctcccagacccctacccacagccaggcgggacgcgcacagtccctccacgcggaaagaagtaccttcgccggtcaccggctcctgcagggtgcaaatatatacagagcttcataatcagcccaagaccacatagagcaaacatgaatgatatttcccaaaaggctgagattctgctttcttcatctaaacctgtcccaaaaacctatgtaccaaaacttggcaagggtgatgtaaaggataagtttgaagccatgcagagagccagggaagaaagaaatcaaaggagatctagagacgaaaaacaaagaagaaaagaacaatatattagagagagagaatggaacaggagaaagcaggagattaaagaaatgcttgcttctgatgatgaggaagatgtatcttctaaagtagaaaaggcttatgttccaaaattaacaggaactgtgaagggtagatttgctgaaatggagaaacaaagacaagaggaacaaaggaagagaacggaggaggaacgaaaacgcagaattgagcaggatatgttagaaaagaggaaaatacagcgtgaattagcaaaaagggctgaacaggaaggagatgattcactacttataactgtggtacctgtcaaatcatataaaacatctggaaaaatgaaaaagaattttgaggatctagaaaaagaacgtgaagagaaagaaaggatcaagtacgaggaagataaaagaataagatatgaagaacaacgaccatctctcaaggaagcaaagtgtctttcattagttatggatgatgaaatagaaagtgaagcaaaaaaagaatcactttctcccggaaaattgaaactaacttttgaagaactggagcgacaaagacaagaaaaccgaaagaagcaagctgaagaggaagcaagaaaacgtttagaagaagagaagcgtgcttttgaagaagcaaggcggcaaatggtaaatgaagatgaggaaaaccaagacacagcaaaaatttttaaagggtaccgccctggtaaactcaaactcagttttgaagaaatggaaaggcaaagaagagaagatgaaaaaaggaaagcagaagaagaagccagaaggagaatagaggaagaaaagaaggcgtttgctgaagcaaggagaaatatggtagtagatgatgactccccagagatgtataagacaatctctcaagaatttcttacaccgggaaaactggaaattaattttgaagaattattaaaacaaaaaatggaagaagaaaaacgacgaacagaggaggaacggaagcataagctagaaatggagaaacaagaatttgaacaactgagacaggaaatgggagaggaagaggaagaaaatgaaacctttggattgagcagagaatatgaagaactgatcaaattaaaaaggagtggctctattcaagctaaaaacctaaaaagcaagtttgaaaaaattggacagttgtctgaaaaagaaatacagaaaaaaatagaagaagagcgagcaagaaggagagcaattgaccttgaaattaaagagcgagaagctgaaaattttcatgaggaagatgatgttgatgttaggcctgcaagaaaaagcgaggctccatttactcacaaagtgaatatgaaagctagatttgaacaaatggctaaggcaagagaagaagaagaacaaagaagaattgaagaacaaaagttactacgcatgcagtttgaacaaagggaaattgatgcagcactacaaaagaaaagagaagaggaggaggaggaagaaggtagcatcatgaatggctccactgctgaagatgaagagcaaaccagatcaggagctccatggttcaagaagcctcttaaaaacacatcagttgtagacagtgagccagtcagatttacggttaaagtaacaggagaacccaaaccagaaattacatggtggtttgaaggagaaatactgcaggatggagaagactatcaatatattgaaaggggagaaacttactgcctttacttaccagaaactttcccagaagatggaggagagtatatgtgtaaagcagtcaacaataaaggatctgcagctagtacctgtattcttaccattgaaactgatgactactag

SEQ ID NO: 6812 - DNA, 5304 bp, Homo sapiens
gaaacatggcggtgccggctcggacctgcggcgcctctcggcccggcccagcgcggactgcgcgcccctggcccggctgcggcccccaccctggccccggcacccggcgcccgacgtccgggcccccgcgcccgctgtggctgctgctgccgcttctaccgctgctcgccgcccccggcgcctctgcctacagcttcccccagcagcacacgatgcagcactgggcccggcgtctggagcaggaggtcgacggcgtgatgcggatttttggaggcgtccagcagctccgtgagatttacaaggacaaccggaacctgttcgaggtacaggagaatgagcctcagaagttggtggagaaggtggcaggggacattgagagccttctggacaggaaggtgcaggccctgaagagactggctgatgctgcagagaacttccagaaagcacaccgctggcaggacaacatcaaggaggaagacatcgtgtactatgacgccaaggctgacgctgagctggacgaccctgagagtgaggatgtggaaagggggtctaaggccagcaccctaaggctggacttcatcgaggacccaaacttcaagaacaaggtcaactattcatacgcggctgtacagatccctacggacatctacaaaggctccactgtcatcctcaatgagctcaactggacagaggccctggagaatgtgttcatggaaaaccgcagacaagaccccacactgctgtggcaggtcttcggcagcgccacaggagtcactcgctactacccggccaccccgtggcgagcccccaagaagatcgacctgtacgatgtccgaaggagaccctggtatatccagggggcctcgtcacccaaagacatggtcatcatcgtggatgtgagtggcagtgtgagcggcctgaccctgaagctgatgaagacatctgtctgcgagatgctggacacgctgtctgatgatgactatgtgaatgtggcctcgttcaacgagaaggcacagcctgtgtcatgcttcacacacctggtgcaggccaatgtgcgcaacaagaaggtgttcaaggaagctgtgcagggcatggtggccaagggcaccacaggctacaaggccggctttgagtatgcctttgaccagctgcagaactccaacatcactcgggccaactgcaacaagatgatcatgatgttcacggatggtggtgaggaccgcgtgcaggacgtctttgagaagtacaattggccaaaccggacggtgcgcgtgtttactttctccgtggggcagcataactatgacgtcacaccgctgcagtggatggcctgtgccaacaaaggctactattttgagatcccttccatcggagccatccgcatcaacacacaggaatatctagatgtgttgggcaggcccatggtgctggcaggcaaggaggccaagcaggtgcagtggaccaacgtgtatgaggatgcactgggactggggttggtggtaacagggaccctccctgttttcaacctgacacaggatggccctggggaaaagaagaaccagctgatcctgggcgtgatgggcattgacgtggctctgaatgacatcaagaggctgacccccaactacacgcttggagccaacggctatgtgtttgccattgacctgaacggctacgtgttgctgcaccccaatctcaagccccagaccaccaacttccgggagcctgtgactctggacttcctggatgcggagctagaggatgagaacaaggaagagatccgtcggagcatgattgatggcaacaagggccacaagcagatcagaacgttggtcaagtccctggatgagaggtacatagatgaggtgacacggaactacacctgggtgcctataaggagcactaactacagcctggggctggtgctcccaccctacagcaccttctacctccaagccaatctcagtgaccagatcctgcaggtcaagtattttgagttcctgctccccagcagctttgagtctgaaggacacgttttcattgctcccagagagtactgcaaggacctgaatgcctcagacaacaacaccgagttcctgaaaaactttattgagctcatggagaaagtgactccagactccaagcagtgcaacaacttccttctgcacaacctgatcttggacacgggcatcacgcagcagctggtagagcgtgtgtggagggaccaggatctcaacacgtacagcctactggccgtgttcgctgccacagacggtggcatcacccgagtcttccccaacaaggcagctgaggactggacagagaaccctgagcccttcaatgccagcttctaccgccgcagcctggataaccacggttatgtcttcaagcccccacaccaggatgccctgttaaggccgctggagctggagaatgacactgtgggcatcctcgtcagcacagctgtggagctcagcctaggcaggcgcacactgaggccagcagtggtgggcgtcaagctggacctagaggcttgggctgagaagttcaaggtgctagccagcaaccgtacccaccaagaccagcctcagaagcagtgcggccccaacagccactgtgagatggactgcgaggttaacaatgaggacttactctgtgtcctcattgatgatggaggattcctggtgctgtcaaaccagaaccatcagtgggaccaggtgggcaggttcttcagtgaggtggatgccaacctgatgctggcactctacaataactccttctacacccgcaaggagtcctatgactatcaggcagcctgtgcccctcagccccctggcaacctgggtgctgcaccccggggtgtctttgtgcccaccgttgcagatttccttaacctggcctggtggacctctgctgccgcctggtccctgttccagcagcttctctacggcctcatctaccacagctggttccaagcagaccccgcggaggccgaggggagccccgagacgcgcgagagcagctgcgtcatgaaacagacccagtactacttcggctcggtaaacgcctcctacaacgccatcatcgactgcggaaactgctccaggctgttccacgcgcagagactgaccaacaccaatcttctctttgtggtggccgagaagccgctgtgcagccagtgcgaggctggccggctgctgcagaaggagacgcactcggacggcccggagcagtgtgagctagtgcagagaccgcgataccggagaggcccgcacatctgcttcgactacaacgcgacagaagatacctcagactgtggccgcggggcctccttcccgccgtcgctgggcgtcctggtctccctgcaactgctgctcctcctgggcctgccgccccggccgcagcctcaagtcctcgtccacgcctctcgccgcctctgagcaccctgccccaccccacctccactcccacctcacccggcctcttcgcctttcccaccctcctgccccacactccccgccttagagcctcgtccctccctcactgaaggacctgagctggccaggccctgagagtctggtctgcgccttgggatggggagtcccaaagcgggacgccgcaggtgtttggcacccaaatcacatctcacctccgaactgttcaagtgtccccagacccttcttgcctgctgggctccccccagtgggatgggacagggaggccacacgcactggtgccaaaaccaggcctctgctgccgcccttcctggaggctgcctatgttgggggggaccctgcctcagctgacccggcctctctgccccacccaagcccaaacttggtttctgtgagaatagtggaggaaggtgagatggccagtttgaagcctgtgcctcccagcttaaatcctagcaggagagaggctctggggcagcccccatgggctcctgcccctttcaggcctacagccacatccccaagcccaccaggtgtcaggatagtcacagtgataccagttcagacactaccccatatacacctggaacattgaggatggaaactggactcacattcgacataccccactgggcacacgcacaaacacacacactatggggtggggtgggtgtaggggcttacaaagccttacacagggcgaggggttggtgggagggttggcacctgcacactccatctcctgctcaccacctgcctctaatctgagctgcagcctggctggtcctcccatttctaaagctgaatgtcaaacagtgccaaatgctggggcagggggtgaagaaccctctgtcccacccctagccaccagtgtcctccaagtgccccctcacctctccaggtgctcattgtaaccatttctcactagtgtcaggcccccagtgggaccacatgccactgcctgcacctttcggcagaggaacccccaccagacatcaccctttgccttagcaggggtgactttgtctctcctggctgggccatccttccgccaatctggcccttacacactcaggcctgtgcccactccctatctccttcccacccctacacacacactccctgcttgcaggaggccaaactgtccctcccttgctgaacacacacacacacacacacacacaggtggggactgggcacagctcttcacaccattcattctggtcatttcccccaaaggcatcccagcctgggggccagtggggaactgagggcaaggggatatagtgatggggctcagatggactgggaggagggggagggtgatgcattaattaatggcttcgttaattaatgtcatgttgcttgtcgctttctcagtgtgtgtgtgtggtccatgcccactgctggtgccagggtgggtgtccatgtgcacccggcctggatgccagctgtgtccttcgggggcgtgcgtgtaactgtagtgtagtcaggtgctcaatggagaatataaacatatacagaaaaatatatattttaagtttaaaaaacagaaaaacagacaaaacaatccccatcaggtagctgtctaacccccagctgggtctaatccttctcattacccacccgacctggctgcccctcaccttgggctgggggactggggggccatttccttttctctgccctttttttgttgttctattttgtacagacaagttggaaaaacaacagcgacaaaaaagtcaagaaactttgtaaaatatcgtgtgtgtgattccttgtaaaatattttcaaatggtttattacagaagatcagttattaaataatgttcatattttcacttc

SEQ ID NO: 6813 - DNA, 1849 bp, Homo sapiens; identical to SEQ ID NO: 222

SEQ ID NO: 6814 - DNA, 3841 bp, Homo sapiens
ccggacgctcgcgggtctcggaacgcatcccgccgcgggggcttcggccgtggcatgggcgccgcgggcctgctcggggttttcttggctctcgtcgcaccgggggtcctcgggatttcttgtggctctcctccgcctatcctaaatggccggattagttattattctacccccattgctgttggtaccgtgataaggtacagttgttcaggtaccttccgcctcattggagaaaaaagtctattatgcataactaaagacaaagtggatggaacctgggataaacctgctcctaaatgtgaatatttcaataaatattcttcttgccctgagcccatagtaccaggaggatacaaaattagaggctctacaccctacagacatggtgattctgtgacatttgcctgtaaaaccaacttctccatgaacggaaacaagtctgtttggtgtcaagcaaataatatgtgggggccgacacgactaccaacctgtgtaagtgttttccctctcgagtgtccagcacttcctatgatccacaatggacatcacacaagtgagaatgttggctccattgctccaggattgtctgtgacttacagctgtgaatctggttacttgcttgttggagaaaagatcattaactgtttgtcttcgggaaaatggagtgctgtcccccccacatgtgaagaggcacgctgtaaatctctaggacgatttcccaatgggaaggtaaaggagcctccaattctccgggttggtgtaactgcaaactttttctgtgatgaagggtatcgactgcaaggcccaccttctagtcggtgtgtaattgctggacagggagttgcttggaccaaaatgccagtatgtgaagaaattttttgcccatcacctccccctattctcaatggaagacatataggcaactcactagcaaatgtctcatatggaagcatagtcacttacacttgtgacccggacccagaggaaggagtgaacttcatccttattggagagagcactctccgttgtacagttgatagtcagaagactgggacctggagtggccctgccccacgctgtgaactttctacttctgcggttcagtgtccacatccccagatcctaagaggccgaatggtatctgggcagaaagatcgatatacctataacgacactgtgatatttgcttgcatgtttggcttcaccttgaagggcagcaagcaaatccgatgcaatgcccaaggcacatgggagccatctgcaccagtctgtgaaaaggaatgccaggcccctcctaacatcctcaatgggcaaaaggaagatagacacatggtccgctttgaccctggaacatctataaaatatagctgtaaccctggctatgtgctggtgggagaagaatccatacagtgtacctctgagggggtgtggacaccccctgtaccccaatgcaaagtggcagcgtgtgaagctacaggaaggcaactcttgacaaaaccccagcaccaatttgttagaccagatgtcaactcttcttgtggtgaaggaaatcacctgcccaccaccccctgttatctacaatggggcacacaccgggagttccttagaagattttccatatggaaccacggtcacttacacatgcctgggccagaaagaggagtggaattcagcctcattggagagagcaccatccgttgtacaagcaatgatcaagaaagaggcacctggagtggccctgctcccctgtgtaaactttccctccttgctgtccagtgctcacatgtccatattgcaaatggatacaagatatctggcaaggaagccccatatttctacaatgacactgtgacattcaagtgttatagtggatttactttgaagggcagtagtcagattcgttgcaaagctgataacacctgggatcctgaaataccagtttgtgaaaaagaaacatgccagcatgtgagacagagtcttcaagaacttccagctggttcacgtgtggagctagttaatacgtcctgccaagatgggtaccagttgactggacatgcttatcagatgtgtcaagatgctgaaaatggaatttggttcaaaaagattccactttgtaaagttattcactgtcaccctccaccagtgattgtcaatgggaagcacacaggcatgatggcagaaaactttctatatggaaatgaagtctcttatgaatgtgaccaaggattctatctcctgggagagaaaaaattgcagtgcagaagtgattctaaaggacatggatcttggagcgggccttccccacagtgcttacgatctcctcctgtgactcgctgccctaatccagaagtcaaacatgggtacaagctcaataaaacacattctgcatattcccacaatgacatagtgtatgttgactgcaatcctggcttcatcatgaatggtagtcgcgtgattaggtgtcatactgataacacatgggtgccaggtgtgccaacttgtatcaaaaaagccttcatagggtgtccacctccgcctaagacccctaacgggaaccatactggtggaaacatagctcgattttctcctggaatgtcaatcctgtacagctgtgaccaaggctacctgctggtgggagaggcactccttctttgcacacatgagggaacctggagccaacctgcccctcattgtaaagaggtaaactgtagctcaccagcagatatggatggaatccagaaagggctggaaccaaggaaaatgtatcagtatggagctgttgtaactctggagtgtgaagatgggtatatgctggaaggcagtccccagagccagtgccaatcggatcaccaatggaaccctcccctggcggtttgcagatcccgttcacttgctcctgtcctttgtggtattgctgcaggtttgatacttcttaccttcttgattgtcattaccttatacgtgatatcaaaacacagagcacgcaattattatacagatacaagccagaaagaagcttttcatttagaagcacgagaagtatattctgttgatccatacaacccagccagctgatcagaagacaaactggtgtgtgcctcattgcttggaattcagcggaatattgattagaaagaaactgctctaatatcagcaagtctctttatatggcctcaagatcaatgaaatgatgtcataagcgatcacttcctatatgcacttattctcaagaagaacatctttatggtaaagatgggagcccagtttcactgccatatactcttcaaggactttctgaagcctcacttatgagatgcctgaagccaggccatggctataaacaattacatggctctaaaaagttttgccctttttaaggaaggcactaaaaagagctgtcctggtatctagacccatcttctttttgaaatcagcatactcaatgttactatctgcttttggttataatgtgtttttaattatctaaagtatgaagcattttctggggttatgatggctttacctttattaggaagtatggttttattttgatagtagcttcctcctctggtggtgttaatcatttcatttttacccttacttggtttgagtttctctcacattactgtatatactttgcctttccataatcactcagtgattgcaatttgcacaagtttttttaaattatgggaatcaagatttaatcctagagatttggtgtacaattcaggctttggatgtttctttagcagttttgtgataagttctagttgcttgtaaaatttcacttaataatgtgtacattagtcattcaataaattgtaattgtaaagaaaac

SEQ ID NO: 6815 - DNA, 405 bp, Homo sapiens
actccgccttccacgtgcacccactgcctcttcccttctcgcttgggaactctagtctcgcctcgggttgcaatggaccccaactgctcctgtgccgctgcaggtgtctcctgcacctgcgccagctcctgcaagtgcaaagagtgcaaatgcacctcctgcaagaagagctgctgctcctgctgccctgtgggctgtgccaagtgtgcccagggctgcatctgcaaaggggcatcggagaagtgcagctgctgcgcctgatgtcgggacagccctgctcccaagtacaaatagagtgacccgtaaaatccaggattttttgttttttgctacaatcttgacccctttgctacattcctttttttctgtgaaatatgtgaataataattaaacacttagacttga

SEQ ID NO: 6816 - DNA, 730 bp, Homo sapiens
gatgttttgtgtgtcagcttcatcacagagcaagatggaaaaatataggcctcatcagtctcatgccaaccagaatgggccttcaacttatggtgctggtttgattgaatggaccactgcatgagtggaaaatctgaacttggctctgaactctgcctcagccatcgggtgccatgtggtcaacataggggctgaggacctgaaggaggggaagccttatctggtcctgggacttctgtggcaagtcatcaagattgggttgtttgctgacattgaactcagcagaaatgaagctctgattgctcttttgagagaaggtgagagcctggaggatttgatgaaactctcccctgaagagctcttgctgaggtgggctaattaccacctggaaaatgcaggctgcaacaaaattggcaacttcagtactgacatcaaggactcaaaagcttattaccacctgcttgagcaggtggctccaaaaggagatgaagaaggtgttcctgctgttgttattgacatgtcaggactgcgggagaaggatgacatccagagggcagaatgcatgctgcagcaggcggagaggctgggctgccggcagtttgtcacagccacagatgttgtccgagggaaccccaagttgaacttggcttttattgccaacctctttaacagataccctgccctgcacaaaccagagaaccaggacattgactggggggctcttgaaggt

SEQ ID NO: 6817 - DNA, 4846 bp, Homo sapiens
cgagccagcgagcgagcagagcacatcgctgcgggctcacaaagcggccagacgctcggcggcggcgtgtggcaggagcgcaggggcgcgagccggcgatcagccttcccggcgaccgtgccgcgggagctcgagcaactcggactaggggacccgggccggcccccaagatgccggcgatcgcggtgttggcggcggccgccgcggcgtggtgcttcctccaagtcgagagccggcacctggacgcgctcgccggaggcgcgggccccaaccacggcaatttcctagacaatgaccagtggctgagcaccgtctcccagtacgaccgggacaagtactggaaccgctttcgagacgatgattatttcagaaactggaatcccaacaagccctttgaccaagccctggacccatccaaggacccctgcctgaaggtaaaatgcagccctcacaaagtgtgtgtgacccaggactaccagaccgccctgtgtgtcagccgcaagcacctgctccccaggcaaaagaaggggaacgtggcccagaaacactgggttggaccttcgaatttggtcaagtgcaagccctgtcccgtggcacagtcagccatggtctgcggctcagatggccactcctacacatccaagtgcaaattggagttccatgcttgttctactggcaaaagcctcgccaccctctgtgatgggccctgtccctgtctcccagagcctgagccaccaaagcacaaggcagaaaggagtgcctgcacagacaaggagttgcggaaccttgcctcccggctgaaggattggtttggagctctccacgaggatgcgaacagagtcatcaagcccaccagctccaacacagcccaaggcaggtttgacactagcatcctgcccatctgcaaggactccctgggctggatgttcaacaagttggacatgaactatgacctcctgcttgacccttcagagatcaatgccatctacctggataagtacgagccctgtatcaagcctcttttcaactcgtgtgactccttcaaggatggcaagctttctaacaatgagtggtgctactgcttccagaagcctggaggtctcccttgccagaatgaaatgaacagaattcagaagctgagtaaggggaaaagcctgttgggggccttcatacctcggtgtaatgaggagggctattacaaagccacacagtgccacggcagcacggggcagtgctggtgtgtggacaaatatgggaatgagttggctggctccaggaaacagggtgctgtgagctgtgaagaggagcaggaaacctcaggggattttggcagtggtgggtccgtggtcctgctggatgacctagaatatgaacgggagctgggaccaaaggacaaagaggggaagctgagggtgcacacccgagccgtgacagaggatgatgaggatgaggatgatgacaaagaggatgaggtcgggtacatatggtagtgcccacaagaaagaggacacaagttttgcacaaaattgcaagtcacttcctattcctgcatttgtatctaagactccaaggcaccaaggtctcttctccattgttgctctctatacccgacctaaggtttggaagacaactgcttgttcccagaggattctgattttgcatatgtttgtatgggagaaagggtgttgtgttttttttttgttgttgtttattttttggatagggaagtcattggcttaattagagcctccttcctttctgtgagatttttccaacaagcatgtgatttacgtggaattctgacagtgcagggagccccaaccctcttaaatgtcaaagaccctttttgattacccacactggtggttattacagcatggttcccagccttacagtgtctaagtgcttctcttgtgtcctgtagatgttgtgaaaaagaaaaaaacaaaaaatacaccacactgtactttttccccctgcccccgttactgccggtgattattattaaaaattagtttttttcacatcattatatctggcttcctataaacaacagccttaattcagtcaagactccctttggggaattcattttattaaaaattggtgtctggatacttccctgtacatgcataaatatgcatgcatgtacagaaagactgtatgtgtgtgccttgcacacacacccatacctctcagaaaaagtgtttgggtatcttaaaaactcgaaaaacaatgataaatttctcagcttgtccagacctggaacaaaatttctggaataagaaatttgtattaaagtccttttttgcactaacagttggctcttgtagcctgcaggctgaggaagtctcttctctgtgcatcagcagagttactgaaagcctctgattgagaaaaaacctccgtctgcctaaatcacttttctcgcagaagccatgcgactcccacacgacacgggcagcttcacaagccatctctttcatttctgcttgaagccccttggctgcagcaatcctgtctgccataggtttcttccttccttacctactcaagggctttttctaaggcatgcacacatatctcctgttctctgagagtaccatggtgttccttaaaagaagaaaatttctaattctgaactcaatgttttgcttttactccctttctactgacaaatcatgataagggcacaaaagctgtacagatttttttttttaaccactcaatcccaaatggaggcctacaaagaacatcgtaataacacatggaagcaaaccctgggtttttaagagcaaattctgtccccccctcactcccccaagtgacaagatactaatgaagaaagttcttcaccatagtgtttgttttaactaaactcattggagtctagttccaaatttggtagggtcatcatctctacattccttaggatttctctccctatcaagctggcccagatacaagtaccaaacagtagtctctgaagttcccccatttccttcagtaccagtctataagctactgtccgccactgattttcatttatcagggtgtcctaatcagaatcagccacccaagcaagcctctctggcccacatatctatctcttgccttcccccatgaacttcagcctgtccacacaaaagccacataaactcaagcaagaaatatgttcagccaaaacatgattatagtggcagctgaccaatcccccatcccaaattgaccatttagatgtaccaactcaccttaaattagcatgttccaatccagtcggcattgcctgaatacagtagcatcatacctatagttggtcttagataagaaatgaactacttgatatagcaaagtcctttggcttcgtaaataaccctgaggttttgtacttactttccccataggaagacagaccataggcaaactctgttttgggatctcaactccatcacctttgtttcaatattttttttctctcttgaacaaaactgagataatttagaaaacaggtgcttaattgcaataaaattactatgaagtatattaaaaatcacgacattgtaaaatctcactttagatcatcaaagaaaaccattgttactatctcctttgagcttaggaaaatgtacaagagaacaaattaaaattgaaaaattgatttcacttagaaaaacttctaggaacagggtgaaccactgattttaatttgcctaattatcttatgacaagtatcaaattaagatgacacttaaagatccttagcattaacttaatgatggagaagagtgctcaatagacagttcccagtaaggtaatgagatgccattttcagagacattctaagaagatattttgattcattaaaacattaaataaaaagccctcctcagattggaacccccaaatcgatggagccacattaataatacttttcatgcctcactttgacatgacagcattcgatttttttaaagatctttaatactttccatgagtactaaagattgtaatgagttaccttatccttagaagtagaatgtttgctttcttcttcttggaaatagtcctccaaaaagtccacttgtaccagtgacaagaagtcacttgtatagtgaccaagtacacataaaatactgattataaaaatattgtaataaaccacttcctcatttgatacaggtattaagctgaatcctcactaattcacttttgaaaagttcttaatgaacagttttattcttattccatgaacagctcttttaatacaatttccttggtatccaacttaaatcccagaattttgttccaccatggttagttatttgccatatgaatgtattcttgtttctaccaatattctaggcatgagaataccttaatactgagttggagattttgtatctgtttctcctcctttacgcccattttcctacccacagcagcaaatgacaacgtgtctgtccaggtctgtccccctgctcatcccaggatgccactcacatttttttcttcttgttaccttgaccacgctgtacagtaacatccaagagcccattctacagtgggtggttttggtctttttataactttttctcaaagtcactgatgtttgttcctgttaaatgtatagcattgtaatgagagcccatcaaatcctgagtgtcagtttgttgtccctattgtagatgaaatagtgatgtagcaaaaacctagtaaattctgaatgcttttccacgtagacttatctggaatgtgaacacaactctttggttaatagtaaatgcttaactgtagtcctgagtaggtgcatttctgtctgtctcaataaattttactttgtctgcaa

SEQ ID NO: 6818 - DNA, 705 bp, Homo sapiens
ccggtccctccgagctagaattgtccagagcttcttgcagcctcacccccaacacaggtggaaggtgtccccttgggacgtcaatgcttactattcggtatctgaccatgtggtagtctttccagctggactcctccaacccccattcttccaccctggctatcccagaacctccttcaatgactccctcacattcttagagaatgctgcagacgttggggggctagccatcgcgctgcaggcatacagcaagaggctgttacggcaccatggggagactgtcctgcccagcctggacctcagcccccagcagatcttctttcgaagctatgcccaggtaggcagcggccacctcccgccacagcttgctttatgtcagttgaacgccttattactgaagctcatggaagtcccctcttcagacactccgtcaaataccccaaaccctcttctgcagatgtcctcactgttatcttttctcttccctccctaccccttggaatcacccctcagatgactacaggttcttctacctaattcagcacccccacaactcaaaaggtagaaaaaactctattcccaagttcctccaggagaggaggagaccaacttttttttcctctcatacccccaaaatacagatgccttaaaaatgagcctgtggttgggcacagtggctcacacctgtaatcctggcactctagg

SEQ ID NO: 6819 - DNA, 2174 bp, Homo sapiens
attggcctgaaagacgtcattactctacggagacatgtggaaacaaaagttagagctaaaatccgtaagaggaaggtgacaacgaaaatcaaccatcatgacaaaatcaatggaaagaggaagaccgccagaaaacagaaaatgtttcaacgtgcgcaagagttgcggcggcgggcagaggactaccacaaatgcaaaatccccccttctgcaagaaaggctctttgcaactgggtcagaatggcggcagcggagcatcgtcattcttcaggattgccctactggccctacctcacagctgaaactttaaaaaacaggatgggccaccagccacctcctccaactcaacaacattctataactgataactccctgagcctcaagacacctcccgagtgtgtgctcactccccttccaccctcagcggatgataatctcaagacacctcccgagtgtgtgctcactccccttccaccctcagcggatgataatctcaagacacctcctgagtgtctgctcactccccttccaccctcagcggatgataatctcaagacacctcctgagtgtctgctcactccccttccaccctcagcggatgataatctcaagacacctcccgagtgtctgctcactccccttccaccctcagctccaccctcagctccaccctcagcggatgataatctcaagacacgtgccgagtgtctgctccatccccttccaccctcagcggatgataatctcaagacaccttccgagcgtcagctcactccccttccaccctcagctccaccctcagcagatgataatatcaagacacctgccttccaccctcagcggatgataatctcaagacaccttccgagcgtcagctcactccccttccaccctcagctccactctcagcagatgataatatcaagatacctgctgagcgtctgcggattccgcttccaccatcagccgatgataatctcaagacaccttccgagcgtcagctcactccccttccaccctcagctccaccctcagcagatgataatatcaagacacctgccgagcgtctgcgggggccgcttccaccctcagcggatgataatctcaagacaccttccgagcgtcagctcactccccttccaccctcagctccaccctcagcagatgataatatcaagacacctgccgagcgtctgcgggggccgcttccaccctcagcggatgataatctcaagacaccttccgagcgtcagctcactccccttccaccctcagctccaccctcagcagatgataatatcaagacacctgccgagcgtctgcgggggccgcttccaccctcagcggatgataatctcaagacaccttccgagcgtcagctcactccccttccaccctcagctccaccctcagcagatgataatatcaagacacctgccgagcgtctgcgggggccgcttccaccctcagcggatgataatctcaagacaccttccgagcgtcagctcactccccttccaccctcagctccaccctcagcagatgataatatcaagacacctgccgagcgtctgcggggagcgtctgcgggggccgcttccaccctcagcggatgataatctcaagacaccttctgagcgtcagctcactccccttccaccctcagctccaccctcagcagatgataatatcaagacacctgccgagcgtctgcgggggccgcttccaccctcagccgatgataatctcaagacacctcccttagctactcaggaggctgaggcagaaaaaccacgcaaacccaagaggcagagggcggctgagatggaaccacctcccgaacccaagaggcggagggtcggtgacgtggaaccgtcacgcaaacccaagaggcggagggccgctgacgtggaaccatcatcacccaaacccaagaggcggagggtcggtgatgtggaaccgtcacgcaaacccaagaggcggagggccgctgacgtggaaccatcatcacccgaacccaagaggcggagggtcggtgacgtggaaccgtcacgcaaacccaagaggcggagggccgctgacgtggaaccatcatcacccgaacccaagaggcggaggttgagctgagaagaggccagtgcactcaagcctgagcaataagaataaaaccgagt

SEQ ID NO: 6820 - DNA, 546 bp, Homo sapiens
cctctgttctccttccctctctactccctttcttatgtgtggtttcaggtcagtgtgcagctggaagcctctcccgccttcctagctgtcccagtggagaaggaacaagcgcctcactgcatctgtgcaaacgggcggcaaactgtgtcctgggcagtaaccccaaagtcattaggaaatgtgaatttcactgtgagcgcagaggcactagagtctcaagagctgtgtgggactgaggtgccttcagttcctgaacacggaaggaaagacacagtcatcaagcctctgttggttgaacctgaaggactagagaaggaaacaacattcaactccctactttgtccatcaggtggtgaggtttctgaagaattatccctgaaactgccaccaaatgtggtagaagaatctgcccgagcttctgtctcagttttgggtgagtctccagcccctagtggatccgggcattaacagcttctattatactatttttatttcccataaatatttactaaaaataatactataattttaacttctttcttctct

SEQ ID NO: 6821 - DNA, 3252 bp, Homo sapiens
ttttccattaaaagcactgcaaattttagcctctaatgagattggagtcagttgacttggctttaaatattgcctcttccattttccagcttctgttactagccattgtgagcttcagtttcttcatctgcaaaatgggcataatacaatctattcttgccacatcaagggattgttattcctttaaaaaaaaaccaataccaaagaagcctacaatgttggccttagccaaaattctgttgatttcaacgttgttttattcacttctatcggggagccatggaaaagaaaatcaagacataaacacaacacagaacattgcagaagtttttaaaacaatggaaaataaacctatttctttggaaagtgaagcaaacttaaactcagataaagaaaatataaccacctcaaatctcaaggcgagtcattcccctcctttgaatctacccaacaacagccacggaataacagatttctccagtaactcatcagcagagcattctttgggcagtctaaaacccacatctaccatttccacaagccctcccttgatccatagctttgtttctaaagtgccttggaatgcacctatagcagatgaagatcttttgcccatctcagcacatcccaatgctacacctgctctgtcttcagaaaacttcacttggtctttggtcaatgacaccgtgaaaactcctgataacagttccattacagttagcatcctctcttcagaaccaacttctccatctgtgacccccttgatagtggaaccaagtggatggcttaccacaaacagtgatagcttcactgggtttaccccttatcaagaaaaaacaactctacagcctaccttaaaattcaccaataattcaaaactctttccaaatacgtcagatccccaaaaagaaaatagaaatacaggaatagtattcggggccattttaggtgctattctgggtgtctcattgcttactcttgtgggctacttgttgtgtggaaaaaggaaaacggattcattttcccatcggcgactttatgacgacagaaatgaaccagttctgcgattagacaatgcaccggaaccttatgatgtgagttttgggaattctagctactacaatccaactttgaatgattcagccatgccagaaagtgaagaaaatgcacgtgatggcattcctatggatgacatacctccacttcgtacttctgtatagaactaacagcaaaaaggcgttaaacagcaagtgtcatctacatcctagccttttgacaaattcatctttcaaaaggttacacaaaattactgtcacgtggattttgtcaaggagaatcataaaagcaggagaccagtagcagaaatgtagacaggatgtatcatccaaaggttttctttcttacaatttttggccatcctgaggcatttactaagtagccttaatttgtattttagtagtattttcttagtagaaaatatttgtggaatcagataaaactaaaagatttcaccattacagccctgcctcataactaaataataaaaattattccaccaaaaaattctaaaacaatgaagatgactctttactgctctgcctgaagccctagtaccataattcaagattgcattttcttaaatgaaaattgaaagggtgctttttaaagaaaatttgacttaaagctaaaaagaggacatagcccagagtttctgttattgggaaattgaggcaatagaaatgacagacctgtattctagtacgttataattttctagatcagcacacacatgatcagcccactgagttatgaagctgacaatgactgcattcaacggggccatggcaggaaagctgaccctacccaggaaagtaatagcttctttaaaagtcttcaaaggttttgggaattttaacttgtcttaatatatcttaggcttcaattatttgggtgccttaaaaactcaatgagaatcatggtaaaaaaaaaaagttaaccaaagaatatacctgtacataatttgtacagttttaagttgttagataggaactggatttcttatgtattagacattattgctcaatcataatggaatagattctgcatccctaaatgtatgaaccataaggttaaaaaagatgaatggaaatatcaaacaactttttactgagcatcagtttcataatcaataatataagaagattaatttggattctagtatgtttcagtttgtttttaattaccaccttcctttggtagaaaaaatatgttccttgatgtaggaaagtctaggttttagagattagaggatgagatcaagagttaaattcctaaagaagcactgaatatatgaagagagcaaacaaatcaagtaccaacctagaggctttatttttgaattgattcatggtgtgtgtgtgtgtgtgtgtgtgtgtgtgtgtgtgtgtgtaacacagaaacagcttcagaaaataagggatagaaagtaatgaagaaagtacttaccccatattgccataaaaatagcaaagaagactgtccctccattatcgaacaaatatgtcacctgagtagaaaacaaacagaaatattagtcatgcaaattgattataataagccagtgaatactgtttgcactcaggtactatgattttttctcaaatagaatcatattattttatagtacagaaatattatatatgaattcctttcatgggtcttgcaacaatttcacatgatttttctcatggggagaggtgaagaaacaacattagccctcttctctcctctcttgattccctttataccccaccatcatttctgattataaataattctaccattctatggaagtatttgtgggtcacagattgtcaaactacttaatgaaagttgtatgaaattagtttttcaggtgaggcattcctagttgcaattcctgttagcaaaacttctaggagtggggaagttggaaaatgcaggattcttccagtgagccagcatttcccatagctaaccctattctcttagtctttcaaaatgtagaatgggtccaataatggctataagatgtaataaatcccatcttaatttgttttaaaagtttcataaatcactgaacacttatgaaacaaagtgttttttaatcagatatcaactgaaacttcataaaggatgcatagttttataatgttattgaatcaaattttaaggcttgtattgtttgattttaataaagtataaattcaattt

SEQ ID NO: 6822 - DNA, 1425 bp, Homo sapiens
aaggtttaaagggcgcctccatggggggcgctcagctggagctaccgagcggtgccaggccaggtgtgtgcgtccgtcggtctttccgtgcccacgccggagaccagccccggaggccgcctgggcctatccctgtgccaggcaccatgaagcaggagtctgcagccccgaacaccccgcccacctcgcagtcccctacgccgtccgctcagttcccccgaaacgacggcgaccctcaagcgctgtggattttcgggtacggctccctggtgtggaggcccgacttcgcctacagcgacagccgtgtgggcttcgtgcgcggctacagccgccgtttctggcagggagacaccttccatcggggcagcgacaagatgcctggccgtgtggtgacgctccttgaagatcatgagggctgcacttggggcgtggcataccaagtgcaaggggagcagaaccctggttacctgggccctgcgcctgaagaggccattgccacgcagatcctggcctgccggggcttctccggccacaaccttgaatacttgctgcgtctggcagacttcatgcagctctgtgggcctcaggcgcaggacgagcacctggcagccatcgtggacgctgtgggcaccatgttgccctgcttctgccccaccgagcaggctctggcgctggtgtgaggggctgagcccctgcggggagtgctcatgtggacatcagggccagacacccactccagtgcacaagacagacttgcgaccgcttgagcccactgagcagatatggtgggtggctggaggcttctctttctcagtccctgcctgtctgccagcctgcagctctcctgcttgacactgacttactacttgaaactttatttattgcaccatgttggtgtggtgggcaggtggagggcctgccctggacacaggggccctgctgagcagtggccccatcctggaacttgaccagattccccccagtgctgctgctaaccccacaccacccaggcctccacctccccagggagtctccaagagcctcgatcctctgctcactcagcccagccatccatagccctgggaattccacctgccaaggatcccagcaggctggatgagggatagtagggcatgaggagaaggagccctgtaaggactgaggccccggccagcccttctcctccaccagttccccagagcagagctggagctgatgcctggacacagctgctgagcctggcctgggcctcttacccacttggttgttttcttgtccctctgtctgtctgtctatctacttgtctgtctgggccactcctgcctgtgtgttggtctattcctgggaagctcatcactacaggccctggcaaccttcccagtctgtcccatactgttacccataaaactatctctttatctgtgc

SEQ ID NO: 6823 - DNA, 11351 bp, Homo sapiens
gcggccgccaggtgctcctggagtgcagcgcctatcgccggggcgtgtgggggccacaccgagcaccagcttctccgacgccgggaagccgctgtcgccgccgctacctctccctgttgccgccgcctcagatctcttcatgccgctgtaagctcggaggccaaggatgcggagtaggcttcccccagcgcttgccgccctgggcgcggccctgctcctgtcttccattgaggcagaagttgacccaccttcagacttgaattttaaaattatagatgaaaatactgttcatatgtcatgggcaaaaccagttgatccaattgtgggttacagaataacggtggaccctacaacggatgggcctactaaagaatttaccctttcagctagtaccactgaaactttattgtcagaacttgtacctgaaacagagtatgtggtgacaataacttcatatgatgaagtagaagaaagtgtaccagttataggacaactaacaattcaaacaggtagttcgacaaagccagtggagaagaaacctggaaaaaccgagatacaaaaatgctctgtcagtgcctggactgatttggttttcctcgtggatggctcttggagtgtgggaagaaataatttcaagtacattttagacttcattgctgctcttgtgtctgcttttgacattggggaagagaagacaagagttggagttgttcaatacagctctgataccaggactgaatttaacttaaatcagtactaccaaagggatgaacttcttgctgcaataaaaaaaattccatataaaggtggcaacacaatgacaggggatgccattgattatttagttaaaaatactttcacggaatctgctggggcaagagttggctttcctaaagtggcaattattattacggatggaaaatcccaggatgaagtggaaattccagcaagagagcttcgtaatgttggagttgaagttttctccttgggcattaaagctgcagatgcaaaagaactcaaacaaattgcctccacaccttcactgaaccatgttttcaatgtggccaactttgatgcaattgtggatattcagaatgagatcatctcccaggtgtgctcaggtgttgatgaacaacttggtgaattggttagtggagaagaagttgttgagcctccttcaaatttgattgccatggaagtctcttcaaaatatgttaagctaaattggaatccatctcctagtccagtgactggctacaaagtcatcctcacaccaatgactgcaggaagccgacagcacgctctgagtgtggggcctcagacaaccacgctcagtgttcgcgacctctcagcagacacagaataccagatcagtgtttccgccatgaagggaatgacatccagtgaacccatttcaataatggagaagactcagccaatgaaagttcaagtggaatgctcacgtggtgtggatataaaagccgatattgtgtttttggttgatggctcctatagcattgggattgcaaactttgttaaagttagagcctttttggaagttcttgtaaaaagttttgaaatttcaccaaatagggtccagattagtcttgtgcaatacagccgggatcctcatactgagttcactttgaaaaaattcaccaaagttgaagatataattgaagcaataaacaccttcccttacagaggaggatctacaaatactggcaaagcaatgacttatgtcagagagaaaatatttgtgcctagcaagggatcaagaagcaatgtgccaaaggtcatgattcttatcacggatgggaaatcatcagatgctttcagagatcctgcgataaaactgaggaattcagatgttgaaatctttgcagttggtgtgaaggatgccgttcgctcagaattggaagctattgcctctcctcctgcagagacccatgtgttcacagtggaagattttgatgcttttcagaggatatcttttgaactcacacagtctatctgccttagaattgagcaagaattggcagctataaagaagaaagcttacgtccctccaaaggatcttagtttttcagaagtgacttcttatggtttcaaaaccaactggtctccagctggagaaaatgttttttcatatcacatcacctacaaggaagcggctggggatgatgaggtcactgtggtggagccagcatcgagcaccagtgttgttctcagcagcctgaagccagagaccttgtatttggtcaatgtgactgcggagtatgaggatggcttcagcattcccttagctggagaggagaccaccgaagaagtaaaaggagcacctcgaaacctaaaggtgacagatgagactacagatagtttcaaaattacttggactcaagctccagggagagttttaagatatcgaattatatatagaccagttgctggtggagagagcagagaagttaccaccccacccaatcagaggaggagaacactggagaacttgattccagacacgaaatatgaagtatctgtaattcctgaatatttctcaggacctggtactccattaactggaaatgcagccactgaagaagttagagggaatccaagagacttaagagtttctgaccctacgacgtctactatgaaattatcttggagtggggcaccaggaaaagtgaaacagtatctcgtcacatataccccagtggcagggggtgaaactcaagaggtcactgtgaggggagatacaaccaatacggtgctgcagggattgaaggaagggacacaatacgccttatctgtgacagccttgtatgcgtctggggctggagacgccctctttggtgaaggaacaacacttgaagaacgtggttctcctcaagatttagttactaaagacatcactgacacatcaattggggcttattggacatctgctccaggaatggttcgcggttacagggtctcatggaaatcactttatgatgatgttgacactggagagaaaaatctgcctgaagatgcaattcatacgatgatagaaaatctgcagccagagaccaaatacagaatttcagtatttgccacttacagcagtggagaaggagaacctttgactggagatgccacaactgaattatctcaagattccaaaaccctgaaagtagatgaagaaacagaaaacacaatgagagttacatggaaaccagcaccagggaaagtcgtcaactaccgtgttgtctatcgccctcatgggagagggaagcaaatggttgctaaggtgccccccacagtcacttcgacagtgttaaagcgacttcagccacagaccacatatgacatcacagttcttcctatttacaagatgggagaaggaaagcttaggcaaggatcaggaacaacagcttctcggtttaagtctcctagaaacctcaaaacatctgacccaaccatgtcaagcttccgagtgacttgggagcctgcccctggggaagtgaagggttataaagtcacattccaccctacgggggatgacagaagactgggggagttagtggttggaccctatgacaacacagttgttttggaggaacttagggctggtaccacctataaagtaaatgtttttggaatgtttgatggaggagaaagctcaccacttgttggacaagaaatgacaaccctttccgacacaactgttatgccaattttatcttctgggatggagtgtctcaccagagctgaggcagacattgtgttgctggtggatggatcatggagcatcggccgggcaaattttagaaccgtgaggagtttcatttctcgtattgtggaagtctttgacattggccccaaaagagtacaaattgctcttgctcagtatagtggggatcccagaacagagtggcagttaaatgcacacagagacaagaagagcttgttgcaagctgtggcaaacttgccgtacaaaggaggcaatactctcacaggcatggctttgaatttcattcgccaacagaacttcaggacccaagctggcatgagacctcgagctcgaaaaattggtgtgctcattactgatggaaaatcacaagacgatgttgaagcaccttcaaagaaactcaaggatgagggagtggagctgtttgctattggtattaaaaatgctgatgaagtcgaattaaagatgattgcaactgatcctgatgatacccatgcatacaatgtggcagattttgagtcactctccaggatagtggatgatctcaccattaatttgtgtaacagtgtcaaaggtccaggtgatttggaagcaccttctaacttagttatttctgagcgaacccatcgttcttttagagtgagctggacaccaccttctgacagtgtggatcgatataaggtggaatactatccagtttctggagggaaacgtcaagaattttatgtgagtcgaatggaaactagcacagtgctgaaagatctgaaacctgaaactgaatatgttgtcaatgtgtattctgtggtagaagatgaatatagtgagcctctgaaggggacagaaaaaaccttgccagtgcctgtagtcagcctgaatatttatgatgttggccctaccaccatgcatgtgcagtggcagcctgtgggaggagctactggctacatcttgtcatacaaacctgttaaggacacagagccaacaagacccaaagaggtgcgtttggggccaacagtgaatgacatgcagctgactgaccttgttcccaacacggagtatgcagtcacagtccaggctgtcctgcacgacctcactagtgaacctgtcactgttcgggaagtcaccttgcctttacccagacctcaggatctgaaactcagagatgtgactcacagcactatgaatgtcttttgggaacctgtgcctggaaaagtgcgtaaatatattgttcgatacaaaacaccagaagaggatgtcaaagaggtagaggtggacagatcagagaccagcacttccctcaaagacctcttctcacagaccttgtacacagtcagcgtttctgcagtacatgacgagggggagtctcctccagtgactgctcaagaaactacccgacccgtgccagccccaacaaacttaaagattactgaagtaacatcagagggtttcagagggacttgggatcatggagcttcagatgtgtctctctacagaataacttgggcaccttttggaagctcagataagatggagaccatcttaaatggagatgaaaacactttggtgttcgaaaacctgaaccccaacaccatctatgaagtttccattactgccatctatcctgatgagtcagaaagtgatgacctgattggcagtgagcgcacactgcctatcttaacaacacaagctcccaaaagtggcccacgaaaccttcaagtgtacaatgcaacatctaacagcctgactgttaagtgggatcctgctagtggtcgtgtgcagaaatataggatcacttatcagccttccacaggggaaggcaatgagcaaacgaccacaataggaggacggcagaacagtgtggtcctgcagaaactgaagccagacactccttacactatcaccgtatcctctctgtatcctgatggtgaaggaggtcggatgacgggaagaggcaagaccaaacctctaaacactgtaaggaacctgagagtgtatgacccttctaccagcaccttgaatgtccgctgggaccatgcagagggaaatcctcgtcagtacaagctcttctatgcaccagcagcaggtggtccagaggaactggtaccaatccccgggaataccaattatgccattcttaggaatctgcagccagatacctcatacactgtgactgtagttcccgtttatactgaaggtgatgggggacgcacatcagatactggaaggacattgatgagaggactggcaagaaatgtccaagtatacaatcctacacctaacagcctcgatgttcgctgggaccctgctccaggacctgtgctgcaatatcgcgttgtgtattctcctgtggatggcacaagaccctcagaatctatagtagtgccaggaaacacgcgcatggtgcatctggagcggctgattccggacacactctattccgtgaaccttgtggctctgtactcggatggagagggaaatcccagccctgcccagggccgaacgctaccacgcagtggaccaaggaacctgagagtctttggtgaaacaaccaatagcctctcggtagcctgggatcatgctgatgggccagttcagcagtacaggatcatctattctcccactgttggtgatccaattgatgaatataccacagtcccaggcagaagaaacaatgtaatactgcagcccctgcaacctgacactccatataaaattactgttattgctgtttatgaagatggagatggtggccatctaacaggaaatggaagaactgtgggactccttcctcctcagaacatacacatctctgacgaatggtatacaagattcagggtgtcctgggatccttcaccttctccagttcttggatataaaatagtatataagccagtgggttccaatgagcccatggaagcctttgttggagaaatgacatcatataccttacacaatctcaatcccagcaccacctacgatgtgaatgtttatgctcaatatgattctggactcagtgtccccttgacagatcaaggcactacattatatttaaatgtaacagatctgaaaacttaccagattgggtgggatacattctgtgtcaaatggtcacctcaccgggcagccacctcctacaggctaaaactaagccctgcagatggaacaaggggacaagaaattacagtgcgtggatcagaaaccagtcactgcttcactggcctttcaccagacactgattatggtgtcactgtttttgtgcagacaccaaatctcgagggaccaggagtctctgttaaagaacataccactgtgaaaccaacagaagcccctacagagccacccacacctcctccccctcccaccattccaccagcccgggatgtatgcaaaggggccaaggcagatattgtgttcttgactgatgcctcctggagcattggggacgataattttaacaaagttgtaaaattcatcttcaatactgtgggaggctttgatgaaatcagtcctgctgggattcaggtttcatttgtgcaatacagcgatgaggtcaagtctgagttcaagctgaacacgtacaatgacaaggccctagcccttggggccctccagaatattaggtacagaggaggaaacacaagaacaggcaaggccctcacgtttatcaaggagaaagtcttgacttgggagagcggcatgaggaagaatgtccctaaggtgttggttgtggtcacggacggtcggtcccaggatgaggtcaagaaggcggctttggtcatccagcagtcagggttcagtgtctttgtagttggtgtggctgatgtcgactacaatgagcttgccaacattgccagcaaaccaagtgaacggcacgtgttcattgtggacgactttgaatcttttgagaagatcgaagacaatcttattacatttgtttgtgaaactgccacttcaagttgtcctctcatttatttggatggctacacctcaccaggttttaaaatgcttgaagcatacaacctgacagaaaagaattttgcttctgtacaaggagtatctttggagtcagggtctttccccagctactcagcatacaggattcagaagaatgcgtttgtgaatcagcctacagcagacctacacccaaatggactccctccttcatacacgattatattattattcagacttctcccagaaactcccagtgacccttttgcaatttggcaaatcacagacagagactacaaaccacaagttggagtgattgcagatccttctagcaagacgttatcattctttaacaaggatacaagaggcgaggtgcaaactgttacatttgacacagaagaagtaaagacattattttatggaagttttcacaagagagatgagggaaaatgccctgcttttccaaattcttgcacatgtacacaggacagcgttggacctccaggacctccaggccctgcaggaggacctggtgctaaaggtcccagaggtgaaagaggtatcagtggggcaattgggccccctggtcctcgtggagacataggtcctccaggcccccagggtcctccaggccctcagggacccaatggactctctattccgggagagcaaggtcgccaagggatgaaaggtgatgctggagagccaggacttccaggccgaacaggaaccccaggattacctggcccaccaggaccaatgggacctccaggagacagaggcttcactggaaaagacggtgcaatgggacccaggggcccaccagggccgccgggaagcccaggctccccaggagtcacaggaccaagtgggaagccaggaaaacctggagatcatggcagaccaggtccatctgggttgaaaggagaaaaaggtgataggggagacattgcttcccagaacatgatgcgagcagttgcaagacaagtctgtgaacaattgataagtggtcagatgaacagattcaatcagatgctgaatcagattccaaatgattaccagtccagtcgcaaccagccaggcccgccgggtccaccgggacctcctggtagcgcaggagccagaggagaacctgggcctggggggcggccaggcttcccgggcacaccagggatgcagggaccccctggggaacgaggtttgccaggagagaaaggtgaaaggggtactggatcttcaggacctcgggggctgcctggccccccaggtccacaaggagaatccagaacaggtccaccagggtccacaggttcaagaggtccccctggcccccctggccgtcctggaaactcaggtatccgaggacccccaggtcctcctggatactgtgattcttctcagtgtgccagcatcccatacaacgggcaaggctatccaggttccggctaacacattttctaagtcgccagtgctgcttacagtttgaatacatgaaaatcctgtttctgagatgtttgcgcacgtgcttattaggaaatgagtctgtatggaaatctcaccacagataatggttaacgaaccgggtcgacatcacaaaggagggtggagactctttttactaacttgaatgagacaaaagcagtggtgtcagtttataatcctgatgcatttcagtaataatgtagaaaaacattattttaaaaaagttccaacacacagccatgaggagcctcagttttgaaagaggtgcataataaaactactaaccagaggagtctatgccattttaagaaaaacaattaacctggttaaagagaaatgtcttatgtaaataataaactaattgtggcttgtaaatgatttgtatgtgatcctgtcgactaaaatcacttaacaattctacaataagcttctgcatcaaagcctgccgcttgctctatgccggaataacaccaaatggaatctcctcatctcttgcttgttagcgatgtgtctgattcagggcatctgtctttttgttacttttttgtccgtgtcctctcatttgggttttgtaactgcaattttcaaaccaaagtttaaaatcaccttttcttcctgttttgctgtagtcactggtgttcctcacccaccagctgtaactcagtttgtgtgaggtacagccacagaagatgtcatgtactgtatattacctggtgatagttgcttttcaccccccgagttcagtttctaggagccaatgaaacttcccctcacctcctcatctttccaagttgttctttgaattgaggagtttgaaggcataaacagttacttggggatttgcgaaaatcctacttagttactgcgtttacagttctttggcccagtctctgacccttcccaagtatttgtgcaatgattgtgtttactgctggatttttgaaggtttttttttttaagaaagtgccatttcattatttgattatcaccaaattatctggaaataattgggacattgtaacttatctatttatagttatgagattaagactggagtgccatcaccgcgggtgatgatttagcttttgctgtgtgtgtgtgtgtgtgccttccaaatcatgccataattgtaatgttgaatcggacagagccttacgtgcccgagggcggggcctacctgcctgagcgcgagcccttcatcgtgccggtggagcccgagcggacagcggaatacgaggactacggcgcagacgagcctgcagaggagcctcctgagccccaccggcgctggcggcgcgccctgccccacggacccgggcagtgaaccagagatcacgcgccgcgccgcgaggcttgggggaggtgttgaaattctcatttacaggtcagatagagcagtgtacgtcttttctgaggtgtttcttccagcgttgctcatccaggagtaccctttctgattgtagagaaccttgtttctgcaggaagcctagctccaagcacgcagtctgtagacatttttgcctttgcccttgaaatgcttgcaaaatactttgttaacaaaagctgcaaagagagaacatgccgtgtgcctttagttagcacagcgggcagcctcagtgaaactcttaggttaagcagttaagtcctggaacccagagctgctgtgtatttcgagcgggcagtttatcttttgctatacttattttcaattcaattacaccacgattcaaataattcccctcctaaaaccaaaaaggagggaaacgtcaactccattgcaattacttatcttcctcttctatctctgttatacgccggggcatagaatgctcgtatacatctctttaacaaccacaaaccttaagccatgtagatgaagttagtgcatcaacgggatacagttccatattgccttaaacctccttgttttagacacactaacatttataccaaattgcagattattctgcagagagggaattgcatgtttgtgttgtatatttagtatgaacttttttcagaatataatatttcttagttatcaaaagtagttggaaaacatttgcaagactatgaacatagaattgctgcttttatattttaactgcagattgtgaatttcactgccttatattatttatttctgaaacaaaagaggcatttttcaataaaactactgaaaatttga

SEQ ID NO: 6824 - DNA, 765 bp, Homo sapiens
cacacccaggcttgacaaagctgttctgcagatcagaaagaaggggttcctggtcatacaccagtactaccaaggacagcttttttcctgcaagatctgttacctaaagcaataaaaaatggccagaggatcagtgtccgatgaggaaatgatggagctcagagaagcttttgccaaagttggtgagtagacctggtaccccaaattgcatcattctcttcttcactgagtagcttcagggtagattcaatgaaatgggaacatgagcaaaatttcagagatgacaagaaaccagtagtatttgtttagaggagctgggagaacttatttttgaaaaatatgcttcaataaaatgactttctctatcaaaacatggaatatggactctactcttacatagtttgttcctggaaatggtttgtaagtctcatcttttatatcttgtcttctgttttgctgtttccttgattttaataccatcacatactttctcttactctttatcactaaacctgtggtttccttaagagtttctataagagttctttgtggaaacagaggtaccttatagaaattatgactcttttactgtggatgttgaaagtaatgctggtgcccctattcagtagcaacagtcatcttgtgagattctgactcttccctgggatcatgccttaatgtctgaatgatagcctctctcgtcccttcaccttccatctagtcttccctcacctctctaaaagctgttgcctgaatcgtcctgaa

SEQ ID NO: 6825 - DNA, 697 bp, Homo sapiens
gacccttgagaaattagcaatttaaggtggggacagacacatagatggctaattgtaattcagtatggtgagtactcttaacagagaattgttttttaaaatcctactggctcaaaaatcagaaaaatatcatttctgcccaaagagatgtcagggaagaatatggagaggaggaagacctggaaggctgagttaggaaggaaagaattataactagatttgaatgtggtcaaaaataggacgtttatttccaggccccttatgtgaggtgtggtttgagcaggagcttgagattccagtggcagggtcccctcaggctattgggaacatttatttttccttgaaacatgaagcctcctaggaggcctgcgtgtgctgtttggtggatacgtgaccatggagcttgggaggccgcaggtttttctgcacccagcctcactgagctgttttctctgtctgtttccccagctcggagtccagtgttttcccacttatcatcttctctccaggggctctggaccatccgggcatacaaagcagaagagaggtgtcaggaactgtttgatgcacaccaggatttacattcagaggcttggttcttgtttttgacaacgtcccgctggtttgccgtccgtctggatgccatctgtgccatgtttgtcatcatcgttgcctttgggtccctgattctggcaaa

SEQ ID NO: 6826 - DNA, 5702 bp, Homo sapiens
gagcggacaggcgtggcggccggagccccagcatccctgcttgaggtccaggagcggagcccgcggccaccgccgcctgatcagcgcgaccccggcccgcgcccgccccgcccggcaagatgctgcccgtgtaccaggaggtgaagcccaacccgctgcaggacgcgaacctctgctcacgcgtgttcttctggtggctcaatcccttgtttaaaattggccataaacggagattagaggaagatgatatgtattcagtgctgccagaagaccgctcacagcaccttggagaggagttgcaagggttctgggataaagaagttttaagagctgagaatgacgcacagaagccttctttaacaagagcaatcataaagtgttactggaaatcttatttagttttgggaatttttacgttaattgaggaaagtgccaaagtaatccagcccatatttttgggaaaaattattaattattttgaaaattatgatcccatggattctgtggctttgaacacagcgtacgcctatgccacggtgctgactttttgcacgctcattttggctatactgcatcacttatatttttatcacgttcagtgtgctgggatgaggttacgagtagccatgtgccatatgatttatcggaaggcacttcgtcttagtaacatggccatggggaagacaaccacaggccagatagtcaatctgctgtccaatgatgtgaacaagtttgatcaggtgacagtgttcttacacttcctgtgggcaggaccactgcaggcgattgcagtgactgccctactctggatggagataggaatatcgtgccttgctgggatggcagttctaatcattctcctgcccttgcaaagctgttttgggaagttgttctcatcactgaggagtaaaactgcaactttcacggatgccaggatcaggaccatgaatgaagttataactggtataaggataataaaaatgtacgcctgggaaaagtcattttcaaatcttattaccaatttgagaaagaaggagatttccaagattctgagaagttcctgcctcagagggatgaatttggcttcatttttcagtgcaagcaaaatcatcgtgtttgtgaccttcaccacctacgtgctcctcggcagtgtgatcacagccagccgcgtgttcgtggcagtgacgctgtatggggctgtgcggctgacggttaccctcttcttcccctcagccattgagagggtgtcagaggcaatcgtcagcatccgaagaatccagacctttttgctacttgatgagatatcacagcgcaaccgtcagctgccgtcagatggtaaaaagatggtgcatgtgcaggattttactgctttttgggataaggcatcagagaccccaactctacaaggcctttcctttactgtcagacctggcgaattgttagctgtggtcggccccgtgggagcagggaagtcatcactgttaagtgccgtgctcggggaattggccccaagtcacgggctggtcagcgtgcatggaagaattgcctatgtgtctcagcagccctgggtgttctcgggaactctgaggagtaatattttatttgggaagaaatacgaaaaggaacgatatgaaaaagtcataaaggcttgtgctctgaaaaaggatttacagctgttggaggatggtgatctgactgtgataggagatcggggaaccacgctgagtggagggcagaaagcacgggtaaaccttgcaagagcagtgtatcaagatgctgacatctatctcctggacgatcctctcagtgcagtagatgcggaagttagcagacacttgttcgaactgtgtatttgtcaaattttgcatgagaagatcacaattttagtgactcatcagttgcagtacctcaaagctgcaagtcagattctgatattgaaagatggtaaaatggtgcagaaggggacttacactgagttcctaaaatctggtatagattttggctcccttttaaagaaggataatgaggaaagtgaacaacctccagttccaggaactcccacactaaggaatcgtaccttctcagagtcttcggtttggtctcaacaatcttctagaccctccttgaaagatggtgctctggagagccaagatgttgcctatgtgcttcaagattggtggctttcatactgggcaaacaaacaaagtatgctaaatgtcactgtaaatggaggaggaaatgtaaccgagaagctagatcttaactggtacttaggaatttattcaggtttaactgtagctaccgttctttttggcatagcaagatctctattggtattctacgtccttgttaactcttcacaaactttgcacaacaaaatgtttgagtcaattctgaaagctccggtattattctttgatagaaatccaataggaagaattttaaatcgtttctccaaagacattggacacttggatgatttgctgccgctgacgtttttagatttcatccagacattgctacaagtggttggtgtggtctctgtggctgtggccgtgattccttggatcgcaatacccttggttccccttggaatcattttcatttttcttcggcgatattttttggaaacgtcaagagatgtgaagcgcctggaatctacaactcggagtccagtgttttcccacttatcatcttctctccaggggctctggaccatccgggcatacaaagcagaagagaggtgtcaggaactgtttgatgcacaccaggatttacattcagaggcttggttcttgtttttgacaacgtcccgctggtttgccgtccgtctggatgccatctgtgccatgtttgtcatcatcgttgcctttgggtccctgattctggcaaaaactctggatgccgggcaggttggtttggcactgtcctatgccctcacgctcatggggatgtttcagtggtgtgttcgacaaagtgctgaagttgagaatatgatgatctcagtagaaagggtcattgaatacacagaccttgaaaaagaagcaccttgggaatatcagaaacgcccaccaccagcctggccccatgaaggagtgataatctttgacaatgtgaacttcatgtacagtccaggtgggcctctggtactgaagcatctgacagcactcattaaatcacaagaaaaggttggcattgtgggaagaaccggagctggaaaaagttccctcatctcagccctttttagattgtcagaacccgaaggtaaaatttggattgataagatcttgacaactgaaattggacttcacgatttaaggaagaagatgtcaatcatacctcaggaacctgttttgttcactggaacaatgaggaaaaacctggatccctttaatgagcacacggatgaggaactgtggaatgccttacaagaggtacaacttaaagaaaccattgaagatcttcctggtaaaatggatactgaattagcagaatcaggatccaattttagtgttggacaaagacaactggtgtgccttgccagggcaattctcaggaaaaatcagatattgattattgatgaagcgacggcaaatgtggatccaagaactgatgagttaatacaaaaaaaaatccgggagaaatttgcccactgcaccgtgctaaccattgcacacagattgaacaccattattgacagcgacaagataatggttttagattcaggaagactgaaagaatatgatgagccgtatgttttgctgcaaaataaagagagcctattttacaagatggtgcaacaactgggcaaggcagaagccgctgccctcactgaaacagcaaaacaggtatacttcaaaagaaattatccacatattggtcacactgaccacatggttacaaacacttccaatggacagccctcgaccttaactattttcgagacagcactgtgaatccaaccaaaatgtcaagtccgttccgaaggcattttccactagtttttggactatgtaaaccacattgtacttttttttactttggcaacaaatatttatacatacaagatgctagttcatttgaatatttctcccaacttatccaaggatctccagctctaacaaaatggtttatttttatttaaatgtcaatagttgttttttaaaatccaaatcagaggtgcaggccaccagttaaatgccgtctatcaggttttgtgccttaagagactacagagtcaaagctcatttttaaaggagtaggacaaagttgtcacaggtttttgttgttgtttttattgcccccaaaattacatgttaatttccatttatatcagggattctatttacttgaagactgtgaagttgccattttgtctcattgttttctttgacataactaggatccattatttcccctgaaggcttcttgttagaaaatagtacagttacaaccaataggaacaacaaaaagaaaaagtttgtgacattgtagtagggagtgtgtaccccttactccccatcaaaaaaaaaaatggatacatggttaaaggatagaagggcaatattttatcatatgttctaaaagagaaggaagagaaaatactactttctcaaaatggaagcccttaaaggtgctttgatactgaaggacacaaatgtgaccgtccatcctcctttagagttgcatgacttggacacggtaactgttgcagttttagactcagcattgtgacacttcccaagaaggccaaacctctaaccgacattcctgaaatacgtggcattattcttttttggatttctcatttatggaaggctaaccctctgttgactgtaagccttttggtttgggctgtattgaaatcctttctaaattgcatgaataggctctgctaacgtgatgagacaaactgaaaattattgcaagcattgactataattatgcagtacgttctcaggatgcatccaggggttcattttcatgagcctgtccaggttagtttactcctgaccactaatagcattgtcatttgggctttctgttgaatgaatcaacaaaccacaatacttcctgggaccttttgtactttatttgaactatgagtctttaatttttcctgatgatggtggctgtaatatgttgagttcagtttactaaaggttttactattatggtttgaagtggagtctcatgacctctcagaataaggtgtcacctccctgaaattgcatatatgtatatagacatgcacacgtgtgcatttgtttgtatacatatatttgtccttcgtatagcaagttttttgctcatcagcagagagcaacagatgttttattgagtgaagccttaaaaagcacacaccacacacagctaactgccaaaatacattgaccgtagtagctgttcaactcctagtacttagaaatacacgtatggttaatgttcagtccaacaaaccacacacagtaaatgtttattaatagtcatggttcgtattttaggtgactgaaattgcatcagtgatcataatgaggtttgttaaaacgatagctatattcaaaatgtctatatgtttatttggacttttgaggttaaagacagtcatataaacgtcctgtttctgttttaatgttatcatagaattttttaatgaaactaaattcaattgaaataaatgatagttttcatctccattcaga

SEQ ID NO: 6827 - DNA, 651 bp, Homo sapiens
gctcaaatggcttaggaagcaggcagctgcagctgtggggctggccgcccctccaccaggagctcggataattattgatggagctaatttgaccatatctaatgtaactttagaggaccaaggtatttactgctgttcagctcatactgctctagacagtgctgccgatataactcaagtaactgttcttgatgttccggatccaccagaaaaccttcacttgtctgaaagacagaacaggagtgttcggctgacctgggaagctggagctgaccacaacagcaatattagcgagtatattgttgaatttgaaggaaacaaagaagagcctggaaggtgggaggaactgaccagagtccaaggaaagaaaaccacagttatcttacctttggctccatttgtgagataccagttcagggtcatagccgtgaacgaagtagggagaagtcagcctagccagccgtcagaccatcatgaaacaccaccagcagctccagataggaatccacaaaacataagggttcaagcctctcaacccaaggaaatgattataaagtgggagcctttgaaatccatggagcagaatggaccaggcctagagtacagagtgacctggaagccacagggagccccagtggagtgggaagaaga

SEQ ID NO: 6828 - DNA, 3352 bp, Homo sapiens
agacacaaggagaggcttggagagagcagacgccttctggattcaagaagacgagtccaagcatctgaatggggatgagagaagtggcagtaattacaggcggatcccatggggccggaggcctgcaccaccgcgagatgtggccattttacaagaaagggctaataagttggtgaaatacctgttggttaaggaccagacaaagatccccatcaaacgctcagacatgctgagggatgtcatccaagaatatgatgaatatttcccagaaatcattgaacgagcaagctacactctggagaagatgtttcgagtcaatctgaaagaaattgataagcaaagtagcttgtatattctcatcagcactcaggaatcctctgcaggcatactgggaacgaccaaggacacacccaagctgggtctcctcatggtgattctgagtgtcatttttatgaatggcaacaaggccagtgaggctgtcatctgggaggtgctgcgcaagttggggctgcgccctggggtgaggcattcactctttggggaagtgaggaagctcatcacagacgagtttgtgaagcagaagtacctggagtacaagagggtccctaacagcagaccacctgaatatgagttcttctggggcttgcgctcctaccacgagactagcaagatgaaagtcctcaagtttgcatgcagggtgcagaagaaagaccccaaggactgggctgtgcagtaccgcgaggcagtggagatggaagtccaagctgcagctgtggctgtggctgaggctgaagccagggctgaggcaagagcccaaatggggattggagaggaagctgtggctgggccctggaattgggatgacatggatatcgactgcctaacaagggaagagttaggcgatgatgctcaggcctggagcagattttcatttgaaattgaggccagagcccaagaaaatgcagatgccagcaccaacgtcaacttcagcagaggagctagtaccagggctggcttcagcgatggtgctagtattagcttcaatggtgcacccagctccagtggtggcttcagtggtggacctggcattacctttggtgttgcacccagcaccagtgccagcttcagcaatacagccagcattagctttggtggtacactgagcactagctccagcttcagcagcgcagccagcattagctttggttgtgcacacagcaccagcactagtttcagcagtgaagccagcattagctttggtggcatgccttgtaccagtgccagctttagtggtggagtcagctctagttttagtggcccactcagcaccagtgccactttcagtggtggagccagctctggctttggaggcacactcagcaccacggctggctttagtggtgtactcagcactagcaccagctttggcagtgcacccacaacgagcacagtcttcagtagtgcgcttagcaccagcactggctttggaggcatactcagcaccagtgtctgttttggtggctctcccagctccagtggtagctttggtggtacactcagtaccagtatctgcttcggtggctctccctgcaccagcactggctttggaggcacacttagcaccagtgtctcctttggtggctcttccagcaccagtgccaattttggtggtacactaagtaccagcatctgctttgatggctctcccagcactggtgctggctttggtggtgctctcaacaccagtgccagctttggcagtgtgctcaacaccagtactggttttggtggtgctatgagcaccagtgctgactttggcggtacactaagcaccagtgtctgctttggtggctctcctggcaccagtgtcagctttggcagtgcactcaacaccaatgctggttatggtggtgctgtcagcaccaacactgactttggtggtacactaagcaccagcgtctgttttggtggctctcccagcaccagtgctggctttggtggtgcactcaacaccaatgccagctttggctgtgccgtcagcaccagtgccagcttcagtggtgctgtcagcaccagtgcttgcttcagtggtgcaccaatcaccaaccctggctttggcggtgcatttagcaccagtgctggcttcggtggggcacttagtaccgctgctgacttcggtggtactcccagcaacagcattggctttggtgctgctcccagcaccagtgtcagctttggtggtgctcatggcaccagcctctgttttggtggagctcccagcaccagcctctgctttggcagtgcatctaatactaacctatgctttggtggccctcctagcaccagtgcctgctttagtggtgctaccagccctagtttttgtgatggacccagcaccagtaccggtttcagctttggcaatgggttaagcaccaatgctggatttggtggtggactgaacaccagtgctggctttggtggtggcctaggcaccagtgctggcttcagtggtggcctaagcacaagttctggctttgatggtgggctaggtaccagcgctggcttcggtggaggaccaggcaccagcactggttttggtggtggactgggcaccagtgctggcttcagtggcggactgggcaccagtgctggctttggtggtggactggtcactagtgatggctttggtggtggactgggcaccaatgctagtttcggcagcacacttggcaccagtgctggctttagtggtggcctcagcaccagcgatggctttggcagtaggcctaatgccagcttcgacagaggactgagtaccatcattggctttggcagtggttccaacaccagcactggctttactggcgaacccagcaccagcacgggcttcagtagtggacccagttctattgttggcttcagcggtggaccaagcactggtgttggcttctgcagtggaccaagcaccagtggcttcagcggtggaccgagcacaggagctggcttcggcggtggaccaaacactggtgctggctttggtggtggaccgagcaccagtgctggctttggcagtggagccgccagtcttggtgcctgtggcttctcgtatggctagtgaggtttcagatttattccccatgtttacagataccgctaataaattgcagtagtccttcccatggagccaaagtacatccttggaatctttgtccacacagcagtcaaggcagttatggccaatcagctgagggtgtcatgtgatggaaaaatctgtttgctgttcctgctttattgtttgctttctgtgtgctgtcatattttggtatcagagttacattaaatttgcaaaatg

SEQ ID NO: 6829 - DNA, 3501 bp, Homo sapiens
cggatggctacatggatgtgatggagatggtttactatcgggaccttccgcaccctgctgatgttttgttgcttaggatatgaatggctgagcggaggctgtaaaacctggcactctgcttgggttatcaatactctggctgaccatcatcatcgtgggactgactttggtggaagtccttggttacatgtcattattgcgtttccgacaagttataaagttgtcattaccctctggatagtttacctttgggtgtctctcctgaagactatcttctggtctcgaaatggacatgatggatccacggatgtacagcagagagcctggaggtccaaccgccgtagacaggaagggctgaggtccatttgtatgcacacaaagaaaagagtttcttcctttcgaggaaataaaattggcctgaaagacgtcattactctacggagacatgtggaaacaaaagttagagctaaaatccgtaagaggaaggtgacaacgaaaatcaaccatcatgacaaaatcaatggaaagaggaagaccgccagaaaacagaaaatgtttcaacgtgcgcaagagttgcggcggcgagcagaggactaccacaaatgcaaaatccccccttctgcaagaaaggctctttgcaactgggtcagaatggcggcagcggagcatcgtcattcttcaggattgccctactggccctacctcacagctgaaactttaaaaaacaggatgggccaccagccacctcctccaactcaacaacattctataactgataactccctgagcctcaagacacctcccgagtgtctgctcactccccttccaccctcagcggatgataatctcaagacacctcccgagtgtgtgctcactccccttccaccctcagcggatgataatctcaagacacctcccgagtgtgtgctcactccccttccaccctcagcggatgataatctcaagacacctcctgagtgtctgctcactccccttccaccctcagcggatgataatctcaagacacctcccgagtgtctactcactccccttccaccctcagctctaccctcagctccaccctcagcggatgataatctcaagacacgtgccgagtgtctgctccatccccttccaccctcagcggatgataatctcaagacaccttccgagcgtcagctcactccccttccaccctcagctccaccctcagcagatgataatatcaagacacctgccgagcgtctgcgggggccgcttccaccctcagcggatgataatctcaagacaccttccgagcgtcagctcactccccttccaccctcagctccaccctcagcagatgataatatcaagacacctgccgagcgtctgcgggggccgcttccaccctcagcggatgataatctcaagacaccttccgagcgtcgtactccccttccaccctcagctccaccctcagcagatgataatatcaagacacctgccgagcgtctgcgggggccgcttccaccctcagcggatgataatctcaagacaccttccgagcgtcatatcatgcccccaccctcagcagatgataatatcaatacacctgccgagcgtcttcgggggccgcttccaccctcagcggatgataatctcaagacaccttccgagcgtcagctcactccccttccaccctcagcagatgataatatcaagacacctgccgagcgtctgcgggggccgcttccaccctcagcggatgataatctcaagacaccttccgagcgtcagctcactccccttccaccctcagctccaccctcagcagatgataatatcaagatacctgctgagcgtctgcggattccgcttccaccatcagccgatgataatctcaagacaccttccgagcgtcagctcactccccttccaccctcagctccaccctcagcagatgataatatcaagacacctggcttccaccctgagcggatgataatctcaagacaccttccgagcgtcagctcactccccttccaccctcagctccaccctcagcagatgataatatcaagacacctgccgagcgtctgcgggggccgcttccaccctcagcggatgataatctcaagacaccttccgagcgtcagctcactccccttccaccctcagctccaccctcagcagatgataatatcaagacacctgccgagcgtctgcgggggccgcttccaccctcagcagatgataatctcaagacaccttccgagcgtcagctcactccccttccaccctcagctccaccctcagcagatgataatatcaagacacctgccgagcgtctgcgggggccgcttccaccctcagcggatgataatctcaagacaccttccgagcgtcagctcactccctttccaccctcagctccaccctcagcagatgataatatcaagacacctgccgagcgtctgcgggggccgcttccaccctcagcggatgataatctcaagacaccttccgagcgtcagctcactccccttccaccctcagctccaccctcagcagatgataatatcaagacacctgccgagcgtctgcgggccgcttccaccctcagcggatgataatctcaagacaccttccgagcgtcagctcactccccttccaccctcagctccaccctcagcagatgataatatcaagacacctgccgagcgtctgcgggggccgcttccaccctcagcggatgataatctcaagacaccttccgagcgtcagctcactccccttccaccctcagctccaccctcagcagatgataatatcaagacacctgccgagcgtctgcgggggccgcttccaccctcagcggatgataatctcaagacaccttccgagcgtcagctcactccccttccaccctcagctccaccctcagcagatgataatatcaagacacctgctgagcgtctgcgggggccgcttccaccctcagcggatgataatctcaagacaccttccgagcgtcagctcactccccttccaccctcagctccaccctcagcagatgataatatcaagacacctgccgagcgtctgcgggggccgcttccaccctcagccgatgataatctcaagacacctcccttagctactcaggaggctgaggcagaaaaaccacgcaaacccaagaggcagagggcggctgagatggaaccacctcccgaacccaagaggcggagggtcggtgacgtggaaccgtcacgcaaacccaagaggcggagggccgctgacgtggaaccatcatcacccgaacccaagaggcggagggtcggtgatgtggaaccgtcacgcaaacccaagaggcggagggccgctgacgtggaaccatcatcacccgaacccaagaggcggagggtcggtgacgtggaaccgtcacgcaaacccaagaggcggagggccgctgacgtggaaccatcattacccgaacccaagaggcggaggttgagctga

SEQ ID NO: 6830 - DNA, 509 bp, Homo sapiens
agggagaactgtccttgaagaaaaagtatcagttgccttccgccaagaagtagtagtaaaagaaagactagaattagaagtagtagaagcagaagtggaagaaattccggaagaagaagagttccatgaagttgaagaatattttgaagaaggcgagtttcatgaagtagaagaattcatcaaattagaacaacatagagttgaagaagaacacagagttgaaaaagttcatagggtaatagaagtttttgaggctgaagaagtggaagtatttgaaaaaccaaaagctccacctaaagggcctgagatatctgagaaaatcatccctccaaaaaaaccgcccactaaagttgttcctcgaaaagagccaccagctaaagtaccggaggtgcctaagaaaattgtggtagaagaaaaagtacgtgttcctgaagagcccagagttccaccaactaaagcacccgaagtacccaagaaaattgtcccagaagaaaaagttcgtgaagctg

SEQ ID NO: 6831 - DNA, 734 bp, Homo sapiens
ccagttggctgtaagttgccatttgaactaaacgaaatagatcaggaactgaggacatatctaaattttctagttttatagaaggcttttatccacaagaatcaagatcttccctctctgagcaggaatcctttgtgcattgaagactttagattcctctctgcggtagacgtgcacttataagtatttgatggggtggattcgtggtcggaggtctcgacacagctgggagatgagtgaatttcataattataacttggatctgaagaagagtgatttttcaacacgatggcaaaagcaaagatgtccagtagtcaaaagcaaatgtagagaaaatgcatctccattttttttctgctgcttcatcgctgtagccatgggaatccgtttcattattatggtaacaatatggagtgctgtattcctaaactaaagttactgtggcccatgtcctaaaaactggatatgttacaaaaataactgctaccaattttttgatgagagtaaaaactggtatgagagccaggcttcttgtatgtctcaaaatgccagccttctgaaagtatacagcaaagaggaccaggatttacttaaactggtgaagtcatatcattggatgggactagtacacattccaacaaatggatcttggcagtgggaagatggctccattctctcacccaacctactaacaataattgaaatgcagaagggagactgtgcactctatgcct

SEQ ID NO: 6832 - DNA, 872 bp, Homo sapiens
aggggcagccccggggccgggcccggcgcgcacccggccagcgcgccctcgccagctgcgctctgagttctgggccagctccccagaggcctaggcgccgccgccgcgagggcgcggggcagacaaaggaggcagacaaaggcgggcgcagcccagcagccgtgcgggcaccgggcgaggcaggcccactcctcccggtagcgggaaggatgaccacgctcacacgacaagacctcaactttggccaagtggtggccgatgtgctctgcgagttcctggaggtggctgtgcatctcatcctctacgtgcgcgaggtctaccccgtgggcatcttccagaaacgcaagaagtacaacgtgccggtccagatgtcctgccacccggagctgaatcagtatatccaggacacgctgcactgcgtcaagccactcctggagaagaatgatgtggagaaagtggtggtggtgattttggataaagagcaccgcccagtggagaaattcgtctttgagatcacccagcctccactgctgtccatcagctcagactcgctgttgtctcatgtggagcagctgctccgggccttcatcctgaagatcagcgtgtgcgatgccgtcctggaccacaaccccccaggctgtaccttcacagtcctggtgcacacgagagaagccgccactcgcaacatggagaagatccaggtcatcaaggatttcccctggatcctggcggatgagcaggatgtccacatgcatgacccccggctgataccactaaaaaccatgacgtcggacattttaaagatgcagctttacgtggaagagcgcgctcataaaggcagctgagggggcacctgccaccccactgatgcc

SEQ ID NO: 6833 - DNA, 5759 bp, Homo sapiens
agtgtgccaccgccatctttaccggctgtggctcagcatggtcagtgccgtttaacctttattgtggtggagtccaccccgctgtgggcctcagataaccctgtacaaaggggaatggagattgcctgtatccacctagattcataagctgccctgaggcgatcttggcatcaagaaagacagcattgaggcacatctcaccatcagcttcagaggatgtcagcctttgatatgtcccatgggttttttcccagggaaccaatctgtccttttgaagaaaagacaaagataggaacgatggtagaggaccaccggtcaaattcttaccaggattcagtgacgtttgatgatgtggctgtggagttcaccccagaggagtgggctttactggacacaactcagaaatacctctacagagatgtgatgctggagaactacatgaacctggcctctgtggatttctttttctgcttaacttcagaatgggaaatacaacctagaaccaaacggtcatcacttcagcagggttttttgaagaatcaaatattcactgggatacaaatgcagacaagaagctacagtggatggaaactctgtgagaattgtggagaggtcttcagtgaacagttttgccttaagacacacatgagagctcagaatggagggaacacttttgagggtaattgttatggaaaagacagcatcagtgtgcacaaggaagcctctattggacaagaactttccaaatttaatccatgtggaaaagtcttcaccttaactccaggccttgctgtgcatcttgaaattctcaatggaagacaaccctacaaatgtaaggaatgtggaaaaggctttaagtattttgcaagccttgataatcacatgggaatccacattggagagaaactctgtgaatttcaggaatgtgagagagccatcacaacttcctcacacttaaagcagtgtgtagcagttcatactggaaagaaatccgaaaagactaagaactgtgggaaatccttcactaatttttctcaactttctgcacatgcaaaaactcataaaggagagaagtcctttgaatgtaaagaatgtggaagatcctttagaaattcctcatcctttaatgttcacattcaaattcacactggaataaaaccacacaaatgtacggaatgtgggaaagccttcactagatcaactcaccttactcaacatgtaagaactcacactggaataaaaccctatgaatgtaaggaatgtggccaagccttcactcagtacacgggccttgctatacacatacgaaatcacactggagagaaaccctatcagtgtaaggaatgtgggaaagccttcaatagatcttcaacgcttactcaacatagaagaattcacacaggagagaagccttatgaatgtgttgaatgtgggaagaccttcattacttcttcccatcgtagtaaacatttgaaaactcacagtggagaaaggtaaatgcaagatatgtgggaaagaatttctgtattcctcaccccacctgtgaactcctaccagagagaaaccttttgtatgtaaagaatttgggaaagcatttgctctttcctcatgcctaagtatgcatgaaagaattcacactggggagaaatactatgaatgtaaggatatgagtgttgttaccatttagcccattggttgccatctttaattattggcagtgcaaagatcatcagattagtcctaaatgccttttggaggttgtaatggctcacagattggccttagatgcatcccgagggtctgaaattaaacctacaggttctgaatacaacatcatggttacctgagtctgggcatctgtgaagaagggtcatggatggtgaggtcagtactgcaggctgcctcaccttggtgattagattcctaagatcatagcattaacaagttctgtacgagataaatcatgcagattgatcccagcccctgttggttagtggctgccagtgtggcacattcatgtcaaaatttaccagaagccaagatgatgtaggccccagaggtggattgttaaaaagatgctcctccaaggttctcttctgttcccatggatcctgcagagcatgtcaggagtgaaaccatccataactgccagtgccctttcacagctgattatttctatgtccccttcttgtaaaataagaagtgtgacaaccttgactgttctgttctgtcttctctgtccattttaggtggcacaatgtaagtggcagtgtctcttatagtataatccagtctctcttctcacttctgttaagatggctgatatagtccatgaatcccactcatgatctctttatcaaatgattgttcagccacactttgaggattctcttcagtacaagttttctaatttttgcagtatggataggctgagaattttccaaatctccaagttctggttcctttttccttaacaatttcttctgcaattcaggtctccttttgcatttttgccgagaccagctgggtcgtggagaccctaacccagtggctctagaggaattaagacaaagacacagaaatatagtgcagagtgggaatcggggctcacagccttcagagctgagcttgaacagagtttgacccacatatttattgacagtaagcctgtgataaacattattcctatagattgtagatcagctataagtattccttatgagaaagaaagggacaggctctggcttgttatctgcaacaggaatatgtccttaaggcacaaatcactcatgctattgtttgtggtttaggaatgccttgagcagttttccagttttctgccctgggtgggccaggtgttgcttgccctcattctggtaaaccagcagcctccagcatgggcgtcatagccatcacgagcatgtcacagtgctgcagagattttgtttatggccagtttctcattgcctgtttatggccagatttggggggcctgttcccagcacattttcctgtaagcactcaggaataatgaagcttcctgtgtcctttaacactttaattacagatcttagtgatacataccattttatctgtctcaagctctaccttccgtaaaatgctagaatacagttctgccaagttcttcaccactttatatcaagggttgtcttttcttcatttcccaatagcatgttcctcattccccaatgacacctcaccagaataacccttaccaaccttatttccagcttgcacatcagaatttttccagcctctactcatttgtcagtttcaaagctgcttcacatttttagtttttttgtttgtttttaattgcagtacctcacttctcagtaccaatatctgccttagtcagctcagacaaccataagagaataccgcagaccaaatggcttagaaattaatttaattttaaatcaatgaggttaaaaacacaggattttttttttttttttttttttttttttgagatggagttttgctcttgttgcccaggctggagtgcaatggtatgatcttggctcaccgcaacctccacctcctgagttccagtgattctcctgcctcaccctcagtagctgggattattggcatgcaccacaaaccttagctaagtttgtatttttagtagagacagggtttctccatgttggttaggctgatctccatgttggtcagatctgacctttggtgatccacctgccttggcctcccaaagtgctgggattacaggcctgagccaccgtatctggcccaaaacacaaatttatattctcacatatctggaggctggaagtctgagatcagagtgccagcatggtcaacctctagtgagagctctcttcctggcatgtaagtgcccacttcctcatgttttcacacgatggagaccaacaaataggtcggtcggtctcccccctccccgcccccttctcttttcacatacagtcacattgaggtttggaacttcatatgaaatttggggggtcactgtgtgtgtgtgtgtgtgtgtgtgtatgtgtatatatatatacatatatatacacatatgtatgtatacctaactcctaaagtggaacagtaagagtcattatttatagattatctgattctctatgtggaaagagaaaagaatcatattaagtactttggactgaacaatgacccccaaaattcgtatgatgatgaagctctctctaaatattttcttgctttactggactgattttaacccgctgcacaacaccaactaaaagtagtaataccagcatacttgtctttgcagttctggtgagatatgcactctattttgttggtttggctgtaggcttttatttcttttttattttttgaagaggttatgtcctgtcagggaaccagccccgatattcacataggttcttttctattttccctaagtgtcagccaacttgagaaataaagggacagagtacaaaagagagaaattttaaagctgggtgtccggggcagacatcacatgtcggtaggttccgtgatgccccacaagccgcaaaaaccagcaagtttttattagggattttcaaaaggggagggagtgtgcaaataggtgtgggtcacagacatcaagtactttacaaggtaatagaatatcacaaggcaagtggaggcagggcgagatcacaggaccaaggtgaaattaaaattgctaatgaagttttgggcaccattgtcattgataacatcttatcaggagacggttttgagatcaactggtctgactaaaatttattaggtgggaatttcctcttcctaataagcctgggagtgctatgggagactggggtctatttcacccctgcagtctcgaccataagagatggctacacccaggggggccagttcagagacccactcccaggtgtgcattctctttctcaaggatgttccttgctgagaaaaagaattcagtgatatttctcccatttgcttgtgaaagaagagaaatgtggctttgttccacctggctcaccggcggtcagaatttaaggttatctctcttgtttcctaaacattgctgttatcctgttcttttttcaaggtgcccagatttcatattgctcaaacacacatgctgtataatttgtgcagttaatgcaattattacagggtcctgaggtaatatacatcctcctcagctgacaggattgagagattaaagtaaagacaggcataggaaatcacaagggtattgactggggaagtgataagtgtccatgaaatctttacaatttatgtttagagattgcagtaaagacaggcataagaaattataaaagtattaatttggggaactaataaatgtccatgaaaccttcacaatccatgtttttctgccatggcttcagccagtccccccgtttggggtccctgacttcctgcaacaatgtcctgcaggaaaagttttttctttatatccagtttttacatgatgaattatttcccaatatttcatagtttatgaggctgaattcctcttgaatttattaaatgcttccttcacatcctctgtgatgatcatgtttatttactgataaaactcaatacctagaactgcacctagctcatgatggtacctaataaatacttcaatgaaatgatgtggtgatgcatgcctatagttttagctacttgggagggtggcctgagcccaggggttctagaccagcttaggcaacatagcaagaccccatctc

SEQ ID NO: 6834 - DNA, 1485 bp, Homo sapiens
attctgtgcacaagtgcagagaaggcgtgcgcgctgcctcgggactcagaccaccggtctcttccttggggaagcggggatgtcttggagcgagttacattgtctgaatttagaggcggagggcggcgtgcctgggctgagttcccaggaggagattgcgcccgctttaacttcggggttaagcgcctggtgactgttcttgacactggatatacacttcagataactacaccgaggaaatgggctcaggggactatgactccatgaaggaaccctgtttccgtgaagaaaatgctaatttcaataaaatcttcctgcccaccatctactccatcatcttcttaactggcattgtgggcaatggattggtcatcctggtcatgggttaccagaagaaactgagaagcatgacggacaagtacaggctgcacctgtcagtggccgacctcctctttgtcatcacgcttcccttctgggcagttgatgccgtggcaaactggtactttgggaacttcctatgcaaggcagtccatgtcatctacacagtcaacctctacagcagtgtcctcatcctggccttcatcagtctggaccgctacctggccatcgtccacgccaccaacagtcagaggccaaggaagctgttggctgaaaaggtggtctatgttggcgtctggatccctgccctcctgctgactattcccgacttcatctttgccaacgtcagtgaggcagatgacagatatatctgtgaccgcttctaccccaatgacttgtgggtggttgtgttccagtttcagcacatcatggttggccttatcctgcctggtattgtcatcctgtcctgctattgcattatcatctccaagctgtcacactccaagggccaccagaagcgcaaggccctcaagaccacagtcatcctcatcctggctttcttcgcctgttggctgccttactacattgggatcagcatcgactccttcatcctcctggaaatcatcaagcaagggtgtgagtttgagaacactgtgcacaagtggatttccatcaccgaggccctagctttcttccactgttgtctgaaccccatcctctatgctttccttggagccaaatttaaaacctctgcccagcacgcactcacctctgtgagcagagggtccagcctcaagatcctctccaaaggaaagcgaggtggacattcatctgtttccactgagtctgagtcttcaagttttcactccagctaacacagatgtaaaagacttttttttatacgataaataacttttttttaagttacacatttttcagatataaaagactgaccaatattgtacagtttttattgcttgttggatttttgtcttgtgtttctttagtttttgtgaagtttaattgacttatttatataaattttttttgtttcatattgatgtgtgtctaggcaggacctgtggccaagttcttagttgctgtatg

SEQ ID NO: 6835 - DNA, 480 bp, Homo sapiens
ctgctgaaaaagcagaaagagattaccagccacagacgggtcatgagcgcggtattactgctggccctcctggggttcatcctcccactgccaggagtgcaggcgctgctctgccagtttgggacagttcagcatgtgtggaaggtgtccgacctgccccggcaatggacccctaagaacaccagctgcgacagcggcttggggtgccaggacacgttgatgctcattgagagcggaccccaagtgagcctggtgctctccaagggctgcacggaggccaaggaccaggagccccgcgtcactgagcaccggatgggccccggcctctccctgatctcctacaccttcgtgtgccgccaggaggacttctgcaacaacctcgttaactccctcccgctttgggccccacagcccccagcagatcccatgatgggagctgcagaaggcccctttgggaaggctgagcaggttgactcttga

SEQ ID NO: 6836 - DNA, 3344 bp, Homo sapiens
gagccattttggagccggtgtcagtttccactctgccttcagcggtgcatttttttccaccctcccctccccctcctcccctccccccgctcgcacgcacacacacggcgccccccgcccgcccgcctcccccacagcaactatgaaataatcgtagtatgagaggcagagatcggggcgagacaatggggatgtgggcgcgggagccccgttccggcttagcagcacctcccagccccgcagaataaaaccgatcgcgccccctccgcgcgcgccctcccccgagtgcggagcgggaggaggcggcggcggccgaggaggaggaggaggaggccccggaggaggaggcgttggaggtcgaggcggaggcggaggaggaggaggccgaggcgccggaggaggccgaggcgccggagcaggaggaggccggccggaggcggcatgagacgagcgtggcggccgcggctgctcggggccgcgctggttgcccattgacagcggcgtctgcagctcgcttcaagatggccgcttggctcgcattcattttctgctgaacgacttttaactttcattgtcttttccgcccgcttcgatcgcctcgcgccggctgctctttccgggattttttatcaagcagaaatgcatcgaacaacgagaatcaagatcactgagctaaatccccacctgatgtgtgtgctttgtggagggtacttcattgatgccacaaccataatagaatgtctacattccttctgtaaaacgtgtattgttcgttacctggagaccagcaagtattgtcctatttgtgatgtccaagttcacaagaccagaccactactgaatataagattggatcggaaagtaaacaaagacaaagagaaatctaaggaggaggtgaatgataaaagatacttacgatgcccagcagcaatgactgtgatgcacttaagaaagtttctcagaagtaaaatggacatacctaatactttccagattgatgtcatgtatgaggaggaacctttaaaggattattatacactaatggatattgcctacatttatacctggagaaggaatggtccacttccattgaaatacagagttcgacctacttgtaaaagaatgaagatcagtcaccagagagatggactgacaaatgctggagaactggaaagtgactctgggagtgacaaggccaacagcccagcaggaggtattccctccacctcttcttgtttgcctagccccagtactccagtgcagtctcctcatccacagtttcctcacatttccagtactatgaatggaaccagcaacagccccagcggtaaccaccaatcttcttttgccaatagacctcgaaaatcatcagtaaatgggtcatcagcaacttcttctggttgatacctgagactgttaaggaaaaaaattttaaacccctgatttatatagatatcttcatgccattacagctttctagatgctaatacatgtgactatcgtccaatttgctttcttttgtagtgacattaaatttggctataaaagatggactacatgtgatactcctatggacgttaattgaaaagaaagattgttgttataaagaattggtttcttggaaagcaggcaagactttttctctgtgttaggaaagatgggaaatggtttctgtaaccattgtttggatttggaagtactctgcagtggacataagcattgggccatagtttgttaatctcaactaacgcctacattacattctccttgatcgttcttgttattacgctgttttgtgaacctgtagaaaacaagtgctttttatcttgaaattcaaccaacggaaagaatatgcatagaataatgcattctatgtagccatgtcactgtgaataacgatttcttgcatatttagccattttgattcctgtttgatttatacttctctgttgctacgcaaaaccgatcaaagaaaagtgaacttcagttttacaatctgtatgcctaaaagcgggtactaccgtttattttactgacttgtttaaatgattcgcttttgtaagaatcagatggcattatgcttgttgtacaatgccatattggtatatgacataacaggaaacagtattgtatgatatatttataaatgctataaagaaatattgtgtttcatgcattcagaaatgattgttaaaattctcccaactggttcgacctttgcagatacccataacctatgttgagccttgcttaccagcaaagaatatttttaatgtggatatctaattctaaagtctgttccattagaagcaattggcacatctttctatactttatatacttttctccagtaatacatgtttactttaaagattgttgcagtgaagaaaaacctttaactgagaaatatggaaaccgtcttaattttccattggctatgatggaattaatattgtattttaaaaatgcatattgatcactataattctaaaacaattttttaaataaaccagcaggttgctaaaagaaggcattttatctaaagttattttaataggtggtatagcagtaattttaaatttaagagttgcttttacagttaacaatggaatatgccttctctgctatgtctgaaaatagaagctatttattatgagcttctacaggtatttttaaatagagcaagcatgttgaatttaaaatatgaataaccccacccaacaattttcagtttattttttgctttggtcgaacttggtgtgtgttcatcacccatcagttatttgtgagggtgtttattctatatgaatattgtttcatgtttgtatgggaaaattgtagctaaacatttcattgtccccagtctgcaaaagaagcacaattctattgctttgtcttgcttatagtcattaaatcattacttttacatatattgctgttacttctgctttctttaaaaatatagtaaaggatgttttatgaagtcacaagatacatatatttttattttgacctaaatttgtacagtcccattgtaagtgttgtttctaattatagatgtaaaatgaaatttcatttgtaattggaaaaaatccaataaaaaggatattcatttagaaaatagctaagatctttaataaaaatttgatatgaaaagcacaatgtgcagaagttatggaaaacctatagaggattacaacaggtaaacgttaaagagaatacattgctgacttatagtgatgtggctaagaagtacatgctttgttgtaaaattgcttgaaagcccattgaaagatgtatctgtttatttacagtctttgaagtaaaagttaccaatgtttgcc

SEQ ID NO: 6837 - DNA, 5724 bp, Homo sapiens
gcggccgccgcctgccgggcctcccctcgccgcggccggccgccgcgctcccgcccgggcgcccagctatgtactccccgtactgcctcacccaggatgagttccacccgttcatcgaggcactgctgcctcacgtccgcgctttctcctacacctggttcaacctgcaggcgcggaagcgcaagtacttcaagaagcatgaaaagcggatgtcgaaggacgaggagcgggcggtgaaggacgagctgctgggcgagaagcccgagatcaagcagaagtgggcatcccggctgctggccaagctgcgcaaggacatccggcccgagttccgcgaggacttcgtgctgaccatcacgggcaagaagcccccctgctgcgtgctctccaaccccgaccagaagggcaagatccggcggattgactgcctgcgccaggctgacaaggtgtggcggctggacctggtcatggtgattttgtttaaggggatccccctggaaagtactgatggggagcggctctacaagtcgcctcagtgctcgaaccccggcctgtgcgtccagccacatcacattggagtcacaatcaaagaactggatctttatctggcttactttgtccacactccggaatccggacaatcagatagttcaaaccagcaaggagatgcggacatcaaaccactgcccaacgggcacttaagtttccaggactgttttgtgacttccggggtctggaatgtgacggagctggtgagagtatcacagactcctgttgcaacagcatcagggcccaacttctccctggcggacctggagagtcccagctactacaacatcaaccaggtgaccctggggcggcggtccatcacctcccctccttccaccagcaccaccaagcgccccaagtccatcgatgacagtgagatggagagccctgttgatgacgtgttctatcccgggacaggccgttccccagcagctggcagcagccagtccagcgggtggcccaacgatgtggatgcaggcccggcttctctaaagaagtcaggaaagctggacttctgcagtgccctctcctctcagggcagctccccgcgcatggctttcacccaccacccgctgcctgtgcttgctggagtcagaccagggagcccccgggccacagcatcagccctgcacttcccctccacgtccatcatccagcagtcgagcccgtatttcacgcacccgaccatccgctaccaccaccaccacgggcaggactcactgaaggagtttgtgcagtttgtgtgctcggatggctcgggccaggccaccggacagcccaacggtagcggccagggcaaagtcccggggtcatttttgctaccgccgccgcctccagtggccagacctgtgccccttcctatgcctgattccaaatccaccagcactgccccagacggcgccgccttgactcctccatcaccttcattcgcaacgacaggcgcctcctctgccaaccggtttgtcagcatcggaccccgggacggcaactttctgaacatcccacagcagtctcagtcctggttcctctgataagatcgacaaaagaaacaacaaaatgagaagaagaggttcctcgaaaggggggagaagaaattttgagaatggaaaaatcccccagcccagcccagccccaccgaaaagcaaaaattacacgtcgtcagccactcagcccttctctcctccagcccggggacccccgcgggccccagaagcagcccagttctcagagagcccttggaaggggtctcggtggagctgtgcaccagcagccaagcagaaagaaacacgcgacatggactctgtcaagtagaggacagaaagcaagaaaggatgcagaactgccttcctccccctgaccccgccccggccttctggggaaggaacaaagtccccaaacaaagcaaccagcacaattctgaaggggcctggcctccaccctcaccccttcctaggggaaccccaccctccacacagccggagctgccctagggagcctggagggccagcttgtaaagatgatggggtttagatccctcaggctctcccctccagactccgcccttccctccctccctccctccctccctctctgccaaggctccagcttcttcccccagctgctcccgaccaggagggggagagcagcctccacttaccccaccccacccttgggctaaaagcccccaggcgggcagggggtgacccctggagctagttgcgtgtcccagaatggagggtgttctgacaccccaccctgagccgcaagagcagtcctggggccctggacccctctgtacagtccgtaggaaaaagtcggaatgctctcgacggcctcgtcccagcctgggacaggccccctttcccctctctctgcaggccaggagggcctccttcctgccacgagggaggggagtcgggccccaggtcgcccccgcccccagccctgcatgcaggtgccctcgctccgccccatcagttcctgcccctgcccctcatgcagactgccctgctggggccgggccggagggtggagcagaaaggggaccccggagccgagcgaggaggaccaggcagccgccgctgccgcgctaagccaccacctgcgcttaggtaggcgtcctgctcgccgactttcagttccttgggagggtgttgggtgtcgtccttttcaaaagtgttttggagctttctgtgccccccgactttcccccgcctccccgccccccacgtggccacttttctctggattttagctgtaatgtctttactctttatttaggggtggggcattcattgtttgggtcttttgctgttggaatgggaactcctcctccatttgagcaacttgggaacaatttggtaacacaccacaggaagtagctctcccccccagccccctcctccctcaagggagggttggggggcctgtccagagggtcttcagaagcccccctgggagggaggggaggatgagcacgcccagctcccctccagggtgtgacttggcccctctggcttgtctttctgtgccttactcctcctcctgcgtctcccgttcctggccccttcttgagtccttgtgcctctctctttctctctctttcttaattgtatgaaaacacaaagcacaggtcaggatcctctgagagaaaatcaacattgcaccacgtaggggtgggctatgggctgtatttattgtgaatctagtttgtgaggctgtggccccgagctggcggagggagggaagaggagggagtgacgggaggggaggaggtcagcgacctggggccgtagcggcaggcgaacggtgcctgctacccagctggaagccacaaggtggctggctccaggggcggcttttgttggaagttgagtgaagccctccccctgtcctcagcgtgcagccctagaggaccccagggctgaggggcagtggatcctgcgggagtctcccggggcgtggggagtaaggccccgggggtggggggccgggtgggccgggcgtgacgcgcggtcaaagtgcaatgatttttcagttcggttggctaaacagggtcagagctgagagcgaagcagaaggggctccctgtccggcccacgtgccctttccctcgacgacagtcgagggctcgggctctgtgggactgtgggagctagggtctgcggggcgcctgcccgggcgaggtcggaagctgcaggccagctgggcccgggccggagcgtgcccggcggggctgcccgggcgggcagggggtgggggctgctcctttcccaagtggtgttgtgaggggcaatgagggcaacaggagatgtggggacgtgttaggagagaaaaaaaaaaaaacaaaaatatatatgggggaaattaacttttttttttcattgaaccaagtgcaatgcatcagagagttttcctatctttgtatgttaagagattaagaaaaaaaaattctatttttgttgtaatgtcctcgcggctctggggacgctaaaagaaccgggcctgccccgccctgcgcggggataacgaaagctgagtgtttttcccttttttttgttcgtttttagtttttttttttttaagtcgttttcctgcgttgacgaggatgatctggggtttttatttgtttcgtcgttcgttctgtttcggtgggagggctgaaggaaacgttcacattttagagtttaaaaaaaacacctcgacatttaaaaaatcaaccaacacaagatcaaaaaggaaaaggacgagagaaaaattatttttaagataattaaacataaaaccctggtgcttcttacattataaagtacgttttaaagaacccacaaactattatacataagtttatgaatcaattaaatatcctgcacttgttaggaatacgcatatcccttctttgttgagtttaacggaacgggacagcggcgtgcccccggcggctggactgctccggccgcgggtctccccgggcgcccctccctggggcccagcacccctcctcgccccatccccgtccgggtacgggggcgcggcaggggtccccggcccctcccccgcagaggtcaatgccaacgaacaaacgtcccctccctccctccctctccgccccgagcgcccttctttgagccagacgccaacttgaccctcaccagcattatcaggagcgcgctcagcaagttggtagtttcctcccccctttcccggcgcccctcccgcccccattcaacatctctcatcctatccccgaccccctccggggaacaccgggaaggctcgacgctccaggacaggaccagccacgcagacaggtcgatttgcccaggcccgcgcccgcacgcacgcacgcacacggccccgcacacagccccgccccaccccgcaaccagccctgtcgactgccttatacacccgcccccgcgctggccggccgacctagtgccttgttctcacccccgtgctggcggagcggacgccgcgctctgggtcccagaggggccgggtggctcagacgacccaccactcccccaccctgaccgtgctgaacagacccccccacacgagagaaaataaaggagcaataaagtcacgagaactttcgtcccccaatcgagagcccgaggggcaccccagccccgcctctgctcccccccaccccacccaccctcggggcgcccccctccccccgcaagccagcctgggccagccccgcttcggcccctcccgggagatccgtgcgcccgaccagcaccagcatcgcggaccgcaaaggccgcccgtcccgtcaaacaagtttcttcttaggctaagaaacgcagtatatacgagtatctctatatatagtactaatggatttggtgtgcttcccccttagcgtccccctccctctgctcctcctccttcagcctggtctccccctcttctctgccctccacccccgtctctgcactgagatacataagaaacaagggtagtttactgtctgttttgttttctgggttttcagtgtcctagcggaatgcaagtaggcagccagcccgtctgttccctctccgccccgccccgccccgcccccgtcactgcgcttctgttataccatctttgcctgactctctccggcttctccattgaatggctaatgtgtatgtgaaataaagaaataaagaaaaacaaacgcga

SEQ ID NO: 6838 - DNA, 5217 bp, Homo sapiens
agagaggccaagaggtttctgcttctattgatgttagcatttggttataaccacgggcaaagaatattaagctttgtcagagacccttcagcacttccatagagccatcccactagaggtcacagatcacaaaaaccctacagaaacaggaaaccgaacttcctgagtacgctacaaaacacagaaacctgtttcctctacacatctcaaactggcaaaactcagtcttagcagattcagtgtggaagcagctatcaaaaaggccataaggattttgtccccaaatttcacatgagctaccttgcttcaaactactgagatgaagggggcaagattatttgtccttctttctagtttatggagtgggggcattgggcttaacaacagtaagcattcttggactatacctgaggatgggaactctcagaagactatgccttctgcttcagttcctccaaataaaatacaaagtttgcaaatactgccaaccactcgggtcatgtcggcggagatagctacaactccagaggcaagaacttctgaagacagtcttcttaaatcaacactgcctccctcagaaacaagtgcacctgctgagggtgtgagaaatcaaactctcacatccacagagaaagcagaaggagtggtcaagttacagaatcttaccctcccaaccaacgctagcatcaagttcaatcctggagcagaatcagtggtcctttccaattctacactgaaatttcttcagagctttgccagaaagtcaaatgaacaagcaacttctctaaacacagttggaggcactggaggcattggaggcgttggaggcactggaggcgtgggaaatcgagccccacgggaaacatacctcagccggggtgacagcagttccagccaaagaactgactaccaaaaatcaaatttcgaaacaactagaggaaagaattggtgtgcttatgtacataccaggttatctcccacagtgatattggacaaccaggtcacttatgtcccaggtgggaaaggaccttgtggctggaccggtggatcctgtcctcagagatctcagaagatatccaatcctgtctataggatgcaacataaaattgtcacctcattggattggaggtgctgtcctggatacagtgggccgaaatgtcaactaagagcccaggaacagcaaagtttgatacacaccaaccaggctgaaagtcatacagctgttggcagaggagtagctgagcagcagcagcagcaaggctgtggtgacccagaagtgatgcaaaaaatgactgatcaggtgaactaccaggcaatgaaactgactcttctgcagaagaagattgacaatatttctttgactgtgaatgatgtaaggaacacttactcctccctagaaggaaaagtcagcgaagataaaagcagagaatttcaatctcttctaaaaggtctaaaatccaaaagcattaatgtactgataagagacatagtaagagaacaatttaaaatttttcaaaatgacatgcaagagactgtagcacagctcttcaagactgtatcaagtctatcagaggacctcgaaagcaccaggcaaataattcaaaaagttaatgaatctgtggtttcaatagcagcccagcaaaagtttgttttggtgcaagagaatcggcccactttgactgatatagtggaactaaggaatcacattgtgaatgtaaggcaagaaatgactcttacatgtgagaagcctattaaagaactagaagtaaagcagactcatttagaaggtgctctagaacaggaacactcaagaagcattctgtattatgaatccctcaataaaactctttctaaattgaaggaagtacatgagcagcttttatcaactgaacaggtatcagaccagaagaatgctccagctgctgagtcagttagcaataatgtcactgagtacatgtctactttacatgaaaatataaagaagcagagtttgatgatgctgcaaatgtttgaagatttgcacattcaagaaagcaagattaacaatctcaccgtctctttggagatggagaaagagtctctcagaggtgaatgtgaagacatgttatccaaatgcagaaatgattttaaatttcaacttaaggacacagaagagaatttacatgtgttaaatcaaacattggctgaagttctctttccaatggacaataagatggacaaaatgagtgagcaactaaatgatttgacttatgatatggagatccttcaacccttgcttgagcagggagcatcactcagacagacaatgacatatgaacaaccaaaggaagcaatagtgataaggaaaaagatagaaaatctgactagtgctgtcaatagtctaaattttattatcaaagaacttacaaaaagacacaacttacttagaaatgaagtacagggtcgtgatgatgccttagaaagacgtatcaatgaatatgccttagaaatggaagatggcctcaataagacaatgactattataaataatgctattgatttcattcaagataactatgccctaaaagagactttaagtactattaaggataatagtgagatccatcataaatgtacctccgatatggaaactattttgacatttattcctcagttccaccgtctgaatgattctattcagactttggtcaatgacaatcagagatataactttgttttgcaagtcgccaagacccttgcaggtattcccagagatgagaaactaaatcagtccaacttccaaaagatgtatcaaatgttcaatgaaaccacttcccaagtgagaaaataccagcaaaatatgagtcatttggaagaaaaactactcttaactaccaagatttccaaaaattttgagactcggttgcaagacattgagtctaaagttacccagacgctcataccttattatatttcagttaaaaaaggcagtgtagttacaaatgagagagatcaggctcttcaactgcaagtattaaattccagatttaaggcgttggaagcaaaatctatccatctttcaattaacttcttttcgcttaacaaaactctccacgaagttttaacaatgtgtcacaatgcttctacaagtgtgtcagaactgaatgctaccatccctaagtggataaaacattccctgccagatattcaacttcttcagaaaggtctaacagaatttgtggaaccaataattcaaataaaaactcaagctgccctatctaatttaacttgttgtatagatcgatcgttgcctggtagtctggcaaatgttgtcaagtctcagaagcaagtaaaatcattgccaaagaaaattaacgcacttaagaaaccaacggtaaatcttaccacagtcctgataggccggactcaaagaaacacggacaacataatatatcctgaggagtattcaagctgtagtcggcatccgtgccaaaatgggggcacgtgcataaatggaagaactagctttacctgtgcctgcagacatccttttactggtgacaactgcactatcaagcttgtggaagaaaatgctttagctccagatttttccaaaggatcttacagatatgcacccatggtggcattttttgcatctcatacgtatggaatgactatacctggtcctatcctgtttaataacttggatgtcaattatggagcttcatataccccaagaactggaaaatttagaattccgtatcttggagtatatgttttcaagtacaccatcgagtcatttagtgctcatatttctggatttttagtggttgatggaatagacaagcttgcatttgagtctgaaaatattaacagtgaaatacactgtgatagggttttaactggggatgccttattagaattaaattatgggcaggaagtctggttacgacttgcaaaaggaacaattccagccaagtttccccctgttactacatttagtggctatttattatatcgtacataagttagtatgaaaaacagactatcacctttattgagaaacagccagtgttttcatttatctttgcttgcacatctgctctgttttggtttttctacaggaaatgaaaatcaacttgtttttttaatatgagtaaacttgtatgtctattttataaaattatttgaatattgtttaatgtctgaatatgaaagagttcttgatcctaaagaaatttagtggcacagaaaacaaagtgaatttgttagcataattattcctattcttatttcttcattttaagtcattgcaatggaaagtaatattataaaatggtaattacaacatattatcagtcacagttttctttccaattaaacacttaacttttgttattccctgtatataaatatataacacacattttctagattcacaaatttaaataaattactcaaaaaatgaaaattgattttgtaaacttttatttttactctttacgttgagttgatcaattttccatactaagattttcattcagaatcaaaattaagaaagttggactgaaaatatgaaaaatgcttaactattgttctcttcctataattctctaattataacatagtaatttacatgtagttggacatgtacactcaagtctaagaatatatgagtggatcatttaccgccccccgccccacaacatctataaggggcaaaaagtctttttctaataagtattcttctatggtagtacctacagatctgcccttcttcttctaaagggtaagtcataatctgtgtaatactacaatttatgggatgctcactatgccctgtttctcttctaaacaatttacatgtaatgtctcattcctcacaataacccttgtaaagtgggcatgattaccatgatttttatagttgaagaacctaagacacagagaccaaggcccatgagctcatagggctgaggcaggatttggaatcaggccatgtcttctccagagcccacatccatcctttctctatattgcctcccacagatgtgctaaaatttatttaactaatcctttatcctctatttgtgttgtctcccattttttattattacaatattactgtggtgaacatgcttaaaaatacattccttggatatctgacaacgtgtttctgaaaaacagattttcataagtaataataaaaataataataaaaaagttttggtatggtaa

SEQ ID NO: 6839 - DNA, 3470 bp, Homo sapiens
agcgtcgctgcggctccggcccgggagcgagcgcccggagctcggaaagatgcggcgcccgcggcggcctgggggtctcgggggatccgggggtctccggctgctcctctgcctcctgctgctgagcagccgcccggggggctgcagcgccgttagtgcccacggttcgggagaaggacacggggtgcatgtgggcagagggacttagagaccggctgcgagaccacaggagaagccacttgctccgaggcgcctgggaggctgtctatttgaccgcaggctctgctctcacctggaagtctgtattcaggatggcttgtttgggcagtgccaggtgggagtggggcaggcccggccccttttgcaagtcacctccccagttctccaacgcttacaaggtgtgctccgacaactcatgtcccaaggattgtcctggcacgatgacctcacccagtatgtgatctctcaggagatggagcgcatccccaggcttcgccccccagagccccgtccaagggacaggtctggcttggcacccaagagacctggtcctgctggagagctgcttttacaggacatccccactggctccgcccctgctgcccagcatcggcttccacaaccaccagtgggcaaaggtggagctggggccagctcctctctgtcccctctgcaggctgagctgctcccgcctctcttggagcacctgctgctgcccccacagcctccccacccttcactgagttacgaacctgccttgctgcagccctacctgttccaccagtttggctcccgtgatggctccagggtctcagagggctccccagggatggtcagtgtcggccccctgcccaaggctgaagcccctgccctcttcagcagaactgcctccaagggcatatttggggaccaccctggccactcctacggggaccttccagggccttcacctgcccagctttttcaagactctgggctgctctatctggcccaggagttgccagcacccagcagggccagggtgccaaggctgccagagcaagggagcagcagccgggcagaggactccccagagggctatgagaaggaaggactaggggatcgtggagagaagcctgcttccccagctgtgcagccagatgcggctctgcagaggctggccgctgtgctggcgggctatggggtagagctgcgtcagctgacccctgagcagctctccacactcctgaccctgctgcagctactgcccaagggtgcaggaagaaatccgggaggggttgtaaatgttggagctgatatcaagaaaacaatggaggggccggtggagggcagagacacagcagagcttccagcccgcacatcccccatgcctggacaccccactgccagccctacctccagtgaagtccagcaggtgccaagccctgtctcctctgagcctcccaaagctgccagaccccctgtgacacctgtcctgctagagaagaaaagcccactgggccagagccagcccacggtggcaggacagccctcagcccgcccagcagcagaggaatatggctacatcgtcactgatcagaagcccctgagcctggctgcaggagtgaagctgctggagatcctggctgagcatgtgcacatgtcctcaggcagcttcatcaacatcagtgtggtgggaccagccctcaccttccgcatccggcacaatgagcagaacctgtctttggctgatgtgacccaacaagcagggctggtgaagtctgaactggaagcacagacagggctccaaatcttgcagacaggagtgggacagagggaggaggcagctgcagtccttccccaaactgcgcacagcacctcacccatgcgctcagtgctgctcactctggtggccctggcaggtgtggctgggctgctggtggctctggctgtggctctgtgtgtgcggcagcatgcgcggcagcaagacaaggagcgcctggcagccctggggcctgagggggcccatggtgacactacctttgagtaccaggacctgtgccgccagcacatggccacgaagtccttgttcaaccgggcagagggtccaccggagccttcacgggtgagcagtgtgtcctcccagttcagcgacgcagcccaggccagccccagctcccacagcagcaccccgtcctggtgcgaggagccggcccaagccaacatggacatctccacgggacacatgattctggcatacatggaggatcacctgcggaaccgggaccgccttgccaaggagtggcaggccctctgtgcctaccaagcagagccaaacacctgtgccaccgcgcagggggagggcaacatcaaaaagaaccggcatcctgacttcctgccctatgaccatgcccgcataaaactgaaggtggagagcagcccttctcggagcgattacatcaacgccagccccattattgagcatgaccctcggatgccagcctacatagccacgcagggcccgctgtcccataccatcgcagacttctggcagatggtgtgggagagcggctgcaccgtcatcgtcatgctgaccccgctggtggaggatggtgtcaagcagtgtgaccgctactggccagatgagggtgcctccctctaccacgtatatgaggtgaacctggtgtcggagcacatctggtgcgaggactttctggtgcggagcttctacctgaagaacgtgcagacccaggagacgcgcacgctcacgcagttccacttcctcagctggccggcagagggcacaccggcctccacgcggcccctgctggacttccgcaggaaggtgaacaagtgctaccggggccgctcctgccccatcatcgtgcactgcagtgatggtgcggggaggaccggcacctacatcctcatcgacatggtcctgaaccgcatggcaaaaggagtgaaggagattgacatcgctgccaccctggagcatgtccgtgaccagcggcctggccttgtccgctctaaggaccagtttgaatttgccctgacagccgtggcggaggaagtgaatgccatcctcaaggccctgccccagtgagaccctggggccccttggcgggcagcccagcctctgtccctctttgcctgtgtgagcatctctgtgtacccactcctcactgccccaccagccacctcttgggcatgctcagcccttcctagaagagtcaggaagggaaagccagaaggggcacgcctgcccagcctcgcatgccagagcctggggcatcccagagcccagggcatcccatgggggtgctgcagccaggaggagaggaaaggacatgggtagcaattctacccagagccttctcctgcctacattccctggcctggctctcctgtagctctcctggggttctgggagttccctgaacatctgtgtgtgtccccctatgctccagtatggaagaatggggtggagg

SEQ ID NO: 6840 - DNA, 1123 bp, Homo sapiens
actcccaacagagcgcccaagaagaaaatggccataagtggagtccctgtgctaggatttttcatcatagctgtgctgatgagcgctcaggaatcatgggctatcaaagaagaacatgtgatcatccaggccgagttctatctgaatcctgaccaatcaggcgagtttatgtttgactttgatggtgatgagattttccatgtggatatggcaaagaaggagacggtctggcggcttgaagaatttggacgatttgccagctttgaggctcaaggtgcattggccaacatagctgtggacaaagccaacctggaaatcatgacaaagcgctccaactatactccgatcaccaatgacaagttcaccccaccagtggtcaatgtcacgtggcttcgaaatggaaaacctgtcaccacaggagtgtcagagacagtcttcctgcccagggaagaccaccttttccgcaagttccactatctccccttcctgccctcaactgaggacgtttacgactgcagggtggagcactggggcttggatgagcctcttctcaagcactgggagtttgatgctccaagccctctcccagagactacagagaacgtggtgtgtgccctgggcctgactgtgggtctggtgggcatcattattgggaccatcttcatcatcaagggagtgcgcaaaagcaatgcagcagaacgcagggggcctctgtaaggcacatggaggtgatggtgtttcttagagagaagatcactgaagaaacttctgctttaatgactttacaaagctggcaatattacaatccttgacctcagtgaaagcagtcatcttcagcgttttccagccctatagccaccccaagtgtggttatgcctcctcgattgctccgtactctaacatctagctggcttccctgtctattgccttttcctgtatctattttcctctatttcctatcattttattatcaccatgcaatgcctctggaataaaacatacaggagtctgtctctgctatggaatgccccatggggcatctcttgtgtacttattgtttaaggtttcctcaaactgtgatttttctgaacacaataaactattttgatgatcttgggtggaa

SEQ ID NO: 6841 - DNA, 3589 bp, Homo sapiens
acccgcctctgcgcgcccccgggcacgaccccggagtctccgcgggcggccagggcgcgcgtgcgcggaggttctcctcgtccgcccgttgttcagcgagggaggctctgcgcgtgccgcagctgacggggaaactgaggcacggagcgggcctgtaggagctgtccaggccatctccaaccatgggagtgaggcacccgccctgctcccaccggctcctggccgtctgcgccctcgtgtccttggcaaccgctgcactcctggggcacatcctactccatgatttcctgctggttccccgagagctgagtggctcctccccagtcctggaggagactcacccagctcaccagcagggagccagcagaccagggccccgggatgcccaggcacaccccggccgtcccagagcagtgcccacacagtgcgacgtcccccccaacagccgcttcgattgcgcccctgacaaggccatcacccaggaacagtgcgaggcccgcggctgttgctacatccctgcaaagcaggggctgcagggagcccagatggggcagccctggtgcttcttcccacccagctaccccagctacaagctggagaacctgagctcctctgaaatgggctacacggccaccctgacccgtaccacccccaccttcttccccaaggacatcctgaccctgcggctggacgtgatgatggagactgagaaccgcctccacttcacgatcaaagatccagctaacaggcgctacgaggtgcccttggagaccccgcatgtccacagccgggcaccgtccccactctacagcgtggagttctccgaggagcccttcggggtgatcgtgcgccggcagctggacggccgcgtgctgctgaacacgacggtggcgcccctgttctttgcggaccagttccttcagctgtccacctcgctgccctcgcagtatatcacaggcctcgccgagcacctcagtcccctgatgctcagcaccagctggaccaggatcaccctgtggaaccgggaccttgcgcccacgcccggtgcgaacctctacgggtctcaccctttctacctggcgctggaggacggcgggtcggcacacggggtgttcctgctaaacagcaatgccatggatgtggtcctgcagccgagccctgcccttagctggaggtcgacaggtgggatcctggatgtctacatcttcctgggcccagagcccaagagcgtggtgcagcagtacctggacgttgtgggatacccgttcatgccgccatactggggcctgggcttccacctgtgccgctggggctactcctccaccgctatcacccgccaggtggtggagaacatgaccagggcccacttccccctggacgtccagtggaacgacctggactacatggactcccggagggacttcacgttcaacaaggatggcttccgggacttcccggccatggtgcaggagctgcaccagggcggccggcgctacatgatgatcgtggatcctgccatcagcagctcgggccctgccgggagctacaggccctacgacgagggtctgcggaggggggttttcatcaccaacgagaccggccagccgctgattgggaaggtatggcccgggtccactgccttccccgacttcaccaaccccacagccctggcctggtgggaggacatggtggctgagttccatgaccaggtgcccttcgacggcatgtggattgacatgaacgagccttccaacttcatcaggggctctgaggacggctgccccaacaatgagctggagaacccaccctacgtgcctggggtggttggggggaccctccaggcggccaccatctgtgcctccagccaccagtttctctccacacactacaacctgcacaacctctacggcctgaccgaagccatcgcctcccacagggcgctggtgaaggctcgggggacacgcccatttgtgatctcccgctcgacctttgctggccacggccgatacgccggccactggacgggggacgtgtggagctcctgggagcagctcgcctcctccgtgccagaaatcctgcagtttaacctgctgggggtgcctctggtcggggccgacgtctgcggcttcctgggcaacacctcagaggagctgtgtgtgcgctggacccagctgggggccttctaccccttcatgcggaaccacaacagcctgctcagtctgccccaggagccgtacagcttcagcgagccggcccagcaggccatgaggaaggccctcaccctgcgctacgcactcctcccccacctctacacactgttccaccaggcccacgtcgcgggggagaccgtggcccggcccctcttcctggagttccccaaggactctagcacctggactgtggaccaccagctcctgtggggggaggccctgctcatcaccccagtgctccaggccgggaaggccgaagtgactggctacttccccttgggcacatggtacgacctgcagacggtgccagtagaggcccttggcagcctcccacccccacctgcagctccccgtgagccagccatccacagcgaggggcagtgggtgacgctgccggcccccctggacaccatcaacgtccacctccgggctgggtacatcatccccctgcagggccctggcctcacaaccacagagtcccgccagcagcccatggccctggctgtggccctgaccaagggtggggaggcccgaggggagctgttctgggacgatggagagagcctggaagtgctggagcgaggggcctacacacaggtcatcttcctggccaggaataacacgatcgtgaatgagctggtacgtgtgaccagtgagggagctggcctgcagctgcagaaggtgactgtcctgggcgtggccacggcgccccagcaggtcctctccaacggtgtccctgtctccaacttcacctacagccccgacaccaaggtcctggacatctgtgtctcgctgttgatgggagagcagtttctcgtcagctggtgttagccgggcggagtgtgttagtctctccagagggaggctggttccccagggaagcagagcctgtgtgcgggcagcagctgtgtgcgggcctgggggttgcatgtgtcacctggagctgggcactaaccattccaagccgccgcatcgcttgtttccacctcctgggccggggctctggcccccaacgtgtctaggagagctttctccctagatcgcactgtgggccggggccctggagggctgctctgtgttaataagattgtaaggtttgccctcctcacctgttgccggcatgcgggtagtattagccacccccctccatctgttcccagcaccggagaagggggtgctcaggtggaggtgtggggtatgcacctgagctcctgcttcgcgcctgctgctctgccccaacgcgaccgctgcccggctgcccagagggctggatgcctgccggtccccgagcaagcctgggaactcaggaaaattcacaggacttgggagattctaaatcttaagtgcaattatttttaataaaaggggcatttggaatc

SEQ ID NO: 6842 - DNA, 8552 bp, Homo sapiens
agggaaggttggcagagggatccatgtgactgaggccggagcacggcaaagatgagcctgcccgcccgcctgctgcctggatgcggagggtgagggctggcgcacgggaggccgctggctgcgcattctgggcgccgagtgcccgggatgagctcacgcccgcgtctgcggctctctccacctgccgacctgccgggggcccactgagctgacggcgcacctgggctccggccgcagcgtggggcgcggcgcccgggagcaggtgtgcaggagcgcagcgcgcggcgagcgcagccctcgctccggagcccggccgcgccgcgtgcccgggcggctaggcagcggcggcggcggcggcgggcggcgggcgggcggcggcccccgggcaggtgccgagcggcgagcggagccgggccgggcggagcgcggggggcgaggccggcgcgtcgctcgcgggaggccggggagcggcaggggcatgtggatactggctctctccttgttccagagcttcgcgaatgttttcagtgaagacctacactccagcctctactttgtcaatgcatctctgcaagaggtagtgtttgccagcaccacggggactctggtgccctgccccgcagcaggcatccctcctgtgactctcagatggtacctagccacgggcgaggagatctacgatgtccccgggatccgccacgtccaccccaacggcactctccaaattttccccttccctccttcaagcttcagtaccttaatccatgataatacttattattgcacagctgaaaatccttcagggaaaattagaagtcaggatgtccacatcaaggctgttttacgggagccctatacagtccgtgtggaggaccagaaaaccatgagaggcaatgttgcggtcttcaagtgcattatcccctcctcggtggaggcgtacatcactgtcgtctcatgggagaaagacactgtttcacttgtctcaggatctagatttctcatcacatccacgggagccttgtatattaaagatgtacagaatgaagatggattgtataactaccgctgcatcacgcggcatcgatacaccggagagacgaggcagagcaacagcgccagactttttgtatcagacccagcgaactcagccccatccatactggatgggtttgaccatcgcaaagccatggctgggcagcgtgtggagctgccttgcaaagcgctcgggcaccctgagccagattaccgctggctgaaggacaacatgcccctggaactttcagggaggttccagaagaccgtgacggggctgctcattgagaacattcgcccctcggactcaggcagctatgtttgtgaagtgtccaacagatacggaactgctaaggtgataggccgcctgtacgtgaaacagccactgaaagccaccatcagtcccaggaaggttaaaagcagcgtgggtagccaagtttccttgtcctgcagcgtgacaggaactgaggaccaggaactctcctggtaccgcaatggtgaaatcctcaaccctggaaaaaatgtgaggatcacagggatcaaccacgaaaaccttataatggatcacatggtcaaaagtgacgggggcgcataccagtgctttgtgcgcaaggacaagctgtccgctcaagactatgtgcaggtggtccttgaagatggaactcccaaaattatttctgcctttagtgaaaaggtggtgagtccagcagagccggtttcccttatgtgcaacgtgaagggaacacctttgcccacgatcacgtggaccctggacgatgacccgattctcaagggtggcagtcaccgcatcagccagatgatcacgtcggaggggaacgtggtcagctacctgaacatctccagctcccaggtccgggacgggggagtctaccgctgcactgccaacaactcggcgggagtcgtcctgtaccaggctcgaataaacgtaagagggcctgcaagcattcgaccaatgaaaaacatcacagcaatagcaggacgggacacatacattcactgtcgtgtgattggctatccgtattactccattaaatggtacaagaactctaacctgcttcctttcaaccaccgccaagtggcatttgagaacaatggaactcttaaactttcagatgtgcaaaaggaagtggacgagggggagtacacgtgcaacgtgttggttcaaccacaactctccaccagccagagcgtccacgtgaccgtgaaagttccgcctttcatacaaccctttgagtttccaagattctccattgggcagcgggtcttcatcccctgtgttgtggtctcaggggacttacccatcacgatcacctggcagaaggatggccggccaatccctgggagccttggggtgaccattgacaatattgacttcacgagctccttgaggatttccaatctctcgctcatgcacaatgggaattacacctgcatagcccggaatgaggccgccgctgtggagcaccaaagccagttgattgtcagagttcctcccaagtttgtggttcagccacgggaccaggacgggatttatggcaaagcagtcatcctcaattgttctgctgagggttaccctgtacctaccatcgtgtggaaattctctaaaggtgctggggttccccagttccagccaattgccctaaatggccgaatccaagttctcagcaatgggtcgttgctgatcaagcatgtcgtggaggaagacagtggctactacctctgcaaggtcagcaacgatgtgggcgcagacgtcagcaagtccatgtacctcacggttaaaattcctgcgatgataacatcctatccaaatactaccctggccacgcaggggcagaaaaaggagatgagctgcacggcgcatggtgagaagcccattatagtccgctgggagaaggaggaccgaatcattaaccctgagatggcccgttatcttgtgtccaccaaggaggtgggagaagaggtgatttctactctgcagattttgccaactgtgagagaagattctggtttcttttcctgccatgctattaattcttatggggaggaccgtggaataattcagctcacagtgcaagagcccccagaccctcccgaaattgagatcaaagatgtcaaagcacgcacaattacgctcaggtggaccatggggtttgatggaaacagtcccatcacaggctacgatattgaatgcaaaaataaatcagactcctgggattctgctcagagaaccaaagatgtttcccctcagctgaactcggccaccatcattgatatccacccttcctccacctacagcatccgcatgtacgccaagaaccggattggcaagagcgagcccagcaacgagctcaccatcacggcggacgaggcagctcctgatggtccacctcaggaagttcacctggagcctatatcatctcagagcatcagggtcacatggaaggctcccaagaaacatttgcaaaatgggattatccgtggctaccaaataggttaccgagagtacagcactgggggtaacttccaattcaacattatcagtgtcgacaccagcggggacagtgaggtttacaccctggacaacctgaataagttcactcagtacggcctggtggtgcaggcctgtaaccgggccggcacggggccttcttctcaggaaatcatcaccaccactctcgaggatgtgcccagttacccccccgaaaatgtccaagccatagcaacatcaccagaaagcatatcaatatcctggtccacactttccaaggaagccttgaatggaattctccaggggttcagagtcatttactgggccaacctcatggacggagagctgggtgagattaaaaacatcaccaccacacagccttcactggagctggacgggctggaaaagtacaccaactacagcatccaggtgctggccttcacccgcgcaggagacggggtcaggagtgagcagatcttcacccggaccaaagaggatgttccaggtcctcccgcgggtgtgaaggcagcggcggcctcagcctccatggtctttgtgtcctggcttccccctctcaagctgaacggcatcatccgaaagtacactgtattctgctcccacccctatcccacagtgatcagcgagtttgaggcctctcccgactcgttttcctacagaattcccaacctgagtaggaatcgtcagtacagcgtctgggtggtggctgttacttcagccggaagaggcaacagcagtgaaatcatcacagtcgagccactagcaaaagctcctgcacgaatcctgaccttcagtgggacagtgactactccatggatgaaagacattgtcttgccttgtaaggctgttggggacccttctcctgcagtcaaatggatgaaagacagtaacgggacacccagtctagtaacgattgatgggcggaggagcatctttagcaacggaagcttcattattcgcacggtgaaagcagaagactccggctattacagctgcattgccaataacaactggggatctgatgaaattattttaaacttacaagtacaagttccaccagatcagcctcggcttacagtctccaagaccacgtcttcctccatcaccctttcttggctccctggagacaacgggggcagctctatcagaggatacatactgcagtactccgaggacaatagtgagcagtgggggagttttccaatcagccccagcgaacgttcctatcgcttggaaaatctcaaatgtgggacttggtataagttcacactgacagcccaaaatggagtgggcccagggcgcataagtgaaatcatagaagcaaagaccttaggaaaagagccccagttctcaaaggagcaggagctgtttgccagcatcaacaccacacgcgtgaggctgaacctcattggctggaatgatggcggctgccccatcacctccttcacactagagtacaggccctttgggaccacagtttggaccacagctcagaggacctctctctccaagtcctacatcctgtatgacctgcaggaagccacctggtatgagctgcagatgcgggtgtgcaacagtgcgggctgcgcggagaagcaggccaacttcgctacgctgaactacgatggcagtacaattcctccactcattaagtcagttgtccaaaacgaagaagggctgacgaccaacgaggggctcaagatgctggtgaccatctcctgtatcctggtgggggtcttgctgctgtttgtgctcctgctggttgtgcggaggaggcggcgggagcagaggctaaagaggctgcgagatgcaaagagtttagctgaaatgctcatgagtaagaatacccggacttcagatacgttaagcaagcaacagcagaccctgcgaatgcacatcgacatacccagggctcagcttttgattgaagagagagacacgatggagaccattgatgatcgctccacggttctgttgacggatgctgactttggagaggcagctaagcagaagtccctgacggtcactcacacggtccattaccaatcggtgtctcaggccactgggcccttagtggatgtttcagacgctcggccgggaacgaatcccaccaccaggaggaatgccaaggctgggcccacagcgagaaaccgctatgccagccagtggaccctcaaccgaccccaccccaccatctcagcacacaccctcaccacagactggaggctgccaacacccagggctgcaggatcagtagacaaagagagcgacagttacagcgtcagcccctcgcaagacacagatcgagcaagaagcagcatggtctccacagaaagtgcctcctccacttacgaagaactggccagggcctacgaacacgccaagatggaagagcaactgaggcacgccaagttcaccatcacggagtgcttcatatcagacacgtcatcggagcagttgacggcagggacaaatgagtacacggacagtctgacctccagcaccccttccgaatcgggaatctgcaggttcactgcatctccccccaaacctcaggatggaggaagagtaatgaatatggcagttccaaaggcacatcggccaggtgacctcatacatttgcctccataccttagaatggactttttgttaaaccgaggtggtccaggcaccagcagggacctgagcttaggacaagcatgcttggaacctcagaaaagccggaccctgaagcgccccacggtcctggagcccatcccgatggaagccgcctcctccgcctcctccacgagagaaggacagtcgtggcagccgggggccgtggccacattacctcagcgggagggagcagagctgggacaggcagctaaaatgagcagctcccaagaatcactgctcgactcccggggccatttgaaaggaaacaatccttacgcaaaatcttacaccctggtataacagacagcatgactggacagcggttgtaaatacaattcaaacaattcaatcaaagctaccttttttttacggaattccaatatttataattaaagaaaattgccaaaatatattaaaaaaaaaaaagagaaaatactgaaaccacagacagtgcaaagactctcctgctttttttctgtctgagtgtgagctccatccgcctgggcatctgattttttgggaaagaagtccagttttatgatcttcacaggctattgcatttttactgattttctacaaaagtgcatgggggggattaattaaaccttctgactggaagttctatcacacaagaggcaagaaagaaaacagggtgggtgggaaatcagcctatttgtgaatttaaaaggaacaccgatttgcgggcaggggaaaacttcagtcacgtttgcacacctttctttcccattagaaaccgggttctcaatttggtcttcttttgttgttaattaggatgagtgccgtcagtgaaggggtggggggaatcaatttggttttctctcttgtttcttttttaatttaatgagacactctttgcattttgtctaagcgaaataaaaaagaaaaggttgtctgcctttatttccatgtctgcttctctcgtcttctgccagtggcctggtcctccttcccattgacacttctgtttggaaacaccaggcctgaacccagagcccaattcaataaaccagagtcgatactaacaccctgaactcctcaggaatctccaggaagcacaaagaaggtgcagctcctgctctcaagctggagaggacaaaatgcaggctggtctccaccgcaaccagaggccagcccaagtattcgaagcccgtcgcaaagctctgccccttgcctgcccatggccagagttcaactgactgtggcctatgggccaaatccagcctcctgctgttttttaaataaagttttattgaaacaaggccacatgcactatttgctattgtctatggctgctttcatggcacaatggtagagctgaatagttgcagcagagatggtatagcccatgaagcctaaaatatttattacctggcccattacaggaaacatttgccagacccgtgctctggagtctgaaatgtagccccagcttgcgtgacaaggggcaagatcgtgcatcttaccctccatgacttttcctatctccactatgcctggtatgcaaatttgtgatagaccatcttaataaacattgcctgaatcctctgtaaccagaggaaagtgatgttcctctaaaatctaagtttttactttcctttccctcactttatctcccatgtggctcatcctaagagagaatttactcataaatagtcggaactgcattctttatcccacaaccctcacagggtttgctttatgaaagaggatgtaatcctcccctggctgcaacactccattccaggctcacttccataaaatggaaagataaacaggtctttgtgtcagagatttggcattaaccagaaaacatgatcaaatatccacagctgctcagtctcccaggctgaagattctctacaggcttccattaaggccaccaacatagactggtgccagttattaccatcttgggaacatattcagaaatgtctttccttccctccctccctccttctttcccatcctttcttccttctatttattttccaggcaggcccatttgtctgcttagattcagtgacacagaatgggtccaggaccatgtcaagaccacctgctgatgctagtgttagatgactccaggaatgtgaggtgtgcatccatggtttcagaatgtaatccgtgttgacgtgtactgtttgcatactctcagactgttttttttttatgcaaaagaaatgttactttctgggggaaaaaattaaaagtctatctttcatcaacctaaaacttctatatcccccaaacatagaagtttacctttttaacatttttctctcaacctgtacaaaaataaaaaaattctacatta

SEQ ID NO: 6843 - DNA, 5638 bp, Homo sapiens
aatgcgaaacgtaattaacccggaaaaaagagccgagggacgggagagaaggagggggcactgggggagaccagagcgaggggagcgagaggcgcggagagtttggcaggcagacccagaaatccctggagcgcggcggacccggcggccggaggggcgaccccgcccgatgtaacgcgccccgcccgagccccggcccctgcacggggggggtgatgtgagcagagcccaggaatgccttatgtggatcggcagaaccgaatctgtgggtttctggacatcgaggagcatgagaacagcggcaagtttctgcggaggtacttcattctggacacccaggctaactgcctcctctggtatatggacaacccccagaatctggcaatgggggcaggagctgttggagctttgcagctgacctacatctcgaaggtgagcatagctaccccaaaacagaaaccaaaaactccattttgctttgttatcaatgccctgtctcagagatatttccttcaagccaatgatcagaaagatatgaaggactgggttgaagccctgaaccaagccagcaagatcaccgttcccaaaggtgggggcctacccatgaccactgaagttctcaagagcttagcagctcctccagccctggagaagaagccacaggtggcctacaagacggagatcattggaggggtggtggtccacacacccatcagccagaacggtggggatgggcaggaagggagtgagcccgggtcccacaccatccttcgaaggtctcagagttacatccccacgtcaggctgccgtgcttccactgggcctcccctcattaagagtggttactgcgtgaagcaagggaatgtgcggaagagctggaaacgtcgcttctttgcacttgatgactttaccatctgctacttcaagtgtgagcaggaccgagaaccactgcgcaccatatttcttaaggatgttctgaagacccatgaatgtctggtcaagtctggtgatctcttaatgagggacaacctgtttgaaataataacaagctccaggaccttctacgtacaggcagacagtccagaagacatgcacagctggattaaggagattggcgcagctgtccaggccctcaagtgccaccccagagaaacgtccttttctagatccatttctttgacccgacctggaagctccagcctttcaagtgggcccaactctatcctgtgcagggggcggccacctttggaggaaaagaaagccctctgcaaagccccctctgtggcctcctcctggcagccctggacacctgtcccccaggctggggagaagctgcttccacctggagacacttcagaggactccttgttcacgcctcgtcctggggagggcagcgcccctggggtgctgcccagctcccggataaggcacagatcggagccccagcaccccaaggagaagccgtttatgttcaaccttgatgatgaaaacatacggacctctgatgtgtgatggagcacagtgccatgggagggagggagggagggaggacttgagagaaggaggctgtgactcagtttctctaccttgttggagggtagtcagaggcctttatgtcactcatattcctgtggatgctctttgggagggaggggcccatccagctgggctgtgtgtgtgtgtgtgtgtgtgtgtgtgtgtgtgtgtaatatcaacgcagtgtatttaatttggggaagtcactaggttagaactgtaggcatactcagtggagaggaagctacctattctattctaactattctgaggtcttcctggagagggattgttttagcagctcctctccagagggggctggaagtccagtttcaccaatgaccaagttttatttccttgtccttgttttagttttttcattttgttttcagtccaggtgcctcgcagctcttttggaatgggccagcattagtctaattttaagcgctatgtgttttgtacccttgcaaacttgctttctctttcttcttgctgttgccctttgaatgaagccttgtgtgcttgcatgatcagaccctgtaataggatgaatttccatgcacttaacatgaagagatacaaaaagaatctagagagagatatatatttttaatgaaatagaagcttggcatagaaacattgatttagatgttatgagttgctggccagagattcctcagataaaagagcctagaaaattgagttttgagcgggcatggtggctcacgcctgtaatgccagtagtttgggaggctgaggcgggtggatcacctgaggtcaggagttcgagatcagcctggccaacatggtgaaaccccgcctctactaaaaaatatgcaaaattagccgggcgtggtggtgcaggcctgtaatcccagctactcagaggctgaggcaggagattcacttgaacccaggaggtggaggttgcagtgagccaagatcgcgccattgcactccagtcagggcaacaagagtgaaactccgtctcaaaatataaaagaaaattgagtgtcccacccaaattttagggcgtacctccttccatttgataagaagatgctatttccagtgtccctgggagaattcttccatccagtttatatggtgaattgccaccagcgttccctaaaggaagagagaacttagcttatttctgtctgtgacttttatcagctagatcagttaattgtatttttaaattaaaaattagtaactagaggaagagactaagagaactatttttacctgagtaaatgctctcctcttcttgtgtccaaatctaatgcagaggtgaaaacacttgatgagaaaatcctttgtggcttgaggggaatcatgtttctttcaggacgtgttgtttccctgaagtctatgtcacactgagaactttttctgactgcactgctttggagctattcatttaaattgagtttggcctagttttcctggtataaaacaggaaatctacattgttccctctttctctcccttccatcccttcccctgcctttcctatacacgctggtgtgcttttgccctcagaaattcttggtttgggagttatgtatttttgagtgatcgaggttatgacatacttggagcggcatgatttcaagaagccattccaaattcttatagctccttagctctggttttactctcgtattttccccaagaaaattttttggctattcaaagaaagcacaaaatatgtgatgtggaactcatgaaaatagggacttttgatatctctttaaatattccctgactcacggaaaagatgtcctcttttggtgtatacattgtgaaaatctacccatttatctctctctctctcttttcttttaaataaattatctgataaggccggcaaggtggctcacgcctgtaatcccagcactttgggaggccgaggcgagcggatcacgaggtcaggagatcgagaccgcggtgaaaccccgtctctactaaaaatacgaaaaaaaaattagccgggcgcagtggcaggcgcctgtagtcccagctacttgggaggctgcggcaggagaatggtgtgaacctgggaggcggagcttgcagtgagccaagatcgcgccactgcactccagcctgggcgacagagcaagactccatctcaaaaaaaaaattatctgataggttactattgctaaattaattggccattataataagctgatttgtttcttattcagcaagatctcttttgagaatgtgacaaattaaacatacatagaatccatatggtattatcctgataaagggaaacgaggacactaagactgtcaaatggaaatcttcttgtcaattggcaaacacttgggaattccacattagagcattgcttgtttttaattttttttttttaatttttaaaagacagggtctcactctcttacccaggctagagtgcagtggtgtgatcatagttcatcataactttgaatctctgggcttaagcaatcctcccatgttagcttcccaagtagctaggactacagggttgtgctaccacgcctggctaatttttaatttttttttatctacagagcctggctatgttgcccaggctctctcaaactcctggcccaagtgatcctcctgccttggcctcctaaagtgttgggattacaggtgtgagccactgcacctagccagaacatcgttaatgtagttcaatatgagataaattattatcttcaatgaaacaagctctaaaagcattccattcctaaattgtatttcaaacttcctattttgttgatatttcttaacttctggccagttttggaccataatcttttaatgtgaaccaaagatggtacgtatttgaccaaagcagttagttttaaatgtataaaattgaaccaaatggaaaaaataggttggggatgcagtatagattagtgactaagtgcataggctctggagtaaatctgagtttttttttttttaaaggaactaaaaaatgtactgcattttctttgtggaataaaagccttgcctgagttgtgctattttcataaggcttttgaagtggtcttgacccactgtgtgtaacagtatttcaggtggtcctccccatggctgaataatgccatccattattctttaatttttatttttagaaacagtgtttcactctgtcacccaggctggagtgcagtggcctgatcatggctcactgcagcctggacctcctgggctcaagtgatcttcctgcctcacagcctcccaaagtactcagattataggtgtgagccaccacgcctggccaccatctattacttttgaaatcttcaaaagacttgcttactcaatgtcagctgatggttggtaaaaataatttggcctttagtgttaagtgagacatcataagggtattgaggtatacattatggagattgatgtcaggtcagaatattggagttatacatctatttctgagttgaatactcagctcccacgagaaagaaagtagttttaaggtccagcttcttagtctacttgaagcaaattttttttcttttatatttctgaatataaatatactcttatatgggctaaaaagaccccatgaataaatagcaggttcagtagttgaggagtggagtttagtaggtttgttttcagtataaattagataacatgtggaggtcacagcattttggaaattgagtgtccccaagtgagctttgtttataaactttcaaaatgtcggaagtggacaggtttgttaaatcttgtctgccagcacccttttcttcctttgttccttttcctctctgtgttattgcctgcggcagccagtccttcatactagatagagttcagataaagcaaacgtttggcaaaaacatactgtttgacctcctccccctctgcttatgaaggggtagcatgattctgtgttttaaagcagtgatgtttcagctgtgaaatgcactcgctgtaagctctaggctgagtgcatggaaactgttacgcttctcattttatgtgatctcctaattggtatgtagcaaaaattttctaaaactgttttgtggcttgttttgtaataaaaccatgtgaaatactg

SEQ ID NO: 6844 - DNA, 1124 bp, Homo sapiens; identical to SEQ ID NO: 6440

SEQ ID NO: 6845 - DNA, 571 bp, Homo sapiens
ttggtgtccggacatggccttggcactgtagcatgtggacagccagtgccatggatttcagaacctgcattgccagttgactgcctgctttgtgctacgtgcaggcctgccgcgccctgatgattgctgcctcggtcctgggtctgccggccattttactgctgctgactgttcttccctgcatccggatgggccaggagcccggtgtggctaagtacaggcgggcccagctggctggtgttttgctcattctgctggtgagaaaagctagaatgtggagtcctgtcatcagatgatgtgactacatggaatgaggactatagctgctctcttaaaaacctgcagccccctctctcagcccagacagttgagctgcttcagttgtcaggatgtttacacggaagaagcactggaccagttatgctgggctcctgtttctactccatccctgtagattcagcatccttgtttctaaaataaaagtattacaccaaagactctcttacggatctcctaactctgaccctctaggattccatctgttatattgaactttgtagtattttttgct

SEQ ID NO: 6846 - DNA, 2727 bp, Homo sapiens
cagctgcctgcctgccaggggtagtgagccggctgagaggcatggagacgcaggaacttcggggggccctggctcttctcctcctttgctttttcacatctgccagtcaggatctgcaggtaattgacctgctgactgtgggcgagtctcggcagatggtagctgtggcagagaagatccggacagccttgctcactgctggggacatctacctcttatccaccttccgcctgccccccaagcagggtggtgtcctctttggcctctattctcgccaagacaacactcgatggctggaggcctctgttgtaggcaagatcaacaaagtgaccaatgcactgcactccattctaggggagcagaccaaggcgctggtcacccaactcaccctcttcaaccagatcctggtggagctgcgggatgatatacgagaccaggtgaaggaaatgtccctgatccgaaacaccattatggagtgtcaggtgtgcggcttccatgagcagcgttcccactgcagccccaatccctgcttccgaggtgtggactgcatggaagtgtacgagtacccaggctaccgctgtgggccctgcccccctggcctgcagggcaacggcacccactgcagtgacatcaatgagtgtgctcacgctgacccctgtttcccgggctccagctgcatcaacaccatgcccggcttccactgtgaggcctgtcctcgagggtacaagggcacacaggtgtctggtgtgggcattgactatgcccgggccagcaaacaggtctgcaatgacatcgatgaatgcaacgatggcaacaatggtggctgtgacccaaactccatctgcaccaacactgtgggctctttcaagtgtggtccctgccgcctgggtttcctgggcaaccagagccagggctgcctcccagcccggacctgccacagcccagcccacagcccctgccacatccatgctcactgtctctttgaacgcaatggtgcagtgtcctgccagtgtaacgtgggctgggctgggaatgggaacgtgtgtgggactgacacagacatcgatggctacccagaccaagcactgccctgcatggacaacaacaaacactgcaaacaggacaactgccttttgacacccaactctgggcaggaagatgctgataatgatggtgtgggggaccagtgtgatgatgatgctgatggggatgggatcaagaatgttgaggacaactgccggctgttccccaacaaagaccagcagaactcagatacagattcatttggtgatgcctgtgacaattgccccaacgttcccaacaatgaccagaaggacacagatggcaatggggaaggagatgcctgtgacaacgacgtggatggggatggcatccccaatggattggacaattgccctaaagtccccaacccactacagacagacagggatgaggacggggtgggagatgcttgcgacagctgccctgaaatgagcaatcctacccagacagatgcagacagcgacctggtgggggatgtctgtgatactaatgaagacagcgatggggatgggcatcaggacaccaaggacaactgcccacagctgccaaatagctcccagctggactctgataacgatggacttggagatgagtgtgatggggatgatgacaatgatggcatcccagattatgtgcctcctggtcccgataactgccgcctggtacccaatcccaatcagaaggactcagatggcaatggcgttggtgatgtgtgtgaggatgactttgacaatgatgctgtggtcgaccccctggatgtgtgtcctgaaagtgcagaggtaacgcttacggattttcgggcctatcagaccgtcgtcctggatcctgagggtgatgctcagattgacccaaactgggttgtgctcaaccagggcatggaaatcgttcagaccatgaacagtgaccctggcttggcagttggatacacggccttcaatggtgtggactttgaaggcaccttccatgtgaacacagtgactgatgatgactacgcaggctttctcttcagttatcaagacagtggccgcttctacgtagtcatgtggaagcagaccgagcagacctactggcaggctacacccttccgggcggttgcccagcccgggctgcagctcaaggcagtgacatcagtgtctggcccaggtgagcacctccgaaatgccctgtggcatactggccacacccctgatcaggtacgactgctgtggacagacccacgaaatgtgggctggcgggacaagacctcctatcgctggcagcttctgcaccggcctcaagttggctacattcgggtgaagctctatgagggaccccagcttgtggcggattctggggtgatcattgacacatccatgcgaggggggcgtcttggtgtattctgcttctcccaagaaaacataatttggtccaatctccagtatcgatgcaatgacacagtgcctgaggactttgagccattccggaggcagctgctccagggaagggtgtgaggaggaggccaccagattcagaattcagaattttagaccctttggccttggggtccatcctggagaccctgaggtctaagctacagcccctcagccaaccacagacccttctctggctcccaaaaggagttcagtcccagaggggtggtcaccccacccttcaggggatgagaag

SEQ ID NO: 6847 - DNA, 599 bp, Homo sapiens
ttaaatgtggttataagaattgtgattctttggcatatttccatcaaattttaaaacttcaaatagtgcatatgtacttgaaaattacactttctcttttctaaaaagctgtatttttaatacaaccctaatgtatttcagaatgcaatgagagccactatggaacaccatgccaacagaggtgtttacccccctattcaagttcatgtcacgctgggtaatgaggatttgactgtgaagatgagtgaccgaggaggtggcgttcctttgaggaaaattgacagacttttcaactacatgtattcaactgcaccaagacctcgtgttgagacctcccgcgcagtgcctctggctggttttggttatggattgcccatatcacgtctttacgcacaatacttccaaggagacctgaagctgtattccctagagggttacgggacagatgcagttatctacattaaggctctgtcaacagactcaatagaaagactcccagtgtataacaaagctgcctggaagcattacaacaccaaccacgaggctgatgactggtgcgtccccagcagagaacccaaagacatgacgacgttccgcag

SEQ ID NO: 6848 - DNA, 9640 bp, Homo sapiens
cagcgactcctctggctcccgagaagtggatccggtcgcggccactacgatgccgggagccgccggggtcctcctccttctgctgctctccggaggcctcgggggcgtacaggcgcagcggccgcagcagcagcggcagtcacaggcacatcagcaaagaggtttattccctgctgtcctgaatcttgcttctaatgctcttatcacgaccaatgcaacatgtggagaaaaaggacctgaaatgtactgcaaattggtagaacatgtccctgggcagcctgtgaggaacccgcagtgtcgaatctgcaatcaaaacagcagcaatccaaaccagagacacccgattacaaatgctattgatggaaagaacacttggtggcagagtcccagtattaagaatggaatcgaataccattatgtgacaattaccctggatttacagcaggtgttccagatcgcgtatgtgattgtgaaggcagctaactccccccggcctggaaactggattttggaacgctctcttgatgatgttgaatacaagccctggcagtatcatgctgtgacagacacggagtgcctaacgctttacaatatttatccccgcactgggccaccgtcatatgccaaagatgatgaggtcatctgcacttcattttactccaagatacaccccttagaaaatggagagattcacatctctttaatcaatgggagaccaagtgccgatgatccttctccagaactgctagaatttacctccgctcgctatattcgcctgagatttcagaggatccgcacactgaatgctgacttgatgatgtttgctcacaaagacccaagagaaattgaccccattgtcaccagaagatattactactcggtcaaggatatttcagttggagggatgtgcatctgctatggtcatgccagggcttgtccacttgatccagcgacaaataaatctcgctgtgagtgtgagcataacacatgtggcgatagctgtgatcagtgctgtccaggattccatcagaaaccctggagagctggaacttttctaactaaaactgaatgtgaagcatgcaattgtcatggaaaagctgaagaatgctattatgatgaaaatgttgccagaagaaatctgagtttgaatatacgtggaaagtacattggagggggtgtctgcattaattgtacccaaaacactgctggtataaactgcgagacatgtactgatggcttcttcagacccaaaggggtatctccaaattatccaaggccatgccagccatgtcattgcgatccaattggttccttaaatgaagtctgtgtcaaggatgagaaacatgctcgacgaggtttggcacctggatcctgtcattgcaaaactggttttggaggtgtgagctgtgatcggtgtgccaggggctacactggctacccggactgcaaagcctgtaactgcagtgggttagggagcaaaaatgaggatccttgttttggcccctgtatctgcaaggaaaatgttgaaggaggagactgtagtcgttgcaaatccggcttcttcaatttgcaagaggataattggaaaggctgcgatgagtgtttctgttcaggggtttcaaacagatgtcagagttcctactggacctatggcaaaatacaagatatgagtggctggtatctgactgaccttcctggccgcattcgagtggctccccagcaggacgacttggactcacctcagcagatcagcatcagtaacgcggaggcccggcaagccctgccgcacagctactactggagcgcgccggctccctatctgggaaacaaactcccagcagtaggaggacagttgacatttaccatatcatatgaccttgaagaagaggaagaagatacagaacgtgttctccagcttatgattatcttagagggtaatgacttgagcatcagcacagcccaagatgaggtgtacctgcacccatctgaagaacatactaatgtattgttacttaaagaagaatcatttaccatacatggcacacattttccagtccgtagaaaggaatttatgacagtgcttgcgaatttgaagagagtcctcctacaaatcacatacagctttgggatggatgccatcttcaggttgagctctgttaaccttgaatccgctgtctcctatcctactgatggaagcattgcagcagctgtagaagtgtgtcagtgcccaccagggtatactggctcctcttgtgaatcttgttggcctaggcacaggcgagttaacggcactatttttggtggcatctgtgagccatgtcagtgctttggtcatgcggagtcctgtgatgacgtcactggagaatgcctgaactgtaaggatcacacaggtggcccatattgtgataaatgtcttcctggtttctatggcgagcctactaaaggaacctctgaagactgtcaaccctgtgcctgtccactcaatatcccatccaataactttagcccaacgtgccatttagaccggagtcttggattgatctgtgatggatgccctgtcgggtacacaggaccacgctgtgagaggtgtgcagaaggctattttggacaaccctctgtacctggaggatcatgtcagccatgccaatgcaatgacaaccttgacttctccatccctggcagctgtgacagcttgtctggctcctgtctgatatgtaaaccaggtacaacaggccggtactgtgagctctgtgctgatggatattttggagatgcagttgatgcgaagaactgtcagccctgtcgctgtaatgccggtggctctttctctgaggtttgccacagtcaaactggacagtgtgagtgcagagccaacgttcagggtcagagatgtgacaaatgcaaggctgggacctttggcctacaatcagcaaggggctgtgttccctgcaactgcaattcttttgggtctaagtcattcgactgtgaagagagtggacaatgttggtgccaacctggagtcacagggaagaaatgtgaccgctgtgcccacggctatttcaacttccaagaaggaggctgcacagcttgtgaatgttctcatctgggtaataattgtgacccaaagactgggcgatgcatttgccctcccaataccattggagagaaatgttctaaatgtgcacccaatacctggggccacagcattaccactggttgtaaggcttgtaactgcagcacagtgggatccttggatttccaatgcaatgtaaatacaggccaatgcaactgtcatccaaaattctctggtgcaaaatgtacagagtgcagtcgaggtcactggaactaccctcgctgcaatctctgtgactgcttcctccctgggacagatgccacaacctgtgattcagagactaaaaaatgctcctgtagtgatcaaactgggcagtgcacttgtaaggtgaatgtggaaggcatccactgtgacagatgccggcctggcaaattcggactcgatgccaagaatccacttggctgcagcagctgctattgcttcggcactactacccagtgctctgaagcaaaaggactgatccggacgtgggtgactctgaaggctgagcagaccattctacccctggtagatgaggctctgcagcacacgaccaccaagggcattgtttttcaacatccagagattgttgcccacatggacctgatgagagaagatctccatttggaacctttttattggaaacttccagaacaatttgaaggaaagaagttgatggcctatgggggcaaactcaagtatgcaatctatttcgaggctcgggaagaaacaggtttctctacatataatcctcaagtgatcattcgaggtgggacacctactcatgctagaattatcgtcaggcatatggctgctcctctgattggccaattgacaaggcatgaaattgaaatgacagagaaagaatggaaatattatggggatgatcctcgagtccatagaactgtgacccgagaagacttcttggatatactatatgatattcattacattcttatcaaagctacttatggaaatttcatgcgacaaagcaggatttctgaaatctcaatggaggtagctgaacaaggacgtggaacaacaatgactcctccagctgacttgattgaaaaatgtgattgtcccctgggctattctggcctgtcctgtgaggcatgcttgccgggattttatcgactgcgttctcaaccaggtggccgcacccctggaccaaccctgggcacctgtgttccatgtcaatgtaatggacacagcagcctgtgtgaccctgaaacatcgatatgccagaattgtcaacatcacactgctggtgacttctgtgaacgatgtgctcttggatactatggaattgtcaagggattgccaaatgactgtcagcaatgtgcctgccctctgatttcttccagtaacaatttcagcccctcttgtgtcgcagaaggacttgacgactaccgctgcacggcttgtccacggggatatgaaggccagtactgtgaaaggtgtgcccctggctatactggcagtccaggcaaccctggaggctcctgccaagaatgtgagtgtgatccctatggctcactgcctgtgccctgtgaccctgtcacaggattctgcacgtgccgacctggagccacgggaaggaagtgtgacggctgcaagcactggcatgcacgcgagggctgggagtgtgttttttgtggagatgagtgcactggccttcttctcggtgacttggctcgcctggagcagatggtcatgagcatcaacctcactggtccgctgcctgcgccatataaaatgctgtatggtcttgaaaatatgactcaggagctaaagcacttgctgtcacctcagcgggccccagagaggcttattcagctggcagagggcaatctgaatacactcgtgaccgaaatgaacgagctgctgaccagggctaccaaagtgacagcagatggcgagcagaccggacaggatgctgagaggaccaacacaagagcaaagtccctgggagaattcattaaggagcttgcccgggatgcagaagctgtaaatgaaaaagctataaaactaaatgaaactctaggaactcgagacgaggcctttgagagaaatttggaagggcttcagaaagagattgaccagatgattaaagaactgaggaggaaaaatctagagacacaaaaggaaattgctgaagatgagttggtagctgcagaagcccttctgaaaaaagtgaagaagctgtttggagagtcccggggggaaaatgaagaaatggagaaggatctccgggaaaaactggctgactacaaaaacaaagttgatgatgcttgggaccttttgagagaagccacagataaaatcagagaagctaatcgcctatttgcagtaaatcagaaaaacatgactgcattggagaaaaagaaggaggctgttgaaagcggcaaacgacaaattgagaacactttaaaagagggcaatgacatactcgatgaagccaaccgtcttgcagatgaaatcaactccatcatagactatgttgaagacatccaaactaaattgccacctatgtctgaggagcttaatgataaaatagatgacctctcccaagaaataaaggacaggaagcttgctgagaaggtgtcccaggctgagagccacgcagctcagttgaatgactcatctgctgtccttgatggaatccttgatgaggctaaaaacatctccttcaatgccactgcagccttcaaagcttacagcaatattaaggactatattgatgaagctgagaaagttgccaaagaagccaaagatcttgcacatgaagctacaaaactggcaacaggtcctcggggtttattaaaggaagatgccaaaggctgtcttcagaaaagcttcaggattcttaacgaagccaagaagttagcaaatgatgtaaaagaaaatgaagaccatctaaatggcttaaaaaccaggatagaaaatgctgatgctagaaatggggatctcttgagaactttgaatgacactttgggaaagttatcagctattccaaatgatacagctgctaaactgcaagctgttaaggacaaagccagacaagccaacgacacagctaaagatgtactggcacagattacagagctccaccagaacctcgatggcctgaagaagaattacaataaactagcagacagcgtcgccaaaacgaatgctgtggttaaagatccttccaagaacaaaatcattgccgatgcagatgccactgtcaaaaatttagaacaggaagctgaccggctaatagataaactcaaacccatcaaggaacttgaggataacctaaagaaaaacatctctgagataaaggaattgataaaccaagctcggaaacaagccaattctatcaaagtatctgtgtcttcaggaggtgactgcattcgaacatacaaaccagaaatcaagaaaggaagttacaataatattgttgtcaacgtaaagacagctgttgctgataacctcctcttttatcttggaagtgccaaatttattgactttctggctatagaaatgcgtaaaggcaaagtcagcttcctctgggatgttggatctggagttggacgtgtagagtacccagatttgactattgatgactcatattggtaccgtatcgtagcatcaagaactgggagaaatggaactatttctgtgagagccctggatggacccaaagccagcattgtgcccagcacacaccattcgacgtctcctccagggtacacgattctagatgtggatgcaaatgcaatgctgtttgttggtggcctgactgggaaattaaagaaggctgatgctgtacgtgtgattacattcactggctgcatgggagaaacatactttgacaacaaacctataggtttgtggaatttccgagaaaaagaaggtgactgcaaaggatgcactgtcagtcctcaggtggaagatagtgaggggactattcaatttgatggagaaggttatgcattggtcagccgtcccattcgctggtaccccaacatctccactgtcatgttcaagttcagaacattttcttcgagtgctcttctgatgtatcttgccacacgagacctgagagatttcatgagtgtggagctcactgatgggcacataaaagtcagttacgatctgggctcaggaatggcttccgttgtcagcaatcaaaaccataatgatgggaaatggaaatcattcactctgtcaagaattcaaaaacaagccaatatatcaattgtagatatagatactaatcaggaggagaatatagcaacttcgtcttctggaaacaactttggtcttgacttgaaagcagatgacaaaatatattttggtggcctgccaacgctgagaaacttgagtatgaaagcaaggccagaagtaaatctgaagaaatattccggctgcctcaaagatattgaaatttcaagaactccgtacaatatactcagtagtcccgattatgttggtgttaccaaaggatgttccctggagaatgtttacacagttagctttcctaagcctggttttgtggagctctcccctgtgccaattgatgtaggaacagaaatcaacctgtcattcagcaccaagaatgagtccggcatcattcttttgggaagtggagggacaccagcaccacctaggagaaaacgaaggcagactggacaggcctattatgcaatactcctcaacaggggccgtctggaagtgcatctctccacaggggcacgaacaatgaggaaaattgtgatcagaccagagccgaatctgtttcatgatggaagagaacattccgttcatgtagagcgaactagaggcatctttacagttcaagtggatgaaaacagaagatacatgcaaaacctgacagttgaacagcctatcgaagttaaaaagcttttcgttgggggtgctccacctgaatttcaaccttccccactcagaaatattcctccttttgaaggctgcatatggaatcttgttattaactctgtccccatggactttgcaaggcctgtgtccttcaaaaatgctgacattggtcgctgtgcccatcagaaactccgtgaagatgaagatggagcagctccagctgaaatagttatccagcctgagccagttcccaccccagcctttcctacgcccaccccagttctgacacatggtccttgtgctgcagaatcagaaccagctcttttgatagggagcaagcagttcgggctttcaagaaacagtcacattgcaattgcatttgatgacaccaaagttaaaaaccgtctcacaattgagttggaagtaagaaccgaagctgaatccggcttgcttttttacatggctcgcatcaatcatgctgattttgcaacagttcagctgagaaatggattgccctacttcagctatgacttggggagtggggacacccacaccatgatccccaccaaaatcaatgatggccagtggcacaagattaagataatgagaagtaagcaagaaggaattctttatgtagatggggcttccaacagaaccatcagtcccaaaaaagccgacatcctggatgtcgtgggaatgctgtatgttggtgggttacccatcaactacactacccgaagaattggtccagtgacctatagcattgatggctgcgtcaggaatctccacatggcagaggcccctgccgatctggaacaacccacctccagcttccatgttgggacatgttttgcaaatgctcagaggggaacatattttgacggaaccggttttgccaaagcagttggtggattcaaagtgggattggaccttcttgtagaatttgaattccgcacaactacaacgactggagttcttctggggatcagtagtcaaaaaatggatggaatgggtattgaaatgattgatgaaaagttgatgtttcatgtggacaatggtgcgggcagattcactgctgtctatgatgctggggttccagggcatttgtgtgatggacaatggcataaagtcactgccaacaagatcaaacaccgcattgagctcacagtcgatgggaaccaggtggaagcccaaagcccaaacccagcatctacatcagctgacacaaatgaccctgtgtttgttggaggcttcccagatgacctcaagcagtttggcctaacaaccagtattccgttccgaggttgcatcagatccctgaagctcaccaaaggcacaggcaagccactggaggttaattttgccaaggccctggaactgaggggcgttcaacctgtatcatgcccagccaactaataaaaataagtgtaaccccaggaagagtctgtcaaaacaagtatatcaagtaaaacaaacaaatatattttacctatatatgttaattaaactaatttgtgcatgtacatagaattctttctgtattcagatggtgctaattcagactccagactgaattttaattcaagttctttctcaagtctataaataatattaaactgattatttcattctaaataa

SEQ ID NO: 6849 - DNA, 859 bp, Homo sapiens
taccgcggggccggtcacggggagcgcgtccagaggtccagcccgcggcccgaagggtatggtgatccggtccaccgtgtggttaggattcccaaattttgttgacagcgtctcggatatgaaccacacggaaatttggcctgctgctttctgcgtggggagtgcgatgtggatccagctgttgtacagtgcctgcttctggtggctgttttgctatgcagtggatgcttatctggtgatccggagatcggcaggactgagcaccatcctgctgtatcacatcatggcgtggggcctggccaccctgctctgtgtggagggagccgccatgctctactacccttccgtgtccaggtgtgagcggggcctggaccacgccatcccccactatgtcaccatgtacctgcccctgctgctggttctcgtggcgaaccccatcctgttccaaaagacagtgactgcagtggcctctttacttaaaggaagacaaggcatttacacggagaacgagaggaggatgggagccgtgatcaagatccgatttttcaaaatcatgctggttttaattatttgttggttgtcgaatatcatcaatgaaagccttttattctatcttgagatgcaaacagatatcaatggaggttctttgaaacctgtcagaactgcagccaagaccacatggtttattatgggaatcctgaatccagcccagggatttctcttgtctttggccttctacggctggacaggatgcagcctgggttttcagtctcccaggaaggagatccagtgggaatcactgaccacctcggctgctgagggggctcacccatccccactgatgccccatgaaaaccct

SEQ ID NO: 6850 - DNA, 835 bp, Homo sapiens; identical to SEQ ID NO: 6666

SEQ ID NO: 6851 - DNA, 10721 bp, Homo sapiens
atgtgggggcttttgatctggacactgctagctctgcatcagatccgcgcggccagagcccaagatgatgtgtccccgtatttcaagacagagcctgtgcggacacaggtgcacttggaaggaaaccgcctggtgcttacatgcatggccgagggcagctggccactggagttcaagtggctccacaacaacagggagctgaccaagttctccctggaatacagatacatgatcaccagcctggaccgcacccacgctggcttttaccgttgcatcgtgcggaaccgaatgggggccctgctgcagcggcaaaccgaggtccaggtggcctacatggggagctttgaggaaggtgagaagcaccagagcgtctcccacggagaagcagctgtcatccgtgccccgcgcatcgccagcttcccccagccacaggtgacctggttccgggacggccgcaagatcccgcccagcagccgcatagccatcacgctggagaacacccttgtcatcctgtcaacggtggcccctgacgcaggtcgctactatgtgcaggctgttaacgacaaaaacggggataacaagaccagccagcccatcacgctcaccgtggagaatgtaggggggcctgcagaccccatcgcacccaccatcatcatcccacctaaaaacaccagcgtggtggccggcacctcagaggttaccttggagtgtgtggccaatgccaggcccctgatcaagctacatatcatttggaagaaggacggggtattgctgtcgggcggcatcagtgaccacaaccgccggctcaccatccccaaccccaccggcagtgacgccggctactacgagtgtgaggctgtcctgcgcagcagcagcgtcccctctgttgtccggggcgcctacctctcagtgctggaaccgcctcagtttgtcaaggagccagaaagacacatcactgcggagatggagaaggtggtggacatcccctgtcaggccaaaggtgtgccgccgccctccatcacctggtacaaggacgcagccgtggtggaggtggagaagttgacccgcttccggcagcgcaacgacgggggcctgcagatcagcggcctggtgcccgatgataccggcatgttccagtgcttcgcccgcaatgcagccggcgaggtgcaaacttccacctacctggctgtcaccagcatcgcccctaacatcaccagaggccccctggacagcacggtgatcgatggcatgtcagtggtgctagcatgtgagacctcgggggcgccccgaccagctatcacttggcagaaaggggagcgcatcttggccagtggctctgtgcagctgcctcgcttcacacccctggagtcgggcagcctcctcatcagccccacacacatctccgatgcggggacctacacctgcctggccaccaactctcggggggtcgatgaggcctcagcagacctagtcgtttgggctcggacccgcatcaccaagcccccccaggatcagagtgtcatcaagggcacccaggcctccatggtgtgcggagtgacccacgacccccgagtaaccatcaggtacatctgggagaaggacggggccaccctgggcacggagagccatcctcgtatccgcctggacagaaacggctccctgcacatctcacagacgtggtcgggagacatcggcacgtacacctgccgggtgatctcagcaggaggcaacgactctcgcagtgcccacctgcgagtcaggcaactgccccacgcgcccgagcacccagtggccactctcagcaccgtggaaaggcgagccatcaacctgacgtggaccaagccctttgatggcaacagccccctgatccgctacattctggagatgtcggagaacaatgccccctggactgtactcctggccagtgtggaccccaaagctacctcagtgacagtcaagggcctggttcctgcacgctcctaccagttccgtctttgtgccgtcaacgacgtggggaaaggacagttcagcaaagacaccgagagggtctccctccccgaggagccccccacggcccctccacagaacgtcatcgccagcggtcgaaccaaccagtccatcatgatccagtggcagccgcctcctgagagccaccagaatggaattctcaagggttacatcatcaggtactgcctggccgggctgcccgtggggtaccagtttaagaacatcacggatgctgatgtgaacaacctgctgctggaggatctcatcatttggaccaactacgagatcgaggtggctgcttacaacagcgctgggctgggggtctacagcagtaaagtcaccgagtggacgctgcagggagttcccacggtccctccgggcaatgtgcacgcggaagccaccaattccacgaccatccgcttcacctggaacgcccccagcccccagttcatcaacggcatcaaccagggctacaagctgatcgcctgggagccggaacaggaagaggaggttaccatggtgaccgcccggcctaactttcaagacagcatccacgtgggcttcgtgtctggcctgaagaagttcaccgagtacttcacctcagtgctgtgtttcaccacccccggggacgggccacgcagcaccccgcagctggtgcgcacccatgaggatgtgcctgggcccgtgggacacctgagcttcagtgagatcctggacacatcgctgaaggtcagctggcaagagccgggagagaaaaatggcatcctcacagggtaccggatctcctgggaggagtacaatcgaaccaacacccgtgtgacccactacctgcccaacgtgaccctggagtaccgtgtcacgggcctcaccgcgctcaccacctacaccatcgaggtggccgccatgacctcaaagggccagggccaagtgtccgcctccaccatctcctctggggtgcccccagaactcccagggccccccaccaacctgggcatttccaacatcggcccccgctctgtgaccttgcagttcaggccaggctacgatgggaaaacctccatctcccgctggctggtggaagcccaggtaggcgtggttggggagggagaggagtggttgctgatccaccagctctccaatgagcccgatgcccgctccatggaggtgcccgacctcaaccccttcacctgctacagcttccgcatgcgccaggtgaacatcgtgggcaccagcccccccagtcagccttctagaaagatccagaccctgcaggcaccccctgacatggccccagccaatgtgtctctgcgcacagccagtgagaccagcctgtggctgcgctggatgcctctcccggagatggaatacaatgggaaccctgagtccgtgggctataagatcaagtacagccggtcagacgggcatggcaagacgctgagccacgtggtgcaggaccgtgtggagcgggactacaccatcgaggacctggaggagtggacagagtaccgcgtccaggtccaggccttcaacgccatcgggagcgggccctggagccagacggtggtgggcaggacccgggagtcagttccctcttccggccccaccaatgtgtctgcactggccaccacctccagcagcatgctggtgcgctggagcgaggtccccgaggctgatcgcaacgggctcgtgctgggctataaggtgatgtataaggagaaggactcggacacccagccccgattctggctggtggaaggcaactcgtctcgcagtgcccagctcaccggcttgggcaaatacgtgctctatgaagtccaggtgctggccttcacacgcatcggggacggcagccccagccaccctcccatcctggagcggacgctggatgatgtcccaggaccacccatgggcatcctgttcccagaggtgcggaccacgtctgtgcggctgatctggcagccccctgccgcccccaatggcatcattcttgcttaccagatcacacaccggctcaacaccaccacggccaacaccgccactgtggaggtgctggcacccagcgcccggcagtacacagccacgggcctcaagccagagtctgtctacctgttccgcatcacggcccagacccgcaagggctggggagaagctgccgaggccttggtggtgaccaccgagaagagagaccgtccgcagccccccagcaggccgatggtgcagcaggaggatgtgagagcacgcagcgtgctgctgtcctgggagccagggagcgacgggctctcccctgtgcgctactacaccatccagacccgcgagctgcccagcggcaggtgggcactgcactcggcctccgtgagccacaatgcctccagcttcattgtggacaggctgaagcccttcacgtcctacaagttccgagtgaaggcgaccaatgacattggcgacagcgagttcagcgaggagtcggagtcactgaccaccctgcaggctgcccccgatgaagcacccaccatcctctccgtgacgccccacaccaccacctccgtgctaatccgatggcagccgccagcagaggacaagatcaatggcatcctcctgggcttccggatccgataccgggagctgctctatgaaggactgaggggcttcacgcttcgaggcatcaacaacccaggggccacatgggctgagcttacctccatgtactccatgcggaacctgagccggcccagcctcacgcagtacgagctggacaacctgaacaagcacaggcggtacgagatacggatgagcgtgtacaacgctgtgggtgaggggccctccagccccccgcaggaggtctttgttggggaggcagtgcccacagcagcacctcgtaacgtggtcgtccacggcgccacggccacacagctggacgtgacttgggagccacctccgctggacagccagaatggagacatccaggggtacaagatttatttctgggaagcccagcgggggaacctcacagagcgagtgaagacgcttttcctggctgagaacagcgtgaagctcaagaacttgactggctacacggcctacatggtcagcgtggccgccttcaacgccgctggggatgggcctcggagcacccccacccaaggccagacccagcaagcagcccccagcgctcccagctcggtcaagttcagtgagctgaccacaacctcagtgaatgtgtcctgggaagccccgcagttccccaatggcatcctggagggctacaggctggtgtacgagccctgcagccccgtggatggagtcagcaagatcgtgaccgtggacgtgaaggggaacagccccctgtggctgaaggtgaaggacctggcggagggggtgacctacaggttccgcatcagagccaagaccttcacctacgggccggagatcgaagccaacgtcaccacgggccccggagaaggtgccccaggaccgcctggcgtgcccatcatcgtgcggtacagctctgccatcgccattcactggtccagcggagacccgggcaaagggcccatcacccgctacgtcatcgaggccagaccttcagacgagggactatgggacatcctcatcaaagacatccccaaggaggtgagctcctacacgttcagcatggacatcctgaagccgggcgtgagctatgacttccgggtcatcgcggtcaacgactatggtttcggcacccccagcagcccctcccagtctgtgccagcccagaaagccaaccccttctatgaggagtggtggttcttggtggtcattgccctggtcggcctcatcttcatcctgcttctggtcttcgtgctcatcatccggggccagagcaagaagtacgccaagaagacagactcggggaacagtgccaagtctggagccctaggccacagcgagatgatgagcttggatgaaagcagcttccctgccctggaactcaacaacaggcggctctccgtcaagaactctttctgccgaaagaacggcctgtacaccaggtctccccccaggcccagcccaggcagcctgcactactcggatgaggatgtcaccaaatacaacgacctcatccctgcagagagcagcagcctgacggagaagccctcagaaatctccgactctcagggaagtgacagcgagtacgaggtcgactcaaaccaccagaaggcccactcctttgtcaaccactacatcagtgaccccacatactacaactcgtggcggcgacagcagaagggcatctcgagggcacaggcctacagctacacggagagcgactcgggtgagccagaccacaccaccgtcaccaacagcaccagcacccagcagggcagcctctttcggcccaaggccagtcggactccaacgccccagaacccccctaaccccccaagtcagcagagcaccctctaccgtccccccagcagcctggccccaggctcccgggctcccatagcaggattttcatcatttgtttgacatcagaagaggaaaaagcagaaagagaaatggcaccaaactcctccttcacccctcctctcactgcctgccagaaaacaaaaacaccaagaaaccaagtcaacttttcacctcctgagtttatttttccagagattccagggccagcaaagccggcgttcagaaggagggagaaaaccgtgagaggatgtgtgtggccagcagctcttcagctttgagatggtggggttcactgctcccttgggaattacacggagctggggaagtggctgtgtcactgctatggacacggagtggggcgggcatctggagagagagagggagcggaggctaaggactggaggccgccaggcaggcgtggccgagggaagaaaaagcttctggatgtccagccagctgcccccttccagcccctccaggacccctggacccactgccgctgctctctgcaaaaagaatgggcatcccggaggccacgcctatcttctctctctgctcctccttccctccatgcaccatcactgtggctggcaggcatcggacagcctcatccagaccccctgccctgtcttggcaacctctactgcccatctcccctgctcaacttctccaccaagcatttggtttatttagaaaaaggaagaaaaacaaaaaacaaaaaactaaagggtgagaatttgcttagcgccttccttgttcctgcatattttttaaaatattgaatccaaggaagagagcccaagggtaggggagaaaccccccacaactgacccctgcctccctgtgctggaattgactttcctgagcatggacaaggaaaggtgaagtctggggagcagaggtgtaaataaggcgactggccttggcactgtgggatgattaggtttaacgcattgtgggcaagataagaatgacactttgactgttctctttcttccaatccaggttccatccgtcctctctttaaaggggtagtcagcttcccaaggctggggagtggggcacagctgagggatctccctctgggcagacacgtcactctccactggatagatcctcaccacacacacacacacacacacatctcccatgcacttacaaggaacagggtctagggatcctctccagaacaaactcatctgggccctcctagccagacagcacactcactttcagatctgtgtccctctcactgccacccggcagcctcctaagcacagaggcacaggagcccagaggggtggcccaagtccctggtccagaggctggaatacccagagtttgctcagtcagcctagcacccagtttacaggcaaaaaggcaaagacaccctaacccccagtaacagcttccaggctgggctccgcctggccagggcggggaggggaaggggcaggtcaggaagctcagtccaaagtggacccagcatttgaattgcacgcccagcaggggcaggtcagatgggaccaagtgacaagaatagctgatgggagggaatgcttttacacacacacacacacacacacacacacatacacatacacaatctgctccaaggagtgttctgcaaaaagccacatccagtggccaggatcttcccgtccacttggtacttacggatgccagggtttagggagaagcctttctatctaactccatacattgtccaaggccctctgtgccctcagccagccctgtaaggccagcccaacacctgccccaccgctgagatgggtggcagatggcccacaggggcctgtctgattcagcgtgagccccttcgtggagcagggctccctctgtgcactgtgtacaggcgctgctggccctgcccaagagatgatgctctgttggggtgggtgagcagagttcaaggaagcccaagtaggagatttgggaaacatgccaaggtaagagagagcctggaccactctcctacagccccaagtcagtcactgtgctaatggtgaccgggaagggaagtcagggtctggggcccaaagaacgggcacacccagccatgagtttttcctgaagcacttgacccctgggaaatgtgaacggggagatgctggaagatggctcagcagacaggccagcccagctccagtgtccaaaaagcggtttctccaataaggaggcctgggaagggaagcacaatcttccccaaaggagaaccaagggctgaggttctgcccctccaggaagtaaggtgctctcggggcctccttggacttgtctgggggctgcagtggagtcagctggacacctgctccacccctgccacctccgcccccaccctctgcagcatctggcatctccatggcagcacatctgcagctgccggcctgtgatcgtgccgcacagctttcttttctttcctctcatcttttttttttttttttttttaaataacttcatccctttccctctctgctgagcatttaaccatttaaggaagttcccagtttgcattagggaattatttaagcccagcccagtgagggattatttgggaggaagcaggagtgagtaaaaacattgtgtctgtgtatatattgcacatgaggtcaattttcctttgcctttaatgaatcacctggtgcactaagatattccacccccccactccccacacgctcattcgcacccatgctgacacctacgtgtacatgcgggatggtgcccatgcacgcctgtgcttacacacatgcacacacaaatatgcacagaacacacatctgtatgtgtgttagcaaagagactcctgaactccctctgatggctgaagccatctctcccctgtgaggcacaggtggcctgggttgcttgcacttggggcgtggctgggatctattgtctgagagggtgaggacaccacgcaaatttagacaagcccatgagatcaggctgggcccatggtgaaagtcccacacttagtcaatacccactcatctggaatattgtctccacagccccagccacagctggaagcccaggcctgcagctgtggaactctagattttttcaggacacgtctctttgcccttgtttacatatctactggcacagccgaggctcccaaccgtcctcccagaaacctggccacattagaaaggggtggtgggccctgccctttgtagaaagagtgggaccctttctggcctgtgattttccgtgccagtgatgccagggcccctgcctgtgggactccacccaaagcaggttcacaccaggacacacctggcacctttggcattgcctccttgtgccctaagcaatctcccagtgttgcacccaggagcccatgctgggcacaccagggctttccccttcctggctgcgcctccagagttgacgtcagctccacacccacactgccaagacaaaccaaaaagatgctctgggctccagaaccaccatcctcctagggctccagagagtttgcaaacccaggctgcctccccttctgtccatccctcaccccccggcccccaaaactcctacccccaaacctggcactgccgtgatttagaggaaacaaggacacagcgggggctgcccccacctggtgcacgctgcctcaaggccttctgttgctgcccacgcctccctgggcagtgcttctaaaggtgccagagcctcaccacagtgccactctggctgggcaggggcttccctcagcttcccagagtgcacatctgaaggtgcctaccctgggtgaggggctggtgggcaggaaggtaaaggggagaccatctgagcagccgccacccgctccccagtgcctctgtatggccctatccagggacacccatgggcatgcgcacatggcaatcctgaccaccacctgagcacaggtgccccctcgggaccaccccccttctctttgtttccatcagaataaccaaaagcatttaaacgtgttacctttctccatccatctagactccagaaacaaaaatcaacacaaatctttattttttgatttaaaagatataacaaaaaattatggggagagtattcattatggcaggtgtctgtctgtaagaaaaaaatatatatctctatgtcatatagcgtgttagcaggtttattttttaaatgaaaggtaagaaagaaattgatttgaaatatataccacaagaagtcccgtgtcctgtcaaactgtcagtattttataaataaacttttttttttgg

SEQ ID NO: 6852 - DNA, 791 bp, Homo sapiens
tttcaccaggcccccggcttggggcgccttccttccccatggcgggacacctggcttcggatttcgccttctcgccccctccaggtggtggaggtgatgggccaggggggccggagccgggctgggttgatcctcggacctggctaagcttccaaggccctcctggagggccaggaatcgggccgggggttgggccaggctctgaggtgtgggggattcccccatgccccccgccgtatgagttctgtggggggatggcgtactgtgggccccaggttggagtggggctagtgccccaaggcggcttggagacctctcagcctgagggcgaagcaggagtcggggtggagagcaactccgatggggcctccccggagccctgcaccgtcacccctggtgccgtgaagctggagaaggagaagctggagcaaaacccggaggagtcccaggacatcaaagctctgcagaaagaactcgagcaatttgccaagctcctgaagcagaagaggatcaccctgggatatacacaggccgatgtggggctcaccctgggggttctatttggtgggttcccctctgcagattctgaccgcatctcccctctaaggagtatccctgaacctagtggggaggggcaggggcagactaccctcacccatgaagaggagtagggagagggagaagatgctttgagctccctctgggaagaggtggtaagcttggatctcagggtcacaagggccctgcgtgctccctcactttgcttctcttttgactggcctcccccaggg

SEQ ID NO: 6853 - DNA, 1285 bp, Homo sapiens; identical to SEQ ID NO: 4782

SEQ ID NO: 6854 - DNA, 1420 bp, Homo sapiens
agagaggggttgagtagtcccttcgcaagccctcatttcaccaggcccccggcttggggcgccttccttccccatggcgggacacctggcttcagatttcgccttctcgccccctccaggtggtggaggtgatgggccaggggggccggagccgggctgggttgatcctcggacctggctaagcttccaaggccctcctggagggccaggaatcgggccgggggttgggccaggctctgaggtgtgggggattcccccatgccccccgccgtatgagttctgtggggggatggcgtactgtgggccccaggttggagtggggctagtgccccaaggcggcttggagacctctcagcctgagggtgaagcaggagtcggggtggagagcaactccgatggggcctccccggagccctgcaccgtcacccctggtgccgtgaagctggagaaggagaagctggagcaaaacccggaggagtcccaggacatcaaagctctgcagaaagaactcgagcaatttgccaagctcctgaagcagaagaggatcaccctgggatatacacaggccgatgtggggctcaccctgggggttctatttgggaaggtattcagccaaacgaccatctgccgctttgaggctctgcagcttagcttcaagaacatgtgtaagctgcggcccttgctgcagaagtgggtggaggaagctgacaacaatgaaaatcttcaggagatatgcaaagcagaaaccctcgtgcaggcccgaaagagaaagcgaaccagtatcgagaaccgagtgagaggcaacctggagaatttgttcctgcagtgcccgaaacccacactgcagcagatcagccacatcgcccagcagcttgggctcgagaaggatgtggtccgagtgtggttctgtaaccggcgccagaagggcaagcgatcaagcagcgactatgcacaacgagaggattttgaggctgctgggtctcctttctcagggggaccagtgtcctttcctctggccccagggccccattttggtaccccaggctatgggagccctcacttcactgcactgtactcctcggtccctttccctgagggggaagcctttccccctgtctctgtcaccactctgggctctcccatgcattcaaactgaggtgcctgcccttctaggaatgggggacagggggaggggaggagctagggaaagaaaacctggagtttgtgccagggtttttgggattaagttcttcattcactaaggaaggaattgggaacacaaagggtgggggcaggggagtttggggcaactggttggagggaaggtgaagttcaatgatgctcttgattttaatcccacatcatgtatcacttttttcttaaataaagaagcttgggacacagtagatagacacactta

SEQ ID NO: 6855 - DNA, 704 bp, Homo sapiens
ggcggcttccggcggcgtgacctgaccgcaagaggccaatggagtgtgggagctgaaagggtcttcgctggcggccgggcctcactgtgtcacccaggctggagtgcagtcctcccacctcagcctcccaagtagctggactccaggcgcccaccaccacgcccagctattttttgtgtttttggtagagatgagattttgccatcttacgcagattggtctcgaactcttggcctcaagcaatctactcacctcagctccctaaagtgctgggattacaggacagtactgcttttaaagagacagtgttagggatcttggaagcacagccaacatgtgtgacattgaagaagccactaaccaactcctagatgtgaaccttcatgagaaccagaagtctgtacaagtgacagaaagtgacctcggaagtgaatctgagcttctagtcactattggagccactgtacctactggctttgagcaaacagctgcagatgaagtcagagagaaacttgggtcatcatgcaaaatcagcagagaccgtggcaagatatattttgtcatttcagtggaaagtctggcacaggttcattgtctgagatcagttgataacttatttgtggtggttcaggagtttcaagattaccagttcaaacaaacaaaggaagaagttctaaaggattttgaagacttggctggaaaac

SEQ ID NO: 6856 - DNA, 4107 bp, Homo sapiens
ggtgcgcgccgcggcttgggggagagttgagcgcttttcccccctcttttttttttttttcctcttcttcttaaacaaaccacaaacggatgtgagggaaggaaggtgtttcttttactcctgagcccagacacctcactctgttccgtctaagcttgttttgctgaacacttttttttaaaaaaggaaaaagaaaaggagttgcttgatgtgagagtgaaatggacgtaagattttatccacctccagcccagcccgccgctgcgcccgacgctccctgtctgggaccttctccctgcctggacccctactattgcaacaagtttgacggtgagaacatgtatatgagcatgacagagccgagccaggactatgtgccagccagccagtcctaccctggtccaagcctggaaagtgaagacttcaacattccaccaattactcctccttccctcccagaccactcgctggtgcacctgaatgaagttgagtctggttaccattctctgtgtcaccccatgaaccataatggcctgctaccatttcatccacaaaacatggacctccctgaaatcacagtctccaatatgctgggccaggatggaacactgctttctaattccatttctgtgatgccagatatacgaaacccagaaggaactcagtacagttcccatcctcagatggcagccatgagaccaaggggccagcctgcagacatcaggcagcagccaggaatgatgccacatggccagctgactaccattaaccagtcacagctaagtgctcaacttggtttgaatatgggaggaagcaatgttccccacaactcaccatctccacctggaagcaagtctgcaactccttcaccatccagttcagtgcatgaagatgaaggcgatgatacctctaagatcaatggtggagagaagcggcctgcctctgatatggggaaaaaaccaaaaactcccaaaaagaagaagaagaaggatcccaatgagccccagaagcctgtgtctgcctatgcgttattctttcgtgatactcaggccgccatcaagggccaaaatccaaacgctacctttggcgaagtctctaaaattgtggcttcaatgtgggacggtttaggagaagagcaaaaacaggtctataaaaagaaaaccgaggctgcgaagaaggagtacctgaagcaactcgcagcatacagagccagccttgtatccaagagctacagtgaacctgttgacgtgaagacatctcaacctcctcagctgatcaattcgaagccgtcggtgttccatgggcccagccaggcccactatcaccaacaaccgggaatgaatcctcacctaactgccatgcatcctagtctccccaggaacatagcccccaagccgaataaccaaatgccagtgactgtctctatagcaaacatggctgtgtcccctcctcctcccctccagatcagcccgcctcttcaccagcatctcaacatgcagcagcaccagccgctcaccatgcagcagccccttgggaaccagctccccatgcaggtccagtctgccttacactcacccaccatgcagcaaggatttactcttcaacccgactatcagactattatcaatcctacatctacagctgcacaagttgtcacccaggcaatggagtatgtgcgttcggggtgcagaaatcctcccccacaaccggtggactggaataacgactactgcagtagtgggggcatgcagagggacaaagcactgtaccttacttgagaatctgaacacctcttctttccactgaggaattcagggaagtgttttcaccatggattgctttgtacagtcaaggcagttctccattttattagaaaatacaagttgctaagcacttaggaccatttgagcttgtgggtcacccactctggaagaaatagtcatgcttctttattatttttttaatcctttatggacattgtttttcttcttccctgaaggaaatttggaccattcagattttatgttggttttttgctgtgaagtgctgcgctctagtaactgccttagcaactgtagatgtctcggataaaagtcctggattttccattggttttcataatgggtgtttatatgaaactactaaagactttttaaatggcttgatgtagcagtcatagcaagtttgtaaatagcatctatgttacactctcctagagtataaaatgtgaatgtttttgtagctaaattgtaattgaaactggctcattccagtttattgatttcacaataggggttaaattggcaaacattcatatttttacttcatttttaaaacaactgactgatagttctatattttcaaaatatttgaaaataaaaagtattcccaagtgattttaatttaaaaacaaattggctttgtctcattgatcagacaaaaagaaactagtattaagggaagcgcaaacacatttattttgtactgcagaaaaattgcttttttgtatcactttttgtgtaatggttagtaaatgtcatttaagtccttttatgtataaaactgccaaatgcttacctggtattttattagatgcagaaacagattggaaacagctaaattacaacttttacatatggctctgtcttattgtttcttcatactgtgtctgtatttaatctttttttatggaacctgttgcgcctatttatgaaataataaatataggtgtttgtaagtaaatttgttagtatttgaaagaggtttctttgatgttttaacttttgctggcaaaaaaaaattcacgcttggtgtgaatactttattatttagtttttacagtaacatgaataaagccaaacctgcttttcatttagcagcaaattaaagtaaccagtccttatttctgcatttctttggttgatgcaaacaaaaaactattatatttaagaactttatttcttcatacgacataacagaattgccctccaagtcacacaagctccaagactaaacaaacagacaggtcctctgtcttaaaaaggttacttcttggttctcagctggttctagtcaattctgaaccaccaccccccgccccccgcaaaaaagtaaaagtcaaaccaaacttcctcaagctgcatgcttttcacaaaatccagaaagcatttaagaattgaactaggggctggaagaagtgaaagggaagcatctaaaaatgaaaggtgagtaaccagatagcaaaagaaaagggaaagccatccaaatttgaaagctgttgatagaaattgagattcttgctgtcttttgtgcctctacaagctactactcattccagaattcctgggtcttccaagaggattcttaaggtaccagagatttgctagggaaccaaaagtgcttgagaatctgcctgagggcttgcatagctttcacattaaaaaaagaaaaagctagcagatttactcctttttaggggatcatatcaagaaagttagtctggttggaaaccaagagaatggctgatgtctctttcttggaatatgtgaaataaatttagcagtttaactaaatacaaatatatgcattgtgtaatccactcagaattaaacagacaaaaggtatgcttgctttggaatgattttaggcattgtacaaccttgaatcacttgagcatgtaataactaataaataatgcagatccatgtgattattaaaatgactgtagctgagagctctaattttcctgtcttgaaactgtataagaactcatgtgattaagttcacagtttattgtttgtctgtttagtattttagaaatataccagcactactaattaactaatgtcttttatttattatattatgataaagtaaaaatttcacttgcattaagtctaaactgagaaggtaattactgggaggagaatgagcagctttgactttgacaggcggtttgtgcaggaaagcacagtgccgtgttgtttacagcttttctagagcagctgtgcgaccagggtagagagtgttgaaattcaataccaaatacagtaaaaacaaatgtaaataaaagaaaacacatcatcaataaaactgttattatgcgtg

SEQ ID NO: 6857 - DNA, 3095 bp, Homo sapiens
atctcggctccaccgcacccttcgcgggaagtccccaggcttccagcaaagctcagcttatcccgcccccgcttccaacccggaaccccagaagaacagcatgatgagcctccggcagccaggtgggccacctccccgcggctcagtttgaggacacttgtgcggaaccctttcacatccccaccctacccagctttcacaactccgccgggttaaatggccaaagacaaacttctacctctcctgtccccggtcccagcttttcaaaaacccacagctggcgaacccacacacatcgaaactcctaggtcgctgttgcagtctgggcatgctcagtatcagggctgcccctccaagagcggaggcagcgagagtacgcgtgtgcctcgcgccggtccacgcggggagagcactggggaccgagacccggcaccacctcccggtccgccctccagggaaaacgggaaaactagcaagagctagcaagaactagcaagagcttgaacaaacgcctggactcagattggaagactgctcatttgtctactgcctcattcctggaaattgcactggaactgtctgattaagaaaaacagaataattctgaaagaaagaaaacaaagaaaaacatactccagaattcctaatagaacacttcacctgaacctaaaatggtgagcgagagtcaccatgaggccctggcagccccgcctgtcaccactgtcgcgactgttctgccaagcaacgccacagagccagccagtcctggagaaggaaaggaagatgcattttctaagctgaaggagaagtttatgaatgagttgcataaaattccattgccaccgtgggccttaattgcaatagccatagtcgcagtccttttagtcctgacctgctgcttttgtatctgtaagaaatgtttgttcaaaaagaaaaacaagaagaagggaaaggaaaaaggagggaagaatgccattaacatgaaagatgtaaaagacttagggaagacgatgaaagatcaggccctcaaggatgatgatgctgaaactggattgacagatggagaagaaaaagaagaacccaaagaagaggagaaactgggaaaacttcagtattcactggattatgatttccaaaataaccagctgctggtagggatcattcaggctgccgaactgcccgccttggacatggggggcacatctgatccttacgtgaaagtgtttctgctacctgataagaagaagaaatttgagacaaaagtccaccgaaaaacccttaatcctgtcttcaatgagcaatttactttcaaggtaccatactcggaattgggtggcaaaaccctagtgatggctgtatatgattttgatcgtttctctaagcatgacatcattggagaatttaaagtccctatgaacacagtggattttggccatgtaactgaggaatggcgtgacctgcaaagtgctgagaaggaagagcaagagaaattgggtgatatctgcttctcccttcgctacgtacctactgctggtaagctgactgttgtcattctggaggcaaagaacctgaagaagatggatgtgggtggcttatccgatccttatgtgaagattcatctgatgcagaatggtaagaggctgaagaagaaaaagacaacaattaaaaagaacacacttaacccctactacaatgagtcattcagctttgaagtaccttttgaacaaatccagaaagtgcaggtggtggtaactgttttggactatgacaagattggcaagaacgatgccatcggcaaagtctttgtgggctacaacagcaccggcgcggagctgcgacactggtcagacatgctggccaaccccaggcgacctattgcccagtggcacaccctgcaggtagaggaggaagttgatgccatgctggccgtcaagaagtaaaggaaagaagaagcctttctgcatttgcccatatagtgctctttagccagtatctgtaaatacctcagtaatatgggtcctttcatttttccagccatgcattcctaacacaattcagtggtacttggaatcctgttttaatttgcacaaatttaaatgtagagagcccctaagtccttcatcataccactgccctccaaatctactcttcttttaagcaatatgatgtgtagatagagcatgaatgaaattatttattgtatcacactgttgtatataccagtatgctaaagatttatttctagtttgtgtatttgtatgttgtaagcgtttcctaatctgtgtatatctagatgtttttaataagatgttctattttaaactatgtaaattgactgagatataggagagctgataatatattatacggtaaatatagtatcgtctgcattccagcaaaaatatcaactcgtaaggcactagtacagttaaactgacatcttaaaggacaacttaaacctgagctttctattgaatcatttgagtaccaagataaacttacaccacatacttggtgggtgaatccaattttgtagaattcctacacaggcaaaatagcatgatctgagcagcagcatccaggctgacctcaaggaagcatagccacaaaacagaatagcacctgtctgtacatatttacaaagctaaaataatggcttcactcttatatttgaggaagcaactgaacaggagtcaatgatttcatattactgcatatagaataacaacaaggtgttccgtgtgtgtgtgtgtgtgtgtgtgtgtgtgtgtgtgcacatttgtttggggatgggggagaagaagctaaggggagaagtcaacatttatgaaatattgcctgactatttaaaaagaaaaaagtagctctccattatcacctttatacaaaatgtacatcctgtgaattctgttccagatttcacacctacaataattccaaaaggtttgcacattagagtttgtaacaaaatattttattatataaaaccaggttagaaggaatgcaggatatttttaacacaacaatctgtgcttattacacaaaattactttgtggtaaacagacagtattgtaatcccatcaaaagatgaaag

SEQ ID NO: 6858 - DNA, 1351 bp, Homo sapiens; identical to SEQ ID NO: 6333

SEQ ID NO: 6859 - DNA, 3532 bp, Homo sapiens
actttcactctccgtcagccgcattgcccgctcggcgtccggcccccgacccgcgctcgtccgcccgcccgcccgcccgcccgcgccatgaacgccaaggtcgtggtcgtgctggtcctcgtgctgaccgcgctctgcctcagcgacgggaagcccgtcagcctgagctacagatgcccatgccgattcttcgaaagccatgttgccagagccaacgtcaagcatctcaaaattctcaacactccaaactgtgcccttcagattgtagcccggctgaagaacaacaacagacaagtgtgcattgacccgaagctaaagtggattcaggagtacctggagaaagctttaaacaagaggttcaagatgtgagagggtcagacgcctgaggaacccttacagtaggagcccagctctgaaaccagtgttagggaagggcctgccacagcctcccctgccagggcagggccccaggcattgccaagggctttgttttgcacactttgccatattttcaccatttgattatgtagcaaaatacatgacatttatttttcatttagtttgattattcagtgtcactggcgacacgtagcagcttagactaaggccattattgtacttgccttattagagtgtctttccacggagccactcctctgactcagggctcctgggttttgtattctctgagctgtgcaggtggggagactgggctgagggagcctggccccatggtcagccctagggtggagagccaccaagagggacgcctgggggtgccaggaccagtcaacctgggcaaagcctagtgaaggcttctctctgtgggatgggatggtggagggccacatgggaggctcacccccttctccatccacatgggagccgggtctgcctcttctgggagggcagcagggctaccctgagctgaggcagcagtgtgaggccagggcagagtgagacccagccctcatcccgagcacctccacatcctccacgttctgctcatcattctctgtctcatccatcatcatgtgtgtccacgactgtctccatggccctgcaaaaggactctcaggaccaaagctttcatgtaaactgtgcaccaagcaggaaatgaaaatgtcttgtgttacctgaaaacactgtgcacatctgtgtcttgtttggaatattgtccattgtccaatcctatgtttttgttcaaagccagcgtcctcctctgtgaccaatgtcttgatgcatgcactgttccccctgtgcagccgctgagcgaggagatgctccttgggccctttgagtgcagtcctgatcagagccgtggtcctttggggtgaactaccttggttcccccactgatcacaaaaacatggtgggtccatgggcagagcccaagggaattcggtgtgcaccagggttgaccccagaggattgctgccccatcagtgctccctcacatgtcagtaccttcaaactagggccaagcccagcactgcttgaggaaaacaagcattcacaacttgtttttggtttttaaaacccagtccacaaaataaccaatcctggacatgaagattctttcccaattcacatctaacctcatcttcttcaccatttggcaatgccatcatctcctgccttcctcctgggccctctctgctctgcgtgtcacctgtgcttcgggcccttcccacaggacatttctctaagagaacaatgtgctatgtgaagagtaagtcaacctgcctgacatttggagtgttccccttccactgagggcagtcgatagagctgtattaagccacttaaaatgttcacttttgacaaaggcaagcacttgtgggtttttgttttgtttttcattcagtcttacgaatacttttgccctttgattaaagactccagttaaaaaaaattttaatgaagaaagtggaaaacaaggaagtcaaagcaaggaaactatgtaacatgtaggaagtaggaagtaaattatagtgatgtaatcttgaattgtaactgttcttgaatttaataatctgtagggtaattagtaacatgtgttaagtattttcataagtatttcaaattggagcttcatggcagaaggcaaacccatcaacaaaaattgtcccttaaacaaaaattaaaatcctcaatccagctatgttatattgaaaaaatagagcctgagggatctttactagttataaagatacagaactctttcaaaaccttttgaaattaacctctcactataccagtataattgagttttcagtggggcagtcattatccaggtaatccaagatattttaaaatctgtcacgtagaacttggatgtacctgcccccaatccatgaaccaagaccattgaattcttggttgaggaaacaaacatgaccctaaatcttgactacagtcaggaaaggaatcatttctatttctcctccatgggagaaaatagataagagtagaaactgcagggaaaattatttgcataacaattcctctactaacaatcagctccttcctggagactgcccagctaaagcaatatgcatttaaatacagtcttccatttgcaagggaaaagtctcttgtaatccgaatctctttttgctttcgaactgctagtcaagtgcgtccacgagctgtttactagggatccctcatctgtccctccgggacctggtgctgcctctacctgacactcccttgggctccctgtaacctcttcagaggccctcgctgccagctctgtatcaggacccagaggaaggggccagaggctcgttgactggctgtgtgttgggattgagtctgtgccacgtgtttgtgctgtggtgtgtccccctctgtccaggcactgagataccagcgaggaggctccagagggcactctgcttgttattagagattacctcctgagaaaaaaggttccgcttggagcagaggggctgaatagcagaaggttgcacctcccccaaccttagatgttctaagtctttccattggatctcattggacccttccatggtgtgatcgtctgactggtgttatcaccgtgggctccctgactgggagttgatcgcctttcccaggtgctacacccttttccagctggatgagaatttgagtgctctgatccctctacagagcttccctgactcattctgaaggagccccattcctgggaaatattccctagaaacttccaaatcccctaagcagaccactgataaaaccatgtagaaaatttgttattttgcaacctcgctggactctcagtctctgagcagtgaatgattcagtgttaaatgtgatgaatactgtattttgtattgtttcaattgcatctcccagataatgtgaaaatggtccaggagaaggccaattcctatacgcagcgtgctttaaaaaataaataagaaacaactctttgagaaacaacaatttctactttgaagtcataccaatgaaaaaatgtatatgcacttataattttcctaataaagttctgtactcaaatgta

SEQ ID NO: 6860 - DNA, 988 bp, Homo sapiens
agcccaggttcatctacatcctgttgagaagtttggcagctggaggtggacatgcacacactacactgaacctcctgcaacaagcactgcggaagggaccatttggatgttgctgccatacttttcagcggctgaaaaggtcgtccttggtggaaggaaccatgaactggcatctccccctcttcctcttggcctctgtgacgctgccttccatctgctcccacttcaatcctctgtctctcgaggaactaggctccaacacggggatccaggttttcaatcagattgtgaagtcgaggcctcatgacaacatcgtgatctctccccatgggattgcgtcggtcctggggatgcttcagctgggggcggacggcaggaccaagaagcagctcgccatggtgatgagatacggcgtaaatggagttggtaaaatattaaagaagatcaacaaggccatcgtctccaagaagaataaagacattgtgacagtggctaacgccgtgtttgttaagaatgcctctgaaattgaagtgccttttgttacaaggaacaaagatgtgttccagtgtgaggtccggaatgtgaactttgaggatccagcctctgcctgtgattccatcaatgcatgggttaaaaatgaaaccagggatatgattgacaatctgctgtccccagatcttattgatggtgtgctcaccagactggtcctcgtcaacgcagtgtatttcaagggtctgtggaaatcacggttccaacccgagaacacaaagaaacgcactttcgtggcagccgacgggaaatcctatcaagtgccaatgctggcccagctctccgtgttccggtgtgggtcgacaagtgcccccaatgatttatggtacaacttcattgaactgccctaccacggggaaagcatcagcatgctgattgcactgccgactgagagctccactccgctgtctgccatcatcccacacatcagcaccaagac

SEQ ID NO: 6861 - DNA, 709 bp, Homo sapiens; identical to SEQ ID NO: 6531

SEQ ID NO: 6862 - DNA, 2678 bp, Homo sapiens
cccagatcctttcccagagagaaacttggcgatcacgttttcacatgatgctcacgctcagggcgcttcaattatccctccccacaaagataggtggcgcgtgtttcagggtctctcgtctctctcctacagaaaagaaaaagaaaaaaatgtcattagaagaggcgtaacacgtcagtccgtccccaggtttgtgtttcctggagtggccgaaagagatcagttctaacctgctctgcaggaataacggtcctgcctcccgacactcttggcgaggtttttgtacagtttgctccgggagctgtttcttcgcttccacctttttctcccccacacttcgcggcttcttcatgctttttcttctcaccatttctggccaaaactacaaacaagacttcgcagccccctgtttaaactaatcctcgaggcacagcatcttcccaacctccaccgagttttcaggattctcctcctctcctgcctgcctccgaggtcccccttctccaagttttgacagtttcaactgaaaaaatgcagcgcctctctcgatttttagatcgagcctgcgtgctgccgaagcagggcgccgagtccatgcgaactgccatctgatccgctcttatcaatgaagcagccgatcatggcggatggcccccggtgcaagaggcgcaaacaagccaatcccaggaggaaaaacgtggtgaactatgacaatgtagtggacacaggttctgaaacagatgaggaagacaagcttcatattgctgaggatgacggtattgccaaccctctggaccaggagacgagtccagctagtgtgcccaaccatgagtcctccccacacgtgagccaagctctgttgccaagagaggaagaggaagatgaaataagggagggtggagtggaacacccctggcacaacaacgagattctacaagcctctgtagatggtccaggtaagtgtctaaaatcacttggcctcttcctgtaccatcttcacatcttcaactaatctgttccacctagcagatcgcccacaaccaaataattaaaatatttctttccattgagcccttgcagaatagagataccaaagctggtgacagattatgaagtgatagtaatgttatcacattgcggcagttacatcttaggaagggattatatttcagttttgatgcaagtcaaacatgaaccacactttcaacacataacatgaggtatttgcaccacatttacaatgtgcaaattatgtaacatgatcaagatctatactttcatgataggaaatggaagcaaatgtaaaaactcacaacatatatatgtatataaaaatattttgtgtggaaattatgtagcatttcaaaccaaataactgtcagtttaatgtagcttcagtgtctgtctgacacctcctattggaattcaatcgtttaatgattcccttttgttaagtgtgaatgtgatttcacacttttacctggtcaggtagctttcttattatttatcagctaagtacttgataatgattcctgctgtttggtgggactctcaagggaagtaaaaatggtcccaggccaactataataaaactaaggtaaattatattcaaactaaaacttccgacaacactgtgcaaacgggaaatgtcttggtctaaaattcacttatgacggagaatcgctaaggtatgaaatgtttaacaaaatacaagaaatcttattcctgtgaactttctctgctcatctttacatggtaaagtggcctggaaaatttgtttaaatgacctctctaattcagacctcatgtcaccttcatctctattcccaggacccactgagagttatcattgtttaccccaccttgttttttctttgacaacataagcaacaaaagcatttttataaataggtgaagtggctgggaaggagtctacctatatgctgttgtgatgtcgcagactataaaccatcaaacataggcagaataattgtttggtatactggaaggaggataataaaagcacttccactacgaaagaaaattaaatgtgagatgaaagaaaaagaaaaaagactgatggcaatttgagtacagtgtatttgtttttcgttttcctaacatactgtgccaagttttctactctttccgtttccaattttgctttcggtgaaggtttctcgaatctcagcaatcccacacataaacatttatcgttatatccattaagccttaaggttttagattttcaactatgagggagaactcagccaaagatgcttgaaagataaatacgtttaattaggggcagaggatgatcattaaaggaagtctgactgctgcagaagtcattaacaatcttaaatgaaatttttatttttatgatagccatttacatgtataataagagccaatgattcttgggagcagtgtgacagaaacagagtgtggcgagaactcatgtaagacatactatttaaatgagctggtgttagctattcatatttgttaatgaactagatatgcagggctataagaatgaatgttctgatgctttaaattttaatatctagaaatcaagggtaaggaccaattactagaatttccacccttagaagaataattaataacaatgtaacaaatgtacagccccaaacctcttttaaaaaagtttaatt

SEQ ID NO: 6863 - DNA, 677 bp, Homo sapiens
aagccattcccctccaggggctgcaagttcccatccataaatcagtatctagatcaccatggcgactggacagaagttgatgagagctgttagagtttttgaatttggtgggccagaagtcctgaaattgcgatcagatattgcagtaccgattccaaaagaccatcaggttctaatcaaggtccatgcatgtggtgtcaaccccgtggagacatacattcgctctggtacttatagtagaaaaccactcttaccctatactcctggctcagatgtggctggggtgatagaagctgttggagataatgcatctgctttcaagaaaggtgacagagttttcactagcagcacgatctctgggggttatgcagagtatgctcttgcagcagaccacactgtttacaaactacctgaaaaactggactttaaacaaggagctgccatcggcattccatattttactgcttatcgagctctgatccacagtgcctgtgtgaaagctggagagagtgttctggttcatggggcaagtggaggagttggattagcagcatgccaaattgctagagcttatggcttaaagattttgggcactgctggtactgaggaaggacaaaagattgttttgcaaaatggagcccatgaagtgttcaatcacagagaagtgaattacattg

SEQ ID NO: 6864 - DNA, 691 bp, Homo sapiens
cacatcacctccagccctctgcattcacgtagcattgctgcggagctggacgagcttgctgatgaccgtatggcactggtgtcaggcatcagcttagatccagaagcagcgattggtgtgacaaaacggccacctcctaagtgggtggatggagtggatgaaattcagtatgatgttggccggattaagcagaagatgaaagaattggccagccttcatgacaagcatttaaacagacccaccctggatgacagcagcgaagaggaacatgccattgagataactacccaagagatcactcaggtgccagcgtgccgtgcaggccctgccgagccgggcccgggcctgctccgagcaggaggggcggctgcttgggaacgtggtggcctcgctggcgcaggccctgcaggaactctccaccagcttccggcacgcacagtcaggctacctcaaacgcatgaagaatcgagaggaaagatcccagcattttttcgacacatcagtaccactaatggatgatggagacgataacactctttaccatcggggttttacagaggaccagttagttctggtggagcagaacacactgatggtggaagagcgggaacgagagattcgccagattgtacagtccatttctgacctgaatgaaatattcagggacttaggggcgatgattgtagaacag

SEQ ID NO: 6865 - DNA, 2247 bp, Homo sapiens
gttttggccggaaaggcttaccatgagttgccagggctgagagagatggagaaggattcgcggcggtgacagattaaattccccagttacattatagacttggagacttgtccttgtgtggacgggagccggaaagccttgagaacttattcctcgacccggacatggcacaggagaaaatgaaactaggtttcaagtcgctgccgagttccactaccgcagacggcaacattctgagaagagtcaacagtgcccctttgatcaatggacttggttttaattcacaggtgttgcaagctgacatgttaagaattaggacaaacagaacaacatttaggaatcgacgctctctgttgttgccacctcctccctttcatggttccatcagccgccttcatcaaatcaaacagtctccctctgatgccgagcggaagctggactgtactgctgccatctcggctcactgcaacctccctgcctgattctcctgcctcagcctgccgagtgcctgcgattgcaggcgcgcgcagccacacctgactggttttcgtatttttttggtggagacggggtttcgctgtgttggccgggctggtctccagctcctaaccgcaagtgatctgccagcctcggcctcccgaggtgccgggattgcagacggagtctggttcactcagtgctcaatggtgcccaggctggagtgcagtggcgtgatctcggctcgctacaacctccacctcccagccgcctgccttggcctcccaaagtgccgagattgcagcctctgcccggccgccaccccgtctgggaagtgaggagcatctctgcctggccgcccatcgtctgggaggtgaggagcccctctgcctggctgcccagtctggaaagtgaggagcgtctctgcccggccgccatcccatctaggaagtgaggagcgcctcttcccggccgccatcccatctaggaagtgaggagcgtctctgccccgctgccccgtctgggatgtgaggagcgcctctgcccggccgcgaccccgtctgggaggtgaggagcatctctgcccggccgccccgtctgagaagtgaggagaccctccgcctggcaaccgccccgtctgagaagtgaggagcccctccgcccagcagccgccccgtctgagaagtgaggagcccctccgcccggcagccacaccgtctgggaagtgaggagcgtctctgcccggcagccaccccgtccgggagggaggtgggggtcagcccccgccaggccagccgccccatccgggaggaagaagccatggatttaataaatagagaaacaatgtctgaatggaagctacaaagtgagatacagataagtcactcttgggaagaaggcttgaaactgaatgacaatggcttacagaaatcatcctctctaaagtgcattgatttaactccagtatcctcaatggcttcttccatcaagaagactgggaagcagtgtttctctccatcattacaaacttgtgtgagttgcactggttcgccttcaagtcctattcccagtcctatgcaacaatacatcataagaagtcaaaatcctaccaacattattagaccaagtatccttggaccattaaaaagaaaaggtgaaatggcatttcaatatcaaccaaaaaagattttccaaggcacaaccaacatgctttcttctgatacttcccaactgtcagaaaataatgtgtatctacttccagctacttttgatggaaacgacagcaatgctggatcttctggtaattcgtcagctgaaatcggcactgtcacaaactctcctgtgtcaccttctgatactggttctcatttgttctagtagacaaactttcaactaaatgattcacccatcccaagactttctcaccagtggagaaacacacacatcaagcaaaccaagtcagagcaatgagaattgtactgtataatttaaactatctcctatttatcttttttcctcaatttcctaaaattctatttatctacagaacttgcgtgtataattcttgtgtacatccttaaatttaatgtaataacatgttaaagatgttttccaaatcagaaccatgttgaagatacaagcgtaaattgttaggctgctattttctagaaaatgctgtaccttgactttttaaaataatcttatgaaacataattctgataaaatataattgttcaattaacaaagtaaaatgatgtttgacaattatgt

SEQ ID NO: 6866 - DNA, 2373 bp, Homo sapiens; identical to SEQ ID NO: 767

SEQ ID NO: 6867 - DNA, 553 bp, Homo sapiens
agggaagagcgaacccagggcccttgctctcgtgcagcgctgcgccctgggtggggacggcgtgaggcttgcagcgcaggtgagagtgattttccagtgattgctttggcctgtacaaccagagaacaggattcttcccttctttttggccaccaaatgcctatgtgcaccacacattccagtgtgctgagaagggcagagcttcttggatgatgatggacgtcccaccgggcaggatgaaggcagagcgtgtggcatctccacctcaagggtgcagcctgatcttcctcttctcccttgccagccagcactctgccttctgtatccaccatggtgtttggtgagtttttccatcgccctggacaagacgaggaacttgtcaacctgaatgtggggggctttaagcagtctgttgaccaaagcaccctcctgcggtttcctcacaccagactggggaagctgcttacttgccattctgaagaggccattctggagctgtgtgatgattacagtgtggccgataaggagtactactttgatcggaatccctcct

SEQ ID NO: 6868 - DNA, 548 bp, Homo sapiens
gtgctgatggcagagattggtgaggatttggataaatctgatgtgtcctcattaattttcctcatgaaggattacatgggccgaggcaagataagcaaggagaagagtttcttggaccttgtggttgagttggagaaactaaatctggttgccccagatcaactggatttattagaaaaatgcctaaagaacatccacagaatagacctgaagacaaaaatccagaagtacaagcagtctggtaagaattttggcctctcagtggtctaggggaagtactctgtgcatgggggtgggcatcatgactgataaatattcatttgttggataggtggatggaatggaacctggatgaccaaagcctcctttagcttgtggctagaaatcgcgtccctttatattcttcatatcccagatctgccaactccattgccctgtatattcatgatctctgcaaaatgctgccaagcagttcttaacatttcagtcttcaagaaagaatctgggatctgcacaggctggcagagctatggacattcaggggtttt

SEQ ID NO: 6869 - DNA, 705 bp, Homo sapiens
agtcgcgggtccccgagtgagcacgccagggagcaggagaccaaacgacgggggtcggagtcagagtcgcagtgggagtccccggaccggagcacgagcctgagcgggagagcgccgctcgcacgcccgtcgccacccgcgtacccggcgcagccagagccaccagcgcagcgctgccatggagcccagcagcaagaagctgacgggtcgcctcatgctggccgtgggaggagcagtgcttggctccctgcagtttggctacaacactggagtcatcaatgccccccagaaggtgatcgaggagttctacaaccagacatgggtccaccgctatggggagagcatcctgcccaccacgctcaccacgctctggtccctctcagtggccatcttttctgttgggggcatgattggctccttctctgtgggccttttcgttaaccgctttggccggcggaattcaatgctgatgatgaacctgctggccttcgtgtccgccgtgctcatgggcttctcgaaactgggcaatcccaaacttgaaacaacagatacgcctctgccgaagaagtttccctttagaccccaagcccgtaaggtcactgcagtgcagtgtcccttctgcctgagtatttgtccccttcattctttactcatcctgggtcccacatccactgctacagaggcagggaagggccacaatgtcca

SEQ ID NO: 6870 - DNA, 564 bp, Homo sapiens
gcagcggctcgggcagctgctcctgcccgcaccctcccctggagcccggggaggacaaggcgagcattactctactgactggcagagacaggagaggtagatgtccacgcccacagaccctggtgcgatgccccacccagggccttcgccggggcctgggccttcccctgggccaattcttgggcctagtccaggaccaggaccatccccaggttccgtccacagcatgatggggccaagtcctggacctccaagtgtctcccatcctatgccgacgatggggtccacagacttcccacaggaaggcatgcatcaaatgcataagcccatcgatggtatacatgacaaggggattgtagaagacatccattgtggatccatgaagggcactggtatgcgaccacctcacccaggcatgggccctccccagagtccaatggatcaacacagccaaggttatatgtcaccacacccatctccattaggagccccagagcacgtctccagccctatgtctggaggaggcccaactccacctcagatgccaccaagccagccgggggc

SEQ ID NO: 6871 - DNA, 2524 bp, Homo sapiens
aaatccgagcctcgcgtgggctcctggcccccgacggacaccaccaggcccacggagcccaccatgccgcgcccggcccccgcgcgccgcctcccgggactcctcctgctgctctggccgctgctgctgctgccctccgccgcccccgaccccgtggcccgcccgggcttccggaggctggagacccgaggtcccgggggcagccctggacgccgcccctctcctgcggctcccgacggcgcgcccgcttccgggaccagcgagcctggccgcgcccgcggtgcaggtgtttgcaagagcagacccttggacctggtgtttatcattgatagttctcgtagcgtacggcccctggaattcaccaaagtgaaaacttttgtctcccggataatcgacactctggacattgggccagccgacacgcgggtggcagtggtgaactatgctagcactgtgaagatcgagttccaactccaggcctacacagataagcagtccctgaagcaggccgtgggtcgaatcacacccttgtcaacaggcaccatgtcaggcctagccatccagacagcaatggacgaagccttcacagtggaggcaggggctcgagagccctcttctaacatccctaaggtggccatcattgttacagatgggaggccccaggaccaggtgaatgaggtggcggctcgggcccaagcatctggtattgagctctatgctgtgggcgtggaccgggcagacatggcgtccctcaagatgatggccagtgagcccctagaggagcatgttttctacgtggagacctatggggtcattgagaaactttcctctagattccaggaaaccttctgtgcgctggacccctgtgtgcttggaacacaccagtgccagcacgtctgcatcagtgatggggaaggcaagcaccactgtgagtgtagccaaggatacaccttgaatgccgacaagaaaacgtgttcagctcttgataggtgtgctcttaacacccacggatgtgagcacatctgtgtgaatgacagaagtggctcttatcattgtgagtgctatgaaggttataccttgaatgaagacaggaaaacttgttcagctcaagataaatgtgctttgggtacccatgggtgtcagcacatttgtgtgaatgacagaacagggtcccatcattgtgaatgctatgagggctacactctgaatgcagataaaaaaacatgttcagtccgtgacaagtgtgccctaggctctcatggttgccagcacatttgtgtgagtgatggggccgcatcctaccactgtgattgctatcctggctacaccttaaatgaggacaagaaaacatgttcagccactgaggaagcacgaagacttgtttccactgaagatgcttgtggatgtgaagctacactggcattccaggacaaggtcagctcgtatcttcaaagactgaacactaaacttgatgacattttggagaagttgaaaataaatgaatatggacaaatacatcgttaaattgctccaatttctcacctgaaaatgtggacagcttggtgtacttaatactcatgcattcttttgcacacctgttattgccaatgttcctgctaataatttgccattatctgtattaatgcttgaatattactggataaattgtatgaagatcttctgcagaatcagcatgattcttccaaggaaatacatatgcagatacttattaagagcaaactttagtgtctctaagttatgactgtgaaatgattggtaggaaatagaatgaaaagtttagtgtttctttatctactaattgagccatttaatttttaaatgtttatattagataaccatattcacaatggaaactttaggtctagtttcttttgatagtatttataatataaatcaatcttattactgagagtgcaaattgtacaaggtatttacacatacaacttcatataactgagatgaatgtaattttgaactgtttaacactttttgttttttgcttattttgttggagtattattgaagatgtgatcaatagattgtaatacacatatctaaaaatagttaacacagatcaagtgaacattacattgccatttttaattcattctggtctttgaaagaaatgtactactaaagagcactagttgtgaatttagggtgttaaactttttaccaagtacaaaaatcccaaattcactttattattttgcttcaggatccaagtgacaaagttatatatttataaaattgctataaatcgacaaaatctaatgttgtctttttaatgttagtgatccacctgcctcagcctcccaaagtgctgggattacaggcttgaaagtctaacttttttttacttatatatttgatacatataattcttttggctttgaaacttgcaactttgagaacaaaacagtcctttaaattttgcactgctcaattctgtttttcgtttgcattgtctttaatataataaaagttattacctttacatatt

SEQ ID NO: 6872 - DNA, 3107 bp, Homo sapiens
gccttggagccagagagacgcagctaggcctgcacggctgtggagagatcctgccacgggccttgttcaccatgtcggtgctggatgcgctttgggaggatcgggatgtccgtttcgacctgtccgcgcagcaaatgaaaacaagacctggagaagtccttattgattgtttagattccattgaagacaccaaaggaaataatggagatagaggtagactcttggtaacaaatttaagaattctctggcactctttggcattatcaagagtcaatgtttctgtcggttacaattgcatattgaatattacaacaaggactgctaactctaaattacgaggccaaactgaagctctctatatactaacaaaatgtaacagtactcgttttgaatttatatttacaaatttggttcctggaagccctagactttttacttctgtgatggcagtacacagagcttatgaaacttctaaaatgtatcgtgattttaaattaagaagtgcactaattcagaacaagcaactaagactgttgccacaagaacatgtatatgataaaataaatggagtttggaatttatccagtgatcagggcaatttaggaaccttttttattaccaatgtgagaattgtgtggcatgcaaatatgaatgatagttttaatgtcagtataccatatctgcaaattagtggtggatatgttcttggctttaaaatagatcctgtggaaaaactacaagaatcagttaaggaaatcaattcacttcacaaagtctattctgccagtcccatatttggagttgattatgagatggaagaaaagccccagccgctcgaagctctgacagtcgaacaaattcaagatgatgtagaaatagactctgatggtcacacggatgcttttgtggcttattttgctgatggcaataagcaacaagatcgtgaacctgtattttcagaagaactggggcttgcaatagagaaattgaaggatggattcaccctacagggactttgggaagtaatgagttgattgaccttgagttgagatggatttctattaaagatatctctagtttaaagatactagtcacctgccataagtcatggaatagtttttatatttacagcttttatatttaaaacttgtaagagtttttttaatgattgaggaaaaagtcatttagaaaacttcagttttcggccagcgcgtcgagggaggggccagcgacacatggcctagtaaccgtccggccgcggcgctggcttaagccatggctgagggtagctggattcctcaggcccgggcgctcctacagcagtgcctgcacgcccggctgcaaattcgcccagccaatggggacgttgcggcccagtgggtggaggtccaaagaggactggtgatctacgtgtgctttttcaagggagctgataaagaacttcttcccaaaatggccgaagctggactgtactgctgccatctctggctcactgcaacctccctgcctgattctcctgcctcagcctgccgagtgcctgcgattacaggcgcgcgccgccacacctgactggttttcgtatttttttggtggagacggggtttcgctgtgttggccgggctggtctccagctcctaaccgcgagtgatccgccagcctcggcctcccgaggtgccgggattgcagacggagtctggttcacttagtgctcaatggtgcccaggctggagtgcagtggcgtgatctccgctcgctacaacctccacctcccagctgcctgccttggcctcccgaagtgccaagagtgcagcctctgcccggccgccaccccgtctgggaagtgaggagcgtctctgcctggctgcccattgtctgggacgtgagcagcccctctgcctggctgcccagtctggaaagtgaggagcgtctctgcccggccgccatcccatctaggaagtgaggagcgcctcttcccacccgccatcccatctaggaagtgaggagcttctctgcctggccgcccatcgtctgagatgtggggagcacctctgcccggccgcgaccccatttgggaggtgaggagcaactctgcccagccgccccgtctgagaagtgaggagaccctccgcctggcaaccgccccgtctgataagtaaggagcccctctgcccagcagccgccccgtctgagaagtgaggagcccctctgcccagcagccaccctgtctgggaagtgaggagcgtctccgcccggcagccacccagtccgggagggaggtgggggggtcagtcccccgtccggccagccgccccgtccgggaggtgaggggcgcctctgcccagctgcccctactgggaagtgaggagcccctctgccccgccagccaccccgtccgggagggaggtgggggggtcagccccccgcccggccagccgccccgtccgggagggaggtgggggatcagccccccgcccggctagccgccccgtccgggaggcgaggggcgcctctgcccggctgcccctactgggaagtgaggagcccctctgcccggccagccgccccgtccaggagggaggtgggggggtcagccccccgcccggccagccgcccggtccgggagggaggtgggggggtcagccccccgcccggccagccgccccgtccgggaggttaggggcgcctctgcccggccgcccctactgggaagtgaggagcccctctgcccggccaccaccccgtctgggaggtgtacccaacagctcattgagagcgggcgatgatgacagtggcggctttgtggagtggaggtggggggaaggtggggaaaagattgagaaatcggatggttgccgtgtctgtgtagaaagaagtagacatgggagacttttcattttgttctgtactaagaaaaattcttaccctaaaacttaaagtataataaaaaaaaaaaaacttcagttttctaaaaattatatttaaaattgtaatcaaaatgtacctagtttataaatgtttattttgtacttaatacctgtaaagtcttagttttcagacattaagtgactgtatcatgttcggtttaataaagaatttatgcagcacca

SEQ ID NO: 6873 - DNA, 572 bp, Homo sapiens
agatccggggatggagggagccggagaagaggagtgagaaggccggggaggcaggccctgctgtcttcctgcaggccggcagcctgctggcagtggaggaccaggccgtccaggaaaggaaggggtcaggaggtcgggcagggcctcagcaggttcagacaagtccccagaagggagctgcaggcgccctcgagtccaggccccaagcctggctccggttgtccaaagagggcctaggccaggcctctgctgttagccgagcaagagctggacgagcttgctgatgaccgtatggcactggtgtcaggcatcagcttagatccagaagcagcgattggtgtgacaaaacggccacctcctaagtgggtggatggagtggatgaagtaagttccatattcagtatgatgttggccggattaagcagaagatgaaagaattggccagccttcatgacaagcatttaaacagacccaccctggatgacagcagcgaagaggaacatgccattgagataactacccaagagatcactcaggcatgaagaatcgagaggaaagatcccagcattttt

SEQ ID NO: 6874 - DNA, 1536 bp, Homo sapiens
gaccatttcagcttgaatttgacggcgaagtgttgtagagaccgtctccttgaatcattgcaaagggaccggggaaagatgagggggctccctctgtggatttatcttgctgagggatatagacctgcagctaactggatttgatttataagagagaaatctgcagtcaatgcccactcttgccacactgctaatatggaaaacagaatgttcaataggatatggtctgataaatagtgatgattgaagatgctgctccaatacatgtgaaatcaatgggagatatctgctgtctgaagatctttcagagcttttctcgacaagctcccctgtaagaaatcggaggtatattctaccattatacagtctttctcaagtggatataaatacgtttgcctcactgtaaccagacaactagacaactaatgtgggaccatggcactgcccagatgcacgtggccaaattatgtttggagagcagtgatggcatgcttggtacaccggggattgggtgccccattgactctctgtatgttgggatgtttgcttcaggctggccatgtgctatcacaaaaattggatgatgtggacccactggtggctaccaactttggaaagataagagggattaagaaggaactcaataatgaaattttggggcctgttattcaatttcttggggttccatatgcagccccaccaacaggggaacgtcgttttcagcctccagaaccaccatctccctggtcagatatcagaaatgccactcaatttgctcctgtgtgtccccagaatatcattgatggcagattgccagaagtcatgcttcctgtgtggtttactaataacttggatgtggtttcatcatatgtgcaagaccagagcgaagactgcctatatttaaatatatatgtcccgactgaggatgtaaaaagaatatccaaggaatgtgccagaaagcccggcaagaaaatatgtagaaaaggaggtccccttacaaagaaacagacagatgatttaggtgataatgacggtgctgaagatgaagatattcgggacagtgggggtcccaaaccagtgatggtgtatatccatggtggctcatatatggaaggtactggaaatttatatgatggaagtgtcttggcaagttatggcaatgtgatcgtcatcacagtcaactatcgacttggagtactcggtttcttgagtacaggcgatcaggctgcaaaggggaactatggactccttgatctcatacaagctttaagatggactagtgaaaacattggattctttggtggtgaccccttaagaatcactgtttttggatctggtgctgggggttcatgtgtcaacctgctgactttatcccattattctgaaggtaaccgttggagcaattcaaccaaaggactttttcaacgagcaatagctcaaagtggaacagccctttccagctgggctgttagttttcaacctgcaaaatatgctagaatgttggccacaaaagttggttgcaatgtttcagataca

SEQ ID NO: 6875 - DNA, 1079 bp, Homo sapiens
ctgggtgtacagcgtcctcgaaaccacgagcaagtgagcagatcctccgaggcaccagggactccagcccatgccatggcggattctgagcgcctctcggctcctggctgctgggccgcctgcaccaacttctcgcgcactcgaaagggaatcctcctgtttgctgagattatattatgcctggtgatcctgatctgcttcagtgcctccacaccaggctactcctccctgtcggtgattgagatgatccttgctgctattttctttgttgtctacatgtgtgacctgcacaccaagataccattcatcaactggccctggagtgatttcttccgaaccctcatagcggcaatcctctacctgatcacctccattgttgtccttgttgagagaggaaaccactccaaaatcgtcgcaggggtactgggcctaatcgctacgtgcctctttggctatgatgcctatgtcaccttccccgttcggcagccaagacatacagcagcccccactgaccccgcagatggcccggtgtaggcgaacttccctcatttctctctgcaatctgcaaataactcctccattgaaataactcctccccaccccaacaacaacattcccagcagaccaactcccaccccctctttgaggtaaaagtgcctttattgggagacttttgtcttccagcctgccaatcaaccctcctgggtgtggccaccatatgtgtgtgcctaggtcctccttctgcacgatccaataggagacaccagttctgactgaaccatgcccccacctaagtcacaaaatgagggaagtggggagttagatttcagagtccaggccctaggttgggacccactccaaataatctcctcggtgtgggtggtggttctatagagggataaatgaataataaacattgttaaaatatacgataatgaataaagtaatcctttcatcaaatgtgggtaaatttcaagcatcaggagggggaaatggagtggaaacagctggggcaaggaggcaaagaagccaggcctgttttacaacaaatattaaattacttcaataatacaaacgag

SEQ ID NO: 6876 - DNA, 2157 bp, Homo sapiens
ctacttccagcgaaagcccgcgtcggagggcgactgccggcgagcgggagcggcgcagggctcggggcgggcggccagctcagccccagcgccagcgccagcgccagcgcgggctgagctcgcgggaagaagggagactccaggcgcgacagcagccgcggctcctagccccagcgtcgcccaatgctcccgacccgcgggaaaagacgaagaggctctgtggtgcccaaggccctggaacggccgcagagagcaaccgctgccggctgctttgtccagcccgaggcccagcgaacgcgcagagagcgggcgctccgaggactcgccgagggagcgccgagggaacctgctcgccgcgtctccgcccgcccgccggccctcgggctttgtgccgcactgggctccggcgcagaagagtcagccggcactcgagcgccgaggggggcaccgcgcccgccaccagcccgagtggagtcagtcggcaaggcagccgcacgctggaggtagagggaagagcgagctagcgcgagccgggaaggaagccaccaggccaaggcggtggaacgcgcgctccgagggagctcagagccgagcgggaggactgtcagcttccacccagcccccgggctcttgcccccaactccactggagcgctgagctcggaacttgaaaactctctgctccccaggcttcccccgactctcatctcccttgccttgcggaggctggggctcttccctgttctccggccccctgcgcttgggggaagactttaactaggggcgcgcagatgtgtgaggccttttattgtgagagtggacagacatccgagatttcagagccccatattcgagccccgtggaatcccgcggcccccagccagagccagcatgcagaacagtcacagcggagtgaatcagctcggtggtgtctttgtcaacgggcggccactgccggactccacccggcagaagattgtagagctagctcacagcggggcccggccgtgcgacatttcccgaattctgcaggtgtccaacggatgtgtgagtaaaattctgggcaggtattacgagactggctccatcagacccagggcaatcggtggtagtaaaccgagagtagcgactccagaagttgtaagcaaaatagcccagtataagcgggagtgcccgtccatctttgcttgggaaatccgagacagattactgtccgagggggtctgtaccaacgataacataccaagcgtgtcatcaataaacagagttcttcgcaacctggctagcgaaaagcaacagatgggcgcagacggcatgtatgataaactaaggatgttgaacgggcagaccggaagctggggcacccgccctggttggtatccggggacttcggtgccagggcaacctacgcaagatggctgccagcaacaggaaggagggggagagaataccaactccatcagttccaacggagaagattcagatgaggctcaaatgcgacttcagctgaagcggaagctgcaaagaaatagaacatcctttacccaagagcaaattgaggccctggagaaagagtttgagagaacccattatccagatgtgtttgcccgagaaagactagcagccaaaatagatctacctgaagcaagaatacaggtatggttttctaatcgaagggccaaatggagaagagaagaaaaactgaggaatcagagaagacaggccagcaacacacctagtcatattcctatcagcagtagtttcagcaccagtgtctaccaaccaattccacaacccaccacaccggtttcctccttcacatctggctccatgttgggccgaacagacacagccctcacaaacacctacagcgctctgccgcctatgcccagcttcaccatggcaaataacctgcctatgcaacccccagtccccagccagacctcctcatactcctgcatgctgcccaccagcccttcggtgaatgggcggagttatgatacctacacccccccacatatgcagacacacatgaacagtcagccaatgggcacctcgggcaccacttcaacaggactcatttcccctggtgtgtcagttccagttcaagttcccggaagtgaacctgatatgtctcaatactggccaagattacagt

SEQ ID NO: 6877 - DNA, 5871 bp, Homo sapiens
gcggccgcttcccaccgtccctctccccttactggcagagcgcgctgcgggcggactcccgggcccggagcagcccaccggccaccccaccgcccacccggctcccggtgtctcctcccggccgctctacccagcaactttccgtgctttgttccccgactggaaatgctttacggaagcgtcttggacagggtctccgccaggcgacaagagctcggtgctgagatgtgttacgttctcatctccccatcaattatggatggaaacaaataaggaagagtcaattttgctgagccccttctccggcaacgagaggcgttctgcagccgggagggagccgccgctcgcgccggcagccgctggcaggggcatggtgaggaggaaggtagctcagtggcatttctgagcaggggccaccctgacttcaccttggcccaccatgagggtcttcctgctttgtgcctacatactgctgctgatggtttcccagttgagggcagtcagctttcctgaagatgatgaaccccttaatactgtcgactatcactattcaaggcaatatccggtttttagaggacgcccttcaggcaatgaatcgcagcacaggctggactttcagctgatgttgaaaattcgagacacactttatattgctggcagggatcaagtttatacagtaaacttaaatgaaatgcccaaaacagaagtaatacccaacaagaaactgacatggcgatcaagacaacaggatcgagaaaactgtgctatgaaaggcaagcataaagatgaatgccacaactttatcaaagtatttgttccaagaaacgatgagatggtttttgtttgtggtaccaatgcattcaatcccatgtgtagatactacaggttgagtaccttagaatatgatggggaagaaattagtggcctggcaagatgcccatttgatgccagacaaaccaatgttgccctctttgctgatgggaagctgtattctgccacagtggctgacttcttggccagcgatgccgttatttatcgaagcatgggtgatggatctgcccttcgcacaataaaatatgattccaaatggataaaagagccacactttcttcatgccatagaatatggaaactatgtctatttcttctttcgagaaatcgctgtcgaacataataatttaggcaaggctgtgtattcccgcgtggcccgcatatgtaaaaacgacatgggtggttcccagcgggtcctggagaaacactggacttcatttctaaaggctcggctgaactgttctgtccctggagattcgtttttctactttgatgttctgcagtctattacagacataatacaaatcaatggcatccccactgtggtcggggtgtttaccacgcagctcaatagcatccctggttctgctgtctgtgcatttagcatggatgacattgaaaaagtattcaaaggacggtttaaggaacagaaaactccagattctgtttggacagcagttcccgaagacaaagtgccaaagccaaggcctggctgttgtgcaaaacacggccttgccgaagcttataaaacctccatcgatttcccggatgaaactctgtcattcatcaaatctcatcccctgatggactctgccgttccacccattgccgatgagccctggttcacaaagactcgggtcaggtacagactgacggccatctcagtggaccattcagccggaccctaccagaactacacagtcatctttgttggctctgaagctggcatggtacttaaagttctggcaaagaccagtcctttctctttgaacgacagcgtattactggaagagattgaagcctacaaccatgcaaagtgcagtgctgagaatgaggaagacaaaaaggtcatctcattacagttggataaagatcaccacgctttatatgtggcgttctctagctgcattatccgcatccccctcagtcgctgtgagcgttatggatcatgtaaaaagtcttgtattgcatctcgtgacccgtattgtggctggttaagccagggatcctgtggtagagtgaccccagggatgcttgctgaaggatatgaacaagacacagaattcggcaacacagctcatctaggggactgccatggtgtacgatgggaagtccagtctggagagtccaaccagatggtccacatgaatgtcctcatcacctgtgtctttgctgcttttgttttgggggcattcattgcaggtgtggcagtatactgctatcgagacatgtttgttcggaaaaacagaaagatccataaagatgcagagtccgcccagtcatgcacagactccagtggaagttttgccaaactgaatggtctctttgacagccctgtcaaggaataccaacagaatattgattctcctaaactgtatagtaacctgctaaccagtcggaaagagctaccacccaatggagatactaaatccatggtaatggaccatcgagggcaacctccagagttggctgctcttcctactcctgagtctacacccgtgcttcaccagaagaccctgcaggccatgaagagccactcagaaaaggcccatggccatggagcttcaaggaaagaaacccctcagttttttccgtctagtccgccacctcattccccattaagtcatgggcatatccccagtgccattgttcttccaaatgctacccatgactacaacacgtctttctcaaactccaatgctcacaaagctgaaaagaagcttcaaaacattgatcaccctctcacaaagtcatccagtaagagagatcaccggcgttctgttgattccagaaataccctcaatgatctcctgaagcatctgaatgacccaaatagtaaccccaaagccatcatgggagacatccagatggcacaccagaacttaatgctggatcccatgggatcgatgtctgaggtcccacctaaagtccctaaccgggaggcatcgctatactcccctccttcaactctccccagaaatagcccaaccaagcgagtggatgtccccaccactcctggagtcccaatgacttctctggaaagacaaagaggttatcacaaaaattcctcccagaggcactctatatctgctatgcctaaaaacttaaactcaccaaatggtgttttgttatccagacagcctagtatgaaccgtggaggatatatgcccacccccactggggcgaaggtggactatattcagggaacaccagtgagtgttcatctgcagccttccctctccagacagagcagctacaccagtaatggcactcttcctaggacgggactaaagaggacgccgtccttaaaacctgacgtgccaccaaagccttcctttgttcctcaaaccccatctgtcagaccactgaacaaatacacatactaggcctcaagtgtgctattcccatgtggctttatcctgtccgtgttgttgagaggatgatgttgtaagggtaccttaaaacaagagactcgcttgtattttaagagaaccaagtggccaaagaaactctttctaactttggcaacatcagaacttgccacatgtagctactgcagcaaggcttctgtgtacttgcctgaaaacaaaggaaggtgctggtcattccatttcttttgtttgaagctaaagagatgtgtagctcacaggggctaccttaccagtataaagagctgataacagtactcagaagaatctgtgaacaaatacttgaaaatgggttcaatgtagactgccattatgtgtggtcttcccattaaatgtgaacattttaatatgtatgcattcaccttgcctcttgcacaaatgtcaaaaaaaagatggtaatatctcaaagaaatgaacttgtagattaccaagcagtttgctaaaaattcaatctttgacccaagctgtagcatttttttttcatgtgtggcatctttttcatgccaccaacaaacttgttgtgtgtgtgcgtgtgtgtgtgtgtgtgtgtgtgtgtgtgtgtgttctgtacccactaggatttgtttaggtgcccattgcatctttttgtgctatggagttgtttacattaagcatgaccgaacgagagacaatactatttcccacaggagtccattgggttcagctttgaaagaggaatagaatcgaggctcctttgaccatcaaaatgatgaactttacttatgtggtacccaatgccagaatgtaagagttgcaagtgattttgtgctgctattcattaaaacttgtattccagtcttgccagcttaaggagatcaagatattaagaggtatccttgatttattttccagtattcagtagtaaaattttcctgtccactgtgaatcaaagcctgagtcactctatttaaccttggacacactaataaggttttattttgattgtgttcgtttccccccccccaatagtaaaatttctcctcctttaactcctcctaccccccaaggtaagaaacaaaaaacaaacaaacaaacaaaaatagaagacaaaagaaagacatatgaaaggaattgtaattggcttaacagaaacagtctgtaaaaacctaacagtggtgcaatcatgttgtctgtgttgtgttatgtgagaattttctcctaagtcatgcaggtaatgacaatatactgtaaataccacatgtgagtttacctgaatctgtgcattttgtgccttattcatgagaatgatagaagtactaaaatctgtcaagtgttttcagtatagcacattatttactgagtgccagttgtaaatgtttttcaaccagcacctaaaaagactcttttcaaaaaatcacagaaacaacctaggacaattatttgttacataatccgacctcatagcagcattacattctttgccgtgataaacattccactcctgctttcctaaggatgaaacagtgataatgtgaactcaaatgaggtttcctgggtaatgtgacacctgcagaaactatagagcgtcatttatacgtagtttggcagaaaccacttacggctgatgatgcgcaaccctgctgactgtttcagttaatatgctgcacaccacacacttgtttagtgaaccaaatctagaaagtaccaaggcagaggtatgctcctgctgtaatcaggcaaatgagttcaactggatttcttttgacaatactgttggtacctattacttgggggaggacatgttgcagaagaccagatcatttttatacagaatgtgaaatactgatacagttattcttttttttaaagaacattgttttataaagaacgtgatttccagtgatctctggaagcgctaaagctaaaatttctgttcttgaaacacttcagctttgcaactaaaatattacagattaataataaattaaaccaaccaatgataaacactactcagtccaccaacaacaaacgtgtttgaattcaccttaccaatattaatcccagcgtgtgtaaaacagaacagtaactctatgtgaccccagataacattttgtaacattgtgcttccttgtagtttgtaatgtgagttcaatcagtatttatgttgaaatttctaacattaaatctagtctctatcctgttaatttaatttttaaatgctttatccatttgtgcaaaggtaaacgcagattgtatcttttttaatggtacggcataaaaagtaaccctcaagtgaagtgtctctatactgttttatagagtactttaacatgaatagataccttgtaaacttgtattgtggatgtgtaaataatatgtactttgggtttttaacaccgcatgtaaagtcaaaataaaatatacaaatcatt

SEQ ID NO: 6878 - DNA, 1409 bp, Homo sapiens
cccgccccttcgcggcgcttcctagttcggctggttcttctgtcgccggcttcagcagcccgcgcccgggcagatgctgttcccaaaactgctaatacactaccttctaaagaagctataacagttcagcaaaaacagatgcctttctgtgacaaagacaggacattgatgacacctgtgcagaatcttgaacaaagctatatgccacctgactcctcaagtccagaaaataaaagtttagaagttagtgatacacgttttcacagtttttcattttatgaattgaagaatgtcacaaataactttgatgaacgacccatttctgttggtggtaataaaatgggagagggaggatttggagttgtatataaaggctacgtaaataacacaactgtggcagtgaagaagcttgcagcaatggttgacattactactgaagaactgaaacagcagtttgatcaagaaataaaagtaatggcaaagtgtcaacatgaaaacttagtagaactacttggtttctcaagtgatggagatgacctctgcttagtatatgtttacatgcctaatggttcattgctagacagactctcttgcttggatggtactccaccactttcttggcacatgagatgcaagattgctcagggtgcagctaatggcatcaattttctacatgaaaatcatcatattcatagagatattaaaagtgcaaatatcttactggatgaagcttttactgctaaaatatctgactttggccttgcacgggcttctgagaagtttgcccagacagtcatgactagcagaattgtgggaacaacagcttatatggcaccagaagctttgcgtggagaaataacacccaaatctgatatttacagctttggtgtggttttactagaaataataactggacttccagctgtggatgaacaccgtgaacctcagttattgctagatattaaagaagaaattgaagatgaagaaaagacaattgaagattatattgataaaaagatgaatgatgctgattccacttcagttgaagctatgtactctgttgctagtcaatgtctgcatgaaaagaaaaataagagaccagacattaagaaggttcaacagctgctgcaagagatgacagcttcttaaaactttattggaaaagactcttgactttttatatacacctatctcaaccatttttttaactgatttttttcctaaatattcttctttacctttaacaaggcataggctgttgcaggacagtggttattaaagcatgggttgaacttccaaaatataaaaatagagccaccatatcaacacttagccctacccattagtatcacccccagttcttacagtaatccctgagaaatctccttcaagcatcaccaaacacagtt

SEQ ID NO: 6879 - DNA, 1688 bp, Homo sapiens
agacggacactgtgccggggcgagctgacaggagttcacggctgcgatagaacatggagatgtcatgggcgcgacagagcctggcggggataccagcagcgtgtgatgagttccacccgttcatcgaggcactgctgcctcacgtccgcgctttctcctacacctggttcaacctgcaggcgcggaagcgcaagtacttcaagaagcatgaaaagcggatgtcgaaggacgaggagcgggcggtgaaggacgagctgctgggcgagaagcccgagatcaagcagaagtgggcatcccggctgctggccaagctgcgcaaggacatccggcccgagttccgcgaggacttcgtgctgaccatcacgggcaagaagcccccctgctgcgtgctctccaaccccgaccagaagggcaagatccggcggattgactgcctgcgccaggctgacaaggtgtggcggctggacctggtcatggtgattttgtttaaggggatccccctggaaagtactgatggggagcggctctacaagtcgcctcagtgctcgaaccccggcctgtgcgtccagccacatcacattggagtcacaatcaaagaactggatctttatctggcttactttgtccacactccggaatccggacaatcagatagttcaaaccagcaaggagatgcggacatcaaaccactgcccaacgggcacttaagtttccaggactgttttgtgacttccggggtctggaatgtgacggagctggtgtatcacagactcctgttgcaacagcatcagggcccaacttctccctggcggacctggagagtcccagctactacaacatcaaccaggtgaccctggggcggcggtccatcacctcccctccttccaccagcaccaccaagcgccccaagtccatcgatgacagtgagatggagagccctgttgatgacgtgttctatcccgggacaggccgttccccagcagctggcagcagccagtccagcgggtggcccaacgatgtggatgcaggcccggcttctctaaagaagtcaggaaagctggacttctgcagtgccctctcctctcagggcagctccccgcgcatggctttcacccaccacccgctgcctgtgcttgctggagtcagaccagggagcccccgggccacagcatcagccctgcacttcccctccacgtccatcatccagcagtcgagcccgtatttcacgcacccgaccatccgctaccaccaccaccacgggcaggactcactgaaggagtttgtgcagtttgtgtgctcggatggctcgggccaggccaccggacagcccaacggtagcggccagggcaaagtcccggggtcatttttgctaccgccgccgcctccagtggccagacctgtgccccttcctatgcctgattccaaatccaccagcactgccccagacggcgccgccttgactcctccatcaccttcattcgcaacgacaggcgcctcctctgccaaccggtttgtcagcatcggaccccgggacggcaactttctgaacatcccacagcagtctcagtcctggttcctctgataagatcgacaaaagaaacaacaaaatgagaagaagaggttcctcgaaaggggggagaagaaattttgagaatggaaaaatcccccagcccagcccagccccaccg

SEQ ID NO: 6880 - DNA, 1240 bp, Homo sapiens
aggacagggaagagcgggcgctatggggagccggacgccagagtcccctctccacgccgtgcagctgcgctggggcccccggcgccgacccccgctgctgccgctgctgttgctgctgctgccgccgccacccagggtcgggggcttcaacttagacgcggaggccccagcagtactctcggggcccccgggctccttcttcggattctcagtggagttttaccggccgggaacagacgggctctcggctcctggagtcctcactgtccagctcagagggagaggagcctgtggagtacaagtccttgcagtggttcggggcaacagttcgagcccatggctcctccatcttggcatgcgctccactgtacagctggcgcacagagaaggagccactgagcgaccccgtgggcacctgctacctctccacagataacttcacccgaattctggagtatgcaccctgccgctcagatttcagctgggcagcaggacagggttactgccaaggaggcttcagtgccgagttcaccaagactggccgtgtggttttaggtggaccaggaagctatttctggcaaggccagatcctgtctgccactcaggagcagattgcagaatcttattaccccgagtacctgatcaacctggttcaggggcagctgcagactcgccaggccagttccatctatgatgacagctacctaggatactctgtggctgttggtgaattcagtggtgatgacacagaagactttgttgctggtgtgcccaaagggaacctcacttacggctatgtcaccatccttaatggctcagacattcgatccctctacaacttctcaggggaacagatggcctcctactttggctatgcagtggccgccacagacgtcaatggggatgggctggatgacttgctggtgggggcacccctgctcatggatcggacccctgacgggcggcctcaggaggtgggcagggtctacgtctacctgcagcacccagccggcatagagcccacgcccacccttaccctcactggccatgatgagtttggccgatttggcagctccttgacccccctgggggacctggaccaggatggctacaatgatgtggccatcggggctccctttggtggggagacccagcagggagtagtgtttgtatttcctgggggcccaggagggctgggctctaagccttcccaggttctgcagcccctgtgggcagccag

SEQ ID NO: 6881 - DNA, 7243 bp, Homo sapiens
gcggccgcgggctcccgctaaccgcagcctccactcctctccccgcgcgccgcgcccccgccccgccccgccccgcccggtctcgccggccgagcgtccgttggtccttgagcgcgtccgacagtctgtctgttcgcgatcctgccggagccccgccgccgccggcttggattctgaaaccttccttgtatccctcctgagacatctttgctgcaagatcgaggctgtcctctggtgagaaggtggtgaggcttcccgtcatattccagctctgaacagcaacatggggtgcaaagtcctgctcaacattgggcagcagatgctgcggcggaaggtggtggactgtagccgggaggagacgcggctgtctcgctgcctgaacacttttgatctggtggccctcggggtgggcagcacactgggtgctggtgtctacgtcctggctggagctgtggcccgtgagaatgcaggccctgccattgtcatctccttcctgatcgctgcgctggcctcagtgctggctggcctgtgctatggcgagtttggtgctcgggtccccaagacgggctcagcttacctctacagctatgtcaccgttggagagctctgggccttcatcaccggctggaacttaatcctctcctacatcatcggtacttcaagcgtagcgagggcctggagcgccaccttcgacgagctgataggcagacccatcggggagttctcacggacacacatgactctgaacgcccccggcgtgctggctgaaaaccccgacatattcgcagtgatcataattctcatcttgacaggacttttaactcttggtgtgaaagagtcggccatggtcaacaaaatattcacttgtattaacgtcctggtcctgggcttcataatggtgtcaggatttgtgaaaggatcggttaaaaactggcagctcacggaggaggattttgggaacacatcaggccgtctctgtttgaacaatgacacaaaagaagggaagcccggtgttggtggattcatgcccttcgggttctctggtgtcctgtcgggggcagcgacttgcttctatgccttcgtgggctttgactgcatcgccaccacaggtgaagaggtgaagaacccacagaaggccatccccgtggggatcgtggcgtccctcttgatctgcttcatcgcctactttggggtgtcggctgccctcacgctcatgatgccctacttctgcctggacaataacagccccctgcccgacgcctttaagcacgtgggctgggaaggtgccaagtacgcagtggccgtgggctccctctgcgctctttccgccagtcttctaggttccatgtttcccatgcctcgggttatctatgccatggctgaggatggactgctatttaaattcttagccaacgtcaatgataggaccaaaacaccaataatcgccacattagcctcgggtgccgttgctgctgtgatggccttcctctttgacctgaaggacttggtggacctcatgtccattggcactctcctggcttactcgttggtggctgcctgtgtgttggtcttacggtaccagccagagcagcctaacctggtataccagatggccagtacttccgacgagttagatccagcagaccaaaatgaattggcaagcaccaatgattcccagctgggctttttaccagaggcagagatgttctctttgaaaaccatactctcacccaaaaacatggagccttccaaaatctctgggctaattgtgaacatttcaaccagcctcatagctgttctcatcatcaccttctgcattgtgaccgtgcttggaagggaggctctcaccaaaggggcgctgtgggcagtctttctgctcgcagggtctgccctcctctgtgccgtggtcacgggcgtcatctggaggcagcccgagagcaagaccaagctctcatttaaggttcccttcctgccagtgctccccatcctgagcatcttcgtgaacgtctatctcatgatgcagctggaccagggcacctgggtccggtttgctgtgtggatgctgataggcttcatcatctactttggctatggcctgtggcacagcgaggaggcgtccctggatgccgaccaagcaaggactcctgacggcaacttggaccagtgcaagtgacgcacagccccgccccccggaggtggcagcagccccgagggacgcccccagaggaccgggaggcaccccaccctccccaccagtgcaacagaaaccacctgcgtccacaccctcactgcagccaaaggtgcaattacttgacctgcagccccagcccaccctcggctctgcagccggttctccgggccctggtcacctccagacagctgcctggccggggccactaggctgcggctggccactgtgtctcctcacttctctgaacaaagcagttcctcccctaccagctcagccccgagctgccgcagcctcaggcagaacggaggtcaccttctctccttatcttgggaaccaggccttcctcccggggactgttctgggattgaaattgtgcatactccaaactttcgcagccatcttcccgctcagccccagacacccagcaatcaagccagatgagtaccacaaaacagtgtgtccccagcagctccccaccccagagccaaatgacagtagtgcacttaaaaaggaaaatcaggcctgttgtccttctccggttgcattcagatgggtcattagggccggaccctgcctgccccttggcttctcagggctttgctctgacaccatgacagctgcccggggctgagggcagctggctccactcaaatgaggaagaagggatcactcccattagggcctgctttgcttatgcatgtgtgtgcacatgcatgtaaaccagggaccttcagctcacggcctccaggcctgggccagttcttgctgctcctgccgtctcccccgactggctgtgtcctgagtaactggaacatgagacagtatctgcaggactggccccatggtggccgagtcagaagtctgtttcctgtgagtcgccaccgttcactcagtcttgccctcccatgctttggagccagtctggtggctcctgtaaggttctcaaggctggtggcagctcagtctggggtcaggacatgtcggggtcatgcgtttctggccctgacataagctgtctggcctctctgtgacatgatgaaattgaaatcaatccacagtccatgaaattgtgacactccaccagattaagttagggcataacattaacttggaaatggccatgtcatcacccctgcggctgtcctatagctgagatgcgtgggtcgcaggggaggtgatttctaggcatattgctgtcccttttgtgtatctgtcatccggatgcttcggaccccacgcctctgcaagtgggagagacccgagcatcctccccacccccatagctccagtgcacgccacccccgtcttgcctgggtcggggcctgcggccagcaccatttcacacacactccttgtagatgggagccagaggaaacctgaacgtgggtggagcgttccactgagtctacttcaggagacagaaggcccatgctgatgggggaggaggagggatgtgggcattttggacaccaggggaaatggaaatgctgctttcaaaacttagtttcctttccatttcttcctagtctggcctttgacacaaatctggtagaaagaagcctgataaattgagggcacttgtaccctccctgtgcccccagaaggttcttggagagaagtgcaagaatttgtgaacacggcggtggagggcgggtggatggccatgggctgagcctccgtatcaggcctgctcaccttgctgggagctttattctgatctcattttgaatgttccagagggagcatcataagagcccagagctccgatttccaaagagtgatattgacatttatggagattggtgttgtaacatattttgataaatactaacttattttgttggggttttggttgtctcttgtcttaggacctggtagttatttgcttgatttttttttccgttattttctacataggcaaagagaattcgagggatagacagtctccaagaaaagtgaagtggtgggagagaattgcttttttcttttttttcttttctctagtttttctttctggctgagatttccgtgcaagacagcacccaatagactatttagagttgacatttgacattttaatgggcgccatggctcattttgtagattgagaaggtgcgtctcccctgctccaagtctcatcatgacagcgtgctgacagctgggagtctgtggccttcctcacgcagaggccttaaagctggacacagaagcacgcctaggctgggcagggatgggacccatgccccctccttagaggacgggcttcctggttaggaaaggacacgtgggggtgccttgcataatagttcactggtcaccgtgcttttatgagtagtgtttttgtgcacttgccaggggttttctctctgtgtgagaggggagtgatttaagcaatggtgtctggagtaagccttacaattttaatagactttttcttatcatatccctcatttctttccctgaaataaaaatacacacaagcaaaaaaaaaatgatagtttcacatctcttagttcccttgcccaaacaagaatattcttagttccactggccaggattttcctacatagtcagaacttacacattactagaggcacacccaccaaggagtattgtgtctacttttatctgtgcaccagccacaaatacccacattggaaagacccatttgtgatgggtaaacatcccttcctgtctcccacaacccctgtgactgccctgcatgtgttcatgacctccgaaggcccaaattcatgaagcagcaaacccagcagatctccacccccctgcctcaggacctctgctgaagagggggatgaagtgggtctccagggaggcagtgggggccttgttggcagctggctcgggagccggcttacaggagggcagctctgcagttgggaggggcaccgtccggaggagaccaggcctctacacaccccccactctacttatcatccctgctcacacacccttgtccaaggctttatgcatcggatttatttttccaaatcaagaggacagtgatagatgcattttccccaggctgtctcagaaaggtcgctaaatgtatactgttgtcagaattgctgagatctccccccacttttggtttttgcagcagtaaaaactctttccactgtgacttattttctctctcaggcagccagccacctggtcccttgtgctgactctagcacagtggccaggatccaatacgagtccaggggtgaccgcaggatggtgggggcagcgggcttctccacctaccccagccaccaaggccctgacgcactgcctcctgcaccttcagcacatccctgtgcacagctggaagggtgcatggcccgctcacctttgttcagatgggtggaaacgctgatgataccagctcctccctgccgtgcccctgccacggagcaggcattgtgaactggctggtgtttgcagtcccacgtggcatggcctccagcccaacccacagtggagactggagacagggcaatgagtctggtggggggcacgtggacatgccccataggggccccacccagacttaacaggcaaggtcctgggcattgcgcgacgcaggactcaatgctaaagcaagcctgcctggctctgtgccagggcccctcttctgattcacacatcccatttttacacagacccttccttcttaataaaggctgacagttctgttggcagccaagaacccacaccatgaagacagggagtgaggggcctttgtgcccaactccagcacagctgcgttctggggtgtgtgagaggcatgttcgtgtctgtgcgctggtggtctcgtgagacagttccgaggacggggaaattgcagggtggtgggggcgtgaggcttatatgtggaactgatgcagagttcgcctgcagacggatctggatatacactatgtataattgttacgtgtaatttaaaatatatctgtttgccatcgtcatgagaagattatatgtaaggctctgaagggagagggagatgtacattctgccaggctcctggggaccttatccgagtcatgaaattgattactgttgatccagtggtgcaagaagctacactccatgtgtcatcacgcttatgactcctaatgtatttttaaggcaaaaaatgtcagccgactccatcttcacccctcgattcctcgagtccagcctttctgtgccagtgcttcactgagccacaacgctctcgccatcgggacccggctgggcctggagtctcggggcacagttgccatggagccctcctgggtcattctacaaatgtgctgagtgccagctgaaaaccccacaggagatggagtaccttggccaagcttaaagagaagattttctcagggtatttattagtgtgtccagcagggtcaggaagcaggatggaaagatgcactcagactgttaatttattaacaaggcaaatgattttgtgtttcttgatgacagactattaagtttgggacttattttcccatttgagaagttataatatatatttaagatgataagtttcctgcttaagttgtgcctttcagcttcaatgagtttaaggagcactaagggtaatgataccaatgagggttggtttattatcaaacctgaatagctgtggtttctccagtaaatattttcttctactgaacatggagccattattaagagttgtgtgttttttattatgtacatttgtatatttttttgcttgtttgatgttctatttttctaatagttttcttttagtttcttaaagttgtgatactagatttagattctgatgctaactgcaaatcaggttggtctctgctgggtctctcctgcttttattttactttaaggacaagtgtagttgtcgtccaccacctttcaaaaaatgtgaaactgccctgcctcccctttttgctgacaacactgtgtacattgaccacttcctaccatactttatgttgtaaaatcaaactcttttgtggtacattatctcatgcttctgcaaattcgaataaattctatggcttccatgtg

SEQ ID NO: 6882 - DNA, 1420 bp, Homo sapiens
agagaggggttgagtagtcccttcgcaagccctcatttcaccaggcccccggcttggggcgccttccttccccatggcgggacacctggcttcagattttgccttctcgccccctccaggtggtggaggtgatgggccaggggggccggagccgggctgggttgatcctcggacctggctaagcttccaaggccctcctggagggccaggaatcgggccgggggttgggccaggctctgaggtgtgggggattcccccatgccccccgccgtatgagttctgtggggggatggcgtactgtgggccccaggttggagtggggctagtgccccaaggcggcttggagacctctcagcctgagggcgaagcaggagtcggggtggagagcaactccgatggggcctccccggagccctgcaccgtcacccctggtgccgtgaagctggagaaggagaagctggagcaaaacccggaggagtcccaggacatcaaagctctgcagaaagaactcgagcaatttgccaagctcctgaagcagaagaggatcaccctgggatatacacaggccgatgtggggctcaccctgggggttctatttgggaaggtattcagccaaacgaccatctgccgctttgaggctctgcagcttagcttcaagaacatgtgtaagctgcggcccttgctgcagaagtgggtggaggaagctgacaacaatgaaaatcttcaggagatatgcaaagcagaaaccctcgtgcaggcccgaaagagaaagcgaaccagtatcgagaaccgagtgagaggcaacctggagaatttgttcctgcagtgcccgaaacccacactgcagcagatcagccacatcgcccagcagcttgggctcgagaaggatgtggtccgagtgtggttctgtaaccggcgccagaagggcaagcgatcaagcagcgactatgcacaacgagaggattttgaggctgctgggtctcctttctcagggggaccagtgtcctttcctctggccccagggccccattttggtaccccaggctatgggagccctcacttcactgcactgtactcctcggtccctttccctgagggggaagcctttccccctgtctctgtcaccactctgggctctcccatgcattcaaactgaggtgcctgcccttctaggaatgggggacagggggaggggaggagctagggaaagaaaacctggagtttgtgccagggtttttgggattaagttcttcattcactaaggaaggaattgggaacacaaagggtgggggcaggggagtttggggcaactggttggagggaaggtgaagttcaatgatgctcttgattttaatcccacatcatgtatcacttttttcttaaataaagaagcttgggacacagtagatagacacactta

SEQ ID NO: 6883 - DNA, 1455 bp, Homo sapiens
atgagcgaagagacggtccccgaggctgcctcgccgccgcccccgcaggggcagccttactttgaccgcttctcagaggacgaccccgagtacatgcgccttcgcaaccgggcggcggacctgcggcaggacttcaacctgatggagcagaagaagcgcgtcaccatgatcctgcagagtccctctttcagggaggagctggaaggcctcatccaggagcagatgaagaaggggaacaactcctccaacatctgggccctgcgacagatcgcggacttcatggccagcacctcccacgcagtcttcccgacatcttccatgaatgtctccatgatgacgcctatcaatgacctccacacagctgactccctgaacctggccaaaggggagcggctcatgcggtgcaagatcagcagtgtctaccgactcctggacctctatggctgggcccagctgagtgacacctatgtcacgttgagagtcagcaaggagcaggaccacttcctgatcagccctaagggagtttcttgcagtgaagtcacagcgtccagcctgatcaaggtgaacattctgggagaggtggtggagaagggcagcagctgcttcccagtggacaccacaggcttctgtctgcactcggccatctatgcagcgaggcccgacgtgcgctgcatcatccacctgcacacaccggccacagcagcggtgtcggccatgaagtggggcctcctgcctgtctcccacaatgccctgctggtgggggacatggcctattatgacttcaatggggaaatggagcaggaagccgatcggatcaacctgcagaagtgccttggacccacctgcaagtctacagagagccagctgatgtccaagggagacgaggataccaaagacgattcagaggagacggtgcccaaccccttcagccaactcactgaccaggagttggaggagtacaagaaagaggtggagaggaagaaactagaacttgatggagagaaagaaactgccccagaagagcctggctcacctgcaaagtctgcacctgcttctccagtgcagagcccagcgaaggaggcagagacaaagagccctttagtctctccttccaagtctttagagggtactaagaagacagaaacaagcaaagccgccaccacagagcccgaaacaacccagccggaaggggtggtggtcaacgggagggaggaggagcagacggcagaggaaatcctcagcaaaggcctgagccagatgaccaccagtgctgacacggatgttgatacctctaaggacaaaaccgagtcggtcaccagcggccccatgtccccagagggctcaccttccaagtctccctcaaagaagaaaaagaaattccgaaccccctccttcctgaaaaagagcaaaaagaaggagaaagtggagtcctgattcatgacacccttgggctcc

SEQ ID NO: 6884 - DNA, 2075 bp, Homo sapiens; identical to SEQ ID NO: 507

SEQ ID NO: 6885 - DNA, 5400 bp, Homo sapiens
gccagagcagcggggccgggcgcgcagggcctggccggagcccccactcccaggagtttcctctgcagagccccgcgccccccgcgccgggatttcagcccgatcccctcctctccctgcgcccagcctctccccagcatgtaaagtcttctgtctctcctcggagttggcggaggcggcaactttccattctcgccgccgggggccgggcagcagcgggcgcgcgggtcagcgctcagcacggcgggcagcgccgcgctgcgcaccgccgccgaccatgagcgaggacagccgcggagacagccgcgccgagagcgccaaggacctggagaagcagcttcgcctgcgcgtgtgcgtgctcagcgagctccagaagaccgagcgggactatgtgggcacgctggagttcctggtgtcggcattcttacacagaatgaaccagtgtgcagcatcaaaagttgacaaaaatgtgacagaagaaacagtgaagatgttgttctcaaacattgaagacatccttgcagtacataaagaattcttaaaagtcgtggaagaatgcttacaccccgaacctaatgctcaacaagaagtgggaacctgctttcttcactttaaagacaagtttcgtatctatgatgaatattgtagtaaccatgagaaggcacaaaaattacttcttgaactcaacaaaataagaacaatccggacatttcttttgaactgcatgctgcttggaggacggaagaacacagatgttcccttggaaggatatttagtaacaccaatacaaagaatatgcaagtaccctcttattttgaaggagttgctgaagcggactccacggaaacacagtgactatgcagcagtgatggaagccctccaagccatgaaagctgtctgttccaacataaacgaggccaagagacagatggagaagttagaagttttagaggaatggcagtctcacattgaaggctgggaggggtccaacatcactgacacctgcactgaaatgctaatgtgtggagtcttactgaaaatttcttctggaaatattcaagaacgggtgttttttcttttcgataatcttttggtgtactgcaaaagaaaacacagacggttgaagaacagcaaggcatctacagatggacatcggtacctttttcgtggccggatcaacacggaggtgatggaagtggagaatgtggatgatggcaccgctgatttccatagcagtggacacattgttgttaatggatggaagatacataacacagcaaaaaataaatggtttgtttgtatggcaaaaacacctgaagagaagcatgaatggtttgaagctattttgaaagaaagagaacggcggaaaggtttaaaattaggaatggagcaagatacctgggtcatgatctctgaacagggtgagaaactttataaaatgatgtgcagacaaggaaatctgatcaaagaccgaaagagaaaactgactacgttccctaaatgctttcttggaagcgaatttgtgtcatggctgttggaaattggagagattcacaggcctgaggaaggcgtgcacttgggacaagcattattagaaaatggaatcattcaccatgttactgataaacatcaattcaaaccagaacagatgttatatagatttcgctatgatgatggaacattttatccaagaaatgagatgcaggacgtgatttcaaagggtgtaagattatattgtcgtcttcatagcctttttactccagtgataagagataaagattaccatttaaggacctacaaatctgtggtcatggccaacaaactgatagactggttaattgcacagggagattgccgcaccagagaagaggcaatgatatttggcgttggactctgtgacaatggatttatgcaccatgtccttgaaaaaagcgaattcaaagatgaacccctacttttccgttttttttcggatgaggaaatggagggatcaaatatgaaacatcgacttatgaaacatgacttaaaagttgtggaaaatgttatagctaagtcattattgattaaatccaatgaaggcagctatggctttggattagaagacaaaaataaagttccaataataaagttggtagaaaagggatctaatgctgagatggctggcatggaagtcgggaaaaagatttttgctattaatggtgacctagtttttatgagacctttcaatgaagtggattgcttcctgaaatcgtgtttaaacagcagaaaacctctaagagttcttgtgagcacaaagccaagagagacagtgaaaattccagattcagctgatggacttggcttccagatccggggatttggcccttctgttgtgcatgctgtaggaagaggaactgtggctgcagcagctggtcttcaccctggacagtgcattatcaaggtgaatggaatcaatgtcagcaaagagacacatgccagtgtcattgcacacgttacagcctgcaggaagtacaggcggccaacgaagcaagattccatacaatgggtttataatagcattgagagtgctcaagaagaccttcaaaaatctcactccaagccccctggagatgaagcaggggatgcttttgactgtaaagtagaagaggttattgacaaattcaacactatggccatcattgatgggaagaaggagcatgtgagtctgacagtggacaatgtccacctggaatatggtgtcgtgtatgagtacgacagcacagctggcatcaagtgcaatgtggtggaaaagatgattgagcccaaaggtttcttcagcttaactgccaagattcttgaagccctggctaaaagtgatgagcattttgtacaaaactgtaccagcctaaattctctaaatgaagtgattcctactgaccttcagagtaaattcagtgccctttgcagtgaaagaattgaacacctatgtcagagaatatccagttataaaaaggtaagtgttctattgattttatacacaattattgttgaaatgtaccattttactgagatgataacattatataacattttagaacttgtaagaccacctaattctgaattcttcttttcttttctcccaactaagagaatgaaaactctcaatcagaaaaaagttactcacatgaagaaaactaatattcagttgcagttttctcgtgtactgaagaatagggcctggcctacttttaaacaggccaaatctaaaatctccccactgcacagcagtgatttctgccctaccaactgccatgtcaatgtgatggaagtttcttatcccaaaacatcaacctctttgggaagtgcatttggtgttcagtggaaactgagccctatggtgtacattcagcacaccatcacaaccatggcggccccttcaggtctgtctctgggacagcaggatggccatggtctcaggtatctgttagaacgtaagacatcagagggcataataccaacagacagtgacaatgagaagggagaaagaaacagcaaacgggtatgttttaatgtagcaggagatgaacaggaagattctggtcatgacaccatcagcaacagagactcttacagtttcagtgactgcaacagcaataggaattccatcgcctccttcaccagcatctgcagcagccagtgcagctcgtatttccacagtgatgaaatggactcagggagtgatgaacttcccttaagtgttcgcatatctcatgataaacaggacaagatacatagttgccttgagcatcttttcagccaggtggattcaattaccaatctcctaaaagggcaggctgttgtgagggcctttgaccaaaccaagtatctcactccaggccgaggattgcaagaatttcaacaggaaatggaaccaaagctgagttgtccaaaaaggctacggcttcatatcaagcaagatccttggaatcttcccagcagcgtccggactcttgctcagaacatcaggaaatttgttgaagaggtaaagtgtaggctactcctggctcttcttgaatattcagatagtgagacacagctccgtagagacatggttttctgccagactcttgtggccactgtctgtgccttctctgagcagctcatggcggccttgaaccagatgtttgacaacagcaaggaaaatgagatggaaacttgggaagccagcaggaggtggctggaccagatagcgaatgcaggtgttctttttcactttcagtcacttctgtcaccaaacttgacagatgaacaagccatgttagaagatacactggttgcactatttgatttggaaaaggtttccttttactttaaaccatcagaagaggaacctctggttgcaaatgttcctcttacatatcaagcagaaggaagtcggcaagctctgaaagtttacttctacattgatagttatcattttgaacaacttcctcaacggctgaaaaatggaggagggtttaaaattcatcctgttctttttgcacaagcactagagagcatggaaggatattattacagagacaatgtttctgtggaagaatttcaagctcagataaatgcagcctcactggaaaaggtcaaacagtacaaccagaagctcagggcattctacttggacaagtcaaattcaccaccaaactccacatccaaagctgcctatgtagataagctaatgaggcctctcaacgctttggatgaactttaccgactggtagcctcgtttatcagatccaagcgcacagctgcctgtgcaaacacagcttgcagtgcttctggggttggactgctgtcagtttcctcggagctgtgcaacaggctgggcgcctgccacatcatcatgtgcagcagcggtgtgcatcggtgcaccctgagcgtgacgctggagcaagccatcattctggccagaagccacggactgccacctcgttacatcatgcaggctacagatgtgatgcggaagcagggagcaagagttcagaacacagcgaagaatttgggagtcagagaccggactccacagtctgcaccaaggctgtacaagctgtgcgagccacctcccccagctggagaagaatgaaaagaactcccaagaaaccaggcaggcagaagctcctgaatgctggactagacaaactacatgctggctaaacattctccactgaagatacatcaatgcttttttttttttttttttctgtaaatctttcttcccattgcaaacaagtagtgatcagtttatactttgatatttatgctggaaatggatagaagttcaatcagacagttcagcttcacgaactgatgtctctctgtattgacattaagtattcacttttagagtaaaatccatccctgggacat

SEQ ID NO: 6886 - DNA, 8119 bp, Homo sapiens; identical to SEQ ID NO: 2621

SEQ ID NO: 6887 - DNA, 1032 bp, Homo sapiens
gagagttaaaccgaagggaatggtagagacggcaaccccgggcctgtgcccagctgaaggatgaactgagggcaggatcgttaaatgcagaagccgaagacagtggcctgggagaatctgggtccagagatgtcagctcttggaactgctttttcaagagaaggtggccgtaaagttgaattccctacagatccaaaggtagttgtttatgaaaagcctttctttgaaggaaaatgtgtggaactagaaacaggaatgtgtagttttgtcatggagggaggtgaaacagaagaggcgactggagacgatcatttgccgtttacgtcagtggggtctatgaaagttctaagaggcatttgggttgcatatgagaaacctggatttaccggtcatcagtatttgctagaagaaggagaatacagggactggaaagcctggggaggttacaatggagagcttcagtctttacgacctatattaggtgatttttcaaatgctcacatgataatgtacagtgaaaaaaactttggatccaaaggttccagtattgatgtattgggaattgttgctaatttaaaggagactggatatggagtgaagacacagtctattaatgtactgagtggagtatgggtagcctatgaaaatcctgacttcacaggagaacagtatatactggataaaggattttataccagttttgaggactggggaggcaaaaattgtaagatctcttctgttcaacctatatgtttggattctttcactggcccaaggagacgaaatcagattcacttgttttcagaaccacagtttcaaggtcacagtcaaagttttgaagaaacaacaagtcaaattgatgattcattttctaccaagtcttgcagagtttcaggaggcagctgggttgtatatgatggagaaaatttcactggtaatcaatacgtgttggaagaaggccattatccttgtctgtctgcaatgggatgcccgcctggagcaactttcaagtctcttcgttttatagatgtt

SEQ ID NO: 6888 - DNA, 4704 bp, Homo sapiens
tgttttctgcattctctcccagcggatctgattcctgttctgaagaattgaagttgagcatcgttagttaaattcagctgctgcctgactgtataccacagcaaaggctttggaaacatttttcagttaaaacaataatgactttcttggagtgtaatcccagtggaggctgttctacgtatagcctgaaagaatacttaactaccatacgcaattctgcagagaccttgtaaaaatcacactttacaccaaacaactgagtgattctgaattggttgggggaatcttagttgtagatatcaattcaccttcttgaagattcaaccactgctactcagagctgctgctgaaataccatgtctaagaactcagagttcatcaatctgtcatttttattagatcatgagaaggaaatgatcctgggcgtcctaaagagagatgaatatttgaaaaaagtggaggacaagagaataaggaagctgaaaaatgaactcttagaagcaaaacgtagaagtgggaaaactcaacaagaggccagcagagtttgtgttcactgtcacagaaacctgggcctaatctttgaccggggagacccttgtcaggcttgctcactgagggtatgcagggagtgtcgagttgcaggccccaatggcagctggaagtgcactgtctgtgacaaaatcgcgcagctaaggattataactggtgagtggttttttgaagaaaaggcaaaacgtttcaagcaagtcaatgttctcggcactgatgttgtccgacagtccattttaagaagaagtccaggagctgaagaagtacagagccaagagcaaacccgccaggatgcagaaaagtcagacacttcacctgttgctgggaagaaggccagccatgatgggcccaagagaaagggatttcttcttagcaagttcagatcggcaaccagaggagaaatcataactcccaaaactgacactgggcggagctatagcttggacttagacggtcaacattttcggagtttaaaatcacctcctggttcagacaggggaagcactggctcatcagatctcaatgaccaggaacctggtcctaggaccccgaagagcagtcggagcaatggtgtgaccccaggcactcagagttcaccagccccaagcacacgaactgtgacctcagtcatcagtagagagtatggttttgaaaattccatggatttggctgctattgaaggtacctctcaggagctcacaaagagtcaccgcagaaacacttctggcacaccttccatagcagtgtctggaacctctctctcctcagatcagagtcgatctgagttagatttgagtgagtcatttacagaagactcagaggatactgtaagcataagaagcaagtctgtccctggggctttagacaaggactccttggaagagactgaagaaagcattgatgccttagtgtcctcgcagttatctacaaacactcaccgtctggcaagtggcctatcaactagttctcaagcaggttctgacaggaagtggacctacctaaatgtgcctgatgctgactcagacactaccagccttaacagcatgatgagcgtttacagtgaaacgggagactatggcaacgtgaaagtcagtggtgaaatccttctccatatcagctactgctacaaaactggtgggctgtacatttttgtcaagaattgcagaaatctggccataggagatgaaaagaaacagaggacagatgcttatgtcaagtcatatcttcttcctgacaagtcccggaacaacaagcgtaagaccaaaatcagaacaggcaccaatccagaattcaatgaaacactaaagtacactatcagccatacccagctggaaacaagaactctgcagctctcagtctggcactatgatcgatttggacgtaatagcttcctcggggaagtagagattccttttgactcatggaactttgaaaatccaactgatgagtggtttgtgcttcaacccaaggtggagtttgctcctgatattggccttcaatacaaaggagagctgacagttgttttacgttacattcccccagaagagaacctgatgcttccaccagaacaactccaaggaaataagacttttaaaaagggaaagaagaaggagtcacctgtaatctctggaggaatactagaagtgttcatcaaagaggcaaagaatttgacagcagtgaagtcaggaggcacttctgatagctttgtgaagggctacctgctccctgatgatagcaaagccaccaagcacaaaactctggtaataaaaaagagtgttaaccctcagtggaatcatacattcatgttcagtggcatccatccccaggatataaagaatgtttgcctagaacttactatctgggacaaggaggccttttccagcaacatctttctgggaggagttcgtttgaattctggaagtggtgtgagccatgggaagaacgtggattggatggactctcagggggaagagcagcgcctttggcagaagatggccaacaaccctggaactccctttgagggtgtactcatgcttcgttccagcatgggaaaatgtaggctctaaagggaccagttctccaagaatgaggccaccaggacctatctggctgtcttttcctaccattagcaaactgagacctgggattctgcttccctgccatttctcacctgacagtgttgggacatgaggggagagatgtcagtagtatgaacatttagggtcttgctgagtgcctaaaaaacatatatttccatccaatcaaggccttcttgattggatgatagaaagtgtactacttgtcctgtcaacaagcaaattgtgcaaaggcttatagggtttatgccataaaagaaatggcacaagcctccatttgctaattataagttactttagatttcctcaaatcctttgaagagaaagaggaccactgagaaggtagatcacttgaaaagtcagaagaaaggatactggccaacttttactcaccctaggaatccacatgatctcaagaaggcatggtggagatggttgcttgagcaaggggattgtcctgttattgcagcaaacttgtggattaaccaagtagtatttcaagatggattgacagggctttctatgattactatagaatttatcatctaaatcagtttactttttagaacaaagagagctaaataactacatcagaacgattgatgttgattagaattgacctgggaaaattgggatgtagggtcaccctactgatgacctaagagagctctgttttaaacatttattttataaaatgttctaagccattaactaaaaggaaatgagatataatggtcaattgatataccttttcacattgtgttcactgacgagactagtttaatgaaaaaggaggtactctacctgctattttacttctgttcctcttctgccctgttatgggagagaatcaaagactccatctgctctcttcccccttgttttctccttcactgagtttttcttatctccttttgcagtggttaactattgtcacaataatgctgaatgaaaaaacacaccaaatgtcagtggcttaaaatgaccatcctttttctcacagttatgaagattggctatggcacctctgcttcctgctataggcctgaggttctagggcttcttatgcctcatcctctttaagccaaagggatagccagagcatcttgatggcagaagtgcaataagatgagccccactgctcgggtacattttcagcccctggttgtgtcatgtctactgatatctcattggtcaaaggaagtcagagggccaagatgaagaggcagggaaatatgcactgcccacagtgaagccatgacaagagtgaggatgcaggaaggcatgaagaattggggccaacagttcaatctaccataccttctctcacctggaattccagatgcttgagctacgaaacttagatgcaaagaaagttaaagctagaaggaacctcaggcccagttgctcattttgcagattccaaatgtgaatttcagagagctgagataacttgcccaaggccatatagaggctgtgactaaatctggacttaaatccagactatcaatcttaggccagtgttcttttttcaatatagtccttggcataatgctatgcttattaggtagataaaagggcttatgtcaagaaatttggagcagagtctgattacttgagcatgaacatacccgaccaaggtatgttctggagtcatattctagcctctgagctcattttttcatgcgagttcatataaaatcctcgaaagtttagaaactaggttttagtagtaacggagctagaatcatcttcgggcttattcctgctagttgttccatatttctagatttcatcttgaattttgaaaactgatttaagaatatatttagtattattattagtaagggaatacgcaatccagtttcaattttattcagaagtaggtcacctaattctagaaaatggttattagtctagtgtcgcttagcaaggtacttaaaagaaaatctgcacatatccttgtgctgcccttcttaaaaacagaaaacaaaaagtgtaagatcatcattgcttcccacataggaaaaataaaatgtcttcagacttgatgtgactc

SEQ ID NO: 6889 - DNA, 2032 bp, Homo sapiens
atgccggaccgcgcatgcgccgtcggcagcgtcgcgcgcgccctgtcgcgcagccggcgctacgtgtgcgcccgggacgcggacgcaagccgccgacggaggaggccttttaactacggcctctccatcgaagaaaaaaatgaaaatgatgaaaactcattaagcagttcctctgacagtagtgaagacaaggatgaaaaaataagtgaagaatgtgatattgaagaaaagactgaagtgaaagaagaaccggagcttcaaacaaaaagggaaatggaagaaagaacagtaactctagaaatccctgaagttctgaagaggcagctggaggatgattgttactacattaatcggaggaaacggttagtgcaacttccatgccacaccaacatcataacgattttggaatcctatgtgaagcattttgctatcagtgcagccttttcagccaatgagaggcctcgtcaccatcacgctatgccacatgccagcatgaacgtgccttatatcccagcagaaaagaatattgacctttgtaaggagatggtggatggattaagaataacctttgattacactctcccgttggttttactctatccctatgaacaagctcagtataaaaaggtgactgcatctaaggtttttcttgcaattaaggaaagtgccacaaatactaataggagccaggagaagctctctcccagcttacgtttgttgaatccatccaggccgcagtctacagagagtcagtcgaccagcggtgaaccagccacccctaaaaggcgcaaagccgagccgcaagcagtgcagtctctgaggcggtcctcgccccacaccgccaactgtgacaggctttctaagagcagcacctcacctcagcccaagcgctggcagcaggacatgtccaccagtgtgcccaagctgttcctgcacctggaaaagaagacacctgtgcatagcagatcatcttcacctactctgactcctagccaggaagggagtcctgtgtttgctggctttgaagggagaagaactaatgaaataaatgaggtcctctcctggaagctcgtacctgacaattacccaccaggtgaccagccacctccaccctcttacatttacggggcgcaacatttgctgcgattgtttgtcaaacttccagaaattcttggaaaaatgtcctttactgagaagaatctgaaggctttattgaagcactttgatctctttgtgaggtttttagcagaataccacgatgacttcttcccagagtcagcttacgtcgctgcctctgaggtgcattacagcaccaggaacccccaggcagtcaataagtgttgatggttctgtaagaacaactgctccatctagcatggtgttctgagttccaggtaaaaaattaacaaggtggtgggtttttatccagagcacaaaacaaagtgcccaccagggggctttgacagaggtgtgccctgttgtttgagttccccatgtactgtagttactctgtttagaattatttcctaggtgcctgaaagtgttctgacatgacacttgctactttgtaggccatctgtgatggcaggtaaaaagcaactgttcacagtgaaatgttcatggaagtgtacataggttaggccatttcagcagacattgcagttagtcagcaagaaccacattgtttcgttatttgttagcattaaacaaaattttttttgcaaattggtttcattctcttgatgaagctgagcaactgtccaacaaggtttagtttgtacttgaaaactgcaaagtagtctcaaagtattttagagggaatccatattgatggcaaaagaaaatttgcagctataatttgcttctgacggttccttctctgtgaaacattatttttggtgatctaaagaaagcattgcctttcttgtttgcaattttacagctatacttttttgtgtaatgttacggttccctttctgtaaaatgttctttttggtgatctaaataaagcctctcttgtttgaaaaaaaaa

SEQ ID NO: 6890 - DNA, 449 bp, Homo sapiens
gtatgtcaggttcttgaggagggggctcagggctcccctatccccggagagggagcaggggggctccgaggcctgagagaccactcatccgccctcctcacagcatgggccagtggaagatccgagcctactatgaaaactcaccacagcaggtcttctccactgagtttgaggtgaaggagtacgtgctgcccagtttcgaggtcatagtggagcctacagagaaattctactacatctataacgagaagggcctggaggtcaccatcaccgccaggttcctctacgggaagaaagtggagggaactgcctttgtcatcttcgggatccaggatggcgaacagaggatttccctgcctgaatccctcaagcgcattccgattgaggatggctcgggggaggttgtgctgagccggaaggtactgctggacggggtgcagaacccccga

SEQ ID NO: 6891 - DNA, 2978 bp, Homo sapiens; identical to SEQ ID NO: 1980

SEQ ID NO: 6892 - DNA, 970 bp, Homo sapiens
gaaggaaaaagagcaacagatccagggagcattcacctgccctgtctccaaacagccttgtgcctcacctacccccaacctcccagagggagcagctatttaaggggagcaggagtgcagaacaaacaagacggcctggggatacaactctggagtcctctgagagagccaccaaggaggagcaggggagcgacggccggggcagaagttgagaccacccagcagaggagctaggccagtccatctgcatttgtcacccaagaactcttaccatgaagaccctcctactgttggcagtgatcatgatctttggcctactgcaggcccatgggaatttggtgaatttccacagaatgatcaagttgacgacaggaaaggaagccgcactcagttatggcttctacggctgccactgtggcgtgggtggcagaggatcccccaaggatgcaacggatcgctgctgtgtcactcatgactgttgctacaaacgtctggagaaacgtggatgtggcaccaaatttctgagctacaagtttagcaactcggggagcagaatcacctgtgcaaaacaggactcctgcagaagtcaactgtgtgagtgtgataaggctgctgccacctgttttgctagaaacaagacgacctacaataaaaagtaccagtactattccaataaacactgcagagggagcacccctcgttgctgagtcccctcttccctggaaaccttccacccagtgctgaatttccctctctcataccctccctccctaccctaaccaagttccttggccatgcagaaagcatccctcacccatcctagaggccaggcaggagcccttctatacccacccagaatgagacatccagcagatttccagccttctactgctctcctccacctcaactccgtgcttaaccaaagaagctgtactccggggggtctcttctgaataaagcaattagcaaa

SEQ ID NO: 6893 - DNA, 6903 bp, Homo sapiens
ggagcggcggagccggagggaagcaaaggaccgtctgcgctgctgtccccgccccgcgcgctctgcgcccctcgtccctggcggtcgctccgaagctcagccctcttgcctgccccggagctgtcccgggctagccgagaagagagcggccggcaagtttgggcgcgcgcaggcggcgggccgcgggcactgggcgcctcgctggggcggggggaggtggctaccgctcccggcttggcgtcccgcgcgcacttcggcgatggcttttccgccgcggcgacggctgcgcctcggtccccgcggcctcccgcttcttctctcgggactcctgctacctctgtgccgcgccttcaacctagacgtggacagtcctgccgagtactctggccccgagggaagttacttcggcttcgccgtggatttcttcgtgcccagcgcgtcttcccggatgtttcttctcgtgggagctcccaaagcaaacaccacccagcctgggattgtggaaggagggcaggtcctcaaatgtgactggtcttctacccgccggtgccagccaattgaatttgatgcaacaggcaatagagattatgccaaggatgatccattggaatttaagtcccatcagtggtttggagcatctgtgaggtcgaaacaggataaaattttggcctgtgccccattgtaccattggagaactgagatgaaacaggagcgagagcctgttggaacatgctttcttcaagatggaacaaagactgttgagtatgctccatgtagatcacgtcagcttatttcggatcaagtggcagaaatcgtatctaaatacgaccccaatgtttacagcatcaagtataataaccaattagcaactcggactgcacaagctatttttgatgacagctatttgggttattctgtggctgtcggagatttcaatggtgatggcatagatgactttgtttcaggagttccaagagcagcaaggactttgggaatggtttatatttatgatgggaagaacatgtcctccttatacaattttactggcgagcagatggctgcatatttcggattttctgtagctgccactgacattaatggagatgattatgcagatgtgtttattggagcacctctcttcatggatcgtggctctgatggcaaactccaagaggtggggcaggtctcagtgtctctacagagagcttcaggagacttccagacgacaaagctgaatggatttgaggtctttgcacggtttggcagtgccatagctcctttgggagatctggaccaggatggtttcaatgatattgcaattgctgctccatatgggggtgaagataaaaaaggaattgtttatatcttcaatggaagatcaacaggcttgaacgcagtcccatctcaaatccttgaagggcagtgggctgctcgaagcatgccaccaagctttggctattcaatgaaaggagccacagatatagacaaaaatggatatccagacttaattgtaggagcttttggtgtagatcgagctatcttatacagggccagaccagttatcactgtaaatgctggtcttgaagtgtaccctagcattttaaatcaagacaataaaacctgctcactgcctggaacagctctcaaagtttcctgttttaatgttaggttctgcttaaaggcagatggcaaaggagtacttcccaggaaacttaatttccaggtggaacttcttttggataaactcaagcaaaagggagcaattcgacgagcactgtttctctacagcaggtccccaagtcactccaagaacatgactatttcaagggggggactgatgcagtgtgaggaattgatagcgtatctgcgggatgaatctgaatttagagacaaactcactccaattactatttttatggaatatcggttggattatagaacagctgctgatacaacaggcttgcaacccattcttaaccagttcacgcctgctaacattagtcgacaggctcacattctacttgactgtggtgaagacaatgtctgtaaacccaagctggaagtttctgtagatagtgatcaaaagaagatctatattggggatgacaaccctctgacattgattgttaaggctcagaatcaaggagaaggtgcctacgaagctgagctcatcgtttccattccactgcaggctgatttcatcggggttgtccgaaacaatgaagccttagcaagactttcctgtgcatttaagacagaaaaccaaactcgccaggtggtatgtgaccttggaaacccaatgaaggctggaactcaactcttagctggtcttcgtttcagtgtgcaccagcagtcagagatggatacttctgtgaaatttgacttacaaatccaaagctcaaatctatttgacaaagtaagcccagttgtatctcacaaagttgatcttgctgttttagctgcagttgagataagaggagtctcgagtcctgatcatgtctttcttccgattccaaactgggagcacaaggagaaccctgagactgaagaagatgttgggccagttgttcagcacatctatgagctgagaaacaatggtccaagttcattcagcaaggcaatgctccatcttcagtggccttacaaatataataataacactctgttgtatatccttcattatgatattgatggaccaatgaactgcacttcagatatggagatcaaccctttgagaattaagatctcatctttgcaaacaactgaaaagaatgacacggttgccgggcaaggtgagcgggaccatctcatcactaagcgggatcttgccctcagtgaaggagatattcacactttgggttgtggagttgctcagtgcttgaagattgtctgccaagttgggagattagacagaggaaagagtgcaatcttgtacgtaaagtcattactgtggactgagacttttatgaataaagaaaatcagaatcattcctattctctgaagtcgtctgcttcatttaatgtcatagagtttccttataagaatcttccaattgaggatatcaccaactccacattggttaccactaatgtcacctggggcattcagccagcgcccatgcctgtgcctgtgtgggtgatcattttagcagttctagcaggattgttgctactggctgttttggtatttgtaatgtacaggatgggcttttttaaacgggtccggccacctcaagaagaacaagaaagggagcagcttcaacctcatgaaaatggtgaaggaaactcagaaacttaactgcagtttttaagttatgctacatcttgacccactagaattagcaactttattatagatttaaactttcttcatgaggagtaaaaatccaaggctttactgctgatagtgctaattggcattaaccacaaaatgagaattatatttgtcaaccttctccttataaataagttcagacatacatttaataacatagggtgacttgtgtttttaggtatttaaataataaaatttcaagggatagtttttattcaatgtatataagacaggtagtgcctgatttactactttatataaaatagtacctccttcagttactgtttctgatttaatgtacggaactttatttgttgttgttgttgttgttgttgttgttgttttaaagcagtccaaatttggaccttagcaatcatgtcttttgtataggtacttaatgttaatacatattacactacagtttacttttcagaatactaaagactttataactgcatgaacttggatttttttaatcactcatatggtagaattttataaacacatacatgataccatccaaattcttgcttttaataacaaaggtacaatattttgttttagtatgaaaatctggtagatcctattacacttctgtttatattaaatccacaatattttattacatttttaacttgtataaattttaggtcaaatccttcaagccaacctatactaaaaattagttccataatcacaaatggctcttttgtgtaattgtttaatttcacctgaatatcataatgcttaaagccatatggagttggaaattatttccaaagcatatttattccattgttttagtctggctatttacagtataaaaaaagcatttttattaaaatactgtgtagttctttgagatagttgcttatgcatatagtaagtattacattcttagagtagagcagagtttttagttagtattaatttattttcctccattcatgtacttttccttatatttccaaaactgttactgagaatgggtcaagatcagtgagaaatctttacagttgacaggaacctggaccccttaccccaactttatgagtaatgcttggaataaaaactcttaaggcaactcactgatttacttctagcaatagcatgatgttacaggaatattacctctgtttaagcaaggtaatgtgtaaaatcagtctcggctgtcagaataacttctaaaaggtatttttataagcagttcaagttactgaaaaccttttaaacctttctgaagttcgttagtataaattacttttctaggattattaataaaagccacataggtggcaagttgtagttttatatggctctgtagagtggtgaaccttctagaggaatatatgatttattcacagttcctcaaggcctggggatgatgatcagttatacctatttttgtgcaattacatcatgttgtacattagaaatggagagtttaatagctctttaactgctgtcctcattaggtaatgataaatatttcccttaaataattgactattttgctgtgttttaaaaatgattgaaatttatcttgccatatctcataatttcatgcacaagttgactgagctaatcttgagaatatattcgtaaaataggagcacatttagttgaggtatacaaggtaggactctagacaaaaccttctattttagctttagtgaatttcaaaagtaatgggtcttggagtatagatttttattagtagcttgaaagagcttaatcatatgcagtaagtatttttattaccaataaatttaaaattttttaagaaaaatatttttatcctagggccaagtgttgcctgccaccaatcagtaagttagtctataacaaattttaccctaacagttttaccacctagtaacagtcatttctgaaaatatgttggatagaaagtcactctttggcaaaagtgttagaatttgcttttgtgccatctattccttttatggcatctatcttgaaagtaatcttgtattggagattgaaagatgctgtaatttagaaattaacatgatatcttaaattacctttatgaaatatagttttgtataatagcatagattttccttcaaaaaatgaacatttatatatctacaaaaatatggagaagagtaatttgaaagcctactttctgaagaaaatggtgggatttttttttatcatgattaaatatcaaaaaattgccctatgaaaactttaaatctctaaaacatttgaaatactaccatatttgtgatttattgagaataaaaatccattttgaaatgtaaaatttttatgatctgattcagttttaagaaaacatgaatgaactagaagatattaaaaacatttgacattggtaagaaatattgatactgatattgatttttatataggtatttatttcagaattgatattttgagaaaaatacatgtgagtcattttttctgtttctcttttctcttaacgattatcactgtaattctgaatctgaaaggtaaaacaattagtcaaaatattattgccatcattctacctgtgttatgaaactacttattcatagttaattctcattaacacttacatttccataaagaaaactcaagtattaataaaagagactttactggcttaagagggctgtgaaagatttttgatagtgaatcatgaccctaagggagagatttgtgtgataaaagtattgtatataatagatcagcgatttttgtaaggcaaacagaatttgtaagttggcagatcttcctaagttgcaaaatgtaatgatgagcttggtggagaagaatgagtcgttcttggaatacctatgtgcagccactacccatctcaatgtcaccttgtttgcattcttggatagcttgtatatgtagtagtttgatgaataatttaaagaaaaacacctaaaatttgaaaaatgattgtaggatcaaaaaaggcagatgaaattacttaatactcagtgttttggagagtattccttttagtttgttggttggctggtttgaacgatagaaatatgcagcatgcaatatatgcttatatttcattttaatttctgatatataatgaacttcttgggagaggtactgaatctttgatgttttttgtcattgttctcaagtgcaatataacaatgtaaccaaatctagataatttcaaagttgtcattaatttagtaagcctaatataaacaaatatttgtattatttttgttagcaggaaagagtgattaagtgaggttatttacccctaaatggtccattctgcattgtatttcaggctggaaatgaattattctttaccagttttgaaacactttgaaatatcctaaggtaacttggaagctgtgtagtatatcaaattaatttgctacctaataacatagaaagtaaatatctttgtggtcacccacattgggtgagacagaaaatgaatctgttctaaaatttgtaatttgctaacttgatttgagttagtgaaaactggtacagtgttctgcttgatttacaacatgtaacttgtgactgtacaataaacataagcatatggt

SEQ ID NO: 6894 - DNA, 491 bp, Homo sapiens
gtctgtccgaacccagacacaagtcttcactccttcctgcgagccctgaggaagccttctttccccagacatggccaacaagggtccttcctatggcatgagccgcgaagtgcagccatcccgcttagcctgcctcacccacacccgtgtggtaccttcagccctggccaagctttgaggctctgtcactgagcaatggtaactgcacctgggcagctcctccctgtgcccccagcctcagcccaacttcttacccgaaagcatcactgccttggcccctccctcccggctgcccccatcacctctactgtctcctccctgggctaagcaggggagaagcgggctgggggtagcctggatgtgggccaagtccactgtcctccttggcggcaaaagcccattgaagaagaaccagcccagcctgccccctatcttgtcctggaatatttttggggttggaactcaaaaaaaaaaaaaaaaaatcaatcttt

SEQ ID NO: 6895 - DNA, 736 bp, Homo sapiens
catcagaggaccatggccccgtatcacctgggtcaggcactgaagctgggacaggagagcagagacttccaaaatgagggatccctgtgttctgaggtgatcatgactgggacccaaggactcaagcgcatgctccagagggaatcgtttcccacaaggcctttggcaggaacagggatcctgggagcctgccaagcagagcgcacagtgttcctggagtctcgctgcccagatgccacggaatcagttgaagccaggtctccagctggggtggacgtgcccaccagctgccgaaggccaagacgccaggtccggtggacgtgacaagcaggacatgacatggtccggtgtgacggcgaggacagaggaggcgcgtccggccttcctgaacaccttaggctggtggggctgcggcaagaagcgggtctgtttctttacttcctccacggagtcggcacactatggctgccctctgggctcccagaacccacaacatgaaagaaatggtgctacccagctcaagcctgggcctttgaatccggacacaaaaccctctagcttggaaatgaatatgctgcactttacaaccactgcactacctgactcaggaatcggctctggaaggtgaagctagaggaaccagacctcatcagcccaacatcaaagacaccatcggaacagcagcgcccgcagcacccaccccgcaccggcgactccatcttcatggccaccccct

SEQ ID NO: 6896 - DNA, 1792 bp, Homo sapiens
cagggctcagccagggatggcttctagctgacagtgggaggaattaattcatctgaccggaatattcttttctcttctgggctgttggtttttcaagtgcaacaaagattccatacagctccaaggaaggagccaagaaaaacattctgtgccaaagtgagatcctggaagtgaaaccccggaataaagctgaaaaacgggctccagttgggtgccaggaaatgcaggactggaatgtgacttgacttccggcagcgcgcaggtgctcccgggtcacctgctttgaggtccagcctcctgccctgcctcaggtgaccacatgaccactgtggactttgccctgaaaccttctgggaggagaagaggcctgaccttggcgctggggtccagtgggcattgctctggtccgaggctgctgctcttgacctctgctctgcggctgttttccattggagtagaggctcctcctgtcctgtcctgcctgtggagggaagcaaaccttcccctggaccagagagaggagaaagcggagacaggtagcaacgctgtggactggtgatgacaggctcttcagctccctgcaagtgaccgggcctggggaacagggcatggcacaggcacacaggaccccccagcccagggctgcccccagccagccccgtgtgttcaagctggttctcctgggaagtggctccgtgggtaagtccagcttggctcttcggtacgtgaagaacgacttcaagagtatcctgcctacggtgggctgattccttcctcaaggctcagcagtggctgaaggacctggaggaggagctgcacccaggagaagtcctggtgatgctggtgggcaacaagacggacctcagccaggagcgggaggtgaccttccaggaagggaaggagtttgccgacagccagaagttgctgttcatggaaacttcggccaaactgaaccaccaggtgtcggaggtgttcaatacagtggcccaagagctactgcagagaagcgacgaggagggccaggctctacggggggatgcagctgtggctctgaacaaggggcccgcgaggcaggccaaatgctgcgcccactaggtgcagccactcctgggggctgtggggaagacaccccctgcctgggccatggccagctctaggtggattctgattcactgtcaatgctgggttgctcccgagccctagatgttcctggaagttggccccctttatgaaaaccacttcccacagccagtgggaactgccagaggaagatctggcgtcacatggctcccaggaaagtgctgtgccctatccccactgataccatctgattccccgatgcctgtgcctgttccacctggacggtggccccctcagcctggcagcctctggacagagaggaaggaaggattggaaaagtccccgcagcacagcgacggtgggaagatgccttacgtctgatcttgatgggggcactggcctggagcctgggcccacctgcttctggggggttggggagcaggccagatggaggtggtggtgccaggaagaaatggagcgatgactgactgtggggtgggcccaggatttccacatcttggtgaagttgcccctgggaagggcagctgggggcagtggcgccagttcccttccatggtctcccggctggcaatgtggtgaagctgagtttctgtccaatgagcaggaagattctgagacatttcgcctgagatataagttgtactgcgtatgcagtttttcctccaaaaattaaattgcttttgacaatctg

SEQ ID NO: 6897 - DNA, 3256 bp, Homo sapiens
gaagacgaccgggctctcaagatggcggccccatgcggaaacagctccagggagcagccatgttgcttcctgaacaaagcctctgaagatgcggaacgggcaaaaccgcccagtacggaacggcgcagcctcgggagcccggtgtggtgctcgcggacaggaagcaggagagtttgccaatagggatgtgacagcggttcccattaagcggtgatggtggttttgggacctgataatcgagctgggagtcagaggcgggatgtgtgcggtgaaggatgttttgatacccccatataaaataatctgtctgtcatgggagcccccacgtcctctgaaatagttcagctctgtctgcatgacttgtcctgggactgaggaaaatttaccagtcatctggccttttggaagagcaaaaaatgatgaagtcccaggggttagtatcattcaaggatgtggctgtggatttcacccaggaggagtggcagcaacttgacccttctcagaggaccctgtacagggatgtgatgctggagaactacagccacctggtctcaatggggtatccagtttccaaaccagatgtcatctccaagttggaacaaggagaagagccatggatcataaagggagacatatcaaattggatctatccagatgaatatcaggcagatgggagacaagggaagaagagtaaccttcacaactcccagtcatgtattttggggacagtttccttccatcataagatactgaaaggagtcacaagggatggttcattgtgctccattttaaaagtctgtcaaggtgatggtcagctgcagagatttctagagaatcaagacaaactcttcaggcaggtcacatttgttaacagcaaaacagtgactgaggcatcagggcataaatataatccactggggaaaatatttcaagagtgcatagaaacagatatatcaatacagagattccataaatatgatgcttttaaaaagaacttaaaaccaaatattgacctaccgagttgttataagagcaattcaagaaaaaaacctgatcagagttttggaggtggaaaatcatctagccagagtgagcccaattctaatcttgagaagattcacaatggagtaataccttttgatgataatcagtgtggaaacgtttttagaaatacacaatcccttattcaatatcagaatgtggaaactaaagagaaaagctgtgtatgtgttacatgtggaaaagcctttgctaagaagtcacaactcattgtacatcaaagaattcatactggaaagaaaccatatgattgtggtgcatgcggaaaagccttcagtgagaagtttcatcttgttgtacatcagagaactcatactggggagaaaccttatgattgttctgaatgtggaaaagccttctctcagaaatcgtcccttattatacatcagagagttcacactggggaaaaaccctatgaatgtagtgaatgcgggaaagccttctcccagaaatcacccctcattatacatcagagaatacatactggggaaaaaccctatgaatgtagagagtgtgggaaggccttttcccagaagtcacagctgattatacaccacagagctcatactggagagaagccgtatgagtgtaccgaatgtgggaaagccttctgtgagaagtcccacctcattatacataaaagaattcacactggtgagaaaccctacaaatgtgctcaatgtgaggaagccttcagcaggaagacagaactcattacacatcagttagttcatactggggaaaaaccttatgaatgtactgaatgtggaaagacattctcccgcaagtcacagctcatcatacatcagagaacacatactggagaaaaaccctataaatgtagtgaatgtggcaaagccttctgccagaagtcacatctcattggacatcagagaattcacacaggagaaaaaccttatatatgtactgaatgtgggaaagccttctctcagaagtcccaccttccgggacaccagcgaattcatacaggagagaaaccttacatatgtgctgaatgtggaaaggccttttctcagaagtcagaccttgttttacatcagaggattcatactggggaaagaccctatcaatgtgctatatgtgggaaggccttcatccagaagtcacaactaactgtacaccagagaattcacacagtggtaaaatcataatgaactggccacagaaaagccttagtattagctcaagccttaataattactagaaacccaattaatttgataagcttggggacaacatcccaatagataaaaatttttaagggaatttgtttctagtttggtgatgcctaacttttccagcaaagatgatggaaaatagttatataaatgaagaacatttttaatatggcatgtaaagcttttaaagttatgaactcagtgatcagcacagcaagttaagcatacagaatattgtcaagttgcatattccttatactacaaaatgataatcagccattgtgaaactgctaatattagcttgtcataattatggccataaactaatttttctataaaagacgtggaagaaagcttaagtaaacaataaaataaaacctatacactattttaagaaggggcttgagcatgacccctaaagctacatgtaaagttcttgtacaaaaaatggaatgataggttgatcagattcagtaaagttgatctgtatgcattttcccatctcaagcatataagttgacctgcatctctggaaggaccttgagattgatgcattttgagcaggtctcccttttactcttcccaactgggaacttggagctgaaaaacattggcactgaggccagatggccttgggtttaatcctggctcagtgcctcacagattgtgtgactttaggcaaacatacttctcctagctgagtattttttatcagtaagtacaaatacaatgcagagctcattttcagttaatattagtactttttaaatctttactctctatcttgaagcattagatgttaagactaatgtgtaaaaaccacgtctgagcttgcttttccctctggacactctgcttttgattgcctatccctataagtggctcattttactgtcttctgatcctggtggccttatttttgctatgttaaggttgtgttttttaatacttggatttattttcatatacttacataaaccgtggtgattgcacataaa

SEQ ID NO: 6898 - DNA, 2369 bp, Homo sapiens
cctcattgcccagcggaccccagcctctgccaggttcggtccgccatcctcgtcccgtcctccgccggcccctgccccgcgcccagggatcctccagctcctttcgcccgcgccctccgttcgctccggacaccatggacaagttttggtggcacgcagcctggggactctgcctcgtgccgctgagcctggcgcagatcgatttgaatataacctgccgctttgcaggtgtattccacgtggagaaaaatggtcgctacagcatctctcggacggaggccgctgacctctgcaaggctttcaatagcaccttgcccacaatggcccagatggagaaagctctgagcatcggatttgagacctgcaggtatgggttcatagaagggcacgtggtgattccccggatccaccccaactccatctgtgcagcaaacaacacaggggtgtacatcctcacatccaacacctcccagtatgacacatattgcttcaatgcttcagctccacctgaagaagattgtacatcagtcacagacctgcccaatgcctttgatggaccaattaccataactattgttaaccgtgatggcacccgctatgtccagaaaggagaatacagaacgaatcctgaagacatctaccccagcaaccctactgatgatgacgtgagcagcggctcctccagtgaaaggagcagcacttcaggaggttacatcttttacaccttttctactgtacaccccatcccagacgaagacagtccctggatcaccgacagcacagacagaatccctgctaccactttgatgagcactagtgctacagcaactgagacagcaaccaagaggcaagaaacctgggattggttttcatggttgtttctaccatcagagtcaaagaatcatcttcacacaacaacacaaatggctggtacgtcttcaaataccatctcagcaggctgggagccaaatgaagaaaatgaagatgaaagagacagacacctcagtttttctggatcaggcattgatgatgatgaagattttatctccagcaccatttcaaccacaccacgggcttttgaccacacaaaacagaaccaggactggacccagtggaacccaagccattcaaatccggaagtgctacttcagacaaccacaaggatgactgatgtagacagaaatggcaccactgcttatgaaggaaactggaacccagaagcacaccctcccctcattcaccatgagcatcatgaggaagaagagaccccacattctacaagcacaacagcctcagctcataccagccatccaatgcaaggaaggacaacaccaagcccagaggacagttcctggactgatttcttcaacccaatctcacaccccatgggacgaggtcatcaagcaggaagaaggatggatatggactccagtcatagtataacgcttcagcctactgcaaatccaaacacaggtttggtggaagatttggacaggacaggacctctttcaatgacaacgcagcagagtaattctcagagcttctctacatcacatgaaggcttggaagaagataaagaccatccaacaacttctactctgacatcaagcaataggaatgatgtcacaggtggaagaagagacccaaatcattctgaaggctcaactactttactggaaggttatacctctcattacccacacacgaaggaaagcaggaccttcatcccagtgacctcagctaagactgggtcctttggagttactgcagttactgttggagattccaactctaatgtcaatcgttccttatcaggagaccaagacacattccaccccagtggggggtcccataccactcatggatctgaatcagatggacactcacatgggagtcaagaaggtggagcaaacacaacctctggtcctataaggacaccccaaattccagaatggctgatcatcttggcatccctcttggccttggctttgattcttgcagtttgcattgcagtcaacagtcgaagaaggtgtgggcagaagaaaaagctagtgatcaacagtggcaatggagctgtggaggacagaaagccaagtggactcaacggagaggccagcaagtctcaggaaatggtgcatttggtgaacaaggagtcgtcagaaactccagaccagtttatgacagctgatgagacaaggaacctgcagaatgtggacatgaagattggggtgtaacacctacaccattatcttggaaagaaacaaccgttggaaacataaccattacagggagctgggacacttaacagatgcaatgtgctactgattgtttcattgcgaatcttttttagcataaaattttctactctt

SEQ ID NO: 6899 - DNA, 2459 bp, Homo sapiens
cctgtttcccagagtaatgtgggccatggagtcaggccacctcctctgggctctgctgttcatgcagtccttgtggcctcaactgactgatggagccactcgagtctactacctgggcatccgggatgtgcagtggaactatgctcccaagggaagaaatgtcatcacgaaccagcctctggacagtgacatagtggcttccagcttcttaaagtctgacaagaaccggatagggggaacctacaagaagaccatctataaagaatacaaggatgactcatacacagatgaagtggcccagcctgcctggttgggcttcctggggccagtgttgcaggctgaagtgggggatgtcattcttattcacctgaagaattttgccactcgtccctataccatccaccctcatggtgtcttctacgagaaggactctgaaggttccctatacccagatggctcctctgggccactgaaagctgatgactctgttcccccggggggcagccatatctacaactggaccattccagaaggccatgcacccaccgatgctgacccagcgtgcctcacctggatctaccattctcatgtagatgctccacgagacattgcaactggcctaattgggcctctcatcacctgtaaaagaggagccctggatgggaactcccctcctcaacgccaggatgtagaccatgatttcttcctcctcttcagtgtggtagatgagaacctcagctggcatctcaatgagaacattgccacttactgctcagatcctgcttcagtggacaaagaagatgagacatttcaggagagcaataggatgcatgcaatcaatggctttgtttttgggaatttacctgagctgaacatgtgtgcacagaaacgtgtggcctggcacttgtttggcatgggcaatgaaattgatgtccacacagcatttttccatggacagatgctgactacccgtggacaccacactgatgtggctaacatctttccagccacctttgtgactgctgagatggtgccctgggaacctggtacctggttaattagctgccaagtgaacagtcactttcgagatggcatgcaggcactctacaaggtcaagtcttgctccatggcccctcctgtggacctgctcacaggcaaagttcgacagtacttcattgaggcccatgagattcaatgggactatggcccgatggggcatgatgggagtactgggaagaatttgagagagccaggcagtatctcagataagtttttccagaagagctccagccgaattgggggcacttactggaaagtgcgatatgaagcctttcaagatgagacattccaagagaagatgcatttggaggaagataggcatcttggaatcctggggccagtgatccgggctgaggtgggtgacaccattcaggtggtcttctacaaccgtgcctcccagccattcagcatgcagccccatggggtcttttatgagaaagactatgaaggcactgtgtacaatgatgatcccataagagacacaaattctggcctggtgggcccgctgctggtgtgcagggctggtgccttgggtgcagatggcaagcagaaaggggtggataaagaattctttcttctcttcactgtgttggatgagaacaagagctggtacagcaatgccaatcaagcagctgctatgttggatttccgactgctttcagaggatattgagggcttccaagactccaatcggatgcatgccattaatgggtttctgttctctaacctgcccaggctggacatgtgcaagggtgacacagtggcctggcacctgctcggcctgggcacagagactgatgtgcatggagtcatgttccagggcaacactgtgcagcttcagggcatgaggaagggtgcagctatgctctttcctcatacctttgtcatggccatcatgcagcctgacaaccttgggacatttgagatttattgccaggcaggcagccatcgagaagcagggatgagggcaatctataatgtctcccagtgtcctggccaccaagccacccctcgccaacgctaccaagctgcaagaatctactatatcatggcagaagaagtagagtgggactattgccctgaccggagctgggaacgggaatggcacaaccagtctgagaaggacagttatggttacattttcctgagcaacaaggatgggctcctgggttccagatacaagaaagctgtattcagggaatacactgatggtacattcaggatccctcggccaaggactggaccagaagaacacttgggaatcttgggtccacttatcaaaggtgaagttggtgatatcctgactgtggtattcaagaataatgccagccgcccctactctgtgcatgctcatggagtgctagaatctactactgtctggccactggctgctgagcctg

SEQ ID NO: 6900 - DNA, 642 bp, Homo sapiens
tatggctttcacttaaatgcgattcggggtctgccaggctcattcatcaaagaggtacagaagggcggtcctgctgacttggctgggctagaggatgaggatgtcatcattgaagtgaatggggtgaatgtgctagatgaaccctatgagaaggtggtggatagaatccagagcagtgggaagaatgtcacacttctagtctgtggaaagaaggcctatgattatttccaagctaagaaaatccctattgtttcctccctggctgatccacttgacacccctccagattctaaagaaggaatagtggtggagtcaaaccatgactcgcacatggcaaaagaacggctctacacaattgctgtcaactgcatgctgtgaaagaaagaaattctagcccacagtacagcctcacattcttcttccaattctgaagatacagagatgtgatgaaaacaagcggctattgcagacggctaatttatgcttaacttaggaagagataaggttccttgagcaccaaagatgattcataactctgtataggtgacagctgcttataaaagcatcttagcagataagcctattaaaattgtgcttttgtaacaatgttgtggttgctagaataaataccattaacaaatg

SEQ ID NO: 6901 - DNA, 1310 bp, Homo sapiens; identical to SEQ ID NO: 4319

SEQ ID NO: 6902 - DNA, 3773 bp, Homo sapiens
tgagtaaacagggtagcatccttttagctggttgtgctttgactaactgatctgttctttcttacttgtagaagattccaagcaagaaagtattcagcagtggctggactctggattctttgtctctgcaaatgaaaactttcaacaagtcattgaccgcactgtttctttgtatgaacaagggatggttcaaatgactgtgaaagactacatgagatctttgcatcagttttcagaaactcccatcctatccagagggaccagtttcaactcttgctattctactgcaagtgtaccacaaagcattcctgaatggctggaattttgggagatagatccagtggagattctcttggatctggggtttggtgctgatgagccagacatctgcatgcaaatcccagccagattccttggttgtggctcagcagccagaggaatcaacatccgtgtttttcttgaagctcaaaagcagcgaatggacattgagaaccccaacttgtacggtcgtttccgacagctggaaatcctggaccatgtgaccaatgccttctcatctctgctgagtgatgtcagcatcctgccaaacagagctgaagagaaagctggaggagagagtgtgcaaagaacctcagtgagtgccgccaaagagcatcgaagaagaatgggtaaactcttaaggagagcttccaaacagaacatcaggcgggattgtaacccagaggtatcagagtccttcaaggtgaaggatgaagtttttgttccctttacaaaaccatgggattgtggagcagagctagcagcaacctcaatcaaccacaagcaaaatcatttgtctctgtcagtagaacatcagtctctccaagcctgtgatgatttgctaccttatcctcctcatggtcttctgagcaagcagtggccttgctcatctatgccggccaagcaggctcctccttcctgtgtgtctgaggggtcagtcaagggcagaactcagaaggagaacttatttcagactaacaagctcaagagcttgtctcatcttgcaggcaaaggaccagactcatttgaaatggaagaggtccaaagctttgaagaagagactggtaatcctcttgacatgacttcaggaactgtaggtgccagggtggacagagcaaatagctgccagtctgacagcagcgggttcctggaggagccgctggaaccgctgcccctccagatgccttccttgccaaacagccagagtcctgctgagaatggaggtagaaagccaagagatcagagccacagcttagtatcatcccaggactgtcagctagagtcggatgggccagattccaaaagtagggcgagcatgtctttttcaagccaagaagcgaatgccttggaacaaagggcctcagtatctgtgatggaggaagagtttctgcttgaggccatggaggggccaccagagctgtatatcccagacatggcctgtgccaagaccaccacgaggggagaatgcccaaggaaagacagccatctgtggcagcttctgccaatgccccatgctgagtatgaggtcaccagacccacagccacttccaaatatgatcatcctctggggtttatggtaacccacgtcacagaaatgcaggacagttttgtgaggcctgagggagctggcaaagtgcaaagccaccacaatgagtctcaaaggtcacctggaaatgatcatactcaagacaagttccttcatgttgactctgaggccccacgagaagaggaaagcagtggattctgtcctcacaccaaccacagcttactcgtaccagaaagctcatcacagtgtatccccaagcacagtgaaatcacaccttatgcaactgaccttgctcaaacatctgaaaagctcattccccacctccataaactgcctggagatcctgcccaggtgaagtcaaggtctggtactttgggtcagatactacctgggacagaagctgagatggaaaaccttcctctaaatactggcagctccaggtctgtaatgacccagatgtcctccagcctggtgtcggctgctcagagggctgtggccttggggactggtcccagaggaacatctttagaatgcactgtgtgtgatcctgttaccgcaacagaaacaagactggggacaaaagcaagacagttaaatgatgcttccattcagacttcagctctaagcaacaagaccttgacacatgggccccagcccctcaccaaatccgtctctctagactcaggcttctctagtatctgcccaatgggcacctgccatgctatacctgcccactgctgcatctgctgtcatcaccaccctcactgccacggggagaggcaaagccctggccctgaaccctcagtctgtaggcactgcctgtgttcactaactggtcaccaggaagcccagttcatgacgactttgaaagcccttcaggacactacagtgagggagctatgttcctgcacagtccatgagatggaagccatgaagacgatatgccaaagtttccgggagtatttagaagaaattgaacagcaccttatgggacagcaggccctcttttccagggacatgtcagaggaggaaagggaggaggccgagcaactgcaaacgttacgtgaggccctgaggcagcaggtggcagagttggaatttcagttaggagaccgggctcagcaaatcagagaagggattttactgcagctggaggttctcacagcagagccacctgaacactattcaaatctgcatcaatataactggatagaagaaagcaatgggcagacttcatgttctaaaatccacccaggcatggccccgaggactgtgtttcctcccgatgatggccaggaggctccctgttcaggtgggacccagttggctgccttcactccacccaccttggagaacagcaccaggatgtctccttcatcatcagcttgggcaaagttaggtccaacccctttgtcaaattgtcctgttggagaaaaggatgcagatgtcttcctctagatcagagcaggttgggcttttgacctccccttctccatgtagactccgagctctcctgcagtttcttccttgctccttccctgtaacgcctacggaatgaagaggaacacctggctctaggatgtccctcacctggcagccatctgctttaccagtctcatttcctgctcatccctcagatgaatctccaattctattcccctaaaccacctcctgtgttcctgcttcctctcctttgctgaaacaaatgaagtatctcaccagtaagtcctagggcagaccccatctcctacacaggctttccttgatgatctgtggcagaagtgatccttattttttgaaactcctatatcactttgcttttttgttaaaacactgaaaacctcctgtcttgtgttaccattatctgtgtaggtcatatcttctctagtaaacttaaagctatttgaggactgtgtagtacctactaccctgtgtttaagagagactatctggaggaaagtacagactcctttctttatcatgtgtgacctcgggcacttgctctctttaccctagtttcttcctctgtaaaatagggagaagaaaaacaacatagagttgttggacagaataaataccatgaatcctgtgcagtgtttaatccaatgtccatcacgtagtaagtgttcaatgcatgttggctattattacaagtgcacataccaagaactcaataaatgctaactgt

SEQ ID NO: 6903 - DNA, 728 bp, Homo sapiens
cgcggggaaacctggcgtactggctgtggcttctctagcgggactcggcatgaggctggcgcggctgcttcgcggagccgccttggccggcccgggcccggggctgcgcgccgccggcttcagccgcagcttcagctcggactcgggctccagcccggcgtccgagcgcggcgttccgggccaggtggacttctacgcgcgcttctcgccgtccccgctctccatgaagcagttcctggacttcggatcagtgaatgcttgtgaaaagacctcatttatgtttctgcggcaagagttgcctgtcagactggcaaatataatgaaagaaataagtctccttccagataatcttctcaggacaccatccgttcaattggtacaaagctggtatatccagagtcttcaggagcttcttgattttaaggacaaaagtgctgaggatgctaaagctatttatgactttattgtttggtggaaaaggcaaaggaagtccatctcatcgaaaacacattggaagcataaatccaaactgcaatgtacttgaagttattaaagatggctatgaaaatgctaggcgtctgtgtgatttgtattatattaactctcccgaactagaacttgaagaactaaatgaatgcaatgagagccactatggaacaccatgccaacagaggtgtttacccccctattcaagttcatgtcacgctgggtaatgaggatttgactgt

SEQ ID NO: 6904 - DNA, 1291 bp, Homo sapiens
tgacgatgacaatgacggtgtgaccgatgagaaggacaactgccagctcctcttcaatccccgccaggctgactatgacaaggatgaggttggggaccgctgtgacaactgcccttacgtgcacaaccctgcccagatcgacacagacaacaatggagagggtgacgcctgctccgtggacattgatggggacgatgtcttcaatgaacgagacaattgtccctacgtctacaacactgaccagagggacacggatggtgacggtgtgggggatcactgtgacaactgccccctggtgcacaaccctgaccagaccgacgtggacaatgaccttgttggggaccagtgtgacaacaacgaggacatagatgacgacggccaccagaacaaccaggacaactgcccctacatctccaacgccaaccaggctgaccatgacagagacggccagggcgacgcctgtgaccctgatgatgacaacgatggcgtccccgatgacagggacaactgccggcttgtgttcaacccagaccaggaggacttggacggtgatggacggggtgatatttgtaaagatgattttgacaatgacaacatcccagatattgatgatgtgtgtcctgaaaacaatgccatcagtgagacagacttcaggaacttccagatggtccccttggatcccaaagggaccacccaaattgatcccaactgggtcattcgccatcaaggcaaggagctggttcagacagccaactcggaccccggcatcgctgtaggttttgacgagtttgggtctgtggacttcagtggcacattctacgtaaacactgaccgggacgacgactatgccggcttcgtctttggttaccagtcaagcagccgcttctatgtggtgatgtggaagcaggtgacgcagacctactgggaggaccagcccacgcgggcctatggctactccggcgtgtccctcaaggtggtgaactccaccacggggacgggcgagcacctgaggaacgcgctgtggcacacggggaacacgccggggcaggtgcgaaccttatggcacgaccccaggaacattggctggaaggactacacggcctataggtggcacctgactcacaggcccaagactggctacatcagagtcttagtgcatgaaggaaaacaggtcatggcagactcaggacctatctatgaccaaacctacgctggcgggcggctgggtctatttgtcttctctcaagaaatggtctatttctcagacctcaagtacgaatgcagagttatc

SEQ ID NO: 6905 - DNA, 3419 bp, Homo sapiens
cggttctttccggaaattatgactgcagctgttttcactccgctgtgactcagagcgctccgggctgcaggagaggaagaaatcttgcatcaccatggtgcacttctgtggcctactcaccctccaccgggagccagtgccgctgaagagtatctctgtgagcgtgaacatttacgagtttgtggctggtgtgtctgcaactttgaactacgagaatgaggagaaagttcctttggaggccttctttgtgttccccatggatgaagactctgctgtttacagctttgaggccttggtggatgggaagaaaattgtagcagaattacaagacaagatgaaggcccgcaccaactatgagaaagccatctcccagggccaccaggccttcttattggagggggacagcagctccagggatgtcttctcttgcaatgtgggtaacctccaacctgggtcgaaggcggcagtcaccctgaagtatgtgcaggagctgcctctggaagcagatggggctctgcgctttgtgctcccagctgtcctgaatcctagataccagttctctgggtcgtctaaggacagttgccttaatgtgaagactcctatagtccctgtggaggacctgccctacacactcagcatggtcgccaccatagattcccagcatggcattgagaaggtccaatccaactgccccttgagtcctaccgagtacctaggagaggacaagacttctgctcaggtttccctggctgctggacacaagtttgatcgggacgtggaactcctgatttactacaatgaggtgcatacccccagcgtggttttggagatggggatgcctaacatgaagccaggtcatttgatgggagatccatctgcaatggtgagtttctatccaaatatcccagaagatcaaccatcaaatacctgtggagagtttatctttctcatggaccgctcgggaagtatgcagagccccatgagtagccaggatacatctcagctgcgaatacaggcagccaaggaaacactgattttgctgctgaagagtttacctataggctgttatttcaacatctatggatttggctcttcctatgaggcatgctttccggagagtgtgaagtacactcagcaaacaatggaggaggctctggggagagtgaagcttatgcaggccgacctagggggcactgaaatcttggcaccactccagaacatttacaggggaccctccatcccaggccaccccctacagctttttgtctttacagatggagaagttacagacacgtttagtgtaattaaagaagttaggatcaacagacagaaacacaggtgtttctcatttggtattggagaaggcacctccaccagcctaataaaaggtattgcccgggcatcagggggcacctcagaatttatcacaggcaaagacaggatgcagtccaaggctctcaggactctgaaacgctctctgcagcctgtggtagaggatgtctctctgagctggcatttgcctcctggtctgtctgctaaaatgctttccccagaacagactgtcatctttaggggtcagagattaatcagctatgcccagctgaccgggaggatgccagcagcagagacaacaggagaagtatgcctcaaatatacactccagggcaagacttttgaggataaggtgacatttcctctacaacccaagcctgatgtcaacctcaccattcaccgccttgctgccaagtccttgctccagaccaaggacatgggcctcagggagactccagcaagtgataaaaaagatgcattgaaccttagccttgagtctggtgtcataagctccttcacagctttcattgctatcaataaggagctcaacaagccggttcaggggcctctggctcatagggacgtcccaaggccaattctgttgggtgcttctgccccattgaagataaaatgccaatcaggttttcgaaaggccttacactctgaccgtcctccttctgcatctcagcccagaggggaacttatgtgttataaggccaagacattccagatggacgattacagtctctgtgggttgataagtcacaaggaccagcacagtccaggctttggagagaatcaccttgtgcagctgatttaccaccaaaatgcaaatggttcctgggatctgaatgaagatctagccaagatcctaggtatgagtttggaagaaataatggctgcacagcctgccgagcttgtggattcctcaggctgggccaccatcctggccgtgatctggctgcacagcaatggtaaggacttgaagtgtgaatgggagcttctggaaaggaaggccgtggcctggatgcgtgcccatgcaggctccaccatgccttcggttgtgaaagctgctattactttcctgaagtcatctgtggatcctgctatctttgccttttgaagataccatccagaaaaagaagtgcctttaatttgctactgtcatttcctctagtatcacttttgctgtgatgatgtgttcttgtgtattataactctttattttttgccataaaagtaaaggatgcttactccacttcgcttctctgctccaggttcactttggatatgatctttcttttcccaacatatgccctcagaaaagtgacagtggtcccagaacctattccctttcttgagggagttcaaaacattcataggcagtaatgttcctcccagggtttccagggaaacaacatgaaaaacaggtgacatgaactacagactaaagattgcagcatttatgttagagaatgcttgaattagagaattttctgcattatctttgtctgttcactttctatcttatatacttatcagggccatactggtaagcttgcgtaggaggagttagagggaagttgaaagccaacatctggatcaatgtaatgtcaagatcacaaagacagagactgcaggggtccactgtgagaggtgacactgttggggaccttcctgattcattcttcttgggctttgctagcctgtacaacctacatgtcttttcttccactgcctgaaagacttgggttgaactataactgttggagagagatgttcctctttaatcatgaaacaccttaagaagtctataatgcaatccttagtcctaccctgaacctatgtgtcctctaagtcaggccctgatctagtgcagtaaagggaagggtgggcttaatgggagctttgcctgggacctgaacctggagcacttaccgcattaggaagaaaggagctccccgtaatcgttcctgacccttgtgtctcatataccctatcctggtggaaatgaccctatttgatatgctgtcccttaaaataacttgtatcaatattaaaatgactatttctaccctttgatgagt

SEQ ID NO: 6906 - DNA, 2236 bp, Homo sapiens
ttactgtaccgccgtgtgcattccctcatacggtcaggagttatgactcattttgaagatatcgagcctgcgtgctgccgaagcagggcgccgagtccatgcgaactgccatctgatccgctcttatcaatgaagcagccgatcatggcggatggcccccggtgcaagaggcgcaaacaagccaatcccaggaggaaaaacgtggtgaactatgacaatgtagtggacacaggttctgaaacagatgaggaagacaagcttcatattgctgaggatgacggtattgccaaccctctggaccaggagacgagtccagctagtgtgcccaaccatgagtcctccccacacgtgagccaagctctgttgccaagagaggaagaggaagatgaaataagggagggtggagtggaacacccctggcacaacaacgagattctacaagcctctgtagatggtccagaagaaatgaaggaagactatgacactatggggccagaagccacgatccagaccgcaattaacaatggtacagtgaagaatgcaaattgcacatcagattttgaggaatactttgccaaaagaaaactggaggaacgcgatggtcatgcagtcagcatcgaggagtaccttcagcgcagtgacacagccattatttacccagaagcccctgaggagctgtctcgccttggcacgccagaggccaatgggcaagaagaaaatgacctgccacctggaactccagatgcttttgcccaactgctgacctgcccctactgcgaccggggctacaagcgcttgacatcactgaaggagcacatcaagtaccgccacgagaagaatgaagagaacttttcctgccctctctgtagctacacgtttgcctaccgcacccagctcgagcggcatatggtgacacacaagccagggacagatcagcaccaaatgctaacccaaggagcaggtaatcgcaagttcaaatgcacagagtgtggcaaggccttcaaatataaacaccatctgaaagaacacctgcgaattcacagtggtgaaaaaccttacgagtgcccaaactgcaagaaacgtttctcccattctggttcctacagttcgcacatcagcagcaagaaatgtattggtttaatctctgtaaatggccgaatgagaaacaatatcaagacgggttcttcccctaattctgtttcttcttctcctactaattcagccattacccagttaagaaacaagttggagaatggaaaaccacttagtatgtctgaacagacaggcttacttaaaattaaaacagaaccactagacttcaatgactataaagttcttatggctacacacgggtttagtggcactagtccctttatgaatggtgggcttggagccaccagccctttaggagttcatccatctgctcagagtccaatgcagcacttaggtgtagggatggaagcccctttacttgggtttcccaccatgaatagtaatttaagtgaggtacaaaaggttctacagattgtggacaatactgtttccaggcaaaaaatggactgcaaggctgaagaaatttcaaagttgaaaggttatcacatgaaggatccatgctctcaacctgaggaacaaggagttacttctcctaatattccgcctgtcggtcttccggtagtgagtcataatggtgccactaaaagtattattgactatacgttggaaaaagtcaatgaagccaaagcttgcctccagagcttgactactgactcaaggagacagatcagtaatataaagaaagagaagctacgtactttaatagatttggtcactgatgacaaaatgattgagaaccacaacatatccactccattttcatgccagttctgtaaagaaagttttcctggccccatccctttgcatcagcatgaacgttacctttgtaagatgaatgaagagatcaaggcggtcctgcagcctcatgaaaacatagtccccaacaaagccggagtttttgttgataataaagccctcctcttgtcatctgtactttctgagaaaggaatgacaagccccatcaacccatacaaggaccacatgtctgtactcaaagcatactatgctatgaacatggagcccaactccgatgaactgctgaaaatttccattgctgtgggccttcctcaggaatttgtgaaggaatggtttgaacaacgaaaagtctaccagtactcaaatt

SEQ ID NO: 6907 - DNA, 3046 bp, Homo sapiens
gtgtgaatgaagctctgccggctacgtggggcgctcactcaacttggtgtcctggacgccagagccgaccgagcgcgctgcccaccggcggcggacacgggctccgccgctccggacctcggcgacagagcaaatcagttgcctggagttcccagtgaagttgtacctgtgcccgtgcgataacgtcagtggaagctgccccgagtttggggctttagccccttggagaaaacagggccacatagctgcctttctatcaagtctccctacaaaactgagaggctctgggaaactcagcctgtgaccccagcgtgggtgaagataggatcaagatggccatgtggcagggtgccatggataacagaggctttcagcaggggagttttagtagcttccagaacagctccagtgatgaagacctgatggacattccagcaaccgctatggatttctccatgagagatgatgttcctcccttagaccgagaagtaggagaggacaagtcgtacaatggtggaggaataggttcttcaaataggatcatggacttcttggaggagccaatccctggtgtagggacctatgatgatttcaatacaattgattgggtgagagagaagtctcgagaccgggataggcaccgagagattaccaataaaagcaaagagtcaacatgggccttaattcacagtgtgagtgatgctttttccggctggttgttgatgctccttattgggcttttatcaggttcgttagctggtttgatagacatctctgctcattggatgacagacttaaaagaaggtatatgcacagggggattctggtttaaccatgaacattgttgctggaactctgagcatgtcacctttgaagagagagacaaatgtccagagtggaatagttggtcccagcttatcatcagcacagatgagggagcctttgcctacatagtcaattatttcatgtacgtcctctgggctctcctatttgccttccttgccgtatctcttgtcaaggtgtttgcgccttatgcctgtggctctggaatccctgagataaaaactatcttgagtggtttcattattaggggctatttgggtaagtggactctggttatcaaaaccatcaccttggtgctggcagtgtcgtctggcttgagcctgggcaaagagggccctctagtgcacgtggcttgctgctgtgggaacatcctgtgccactgcttcaacaaatacaggaagaatgaagccaagcgcagagaggtcttgtcggctgcagcagcagctggtgtatctgtagcctttggagcacctataggtggagtattattcagccttgaagaggtcagctactattttcccctcaaaacattgtggcgttcattctttgctgccttggtggcagcattcactctacgctccatcaatccatttgggaacagccgcctggtactattttatgtggagtttcacaccccatggcatctctttgagctcgtgccattcattctgctgggcatatttggtggtctgtggggagcactgtttatccgcacaaacattgcctggtgtcggaagcgaaagaccacccagttgggcaagtatcctgttatagaggtactcgtcgtgacagccatcactgccatcctggctttccccaatgaatacactcggatgagcacaagtgagctcatttctgagctgtttaatgactgtggccttctggactcctccaagctctgtgattatgagaaccgtttcaacacaagcaaagggggtgaactgcctgacagaccggctggcgtgggagtctacagtgcaatgtggcagctggctttaacactcatactgaaaattgtcattactatattcacctttggcatgaagatcccttctggcctctttatccctagcatggctgttggtgctatagcaggtcgacttctaggagtaggaatggaacagctggcttattaccaccaggaatggaccgtcttcaatagctggtgtagtcagggagctgattgcatcacccccggcctttatgcaatggttggggctgcagcctgcttaggtggggtgactcggatgactgtttctcttgttgtcataatgtttgaactgactggtggcttagaatacatcgtgcctctgatggctgcagccatgacaagcaagtgggtggcagatgctcttgggcgggagggcatctatgatgcccacatccgtctcaatggatacccctttcttgaagccaaagaagagtttgctcataagaccctggcaatggatgtgatgaaaccccggagaaatgatcctttgttgactgtccttactcaggacagtatgactgtggaagatgtagagaccataatcagtgaaaccacttacagtggcttcccagtggtggtatcccgggagtcccaaagacttgtgggctttgtcctccgaagagatctcattatttcaattgaaaatgctcgaaagaaacaggatggggttgttagcacttccatcatttatttcacggagcattctcctccattgccaccatacactccacccactctaaagcttcggaacatcctcgatctcagccccttcactgtgactgaccttacacccatggagatcgtagtggatattttccgaaagctgggactgcggcagtgcctggttacacacaacgggcgattgcttggaatcattaccaaaaaggatgtgttaaagcatatagcacagatggcgaaccaagatcctgattccattctcttcaactagaatcatagagttctggatgtaaagcgggaaggacattacagaccatggatatgttgtattaactgggtacccaaaacacattttccatatttggatggtgaagtcacattagtgtgttgtctctttcctacaagttaaccagttgcactacataatctctggaaattaattttctctttaggagaaattatagttaggcttccatgatgttacattaggaagatatcatgaaagaataaataagattgctatggtttaattat

SEQ ID NO: 6908 - DNA, 2448 bp, Homo sapiens
gggttggttccaagtctttgctattgtgaatagtgccgcaataaacatacgtgtgcatgtgtctttatagcagcatgatttatagtcctttgggtatatacccagtaatgggatggctgggttctagatccctgaggaatcgccacattgacttgcacaatggttgaactagtttacagtcccaccaacagtgtaaaagtgttcctatttctccacatcctctccggcacctgttgtttcctgactttttaatgattgccattctaactggtgtgagatgatatctcattgtggttttgatttgcatttctctgatggccagtgatggtgagcattttttcatgtgttttttggctgcataaatgtcttcttttgagaagtgtctgttcatgattttttttttagacaaagtattagatcagatatttttggggaaaaatgctttgtgattgcttgttttgaatggtgagcattgtattttgttttaagttgttttctggttgttattacagctatgaagtcttacactccatatttcattctcctgtggagtgctgttgggatagcgaaggctgccaaaatcatcatcgtgccgccaattatgtttgaaagccatatgtacattttcaagacgctagcctcagccttgcacgagagaggccaccatacagtgttcctcctctctgaaggcagagacatcgccccatctaatcattacagcctccagcgctacccagggatctttaacagtaccacctcagatgctttcctacagtccaagatgcggaatattttctctgggagattgacagcaatcgaactgtttgacatactggatcactatactaagaactgtgacctgatggttggcaaccatgccctgatccagggtctgaagaaagaaaaatttgacctgctgctggtggaccctaatgatatgtgtggatttgtgatagctcatcttttaggggttaaatatgctgtattttcaactggcctttggtatcctgctgaagtgggtgctcctgctccattagcatacgtcccagagtttaactcactcctcacagaccgcatgaacttgctgcaaaggatgaaaaataccggtgtttacctcatttccagattaggggtcagctttctggttcttcccaaatatgaaaggataatgcagaagtacaacctgctgccagagaagtccatgtatgatttggttcatgggtccagcctgtggatgctgtgtactgacgtagcactggaattcccaagacccactctgcctaatgttgtttatgtaggaggaatcctaaccaaaccagccagcccactaccagaagatctccaaagatgggtaaatggtgctaatgaacatggctttgtcttggtgtcttttggagctggtgtcaagtatctgtcagaagacattgctaacaaactggcaggagctctggggagattgcctcaaaaagtgatttggaggttttctggacccaaaccaaagaatctaggaaacaacactaaactcatagaatggttaccacaaaatgacctgcttgggcattcaaagattaaagccttcctgagccatggtggtttgaacagtatttttgaaactatatatcatggtgtgcctgtagtgggaattccactctttggagaccattatgatactatgaccagagtacaggcaaaaggcatggggatattgctagaatggaagacagttactgaaaaagagctctatgaagcactagtgaaggttatcaataatcccagctaccgtcagagggctcagaagctttcggaaattcacaaggatcaacctggtcaccctgtcaatcgaactatctattggatagattatattattcgtcacaatggagcccatcacctacgtgccgctgtccatcagatctccttttgtcagtattttttactggatattgcctttgtgcttttgcttggtgctgccttgttatactttctcttgtcttgggtgacaaaatttatctacagaaaaatcaaaagtctgtggtctagaaataagcatagcacagttaatggacattaccacaatggaatcctcaatggcaagtacaaaagaaatggccatattaaacatgaaaagaaagtgaaatgagccaacagcccaggtgatagaaataaattggttcactcattgaatttttattgctattatttagtctaacagctactaaaagtaaaacatcagtaaacaattctaacatgcccttatgagatctactaatgaaattctgtggaattaagatggctgtaaaaagcacaaacctaaaatgcagaaatgtattttattcaaatactgatgtagagagttttggcactgaaccttttagaagccttaattatttaaatcaattcagtgactgtgtcagaccttagttttaaatcttgatatgtgcgtgtccc

SEQ ID NO: 6909 - DNA, 3338 bp, Homo sapiens
ggaaggcagaagcaatctctgccgagagagtcagccgagcggccgcgcggagaggaggggcgggcggtccccaggcgggcgggtgcagggcgcagggcgccgacctgctggagagggggcccgggcgcgaggcggagtcccggcgcgcagccaggctggtggaggcccccggcaggctgcagattccctccggctccgggagccgcagcaggaccggccaggaggcgccatggaggggagccccatcccggtgctgacagtgcccaccgcgccctacgaggaccagcggccggccggcggcgggggtctgcggcgacccaccggcctcttcgagggccagcgcaactacctgcccaactttatccagagcgtgctgtcgtccatcgacctgcgcgaccgtcagggctgcaccatggtggtgggcagcgacggcaggtactttagcaggacggccatcgagatcgtggtgcagatggccgcggccaacgggattggacgactgattattggacagaatggcatcttgtcgacacctgcggtctcctgcattatcaggaagatcaaggcagctggtggaatcattctaacagccagccactgccctggaggaccagggggagagtttggagtgaagtttaatgttgccaatggaggtcctgcacccgatgttgtctcagacaaaatctaccaaatcagcaaaacgattgaggaatatgctatatgtcctgatctccgaatcgacctatctcgactaggaagacaagaatttgacctagaaaacaaattcaaaccattcagagtggagatagtggacccagtggatatctatcttaacctccttcggaccatctttgactttcatgccatcaagggtttgctgactggacccagccaactgaagattcgcattgacgcaatgcacggagttatgggaccttatgtgagaaaagttctgtgtgatgagctgggggccccagccaattctgcaataaactgtgttcccctggaagactttggagggcagcaccctgacccaaacctgacatatgcaacgactcttctggaagcaatgaaaggaggagaatatggatttggagctgcatttgatgctgatggggaccgttatatgatcctaggccaaaatggcttctttgtgagcccttctgactccctggccatcattgctgccaacctctcttgcattccatatttccgtcagatgggggtccgcgggtttgggaggagtatgccaaccagcatggccctggacagagtggccaaatcaatgaaggtccctgtatatgagaccccagctggatggagattcttctcaaatctgatggactcaggacgttgcaatctgtgtggggaagagagctttggcactggctctgaccacctccgagagaaggatggcctgtgggctgtcttggtctggctctccattattgctgcccggaagcagagtgtggaggaaattgtccgagatcactgggccaaatttggccgccactactattgcaggtttgactatgaggggttggatcccaagacgacatattatatcatgagggacctggaggccctggtcacagacaaatccttcattggccagcagtttgctgtggggagccatgtctacagcgtggcgaagacggatagttttgaatacgtggaccctgtggatggcactgtgaccaagaaacagggcctaaggatcattttctcggatgcatcacggctcatcttccggctcagttcctccagtggtgtgcgggccaccctcagactgtacgcagagagctacgagagggatcccagcggccatgaccaggagccacaggcagtgctgagccctctcatagccatcgcactgaaaatatcccagattcatgagagaactggccggaggggacccactgtcatcacctgaatagaggaaagatcactcaccagggccaaagagagtgctcagcgggagatgcttcactgatgccttcttgctacctgtttgtgcctcttatgactttggaaaaacaaaagatattttgcttttgggggatagagggtgggtgggaaaagaaaaaaaatccatttggttttggttttgtcctattcctccaaatgcagcagggcctttagttgtctgttaaagctgcactataatttggtatctacattttatcacacaaaggaacctccccttttgacaacaactgggctaggcagctgttaatcacaacatttgtgcatcacttgtgccaagtgagaaaatgttctaaaatcacaagagagaacagtgccagaatgaaactgaccctaagtcccaggtgcccctgggcaggcagaaggagacactcccagcatggaggagggtttatcttttcatcctaggtcaggtctacaatgggggaaggttttattatagaactcccaacagcccacctcactcctgccacccacccgatggccctgcctcccccatcccatccccaacatccctgtaccaccttctctcacatcttctaaagctttgtacaaatcacaatggtgcacttccaacaaaatatatcaataggtgttttcctctcttattttgtaaatagtattattttagctattaagctggataccttctttcaaattcagccattcagttgtaaagttgggaagaagtttcttgacaagactctgcaattaaatgcttaaaatttggaggggatccttccttgattacatcaagtatgttggtacatgggtttatacaagttcctcttgagaaggcaaaaagaccaccatgtgtgagagctctttgacttggccaataggggcctatcttaatgcacttgtttggacacatttctgatcttatttgtaaaggctgcaaaaggagaggatgaaatgctgtaaaagtaggaaatgaagtggaagctggaagaaaatgtaattggtggtacagctatgggccagatggtggaggggagggtggggacccctgccggcaagcagagtgtcacagctggctttcctcacttgggaaaagggtactgccggtctagcagcctcctctgtactcagccaggacacccagcgcgtgggacctgtttgtgtctgttttgcttccttgggaacggcacagtcactcaccctgccatttgcggaaatgacctggtgcactttgactgttaagcaatgcgttattgctgtagtcaaggttagtgcaagcaaggaaacattcccagtaaggtatttgtttccattttctgtctgtgcttctgtcagaaacttgctaggacatttagtggccaataaaaaagaaattcctaatttcaacctta

SEQ ID NO: 6910 - DNA, 2338 bp, Homo sapiens
gtgctgcctgtggggacgctggctggtgctctcaaaggaggactctaagggaggcctgctgaagcctgccaccaccaccaggttttctgtaattggatctgcacaggggcctcagggagtgcagtatgaaaacacccatttccatgcactcccaaccaacacgctgaacaatctgtactcttggtgagaaagacccatgagggactgaaaattctttttctacgtgacactgagaagacagtcacatggtttgggtggctttctagaagatgaccatagaggaccttccagattttccattagaaggaaatcctttgtttggaagatacccatttatattttctgcttctgataccccagttatcttttccatttctgcagcaccaatgccttcagactgtgaataggttgacttcctgagaagtttcagcaaaggttgttcagcataattggagagttctacacagaaggaggagagctcagattcaaaagagacttactctagaactccatggctgggtgagagagcagccagtgctgcggccctgggtaccagcacctagttactggccttggggcttcacaggggtcttcttctgatcctgcttctgacatcaaaaactgtcaaaagaaaattcagggtgcttttcttaatataaatattaagttagtaaaaaactgcaaatagggagacttccaaatcaaaaaattttctttctttgatcctaatgatgcatcatgccaggaaattctttttgatcccaaaacttcagtttcagaattatttgccattttgagacagtgggttcctcaggtccaacaaaacattgacattattggaaatgagattcttaagagaggttgcaatgtgaatgatagagatggattgacagatatgactcttttacattatacctgcaaatctggagctcatggtattggtgatgtggaaacagctgtaaaatttgcaactcagcttattgacctgggagcagacattagtttgcggagtcgctggacaaacatgaatgctttgcattatgctgcttattttgatgtccctgaacttataagagtgattttgaaaacatcgaaaccaaaagatgtggatgccacttgcagtgattttaattttggaacagctttgcatattgcagcatacaacttgtgtgcaggtgctgtgaagtgcctcttggagcagggagcaaatcctgcatttaggaatgacaaaggacagatccctgctgatgttgttccagacccagtagatatgccgttagagatggctgacgccgcagccactgctaaggaaatcaagcagatgcttctagatgcggtgcctctgtcatgtaacatctcaaaggccatgctcccaaattatgatcatgtcactggcaaggcaatgcttacgtcacttggcctgaagttgggggatcgtgttgttattgcaggacagaaggttggtacattaagattttgtggaacaactgaatttgcaagtgggcagtgggctggcattgaactggatgaaccagaaggaaaaaataatggaagtgttggaaaagtccagtactttaaatgtgcccccaagtatggtatttttgcacctctttcaaagataagtaaagcaaaaggtcgaaggaagaatataacacacactccttctacaaaagctgctgtacctctcatcaggtcccagaaaattgacgtagctcatgtgacgtcaaaagtaaatactggtttgaattcctcagcaacatctacagcaaataatagccgttgcgagggggaactccgcctcggagagagagtgttagtggtaggacagagactgggcaccattaggttctttgggacaacaaacttcgctccaggatattggtatggtatagagcttgaaaaaccccatggcaagaatgatggttcagttggaggtgtgcagtattttagctgttctccaagatatggaatatttgctcccccatccagggtgcaaagagtaacagattccctggataccctttcagaaatttcttcaaataaacagaaccattcttatcctggttttaggagaagttttagcacaacttctgcttcttcccaaaaggagattaacagaagaaatgctttttccaagtgagtattaagaagatttagaaaaacacctttcaagatgaacatgatgggattctgtgaagaaagaaaagtggagtgctgtatcttttgcattgcttggtagagttttaacacgtaggagaaaaggtgtgataagtgtattgagaagcgttcttcctccctcctttgcaagcgcaattaaaaatgtcaccagtgactaaaa

SEQ ID NO: 6911 - DNA, 1241 bp, Homo sapiens
tttccaagaaactaaagagtgtattccgagtaccagatctgagtgggatgctgcaagttcttaaagagctgacagatgtccagtactactgggaaaacttctgccacgcctaggatcccagactgtgagtctgtgttcataagcaaggttctctaagattcaactataaaaaaacttactaaggtatgtcttcattatatgacttctcatatggagaaattcagccataatcactaacttccttttaagctactcttttgcaacctcctcagaagtgcatacaaaatagaacatgaaagaaaactatccccaaatcctcaatataatttatttctggaaacctttacaagtccatgatatcaaaattttgaaaggctatgtaagacgttaatggacatctatatcaacttgaaatgatgtagctataaatttcatctcccataattcttcatttaaaaaatctagttattattagttaataaacctctgcatcaagtcaagtaacactgagataaatatgaagaaaacaagcacatccatttaatctatataatttctaaagagatgaagaaaggcttagaaaaatactacaattttatttctgtggtggttccaacctgtgataactgagaacaatacaaatagagatttgaaattcatgttgaatcatgaatcatatgtctgcatctctcaaaatctccaatagctccaaattccaggtctctgagttcatcctgctgggattcccgggcattcacagctggcaacactggctatctctgcccctggcactactgtatctctcagcacttgctgcaaacaccctcatcctcatcatcatctggcagaacccttctttacagcagcccatgtatattttccttggcatcctctgtatggtagacatgggtctggccactactatcatccctaagatcctggccatcttctggtttgatgccaaggttattagcctccctgagtgctttgctcagatttatgccattcacttctttgtgggcatggagtctggtatcctactctgcatggcttttgatagatatgtggctatttgtcaccctcttcgctatccatcaattgtcaccagttccttaatcttaaaagctaccctgttcatggtgctgagaaatggcttatttgtcactccagtgcctgtgcttgcagcacagcgtgattattgctccaagaatgaaattgaacactgcctgtgctctaacctt

SEQ ID NO: 6912 - DNA, 2119 bp, Homo sapiens
gaggaccacaagcggggccgggctacagatgctgcggctgcccgggcagcgctagcaccgaggacctgacagtcgggtgagggcctgggacagacgcagcagactgggatatgcaaagagaggagtagcctaattgtcaagtctagatctaacaaaagcagtgtcccaagatcatggcatatttccctggaactggaaggactgatcaagaaacacagctagacttgtccttgtgtggacgggagccggaaagccttgagaacttattcctcgacccggacatggcacaggagaaaatgaaactaggtttcaagtcgctgccgagttccactaccgcagacggcaacattctgagaagagtcaacagtgcccctttgatcaatggacttggttttaattcacaggtgttgcaagctgacatgttaagaattaggacaaacagaacaacatttaggaatcgacgctctctggaaattacttcacccacttctgttgaacagaagcccaaagacctcttctgaccttgagactatgccttctcccaaatcgcccctttgctttatctcctaagaactctgaagttgccatgcctgttcctttctctcccaccaggaattctggcacttctgctcaagccggatgtcactgcgtcacttctccatccccaccccctcctcttccaaaggaagcaggggaaatgtctcatcttcctaagagaaaaggttgtgcttttcttgagcaattcatctgttctaattttaggcctactgacatctgtctcattaggttttgcttttcctattggcaaccacaaaccccaaatctagtgtatggcccacaaagttgcaagcatgtaatacattcctgatcctgctttatgccctgcacatctagcccatgttcagttcatgttaagtagcattataaaccatcttaaatcatttctgaaactaggcagagacatttataaacacagtgtacaaccctttgtttaggattttctgagcattttatctctagttactatagtaggaaatggcttaaaaacagcaaacctaggaaaatgaaaaataatttttaaaaatcttaatgtctttacaatatgaattttctgtgatctctcttaaatggaactaagcttggtttttcctcctatcttaatcctttcactggagataattcttagtaattagcttcacccagcaccctccctaacctcccgctacttctactcccagccaccttcacaccatgacatcattccttggtgctgatactcttggttccttccaaggacttttctttcttcctggagtgtgagaaaaaggcacagtgggaaatttacacaaaagataccagtgatgtttattacatctcagtgaagtcattatttctattttaatactttgtttcatgtggaaaaattatctaaggtaattcctttgcaaacgccacttgtagtacttaatttggggagaattctcttccagaagccttgttttctgcaattaatttctcacattattactaaaagaatcagccaatacaagatttgatccacattttgtccaattaaaaaattcttgtagcttatgattctgtagctcaagttcaaatcctacctacctcagacatttcacactatctccctgctggtgtcatcaatttcagtctatcttctcatgatttcctggatgaagtttttcagtgggaaatcctaagcctttgcctgaacctaaattggttccttcccatcccttaggtataaattaaaaataatctcttctagggaagtctttcatcattattttatgaaggaaatttgccataccatgttttctcacttataagtcggagctaaatgataagaacttatgaacacaaggaaacaacagacactagggtctacttgagcggggaggatgtgaggagggaagcagaaaagataactattaggtactgggcttactacctgggtgatgaaatagtatgtacaacaggccaggcgcggtggctcacacctgtaatcccagcactttggaaggccaaggtgggcagatcacctgaggtcaggagtttgagatcagcctggtcaacatggtgaaaccccatctctact

SEQ ID NO: 6913 - DNA, 761 bp, Homo sapiens; identical to SEQ ID NO: 6637

SEQ ID NO: 6914 - DNA, 361 bp, Homo sapiens
ggacttttttgttgcattatttaggttgccacatatagtggggatgacagtttgtagatgtgcaggttactggttccattggcatgtactggcagagtgctgggggcagacttctgcccaaacctggaggagccataccacaggctggaagtccaggccatccgttgcacactggtaaactgcacatgtgaatgttttcagccagggaagattaacctgaggacttgtgatcagtgtaaacatggctgggtggcacatgccttggataagctcagcacgcagcacctgtaccaccccacccaagtggagattgtgcagtccaacgtcgtgtttgacatcagcagcctgatgctctatggga

SEQ ID NO: 6915 - DNA, 7762 bp, Homo sapiens
cggacgcccgcgccggctgtgctgcacagggggaggagagggaaccccaggcgcgagcgggaagaggggacctgcagccacaacttctctggtcctctgcatcccttctgtccctccacccgtccccttccccaccctctggcccccaccttcttggaggcgacaacccccgggaggcattagaagggatttttcccgcaggttgcgaagggaagcaaacttggtggcaacttgcctcccggtgcgggcgtctctcccccaccgtctcaacatgcttaggggtccggggcccgggctgctgctgctggccgtccagtgcctggggacagcggtgccctccacgggagcctcgaagagcaagaggcaggctcagcaaatggttcagccccagtccccggtggctgtcagtcaaagcaagcccggttgttatgacaatggaaaacactatcagataaatcaacagtgggagcggacctacctaggcaatgcgttggtttgtacttgttatggaggaagccgaggttttaactgcgagagtaaacctgaagctgaagagacttgctttgacaagtacactgggaacacttaccgagtgggtgacacttatgagcgtcctaaagactccatgatctgggactgtacctgcatcggggctgggcgagggagaataagctgtaccatcgcaaaccgctgccatgaagggggtcagtcctacaagattggtgacacctggaggagaccacatgagactggtggttacatgttagagtgtgtgtgtcttggtaatggaaaaggagaatggacctgcaagcccatagctgagaagtgttttgatcatgctgctgggacttcctatgtggtcggagaaacgtgggagaagccctaccaaggctggatgatggtagattgtacttgcctgggagaaggcagcggacgcatcacttgcacttctagaaatagatgcaacgatcaggacacaaggacatcctatagaattggagacacctggagcaagaaggataatcgaggaaacctgctccagtgcatctgcacaggcaacggccgaggagagtggaagtgtgagaggcacacctctgtgcagaccacatcgagcggatctggccccttcaccgatgttcgtgcagctgtttaccaaccgcagcctcacccccagcctcctccctatggccactgtgtcacagacagtggtgtggtctactctgtggggatgcagtggctgaagacacaaggaaataagcaaatgctttgcacgtgcctgggcaacggagtcagctgccaagagacagctgtaacccagacttacggtggcaactcaaatggagagccatgtgtcttaccattcacctacaatggcaggacgttctactcctgcaccacagaagggcgacaggacggacatctttggtgcagcacaacttcgaattatgagcaggaccagaaatactctttctgcacagaccacactgttttggttcagactcgaggaggaaattccaatggtgccttgtgccacttccccttcctatacaacaaccacaattacactgattgcacttctgagggcagaagagacaacatgaagtggtgtgggaccacacagaactatgatgccgaccagaagtttgggttctgccccatggctgcccacgaggaaatctgcacaaccaatgaaggggtcatgtaccgcattggagatcagtgggataagcagcatgacatgggtcacatgatgaggtgcacgtgtgttgggaatggtcgtggggaatggacatgcattgcctactcgcagcttcgagatcagtgcattgttgatgacatcacttacaatgtgaacgacacattccacaagcgtcatgaagaggggcacatgctgaactgtacatgcttcggtcagggtcggggcaggtggaagtgtgatcccgtcgaccaatgccaggattcagagactgggacgttttatcaaattggagattcatgggagaagtatgtgcatggtgtcagataccagtgctactgctatggccgtggcattggggagtggcattgccaacctttacagacctatccaagctcaagtggtcctgtcgaagtatttatcactgagactccgagtcagcccaactcccaccccatccagtggaatgcaccacagccatctcacatttccaagtacattctcaggtggagacctaaaaattctgtaggccgttggaaggaagctaccataccaggccacttaaactcctacaccatcaaaggcctgaagcctggtgtggtatacgagggccagctcatcagcatccagcagtacggccaccaagaagtgactcgctttgacttcaccaccaccagcaccagcacacctgtgaccagcaacaccgtgacaggagagacgactcccttttctcctcttgtggccacttctgaatctgtgaccgaaatcacagccagtagctttgtggtctcctgggtctcagcttccgacaccgtgtcgggattccgggtggaatatgagctgagtgaggagggagatgagccacagtacctggatcttccaagcacagccacttctgtgaacatccctgacctgcttcctggccgaaaatacattgtaaatgtctatcagatatctgaggatggggagcagagtttgatcctgtctacttcacaaacaacagcgcctgatgcccctcctgacacgactgtggaccaagttgatgacacctcaattgttgttcgctggagcagaccccaggctcccatcacagggtacagaatagtctattcgccatcagtagaaggtagcagcacagaactcaaccttcctgaaactgcaaactccgtcaccctcagtgacttgcaacctggtgttcagtataacatcactatctatgctgtggaagaaaatcaagaaagtacacctgttgtcattcaacaagaaaccactggcaccccacgctcagatacagtgccctctcccagggacctgcagtttgtggaagtgacagacgtgaaggtcaccatcatgtggacaccgcctgagagtgcagtgaccggctaccgtgtggatgtgatccccgtcaacctgcctggcgagcacgggcagaggctgcccatcagcaggaacacctttgcagaagtcaccgggctgtcccctggggtcacctattacttcaaagtctttgcagtgagccatgggagggagagcaagcctctgactgctcaacagacaaccaaactggatgctcccactaacctccagtttgtcaatgaaactgattctactgtcctggtgagatggactccacctcgggcccagataacaggataccgactgaccgtgggccttacccgaagaggacagcccaggcagtacaatgtgggtccctctgtctccaagtacccactgaggaatctgcagcctgcatctgagtacaccgtatccctcgtggccataaagggcaaccaagagagccccaaagccactggagtctttaccacactgcagcctgggagctctattccaccttacaacaccgaggtgactgagaccaccattgtgatcacatggacgcctgctccaagaattggttttaagctgggtgtacgaccaagccagggaggagaggcaccacgagaagtgacttcagactcaggaagcatcgttgtgtccggcttgactccaggagtagaatacgtctacaccatccaagtcctgagagatggacaggaaagagatgcgccaattgtaaacaaagtggtgacaccattgtctccaccaacaaacttgcatctggaggcaaaccctgacactggagtgctcacagtctcctgggagaggagcaccaccccagacattactggttatagaattaccacaacccctacaaacggccagcagggaaattctttggaagaagtggtccatgctgatcagagctcctgcacttttgataacctgagtcccggcctggagtacaatgtcagtgtttacactgtcaaggatgacaaggaaagtgtccctatctctgataccatcatcccagctgttcctcctcccactgacctgcgattcaccaacattggtccagacaccatgcgtgtcacctgggctccacccccatccattgatttaaccaacttcctggtgcgttactcacctgtgaaaaatgaggaagatgttgcagagttgtcaatttctccttcagacaatgcagtggtcttaacaaatctcctgcctggtacagaatatgtagtgagtgtctccagtgtctacgaacaacatgagagcacacctcttagaggaagacagaaaacaggtcttgattccccaactggcattgacttttctgatattactgccaactcttttactgtgcactggattgctcctcgagccaccatcactggctacaggatccgccatcatcccgagcacttcagtgggagacctcgagaagatcgggtgccccactctcggaattccatcaccctcaccaacctcactccaggcacagagtatgtggtcagcatcgttgctcttaatggcagagaggaaagtcccttattgattggccaacaatcaacagtttctgatgttccgagggacctggaagttgttgctgcgacccccaccagcctactgatcagctgggatgctcctgctgtcacagtgagatattacaggatcacttacggagagacaggaggaaatagccctgtccaggagttcactgtgcctgggagcaagtctacagctaccatcagcggccttaaacctggagttgattataccatcactgtgtatgctgtcactggccgtggagacagccccgcaagcagcaagccaatttccattaattaccgaacagaaattgacaaaccatcccagatgcaagtgaccgatgttcaggacaacagcattagtgtcaagtggctgccttcaagttcccctgttactggttacagagtaaccaccactcccaaaaatggaccaggaccaacaaaaactaaaactgcaggtccagatcaaacagaaatgactattgaaggcttgcagcccacagtggagtatgtggttagtgtctatgctcagaatccaagcggagagagtcagcctctggttcagactgcagtaaccactattcctgcaccaactgacctgaagttcactcaggtcacacccacaagcctgagcgcccagtggacaccacccaatgttcagctcactggatatcgagtgcgggtgacccccaaggagaagaccggaccaatgaaagaaatcaaccttgctcctgacagctcatccgtggttgtatcaggacttatggtggccaccaaatatgaagtgagtgtctatgctcttaaggacactttgacaagcagaccagctcagggagttgtcaccactctggagaatgtcagcccaccaagaagggctcgtgtgacagatgctactgagaccaccatcaccattagctggagaaccaagactgagacgatcactggcttccaagttgatgccgttccagccaatggccagactccaatccagagaaccatcaagccagatgtcagaagctacaccatcacaggtttacaaccaggcactgactacaagatctacctgtacaccttgaatgacaatgctcggagctcccctgtggtcatcgacgcctccactgccattgatgcaccatccaacctgcgtttcctggccaccacacccaattccttgctggtatcatggcagccgccacgtgccaggattaccggctacatcatcaagtatgagaagcctgggtctcctcccagagaagtggtccctcggccccgccctggtgtcacagaggctactattactggcctggaaccgggaaccgaatatacaatttatgtcattgccctgaagaataatcagaagagcgagcccctgattggaaggaaaaagacagacgagcttccccaactggtaacccttccacaccccaatcttcatggaccagagatcttggatgttccttccacagttcaaaagacccctttcgtcacccaccctgggtatgacactggaaatggtattcagcttcctggcacttctggtcagcaacccagtgttgggcaacaaatgatctttgaggaacatggttttaggcggaccacaccgcccacaacggccacccccataaggcataggccaagaccatacccgccgaatgtaggacaagaagctctctctcagacaaccatctcatgggccccattccaggacacttctgagtacatcatttcatgtcatcctgttggcactgatgaagaacccttacagttcagggttcctggaacttctaccagtgccactctgacaggcctcaccagaggtgccacctacaacgtcatagtggaggcactgaaagaccagcagaggcataaggttcgggaagaggttgttaccgtgggcaactctgtcaacgaaggcttgaaccaacctacggatgactcgtgctttgacccctacacagtttcccattatgccgttggagatgagtgggaacgaatgtctgaatcaggctttaaactgttgtgccagtgcttaggctttggaagtggtcatttcagatgtgattcatctagatggtgccatgacaatggtgtgaactacaagattggagagaagtgggaccgtcagggagaaaatggccagatgatgagctgcacatgtcttgggaacggaaaaggagaattcaagtgtgaccctcatgaggcaacgtgttatgatgatgggaagacataccacgtaggagaacagtggcagaaggaatatctcggtgccatttgctcctgcacatgctttggaggccagcggggctggcgctgtgacaactgccgcagacctgggggtgaacccagtcccgaaggcactactggccagtcctacaaccagtattctcagagataccatcagagaacaaacactaatgttaattgcccaattgagtgcttcatgcctttagatgtacaggctgacagagaagattcccgagagtaaatcatctttccaatccagaggaacaagcatgtctctctgccaagatccatctaaactggagtgatgttagcagacccagcttagagttcttctttctttcttaagccctttgctctggaggaagttctccagcttcagctcaactcacagcttctccaagcatcaccctgggagtttcctgagggttttctcataaatgagggctgcacattgcctgttctgcttcgaagtattcaataccgctcagtattttaaatgaagtgattctaagatttggtttgggatcaataggaaagcatatgcagccaaccaagatgcaaatgttttgaaatgatatgaccaaaattttaagtaggaaagtcacccaaacacttctgctttcacttaagtgtctggcccgcaatactgtaggaacaagcatgatcttgttactgtgatattttaaatatccacagtactcactttttccaaatgatcctagtaattgcctagaaatatctttctcttacctgttatttatcaatttttcccagtatttttatacggaaaaaattgtattgaaaacacttagtatgcagttgataagaggaatttggtataattatggtgggtgattattttttatactgtatgtgccaaagctttactactgtggaaagacaactgttttaataaaagatttacattccacaa

SEQ ID NO: 6916 - DNA, 1791 bp, Homo sapiens
gagtgcgcatgcatttttccttccacagaaaacatacaaccatgtttctgccaacgtagttgaccaagataacctgttttttaattttcatcgcaaaccagaaaaggttagaaatcatcaacgaagatgatgttgaagcttatgtgggactgagaaatctgacaattgtggattctggattaaaatttgtggctcataaagcatttctgaaaaacagcaacctgcagcacatcaattttacccgaaacaaactgacgagtttgtctaggaaacatttccgtcaccttgacttgtctgaactgatcctggtgggcaatccatttacatgctcctgtgacattatgtggatcaagactctccaagaggctaaatccagtccagacactcaggatttgtactgcctgaatgaaagcagcaagaatattcccctggcaaacctgcagatacccaattgtggtttgccatctgcaaatctggccgcacctaacctcactgtggaggaaggaaagtctatcacattatcctgtagtgtggcaggtgatccggttcctaatatgtattgggatgttggtaacctggtttccaaacatatgaatgaaacaagccacacacagggctccttaaggataactaacatttcatccgatgacagtgggaagcagatctcttgtgtggcggaaaatcttgtaggagaagatcaagattctgtcaacctcactgtgcattttgcaccaactatcacatttctcgaatctccaacctcagaccaccactggtgcattccattcactgtgaaaggcaaccccaaaccagcgcttcagtggttctataacggggcaatattgaatgagtccaaatacatctgtactaaaatacatgttaccaatcacacggagtaccacggctgcctccagctggataatcccactcacatgaacaatggggactacactctaatagccaagaatgagtatgggaaggatgagaaacagatttctgctcacttcatgggctggcctggaattgacgatggtgcaaacccaaattatcctgatgtaatttatgaagattatggaactgcagcgaatgacatcggggacaccacgaacagaagtaatgaaatcccttccacagacgtcactgataaaaccggtcgggaacatctctcggtctatgctgtggtggtgattgcgtctgtggtgggattttgccttttggtaatgctgtttctgcttaagttggcaagacactccaagtttggcatgaaaggttttgttttgtttcataagatcccactggatgggtagctgaaataaaggaaaagacagagaaaggggctgtggtgcttgttggttgatgctgccatgtaagctggactcctgggactgctgttggcttatcccgggaagtgctgcttatctggggttttctggtagatgtgggcggtgtttggaggctgtactatatgaagcctgcatatactgtgagctgtgattggggaacaccaatgcagaggtaactctcaggcagctaagcagcacctcaagaaaacatgttaaattaatgcttctcttcttacagtagttcaaatacaaaactgaaatgaaatcccattggattgtacttctcttctgaaaagtgtgctttttgaccctactggacatttattgacttaattgcttctgtttattaaaattgacctgcaaagttaaaaaaaaattaaagttgagaacaggtataagtgcacactgaatagtctaatctacatgtaacacatattttagtgtgatt

SEQ ID NO: 6917 - DNA, 575 bp, Homo sapiens; identical to SEQ ID NO: 5201

SEQ ID NO: 6918 - DNA, 2674 bp, Homo sapiens; identical to SEQ ID NO: 4303

SEQ ID NO: 6919 - DNA, 6659 bp, Homo sapiens
cgcgcgggcgcgggggacggcgcaggggccgcctggctggagcagccagaggggatagcttcgtcgagaacggaggacaccggcggtccagggtcctgggcagtcgcgccagagctgagcggagggcgcggcgcgagaacgaatctttgtgacattctctctcagcattctttatcccctgtttgctgaagacttcgacaaaagctggtcttagctgttggcattctcctgagaaaaggatagcttcagaaatcagaaaaacatttgggaggtgtctagcccagtggaccttctgaagagcaatgctaagaagacgtttggtttaaagaattaaaaggaagaacaacttaagagcttcttcaaagtttcccgcatgaaaattacttaaacgttgcacacaacgtttcacaaaatcttttgtgaaagaagaaaaggaaattcagtgtgtgagtctcagcaggagttaagctaatgcagcttaaaataatgccgaaaaagaagcgcttatctgcgggcagagtgcccctgattctcttcctgtgccagatgattagtgcactggaagtacctcttgatccaaaacttcttgaagacttggtacagcctccaaccatcacccaacagtctccaaaagattacattattgaccctcgggagaatattgtaatccagtgtgaagccaaagggaaaccgcccccaagcttttcctggacccgtaatgggactcattttgacatcgataaagaccctctggtcaccatgaagcctggcacaggaacgctcataattaacatcatgagcgaagggaaagctgagacctatgaaggagtctatcagtgtacagcaaggaacgaacgcggagctgcagtttctaataacattgttgtccgcccatccagatcaccattgtggaccaaagaaaaacttgaaccaatcacacttcaaagtggtcagtctttagtacttccctgcagacccccaattggattaccaccacctataatattttggatggataattcctttcaaagacttccacaaagtgagagagtttctcaaggtttgaatggggacctttatttttccaatgtcctcccagaggacacccgcgaagactatatctgttatgctagatttaatcatactcaaaccatacagcagaagcaacctatttctgtgaaggtgatttcagtggatgaattgaatgacactatagctgctaatttgagtgacactgagttttatggtgctaaatcaagtagagagaggccaccaacatttttaactccagaaggcaatgcaagtaacaaagaggaattaagaggaaatgtgctttcactggagtgcattgcagaaggactgcctaccccaattatttactgggcaaaggaagatggaatgctacccaaaaacaggacagtttataagaactttgagaaaaccttgcagatcattcatgtttcagaagcagactctggaaattaccaatgtatagcaaaaaacgcattaggagccatccaccataccatttctgttagagttaaagcggctccatactggatcacagcccctcaaaatcttgtgctgtccccaggagaggatgggaccttgatctgcagagctaatggcaaccccaaacccagaattagctggttaacaaatggagtcccaatagaaattgcccctgatgaccccagcagaaaaatagatggcgataccattattttttcaaatgttcaagaaagatcaagtgcagtctatcagtgcaatgcctctaatgaatatggatatttactggcaaacgcatttgtaaatgtgctggctgagccaccacgaatcctcacacctgcaaacacactctaccaggtcattgcaaacaggcctgctttactagactgtgccttctttgggtctcctctcccaaccatcgagtggtttaaaggagctaaaggaagtgctcttcatgaagatatttatgttttacatgaaaatggaactttggaaattcctgtggcccaaaaggacagtacaggaacttatacgtgtgttgcaaggaataaattagggatggcgaagaatgaagttcacttagaaatcaaagatcctacatggatcgttaaacagcccgaatatgcagttgtgcaaagagggagcatggtgtcctttgaatgcaaagtgaaacatgatcacaccttatccctcactgtcctgtggctgaaggacaacagggaactgcccagtgatgaaaggttcactgttgacaaggatcatctagtggtagctgatgtcagtgacgatgacagcgggacctacacgtgtgtggccaacaccactctggacagcgtctccgccagcgctgtgcttagcgttgttgctcctactccaactccagctcccgtttacgatgtcccaaatcctccctttgacttagaactgacagatcaacttgacaaaagtgttcagctgtcatggaccccaggcgatgacaacaatagccccattacaaaattcatcatcgaatatgaagatgcaatgcacaagccagggctgtggcaccaccaaactgaagtttctggaacacagaccacagcccagctgaagctgtctccttacgtgaactactccttccgcgtgatggcagtgaacagcattgggaagagcttgcccagcgaggcgtctgagcagtatttgacgaaagcctcagaaccagataaaaaccccacagctgtggaaggactgggatcagagcctgataatttggtgattacgtggaagcccttgaatggtttcgaatctaatgggccaggccttcagtacaaagttagctggcgccagaaagatggtgatgatgaatggacatctgtggttgtggcaaatgtatccaaatatattgtctcaggcacgccaacctttgttccatacctgatcaaagttcaggccctgaatgacatggggtttgcccccgagccagctgtagtcatgggacattctggagaagacctcccaatggtggctcctgggaacgtgcgtgtgaatgtggtgaacagtaccttagccgaggtgcactgggacccagtacctctgaaaagcatccgaggacacctacaaggctatcggatttactattggaagacccagagttcatctaaaagaaacagacgtcacattgagaaaaagatcctcaccttccaaggcagcaagactcatggcatgttgccggggctagagccctttagccactacacactgaatgtccgagtggtcaatgggaaaggggagggcccagccagccctgacagagtctttaatactccagaaggagtccccagtgctccctcgtctttgaagattgtgaatccaacactggactctctcactttggaatgggatccaccgagccacccgaatggcattttgacagagtacaccttaaagtatcagccaattaacagcacacatgaattaggccctctggtagatttgaaaattcctgccaacaagacacggtggactttaaaaaatttaaatttcagcactcgatataagttttatttctatgcacaaacatcagcaggatcaggaagtcaaattacagaggaagcagtaacaactgtggatgaagctggtattcttccacctgatgtaggtgcaggcaaagttcaagcagtaaatcccaggatcagcaatcttactgctgcagctgctgagacctatgccaatatcagttgggaatatgagggaccagagcatgtgaacttttatgttgaatatggtgtagcaggcagcaaagaagaatggagaaaagaaattgtaaatggttctcggagcttctttgggttaaagggtctaatgccaggaacagcatacaaagttcgagttggtgctgtgggggactctggttttgtgagttcagaggatgtgtttgagacaggcccagcgatggcaagccggcaggtggatattgcaactcagggctggttcattggtctgatgtgtgctgttgctctccttatcttaattttgctgattgtttgcttcatcagaagaaacaagggtggtaaatatccagttaaagaaaaggaagatgcccatgctgaccctgaaatccagcctatgaaggaagatgatgggacatttggagaatacagtgatgcagaagaccacaagcctttgaaaaaaggaagtcgaactccttcagacaggactgtgaaaaaagaagatagtgacgacagcctagttgactatggagaaggggttaatggccagttcaatgaggatggctcctttattggacaatacagtggtaagaaagagaaagagccggctgaaggaaacgaaagctcagaggcaccttctcctgtcaacgccatgaattcctttgtttaatttttaagctctttgccaatattccatttctctagaatgtttatcctaagcacttgtttgtcagccctctcatactatgaacatatgggtagagagtatattttctgctgtatgttagtattatgagaatagttacagcaaaaacataactcagtcaaatgatatgttaatatgaactggaatgcaaagtgcatactttttcattcaaaatgggtattcttgatttcctcagaactgataaaaaataatgcaacatcaccaacagatcctgttatttcctctgcaggatacagttcaatatgatgcatgaaaaatgctccacatttaaaggacatacccgtgtatgttatgaaaacatggtttgatactttgtttatactaccctcagctgaacccctatatatgaattccgttttcattgtcaagaatgttactgtagtattctctagaacttcaatgtctttgtggacattgttgtgaaattggtgactatgtatagctgtcgttagtctttttgggagactgttaggaacagtttgtacagtatatacttgctaaatgagttcattatgacagtcacattgctgatgcttactgagaactattacctactcttggctcctgttactccgtaggcttcttaatcttccaggcattacagcagcacagtgttctactttttacatcatttctatgttcggttgtttttaggcataaacaatgtgtattgcagtgcatttcggcatttgtgccatactgaaagaatcaaaaacaaatcatccaaattaaatttcaaacattatttcagagaacacagggcaagacacatacagtgccttcagatattaagcattccacaacatcgtgcattctgtatcagctggtccagtccattctgggtcctagattactgtcattgtctaaaagtaacttttaaaaagcagagttcatgaaaactgcaatgctgggaaaagaaggaaacatgaaaataaaaataagacagtttattagaaatagcatttcctcataagcataaaaagaaaatctttgttgccaactgaagcacatgatgattttgtggtcctttatggtttctattacattcagtaagaaagatgtcaacatgctagaaaattaattttaaaactaagttattccaacactaaaagcatacaacagcatgccaacagtaatatattattctccaagactttacctatgtaagtgttcaaaactctgcagcattaaacaacgtgtatgcaaattgttatggatacatttcagaatctaagaaatcaggcaagtgcttaaaaggccaacggtccaagggattacatctgcagtttaaaaagtaaatatatattctatcgtattcataaacaatatctatcaaatgggttacctccaaatatgaaaatctataacaacctatggttgaaggaatgctcagtttcatttgccaataaattggtttctcataacttgcatcaagtttaattttaagtaaagctttttatatgtagatattttgttgaatttgtaaatacacttaaaatgtagatgctatatgcttataggtgttacatacaaataaacatgcaatgtttatgttgtactgtataagaggtaagctaattaatgcagtgaatgggattggaaagcatctacttaaatatctattgggttcccccctccccccaccttttttgctgtgaaactgaaatagtgaacttttctacgtattgacagcagatttttcgatgaaatcttcagagctttgcctatggggcacagtaggcctagtaacctggcatgtttgatatatgtaggtaaagcataatttaaagtaatcccaggtaaagatggccctaaatactttcatgtctctatattcatttttcacagatccacctgtctcttgaaaatataaaaagacaaaacaggtttgccttggcatcagagagcacaaagattaaaagttactttaaatttgccaatattttgggagaacaataaaactacattttttcctcttccatactggtagatgcgaaatttatctgtgcatgaaagggtcacttctgtaatagtgcaacagatttggtattaaaaattaaatgtggttttaaaagttcctctctcttttgtaatttatgttcccaattgagtgtgaatgtccaagtaatggtgtatgtaatggtacaggcaaatgtgactggatttccctcaaaaaagtaactattaaacagtcttgatctctttgtgacttttaa

SEQ ID NO: 6920 - DNA, 2374 bp, Homo sapiens
gcaccagccgcggcaaggatggagctgggttgctggacgcagttggggctcacttttcttcagctccttctcatctcgtccttgccaagagagtacacagtcattaatgaagcctgccctggagcagagtggaatatcatgtgtcgggagtgctgtgaatatgatcagattgagtgcgtctgccccggaaagagggaagtcgtgggttataccatcccttgctgcaggaatgaggagaatgagtgtgactcctgcctgatccacccaggttgtaccatctttgaaaactgcaagagctgccgaaatggctcatgggggggtaccttggatgacttctatgtgaaggggttctactgtgcagagtgccgagcaggctggtacggaggagactgcatgccatgctcctcatccccttgtttccatgacggcacgtgcgtccttgacaaggctggatcttacaagtgtgcctgcttggcaggctatactgggcagcgctgtgaaaatctccttgaagaaagaaactgctcagaccctgggggcccagtcaatgggtaccagaaaataacagggggccctgggcttatcaacggacgccatgctaaaattggcaccgtggtgtctttcttttgtaacaactcctatgttcttagtggcaatgagaaaagaacttgccagcagaatggagagtggtcagggaaacagcccatctgcataaaagcctgccgagaaccaaagatttcagacctggtgagaaggagagttcttccgatgcaggttcagtcaagggagacaccattacaccagctatactcagcggccttcagcaagcagaaactgcagagtgcccctaccaagaagccagcccttccctttggagatctgcccatgggataccaacatctgcatacccagctccagtatgagtgcatctcacccttctaccgccgcctgggcagcagcaggaggacatgtctgaggactgggaagtggagtgggcgggcaccatcctgcatccctatctgcgggaaaattgagaacatcactgctccaaagacccaagggttgcgctggccgtggcaggcagccatctacaggaggaccagcggggtgcatgacggcagcctacacaagggagcgtggttcctagtctgcagcggtgccctggtgaatgagcgcactgtggtggtggctgcccactgtgttactgacctggggaaggtcaccatgatcaagacagcagacctgaaagttgttttggggaaattctaccgggatgatgaccgggatgagaagaccatccagagcctacagatttctgctatcattctgcatcccaactatgaccccatcctgcttgatgctgacatcgccatcctgaagctcctagacaaggcccgtatcagcacccgagtccagcccatctgcctcgctgccagtcgggatctcagcacttccttccaggagtcccacatcactgtggctggctggaatgtcctggcagacgtgaggagccctggcttcaagaacgacacactgcgctctggggtggtcagtgtggtggactcgctgctgtgtgaggagcagcatgaggaccatggcatcccagtgagtgtcactgataacatgttctgtgccagctgggaacccactgccccttctgatatctgcactgcagagacaggaggcatcgcggctgtgtccttcccgggacgagcatctcctgagccacgctggcatctgatgggactggtcagctggagctatgataaaacatgcagccacaggctctccactgccttcaccaaggtgctgccttttaaagactggattgaaagaaatatgaaatgaaccatgctcatgcactccttgagaagtgtttctgtatatccgtctgtacgtgtgtcattgcgtgaagcagtgtgggcctgaagtgtgatttggcctgtgaacttgggctgtgccagggcttctgacttcagggacaaaactcagtgaagggtgagtagacctccattgctggtaggctgatgccgcgtccactactaggacagccaattggaagatgccagggcttgcaagaagtaagtttcttcaaagaagaccatatacaaaacctctccactccactgacctggtggtcttccccaactttcagttatacgaatgccatcagcttgaccagggaagatctgggcttcatgaggccccttttgaggctctcaagttctagagagctgcctgtgggacagcccagggcagcagagctgggatgtggtgcatgcctttgtgtacatggccacagtacagtctggtccttttccttccccatctcttgtacacattttaataaaataagggttggcttctgaactac

SEQ ID NO: 6921 - DNA, 1252 bp, Homo sapiens
agatgccccacagcactgctcttccagaggcaagaccaaccaagatgagtgccctgggagctgtcattgccctcctgctctggggacagctttttgcagtggactcaggcaatgatgtcacggatatcgcagatgacggctgcccgaagccccccgagattgcacatggctatgtggagcactcggttcgctaccagtgtaagaactactacaaactgcgcacagaaggagatggagtgtacaccttaaacaatgagaagcagtggataaataaggctgttggagataaacttcctgaatgtgaagcagtatgtgggaagcccaagaatccggcaaacccagtgcagcggatcctgggtggacacctggatgccaaaggcagctttccctggcaggctaagatggtttcccaccataatctcaccacaggtgccacgctgatcaatgaacaatggctgctgaccacggctaaaaatctcttcctgaaccattcagaaaatgcaacagcgaaagacattgcccctactttaacactctatgtggggaaaaagcagcttgtagagattgagaaggttgttctacaccctaactactcccaggtagatattgggctcatcaaactcaaacagaaggtgtctgttaatgagagagtgatgcccatctgcctaccttcaaaggattatgcagaagtagggcgtgtgggttatgtttctggctgggggcgaaatgccaattttaaatttactgaccatctgaagtatgtcatgctgcctgtggctgaccaagaccaatgcataaggcattatgaaggcagcacagtccccgaaaagaagacaccgaagagccctgtaggggtgcagcccatactgaatgaacacaccttctgtgctggcatgtctaagtaccaagaagacacctgctatggcgatgcgggcagtgcctttgccgttcacgacctggaggaggacacctggtatgcgactgggatcttaagctttgataagagctgtgctgtggctgagtatggtgtgtatgtgaaggtgacttccatccaggactgggttcagaagaccatagctgagaactaatgcaaggctggccggaagcccttgcctgaaagcaagatttcagcctggaagagggcaaagtggacgggagtggacaggagtggatgcgataagatgtggtttgaagctgatgggtgccagccctgcattgctgagtcaatcaataaagagctttcttttgaccc

SEQ ID NO: 6922 - DNA, 843 bp, Homo sapiens
aatgctgggctgcccggcgacttccgcgaggtgctccagcagcggctgggggagctggagaggcagcttctgcgcaaggtggcagagctggaggacgagaagtccctgctgcacaatgagacctcggctcaccggcagaagaccgagagcaccctgaacgcgctgctgcagagggtcaccgagctggagcgaggtgtgtgcctggcctgtttctctgtctggcagtggcctgattttcaccacttgtggtcagacatgcgattctggttgatggacagcagggattgtgacaccacatgggcctggttcccgagtgtgtgagcaaataataaaggcgactgaacaaggtcatctcaggaatgagctgccagccccactggcattatccagggaaaagtgaaagtgtccaggaccagcttcgataagcaaccacacgggcgtttcagtcctttgttaactagtcctggcagcggattctgtgtatctttctcttctctgctcacactgtggcaatagcgcctttaagtcaccagatgcgttcaaggtgtccctcccactccgcacaaactacctatacggcaagatcaagaagacgctgcctgagctgtacgccttcaccatctgcctgtggctgcggtccagcgcctcaccaggcattggcacccccttctcctatgcggtgccagggcaggccaacgagatcgtgctgatcgagtggggcaacaaccccatcgagctgctcatcaacgacaaggttgcgcagctgcccctgtttgtcagtgacggcaagtggcaccacatctgtgtcacctggacgacacgggatggcatgtgggaggcatt

SEQ ID NO: 6923 - DNA, 1153 bp, Homo sapiens
agcaacgctaggaagggcgggcagaaagggcacgctcttgtgggtgactacaggttaggagaccgttgaacctggaggggccctaggatggaccccgtggaaagattcagagactgcgccctctccctggcgccgccttcccctacacgcggcgggtatattctgttgcagttggcccaggacctgtttccaagactctgccccctcgcacttccgtccctcctggttttgtaaagtgatgctcataggaacccccaccccgcgtgacactactcccagctcctggctgacttctagtcttctggttgaagctgcgcctttagatgacacgaccctacccacccctgtttccagcggatgcccgggcctggagcccacagaattcttccagtccctgggtggggacggagaaaggaacgttcagattgagatggcccatggcaccaccacgctcgccttcaagttccagcatggagtgattgcagcagtggattctcgggcctcagctgggtcctacattagtgagtgtatacgctccagcaggcagaatctggggagctgggctctcctttccacaggaggccaactctgcaacaaagtggaagtggatattgatttaggacacactgggggatctatggggtcatcccttctctcccaaagctccatcttcttccaggtgccttacgggtgaacaaggtgattgagattaacccttacctgcttggcaccatgtctggctgtgcagcagactgtcagtactgggagcgcctgctggccaaggaatgcaggctgtactatctgcgaaatggagaacgtatttcagtgtcggcagcctccaagctgctgtccaacatgatgtgccagtaccggggcatgggcctctctatgggcagtatgatctgtggctgggataagaagggtcctggactctactacgtggatgaacatgggactcggctctcaggaaatatgttctccacgggtagtgggaacacttatgcctacggggtcatggacagtggctatcggcctaatcttagccctgaagaggcctatgaccttggccgcagggctattgcttatgccactcacagagacagctattctggaggcgttgtcaatatgtaccacatgaaggaagatggttggg

SEQ ID NO: 6924 - DNA, 1696 bp, Homo sapiens
aacagccgcctgttgagtctcctccagatcgcagctgaaggatctgttgagcgcttcaggaaaggcggtgagatccggacaggcgacactaacaggtgaagatctcgggagaccatgactaagaaaagaattgctgtgattgggggaggagtgagcgggctctcttccatcaagtgctgcgtagaagaaggcttggaacctgtctgctttgaaaggactgatgacatcggagggctctggaggttccaggaaaatcctgaagaaggaagggccagtatttacaaatcagtgatcatcaatacttctaaagagatgatgtgcttcagtgactatccaatcccagatcattatcccaacttcatgcataatgcccaggtcctggagtatttcaggatgtatgccaaagaatttgaccttctaaagtatattcgatttaagaccactgtgtgcagtgtgaagaagcagcctgattttgccacttcaggccaatgggaagtggtcactgaatctgaagggaaaaaggagatgaatgtctttgatggagtcatggtttgcactggccatcacaccaatgctcatctacctctggaaagcttccctggaattgagaagttcaaagggcagtacttccacagtcgagactataagaacccagagggattcactggaaagagagtcattataattggcattgggaattctggaggggatctggctgtagagattagccaaacagccaagcaggttttcctcagcaccaggagaggggcttggatcctgaatcgtgtaggggactacggatatcctgctgatgtgttgttctcttctcgacttacacattttatatggaagatctgtggccaatcattagcaaacaaatatttggaaaaaaagataaaccaaaggtttgaccatgaaatgtttggcctgaagcctaaacacagagctctgagtcagcatccaaccttaaatgatgacctgccaaatcgtatcatttctggcttggtgaaagtgaaaggaaatgtgaaggaattcacggagacagctgccatatttgaggatggctccagggaggatgacattgatgctgttatctttgccacaggctatagctttgactttccgtttctggaagattccgtcaaagtggtcaaaaacaagatatccctgtataaaaaggtcttccctcctaacctggaaaggccaactcttgcaatcataggcttgattcagcccttaggagccattatgcccatttcagagctccaaggacgctgggccactcaggtatttaaaggtctaaagacattgccctcacagagtgaaatgatggcagaaatatctaaagctcaagaggaaattgacaaaagtctaaccatgagaaaaacatcagacaaacccaagttgaagaatattctacaaatacctgactacctcaaaactgtcaagatcatcaacaaagaaagtctgagaaattgtcccggaataaaggggcctaaggagacataacatctaaatgtaatgtagtatcctggatggactcctgcaacagaaaaagaactttaagtaaaaattaagggaatattaataaagtatgcattttggttaataatgtatcaatattggtttattagttgtgacaaatgtaccagaggaatgtaaaatgtcaacaataaaggaaattggatgtggggta

SEQ ID NO: 6925 - DNA, 1890 bp, Homo sapiens
agccgcggggagcgaggagcgcgcggagccggccatgggcaagtcagcttccaaacagtttcataatgaggtcctgaaggcccacaatgagtaccggcagaagcacggcgtccccccactgaagctctgcaagaacctcaaccgggaggctcaacagtattctgaggccctggccagcacgaggatcctcaagcacagcccggagtccagccgtggccagtgtggggagaaccttgcatgggcatcctatgatcagacaggaaaggaggtggctgatagatggtacagtgaaatcaagaactataacttccagcagcctggcttcacctcggggactggacacttcacggccatggtatggaagaacaccaagaagatgggcgtggggaaggcgtccgcaagtgacgggtcctcctttgtggtggccagatacttcccagcggggaatgttgtcaatgagggcttcttcgaagaaaacgtcctgccgccgaagaagtaacttgttaaatgtaatgggaaggtggcagacttaagaacgtggatatgaagtgcctagaaccaccacaacctggctgtgcgtctgtccctgtgggtgtatgtgcttgtgtgtgtgatgcatgtgagcgtctctggcacacacacttggacatacagttctgtgtgcgctcattcttattacaggagtgagcaaaggaagcatttaccccgatggttacctagaccacgattatttggattggggggaggggggatccgttttttttttttaattttttgttatttctaagcaaacctcttttgtacttttcttacttctaatatccatccctggactttttgtattccaaatgtttgtgatgctgagaagtgaagttcattttatgtgatcttcatgcgtcgtaatctacttttggtagataattaagattattaaaccctcatttaaatgtgacataaaatacagctttaagcacataaatacaaagcagcttccatcaggaacatggagcaggcagggactccattttacagaattactgagatttctcagttgtaaaacatgatgtcatcctgcatgcctcctggaattctccaatggggtcgccaaacaacaaatggagaaaaaaagttttacttccttgcattcttctacctttaaatagcaaagtaccactaccaccaccacctcttgcccccttccctcttttcttaaacttctggcatttcagagctcagcaggctacccctggtttctggagagttgggctaggcctgaagctccccctcccccacctctgctaggcagcccaggcctggtctgggagacagcccctcaccctgcctgggctcttggccaagcggccttggatggatgaagtcagagaggtggggtgagggtgagcttactcagggcccccagaggaagccctcagcctctgccctccccccacacagggcgggagcccaggcctgttcctggcagctgtggctgcagctgtgctcctgctccctcctggaatgtgcgacaagcccaaatgttccggggaggcggccggggcagggggcttagaagtgctaatatggttctgtgttttgcctgaaacgataccaggttcccctgaatagcaactttacaaggtccatgtgggagggaccaacccagatgccctgctgagtgtccctgaaaccatggcagctccatctgtcaagatggcaggggccggagtgagggggctgctggcttaacagcaggcatctgggcaggccagtcctcaaagcagctcctgaaggtctgtgttgcactgtcaccagtctcaagctatgcctctaatttcaccagggatattgactaagaagacaataaaatctttttctttgtgtaataacctc

SEQ ID NO: 6926 - DNA, 2345 bp, Homo sapiens
gggttatcgctcagttttgagcagaggtttacattttttaaaaatttgctttccagcccgccttgatcttctaagtgcgagttcatcgtctgagaaaaaaaaaaatctctggttggcgtttttgtttcttttcttttctttcttttctttcctttttttttttttttaatttttttcaagggggaggagattttccacaagaaaaggttgttttcatgtttgggattcaggaaagcatccaacggagtggaagcagcatgaaggaagagccgctgggcagcggcatgaacgcggtgcggacgtggatgcagggcgccggggtgctggacgccaacacggcggcgcagagcggggtgggtctggcccgggctcactttgagaagcagccgccttccaatctgcggaaatccaacttcttccacttcgtcctggccctctacgacagacagggccagcccgtggagatcgagaggacagcgtttgtggggttcgtggagaaggaaaaagaagccaacagcgaaaagaccaataacggaattcactaccggcttcagcttctctacagcaatgggataaggacggagcaggatttctacgtgcgcctcattgactccatgacaaaacaagccatagtgtatgaaggccaagacaagaacccagaaatgtgccgagtcttgctcacacatgagatcatgtgcaggttcttcttgaaatttttcctcaaatgtaaccaaaattgcctaaagaatgcgggaaacccacgtgacatgcggagattccaggtcgtggtgtctacgacagtcaatgtggatggccatgtcctggcagtctctgataacatgtttgtccataataattccaagcatgggcggagggctcggaggcttgacccctcggaagctactccctgtatcaaagccatcagcccgagtgaaggatggacgacgggaggtgcgactgtgatcatcataggggacaatttctttgatgggttacaggtcatattcggtaccatgctggtctggagtgagttgatcactcctcatgccatccgtgtgcagacccctcctcggcacatccctggtgttgtggaagtcacactgtcctacaaatctaagcagttctgcaaaggaacaccaggcagattcatttatacagcgctcaacgaacccaccatcgattatggtttccagaggttacagaaggtcattcctcggcaccctggtgaccctgagcgtttgccaaaggaagtaatactcaaaagggctgcggatctggtagaagcactgtatgggatgccacacaacaaccaggaaatcattctgaagagagcggccgacattgccgaggccctgtacagtgttccccgcaaccacaaccaactcccggcccttgctaacacctcggtccacgcagggatgatgggcgtgaattcgttcagtggacaactggccgtgaatgtctccgaggcatcacaagccaccaatcagggtttcacccgcaactcaagcagcgtatcaccacacgggtacgtgccgagcaccactccccagcagaccaactataactccgtcaccacgagcatgaacggatacggctctgccgcaatgtccaatttgggcggctcccccaccttcctcaacggctcagctgccaactccccctatgccatagtgccatccagccccaccatggcctcctccacaagcctcccctccaactgcagcagctcctcgggcatcttctccttctcaccagccaacatggtctcagccgtgaaacagaagagtgctttcgcaccagtcgtcagaccccagacctccccacctcccacctgcaccagcaccaacgggaacagcctgcaagcgatatctggcatgattgttcctcctatgtgaaagaattgccttgaagaattgtattaatgaagaggttggattctgctacagagagtaatctgatacaagtcccagagtggaacttttaactcaggcctttttaagaggaatcacaataactgcagatttttaaacaaacaaaatcaccgaccttgcaaatactgaaattggaagagggatctgcaagtgcagggtgttggttaaagttgtacctcccaagtatttgggggatatatttattctgtattgacaaaagcaaatccactttttctttttcttttttttttttaagcttaattctgcaatcatttgtcttttataaaccgtaaagctctatacaagggacactataaataagactccatgttttaatttatgatgtttttaaagctgtgtaaaggaagaatgaagtggtgatatttacaaaaaagtaaaaaaaaaaaaaaa

SEQ ID NO: 6927 - DNA, 907 bp, Homo sapiens
gagagagagagagaaaaaaaaggtcaggtaggaagaagaaaaatagactttctgtgactgtatactcttgaaatctcccgcaggttctaagcagggcaaaatggggtctcggaagtgtggaggctgcctaagttgtttgctgattccgcttgcactttggagtataatcgtgaacatattattgtatttcccgaatgggcaaacttcctatgcatccagcaataaactcaccaactacgtgtggtattttgaaggaatctgtttctcaggcatcatgatgcttatagtaacaacagttcttctggtactggagaataataacaactataaatgttgccagagtgaaaactgcagcaaaaaatatgtgacactgctgtcaattatcttttcttccctcggaattgctttttctggatactgcctggtcatctctgccttgggtcttgtccaagggccatattgccgcacccttgatggctgggagtatgcttttgaaggcactgctggacgtttccttacagattctagcatatggattcagtgcctggaacctgcacatgttgtggagtggaacatcattttattttccattctcataaccctcagtgggcttcaagtgatcatctgcctcatcagagtagtcatgcaactatccaagatactgtgtggaagctattcagtgatcttccagcctggaatcatttgaataaggacaaaatgttttccattatcaagacatggccatctatctaaatattatatcaactgtgtagacttgagggcaatattgaaatgatggtgctttctgcatttggtgtttatttgtaaaaaatttgcagtcctcactgcacatgcaagtataccacccttccatttagtatgttttttaagtaatatgcatcagaaa

SEQ ID NO: 6928 - DNA, 6874 bp, Homo sapiens
agcgtcgcgggccgaggagcagatgccgcgggggccgctcgcagccgccgctgacttgtgaatgggaccgggactggggccgggactgacaccgcagcgcttgccctgcgccagggactggcggctcggaggttgcgtccaccctcaagggccccagaaatcactgtgttttcagctcagcggccctgtgacattccttcgtgttgtcatttgttgagtgaccaatcagatgggtggagtgtgttacagaaattggcagcaagtatccaatgggtgaagaagaagctaactggggacgtgggcagccctgacgtgatgagctcaaccagcagagacattccatcccaagagaggtctgcgtgacgcgtccgggaggccaccctcagcaagaccaccgtacagttggtggaaggggtgacagctgcattctcctgtgcctaccacgtaaccaaaaatgaaggagaactactgtttacaagccgccctggtgtgcctgggcatgctgtgccacagccatgcctttgccccagagcggcgggggcacctgcggccctccttccatgggcaccatgagaagggcaaggaggggcaggtgctacagcgctccaagcgtggctgggtctggaaccagttcttcgtgatagaggagtacaccgggcctgaccccgtgcttgtgggcaggcttcattcagatattgactctggtgatgggaacattaaatacattctctcaggggaaggagctggaaccatttttgtgattgatgacaaatcagggaacattcatgccaccaagacgttggatcgagaagagagagcccagtacacgttgatggctcaggcggtggacagggacaccaatcggccactggagccaccgtcggaattcattgtcaaggtccaggacattaatgacaaccctccggagttcctgcacgagacctatcatgccaacgtgcctgagaggtccaatgtgggaacgtcagtaatccaggtgacagcttcagatgcagatgaccccacttatggaaatagcgccaagttagtgtacagtatcctcgaaggacaaccctatttttcggtggaagcacagacaggtatcatcagaacagccctacccaacatggacagggaggccaaggaggagtaccacgtggtgatccaggccaaggacatgggtggacatatgggcggactctcagggacaaccaaagtgacgatcacactgaccgatgtcaatgacaacccaccaaagtttccgcagagcgtataccagatgtctgtgtcagaagcagccgtccctggggaggaagtaggaagagtgaaagctaaagatccagacattggagaaaatggcttagtcacatacaatattgttgatggagatggtatggaatcgtttgaaatcacaacggactatgaaacacaggagggggtgataaagctgaaaaagcctgtagattttgaaaccaaaagagcctatagcttgaaggtagaggcagccaacgtgcacatcgacccgaagtttatcagcaatggccctttcaaggacactgtgaccgtcaagatctcagtagaagatgctgatgagccccctatgttcttggccccaagttacatccacgaagtccaagaaaatgcagctgctggcaccgtggttgggagagtgcatgccaaagaccctgatgctgccaacagcccgataaggtattccatcgatcgtcacactgacctcgacagatttttcactattaatccagaggatggttttattaaaactacaaaacctctggatagagaggaaacagcctggctcaacatcactgtctttgcagcagaaatccacaatcggcatcaggaagccaaagtcccagtggccattagggtccttgatgtcaacgataatgctcccaagtttgctgccccttatgaaggtttcatctgtgagagtgatcagaccaagccactttccaaccagccaattgttacaattagtgcagatgacaaggatgacacggccaatggaccaagatttatcttcagcctaccccctgaaatcattcacaatccaaatttcacagtcagagacaaccgagataacacagcaggcgtgtacgcccggcgtggagggttcagtcggcagaagcaggacttgtaccttctgcccatagtgatcagcgatggcggcatcccgcccatgagtagcaccaacaccctcaccatcaaagtctgcgggtgcgacgtgaacggggcactgctctcctgcaacgcagaggcctacattctgaacgccggcctgagcacaggcgccctgatcgccatcctcgcctgcatcgtcattctcctgggttgcccaagcttaatggaacccccctctcccagggaagacatgagattgctttatctgggcttccagctgatgctattttcctatgttaaagtaaacagaagattttgtcttctgggggtctttataaaacttcctttcctctatgtggtggctacagagagtccaaccacacttacgtcattgtagtattgtttgtgaccctgagaaggcaaaagaaagaaccactcattgtctttgaggaagaagatgtccgtgagaacatcattacttatgatgatgaagggggtggggaagaagacacagaagcctttgatattgccaccctccagaatcctgatggtatcaatggatttatcccccgcaaagacatcaaacctgagtatcagtacatgcctagacctgggctccggccagcgcccaacagcgtggatgtcgatgacttcatcaacacgagaatacaggaggcagacaatgaccccacggctcctccttatgactccattcaaatctacggttatgaaggcaggggctcagtggccgggtccctgagctccctagagtcggccaccacagattcagacttggactatgattatctacagaactggggacctcgttttaagaaactagcagatttgtatggttccaaagacacttttgatgacgattcttaacaataacgatacaaatttggccttaagaactgtgtctggcgttctcaagaatctagaagatgtgtaaacaggtatttttttaaatcaaggaaaggctcatttaaaacaggcaaagttttacagagaggatacatttaataaaactgcgaggacatcaaagtggtaaatactgtgaaataccttttctcacaaaaaggcaaatattgaagttgtttatcaacttcgctagaaaaaaaaaacacttggcatacaaaatatttaagtgaaggagaagtctaacgctgaactgacaatgaagggaaattgtttatgtgttatgaacatccaagtctttcttcttttttaagttgtcaaagaagcttccacaaaattagaaaggacaacagttctgagctgtaatttcgccttaaactctggacactctatatgtagtgcatttttaaacttgaaatatataatattcagccagcttaaacccatacaatgtatgtacaatacaatgtacaattatgtctcttgagcatcaatcttgttactgctgattcttgtaaatctttttgcttctactttcatcttaaactaatacgtgccagatataactgtcttgtttcagtgagagacgccctatttctatgtcatttttaatgtatctatttgtacaattttaaagttcttattttagtatacgtataaatatcagtattctgacatgtaagaaaatgttacggcatcacacttatattttatgaacattgtactgttgctttaatatgagcttcaatataagaagcaatctttgaaataaaaaaagatttttttttaattctgggtttgattcttaacattgaaacaaacgttaagtatttctaatgatccatttatatttctaatttaattgtgatcttttaataaccctatttatgatctgttgttgtctgtctgctgcttttattgtttatttaaaatcaaatatgttttacaaatgttttttcagacaagattctgtaacatcatgtaaagcttttttgtacattcttggtgttaacctcctggcttctcttcacacacatcttctaaaaaagaaggatgtgaaagaactaggtcagtctatgactttgcaatatgtgttatatagtatgcatttatcttgtatatcagtaatttgatggttatgagagatgaatccatgagggaatggagctatcagaactctaatgttccaggtatacattctatgccccacactgagcactggggaactgggggactagagtcaaaaatataaatttgcccagactctaatgttattctattttttcttctgttgaacttaccaggctattgtaagactcttgatagttgaaactgcttatttttcctcctgtaattttaactaattgtaaaatgatgtggcattttatgttttaatgagaatgggcgattcatttaaaaaagctttgtttagaatatgcttggggccgtaagctcagaatgagggcagggaccattttggattctgagagtcgatgccatttggtccaggagtgtgtctacagtcccctgcattccagctagtttcttggggattgaaacttatgtgaagggcatttcacctgttcagttgggccaaaggtcaaaacgtagcaatacttggggaaagaccacataaagtcacactgcaagtgctttccctctttccccctacacacagggcacgtgctttttcttggattgcagacaatttttacagtttttttctgactttattgtgaaagtttgtttcaagcatttcttgatatcatgttatgtactatttttatgatttagtcaacatgcatacaaagaaatgttttttatgaagtgctcacttccattttactttgcattgaaatcaaattgggctgaacacttcaatggaatacattttgtggacaatgtcactttagaatctttcatctcagtgaaggattacacattctcaatacttccataattgcaggttgtgttcatttttttatatagtttttgtaatccaaagaatattttgctagatttgcacagatctccaattgaatttgcaatgaagaaataactcaaaaggaatatgaatagcatttaaataagtatacagctgtaagtaaccctgtcaccatggatgatccttttctctaggaatgtatttggattagagatgacaactacattttcgcatttttatgttgaagtcttttttaaaaaggctgtttacttttcagtagttaagaatacttgtttttctttttcttttttttttttttttttaccttttattttttcgttaagcctctattgtttgtagaacactcttagaaacttggaaataaaatgtctttcccaactagtggagtcctttttcatttggagcacattgccttaaaagaagtcttaatttaaacggtccttccttattctaaagtaatcactgttttataccatctatgcagctaaaagaaggaacatgcttctgttcttttcctcaagtaatggttattgtttctagtcatcattcattcattgattcattcattaattcatcaaaatcttattttataaaccctgttccacttactggaggattcagaatgaatcttactaccttttctgacatcttttgataattcagccctgtaccaaagtatccaccttgttgtcttataatcacctatttacctatttgccctcctagaaaatgcaagaagatattttctctccttccaaattgaaggaagaacataaaagatataacaggaaggagatggtgagatatagagtgtgagcggaaattaggccagctgtggcaattctggacagatcttgggtttagctaagttatttcttttaggcctgggtttctgggggtgacagggaagataaaagagtagtttatttgcacctcttggagaattgcttaaaaatatagagatcatggctctgtatgtcaggtggaaccaggtcaggagtatttgaaactgctcctgggtcattgtgacatatccttcacatctttttgagaaactttataagacaatgggggtgaatgggggctgggcagttggagtctctgagcagaagaggggcaaaatttatttggcaggcagtgtggaggacagattaggagcatataaacccagaggtgtgccccaggagggcttttgcaaaggtcaatatgagatagaatgagggcctgaaataattcagtaatttggagatggagaagaggaaagacttctctgctcttgcactgccatcagcctggtctgggccatggtcatctctgacccggaagactgaccccacctcttggctcaccctctgcctcccaacctcctcttcacaaagaagccagagggatacttttaacacacaacccagatcacatgacttcgtaacttaaacctcttcactggcttcccaaagacttaaaatgaattctgatgcctttattttattgctttacatgaacagggccctgcgaacctctccagtgtcattccactccatcctcctttcagtgcacgatgctccagccacactggccatctttcggttcctgatacaaaaaaaaacacgttccttttccatggaaagcaggtcacccttgttattttgtatcgatgacaactctttaaacttattttgctttttggctttatgtatgtgtgtgggtgggtgggactgactgccccactagaatgtaagctccatgagggcagggaatcttgctttcttgtttaccattgtatactcagttctttacacagtgcctgaaacataacaggtacacaataaatatctattgaatgaaagcaaa

SEQ ID NO: 6929 - DNA, 776 bp, Homo sapiens
atgatgatcctgcaggtttcagggggcccctggacagtggctctgacagcattactgatggtgctgctcatatctgtggtccagagcagggccactccagagaattccgtctaccaggaacggcaggaatgctatgcgttcaatgggactcagcgcgttgtggacgggctcatctacaaccgggaggaatacgtgcattttgacagcgcagtgggggagttcctagcagtgatggagctggggcggcccataggcgagtacttcaatagccagaaggactttatggaacggaagcgagccgaggtggacaaggtgtgcagacacaagtacgagctgatggagccactcatccggcagcgccgagtccagcctagggtgaacatctcccctccaagaaggagccccagcagcaccacgacctgcttgtctaccacgtgacagatttctacccagacagcattcaagtccgatgcttcctgaatggacaggaggaaacagctggggtcgtgtccaccaacctgatccgtaatggagactggaccttccagatcctggagatgctggaaatgaccccccagcagggaaacatctacacctgccaagtggagcaccccagcctggacagtcctgtcaccgtggagtggaaggcacagtctgattctgtgcagagcaagatgctgacaggagccaggggcttcatgctggggctcatcatctgtggagtggacatcttcacgcacagaaggaggaagaaagttcaacaaggatctgcataa

SEQ ID NO: 6930 - DNA, 1646 bp, Homo sapiens
attgcgcctctcctgcagtctgattggcaccggctcccattccggctccagcctccaatccgacccccatttcggctgcagcctcggacctagctccggccctccctgttccggatcttatcttgcgccagcgcctactccaggatcccgtagccagacctcaagccatggctggtcccttctcccgtctgctgtccgcccgcccgggactcaggctcctggctttggccggagcggggtctctagccgctgggtttctgctccgaccggaacctgtacgagctgccagtgaacgacggaggctgtatcccccgagccagacatggccaactggacagctcccaggtaactgcactaggtctaggcgtctgtgccctccctccatggttactgggtaccccctccccagcgctgagtacccagacctccgaaagcacaacaactgcatggccagtcacctgaccccagcagtctatgcacggctctgcgacaagaccacacccactggttggacgctagatcagtgtatccagactggcgtggacaaccctggccaccccttcatcaagactgtgggcatggtggctggagatgaggagacctatgaggtatttgctgacctgtttgaccctgtgatccaagagcgacacaatggatatgacccccggacaatgaagcacaccacggatctagatgccagtaaaatccgttctggctactttgatgagaggtatgtattgtcctctagagtcagaactggccgaagcatccgaggactcagtctgcctccagcttgcactcgagcagagcgacgagaggtggaacgtgttgtggtggatgcactgagtggcctgaagggtgacctggctggacgttactataggctcagtgagatgacagaggctgaacagcagcagcttattgatgaccactttctgtttgataagcctgtgtccccgttgctgactgcagcaggaatggctcgagactggccagatgctcgtggaatttggcacaacaatgagaagagcttcctgatctgggtgaatgaggaggatcatacacgggtgatctccatggagaagggtggtaacatgaagagagtgtttgaaagattctgccgaggcctcaaagaggtggagagacttatccaagaacgtggctgggagttcatgtggaatgagcgtttgggatacatcttgacctgtccatctaacctgggcactggacttcgggcaggagtgcacatcaaactgcccctgctaagcaaagatagccgcttcccaaagatcctggagaacctaagactccaaaagcgtggtactggaggagtggacactgctgccacaggcggtgtctttgatatttctaatttggaccgactaggcaaatcagaggtggagctggtgcaactggtcatcgatggagtaaactatttgattgattgtgaacggcgtctggagagaggccaggatatccgcatccccacacctgtcatccacaccaagcattaactccccatcgccagctgatgactcaagattccaaggagttctgctcattctaatgatggcccattctacttgctctggacctgccctcgcatcccctgcctccatcctagtaaagactccttgctatgctgc

SEQ ID NO: 6931 - DNA, 855 bp, Homo sapiens; identical to SEQ ID NO: 2998

SEQ ID NO: 6932 - DNA, 594 bp, Homo sapiens
aaatctagaggcagttgagcatgggagccgtctgtatgttgaattagggctcgcactcttgcgcaacacgtcaccagtcggaaactgggggtttgcttctgtgatttatttcattattgtgctggtaaaagctgatgaagagactagcagctcgctgctttgctggcttgttaattttatccccactaactgtgatttctgatagccggcctgctgatagtggtaaggccatcgaagacggcaatttggaggaaatggaagaggaagtacggcttaagaagcgaaaaagacgaagaaatgtggataaagatcctgcaaaagaagatgtggaaaaagctaagaagagaagaggccgccctcccgctgagaaactgtcaccaaatccccccaaactgacaaagcagatgaacgctatcatcgatactgtgataaactacaaagatagttcagggcgacagctcagtgaagtcttcattcagttaccttcaaggaaagaattaccagaatactatgaattaattaggaagccagtggatttcaaaaaaataaaggaaaggattcgtaatcataagtaccggagcctaggcgacctgg

SEQ ID NO: 6933 - DNA, 861 bp, Homo sapiens
tttacaccttatctgcccaaaaacatcctctgaagcctctctaacccagggatcctcctcactcttcccctacccattccccccaccctccgttatactggggccagttatctagtagatactgccaattacccttggcagaggtgccctgctcactaatttcatttgaaggagagccctggaacctggttttaatgtctggcacacgccactccaggatctcccagtttgtgtttctacatctgcaggctgatgctgatttctaaccaccccatgtcaatcattttagtttgtgggcatcacctatgccctgaccgttgtgtggctcctggtgtttgcctgctctgctgtgcctgtgtacatttacttcaacacctggaccacctgccagtctattgccttccccagcaagacctctgccagtataggcagtctctgtgctgatgccagaatgtatggtgttctcccatggaatgctttccctggcaaggtttgtggctccaaccttctgtccatctgcaaaacagctgagttccaaatgaccttccacctgtttattgctgcatttgtgggggctgcagctacactggtttccctgctcaccttcatgattgctgccacttacaactttgccgtccttaaactcatgggccgaggcaccaagttctgatcccccgtagaaatccccctttctctaatagcgaggctctaaccacacagcctacaatgctgcgtctcccatcttaactctttgcctttgccaccaactggccctcttcttacttgatgagtgtaacaagaaaggagagtcttgcagtgattaaggtctctctttggactctcccctcttatgtacctctt

SEQ ID NO: 6934 - DNA, 501 bp, Homo sapiens
ttcctttctccacagatcctttagttgctttagttgagctgctcctctagcagcagctccagcccaggcagctccttggggccaagcccttttccaagggtcagaagctgtgggcagggccaggctgaggcctctcctgatcctgtccccctgtccctggacctcactcccacaggccatgaaattattcactgcgatccgggatgccctcatcactcgcctcagaaaccttccctggatgaatgaggagacccagaacatggcccaggacaaggttgctcaactgcaggtggagatgggggcttcagaatgggccctgaagccagagctggcccgacaagaatacaacgatatacagcttggatcgagcttcctgcagtctgtcctgagctgtgtccggtccctccgagctagaattgtccagagcttcttgcagcctcacccccaacacaggtggaaggtgtccccttgggacgtcaatgcttactattcggtatctga

SEQ ID NO: 6935 - DNA, 4839 bp, Homo sapiens
atttaaacagagcagagggggcggcgcgcggtcgccgcggtgctgctgctcagtgggagcgggtcttcgcaactgtctccgcgtggcgcgcgcctctagccgcccttcccctggcggctacggccggagggagcggaggcgagcgggagtcgggctccatggagagcggcggacaactgggcagaggcggagctttcatctcggcaccctggttccagtgacccgcgctagcgtcccgtcccgcccgcgtcggagcggccgccggccccgggactgaccggcctcgccgcacctcccgcaccgactagcgctcccgggcgctcctgcgcccgactcgccctcgcccccactccccggcggggtggcggcggccgggcccccacggcggcggccggagcagcagcagcagcagcaggagcccgcctctatgatgaagttcaagcccaaccagacgcggacctacgaccgcgagggcttcaagaagcgggcggcgtgcctgtgcttccggagcgagcaggaggacgaggtgctgctggtgagtagcagccggtacccagaccagtggattgtcccaggaggaggaatggaacccgaggaggaacctggcggtgctgccgtgagggaagtttatgaggaggctggagtcaaaggaaaactaggcagacttctgggcatatttgagaaccaagaccgaaagcacagaacatatgtttatgttctaacagtcactgaaatattagaagattgggaagattctgttaatattggaaggaagagagagtggttcaaagtagaagatgctatcaaagttctccagtgtcataaacctgtacatgcagagtatctggaaaagctaaagctgggttgttccccagccaatggaaattctacagtcccttcccttccggataataatgccttgtttgtaaccgctgcacagacctctgggttgccatctagtgtaagatagagagaactgggtaggcctctcccaccatgtgcagtctcatggggagaggcttctttcgtttcctcgtcaaacatctgattgacgcttgcaaactgtctgaatttgccatgcaaggttttcaaacaatttgcatgtttttcagatgctttcaaatctttttttaaaaaaatagtgtaaaatattttaataagccaaagccatgtggaatttttgtttagatgccttaactgtgccacaccccacaaccccctatattattttggttgtctatttctcacagcatattttcagttttttgtccatttgacatcagtctgtggtttattttgtcatcagattacttgtgggtatacctaccccaaaattgttttctcattcacagcattagcatattcagcaaatccatctgtggtgggaattaaaaatattattggtattaaagaaatccattcaccccaaaacttgttttacaggattacaattttaattcaaaatttccagatttgggctatttctgtatgatccaataacttattttgtcacagggcttaatttgccatttttggggatttgtcgactcattttgtctgaattttcacaactggtattatgtcactagctacctgatacggctatttcccttataactcaatagtaccttaacacaaagtataactctgtagagttggtgaatattttagggaaatattagcaaaatgcatgtagtaaagacatcttatgaaaactgtattcatggaatttgatttagcatgctcagttgccagttcccattatcgatactctttctttgcagaataccttagaaccgttatttccctcagtgtagattgctcttaaaatgtattcagttatttagtggcccccacaggagtggagtcttgaaatctaattctaaatgccagtcagtgatgatcgcatcacagttgagtgaaatggccttcctgttcagctgttagagactgaagattgttagggcaccttagaatgtctcatcttttctaggttgtcaacaggtactatttgtcacataactaactttcgaggcactggaacatacctgaactaagaattaaatcttttactttatactcacttaaaatcaagaatcccatctaaaacacataggtaccttatctgaaactcttgcacttccccaaccagggcagaaatgaggtgggagaagtttgactaaaatgagggatgggggaaagtaaaagatgtttttttttttttgagactcgctttgtcacccaggctggagtgcaatggcacaatctcaactcaccgcaacctccgcctcccgggttcaagcgattctcctgcctcagcctcccgagtagttgggattacaggcgcctgcctccatgcctggctaattttgtatttttagtagagacagggtttcttcatgttggtcaggctggtctcaaactcctaacctcgtgatccgcctgcctcgacctcccaaagtgctgggattacaggcatgagccaccatgcccagccaaagatcatttttttatatagacttcagccctttgtaaatattgtaactggggagtatagagtagaaaaaaagtatagttaaaacatttgttctacaaattaacctttaaaaatataattactgctaaaaatagagtgctgttacacttaaggaaaattagtgccattttggaaatgagatcttgtgccataaatacagctgaactgaatataaatgttcacaaattaatgctgtcaaaggaatgagtaaagcagaaaaacttttaaccagcaacatttcaagtacgtagtgtgatcaaacatgatcatccagaatttttatatttttttctttgtacagaggttacatattctgggtgttcttttataaaggaaacattttaaatcccacaaattgacactttctatcttcaatggactaagatttttttggtcagtaatctctgaaatttccttaaattatatacttaacatagcagagaaactggattgtttttgtatataagactgcttccacctgaaatgctgtcataagtactgggggggtgggggagtgcccatcttgtacatgatattcttagaggtaataaggtaatgatgcatgaatttattttataaactcttggactatgtatttgacatgtaaaatatgtacagtattaacgtcaaccatctctttaaagttagcctataaatattgttgtataattttctttggtcagaaacacttggactgaatagtgacactcggtaaggattttcagtgccatttagcaaaacgtctttagtctatgcaactagcaaaaatctgcataatgcaacaacacagttttcacacttcaaattttacatgaggggttcttcacgattctcctggaacccagtctagcaaaatgagaggaaaggccctagggagatttatttctgttaaatagttaactctgctgagtatgacaaatagtgtctactatctcaaccctccaaaatttgcagagtgttgggactgtcatttgtgattttttttttttttttttggtggggtagttgaataaaattgggcagctaaatttttcagttccatgtgcctcccaaataaaaaacagaaaataagtagtttttgtgaattgacttgcagacaaagtagaaactgtgctgcatgatgttattttgtaaacagatgacattttctgaccaggcacatgccatccaattttctgtcaatcacactgttgtataaagcagcagaactgaaggggaaaaatgattgttgtatacactgaattgctttgcatggtctcatttgagataattgatgtaagaatcctgacttttttatatttggaaacatcaaataaaaatggaaaaaatgatcatggctttaaaaaaaaaacaaaaacacacacacatgaactcagatttgcaaaccaggtttctgaaactttgggtaaggtgtatgcttttaactttgaaatgtataaacacccagcggaaacgtatacctttcagtgcatagtgcattgtgtgcttaccctgggttgtttaaacttgtgttcaaatattccccctccaagtgaaagcctgtcgggaattccacagtaacacctttactgttctcccattgatgatcatatacgttacctcttcctagcggtacatttgtatgatccttactactggaattaccgggttaaaaggaaatgcttaccactaagatgtcagtattctcctcatggatattttcagtctcaatgttgccagtctaatagtatagtatgtggttgctttactgctgttctccccacccccgtggagttgtgtcattattttaatgaatgtgagctcttgacttactctagaattctaatacagatactttctgcactagtatcacttttattattgcagttccatttaaaagcataactggctaagtcaccgccccacccgccgcattacatttcctaaaacatactgctgccaaagaccaactgtagaatccttaagtcctgttcaagtgtcacttcattttttattaggggtttcttagttggagggcatgagaaacttggccctttccaatgttgtcttcacattggagtataagaattctctataggactctttaatttttttttttttttggtagagatggggtcttgctgtgttgcccaggctggtctcaaactcctaggcttaagcagtcctccagcctcagccttctcaaagtgctaggatgattggcatgagccacctcgtctggcctgcaggtctttttaagcatttgctgttcaataataagcatcttctttatgcctagtatttgtgataagagcacaaaacaa

SEQ ID NO: 6936 - DNA, 1239 bp, Homo sapiens
agacgttcgcacacctgggtgccagcgccccagaggtcccgggacagcccgaggcgccgcgcccgccgccccgagctccccaagccttcgagagcggcgcacactcccggtctccactcgctcttccaacacccgctcgttttggcggcagctcgtgtcccagagaccgagttgccccagagaccgagacgccgccgctgcgaaggaccaatgagagccccgctgctaccgccggcgccagtggtgctgtcgctcttgatactcggctcaggccattatgctgctggattggacctcaatgacacctactctgggaagcgtgaaccattttctggggaccacagtgctgatggatttgaggttacctcaagaagtgagatgtcttcagggagtgagatttcccctgtgagtgaaatgccttctagtagtgaaccgtcctcgggagccgactatgactactcagaagagtatgataacgaaccacaaatacctggctatattgtcgatgattcagtcagagttgaacaggtagttaagcccccccaaaacaagacggaaagtgaaaatacttcagataaacccaaaagaaagaaaaagggaggcaaaaatggaaaaaatagaagaaacagaaagaagaaaaatccatgtaatgcagaatttcaaaatttctgcattcacggagaatgcaaatatatagagcacctggaagcagtaacatgcaaatgtcagcaagaatatttcggtgaacggtgtggggaaaagtccatgaaaactcacagcatgattgacagtagtttatcaaaaattgcattagcagccatagctgcctttatgtctgctgtgatcctcacagctgttgctgttattacagtccagcttagaagacaatacgtcaggaaatatgaaggagaagctgaggaacgaaagaaacttcgacaagagaatggaaatgtacatgctatagcataactgaagataaaattacaggatatcacattggagtcactgccaagtcatagccataaatgatgagtcggtcctctttccagtggatcataagacaatggaccctttttgttatgatggttttaaactttcaattgtcactttttatgctatttctgtatataaaggtgcacgaaggtaaaaagtattttttcaagttgtaaataatttatttaatatttaatggaagtgtatttattttacagctcattaaacttttttaaccaaacagat

SEQ ID NO: 6937 - DNA, 391 bp, Homo sapiens
cctgcccgatccgcgctgaccctgcgcgggacgcagccccaggcggctgcctagccgaggcgggagcccgagctgagtcgagctcgccggagcggctgtgctggatgccctggaggaacaaggaggcctccagtccctcttctgctaatccccccttggaagccctccagagccccagcttcagaggcaacatggcggacaagctgaaggaccccagcaccctgggcttcctggaggcggccgtgaagatcagccacacgtccccagatatcccagctgaggtgcagatgtcggtcaaggagcacatcatgcgtcacacccggctgcagcggcaaactacagagccagcgtcatccaccaggcacacgtccttcaagcgccacctgccaag

SEQ ID NO: 6938 - DNA, 4698 bp, Homo sapiens
gcgcccagcctcgccgccgccgagcgcccgacgcgccacgccgcgctgggcagctggagagctggcggcggagcgggccgggagcggcgggggcggcgccgaggccgcgggcggggggaggagggccgcagccccggagaggggaaaaggcgggccggacggcgccagcagccagccccgaggacgcgagcggcaggtgtgcacagaggttctccactttgttttctgaactcgcggtcaggatggttttctctgtcaggcagtgtggccatgttggcagaactgaagaagttttactgacgttcaagatattccttgtcatcatttgtcttcatgtcgttctggtaacatccctggaagaagatactgataattccagtttgtcaccaccacctgctaaattatctgttgtcagttttgccccctcctccaatggtactccagaggttgaaacaacaagcctcaatgatgttactttaagcttactcccttcaaacgaaacagaaaaaactaaaatcactatagtaaaaaccttcaatgcatcaggcgtcaaaccccagagaaatatctgcaatttgtcatctatttgcaatgactcagcattttttagaggtgagatcatgtttcaatatgataaagaaagcactgttccccagaatcaacatataacgaatggcaccttaactggagtcctgtctctaagtgaattaaaacgctcagagctcaacaaaaccctgcaaaccctaagtgagacttactttataatgtgtgctacagcagaggcccaaagcacattaaattgtacattcacaataaaactgaataatacaatgaatgcatgtgctgtaatagctgctttggaaagagtaaagattcgaccaatggaacactgctgctgttctgtcaggataccctgcccttcctccccagaagagttggaaaagcttcagtgtgacctgcaggatcccattgtctgtcttgctgaccatccacgtggcccaccattttcttccagccaatccatcccagtggtgcctcgggccactgtgctttcccaggtccccaaagctacctcttttgctgagcctccagattattcacctgtgacccacaatgttccctctccaataggggagattcaacccctttcaccccagccttcagctcccatagcttccagccctgccattgacatgcccccacagtctgaaacgatctcttcccctatgccccaaacccatgtctccggcaccccacctcctgtgaaagcctcattttcctctcccaccgtgtctgcccctgcgaatgtcaacactaccagcgcacctcctgtccagacagacatcgtcaacaccagcagtatttctgatcttgagaaccaagtgttgcagatggagaaggctctgtccttgggcagcctggagcctaacctcgcaggagaaatgatcaaccaagtcagcagactccttcattccccgcctgacatgctggcccctctggctcaaagattgctgaaagtagtggatgacattggcctacagctgaacttttcaaacacgactataagtctaacctccccttctttggctctggctgtgatcagagtgaatgccagtagtttcaacacaactacctttgtggcccaagaccctgcaaatcttcaggtttctctggaaacccaagctcctgagaacagtattggcacaattactcttccttcatcgctgatgaataatttaccagctcatgacatggagctagcttccagggttcagttcaatttttttgaaacacctgctttgtttcaggatccttccctggagaacctctctctgatcagctacgtcatatcatcgagtgttgcaaacctgaccgtcaggaacttgacaagaaacgtgacagtcacattaaagcacatcaacccgagccaggatgagttaacagtgagatgtgtattttgggacttgggcagaaatggtggcagaggaggctggtcagacaatggctgctctgtcaaagacaggagattgaatgaaaccatctgtacctgtagccatctaacaagcttcggcgttctgctggacctatctaggacatctgtgctgcctgctcaaatgatggctctgacgttcattacatatattggttgtgggctttcatcaatttttctgtcagtgactcttgtaacctacatagcttttgaaaagatccggagggattacccttccaaaatcctcatccagctgtgtgctgctctgcttctgctgaacctggtcttcctcctggactcgtggattgctctgtataagatgcaaggcctctgcatctcagtggctgtatttcttcattattttctcttggtctcattcacatggatgggcctagaagcattccatatgtacctggcccttgtcaaagtatttaatacttacatccgaaaatacatccttaaattctgcattgtcggttggggggtaccagctgtggttgtgaccatcatcctgactatatccccagataactatgggcttggatcctatgggaaattccccaatggttcaccggatgacttctgctggatcaacaacaatgcagtattctacattacggtggtgggatatttctgtgtgatatttttgctgaacgtcagcatgttcattgtggtcctggttcagctctgtcgaattaaaaagaagaagcaactgggagcccagcgaaaaaccagtattcaagacctcaggagtatcgctggccttacatttttactgggaataacttggggctttgccttctttgcctggggaccagttaacgtgaccttcatgtatctgtttgccatctttaataccttacaaggatttttcatattcatcttttactgtgtggccaaagaaaatgtcaggaagcaatggaggcggtatctttgttgtggaaagttacggctggctgaaaattctggaaatgcttctacagagaggaatggggtctcttttagtgttcagaatggagatgtgtgccttcacgatttcactggaaaacagcacatgtttaacgagaaggaagattcctgcaatgggaaaggccgtatggctctcagaaggacttcaaagcggggaagcttacactttattgagcaaatgtgattcctttcttctaaaatcaaagcatgatgcttgacagtgtgaaatgtccaattttaccttttacacaatgtgagatgtatgaaaatcaactcattttattctcggcaacatctggagaagcataagctaattaagggcgatgattattattacaagaagaaaccaagacattacaccatggtttttagacatttctgatttggtttcttatctttcattttataagaaggttggttttaaacaatacactaagaatgactcctataaagaaaacaaaaaaaggtagtgaactttcagctaccttttaaagaggctaagttatctttgataacatcatataaagcaactgttgacttcagcctgttggtgagtttagttgtgcatgcctttgttgtatataagctaaattctagtgacccatgtgtcaaaaatcttacttctacatttttttgtatttattttctactgtgtaaatgtattcctttgtagaatcatggttgttttgtctcacgtgataattcagaaaatccttgctcgttccgcaaatcctaaagctccttttggagatgatataggatgtgaaatacagaaacctcagtgaaatcaagaaataatgatcccagccagactgagaaaatgtaagcagacagtgccacagttagctcatacagtgcctttgagcaagttaggaaaagatgcccccactgggcagacacagccctatgggctcatggtttgacaaacagagtggagagaccatattttagccccactcaccctcttgggtgcacgacctgtacagccaaacacagcatccaatatgaatacccatcccctgaccgcatccccagtagtcagattatagaatctgcaccaagatgtttagctttataccttggccacagagagggatgaactgtcatccagaccatgtgtcaggaaaattgtgaacgtagatgaggtacatacactgccgcttctcaaatccccagagcctttaggaacaggagagtagactaggattccttctcttaaaaaggtacatatatatggaaaaaaatcatattgccgttctttaaaaggcaactgcatggtacattgttgattgttatgactggtacactctggcccagccagagctataattgttttttaaatgtgtcttgaagaatgcacagtgacaaggggagtagctattgggaacagggaactgtcctacactgctattgttgctacatgtatcgagccttgattgctcctagttatatacagggtctatcttgcttcctacctacatctgcttgagcagtgcctcaagtacatccttattaggaacatttcaaaccccttttagttaagtctttcactaaggttctcttgcatatatttcaagtgaatgttggatctcagactaaccatagtaataatacacatttctgtgagtgctgacttgtctttgcaatatttcttttctgatttatttaattttcttgtatttatatgttaaaatcaaaaatgttaaaatcaatgaaataaatttgcagttaagatcttt

SEQ ID NO: 6939 - DNA, 1982 bp, Homo sapiens
tggaggggcagcgtggggaacgagaaactctttgcctgtagggacccttctagctgcaaacttaaaaatgtatgtggcaagatgcaacccaagcaccgagcaggattccagacgagttataatcattctgaacggggagaggaaaggtaatgcaggtggtgaaggagcaggttatgagagcacttacaaccaagcctagctccctggaccagttcaagagcaaactgcagaacctgagctacactgagatcctgaaaatccgccagtccgagaggatgaaccaggaagatttccagtcccgcccgattttggaactaaaggagaagattcagccagaaatcttagagctgatcaaacagcaacgcctgaaccgccttgtggaagggacctgctttaggaaactcaatgcccggcggaggcaagacaagttttggtattgtcggctttcgccaaatcacaaagtcctgcattacggagacttagaagagagtcctcagggagaagtgccccacgattccttgcaggacaaactgccggtggcagatatcaaagccgtggtgacgggaaaggactgccctcatatgaaagagaaaggtgcccttaaacaaaacaaggaggtgcttgaactcgctttctccatcttgtatgactcaaactgccaactgaacttcatcgctcctgacaagcatgagtactgtatctggacggatggactgaatgcgctactcgggaaggacatgatgagcgacctgacgcggaatgacctggacaccctgctcagcatggaaatcaagctccgcctcctggacctggaaaacatccagatccctgacgcacctccgccgattcccaaggagcccagcaactatgacttcgtctatgactgtaactgaagtggccgggcccagacatgccccttccaaaactggaacacctagctaacaggagagaggaatgaaaacacacccacgccttggaaccgtcctttggtaaagggaagctgtgggtccacattcccttcagcatcacctctagccctggcaactttcagcccctagctggcatcttgctcaccgccctgattctgttcctcggctccactgcttcaggtcacttcccatggctgcagtccactggtgggacaagagcaaagcccactgccagtaagaaggccaaagggcccttccatcctagccctctgcaggcatgcccttccttcccttgggcaggaaagccagcagccccagactgcccaaaaacttgcccaccagaccaagggcagtgccccaaggcccctgtctggaggaaatggcctagctatttgatgagaagaccaaaccccacatcctcctttcccctctctctagaatcatctcgcaccaccagttacacttgaattaagatctgcgctcaaatctcctcccacctctctccctgcttttgccttgctctgttcctctttggtcccaagagcagcagccgcagcctcctcgtgatcctccctagcataaatttcccaaacagtccacaggtcccatgcccactttgcgtctgcactgtgatcgtgacaaatcttccctcctcaccagctagtctggggtttcctctccctgccccaggccagaactgccttcttcatttccacccacgctcccagcctcttagctgaaagcacaaatggtgaaatcagtagtctcgctccatctctaatagactaaacctaaatgcctctaggacggactgttgctatccaagcgtttggtgttaccttctcctgggaggtcctgctgcaactcaagttccacaggatggtcaagctgtcagacatccaagtttacatcattgtaattattactggtatttacaatttgcaagagttttgggttagtttttttttttttttttgctttgtttttgtacaaaagagtctaacattttttgccaaacagatatatatttaatgaaaagaagagatacataaa

SEQ ID NO: 6940 - DNA, 3717 bp, Homo sapiens
caccaccatgaagttgttcggcttcaggagccacaggggccagacggtcctgggcaccatagaccacctgtacacgggttccgggtaccgaatccggtactcggaactgcagaagatccacaaggcagctgtcaagggcgacgccgcggagatggagcgctgtctggcgcgcaggagcggagacctggacgccctggacaagcagcacagaactgctctacatttggcctgtgccagtggccatgtgaaagtggtcactctcctggttaacagaaaatgccagattgatatctgtgacaaagaaaatagaacacctttgatacaggctgtccattgccaggaggagtcttgtgccgttattctgctggaagatggcaccattccaaaccttaagggtatctacggcaacactgctctccattatgctgtgtatagtgagagcacctcactggcagaaaaactgcttttccatggtgcaaatattgaagcactggacaaggacaataataccccacttttatttgctataatttgcaagaaagagaaaatggtggaatttttattgaaaaacaaagcaagtacacatgccgttgatagcctgagatgaacagccctcatgcttgctgtgcactatgactcaccgggtattgtcaacatccttcttaagcaaaatattaatgtctttactcaagacatgtatggacaagatgcagaagattacgctatttcttgccgtttgacaaaaattcaacaacaaattttggaacataaaaagatgatacttaaaaatgacaaaccagatgttggaagttctgatgagtctgcagtcagcattttccatgaactgtgtgtggatttattgcctgcattggatgacaaagtcttgagtattgctgctaagcagtgtgtccccaagaaagtgtcagagcctttacgtggaccttcccatggaaaaggaaacagaatagtcaatggaaaaggagaaggacctcctgcaaaacatccttccttgaagcctagcactgaaatggaagatcctgctgtgaaaggagcagtacaaagaaagaatgtacagacattgagagcagaaaaagccttaccagtggcttcagaggaagagcaacaaaggcgtgaaagaagtgaaaagaagcaaccacaggtcaaagaaggaaataatacatacaaaagtgaaaaaatacaactatcagaaaatatatgtcatagtacatcttcttctgctgctgacagattaacccaacaaagaaagattgggaaaacataacctcagcaatttcccaagaaactgaaggaagagcatgatagatgcaccttaaaacaagaaaatgaagaaaaaacaaatgttaatatgctgtacaaaaaaaaaaaagagaagaattagaaaggaaagagaaacaatataagaaagaagttgaagcaaaataatttgaaccaactgttcaatcactagagatgaaaccgaagactgcaagaaatactccaaatcaggattttcataatcatgaagaagtgaaagatctgacggatgaaaattgcattttgaagacagatattgctatacccagacaggaaatatgcacaatgaaaaatgacaacctggaaaaagaaaataaatatcttaaggacattaaaattgctaaaggaacaaatgctgcccttgaaaattgtataaaactcaatgaggaaatgataacaaaaacagcattccggtatcaacaagagcttaatgatctcaaagctgagaatacaaggctcaattctgaactgttgaaggaaaaagaaagcaagaaaaaactggaagctgaaattgaatcttatcagtctagactggctgctgctataagtaaacacagtgaaaatgtgaaaacagaaagaaacttaaaacttgctttagagagaacacaagatgtttttgaacaagtaaaaatgagttctgatatttccgaagtagaagataagaattagtttcttactgaacaactttctaaaacgcatattatattcaatactttaaaagataattccgtaagacaagagatactctcagaaaaaagtcattagctttagaaactgtacaaaacgacctaagccaaacacagcagcaaataaaggaaatgaaagagatgtatcaaagtgcagaagctaaagtcagtaaatctactggaaagtggaactgtgtggaagagaggatatgtcaactccaacgtgaaaatccatggcttgaacagcaactaattgatgttcatcagaaagaggatcataaagagacagtaattaatatccaaagaggctttattgagagtagaaagaaagacctcatactagaagagaaaaataagaagctaatgaatgaatatgatcatttaaaagaaagtctctttcaatatgagagacagaaagcagaaacagtagtggttgtgagacaacttcaacaagaagtggctgattcccttaaaaaattaactatgttagagtctccactggaaggtacatgatgtcacattaatttggaagagacacgggcctcaaagaggaaattatttcaagtggaaagtcaacctgaagaaaaaaatgaagaattaaggaaaccttttgtgttagtatcatcactggagtataatgtgaatcaaataagaaagtaaaatcatgaattagaagaagaggcaactggatataagaaactcctggaaatgacaataaatgtgttaagtgtatttggaaatgaagacttcgattgccatggagacttaaaaacagatcaactgaaaatgaatattctgattaagaaactaaaacataagtttgatgatcttacagcagagaaggaagctgtatcttcaaaatgtgtcgatttggctaaagacaatcaagttcttcaacaggagttattatctatgaaaaaagtacaacagcaatgtgaaaaacttgagaaggataaaaagatgttggaagaagaaatattaaatcttaagacacatatggaagacaatatggtagaacttagtaaactacaagaatataaatcggagctagatgaaagggcaatgacggcagtagaaaaattagaagaaatccatttacagaaataaacacaatatgaaaaacaattagagcagttaaacaagggtaatacggcttcactaaataagaaggaactcacacttaaagatgtggaatgtaaattctccaaaatgaaaactacttatgaagaggttacaaccaaattagaagaatacaaggaagcctttgcagtagcattgaaagctaacaattccatgtcaaaaaaattaacgaaatctaataagaaaatagcaatgatcagcaccaagctccttatggagaaagagcgggtgaaatattttctcagcactcttcctacaaggcgaggcccagagtcaccttgtgttgaaaatcttactagtataggactcaacagaaaatatattccccaaatgcccgtaagaattcctacttcaaaccctcagacctcaaataactgccagaactacttgactgagatggagctggactgtgtggaacaaataattagagaaacaaagagaactgttgctgtgttggacacttgctcccatctattttcttctctagaatccactgccactgaggaagcacaggcgagccctccccagcgtgtactcactggtccccaacagaagaacagctgctgcatccactgag

SEQ ID NO: 6941 - DNA, 2127 bp, Homo sapiens
ggaagaacacaatggatctggtgctaaaaagatgccttcttcatttggctgtgataggtgctttgctggctgtgggggctacaaaagtacccagaaaccaggactggcttggtgtctcaaggcaactcagaaccaaagcctggaacaggcagctgtatccagagtggacagaagcccagagacttgactgctggagaggtggtcaagtgtccctcaaggtcagtaatgatgggcctacactgattggtgcaaatgcctccttctctattgccttgaacttccctggaagccaaaaggtattgccagatgggcaggttatctgggtcaacaataccatcatcaatgggagccaggtgtggggaggacagccagtgtatccccaggaaactgacgatgcctgcatcttccctgatggtggaccttgcccatctggctcttggtctcagaagagaagctttgtttatgtctggaagacctggggccaatactggcaagttctagggggcccagtgtctgggctgagcattgggacaggcagggcaatgctgggcacacacaccatggaagtgactgtctaccatcgccggggatcccggagctatgtgcctcttgctcattccagctcagccttcaccattactgaccaggtgcctttctccgtgagcgtgtcccagttgcgggccttggatggagggaacaagcacttcctgagaaatcagcctctgacctttgccctccagctccatgaccccagtggctatctggctgaagctgacctctcctacacctgggactttggagacagtagtggaaccctgatctctcgggcacttgtggtcactcatacttacctggagcctggcccagtcactgcccaggtggtcctgcaggctgccattcctctcacctcctgtggctcctccccagttccaggcaccacagatgggcacaggccaactgcagaggcccctaacaccacagctggccaagtgcctactacagaagttgtgggtactacacctggtcaggcgccaactgcagagccctctggaaccacatctgtgcaggtgccaaccactgaagtcataagcactgcacctgtgcagatgccaactgcagagagcacaggtatgacacctgagaaggtgccagtttcagaggtcatgggtaccacactggcagagatgtcaactccagaggctacaggtatgacacctgcagaggtatcaattgtggtgctttctggaaccacagctgcacaggtaacaactacagagtgggtggagaccacagctagagagctacctatccctgagcctgaaggtccagatgccagctcaatcatgtctacggaaagtattacaggttccctgggccccctgctggatggtacagccaccttaaggctggtgaagagacaagtccccctggattgtgttctgtatcgatatggttccttttccgtcaccctggacattgtccagggtattgaaagtgccgagatcctgcaggctgtgccgtccggtgagggggatgcatttgagctgactgtgtcctgccaaggcgggctgcccaaggaagcctgcatggagatctcatcgccagggtgccagccccctgcccagcggctgtgccagcctgtgctacccagcccagcctgccagctggttctgcaccagatactgaagggtggctcggggacatactgcctcaatgtgtctctggctgataccaacagcctggcagtggtcagcacccagcttatcatgcctgtgcctgggattcttctcacaggtcaagaagcaggccttgggcaggttccgctgatcgtgggcatcttgctggtgttgatggctgtggtccttgcatctctgatatataggcgcagacttatgaagcaagacttctccgtaccccagttgccacatagcagcagtcactggctgcgtctaccccgcatcttctgctcttgtcccattggtgagaacagccccctcctcagtgggcagcaggtctgagtactctcatatgatgctgtgattttcctggagttgacagaaacacctatatttcccccagtcttccctgggagactactattaactgaaataaatactcagagcctga

SEQ ID NO: 6942 - DNA, 2487 bp, Homo sapiens
atgtatttaaagttagagcacacacagtcatctgtgattcttggtgtcagtgtttcatcagggtcccctgcacttcagattctgcattccttgcctgtttgccttcaacctgctggtgggcagtccctaagaaagaacaggcatggaagtggggagagccatacgtatttaaaagtgagtttctctgtttgaagaacataaggacatttctcacggcctgttgtgagacgtttggaatgaggaaaagtgaacttttcgaggcatttgacttgtttgatgttcgtgactttggaaaggttatagaaacattatcacgactttctcgaacacctatagcattggccacaggaatcagttttcatctacactagtgaacggagccatggaaggatgattgctaccaaattatttgttatcagatcccacagctgaaaagagagggtgctgaaggcaagggcccttcccaacagaagaaagcattaatgatgaagacatctacaaaggccttcctgatttaatagatgaaacccttgtggaagatgaagaagatctctatgactgtgtttatggggaagatgaaggtggagaagtctatgaggacttaatgaaggcagaggaagcacatcagcccaaatgtccagaaaatgatatacgaagttgttgtctagcagaaattaagcagacagaagaaaaatatacagaaactttggagtcaatagaaaagtatttcatggcaccactaaaaagatttctgacagcagcagaatttgattcagtattcatcaacattcctgaacttgtaaaacttcatcggaacctaatgcaagagattcatgattccattgtaaataaaaatgaccagaacttgtaccaagtttttattaactacaaggaaagattggttatttacgggcagtactgcagtggagtggagtcagccatctctagtttagactacatttctaagacaaaagaagatgtcaaactgaaattagaggaatgttccaaaagagcaaataatgggaaatttactcttcgagacttgcttgtggttcctatgcaacgtgttttaaagtaccaccttctcctccaggaactggtcaaacataccactgatccgactgagaaggcaaatctgaaactggctcttgatgccatgaaggacttggcacaatatgtgaatgaagtgaaaagagataatgagacccttcgtgaaattaaacagtttcagctatctatagagaatttgaaccaaccagttttgctttttggacgacctcagggagatggtgaaattcgaataaccactctagacaagcataccaaacaagaaaggcatatcttcttatttgatttggcagtgatcgtatgtaagagaaaaggtgataactatgaaatgaaggaaataatagatcttcagcagtacaagatagccaataatcctacaaccgataaagaaaacaaaaagtggtcttatggcttctacctcatccatacccaaggacaaaatgggttagaattttattgcaaaacaaaagatttaaagaagaaatggctagaacagtttgaaatggctttgtctaacataagaccagactatgcagactccaatttccacgacttcaagatgcataccttcactcgagtcacatcctgcaaagtctgccagatgctcctgaggggaacattttatcaaggctatttatgttttaagtgtggagcgagagcacacaaagaatgtttgggaagagtagacaattgtggcagagttaattctggtgaacaagggacactcaaactaccagagaaacggaccaatggactgcgaagaactcctaaacaggtggatccagatgtgccctgtctccttcatttctttatttccatggcccctgctactagaagcattgtaaaaagccaaaagaagaacaagaaattctgaggacatgggtgaaaatgcagccttgaggtttctgaaaataacaggagacagacaaggctggtgtccagcaacaatactgggtagctctttttgtccccacttacacagcgaaggataaagaagagatcctatggacacttagtaaggattacttcatgttttaattcaaagtactttggaaagaagactttgagcagagtggaatagcaggaggtttttgtaaggtgaaatagaatgaaagtgcagccaagaatttttctgtcttcaattttaaagaacaccggcataactcatttttctttttttcccctgtgttctttttgaccttcttagcagctcctgactttctcccttggggatttttctctgtatagtcagcgctgactcccttagaaatcctgaaccccacacccgtatcgcgaaagagttgaagagaattcaaataaacacgttgagataagtagcttgtgaactaactgttacagcatgcctctgtaataagatactgccagctagaagctaaaataaagtgaaattccatttaa

SEQ ID NO: 6943 - DNA, 6163 bp, Homo sapiens
tgatacccgggagactagcttggccacaggagacaacgttgaggtacagacaggtggcagagaaacaaacatcggtattgcttaaaccacttgctatttccagttccggctgtatgtaccaaaacttaatcttatatagtaccccaaagaggtgctatgaaaattaattgtgatagtgtgattgaagtgattggcacatagtatttaacaaaatatttaatgaagtgtaatcactgttcttgctgttttaattctcacaatactctgtatgaagtgggtgttcaataagtatttgatgaatctttaaaaatttgctaggtctaccataaccaaataccgcagattgagtggttcaaacgccagagattgatattctcacaagtctggaggctgtagaaatctaacatcaaggtgccaacagggattattcaagatcaggttgtagccattttcaacaaggatcactgatcaaaattttctttttacaaagagatttacaagttaaacatgaagggaaaatactggaatcatttggattctgacaggataaagaatacaatatttcacatttacttgtaatggaacctttgtaagattcatcacttgtcattcacccagttgggaacatggatgttggtttttctcgtactactgttcagacactgtcaagaagccactgcaaaaacatcaaacaaaaaatttctcaatgggaaggaagggctaatggtatatctaatccagaaaagtggtgtccaaaggactttggagtgagatataactgtcaccaagagatccgtcttaagaaaaatcctatagctgagagaaagagcaaaaacttggatgtaaccagccgtgaaaatgtgggtctagatataaatgaaaataccaaaagccatgatcaaagtgagaatgaaaataagaaacatgaatatgacgatacacacttctttaaaaatgaatcagaatccaactgggtatgttctcgggtcaaagaaattgaaagctgtaaagaagatgtcttagatccagagacttcattacctccaggaaacttctatacctcacaaatactgtggaagaaaatagaagcacttcccccagataaactcttaaatttggctttagaacattgtgactcttcagaaaaagaactgaacttcagagttctggatagttcatacggaataaccaagagcttagaaaatatttactctgaacctgaggggcaagaatgtggaccttccataaatcctttgccaaaacctcgtaggacattcagatatttatccgaatctggtgttacgccgtataaagaaagaaactgtgacaaaaaatactgtgaaaataactcttgtgcacaatcttctttggcctcttctcaggaacctgaaccaaagaaatatggtggaaaaatcagaggaagatctaaaaggaaatcctttgaatttgaggatattcagcactttcgaaatcggaactcacagacgattcgtgaagaacttggaagaaattctgggtcagcactttattacacacagtctgaggacaatatctatgaagatatcatatatcccaccaaagaaaatccatatgaagatattccagtgcagcctttacctatgtggagatccccttcagcatggaagctaccacccgctaaaagtgcttttaaagcacccaagctccctccaaaacctcagttccttcaccggaagactatggaagtaaagaactcacaggcttatttgcggtcaaagcttacaaaagatacaactttgccggtcactttaacggaatggaagcttttccgagctggtgaagttgcaaacacgaaaaggaaaaatcttccaaggcttgtattgaaaatagatgacatatttgaatctaaaagagggaagaagaaggtaaagttacattcttacactggaaaggaattacctccgacaaaaggtgaaaccagtgggaacgaaagtgatgccgagtatctgccaaagaatcgccataaacgcttagcacaactgcaaccgtcttccaagaggaatcctcactaccagaccttggagcgggatcttattgaattacaggagcagcagctgtttgaactttttgtggtggtgtctctacagaagaaaccatcaggaataagctatattccccaggtcatacaacaattccctggcaaggatgatcatggctataagcagtccaaagacatggaagagagacttaaagttattccaaaattttgttttcctgattcaaaggactggatgccaacctcagaactcaagagtgaaacattctcctttgtcttgactggtgaagatggaagccggtggtttggttactgtaagaagctcttgccagtaggcaaaggaaagcgactccctgaggtatactgcatggttagtcgcctaggctgcttcaatcttttttcaaagattctggatgaagtagagaagagaagagaaatgtctccagcccttgtttacccattcatgcgaagtgtcatggaagctcctttcccagctcctggacgcaccatcacagttaagagttacctccctggggctggagatgagtccattgaactctgccgaccactagattcccgattggaacatgttgattttaaatgtctctttaagtgcctgagtgtgtgtcatctcatccgggtctgtgcctctctccttttggagcgtagggtaatctttgttgccaacagcctaagcaccctgtcaaaatgtggccatgctgtggtagctacactgtatccgttcacctggcagcatacctatatcccagtcctgccagcatctatgattgacatcgtgtgctcacctacaccattccttattggaatcctgtcttgctccttaccacagctccaggacctacccattgaagaggtgctgatagttgatctctgtgcagacaagttcttacaggaggtatctgatgaggatgaaattctaccaccaaaacttcaagctgccctgatgcagattttggaagaacgaaatgaaatcttgactcaggagcagaatttttcacaagatgtgacactcaactctctggtgtccgaagcatttgtcaggttttttgtggagttggtaggacattattctttgaacatgactgtcactgagcgtggggagcgtgttttccaaagggaaccattccgtaagtcccacacctcccgaagtgtacgccacttcctggatctcttcatggaaactcagatgtttgcaggattcatccaggaccgagagcttcggaaaagtggagttaaaggtttgtttgagatccgggccatccagtatttggaaacaattcctgagtcggagcccagtgggatgaatagaattttgcggagtcttggaagcaaaatgaaatttctgcaaaagaaatgaaatctctgattgtctccatcctgaatatacaacagaaagtgccaaagaaaatatttttctaagggtcaggatcccatgaagtattctacaaaattcttgaaattttaaaaggttaaagagcgagtcaggctgttagaggaggattctcctgttgctgctgtagtaatcactggagaattgttgggaatggtctggcaccatgccatctttactctgtctccattttttttttatagcagccttttctatgtgattcttgggctcattctctgttttgtgctttgtctgtgaaagtagttgtgtttcacaaggaaaagccttgttgttgttacatttaaaaaatagctcaaagatgagaataatgagagaaatgctgagtttaaggtagtagagagacatgatggaaatggagaacactagccttatacacataattctcatcactgaactatcatggcccctttaaacccatgggctgtttgacctgggctaaggaatagactcatcacatatctccattgttttgccttatattatatctaggggaatctcacttaggaggaagccctacttgtaatattataaggtactgttattaagtaccttataaaattagacatcttgcaactcctcctccaaattatgtggcatttgagtagtttgcttgtgcctcacatgtcaacattaaactttgtggaggctggatgcagtggctcacacctgtaatctccaccactttgggaggctaaggcaggagtttgagggtgggagtttgagactagcctgggcaacatagcaagatcccatctctacaaaaacattttaaaaataagtaaataaatttaaactttgtgaaattatagctaatatgaaaatgtcctttcaagggcatgggagccacctttattttttagtgtccaccatgtgccatgcactgtggtatatgtatgcatatcatctcaaccaatccttaaatcaaccttatgagatagatatttgcatctccattttactaataaactgaggctgggtgctatggctcacgtctgtaatcccagcactatgggagtccaaggcgagtggatcatttgaggtcaggagttcgagaccagcctggcaacatggtgaaactctgtctctactaaaaatacacacaaaaaattagctgggtgtggtggcaggtgcctgtaatcctggctgctcgggaggctgagccatgagaatcgcttgagcccaggaggcagaggttgcagtgagccgagatcgcgccactgcattccagccagggtgacagagcgagactccatctcaaaaaaaagaaaaaaggaaaagaaaaaagaaaaaaacaaattcaaagaagttaaatacgttgcccaaagttgtacaacacagaactgaagccaagacttttatggacacagaaaaagttggttagtcctacagatggaaatttcatctcagtaggattatatagctatttcttttattaataaaaattttctattaagtgtaccagagccacttttcagctctgaggataaggaactttataggtgcctagatgagactctttttattcccctagaaatgttgaaatttttgctctaattaaattagactcaaaatatgaacattccttgaacatataccacttagtcatccagacctttaatatctaaagtagtagtagtagtgattggaaagagaaagttttcagtgatggtgcagtgttttttttgtgtgtgtatgtgtgtgtgtgtgtgttttgtttcggttttttttttttttttttgagatggagtttcgctctttttgcccaggctggagtgcaatggtgtgatctcggctcactgcaacctccgcctcccggcttcaagcaattctcctgcctcagcctcctgagtagctggaattataggcacccgccaccacacctggctaattttgtacttttagtggagacgggggtttcaccatgttggccaggctggtctcgaactcctgacctcaggtgatccacccaccttggcctcccaaagtgctgggattacaggcatgagtcactgcacccggcctgtgtgtgtgtgtgtgtgtgtgtgtgtgtgttttcaaactcatgggcaaattcaagttcagatggtgcacttttcattgattaatgttatagcaaatgtcagtttgttttcttcagtttctgctgatggttttaactggcacagaaagtatttattcaaccttacaaaactgtgtaagttgtattgtgatacagtttattgacttgtacagtattgtcattacaacccattcaggtatgcatgaatctgaagcagaacaccatttaagactggtgctgtataatataattcctacagatgtgggtccagggaatagaactgagcctgtcttttttttaatgttaagcaggttacccccagtggggcttctactagacatctctccatttggtctcttcttacactccaacccagcaggaacagttaataattggatgtttataaaatgggggtaaaagggtttactgtgatggatcctggctatccctctaggaggagacctttgcttcagcaatggtgtcttcatcctcgcagcctgaagctgcttcatttccttaggtctgttgtgttttctgtaaagtgttaggaattctggatatttttgtaaaagaatcaagatttgtataaaatgttgtttacagatcttttaatgaataaatacataaaccccccaca

SEQ ID NO: 6944 - DNA, 552 bp, Homo sapiens
cagcaaatgcaactagccaatgccatgatgcctggtgccccattacaacccgtgccaatgttttcagttgcaccaagcttagccaccaatgcatcagcagccgcctttaatccctatctgggacctgtttctccaagcctggtcccggcagagatcttgccgactgcaccaatgttggttacagggaatccgggtgtccctgtacctgcagctgctgcagctgctgcacagaaattaatgcgaacagacagacttgaggtatgtcgagagtaccaacgtggcaattgcaaccgaggagaaaatgattgtcggtttgctcatcctgctgacagcacaatgattgacaccaatgacaacacagtcactgtgtgtatggattacatcaaagggagatgctctcgggaaaagtgcaaatactttcatccccctgcacatttgcaagccaagatcaaggctgcccaataccaggtcaaccaggctgcagctgcacaggctgcagccaccgcagctgccatggctcaatattgtgcatgacacccgctacaagtgttg

SEQ ID NO: 6945 - DNA, 867 bp, Homo sapiens
gggatacaactctggagtcctctgagaggttggatgggagagcatgtctgtgtgtctcagagccaccaaggaggagcaggggagcgacggccggggcagaagttgagaccacccagcagaggagctaggccagtccatctgcatttgtcacccaagaactcttaccatgaagaccctcctactgttggcagtgatcatgatctttggcctactgcaggcccatgggaatttggtgaatttccacagaatgatcaagttgacgacaggaaaggaagccgcactcagttatggcttctacggctgccactgtggcgtgggtggcagaggatcccccaaggatgcaacggatcgctgctgtgtcactcatgactgttgctacaaacgtctggagaaacgtggatgtggcaccaaatttctgagctacaagtttagcaactcggggagcagaatcacctgtgcaaaacaggactcctgcagaagtcaactgtgtgagtgtgataaggctgctgccacctgttttgctagaaacaagacgacctacaataaaaagtaccagtactattccaataaacactgcagagggagcacccctcgttgctgagtcccctcttccctggaaaccttccacccagtgctgaatttccctctctcataccctccctccctaccctaaccaagttccttggccatgcagaaagcatccctcacccatcctagaggccaggcaggagcccttctatacccacccagaatgagacatccagcagatttccagccttctactgctctcctccacctcaactccgtgcttaaccaaagaagctgtactccggggggtctcttctgaataaagcaattagcaaatca

SEQ ID NO: 6946 - DNA, 868 bp, Homo sapiens
gacggaacaggctctgcgcatgagcgtggaggccgacatcaacggcctgcgcagggtgctggatgagctgaccctggccaggaccgacctggagatgcagatcgaaggcctgaaggaagagctggcctacctgaagaagaaccatgaggaggaaatcagtacgctgaggggccaagtgggaggccaggtcagtgtggaggtggattccgctccgggcaccgatctcgccaagatcctgagtgacatgcgaagccaatatgaggtcatggccgagcagaaccggaaggatgctgaagcctggttcaccagccggactgaagaattgaaccgggaggtcgctggccacacggagcagctccagatgagcaggtccgaggttactgacctgcggcgcacccttcagggtcttgagattgagctgcagtcacagctgagcatggtatgtgtccccccaccgccgccgcttccctgtgcaattcacacttatacccttgcagcctagggcagcctggccggtggctgtgcccatgccctctccgggaaccaggctctgctgagtcacaaccccctctccctatcctcagaaagctgccttggaagacacactggcagaaacggaggcgcgctttggagcccagctggcgcatatccaggcgctgatcagcggtattgaagcccagctgggcgatgtgcgagctgatagtgagcggcagaatcaggagtaccagcggctcatggacatcaagtcgcggctggagcaggagattgccacctaccgcagcctgctcgagggacaggaagatcactacaacaatttgtctgcctccaaggtcctctgaggcagcaggctctggggcttctgctgtcc

SEQ ID NO: 6947 - DNA, 3863 bp, Homo sapiens
gagaaatccatgactcacatatatcgtccgtcatccccagtcaagctcagggaggagggaggagcccagctggggcaggagaggggtgtctccccaccaaacaaacccggtccctccctctccgcactagctgtctgccctgccctgccgtaggagatgggctgggagcctcccacgctctccagctcactcggcaggcagcggggaccagggctggcaggttaagcctctgggggtggatcctgaaaggtggtccagccgcctggccctgcgtgggaccctccacctggcagcaggtggtgacttccaagagtgactccgtcggaggaaaatgactccccagtcgctgctgcagacgacactgttcctgctgagtctgctcttcctggtccaaggtgcccacggcaggggccacagggaagactttcgcttctgcagccagcggaaccagacacacaggagcagcctccactacaaacccacaccagacctgcgcatctccatcgagaactccgaagaggccctcacagtccatgcccctttccctgcagcccaccctgcttcccgatccttccctgaccccaggggcctctaccacttctgcctctactggaaccgacatgctgggagattacatcttctctatggcaagcgtgacttcttgctgagtgacaaagcctctagcctcctctgcttccagcaccaggaggagagcctggctcagggccccccgctgttagccacttctgtcacctcctggtggagccctcagaacatcagcctgcccagtgccgccagcttcaccttctccttccacagtcctccccacacggccgctcacaatgcctcggtggacatgtgcgagctcaaaagggacctccagctgctcagccagttcctgaagcatccccagaaggcctcaaggaggccctcggctgcccccgccagccagcagttgcagagcctggagtcgaaactgacctctgtgagattcatgggggacatggtgtccttcgaggaggaccggatcaacgccacggtgtggaagctccagcccacagccggcctccaggacctgcacatccactcccggcaggaggaggagcagagcgagatcatggagtactcggtgctgctgcctcgaacactcttccagaggacgaaaggccggagcggggaggctgagaagagactcctcctggtggacttcagcagccaagccctgttccaggacaagaattccagccaagtcctgggtgagaaggtcttggggattgtggtacagaacaccaaagtagccaacctcacggagcccgtggtgctcactttccagcaccagctacagccgaagaatgtgactctgcaatgtgtgttctgggttgaagaccccacattgagcagcccggggcattggagcagtgctgggtgtgagaccgtcaggagagaaacccaaacatcctgcttctgcaaccacttgacctactttgcagtgctgatggtctcctcggtggaggtggacgccgtgcacaagcactacctgagcctcctctcctacgtgggctgtgtcgtctctgccctggcctgccttgtcaccattgccgcctacctctgctccagggtgcccctgccgtgcaggaggaaacctcgggactacaccatcaaggtgcacatgaacctgctgctggccgtcttcctgctggacacgagcttcctgctcagcgagccggtggccctgacaggctctgaggctggctgccgagccagtgccatcttcctgcacttctccctgctcacctgcctttcctggatgggcctcgaggggtacaacctctaccgactcgtggtggaggtctttggcacctatgtccctggctacctactcaagctgagcgccatgggctggggcttccccatctttctggtgacgctggtggccctggtggatgtggacaactatggccccatcatcttggctgtgcataggactccagagggcgtcatctacccttccatgtgctggatccgggactccctggtcagctacatcaccaacctgggcctcttcagcctggtgtttctgttcaacatggccatgctagccaccatggtggtgcagatcctgcggctgcgcccccacacccaaaagtggtcacatgtgctgacactgctgggcctcagcctggtccttggcctgccctgggccttgatcttcttctcctttgcttctggcaccttccagcttgtcgtcctctaccttttcagcatcatcacctccttccaaggcttcctcatcttcatctggtactggtccatgcggctgcaggcccggggtggcccctcccctctgaagagcaactcagacagcgccaggctccccatcagctcgggcagcacctcgtccagccgcatctaggcctccagcccacctgcccatgtgatgaagcagagattcggcctcgtcgcacactgcctgtggcccccgagcccggcccagccccaggccagtcagccgcagactttggaaagcccaacgaccatggagagatgggccgttgccatggtggacggactcccgggctgggcttttgaattggccttggggactactcggctctcactcagctcccacgggactcagaagtgcgccgccatgctgcctagggtactgtccccacatctgtcccaacccagctggaggcctggtctctccttacaacccctgggcccagccctcattgctgggggccaggccttggatcttgagggtctggcacatccttaatcctgtgcccctgcctgggacagaaatgtggctccagttgctctgtctctcgtggtcaccctgagggcactctgcatcctctgtcattttaacctcaggtggcacccagggcgaatggggcccagggcagaccttcagggccagagccctggcggaggagaggccctttgccaggagcacagcagcagctcgcctacctctgagcccaggccccctccctccctcagccccccagtcctccctccatcttccctggggttctcctcctctcccagggcctccttgctccttcgttcacagctgggggtccccgattccaatgctgttttttggggagtggtttccaggagctgcctggtgtctgctgtaaatgtttgtctactgcacaagcctcggcctgcccctgagccaggctcggtaccgatgcgtgggctgggctaggtccctctgtccatctgggcctttgtatgagctgcattgcccttgctcaccctgaccaagcacacgcctcagaggggccctcagcctctcctgaagccctcttgtggcaagaactgtggaccatgccagtcccgtctggtttccatcccaccactccaaggactgagactgacctcctctggtgacactggcctagggcctgacactctcctaagaggttctctccaagcccccaaatagctccaggcgccctcggccgcccatcatggttaattctgtccaacaaacacacacgggtagattgctggcctgttgtaggtggtagggacacagatgaccgacctggtcactcctcctgccaacattcagtctggtatgtgaggcgtgcgtgaagcaagaactcctggagctacagggacagggagccatcattcctgcctgggaatcctggaagacttcctgcaggagtcagcgttcaatcttgaccttgaagatgggaaggatgttctttttacgtaccaattcttttgtcttttgatattaaaaagaagtacatgttcattgtagagaatttggaaactgtagaagagaatcaagaagaaaaataaaaatcagctgttgtaatcacctagcaaactgg

SEQ ID NO: 6948 - DNA, 5504 bp, Homo sapiens
atattacttaagaaagataaccttaaccaggacacgaggaaactgttaatgacttgggctttggaagtagctgttttaatgaagaagtccgaaacatatgcacctttattctgtcttccgtctttccataaattttgcaaaggccttttagccaacattctcgttgaagatgtgaatatctgtctgcaggcatgcagcagtctacctgctctgtcctcttccttgccagatgatcttttacagagatgtgttgatgtttgccatgttcaactagtgcactgtggaactcgtattcgacaagcatttggaaaactgttgaaatcaattcctttagatgttatcctaagcaataacaatcacacagaaattcaagaaatttctttagcattaagaagtcacatgagtaaagcaccaagtaatacattccacccccaagatttctctgatgttattagttttattttgtatgggaactctcatagaacagggaaggacaattggttggaaagactgttctatagctgccagagactggataagcatgaccagtcaacaattccacgcaatctcctgaagacagatgctatcctttggcagtgggccgtatgggaagctgcacaattcactgttctttctaagctgagaaccccactgggcagagctcaagacaccttccagacaattgaaggtatcattcgaagtctcgcagctcacacattaaaccctgatcaggatgttagtcagtggacaactgcagacagtgatgaaggccatggtaacaaccaacttagacttgttcttcttctgcagtatctggaatatctggagaaattaatgtataatgcatacgagggatgtgctaatgcattaacttcacctcccaaggtcattagaacttttttctataccaatcgccaaacttgtcaggactggctaacgcggattcgactctccatcatgagggtaggattgttggcaggccagcctgcagtgacagtgagacatggctttgacttgcttacagagatgaaaacaaccagcctatctcaggggaatgaattggaagtaaccattatgatggtggtagaagcactatgtgaacttcattgtcctgaagctatacagggaattgctgtctggtcatcatctattgttggaaaaaatcttctgtggattaactcagtggctcaacaggctgaagggaggtttgaaaaggcctctgtggagtaccaggaacacctgtgtgccatgataggtgttcattgctgcatctccagctttgacaaatcggtgctcaccttagccaatgctgggtgtaacagtgccagcccgaaacattgtctgaatggtgaatccagaaaaactgtgctgtccaaaccgactgactcttcccctgaggttataaattatttaggaaataaagcatgtgagtgctacatctcaattgccgattgggctgctgtgcaggaatggcagaacgctatccatgacttgaaaaagagtaccagtagcacttccttcaacctgaaagctgacttcaactatataaaatcattaagcagctttgagtctggaaaatttgtcaaatgtaccgagcaattagaattgttaccaggagaaaatatcaatctacttgctggagggtcaaaagaaaaaatagacatgaaaaaactgcttcgtaacatgtgaagtccagatccaagggaacctcagaaatccattgaagttccattgttaagaagttctgtttgtttggcaactgctttaaacccgatagaacaagatcagaagtggcagtctataactgaaaatgtggtaaagtacttgaagcaaacatcccgcatcactattggacctctgagactttctactttaacagtttcacagtctttgccagttctaagtaccttgtagctgtattgctcgtttgctttggagaccacagtttctaacagactttcaacagaggactgtcttattccactcttcggcgaagctttacgttcatgtaaacagcatgacgtgaggccgtggatgcaggcattaaggtatactgtgtaccagaatcagttgttggagaaaattaaaggtatgatctcgtgaaaccttgagagaaactgaatgacgaatgaaactattgttcctgtttcacacagaagaaaactgaggttggcactcatcatgagcccctgttctcattctgcaaatggtgaagctctctattgtcctgaccccacagttcctgtcccatgaccagggccagctcaccaaggagctgcagcagcatgtaaagtcagtgacatgcccatgcgagtacctgaggaaggttatcaatactctggctgaccatcatcatcgtgggactgactttggtggaagtccttggttacatgtcattattgcgtttccgacaagttataaagttgtcattaccctctggatagtttacctttgggtgtctctcctgaagactatcttctggtctcgaaatggacatgatggatccacggatgtacagcagagagcctggaggtccaaccgccgtagacaggaagggctgaggtccatttgtatgcacacaaagaaaagagtttcttcctttcgaggaaataaaattggcctgaaagacgtcattactctacggagacatgtggaaacaaaagttagagctaaaatccgtaagaggaaggtgacaacgaaaatcaaccatcatgacaaaatcaatggaaagaggaagaccgccagaaaacagaaaatgtttcaacgtgcgcaagagttgcggcggcgggcagaggactaccacaaatgcaaaatccccccttctgcaagaaaggctctttgcaactgggtcagaatggcggcagcggagcatcgtcattcttcaggattgccctactggccctacctcacagctgaaactttaaaaaacaggatgggccaccagccacctcctccaactcaacaacattctataactgataactccctgagcctcaagacacctcccgagtgtgtgctcactccccttccaccctcagcggatgataatctcaagacacctcccgagtgtgtgctcactccccttccaccctcagcggatgataatctcaagacacctcctgagtgtctgctcactccccttccaccctcagcggatgataatctcaagacacctcctgagtgtctgctcactccccttccaccctcagcggatgataatctcaagacacctcccgagtgtctgctcactccccttccaccctcagctccaccctcagctccaccctcagcggatgataatctcaagacacgtgccgagtgtctgctccatccccttccaccctcagcggatgataatctcaagacaccttccgagcgtcagctcactccccttccaccctcagctccaccctcagcagatgataatatcaagacacctgccgagcgtctgcgggggccgcttccaccctcagcggatgataatctcaagacaccttccgagcgtcagctcactccccttccaccctcagctccaccctcagcagatgataatatcaagacacctgccgagcgtctgcgggggccgcttccaccctcagcggatgataatctcaagacaccttccgagcgtcagctcactccccttccaccctcagctccaccctcagcagatgataatatcaagacacctgccgagcgtctgcgggggccgcttccaccctcagcggatgataatctcaagacaccttccgagcgtcagctcactccccttccaccctcagctccaccctcagcagatgataatatcaagacacctgccgagcgtctgcgggggccgcttccaccctcagcggatgataatctcaagacaccttccgagcgtcagctcactccccttccaccctcagctccaccctcagcagatgataatatcaagacacctgccttccaccctcagcggatgataatctcaagacaccttccgagcgtcagctcactccccttccaccctcagctccactctcagcagatgataatatcaagatacctgctgagcgtctgcggattccgcttccaccatcagccgatgataatctcaagacaccttccgagcgtcagctcactccccttccaccctcagctccaccctcagcagatgataatatcaagacacctgccgagcgtctgcgggggccgcttccaccctcagcggatgataatctcaagacaccttccgagcgtcagctcactccccttccaccctcagctccaccctcagcagatgataatatcaagacacctgccgagcgtctgcgggggccgcttccaccctcagcggatgataatctcaagacaccttccgagcgtcagctcactccccttccaccctcagctccaccctcagcagatgataatatcaagacacctgccgagcgtctgcggggagcgtctgcgggggccgcttccaccctcagcggatgataatctcaagacaccttccgagcgtcagctcactccccttccaccctcagctccaccctcagcagatgataatatcaagacacctgccgagcgtctgcggagagcgtctgcgggggccgcttccaccctcagcggatgataatctcaagacaccttccgagcgtcagctcactccccttccaccctcagctccaccctcagcagatgataatatcaagacacctgccgagcgtctgcgggggccgcttccaccctcagcggatgataatctcaagacaccttccgagcgtcagctcactccccttccaccctcagctccaccctcagcagatgataatatcaagacacctgccgagcgtctgcgggggccgcttccaccctcagcggatgataatctcaagacaccttctgagcgtcagctcactccccttccaccctcagctccaccctcagcagatgataatatcaagacacctgccgagcgtctgcgggggccgcttccaccctcagccgatgataatctcaagacacctcccttagctactcaggaggctgaggcagaaaaaccacgcaaacccaagaggcagagggcggctgagatggaaccacctcccgaacccaagaggcggagggtcggtgacgtggaaccgtcacgcaaacccaagaggcggagggccgctgacgtggaaccatcatcacccaaacccaagaggcggagggtcggtgatgtggaaccgtcacgcaaacccaagaggcggagggccgctgacgtggaaccatcatcacccgaacccaagaggcggagggtcggtgacgtggaaccgtcacgcaaacccaagaggcggagggccgctgacgtggaaccatcatcacccgaacccaagaggcggaggttgagctgagaagaggccagtgcactcaagcctgagcaataagaataaaaccgagtagaacaaaataaaaaattcaaaaaacaaaacaaaacccacactccaaaaactaacaaagaataaataaataat

SEQ ID NO: 6949 - DNA, 1931 bp, Homo sapiens
ctatgaatccatgaaacaggacttcaaactggggattccagagtatttcaactttgctaaagatgtcctggaccaatggactgataaggaaaaggctggaaagaaaccttcaaatccagccttctggtggatcaacagaaatggagaagagatgcgatggagttttgaggaactgggatctctgtccagaaaatttgccaatatactttcagaagcctgttccctacaaagaggagatcgggtaattctgattctgcccagggtcccagagtggtggcttgcaaatgtggcctgtctgcgaacagggacagttttaattccaggaaccactcagctgacccagaaagacattctctacagactacaatcttcaaaagcaaactgcattatcaccaatgatgttttagccccagcagtagacgctgttgcatccaaatgtgaaaatctgcactccaagctgattgtatcagagaactccagagaggggtgggggaacctcaaggagttgatgaaagtctttctctgtcacccaggctggagtacggtggctcgatcttggctcactgcaacctccacctccctggttcaagcgattctcagcctcctgagtagctgggattacagacatgccagtgacagccacacctgtgtgaagacaaaacacaatgagatcatggccatattctttaccagtggaacaagtggatatccgaaaatgactgcacacacccacagcagttttggtttaggattatctgtaaatggaaggttctggctagatttgacaccctcagatgtgatgtggaatacctcagatacgggctgggcaaagtctgcatggagtagtgttttttctccgtggatccagggagcatgtgtattcacacaccatttaccccgttttgagccgacttctatcttgcaaacactctccaagtaccccatcacagtcttctgttcagcaccaactgtataccgaatgcttgtacagaatgatataaccagctataagtttaaaagcttaaagcactgtgtgagtgctggggaaccaattacccctgacgtgactgaaaaatggagaaacaagacgggcctggatatctacgaaggatatggacagactgaaacggtgctaatctgtggaaattttaagggaatgaaaattaaacctggctcaatgggaaaaccttctcctgctttcgatgttaagattgtagatgtaaatggcaatgttctacctcctggacaagaaggagatattggcattcaagttctacccaaccgaccatttggcctttttactcattacgtagataatccttcaaaaacagcttcaactctacgaggcaatttctatatcactggggacagaggatatatggataaagatgggtatttctggtttgttgcaagagcagatgatgtcatattatcctctggctatcgaattggaccatttgaggtagaaaatgccctgaatgaacacccttcagttgcagagtcagctgttgtcagcagcccagaccccatcagaggagaggtagtaaaggcttttgtcgttctaaatcctgattacaagtcacatgatcaagaacaactaataaaggagattcaggagcatgttaaaaaaactacagcaccttacaaatatcccagaaaggtagaatttattcaagagctgccaaagactatcagtgggaagacaaaaagaaatgaactgaggaagaaagaatggaagacaatttaaagttgtttcattaattaccatatctataaaacaaacatagtatctgtcaatctctagaaaccacaagatgatggagaggtcataaaaactgtggtagtatgcttagaaactgttgatttaaaatatcttgtggttatgatatcagaggctaaattttgaaataaaatatttggcaaattcctcc

SEQ ID NO: 6950 - DNA, 82027 bp, Homo sapiens; identical to SEQ ID NO: 5007

SEQ ID NO: 6951 - DNA, 2483 bp, Homo sapiens
gagctcggtgattggctcagaagggaaaaggcgggtctccgtgacgacttataaaagcccaggggcaagcggtccggataacggctagcctgaggagctgctgcgacagtccactacctttttcgagagtgactcccgttgtcccaaggcttcccagagcgaacctgtgcggctgcaggcaccggcgcgtcgagtttccggcgtccggaaggaccgagctcttctcgcggatccagtgttccgtttccagcccccaatctcagagcggagccgacagagagcagggaaccggcatggccaaagccgcggcgatcggcatcgacctgggcaccacctactcctgcgtgggggtgttccaacacggcaaggtggagatcatcgccaacgaccagggcaaccgcaccacccccagctacgtggccttcacggacaccgagcggctcatcggggatgcggccaagaaccaggtggcgctgaacccgcagaacaccgtgtttgacgcgaagcggctgatcggccgcaagttcggcgacccggtggtgcagtcggacatgaagcactggcctttccaggtgatcaacgacggagacaagcccaaggtgcaggtgagctacaagggggagaccaaggcattctaccccgaggagatctcgtccatggtgctgaccaagatgaaggagatcgccgaggcgtacctgggctacccggtgaccaacgcggtgatcaccgtgccggcctacttcaacgactcgcagcgccaggccaccaaggatgcgggtgtgatcgcggggctcaacgtgctgcggatcatcaacgagcccacggccgccgccatcgcctacggcctggacagaacgggcaagggggagcgcaacgtgctcatctttgacctgggcgggggcaccttcgacgtgtccatcctgacgatcgacgacggcatcttcgaggtgaaggccacggccggggacacccacctgggtggggaggactttgacaacaggctggtgaaccacttcgtggaggagttcaagagaaaacacaagaaggacatcagccagaacaagcgagccgtgaggcggctgcgcaccgcctgcgagagggccaagaggaccctgtcgtccagcacccaggccagcctggagatcgactccctgtttgagggcatcgacttctacacgtccatcaccagggcgaggttcgaggagctgtgctccgacctgttccgaagcaccctggagcccgtggagaaggctctgcgcgacgccaagctggacaaggcccagattcacgacctggtcctggtcgggggctccacccgcatccccaaggtgcagaagctgctgcaggacttcttcaacgggcgcgacctgaacaagagcatcaaccccgacgaggctgtggcctacggggcggcggtgcaggcggccatcctgatgggggacaagtccgagaacgtgcaggacctgctgctgctggacgtggctcccctgtcgctggggctggagacggccggaggcgtgatgactgccctgatcaagcgcaactccaccatccccaccaagcagacgcagatcttcaccacctactccgacaaccaacccggggtgctgatccaggtgtacgagggcgagagggccatgacgaaagacaacaatctgttggggcgcttcgagctgagcggcatccctccggcccccaggggcgtgccccagatcgaggtgaccttcgacatcgatgccaacggcatcctgaacgtcacggccacggacaagagcaccggcaaggccaacaagatcaccatcaccaacgacaagggccgcctgagcaaggaggagatcgagcgcatggtgcaggaggcggagaagtacaaagcggaggacgaggtgcagcgcgagagggtgtcagccaagaacgccctggagtcctacgccttcaacatgaagagcgccgtggaggatgaggggctcaagggcaagatcagcgaggcggacaagaagaaggtgctggacaagtgtcaagaggtcatctcgtggctggacgccaacaccttggccgagaaggacgagtttgagcacaagaggaaggagctggagcaggtgtgtaaccccatcatcagcggactgtaccagggtgccggtggtcccgggcctgggggcttcggggctcagggtcccaagggagggtctgggtcaggccccaccattgaggaggtagattaggggcctttccaagattgctgtttttgttttggagcttcaagactttgcatttcctagtatttctgtttgtcagttctcaatttcctgtgtttgcaatgttgaaattttttggtgaagtactgaacttgctttttttccggtttctacatgcagagatgaatttatactgccatcttacgactatttcttctttttaatacacttaactcaggccattttttaagttggttacttcaaagtaaataaactttaaaattcaagtga

SEQ ID NO: 6952 - DNA, 1229 bp, Homo sapiens
gaccagcctacagccgcctgcatctgtatccagcgccaggtcccgccagtcccagctgcgcgcgccccccagtcccgcacccgttcggcccaggctaagttagccctcaccatgccggtcaaaggaggcaccaagtgcatcaaatacctgctgttcggatttaacttcatcttctggcttgccgggattgctgtccttgccattggactatggctccgattcgactctcagaccaagagcatcttcgagcaagaaactaataataataattccagcttctacacaggagtctatattctgatcggagccggcgccctcatgatgctggtgggcttcctgggctgctgcggggctgtgcaggagtcccagtgcatgctgggactgttcttcggcttcctcttggtgatattcgccattgaaatagctgcggccatctggggatattcccacaaggatgaggtgattaaggaagtccaggagttttacaaggacacctacaacaagctgaaaaccaaggatgagccccagcgggaaacgctgaaagccatccactatgcgttgaacctgtggtttggctgggggcgtggaacagtttatctcagacatctgccccaagaaggacgtactcgaaaccttcaccgtgaagtcctgtcctgatgccatcaaagaggtcttcgacaataaattccacatcatcggcgcagtgggcatcggcattgccgtggtcatgatatttggcatgatcttcagtatgatcttgtgctgtgctatccgcaggaaccgcgagatggtctagagtcagcttacatccctgagcaggaaagtttacccatgaagattggtgggattttttgtttgtttgttttgttttgtttgttgtttgttgtttgtttttttgccactaattttagtattcattctgcattgctagataaaagctgaagttactttatgtttgtcttttaatgcttcattcaatattgacatttgtagttgagcggggggtttggtttgctttggtttatattttttcagttgtttgtttttgcttgttatattaagcagaaatcctgcaatgaaaggtactatatttgctagactctagacaagatattgtacataaaagaatttttttgtctttaaatagatacaaatgtctatcaactttaatcaagttgtaacttatattgaagacaatttgatacataataaaaaattatgacaatgtc

SEQ ID NO: 6953 - DNA, 2591 bp, Homo sapiens
cgcccgcccgccggccctcgggctttgtgccgcactgggctccggcgcagaagagtcagccggcactcgagcgccgaggggggcaccgcgcccgccaccagcccgagtggagtcagtcggcaaggcagccgcacgctggaggtagagggaagagcgagctagcgcgagccgggaaggaagccaccaggccaaggcggtggaacgcgcgctccgagggagctcagagccgagcgggaggactgtcagcttccacccagcccccgggctcttgcccccaactccactggagcgctgagctcggaacttgaaaactctctgctccccaggcttcccccgactctcatctcccttgccttgcggaggctggggctcttccctgttctccggccccctgcgcttgggggaagactttaactaggggcgcgcagatgtgtgaggccttttattgtgagagtggacagacatccgagatttcagagccccatattcgagccccgtggaatcccgcggcccccagccagagccagcatgcagaacagtcacagcggagtgaatcagctcggtggtgtctttgtcaacgggcggccactgccggactccacccggcagaagattgtagagctagctcacagcggggcccggccgtgcgacatttcccgaattctgcagacccatgcagatgcaaaagtccaagtgctggacaatcaaaacgtgtccaacggatgtgtgagtaaaattctgggcaggtattacgagactggctccatcagacccagggcaatcggtggtagtaaaccgagagtagcgactccagaagttgtaagcaaaatagcccagtataagcgggagtgcccgtccatctttgcttgggaaatccgagacagattactgtccgagggggtctgtaccaacgataacataccaagcgtgtcatcaataaacagagttcttcgcaacctggctagcgaaaagcaacagatgggcgcagacggcatgtatgataaactaaggatgttgaacgggcagaccggaagctggggcacccgccctggttggtatccggggacttcggtgccagggcaacctacgcaagatggctgccagcaacaggaaggagggggagagaataccaactccatcagttccaacggagaagattcagatgaggctcaaatgcgacttcagctgaagcggaagctgcaaagaaatagaacatcctttacccaagagcaaattgaggccctggagaaagagtttgagagaacccattatccagatgtgtttgcccgagaaagactagcagccaaaatagatctacctgaagcaagaatacaggtatggttttctaatcgaagggccaaatggagaagagaagaaaaactgaggaatcagagaagacaggccagcaacacacctagtcatattcctatcagcagtagtttcagcaccagtgtctaccaaccaattccacaacccaccacaccggtttcctccttcacatctggctccatgttgggccgaacagacacagccctcacaaacacctacagcgctctgccgcctatgcccagcttcaccatggcaaataacctgcctatgcaacccccagtccccagccagacctcctcatactcctgcatgctgcccaccagcccttcggtgaatgggcggagttatgatacctacacccccccacatatgcagacacacatgaacagtcagccaatgggcacctcgggcaccacttcaacaggactcatttcccctggtgtgtcagttccagttcaagttcccggaagtgaacctgatatgtctcaatactggccaagattacagtaaaaaaaaaaaaaaaaaaaaaaaggaaaggaaatattgtgttaattcagtcagtgactatggggacacaacagttgagctttcaggaaagaaagaaaaatggctgttagagccgcttcagttctacaattgtgtcctgtattgtaccactggggaaggaatggacttgaaacaaggacctttgtatacagaaggcacgatatcagttggaacaaatcttcattttggtatccaaacttttattcattttggtgtattatttgtaaatgggcatttgtatgttataatgaaaaaaagaacaatgtagactggatggatgtttgatctgtgttggtcatgaagttgttttttttttttttaaaaagaaaaccatgatcaacaagctttgccacgaatttaagagttttatcaagatatatcgaatacttctacccatctgttcatagtttatggactgatgttccaagtttgtatcattcctttgcatataattaaacctggaacaacatgcactagatttatgtcagaaatatctgttggttttccaaaggttgttaacagatgaagtttatgtgcaaaaaagggtaagatataaattcaaggaagaaaaaaagttgatagctaaaaggtagagtgtgtcttcgatataatccaatttgttttatgtcaaaatgtaagtatttgtcttccctagaaatcctcagaatgatttctataataaagttaatttcatttatatttgacaagaatataga

SEQ ID NO: 6954 - DNA, 3461 bp, Homo sapiens
caagccggcccacaccacgcccggtccgggccttcccgcctttgccgccggcccccactgctcgggccggatgccggggaacgggctcggccaggtctgacgctcaccgcctagaagccgagccgagcagtcccgcaggctgaggtagagcgggagaagttcgggctctttcctcaggggcccagcggcgcggcagccattttgttgtgttgtgccggttgccgaggggccgcgcgcgcgtggtcggggctagtctcagccacgcccctctccctctccggtactgttggaagggacgcggaggcgtttcccgcctcttttgcagccagcgcgctaggatgccggggagtcttgggcgcgaggcttccggccgcgcggggccgacgggatgcggtgccttcgccttcggattgcgttgcagatatgtcatttcagcaccaaaaatattccgtgttggagcatctgaaaatattgtgattcaagtttatggatacactgaagcatttgatgcaacaatctctattaaaagttatcctgataaaaaatttagttactcctcaggccatgttcatttatcctcagagaataaattccaaaactctgcaatcttaacaatacaaccaaaacaattgcctggaggacaaaacccagtttcttatgtgtatttggaagttgtatcaaagcatttttcaaaatcaaaaagaatgccaataacctatgacaatggatttctcttcattcatacagacaaacctgtttatactccagaccagtcagtaaaagttagagtttattcgttgaatgacgacttgaagccagccaaaagagaaactgtcttaactttcatagatcctgaaggatcagaagttgacatggtagaagaaattgatcatattggaattatctcttttcctgacttcaagattccgtctaatcctagatatggtatgtggacgatcaaggctaaatataaagaggacttttcaacaactggaaccgcatattttgaagttaaagaatatgtcttgccacatttttctgtctcaatcgagccagaatataatttcattggttacaagaactttaagaattttgaaattactataaaagcaagatatttttataataaagtagtcactgaggctgacgtttatatcacatttggaataagagaagacttaaaagatgatcaaaaagaaatgatgcaaacagcaatgcaaaacacaatgttgataaatggaattgctcaagtcacatttgattctgaaacagcagtcaaagaactgtcatactacagtttagaagatttaaacaacaagtacctttatattgctgtaacagtcatagagtctacaggtggattttctgaagaggcagaaatacctggcatcaaatatgtcctctctccctacaaactgaatttggttgctactcctcttttcctgaagcctgggattccatatcccatcaaggtgcaggttaaagattcgcttgaccagttggtaggaggagtcccagtaacactgaatgcacaaacaattgatgtaaaccaagagacatctgacttggatccaagcaaaagtgtaacacgtgttgatgatggagtagcttcctttgtgcttaatctcccatctggagtgacggtgctggagtttaatgtcaaaactgatgctccagatcttccagaagaaaatcaggccagggaaggttaccgagcaatagcatactcatctctcagccaaagttacctttatattgattggactgataaccataaggctttgctagtgggagaacatctgaatattattgttacccccaaaagcccatatattgacaaaataactcactataattacttgattttatccaagggcaaaattatccactttggcacgagggagaaattttcagatgcatcttatcaaagtataaacattccagtaacacagaacatggttccttcatcccgacttctggtctattacatcgtcacaggagaacagacagcagaattagtgtctgattcagtctggttaaatattgaagaaaaatgtggcaaccagctccaggttcatctgtctcctgatgcagatgcatattctccaggccaaactgtgtctcttaatatggcaactggaatggattcctgggtggcattagcagcagtggacagtgctgtgtatggagtccaaagaggagccaaaaagcccttggaaagagtatttcaattcttagagaagagtgatctgggctgtggggcaggtggtggcctcaacaatgccaatgtgttccacctagctggacttaccttcctcactaatgcaaatgcagatgactcccaagaaaatgatgaaccttgtaaagaaattctcaggccaagaagaacgctgcaaaagaagatagaagaaatagctgctaaatataaacattcagtagtgaagaaatgttgttacgatggagcctgcgttaataatgatgaaacctgtgagcagcgagctgcacggattagtttagggccaagatgcatcaaagctttcactgaatgttgtgtcgtcgcaagccagctccgtgctaatatctctcataaagacatgcaattgggaaggctacacatgaagaccctgttaccagtaagcaagccagaaattcggagttattttccagaaagctggttgtgggaagttcatcttgttcccagaagaaaacagttgcagtttgccctacctgattctctaaccacctgggaaattcaaggcgttggcatttcaaacactggtatatgtgttgctgatactgtcaaggcaaaggtgttcaaagatgtcttcctggaaatgaatataccatattctgttgtacgaggagaacagatccaattgaaaggaactgtttacaactataggacttctgggatgcagttctgtgttaaaatgtctgctgtggagggaatctgcacttcggaaagcccagtcattgatcatcagggcacaaagtcctccaaatgtgtgcgccagaaagtagagggctcctccagtcacttggtgacattcactgtgcttcctctggaaattggccttcacaacatcaatttttcactggagacttggtttggaaaagaaatcttagtaaaaacattacgagtggtgccagaaggtgtcaaaagggaaagctattctggtgttactttggatcctaggggtatttatggtaccattagcagacgaaaggagttcccatacaggatacccttagatttggtccccaaaacagaaatcaaaaggattttgagtgtaaaaggactgcttgtaggtgagatcttgtctgcagttctaagtcaggaaggcatcaatatcctaacccacctccccaaagggagtgcagaggcggagctgatgagcgttgtcccagtattctatgtttttcctggaaacaggaaatcattggaacatttttcattctga

SEQ ID NO: 6955 - DNA, 2581 bp, Homo sapiens
attggttgcggcggatgcctcgcgggccggtggctatggaggcggcggcggttgatggttgaccgttggctccggggtgggggtcgccgttcgagtgatctgctcagacccgaccagagggcgcgggctgctgatgcttggcttggagcccgtgggggagacctagttcggctccgccatgccggccgccgggagtaacgagccggacggcgtcctcagctatcagagaccagatgaagaagctgtggtggatcagggtgggaccagtacaattctcaacattcactatgaaaaagaagagctggaaggtcacagaactctgtatgtgggagttcggatgccgcttggccggcagagccatcggcatcaccgcactcatggccagaagcaccggagacgagggcggggcaaaggagccagccagggggaggaaggcctggaagccctggcccacgacacaccatctcagcgtgttcagttcattcttggcaccgaggaagatgaagagcatgtgcctcatgagctgtttacagagctggatgagatctgtatgaaagagggagaagatgctgagtggaaggaaacagccaggtggctgaagtttgaagaagatgttgaagatgggggagaacgctggagcaagccttatgtggcaaccctttcattgcacagcctgtttgagctaaggagctgccttattaatggaacagtcctcctggatatgcatgcaaatagcatagaagaaatttcagacctgatcctggatcagcaagaactgtccagtgacctgaatgacagcatgagggttaaagtgcgggaagcccttctcaaaaagcatcatcatcagaatgaaaagaagagaaacaacctcattcccattgttcgctcctttgctgaggttggcaagaagcagtctgatcctcatttgatggataaacatggtcaaaccgtgtctcctcagtctgttccaactacaaatcttgaagtaaaaaatggagtgaattgtgaacatagtcctgtggatttaagcaaggtagaccttcatttcatgaaaaaaattcctactggggccgaggcctccaatgtcctggttggagaggtggatattttggaccgtcccattgttgcctttgtgaggctgtctccagctgttcttctctcaggcctaacagaagtgccaatcccaacaagatttttgtttatcttattgggtccagtagggaaaggtcagcagtaccatgagattggcagatccatggccaccatcatgacagatgagatttttcatgacgtagcatataaggcaaaagagcgagatgatctcctggcggggattgatgagttcctagaccaggtgacggtgctccctccaggagagtgggatccctccattagaattgagccacccaaaaatgtcccttcccaggagaaaaggaaaatgcctggagttccaaatggaaatgtttgccacatagaacaggaaccacatgggggtcacagtgggccagaacttcagcgcactgggcggctatttgggggcttggtgctggacatcaagcggaaggccccctggtactggagcgactaccgagatgcactcagcttacagtgtttggcttcctttctgttcctgtactgtgcctgcatgtcacctgtcatcacctttgggggactgcttggagaagccactgagggacgcataagtgcaattgaatccttgtttggagcttccatgactgggattgcttattccttgtttgcgggacaggctctcaccatcctgggaagtactggaccagtgcttgtgtttgaaaagattttgttcaaattctgcaaagactatgctctttcatacctctccctgcgagcttgtattggactgtggaccgctttcctgtgtattgtccttgtggcaactgatgccagttcccttgtctgctacattacccgtttcactgaagaagcatttgcctccctaatttgcattattttcatctatgaagcaatagaaaaactgattcacctggcagagacctaccccatccacatgcacagccagctggaccaccttagcctctattactgcaggtgtactctgccagagaatccaaacaatcacaccctccagtactggaaggaccacaacatcgtgacagcagaagtccactgggctaacctgactgtcagtgaatgccaggagatgcatggagagttcatgggatctgcgtgcggccatcatggaccctacactcctgatgtcctcttttggtcctgtattctctttttcaccaccttcatcctctcaagcaccttaaagacgtttaagacgagccgttatttcccaaccagaatggagtcttgctctgtcgcctggctggagtgcggtggtgtgatcttggctcactgcaacctccgcctcctcccgagtagctgggactacaggcacgcaccaccacagccagctaatttttgtatttttagtagagacggggtttccccatgttggccaggatggtctcaatctcttgacctcgtgatctgcctgcctcggcctcccaaaatgctgggattacaagcatga

SEQ ID NO: 6956 - DNA, 2977 bp, Homo sapiens
attctcttgacaatgcagcacataaacacgggcattgacatgcttaaccagctgggttgtgttttctttgcaggcgtcaaaccccagagaaatatctgcaatttgtcatctatttgcaatgactcagcattttttagaggtgagatcatgtttcaatatgataaagaaagcactgttccccagaatcaacatataacgaatggcaccttaactggagtcctgtctctaagtgaattaaaacgctcagagctcaacaaaaccctgcaaaccctaagtgagacttactttataatgtgtgctacagcagaggcccaaaggcacattaaattgtacattcacaataaaactgaataatacaatgaatgcatgtgctgtaatagctgctttggaaagagtaaagattcgaccaatggaacactgctgctgttctgtcaggataccctgcccttcctccccagaagagttggaaaagcttcagtgtgacctgcaggatcccattgtctgtcttgctgaccatccacgtggcccaccattttcttccagccaatccatcccagtggtgcctcgggccactgtgctttcccaggtccccaaagctacctcttttgctgagcctccagattattcacctgtgacccacaatgttccctctccaataggggagattcaacccctttcaccccagccttcagctcccatagcttccagccctgccattgacatgcccccacagtctgaaacgatctcttcccctatgccccaaacccatgtctccggcaccccacctcctgtgaaagcctcattttcctctcccaccgtgtctgcccctgcgaatgtcaacactaccagcgcacctcctgtccagacagacatcgtcaacaccagcagtatttctgatcttgagaaccaagtgttgcagatggagaaggctctgtccttgggcagcctggagcctaacctcgcaggagaaatgatcaaccaagtcagcagactccttcattccccgcctgacatgctggcccctctggctcaaagattgctgaaagtagtggatgacattggcctacagctgaacttttcaaacacgactataagtctaacctccccttctttggctctggctgtgatcagagtgaatgccagtagtttcaacacaactacctttgtggcccaagaccctgcaaatcttcaggtttctctggaaacccaagctcctgagaacagtattggcacaattactcttccttcatcgctgatgaataatttaccagctcatgacatggagctagcttccagggttcagttcaatttttttgaaacacctgctttgtttcaggatccttccctggagaacctctctctgatcagctacgtcatatcatcgagtgttgcaaacctgaccgtcaggaacttgacaagaaacgtgacagtcacattaaagcacatcaacccgagccaggatgagttaacagtgagatgtgtattttgggacttgggcagaaatggtggcagaggaggctggtcagacaatggctgctctgtcaaagacaggagattgaatgaaaccatctgtacctgtagccatctaacaagcttcggcgttctgctggacctatctaggacatctgtgctgcctgctcaaatgatggctctgacgttcattacatatattggttgtgggctttcatcaatttttctgtcagtgactcttgtaacctacatagcttttgaaaagatccggagggattacccttccaaaatcctcatccagctgtgtgctgctctgcttctgctgaacctggtcttcctcctggactcgtggattgctctgtataagatgcaaggcctctgcatctcagtggctgtatttcttcattattttctcttggtctcattcacatggatgggcctagaagcattccatatgtacctggcccttgtcaaagtatttaatacttacatccgaaaatacatccttaaattctgcattgtcggttggggggtaccagctgtggttgtgaccatcatcctgactatatccccagataactatgggcttggatcctatgggaaattccccaatggttcaccggatgacttctgctggatcaacaacaatgcagtattctacattacggtggtgggatatttctgtgtgatatttttgctgaacgtcagcatgttcattgtggtcctggttcagctctgtcgaattaaaaagaagaagcaactgggagcccagcgaaaaaccagtattcaagacctcaggagtatcgctggccttacatttttactgggaataacttggggctttgccttctttgcctggggaccagttaacgtgaccttcatgtatctgtttgccatctttaataccttacaaggatttttcatattcatcttttactgtgtggccaaagaaaatgtcaggaagcaatggaggcggtatctttgttgtggaaagttacggctggctgaaaattctgactggagtaaaactgctactaatggtttaaagaagcagactgtaaaccaaggagtgtccagctcttcaaattccttacagtcaagcagtaactccactaactccaccacactgctagtgaataatgattgctcagtacacgcaagcgggaatggaaatgcttctacagagaggaatggggtctcttttagtgttcagaatggagatgtgtgccttcacgatttcactggaaaacagcacatgtttaacgagaaggaagattcctgcaatgggaaaggccgtatggctctcagaaggacttcaaagcggggaagcttacactttattgagcaaatgtgattcctttcttctaaaatcaaagcatgatgcttgacagtgtgaaatgtccaattttaccttttacacaatgtgagatgtatgaaaatcaactcattttattctcggcaacatctggagaagcataagctaattaagggcgatgattattattac

SEQ ID NO: 6957 - DNA, 5500 bp, Homo sapiens
gcgcagcccgcagaggcgctgcggcccgtgcagccccggaggcccctcgcggagaaggcggcggcggaggagaggccgagttaccgcccgccgcccgcgcccccccaaccccgccgccgccgccgccgccgccactgccccccctccccgcggcgccgcatcttgaatggaaacatggcggtgccggctcggacctgcggcgcctctcggcccggcccagcgcggactgcgcgcccctggcccggctgcggcccccaccctggccccggcacccggcgcccgacgtccgggcccccgcgcccgctgtggctgctgctgccgcttctaccgctgctcgccgcccccggcgcctctgcctacagcttcccccagcagcacacgatgcagcactgggcccggcgtctggagcaggaggtcgacggcgtgatgcggatttttggaggcgtccagcagctccgtgagatttacaaggacaaccggaacctgttcgaggtacaggagaatgagcctcagaagttggtggagaaggtggcaggggacattgagagccttctggacaggaaggtgcaggccctgaagagactggctgatgctgcagagaacttccagaaagcacaccgctggcaggacaacatcaaggaggaagacatcgtgtactatgacgccaaggctgacgctgagctggacgaccctgagagtgaggatgtggaaagggggtctaaggccagcaccctaaggctggacttcatcgaggacccaaacttcaagaacaaggtcaactattcatacgcggctgtacagatccctacggacatctacaaaggctccactgtcatcctcaatgagctcaactggacagaggccctggagaatgtgttcatggaaaaccgcagacaagaccccacactgctgtggcaggtcttcggcagcgccacaggagtcactcgctactacccggccaccccgtggcgagcccccaagaagatcgacctgtacgatgtccgaaggagaccctggtatatccagggggcctcgtcacccaaagacatggtcatcatcgtggatgtgagtggcagtgtgagcggcctgaccctgaagctgatgaagacatctgtctgcgagatgctggacacgctgtctgatgatgactatgtgaatgtggcctcgttcaacgagaaggcacagcctgtgtcatgcttcacacacctggtgcaggccaatgtgcgcaacaagaaggtgttcaaggaagctgtgcagggcatggtggccaagggcaccacaggctacaaggccggctttgagtatgcctttgaccagctgcagaactccaacatcactcgggccaactgcaacaagatgatcatgatgttcacggatggtggtgaggaccgcgtgcaggacgtctttgagaagtacaattggccaaaccggacggtgcgcgtgtttactttctccgtggggcagcataactatgacgtcacaccgctgcagtggatggcctgtgccaacaaaggctactattttgagatcccttccatcggagccatccgcatcaacacacaggaatatctagatgtgttgggcaggcccatggtgctggcaggcaaggaggccaagcaggtgcagtggaccaacgtgtatgaggatgcactgggactggggttggtggtaacagggaccctccctgttttcaacctgacacaggatggccctggggaaaagaagaaccagctgatcctgggcgtgatgggcattgacgtggctctgaatgacatcaagaggctgacccccaactacacgcttggagccaacggctatgtgtttgccattgacctgaacggctacgtgttgctgcaccccaatctcaagccccagaccaccaacttccgggagcctgtgactctggacttcctggatgcggagctagaggatgagaacaaggaagagatccgtcggagcatgattgatggcaacaagggccacaagcagatcagaacgttggtcaagtccctggatgagaggtacatagatgaggtgacacggaactacacctgggtgcctataaggagcactaactacagcctggggctggtgctcccaccctacagcaccttctacctccaagccaatctcagtgaccagatcctgcaggtcaagttgccaatcagcaaactgaaggattttgagttcctgctccccagcagctttgagtctgaaggacacgttttcattgctcccagagagtactgcaaggacctgaatgcctcagacaacaacaccgagttcctgaaaaactttattgagctcatggagaaagtgactccagactccaagcagtgcaacaacttccttctgcacaacctgatcttggacacgggcatcacgcagcagctggtagagcgtgtgtggagggaccaggatctcaacacgtacagcctactggccgtgttcgctgccacagacggtggcatcacccgagtcttccccaacaaggcagctgaggactggacagagaaccctgagcccttcaatgccagcttctaccgccgcagcctggataaccacggttatgtcttcaagcccccacaccaggatgccctgttaaggccgctggagctggagaatgacactgtgggcatcctcgtcagcacagctgtggagctcagcctaggcaggcgcacactgaggccagcagtggtgggcgtcaagctggacctagaggcttgggctgagaagttcaaggtgctagccagcaaccgtacccaccaagaccagcctcagaagtgcggccccaacagccactgtgagatggactgcgaggttaacaatgaggacttactctgtgtcctcattgatgatggaggattcctggtgctgtcaaaccagaaccatcagtgggaccaggtgggcaggttcttcagtgaggtggatgccaacctgatgctggcactctacaataactccttctacacccgcaaggagtcctatgactatcaggcagcctgtgcccctcagccccctggcaacctgggtgctgcaccccggggtgtctttgtgcccaccgttgcagatttccttaacctggcctggtggacctctgctgccgcctggtccctgttccagcagcttctctacggcctcatctaccacagctggttccaagcagaccccgcggaggccgaggggagccccgagacgcgcgagagcagctgcgtcatgaaacagacccagtactacttcggctcggtaaacgcctcctacaacgccatcatcgactgcggaaactgctccaggctgttccacgcgcagagactgaccaacaccaatcttctctttgtggtggccgagaagccgctgtgcagccagtgcgaggctggccggctgctgcagaaggagacgcactgttgcccagcggacggcccggagcagtgtgagctagtgcagagaccgcgataccggagaggcccgcacatctgcttcgactacaacgcgacagaagatacctcagactgtggccgcggggcctccttcccgccgtcgctgggcgtcctggtctccctgcaactgctgctcctcctgggcctgccgccccggccgcagcctcaagtcctcgtccacgcctctcgccgcctctgagcaccctgccccaccccacctccactcccacctcacccggcctcttcgcctttcccaccctcctgccccacactccccgccttagagcctcgtccctccctcactgaaggacctgagctggccaggccctgagagtctggtctgcgccttgggatggggagtcccaaagcgggacgccgcaggtgtttggcacccaaatcacatctcacctccgaactgttcaagtgtccccagacccttcttgcctgctgggctccccccagtgggatgggacagggaggccacacgcactggtgccaaaaccaggcctctgctgccgcccttcctggaggctgcctatgttgggggggaccctgcctcagctgacccggcctctctgccccacccaagcccaaacttggtttctgtgagaatagtggaggaaggtgagatggccagtttgaagcctgtgcctcccagcttaaatcctagcaggagagaggctctggggcagcccccatgggctcctgcccctttcaggcctacagccacatccccaagcccaccaggtgtcaggatagtcacagtgataccagttcagacactaccccatatacacctggaacattgaggatggaaactggactcacattcgacataccccactgggcacacgcacaaacacacacactatggggtggggtgggtgtaggggcttacaaagccttacacagggcgaggggttggtgggagggttggcacctgcacactccatctcctgctcaccacctgcctctaatctgagctgcagcctggctggtcctcccatttctaaagctgaatgtcaaacagtgccaaatgctggggcagggggtgaagaaccctctgtcccacccctagccaccagtgtcctccaagtgccccctcacctctccaggtgctcattgtaaccatttctcactagtgtcaggcccccagtgggaccacatgccactgcctgcacctttcggcagaggaacccccaccagacatcaccctttgccttagcaggggtgactttgtctctcctggctgggccatccttccgccaatctggcccttacacactcaggcctgtgcccactccctatctccttcccacccctacacacacactccctgcttgcaggaggccaaactgtccctcccttgctgaacacacacacacacacacacacacaggtggggactgggcacagctcttcacaccattcattctggtcatttcccccaaaggcatcccagcctgggggccagtggggaactgagggcaaggggatatagtgatggggctcagatggactgggaggagggggagggtgatgcattaattaatggcttcgttaattaatgtcatgttgcttgtcgctttctcagtgtgtgtgtgtggtccatgcccactgctggtgccagggtgggtgtccatgtgcacccggcctggatgccagctgtgtccttcgggggcgtgcgtgtaactgtagtgtagtcaggtgctcaatggagaatataaacatatacagaaaaatatatattttaagtttaaaaaacagaaaaacagacaaaacaatccccatcaggtagctgtctaacccccagctgggtctaatccttctcattacccacccgacctggctgcccctcaccttgggctgggggactggggggccatttccttttctctgccctttttttgttgttctattttgtacagacaagttggaaaaacaacagcgacaaaaaagtcaagaaactttgtaaaatatcgtgtgtgtgattccttgtaaaatattttcaaatggtttattacagaagatcagttattaaataatgttcatattttcacttc

SEQ ID NO: 6958 - DNA, 1787 bp, Homo sapiens
agggctcgcactcttgcgcaacacgtcaccagtcggaaactgggggtttgcttctgtgatttatttcattattgtgctggtaaaagctgatgaagagactagcagctcgctgctttgctggcttgttaattttatccccactaactgtgatttctgatagccggcctgctgatagtggtaagtgctgctggctctggtttaaagcaagcgtttgcaggccatcgaagacggcaatttggaggaaatggaagaggaagtacggcttaagaagcgaaaaagacgaagaaatgtggataaagatcctgcaaaagaagatgtggaaaaagctaagaagagaagaggccgccctcccgctgagaaactgtcaccaaatccccccaaactgacaaagcagatgaacgctatcatcgatactgtgataaactacaaagatagttcagggcgacagctcagtgaagtcttcattcagttaccttcaaggaaagaattaccagaatactatgaattaattaggaagccagtggatttcaaaaaaataaaggaaaggattcgtaatcataagtaccggagcctaggcgacctggagaaggatgtcatgcttctctgtcacaacgctcagacgttcaacctggagggatcccagatctatgaagactccatcgtcttacagtcagtgtttaagagtgcccggcagaaaattgccaaagaggaagagagtgaggatgaaagcaatgaagaggaggaagaggaagatgaagaagagtcagagtccgaggcaaaatcagtcaaggtgaaaattaagctcaataaaaaagatgacaaaggccgggacaaagggaaaggcaagaaaaggccaaatcgaggaaaagccaaacctgtagtgagcgattttgacagcgatgaggagcaggatgaacgtgaacagtcagaaggaagtgggacggatgatgagtgatcagtatggacctttttccttggtagaactgaattccttcctcccctgtctcatttctacccagtgagttcatttgtcatataggcactgggttgtttctatatcatcatcgtctataaactagctttaggatagtgccagacaaacatatgatatcatggtgtaaaaaacacacacatacacaaatatttgtaacatattgtgaccaaatgggcctcaaagattcagattgaaacaaacaaaaagcttttgatggaaaatatgtgggtggatagtatatttctatgggtgggtctaatttggtaacggtttgattgtgcctggttttatcacctgttcagatgagaagatttttgtcttttgtagcactgataaccaggagaagccattaaaagccactggttattttatttttcatcaggcaattttcgaggtttttatttgttcggtattgtttttttacactgtggtacatataagcaactttaataggtgataaatgtacagtagttagatttcacctgcatatacatttttccattttatgctctatgatctgaacaaaagctttttgaattgtataagatttatgtctactgtaaacattgcttaatttttttgctcttgatttaaaaaaaagttttgttgaaagcgctattgaatattgcaatctatatagtgtattggatggcttcttttgtcaccctgatctcctatgttaccaatgtgtatcgtctccttctccctaaagtgtacttaatctttgctttctttgcacaatgtctttggttgcaagtcataagcctgaggcaaataaaattccagtaatttc

SEQ ID NO: 6959 - DNA, 625 bp, Homo sapiens
actcctccccatcctctccctctgtccctctgtccctctgaccctgcactgtcccagcaccatgggacccacctcaggtcccagcctgctgctcctgctactaacccacctccccctggctctggggagtcccatgtactctatcatcacccccaacatcttgcggctggagagcgaggagaccatggtgctggaggcccacgacgcgcaaggggatgttccagtcactgttactgtccacgacttcccaggcaaaaaactagtgctgtccagtgagaagactgtgctgacccctgccaccaaccacatgggcaacgtcaccttcacgatcccagccaacagggagttcaagtcagaaaaggggcgcaacaagttcgtgaccgtgcaggccaccttcgggacccaagtggtggagaaggtggtgctggtcagcctgcagagcgggtacctcttcatccagacagacaagaccatctacacccctggctccacagttctctatcggatcttcaccgtcaaccacaagctgctacccgtgggccggacggtcatggtcaacattgaggtgccagccagagggggccccaggggaagcaggggcacaggcttaggagaggcaaagaga

SEQ ID NO: 6960 - DNA, 1456 bp, Homo sapiens
cggccagagctcccagacccctacccacagccaggcgggacgcgcacagtccctccacgcggaaagaagtaccttcgccggtcaccggctcctgcagggtgcaaatatatacagagcttcataatcagcccaagaccacatagagcaaacatgaatgatatttcccaaaaggctgagattctgctttcttcatctaaacctgtcccaaaaacctatgtaccaaaacttggcaagggtgatgtaaaggataagtttgaagccatgcagagagccagggaagaaagaaatcaaaggagatctagagacgaaaaacaaagaagaaaagaacaatatattagagagagagaatggaacaggagaaagcaggagattaaagaaatgcttgcttctgatgatgaggaagatgtatcttctaaagtagaaaaggcttatgttccaaaattaacaggaactgtgaagggtagatttgctgaaatggagaaacaaagacaagaggaacaaaggaagagaacggaggaggaacgaaaacgcagaattgagcaggatatgttagaaaagaggaaaatacagcgtgaattagcaaaaagggctgaacaggaaggagatgattcactacttataactgtggtacctgtcaaatcatataaaacatctggaaaaatgaaaaagaattttgaggatctagaaaaagaacgtgaagagaaagaaaggatcaagtacgaggaagataaaagaataagatatgaagaacaacgaccatctctcaaggaagcaaagtgtctttcattagttatggatgatgaaatagaaagtgaagcaaaaaaagaatcactttctcccggaaaattgaaactaacttttgaagaactggagcgacaaagacaagaaaaccgaaagaagcaagctgaagaggaagcaagaaaacgtttagaagaagagaagcgtgcttttgaagaagcaaggcggcaaatggtaaatgaagatgaggaaaaccaagacacagcaaaaatttttaaagggtaccgccctggtaaactcaaactcagttttgaagaaatggaaaggcaaagaagagaagatgaaaaaaggaaagcagaagaagaagccagaaggagaatagaggaagaaaagaaggcgtttgctgaagcaaggagaaatatggtagtagatgatgactccccagagatgtataagacaatctctcaagaatttcttacaccgggaaaactggaaattaattttgaagaattattaaaacaaaaaatggaagaagaaaaacgacgaacagaggaggaacggaagcataagctagaaatggagaaacaagaatttgaacaactgagacaggaaatgggagaggaagaggaagaaaatgaaacctttggattgagcagagaatatgaagaactgatcaaattaaaaaggagtggctctattcaagctaaaaacctaaaaa

SEQ ID NO: 6961 - DNA, 585 bp, Homo sapiens
tgggagtttggggagggcaaatcaagggtaattcccaggtttttgccctgaggaactggaaacgtggagttgacattgactgaacttgatgagactgggaggagcaggctgggaagatcgggagctgggctttgggcatgtgaagtttgaggccatctaaggactttatcctgggggctccaacaggttgtgggtattctcatcctgctgatggccctccaggaggggctgggggactttcaggagaattttatcccacatctcttcccctccagatgttttcaagaatgctctccgcctggggaccttctcggctgtgctggtcacctatgcagccagcgccctcctacatggcttcagtttccacctggctgcggtcctgctgtccctggcttttatcacttacgtggagcatgtcctccggaagcgcctggctcggatcctcagtgcctgtgtcttgtcaaagcggtgcccgccagactgttcgcaccagcatcgcttggtgagggttcagcctgggcaaccttgtgcccaacactccctgtcaaaaatgttccttctatctctatcttgtatgtgtctcag

SEQ ID NO: 6962 - DNA, 2805 bp, Homo sapiens
atgaagggggcaagattatttgtccttctttctagtttatggagtgggggcattgggcttaacaacagtaagcattcttggactatacctgaggatgggaactctcagaagactatgccttctgcttcagttcctccaaataaaatacaaagtttgcaaatactgccaaccactcgggtcatgtcggcggagatagctacaactccagagaaagcagaaggagtggtcaagttacagaatcttaccctcccaaccaacgctagcatcaagttcaatcctggagcagaatcagtggtcctttccaattctacactgaaatttcttcagagctttgccagaaagtcaaatgaacaagcaacttctctaaacacagttggaggcactggaggcattggaggcgttggaggcactggaggcgtgggaaatcgagccccacgggaaacatacctcagccggggtgacagcagttccagccaaagaactgactaccaaaaatcaaatttcgaaacaactagaggaaagaattggtgtgcttatgtacataccaggttatctcccacagtgatattggacaaccaggtcacttatgtcccaggtgggaaaggaccttgtggctggaccggtggatcctgtcctcagagatctcagaagatatccaatcctgtctataggatgcaacataaaattgtcacctcattggattggaggtgctgtcctggatacagtgggccgaaatgtcaactaagagcccaggaacagcaaagtttgatacacaccaaccaggctgaaagtcatacagctgttggcagaggagtagctgagcagcagcagcagcaaggctgtggtgacccagaagtgatgcaaaaaatgactgatcaggtgaactaccaggcaatgaaactgactcttctgcagaagaagattgacaatatttctttgactgtgaatgatgtaaggaacacttactcctccctagaaggaaaagtcagcgaagataaaagcagagaatttcaatctcttctaaaagaggagtattcaagctgtagtcggcatccgtgccaaaatgggggcacgtgcataaatggaagaactagctttacctgtgcctgcagacatccttttactggtgacaactgcactatcaagcttgtggaagaaaatgctttagctccagatttttccaaaggatcttacagatatgcacccatggtggcattttttgcatctcatacgtatggaatgactatacctggtcctatcctgtttaataacttggatgtcaattatggagcttcatataccccaagaactggaaaatttagaattccgtatcttggagtatatgttttcaagtacaccatcgagtcatttagtgctcatatttctggatttttagtggttgatggaatagacaagcttgcatttgagtctgaaaatattaacagtgaaatacactgtgatagggttttaactggggatgccttattagaattaaattatgggcaggaagtctggttacgacttgcaaaaggaacaattccagccaagtttccccctgttactacatttagtggctatttattatatcgtacataagttagtatgaaaaacagactatcacctttattgagaaacagccagtgttttcatttatctttgcttgcacatctgctctgttttggtttttctacaggaaatgaaaatcaacttgtttttttaatatgagtaaacttgtatgtctattttataaaattatttgaatattgtttaatgtctgaatatgaaagagttcttgatcctaaagaaatttagtggcacagaaaacaaagtgaatttgttagcataattattcctattcttatttcttcattttaagtcattgcaatggaaagtaatattataaaatggtaattacaacatattatcagtcacagttttctttccaattaaacacttaacttttgttattccctgtatataaatatataacacacattttctagattcacaaatttaaataaattactcaaaaaatgaaaattgattttgtaaacttttatttttactctttacgttgagttgatcaattttccatactaagattttcattcagaatcaaaattaagaaagttggactgaaaatatgaaaaatgcttaactattgttctcttcctataattctctaattataacatagtaatttacatgtagttggacatgtacactcaagtctaagaatatatgagtggatcatttaccgccccccgccccacaacatctataaggggcaaaaagtctttttctaataagtattcttctatggtagtacctacagatctgcccttcttcttctaaagggtaagtcataatctgtgtaatactacaatttatgggatgctcactatgccctgtttctcttctaaacaatttacatgtaatgtctcattcctcacaataacccttgtaaagtgggcatgattaccatgatttttatagttgaagaacctaagacacagagaccaaggcccatgagctcatagggctgaggcaggatttggaatcaggccatgtcttctccagagcccacatccatcctttctctatattgcctcccacagatgtgctaaaatttatttaactaatcctttatcctctatttgtgttgtctcccattttttattattacaatattactgtggtgaacatgcttaaaaatacattccttggatatctgacaacgtgtttctgaaaaacagattttcataagtaataataaaaataataataaaaaagttttggtatggt

SEQ ID NO: 6963 - DNA, 1420 bp, Homo sapiens; identical to SEQ ID NO: 6882

SEQ ID NO: 6964 - DNA, 1116 bp, Homo sapiens
cttcacctcactttaccttctcctccagcacaggaactaggaactacggagagagaagccaagggagaggaggaggaggaaactaacgattccctgcccacccccacacccagcaccaccaacaggtgggcaagcttgccgagaaaacgcagagggcatcctgtgagcagcaaacacatctgagcctggaaaagacgcagagaagtaaaagatcaaagtctgattggcaccggctcccattccggctccagcctccaatccgacccccatttcggctgcagcctcggacctagctccggccctcggtctatccggttgcatcctccctccctgttccggatcttatcttgcgccagcgcctactccaggatcccgtagccagacctcaagccatggctggtcccttctcccgtctgctgtccgcccgcccgggactcaggctcctggctttggccggagcggggtctctagccgctgggtttctgctccgaccggaacctgtacgagctgccagtgaacgacggaggctgtatcccccgagcgctgagtacccagacctccgaaagcacaacaactgcatggccagtcacctgaccccagcagtctatgcacggctctgcgacaagaccacacccactggttggacgctagatcagtgtatccagactggcgtggacaaccctggccaccccttcatcaagactgtgggcatggtggctggagatgaggagacctatgaggtatttgctgacctgtttgaccctgtgatccaagagcgacacaatggatatgacccccggacaatgaagcacaccacggatctagatgccagtaaaatccgttctggctactttgatgagaggtatgtattgtcctctagagtcagaactggccgaagcatccgaggactcagtctgcctccagcttgcactcgagcagagcgacgagaggtggaacgtgttgtggtggatgcactgagtggcctgaagggtgacctggctggacgttactataggctcagtgagatgacagaggctgaacagcagcagcttattgatgaccactttctgtttgataagcctgtgtccccgttgctgactgcagcaggaatggctc

SEQ ID NO: 6965 - DNA, 6297 bp, Homo sapiens
atgaggagcctgccgagcctgggcggcctcgccctgttgtgctgcgccgccgccgccgccgccgccgccgtcgcctcagccgcctcggcggggaatgtcaccggtggcggcggggccgcggggcaggtggacgcgtcgccgggccccgggttgcggggcgagcccagccaccccttccctagggcgacggctcccacggcccaggccccgaggaccgggcccccgcgcgccaccgtccaccgacccctggctgcgacttctccagcccagtccccggagaccacccctctttgggcgactgctggaccctcttccaccacctttcaggcgccgctcggcccctcgccgaccacccctccggcggcggaacgcacttcgaccacctctcaggcgccgaccagacccgcgccgaccaccctttcgacgaccactggcccggcgccgaccacccctgtagcgaccaccgtaccggcgcccacgactccccggaccccgacccccgatctccccagcagcagcaacagcagcgtcctccccaccccacctgccaccgaggccccctcttcgcctcctccagggcatcagtggcctgtggcaaagatgccccaaaagtatctaggaaaatatgcctgtgagagtaacctgaaaagcaagtacttgcctcttacacagccagtcatgaatcttagagtctcagaagctgttaaaacggagtatgtatgtaactgctctgtggttggaagcctgaatgtgaatcgctgcaaccagaccacagggcagtgtgagtgtcggccaggttatcaggggcttcactgtgaaacctgcaaagagggcttttacctaaattacacttctgggctctgtcagccatgtgactgtagtccacatggagctctcagcataccgtgcaacagttctgggaaatgccagtgcaaagtgggtgtcattggctctatatgtgaccgatgccaagatggatattatggctttagtaagaatggctgcttgccctgccaatgcaataatcggtctgccagttgcgatgccctcacaggtgcttgtttaaactgccaggaaaatagcaaaggaaatcactgtgaagaatgtaaagaaggattttatcagagtcctgatgccactaaagaatgtcttcgctgcccttgttcagcagtgacatctacaggcagctgctctataaaatcgagtgaattggaacctgaatgtgaccagtgtaaagatggttacataggcccgaactgcaataaatgtgaaaatggctattacaattttgacagcatctgtagaaagtgccaatgtcacggccatgtggacccagttaaaactccaaagatttgtaagcccgagagtggtgagtgcatcaactgcctccataacaccactgggttttggtgtgagaactgcctagaaggttatgttcacgacctcgagggaaattgcatcaagaaagaagttattcttccaacacctgaaggttctaccattttggtttccaatgcctctttgaccacatcagtgcccacccctgttataaatagtacttttacccctacaaccctgcagactatcttttcagtaagcacttctgaaaacagcacttcagctttagctgatgtatcatggacccaatttaacatcatcattttgacagtcatcatcattgttgtggtgctgctaatgggatttgtgggggctgtatatatgtaccgcgagtaccaaaaccggaaactcaatgcccccttttggaccatcgagctgaaagaagacaatatcagtttcagcagctaccatgacagcattcccaatgcagatgtttcgggattgttggaagatgatggcaatgaagtggctcccaatgggcagctgaccctgacgacgcccatacataactacaaagcctaaggagctagaactgttctgaattgttaaaccacagtgcttgctaagacagagtcagcccctgggccagacaaagcctggctagagtttgctgagaaagcaaaggcaaatagtgcatctgaaattttcaggtacaaatttgtaatgcgcttagcctatctattgctcttagttttcccatgaagatctgaagcgttcactgtcattaggacttgaagtaaagtatatttttgtaccaaaccacatgggagtatggaaaggctgaaccccatagtgcagcccaaaaccactttgacctccagatagactcctggggaagcattcaccaagccagtggtaacaagatgatgaatgtggagggggaaaagactgctggaagacttcatctccattcctgaaacattttttttaaaacagtgtcagggattatattcgttttactatacaaaaggacatcattgaggaaaagcttgtttctaggctgtatcacagtaaataatcttgattgtttctagaacaggggtagaaaagtcccaagatcttcagaagggcttggttttttcctcccaggattcttgctcagtgatgagttgaaagcacaggataagcttctaagggaggaaggcagcattggggagcaggaggctgatggtcctcctcagggtctcagtgtaaatgataaattgtctaaaaataaggaatattcctgcctctagagaaataaggtgtacatagttaatgtagcatatctggtcgacgttgtatttgtatctatttgtaaaaaaaaaatcatgtcatattttatcatctggaatttatttgtacagcagttaatggtgttgtaaaaagaaaaatatggggattgcttaaaatactgtaaaatagatggcaatattgctagagctgggactctggtgagcatccgtcatttttagtccttcttgaggacattgctgaaatttataagaggtcgaatgtttctttctttcctttctcagtctaaaagtagagttatatgctctttgacttactatgattcaagcaatagattttgaagtcagtaatcgttaagctgggacataggatgcattctccaaaaacattaatctaattagacattagccaccctatatattttacatagattaatataaaacatatcctcattaaaaaatgtttttcttgaatgtaaaagatagtcttccaaaggatagaaatattttagttccaagagaaaagccatcatattacttgggatctgtagttttcatgcctatgaaatatttataatcctccctcaccccaaataaaaaatctcctacatgtgaacatagcctgtcactcatttgccatgaggtatgtgccatctccctgcagtgctatagttctcccattgtcttcctgtctggttaatgagcagctttgtagatgggtgtgtctagttagttcttgctttttgatggagttttttcctagaggccaactactgttgctctcgtttattatgatattgacattttgggttaagcaaggtgggtgggaaaggtggtcagatgttaaatataacttattaggaggaacagtgaactgtgaagtggttagaaaaaaaataaaaacttcttattagattagacctaggaaattcaagctgacccctttgcctaacttccctagagaaaaacctagaacttggtcatccctttataggagacccctaagttgttctcagggtttggagatgatgttctggagggagtacaagcaaataatctacttctggtaatctgagggtgctttgcgtatttggccattgctcagaagaatagaggttacattatattacattatatgaaaattatttagtttttctatagccctttgtagtttgcaaagcacttttccatatgtgtgtcctctcttccacaccatagccccctgaggaagtaattgttgtccccattttatagatgaaaaggctgaggcacagaggagctaaatatcttgttcaaggctatacaatgtgtgtgattattaggcttggaatcagggcctctaactctaaagcacatgttttttcaactatatgcagaaattgcctagccatggacacaagaaagctgggaggaagagttctacttgtggatgtttttaattttttttaaatatcaggagcaatccagggccatacagctatgaagcacttagtgaaaagaacacaagaagatttactaactgaagttagtattagtgattagaaaacaaaactgccagtttgtgcttcattaaggtgaactcatctctccaagcaggaagggaaaatttgctttccctagcagttgctgcatatgtgtgtacagactgcacaattctaagaaattgtgcaaaatggcatacctgtctttctcccagatacaccgccccctgccccccccaaaaaaggtcaggattaaaggtggtgagaagtgaacatttattaaacagaagttaaaccaatagagagaaaggaggtttgttggagtctaagaggattttgaccatgtagaaattccttgaaacagaccttaaaaggtattgaaaaattgaatcacaaagaaagtttacctttaaatacttgttaatggctcctagatcatggttataatttttctcaatgggaaaaaaagtcttaaaatttgttttaaataagatcctctaatgtctcgagctttttgattctggaaataatttgctttaaaatataaatcaatcagaaagtgatctaccactgaaatcattctaggaaactagcatgggatgcactgcacaatgttctttcctctaaaggcatgggccccataaactgtggcatctggcagcaggatgccatcagtcctttagaaagcctaattttgggccgggtgcggtggctcacgcctgtaatcccagcactttgggaggccgaggcgggtggatcacaaggtcaggagttcgagaccagcctggtcaacatggcgaaatcccgtctctactaaaaacacaaaaattagccgggtgtacgtgcctgtagtctcagctacttgggaggctgaggcaggagaatcacttgaacctgggaggcagaggttacagtgagccgagatggcgccatttcactccagcctgggcgacagagcaagactctgtctcaaaaaaaaggaagaaaaagaaagcctaatattgggagaatgtttgtgtaaggattggaaatctgtttatttttaaataagatagcactgatgtgaatcttatttggaaattacagatactgccattaagcgatgcttttatcttcattaattcattttggtaagcgcctatgcatttctgatggttaggtgccctaggtagtgttaagtatgtccgtgtcctcccttactcccctctcgctccctctaccctctatcccctagggttcttttattaatggaatttctccagttatagagaaaaaaatgacatttgaaaactaaagctcatttatattaatactaaggtcctgtgggcctagtgcgttactcttcccagtgatacctagattttaagagtagagaacagaggaaacatgggatgagaggagagaggttttttagacaacatttgtagacacctcaaattatatcactgttctctagcgccaatattcccaggtaaattgaccattaaagcaatactcactgacctactagtttattttggtcagctgagtaccatcaggatatttaaccctttaagtgctgttttgggagtagaaaactaaagcaacaatacttcctcttgacagctttgattggaatggggttattagatcattcaccttggtcctacactttttaggatgcttggtgaacataacaccacttataatgaacatccctggttcctatattttgggctatgtgggtaggaattgttacttgttactgcagcagcagccctagaaagtaagcccagggcttcagatctaagttagtccaaaagctaaatgatttaaagtcaagttgtaatgctaggcataagcactctataatacattaaattataggccgagcaattagggaatgtttctgaaacattaaacttgtatttatgtcactaaaattctaacacaaacttaaaaaatgtgtctcatacatatgctgtactaggcttcatcatgcatttctaaatttgtgtatgatttgaatatatgaaagaatttatacaagagtgttatttaaaattattaaaaataaatgtatataatttgtacctattgtagatttgttgtttacttttttgtgtggtcagagttgtttcatgtcttcaaatacatgccaaggatcatttactttcagcccacttcataaaaatctttgaactctt

SEQ ID NO: 6966 - DNA, 609 bp, Homo sapiens
ccgggcgccccgcattcctctcgcgtttctcgggctgcacgattccggctgccctgtctgcctggcggtgcctctcgggtctgagcttaaagcgggtgggtgcaaacctttgggcatccagggagagctttcttgttagagcccacacacaatcgggcgcatcaagtgggttgaagaaatatggagatcaacacaaaactgctcatcagtgttacctgtatcagctttttcacctttcagcttcttttctactttgtaagttactggttttcagcaaaagtttctccaggtttcaatagtctcagcttcaaaaagaagattgaatggaactcaagggtagtatccacatgccattctttggtggttggtatttttggcctgtacattttcttattcgatgaggctactaaagctgatccactttggggtggtccatcacttgcaaacgtgaatattgctattgcctcaggctacctcatttctgatttgtccattataattttgtattggaaagtgattggtgacaaattttttataatgcatcattgtgcgtccctgtatgcatactaccttgtactgaaaaatggagtgctggcatacattgggaat

SEQ ID NO: 6967 - DNA, 1929 bp, Homo sapiens
ccagattctaaatatcaggaaagacgctgtgggaaaatagcaggccaaaagttcttagtaaactgcagccagggagactcagactagaatggaggtagaaagaactgatgcagagtgggtttaattctaagcctttttgtggctaagttttgttgttgttaacttattgaatttagagttgtattgcactggtcatgtgaaagccagagcagcaccagtgtcaaaatagtgacagagagttttgaataccatagttagtatatatgtactcagagtatttttattaaagaaggcaaagagcccggcatagatcttatcttcatcttcactcggttgcaaaatcaatagttaagaaatagcatctaagggaacttttaggtgggaaaaaaaatctagagatggctctaaatgactgtttccttctgaacttggaggtggaccatttcatgcactgcaacatctccagtcacagtgcggatctccccgtgaacgatgactggtcccacccggggatcctctatgtcatccctgcagtttatggggttatcattctgataggcctcattggcaacatcactttgatcaagatcttctgtacagtcaagtccatgcgaaacgttccaaacctgttcatttccagtctggctttgggagacctgctcctcctaataacgtgtgctccagtggatgccagcaggtacctggctgacagatggctatttggcaggattggctgcaaactgatcccctttatacagcttacctctgttggggtgtctgtcttcacactcacggcgctctcggcagacagatacaaagccattgtccggccaatggatatccaggcctctcatgccctgatgaagatctgcctcaaagccgcctttatctggatcatctccatgctgctggccattccagaggccgtgttttctgacctccatcccttccatgaggaaagcaccaaccagaccttcattagctgtgccccatacccacactctaatgagcttcaccccaaaatccattctatggcttcctttctggtcttctacgtcattccactgtcgatcatctctgtttactactacttcattgctaaaaatctgatccagagtgcttacaatcttcccgtggaagggaatatacatgtcaagaagcagattgaatcccggaagcgacttgccaagacagtgctggtgtttgtgggcctgttcgccttctgctggctccccaatcatgtcatctacctgtaccgctcctaccactactctgaggtggacacctccatgctccactttgtcaccagcatctgtgcccgcctcctggccttcaccaactcctgcgtgaacccctttgccctctacctgctgagcaagagtttcaggaaacagttcaacactcagctgctctgttgccagcctggcctgatcatccggtctcacagcactggaaggagtacaacctgcatgacctccctcaagagtaccaacccctccgtggccacctttagcctcatcaatggaaacatctgtcacgagcggtatgtctagattgacccttgattttgccccctgagggacggttttgctttatggctagacaggaacccttgcatccattgttgtgtctgtgccctccaaagagccttcagaatgctcctgagtggtgtaggtgggggtggggaggcccaaatgatggatcaccattatattttgaaagaagccatcaagtcttaagtttttcatttcaacttgtgaacgtttcttctgatgtgaagcaaaccttcccttttcagaaaagggaacaagtagaaaattattttttaagcctcaagccctgttaaatggtcgtggccaattatgtcatagaaactgtatgaacaaccagatttacatagcagagaaatcatacattgaatgcttactt

SEQ ID NO: 6968 - DNA, 1896 bp, Homo sapiens
ctcaaaaggggccggatttccttctcctggaggcagatgttgcctctctctctcgctcggattggttcagtgcactctagaaacactgctgtggtggagaaactggaccccaggtctggagcgaattccagcctgcagggctgataagcgaggcattagtgagattgagagagactttaccccgccgtggtggttggagggcgcgcagtagagcagcagcacaggcgcgggtcccgggaggccggctctgctcgcgccgagatgtggaatctccttcacgaaaccgactcggctgtggccaccgcgcgccgcccgcgctggctgtgcgctggggcgctggtgctggcgggtggcttctttctcctcggcttcctcttcgggtggtttataaaatcctccaatgaagctactaacattactccaaagcataatatgaaagcatttttggatgaattgaaagctgagaacatcaagaagttcttatataattttacacagataccacatttagcaggaacagaacaaaactttcagcttgcaaagcaaattcaatcccagtggaaagaatttggcctggattctgttgagctagcacattatgatgtcctgttgtcctacccaaataagactcatcccaactacatctcaataattaatgaagatggaaatgagattttcaacacatcattatttgaaccacctcctccaggatatgaaaatgtttcggatattgtaccacctttcagtgctttctctcctcaaggaatgccagagggcgatctagtgtatgttaactatgcacgaactgaagacttctttaaattggaacgggacatgaaaatcaattgctctgggaaaattgtaattgccagatatgggaaagttttcagaggaaataaggttaaaaatgcccagctggcaggggccaaaggagtcattctctactccgaccctgctgactactttgctcctggggtgaagtcctatccagatggttggaatcttcctggaggtggtgtccagcgtggaaatatcctaaatctgaatggtgcaggagaccctctcacaccaggttacccagcaaatgaatatgcttataggcgtggaattgcagaggctgttggtcttccaagtattcctgttcatccaattggatactatgatgcacagaagctcctagaaaaaatgggtggctcagcaccaccagatagcagctggagaggaagtctcaaagtgccctacaatgttggacctggctttactggaaacttttctacacagaaagtcaagatgcacatccactctaccaatgaagtgacaagaatttacaatgtgataggtactctcagaggagcagtggaaccagacagatatgtcattctgggaggtcaccgggactcatgggtgtttggtggtattgaccctcagagtggagcagctgttgttcatgaaattgtgaggagctttggaacactgaaaaaggaagacattttagggtggagacctagaagaacaattttgtttgcaagctgggatgcagaagaatttggtcttcttggttctactgagtgggcagaggagaattcaagactccttcaagagcgtggcgtggcttatattaatgctgactcatctatagaaggaaactacactctgagagttgattgtacaccgctgatgtacagcttggtacacaacctaacaaaagagctgaaaagccctgatgaaggctttgaaggcaaatctctttatgaaagttggactaaaaaaagtccttccccagagttcagtggcatgcccaggataagcaaattgggatctggaaatgattttgaggtgttcttccaacgacttggaattgcttcaggcagagcacggtatactaaaaaaaagaaa

SEQ ID NO: 6969 - DNA, 592 bp, Homo sapiens
acagggcacatactcatgcgtggctcccttcactactgggtgtcagtctggcctgtgctcaaggtgtggcatctggttggagtttcaatatgtaggatccactaccagggttttcgtgagattaagaagggtaaggtaacctactggcaaaaggggctggtatgccccaggggttggtttggcacagcaggattaaaacgaagtcaaccaaggctagagtctggtgttctttagtcattcacctcaccctccaggaggccaccgaatggctttatctggacagggacagatccagggacacaactgggataaccggtattcctgaggtgctatctccagttccttgcactcctgttaacaagcacctcagcgagagcagcagcagcgatagcagccgcagaagagccagcggggtcgcctagtgtcatgaccagggcgggagatcacaaccgccagagaggatgctgtggatccttggccgactacctgacctctgcaaaattccttctctaccttggtcattctctctctacttggggagatcggatgtggcactttgcggtgtctgtgtttctggtagagctctatggaa

SEQ ID NO: 6970 - DNA, 1078 bp, Homo sapiens
ccatggcgggacacctggcttcggatgcctgccttcttgccccctccaggcggtggaggtgatgggccaggggggccggagccgggctgggttgatcctcggacctggctaagcttccaaggccctcctggagggccaggaatcgggccgggagttgggtcaggctctgaggtgtgggggattcccccatgccccccgctgtatgagttctgtggggggatggcgtactgtgggcctcaggttggagtgcggctagtgccccaaggcggcttggagacctctcagcctgagggcgaagcaggagtcagggtggagagcaactccgatggcacctccctggagccctgcaccgtcccccctggtgccgtgaaactggagaaggagaagctggagcaaaacccgcaggagtcccagaacatcaaagctctgcagaaagaactcgaacaatttgccaagctcctgaagcagaagaggatcaccctgggatatacacaggccgatgtggggctcaccctgggggttctatttgggaaggtgttcagccaaacgaccatctgccgctttgagggtctgcagcttagcttcaagaacatgtgtaagctgcggcccttgctgcagaagtgggtggaggaagctgacaacaatgaaaatcttcaggagacatgcaaagcagaaaccctcttgcaggctcgaaagagaaagcgaaccagtatcgagaaccgagtgagaggcaacctggagaatttgttcctgcagtgcccgaaacccacactgcagcagatcagccacatcgcccagcagcttgggctcgagaaggatgtggtccgagtgtggttctgtaaccggtgccagaaaggcaagcaatcaagcagcgactatgcataacgagaggattttgaggctgctgggtctcctttctcaggggtaccagtatcctttcctctggccccagggccccattttggtaccccaggctatgggagccctcacttcactgcactgtactcctcggtccctttccctgagggggaagcctttcccccgtctccgtcaccaccctgggctctcccatgcattc

SEQ ID NO: 6971 - DNA, 2483 bp, Homo sapiens
gagctcggtgattggctcagaagggaaaaggcgggtctccgtgacgacttataaaagcccaggggcaagcggtccggataacggctagcctgaggagctgctgcgacagtccactacctttttcgagagtgactcccgttgtcccaaggcttcccagagcgaacctgtgcggctgcaggcaccggcgcgtcgagtttccggcgtccggaaggaccgagctcttctcgcggatccagtgttccgtttccagcccccaatctcagagcggagccgacagagagcagggaaccggcatggccaaagccgcggcgatcggcatcgacctgggcaccacctactcctgcgtgggggtgttccaacacggcaaggtggagatcatcgccaacgaccagggcaaccgcaccacccccagctacgtggccttcacggacaccgagcggctcatcggggatgcggccaagaaccaggtggcgctgaacccgcagaacaccgtgtttgacgcgaagcggctgatcggccgcaagttcggcgacccggtggtgcagtcggacatgaagcactggcctttccaggtgatcaacgacggagacaagcccaaggtgcaggtgagctacaagggggagaccaaggcattctaccccgaggagatctcgtccatggtgctgaccaagatgaaggagatcgccgaggcgtacctgggctacccggtgaccaacgcggtgatcaccgtgccggcctacttcaacgactcgcagcgccaggccaccaaggatgcgggtgtgatcgcggggctcaacgtgctgcggatcatcaacgagcccacggccgccgccatcgcctacggcctggacagaacgggcaagggggagcgcaacgtgctcatctttgacctgggcgggggcaccttcgacgtgtccatcctgacgatcgacgacggcatcttcgaggtgaaggccacggccggggacacccacctgggtggggaggactttgacaacaggctggtgaaccacttcgtggaggagttcaagagaaaacacaagaaggacatcagccagaacaagcgagccgtgaggcggctgcgcaccgcctgcgagagggccaagaggaccctgtcgtccagcacccaggccagcctggagatcgactccctgtttgagggcatcgacttctacacgtccatcaccagggcgaggttcgaggagctgtgctccgacctgttccgaagcaccctggagcccgtggagaaggctctgcgcgacgccaagctggacaaggcccagattcacgacctggtcctggtcgggggctccacccgcatccccaaggtgcagaagctgctgcaggacttcttcaacgggcgcgacctgaacaagagcatcaaccccgacgaggctgtggcctacggggcggcggtgcaggcggccatcctgatgggggacaagtccgagaacgtgcaggacctgctgctgctggacgtggctcccctgtcgctggggctggagacggccggaggcgtgatgactgccctgatcaagcgcaactccaccatccccaccaagcagacgcagatcttcaccacctactccgacaaccaacccggggtgctgatccaggtgtacgagggcgagagggccatgacgaaagacaacaatctgttggggcgcttcgagctgagcggcatccctccggcccccaggggcgtgccccagatcgaggtgaccttcgacatcgatgccaacggcatcctgaacgtcacggccacggacaagagcaccggcaaggccaacaagatcaccatcaccaacgacaagggccgcctgagcaaggaggagatcgagcgcatggtgcaggaggcggagaagtacaaagcggaggacgaggtgcagcgcgagagggtgtcagccaagaacgccctggagtcctacgccttcaacatgaagagcgccgtggaggatgaggggctcaagggcaagatcagcgaggccgacaagaagaaggtgctggacaagtgtcaagaggtcatctcgtggctggacgccaacaccttggccgagaaggacgagtttgagcacaagaggaaggagctggagcaggtgtgtaaccccatcatcagcggactgtaccagggtgccggtggtcccgggcctgggggcttcggggctcagggtcccaagggagggtctgggtcaggccccaccattgaggaggtagattaggggcctttccaagattgctgtttttgttttggagcttcaagactttgcatttcctagtatttctgtttgtcagttctcaatttcctgtgtttgcaatgttgaaattttttggtgaagtactgaacttgctttttttccggtttctacatgcagagatgaatttatactgccatcttacgactatttcttctttttaatacacttaactcaggccattttttaagttggttacttcaaagtaaataaactttaaaattcaagtga

SEQ ID NO: 6972 - DNA, 655 bp, Homo sapiens
cacagcggtacaagctgcaccccgatggacctgagagaccggaagtaacccttggccaactctggccgccccctgcagccgcagccccagaggcccacccgcgagcttcagtggcgggccctcagcgtcgtaactcccccactggaaaggattctgaaagaaatgaagtcagccctcagaaatgaagttgactgcctgctggctttctgttgactggcccggagctgtactgcaagacccttgtgagcttccctagtctaagagtaggatgtctgctgaagtcatccatcaggttgaagaagcacttgatacagatgagaaggagatgctgctctttttgtgccgggatgttgctatagatgtggttccacctaatgtcagggaccttctggatattttacgggaaagaggtaagctgtctgtcggggacttggctgaactgctctacagagtgaggcgatttgacctgctcaaacgtatcttgaagatggacagaaaagctgtggagacccacctgctcaggaaccctcaccttgtttcggactatagagtgctgatggcagagattggtgaggatttggataaatctgatgtgtcctcattaattttcctcatgaaggattacatgggccgaggcaagataagcaaggagaag

SEQ ID NO: 6973 - DNA, 291 bp, Homo sapiens
attctcttttcttttattcttgtctgttctgcctcactcccgagctctactgactcccaaaagagcgcccaagaagaaaatggccataagtggagtccctgtgctaggatttttcatcatagctgtgctgatgagcgctcaggaatcatgggctatcaaagaagaatttggacgatttgccagctttgaggctcaaggtgcattggccaacatagctgtggacaaagccaacctggaaatcatgacaaagcgctccaactatactccgatcaccaatgtacctccagaggt

SEQ ID NO: 6974 - DNA, 3154 bp, Homo sapiens
ataaacgcaggtcacctgagccagtagcagcaacctgggtccccttccacgctgtggaatctttgtttttttttcactgctcgcaataaatcttgctgctgcttattatttgggtccgtgttacctttatgagctgtagcactcaccgcgaaggtttgcagcttcgctattcactcttgaagccagcgagaccacgaacccaccgggaggaagaaacaactccggacgcgccacctttaagagctgtaacactaacggtgaaagtctgcggtatcactcctgaagtcagggagaccacgaaccccccagaagaaactccggacgcatctgaacatctgaaggaacaaactctggacacaccatctttaagaactgaaacaccgcgacagttcgctgcttcattcttaaaggcagtgagaccgagaacgcaccaattctggacacaaaaggaccttagcaggctcaggaaatggcaagccatttatgaagagggaagagatagcaaacgttggtctcaagttctctagttctttacccagaccatagctggctgggggatgatcctgatttagtctggggggttcctttacgcattgccaccagcaggtgccgcaaatggaccattggcagtcttaaggtatagacacgtgtggccgtttacgctgtaggatcctcattcccactggctttgaacattttggggacttacaatgccgccacccgcggacatcgtcaaggtggccatagaatggccgggcgcctaccccaaactcatggaaattgatcagaaaaaaccactgtctgcaataataaaggaagtctgtgatgggtggtctcttgccaaccatgaatattttgcactccagcatgccgatagttcaaacttctatatcacagaaaagaaccgcaatgagataaaaaatggcactatccttcgattaaccacatctccagctcagaacgcccagcagctccatgaacgaatccagtcctcgagtatggatgccaagctggaagccctgaaggacttggccagcctctcccgggatgtcacgtttgcccaggagtttataaacctggacggtatctctctcctcacgcagatggtggagagcggcactgagcgataccagaaattgcagaagatcatgaagccttgctttggagacatgctgtccttcaccctgacggccttcgttgagctgatggaccatggcatagtgtcctgggatacattttcggtggcgttcattaagaagatagcaagttttgtgaacaagtcagccatagacatctcgatcctgcagcggtccttggccattttggagtcgatggtgctcaatagccatgacctctaccagaaagtggcgcaggagatcaccatcggccagctcattccacacctgcaagggtcagatcaagaaatccaaacctatactattgcagtgattaatgcgcttttcctgaaggctcctgatgagaggaggcaggagatggcgaatattttggctcagaagcaactgcgttccatcattttaacacatgtcatccgagcccagcgggccatcaacaatgagatggcgcaccagctgtatgttctacaagtgctcacctttaacctcctggaagacaggatgatgaccaaaatggacccccaggaccaggctcagagggacatcatatttgaacttcgaagaattgcttttgatgctgagtctgaacctaacaacagcagtggcagcatggagaaacgcaagtccatgtacacgcgagattataagaagcttgggttcattaatcatgtcaaccctgccatggacttcacgcagactccacctgggatgttggctctggacaacatgctgtactttgccaagcaccaccaagatgcctacatccggattgtgcttgagaacagtagtcgagaagacaagcatgaatgtccctttggccgcagtagtatagagctgaccaagatgctatgtgagatcttgaaagtgggcgagttgcctagtgagacctgcaacgacttccacccgatgttcttcacccacgacagatcctttgaggagtttttctgcatctgtatccagctcctgaacaagacatggaaggaaatgagggcaacttctgaagacttcaacaaggtaatgcaggtggtgaaggagcaggttatgagagcacttacaaccaagcctagctccctggaccagttcaagagcaaactgcagaacctgagctacactgagatcctgaaaatccgccagtccgagaggatgaaccaggaagatttccagtcccgcccgattttggaactaaaggagaagattcagccagaaatcttagagctgatcaaacagcaacgcctgaaccgccttgtggaagggacctgctttaggaaactcaatgcccggcggaggcaagacaagttttggtattgtcggctttcgccaaatcacaaagtcctgcattacggagacttagaagagagtcctcagggagaagtgccccacgattccttgcaggacaaactgccggtggcagatatcaaagccgtggtgacgggaaaggactgccctcatatgaaagagaaaggtgcccttaaacaaaacaaggaggtgcttgaactcgctttctccatcttgtatgactcaaactgccaactgaacttcatcgctcctgacaagcatgagtactgtatctggacggatggactgaatgcgctactcgggaaggacatgatgagcgacctgacgcggaatgacctggacaccctgctcagcatggaaatcaagctccgcctcctggacctggaaaacatccagatccctgacgcacctccgccgattcccaaggagcccagcaactatgacttcgtctatgactgtaactgaagtggccgggcccagacatgccccttccaaaactggaacacctagctaacaggagagaggaatgaaaacacacccacgccttggaaccgtcctttggtaaagggaagctgtgggtccacattcccttcagcatcacctctagccctggcaactttcagcccctagctggcatcttgctcaccgccctgattctgttcctcggctccactgcttcaggtcacttcccatggctgcagtccactggtgggacaagagcaaag

SEQ ID NO: 6975 - DNA, 527 bp, Homo sapiens
atgatgctacagctgacagtcgcaaaacttacactctaactgattacttaaaaaatacttatagactgaagttatactccttaagatggatttcagatcatgaatatctctacaaacaagaaaataatatcttggtattcaatgctgaatatggaaacagctcagttttcttggagaacagtacatttcatatggcaaagtggatctttctctccttcttgaaatgctccctgccttggctactttttagtctcctttgacgattcctcttcctctgcccatatttttaaatgatgagtttggacattctatcaatgattattcaatatctcctgatgggcagtttattctcttagaatacaactacgtgaaggcagctgattacagaagagaggattccaaacaacacacagtgggtcacatggtcaccagtgggtcataaattggcatatgtttggaacaatgacatttatgttaaaattgaaccaaatttaccaagttacagaatcacatggacggggaaagaa

SEQ ID NO: 6976 - DNA, 494 bp, Homo sapiens
ggcaccctgggcctttgcgttgtttgtcggctgagcagctggttcccggagcccgtgggcctcctggccaatgcgagtgacagcgaccttctgggtttataataaagggcttgacgcgccggaaagtcccctcgccgctggccaccagccttccagcccttacggcccacgccgtaatcctggtgaccgagaagctctttgcctggaaggtgcctgcctgcctgcctgccggcccttgaacttaaatcgtctgaagttgtagagcagagccactgccagaaggaaggggacaagacccagcaggacaccttctttccacgctttccagcctgtgggagcggcaggggcaacagagagaggatctggagccaggattaatgactcatttatgaagcatcttattctgcgaccgaggctcagtggtcagtggcgacgtaaatggctcgactccccgctggcattcgcttcatcatctcattctccagggatcagtg

SEQ ID NO: 6977 - DNA, 1780 bp, Homo sapiens
tggcttggtgagtctgtgtggtcagcagtctctgatccgtgcagggtattaatgtgtcagggctgagtgttctgagatttatctagaggctgggaagggctcctgaaccagttgtttccgtcttgtcggtctgtcagggttggaaagtccaagccataggacccagtttcctttcttagcttacgttatctaccagagcaccgtgggctgttacttgccttgagttggaagcggttcgcatttataccggaatataaatagtttctggaaaggacactgacaacttcaaagcaaaatgaagctcttttggttgcttttcaccattgggttctgctgggctcagtattcctcaaatacacaacaaggacgaacatctattgttcatctgtttgaatggcgatgggttgatattgctcttgaatgtgagcgatatttagctcccaagggatttggaggggttcaggtctctccaccaaatgaaaatgttgccattcacaaccctttcagaccttggtgggaaagataccaaccagttagctataaattatgcacaagatctggaaatgaagatgaatttagaaacatggtgactagatgcaacaatgttggggttcgtatttatgtggatgctgtaattaatcatatgtgtggtaatgctgtgagtgcaggaacaagcagtacctgtggaagttacttcaaccctggaagtagggactttccagcagtcccatattctggatgggattttaatgatggtaaatgtaaaactggaagtggagatatcgagaactataatgatgctactcaggtcagagattgtcgtctgtctggtcttctcgatcttgcactggggaaggattatgtgcgttctaagattgccgaatatatgaaccatctcattgacattggtgttgcagggttcagaattgatgcttccaagcacatgtggcctggagacataaaggcaattttggacaaactgcataatctaaacagtaactggttcccggaaggtagtaaacctttcatttaccaggaggtaattgatctgggtggtgagccaattaaaagcagtgactactttggtaatggccgggtgacagaattcaagtatggtgcaaaactcggcacagttattcgcaagtggaatggagagaagatgtcttacttaaagaactggggagaaggttggggtttcatgccttctgacagagcgcttgtctttgtggataaccatgacaatcaacgaggacatggcgctggaggagcctctatacttaccttctgggatgctaggctgtacaaaatggcagttggatttatgcttgctcatccttatggatttacacgagtaatgtcaagctaccgttggccaagatattttgaaaatggaaaagatgttaatgattgggttgggccaccaaatgataatggagtaactaaagaagttactattaatccagacactacttgtggcaatgactgggtctgtgaacatcgatggcgccaaataaggaacatggttaatttccgcaatgtagtggatggccagccttttacaaactggtatgataatgggagcaaccaagtggcttttgggagaggaaacagaggattcattgttttcaacaatgatgactggacattttctttaactttgcaaactggtcttcctgctggcacatactgtgatgtcatttctggagataaaattaatggcaactgcacaggcattaaaatctacgtttctgaaaaaaaaaaaaaaaaaaaaaaaaaaaaa

SEQ ID NO: 6978 - DNA, 751 bp, Homo sapiens
ggccgccgaagtttcgctttggcgttggggggcgcggatgggtgctcgccggggccctggcccggctcccctgggcggcccgcgcgcgtttcaatgggcgcgggcgatgcccacattgtcgctgtgtttggttgctagatcgagcctgcgtgctgccgaagcagggcgccgagtccatgcgaactgccatctgatccgctcttatcaatgaagcagccgatcatggcggatggcccccggtgcaagaggcgcaaacaagccaatcccaggaggaaaaacgtggtgaactatgacaatgtagtggacacaggttctgaaacagatgaggaagacaagcttcatattgctgaggatgacggtattgccaaccctctggaccaggagacgagtccagctagtgtgcccaaccatgagtcctccccacacgtgagccaagctctgttgccaagagaggaagaggaagatgaaataagggagggtggagtggaacacccctggcacaacaacgagattctacaagcctctgtagatggtccaggtaagtgtctaaaatcacttggcctcttcctgtaccatcttcacatcttcaactaatctgttccacctagcagatcgcccacaaccaaataattaaaatatttctttccattgagcccttgcagaatagagataccaaagctggtgacagattatgaagtgatagtaatgttatcacattgcggcagttacatcttaggaagggattatattt

SEQ ID NO: 6979 - DNA, 1980 bp, Homo sapiens; identical to SEQ ID NO: 6515

SEQ ID NO: 6980 - DNA, 2550 bp, Homo sapiens
cacacacacacacacacacacacgcacacatacaatgcacaagttcagcaggattgtataatgagcatgaattgtaaatttttttccagattgtttgaacttctctggccgcacaatacaggaaggaagactaaagcagcaaagggacctacagcgtctgcagcatgggctggttaactaggattgtctgtcttttctggggagtattacttacagcaagagcaaactatcagaatgggaagaacaatgtgccaaggctgaaattatcctacaaagaaatgttggaatccaacaatgtgatcactttcaatggcttggccaacagctccagttatcataccttccttttggatgaggaacggagtaggctgtatgttggagcaaaggatcacatattttcattcgacctggttaatatcaaggattttcaaaagattgtgtggccagtatcttacaccagaagagatgaatgcaagtgggctggaaaagacatcctgaaagaatgtgctaatttcatcaaggtacttaaggcatataatcagactcacttgtacgcctgtggaacgggggcttttcatccaatttgcacctacattgaaattggacatcatcctgaggacaatatttttaagctggagaactcacattttgaaaacggccgtgggaagagtccatatgaccctaagctgctgacagcatcccttttaatagatggagaattatactctggaactgcagctgattttatggggcgagactttgctatcttccgaactcttgggcaccaccacccaatcaggacagagcagcatgattccaggtggctcaatgatccaaagttcattagtgcccacctcatctcagagagtgacaatcctgaagatgacaaagtatactttttcttccgtgaaaatgcaatagatggagaacactctggaaaagctactcacgctagaataggtcagatatgcaagaatgactttggagggcacagaagtctggtgaataaatggacaacattcctcaaagctcgtctgatttgctcagtgccaggtccaaatggcattgacactcattttgatgaactgcaggatgtattcctaatgaactttaaagatcctaaaaatccagttgtatatggagtgtttacgacttccagtaacattttcaagggatcagccgtgtgtatgtatagcatgagtgatgtgagaagggtgttccttggtccatatgcccacagggatggacccaactatcaatgggtgccttatcaaggaagagtcccctatccacggccaggaacttgtcccagcaaaacatttggtggttttgactctacaaaggaccttcctgatgatgttataacctttgcaagaagtcatccagccatgtacaatccagtgtttcctatgaacaatcgcccaatagtgatcaaaacggatgtaaattatcaatttacacaaattgtcgtagaccgagtggatgcagaagatggacagtatgatgttatgtttatcggaacagatgttgggaccgttcttaaagtagtttcaattcctaaggagacttggtatgatttagaagaggttctgctggaagaaatgacagtttttcgggaaccgactgctatttcagcaatggagctttccactaagcagcaacaactatatattggttcaacggctggggttgcccagctccctttacaccggtgtgatatttacgggaaagcgtgtgctgagtgttgcctcgcccgagacccttactgtgcttgggatggttctgcatgttctcgctattttcccactgcaaagagacgcacaagacgacaagatataagaaatggagacccactgactcactgttcagacttacaccatgataatcaccatggccacagccctgaagagagaatcatctatggtgtagagaatagtagcacatttttggaatgcagtccgaagtcgcagagagcgctggtctattggcaattccagaggcgaaatgaagagcgaaaagaagagatcagagtggatgatcatatcatcaggacagatcaaggccttctgctacgtagtctacaacagaaggattcaggcaattacctctgccatgcggtggaacatgggttcatacaaactcttcttaaggtaaccctggaagtcattgacacagagcatttggaagaacttcttcataaagatgatgatggagatggctctaagaccaaagaaatgtccaatagcatgacacctagccagaaggtctggtacagagacttcatgcagctcatcaaccaccccaatctcaacacaatggatgagttctgtgaacaagtttggaaaagggaccgaaaacaacgtcggcaaaggccaggacataccccagggaacagtaacaaatggaagcacttacaagaaaataagaaaggtagaaacaggaggacccacgaatttgagagggcacccaggagtgtctgagctgcattacctctagaaacctcaaacaagtagaaacttgcctagacaataactggaaaaacaaatgcaa

SEQ ID NO: 6981 - DNA, 406 bp, Homo sapiens
gcccgccgaggctcggggctcgggccgggctccgcgcggagttgcagcggtggccggatgccaagtgtaagtgattttttatcaagcagaaatgcatcgaacaacgagaatcaagatcactgagctaaatccccacctgatgtgtgtgctttgtggagggtacttcattgatgccacaaccataatagaatgtctacattccttctgtaaaacgtgtattgttcgttacctggagaccagcaagtattgtcctatttgtgatgtccaagttcacaagaccagaccactactgaatataaggtcagataaaactctccaagatattgtatacaaattagttccagggcttttcaaaaatgaaatgaagagaagaagggatttttatgcagctcatccttctgctgat

SEQ ID NO: 6982 - DNA, 2585 bp, Homo sapiens
tgcgacgctcgggtctgggtccgggtccggacgtgcaacagaagccgtcagtggccccgctggctaaaaaagggcaagcatcggaggctcgagccagcggccgcggcgcttcccgacagttcctaattcggggcgctacgccggccccaccacctgttcccggcagccaatggggccgcggggggcggccggggcggagcgcggctacaaaaggcctcgggccccgcgcgcccgcccaccccgctccgggcgcgctctcgggaaggcttggaccgacgcggcccagaggccaggaacattccgcgcgtggaccagccgggccagggcgatgctgcgggtgcggtgtctgcgcggcgggagccgcggcgccgaggcggtgcactacatcggatctcggcttggacgaaccttgacaggatgggtgcagcgaactttccagagcacccaggcagctacggcttcctcccggaactcctgtgcagctgacgacaaagccactgagcctctgcccaaggactgccctgtctcttcttacaacgaatgggaccccttagaggaagtgatagtgggcagagcagaaaacgcctgtgttccaccgttcaccatcgaggtgaaggccaacacatatgaaaagtactggccattttaccagaagcaaggagggcattattttcccaaagatcatttgaaaaaggctgttgctgaaattgaagaaatgtgcaatattttaaaaacggaaggagtgacagtaaggaggcctgaccccattgactggtcattgaagtataaaactcctgattttgagtctacgggtttatacagtgcaatgcctcgagacatcctgatagttgtgggcaatgagattatcgaggctcccatggcatggcgttcacgcttctttgagtaccgagcgtacaggtcaattatcaaagactacttccaccgtggcgccaagtggacaacagctcctaagcccacaatggctgatgagctttataaccaggattatcccatccactctgtagaagacagacacaaattggctgctcagggaaaatttgtgacaactgagtttgagccatgctttgatgctgctgacttcattcgagctggaagagatatttttgcacagagaagccaggttacaaactacctaggcattgaatggatgcgtaggcatcttgctccagactacagagtgcatatcatctcctttaaagatcccaatcccatgcatattgatgctaccttcaacatcattggacctggtattgtgctttccaaccctgaccgaccatgtcaccagattgatcttttcaagaaagcaggatggactatcattactcctccaacaccaatcatcccagacgatcatccactctggatgtcatccaaatggctttccatgaatgtcttaatgctagatgaaaaacgtgttatggtggatgccaatgaagttccaattcaaaagatgtttgaaaagctgggtatcactaccattaaagttaacattcgtaatgccaattccctgggaggaggcttccattgctggacctgcgatgtccggcgccgaggcaccttacagtcctacttggactgaacaggcctgatggagcttgtggctggcctcagatacacctaagaagcttaggggcaaggttcattctcctgctttaaaaagtgcatgaactgtagtgctttaaacaatcatctccttaacaggggtcgtaagcctggtttgcttctattacttttctttgacataaagaaaataacttctgctaggtattactctctactcctaaagttatttactatttggcttcaagtataaaattttggtgaatgtgtaccaagaaaaaattagtcacctgagtaacttggccactaataattaaccatctacctctgtttttaattttctttccaaaaggcagcttgaaatgttggtcctaatcttaattttttttcctcttctatagacttgagaatgtttttctctaaatgagagaaagacttagaatgtacacagatccaaaatagaatcagattatctctttttttctaaaggagagaaagacttagaacatacacagatcctaagtagaaccaggtaattgtctctttttctaataaggaatttgggtaatttttaattttttgttttttaaaaaataacctagactatgcaaaacatcaaagtgaattttccatgaatgtttttaatattctcatctcaacattgtgatatatgctactaaaaaccttttcatatacatcttacctcatttcaagtgaattattttaatctttttctctctttccaaaaatttaggaatgtttagtgtaattggatttcgctatcagttcccatccttaagttttgatattcaatatctgatagatacactgcatctttggtcatctaagatttgtttacaaatgtgcaaattatttagagcatagactttataagcattaaaaaaaactaatggaggtaaaacctaaatgcgatgtgaaataattttagtgttgataccgtatgtgtatttttattctaataaacttttgtgttccagattgaa

SEQ ID NO: 6983 - DNA, 472 bp, Homo sapiens
ttcatgggcggggtggggtggggtcaggagcctgctgtgggctggccaggccctggccctccctgtcgcaccctgcgctgcctccatgcacctctcagggctgtcatggcttttcctgtggcttctgacaggtagagtcagcgatgacggcttcatagccattaagctcacagcactggggagaccccagtttctgctgcagttctcagaggtgctggccaagtggaggtgcttctttcaccaaatggctgtggagcaagggcaggcgggcctggctgccatggacaccaagctggaggtggcggtgctgcaggaaagtgtcgcaaagttgggcatcgcatccagggctgagattgaggactggttcacggcagagaccctgggagtgtctgggtgagagcagcccccaggctgagaggacacgagcatcagccatggttccagccaagccccagtgacgtctcccagtcct

SEQ ID NO: 6984 - DNA, 585 bp, Homo sapiens
ctcctcgccgccgcggcggcaggcgcggggccgcgccgcgaggcctgatccctgcagcgcgggcaggcggcgtcgcagagcggagctagctggatgcgtccggactcctgcaggtgagagtgattttccagtgattgctttggcctgtacaaccagagaacaggattcttcccttctttttggccaccaaatgcctatgtgcaccacacattccagtgtgctgagaagggcagagcttcttggatgatgatggacgtcccaccgggcaggatgaaggcagagcgtgtggcatctccacctcaagggtctgtgagagccacttcaggaattttttgcttggagttacatgacgaaatttgcatttcagaaaggccacctgatactgtatggaggatggcctagagggctgaactgatgcttgaaggccctggagcaagctttttgtgatgcttctatggcaccatctgccaactggaaaaatgaccctgctctgcacacagacctgtgttcctgtgggcggagacccctctgtcagttctcagatggggaacctggagcatagagggggaagccacagtttcttca

SEQ ID NO: 6985 - DNA, 555 bp, Homo sapiens
aacgaacagtggtctgatttggctggagagcaagtttcctcaaggggcgccgtggggaatttagctggctccagggcccacaacggcagtgtcctacatgtcggtgaaatgtgtggatgcccgtaagaaccatcacaagacaaaatggttcgtgccttggggacccaatcattgtgacaagatccgagacattgaagaggcaattccaagggaaattgaagccaatgacatcgtgttttctgttcacattcccctcccccacatggagatgagtccttggttccaattcatgctgtttatcctgcagctggacattgccttcaagctaaacaaccaaatcagagaaaatgcagaagtctccatggacgtttccctggcttaccgtgatgacgcgtttgctgagtggactgaaatggcccatgaaagagtaccacggaaactcaaatgcaccttcacatctcccaagactccagagcatgagggccgttactatgaatgtgatgtccttcctttcatggaaattgggtctgtggcccataagttttaccttttaaa

SEQ ID NO: 6986 - DNA, 1641 bp, Homo sapiens
atggctcagtggcactgctcacagagaacacaggctggaggacatggagtcggggaacggctggcccagtgccaggaccagagtagtcggcatgctgctgagctgcgggacttcaagaacaagatgctgccactgctggaggtggcagagaaggagcgggaggcactcagaactgaggccgacaccatctccgggagagtggatcgtctggagcgggaggtagactatctggagacccagaacccagctctgccctgtgtagagtttgatgagaaggtgactggaggccctgggaccaaaggcaagggaagaaggaatgagaagtacgatatggtgacagactgtggctacacaatctctcaagtgagatcaatgaagattctgaagcgatttggtggcccagctggtctatggaccaaggatccactggggcaaacagagaagatctacgtgttagatgggacacagaatgacacagcctttgtcttcccaaggctgcgtgacttcacccttgccatggctgcccggaaagcttcccgagtccgggtgcccttcccctgggtaggcacagggcagctggtatatggtggctttctttattttgctcggaggcctcctggaagacctggtggaggtggtgagatggagaacactttgcagctaatcaaattccacctggcaaaccgaacagtggtggacagctcagtattcccagcagaggggctgatccccccctacggcttgacagcagacacctacatcgacctggcagctgatgaggaaggtctttgggctgtctatgccacccgggaggatgacaggcacttgtgtctggccaagttagatccacagacactggacacagagcagcagtgggacacaccatgtcccagagagaatgctgaggctgcctttgtcatctgtgggaccctctatgtcgtctataacacccgtcctgccagtcgggcccgcatccagtgctcctttgatgccagcggcaccctgacccctgaacgggcagcactcccttattttccccgcagatatggtgcccatgccagcctccgctataacccccgagaacgccagctctatgcctgggatgatggctaccagattgtctataagctggagatgaggaagaaagaggaggaggtttgaggagctagccttgttttttgcatctttctcactcccatacatttatattatatccccactaaatttcttgttcctcattcttcaaatgtgggccagttgtggctcaaatcctctatatttttagccaatggcaatcaaattctttcagctcctttgtttcatacggaactccagatcctgagtaatccttttagagcccgaagagtcaaaaccctcaatgttccctcctgctctcctgccccatgtcaacaaatttcaggctaaggatgccccagacccagggctctaaccttgtatgcgggcaggcccagggagcaggcagcagtgttcttcccctcagagtgacttggggagggagaaataggaggagacgtccagctctgtcctctcttcctcactcctcccttcagtgtcctgaggaacaggactttctccacattgttttgtattgcaacattttgcattaaaaggaaaatccac

SEQ ID NO: 6987 - DNA, 1594 bp, Homo sapiens
gattttccatgggcaggagccagaggacgggctggaccattgcttcgtcctcctctaacagaatctacactagagacgatttgtggctaatggtgcagtttaacttaaaacttctgaggagaacccccatcttcagttatcgtagttcatgacctcccagcagtatgaggatttattaactcatgtctctttaatttcccgcatgaaaattacttaaacgttgcacacaacgtttcacaaaatcttttgtgaaagaagaaaaggaaattcagtgtgtgagtctcagcaggagttaagctaatgcagcttaaaataatgccgaaaaagaagcgcttatctgcgggcagagtgcccctgattctcttcctgtgccagatgattagtgcactggaagtacctcttgatctggtacagcctccaaccatcacccaacagtctccaaaagattacattattgaccctcgggagaatattgtaatccagtgtgaagccaaagggaaaccgcccccaagcttttcctggacccgtaatgggactcattttgacatcgataaagaccctctggtcaccatgaagcctggcacaggaacgctcataattaacatcatgagcgaagggaaagctgagacctatgaaggagtctatcagtgtacagcaaggaacgaacgcggagctgcagtttctaataacattgttgtccgcccatccagatcaccattgtggaccaaagaaaaacttgaaccaatcacacttcaaagtggtcagtctttagtacttccctgcagacccccaattggattaccaccacctataatattttggatggataattcctttcaaagacttccacaaagtgagagagtttctcaaggtttgaatggggacctttatttttccaatgtcctcccagaggacacccgcgaagactatatctgttatgctagatttaatcatactcaaaccatacagcagaagcaacctatttctgtgaaggtgatttcagtggatgaattgaatgacactatagctgctaatttgagtgacactgagttttatggtgctaaatcaagtagagagaggccaccaacatttttaactccagaaggcaatgcaagtaacaaagaggaattaagaggaaatgtgctttcactggagtgcattgcagaaggactgcctaccccaattatttactgggcaaaggaagatggaatgctacccaaaaacaggacagtttataagaactttgagaaaaccttgcagatcattcatgtttcagaagcagactctggaaattaccaatgtatagcaaaaaacgcattaggagccatccaccataccatttctgttagagttaaagcggctccatactggatcacagcccctcaaaatcttgtgctgtccccaggagaggatgggaccttgatctgcagagctaatggcaaccccaaacccagaattagctggttaacaaatggagtcccaatagaaattgcccctgatgaccccagcagaaaaatagatggcgataccattattttttcaaatgttcaagaaagatcaagtgcagtctatcagtgcaatgcctctaatgaat

SEQ ID NO: 6988 - DNA, 5043 bp, Homo sapiens
gggcagggcggctcggccgcctctttctctcgctgcccccgcccctcctcctcctccctctccccgagtgctagcccgggcggccgccgagcttggcgctctctcgcctcgctgcctcctcccccgcgccgcggaccctctcccctcccttgcgttgcccccctctcccgccgcctcctcccgctctcctctcgctctcctcccgcctccttcttccaggcgcggccagcgggggcaagagcgaggtggctgcgaggaggcgtcactgaaagccctgacttggggaaggctgcgggctcggagccggagacgccgagctggggccgggtgagttgggaatcagactcttgagttgacagctggcctatggtttctgcattttgttaagaagcacctcatgcaagcgagggacctgggactgctcacagccaggtggcatttttctgaagttgttcattaagacttcccagcattcctacagatataaataggtgaggccgcaggcggtgctctgggtccgggagcgctgtccccagcatgaacgcggccggcggcgggagtgaatgactgcagctgcgacttccttcccgggccgcccgagcctccttccccaccgactttcttgttttgattaactccgtggactcctgactctttcttcgcccggaacatcaatatgtgtcatgtcattgtcacctgtcgctcgatgctctggaccttgctgagtattgtggtggcttttgccgagctcattgccttcatgagtgcagactggctgatcgggaaagcgaggagccgcggcggcgtggagccggcgggcccgggcgggggctccccggagccctaccaccccaccctgggcatctacgcccgctgcatccggaacccaggggtgcagcacttccagcgggacacgctgtgcgggccctacgccgagagcttcggcgagatcgccagcggcttctggcaggccacagctattttcctggctgtgggaatctttattctctgcatggtggccttggtgtccgtcttcaccatgtgtgtacagagcatcatgaagaaaagcatcttcaatgtctgtgggctgttgcaaggaattgcaggtctattccttatcctcggtttgatactctaccctgctggctggggttgccagaaggccatagactactgtggacattatgcatctgcctacaaacctggagactgctccttgggctgggccttttataccgccattgggggcacagtcctcactttcatctgtgctgtcttctctgcacaagcagaaattgcaacctctagtgacaaagtacaggaagaaattgaagaggggaaaaatctgatctgcctcctttagtttggaagagacaatgccattttctcccttgagtaatcttgtgaaacagtccacagtttcatcatttgagtcaagtggagaactaacctttacctaccaaagccacgttccacggcccgaggcttaaacaggaccaatgagaggccacatccagctacgcaaagttactggacatgcggtctgcagtgcacattataaggaatggaacatgaaaatagtatataatcctagacctggagttgccaagttctgtcagactccatctcccccaggttcaatgaaggataataatctaaatcattagggcagcagtttctctggtaacggaagagaccgtccgccagatctgcaggctgtttctgctccaacactgcttgcttgtgagcatctctgcctcagaatggggttttgggttggagttcttgttttcctctgttctttcaagttgtctccaacgaacagaaaactataaacttactggggacaggatgtgtgctaaagggcacagcaagacactgtcttttgcttagctgaccaaaggggtcagcagggatggcgtggagtcatgctgtggaacttattctaggctgaatcctagggtaaggtggatcaactgaactgtcactccagagattttagaaatttgagtaaagaaacaataaggacctatacaatcatatgagaacaaaaatatgaaatcttgctagtgaagacgtattttttcttcttcccagcagccaggctagcaccagttctggcccagtctcctcttcttctggagatcacatgtttttcttctaaggttaggattgtgctttgactgcgaaaggaaacctcactgtttcctccttccagggactgaggtctccaagctagctgtggcttatgcagatgttcactgggaggacctgccagaatctcggcacttggggggagacctttactcccagtttggtgaccatgctgtagtcagctctatttccaatcccgacagtagcagaatggcattctacaacaaaaagaagctagttatgggagttaagtttttgtagttactggtgttgatcctgaaagcagactgagataacattaaattgctgcaactgaagaactgcagccaagaccttaattccaggaaagcacagaggacaaagttaattcaaaaagaggcgctagatcaaggtcacagcactgcctacacctgtttacaaaaagaatcaaataccactatgaataaggattcaggggtttttaatctactttccataaattaccaatatcactgattcaggaagatagtatctcagaatgaccagagcagcacagaaacaagctactctgacattatgggagcttcaaaattgtatcatgatacagaaacactccttagcactttaagaaagtgagatggaactgccagatttctggaaggagaaaaagtgtaggtatttgggttcattaatctgctcacttgaggactttgttttgaaaaagtaccttctgtggacaaggtattgtgctaccagctatacaaccctgacttcagagtttgcaaccttgccctgagtgaatcatgttaaagctgtctgagtctaaagcaccgtatcttggtgcagaacagataattatacagagatggaatgggacaaccgcagttttactacattctggtgtttggcctatatgagaaaccatcttctcacagattaagggctaagggcaaaaggggtgggaggtgtggaactagccttaatgagtttcccattcctgaaccaaaattcaaagtgagtgagatgtaaatcctgtgattttggtgaagaaaaaaacgggtatcttcatagcagcctaggaaaccttaaccatatctctaacaccacacagaaagaggctggaggagccactggacaaagcttctgtctctgtgtgtacatttataatgttctaaccaagtctcaaaccttgatgaaaaacacaaaatttttccataaacttatcagaagactcacttttctttctttcttggatagagaaaccattttctgacactaggtttacaatctcagtgtccttacaagttaagtcctaagctcacaggatcctccgagcatgtccatcacctgctctttggctaaggtggcagtgtacctctagatcaacctgggaacagtcacaagggagtgtgacttcttggccataataaactcactcgatagtgtttatgttattaatctgaatgcaacagaagacaaaagcacaggcatgcacacacacagaaccccaaaccactaaaaactacctaaacactgacttagtaaatagtaaaaaggtaatgttgggacttttaaaccttgaatccattagccaggcttgggatgaaaggaccatctaaaatcatgctagtctaaaccatgctcttccacacagctgtttaaaaaccactgggtatgaggaatatgctagaaagaaatgttaaaaatagattgttggctcacacttatttttctaataaataggaccattattactaccaggaaagtcttatttattttgcctgaaattggcttaaagaaagtctcatgacgggatgggatgggctgcgcttctcaatgaactctgaggcagaaatatttgccttggattctgtggattctttaaacctgtgtgctaataattcaaacaatgttgcattaattgtataagggtttttgtatagttttcaaacatctgtggtgtaatgatctttgttaaacatatattctgtaaagtgccatagtctttttttatgtgtagcatatttaaaaatatatatgtatattatacatacacaagtttgtgtgaaagatgtgcaataacaaaggtgtatgtatgttttgttgttttgttttggaaactggacaggagtcaaaacagggatgtttgtttctgttttggcaaggagagttccacatttttgccttcatggcttattcagtaacccataattttaatgctacacaaatcttatgtgaagaaaagactggtatgaaatcattttttcctgggtctaaaataatcgctagtgttatgtcaaagttaagcccgcacgccaggcccagttaatgctagtctttcatgtgaaatgtgaagctgccatgttgccttttctcttagtaggataactagtagctggtacataatcactgaggagctatttcttaacatgcttttatagaccatgctaatgctagaccagtatttaagggctaatctcacacctccttagctgtaagagtctggcttagaacagacctctctgtgcaataacttgtggccactggaaatccctgggccggcatttgtattggggttgcaatgactcccaagggccaaaagagttaaaggcacgactgggatttcttctgagactgtggtgaaactccttccaaggctgagggggtcagtaggtgctctggagggactcggcaccacttgatattcaacagccacttgagccaaatataaaattgtatttacagctgatggactcaatttgagccttcaaacttgtagttatcctattatattgtaaactaatacattgtctagcattgatttggttcctgtgcatatgtattttcactatgtgctcccctccccagatcttaattaaaccagattttgcaattcattcttattctttc

SEQ ID NO: 6989 - DNA, 209 bp, Homo sapiens
attctttattctgcctttgtcctggtgagcacatctgatatggcagaggaaactgaggatgcctggccgcacctcagcgagagcagcagcagcgatagcagccgcagaagagccagcggggtcgcctagtgtcatgaccagggcgggagatcacaaccgccagagaggatgctgtggatccttggccgactacctgacctctgcaaaat

SEQ ID NO: 6990 - DNA, 940 bp, Homo sapiens
cccggtcactctggctccccagctcaaggttcaggccttgccccaggccgggcctctgggtcccccacggcccttcaggatgaaagctgcggtgctgaccttggccgtgctcttcctgacggggagccaggctcggcatttctggcagcaagatgaacccccccagagcccctgggatcgagtgaaggacctggccactgtgtacgtggatgtgctcaaagacagcggcagagactatgtgtcccagtttgaaggctccgccttgggaaaacagctaaacctaaagctccttgacaactgggacagcgtgacctccaccttcagcaagctgcgcgaacagctcggccctgtgacccaggagttctgggataacctggaaaaggagacagagggcctgaggcaggagatgagcaaggatctggaggaggtgaaggccaaggtgcagccctacctggacgacttccagaagaagtggcaggaggagatggagctctaccgccagaaggtggagccgctgcgcgcagagctccaagagggcgcgcgccagaagctgcacgagctgcaagagaagctgagcccactgggcgaggagatgcgcgaccgcgcgcgcgcccatgtggacgcgctgcgcacgcatctggccccctacagcgacgagctgcgccagcgcttggccgcgcgccttgaggctctcaaggagaacggcggcgccagactggccgagtaccacgccaaggccaccgagcatctgagcacgctcagcgagaaggccaagcccgcgctcgaggacctccgccaaggcctgctgcccgtgctggagagcttcaaggtcagcttcctgagcgctctcgaggagtacactaagaagctcaacacccagtgaggcgcccgccgccgccccccttcccggtgctcagaataaacgtttccaaagtgggaa

SEQ ID NO: 6991 - DNA, 6671 bp, Homo sapiens
cgcgcgggcgcgggggacggcgcaggggccgcctggctggagcagccagaggggatagcttcgtcgagaacggaggacaccggcggtccagggtcctgggcagtcgcgccagagctgagcggagggcgcggcgcgagaacgaatctttgtgacattctctctcagcattctttatcccctgtttgctgaagacttcgacaaaagctggtcttagctgttggcattctcctgagaaaaggatagcttcagaaatcagaaaaacatttgggaggtgtctagcccagtggaccttctgaagagcaatgctaagaagacgtttggtttaaagaattaaaaggaagaacaacttaagagcttcttcaaagtttcccgcatgaaaattacttaaacgttgcacacaacgtttcacaaaatcttttgtgaaagaagaaaaggaaattcagtgtgtgagtctcagcaggagttaagctaatgcagcttaaaataatgccgaaaaagaagcgcttatctgcgggcagagtgcccctgattctcttcctgtgccagatgattagtgcactggaagtacctcttgatcaaaaatctactgaagtaatggtacagcctccaaccatcacccaacagtctccaaaagattacattattgaccctcgggagaatattgtaatccagtgtgaagccaaagggaaaccgcccccaagcttttcctggacccgtaatgggactcattttgacatcgataaagaccctctggtcaccatgaagcctggcacaggaacgctcataattaacatcatgagcgaagggaaagctgagacctatgaaggagtctatcagtgtacagcaaggaacgaacgcggagctgcagtttctaataacattgttgtccgcccatccagatcaccattgtggaccaaagaaaaacttgaaccaatcacacttcaaagtggtcagtctttagtacttccctgcagacccccaattggattaccaccacctataatattttggatggataattcctttcaaagacttccacaaagtgagagagtttctcaaggtttgaatggggacctttatttttccaatgtcctcccagaggacacccgcgaagactatatctgttatgctagatttaatcatactcaaaccatacagcagaagcaacctatttctgtgaaggtgatttcagtggatgaattgaatgacactatagctgctaatttgagtgacactgagttttatggtgctaaatcaagtagagagaggccaccaacatttttaactccagaaggcaatgcaagtaacaaagaggaattaagaggaaatgtgctttcactggagtgcattgcagaaggactgcctaccccaattatttactgggcaaaggaagatggaatgctacccaaaaacaggacagtttataagaactttgagaaaaccttgcagatcattcatgtttcagaagcagactctggaaattaccaatgtatagcaaaaaacgcattaggagccatccaccataccatttctgttagagttaaagcggctccatactggatcacagcccctcaaaatcttgtgctgtccccaggagaggatgggaccttgatctgcagagctaatggcaaccccaaacccagaattagctggttaacaaatggagtcccaatagaaattgcccctgatgaccccagcagaaaaatagatggcgataccattattttttcaaatgttcaagaaagatcaagtgcagtctatcagtgcaatgcctctaatgaatatggatatttactggcaaacgcatttgtaaatgtgctggctgagccaccacgaatcctcacacctgcaaacacactctaccaggtcattgcaaacaggcctgctttactagactgtgccttctttgggtctcctctcccaaccatcgagtggtttaaaggagctaaaggaagtgctcttcatgaagatatttatgttttacatgaaaatggaactttggaaattcctgtggcccaaaaggacagtacaggaacttatacgtgtgttgcaaggaataaattagggatggcgaagaatgaagttcacttagaaatcaaagatcctacatggatcgttaaacagcccgaatatgcagttgtgcaaagagggagcatggtgtcctttgaatgcaaagtgaaacatgatcacaccttatccctcactgtcctgtggctgaaggacaacagggaactgcccagtgatgaaaggttcactgttgacaaggatcatctagtggtagctgatgtcagtgacgatgacagcgggacctacacgtgtgtggccaacaccactctggacagcgtctccgccagcgctgtgcttagcgttgttgctcctactccaactccagctcccgtttacgatgtcccaaatcctccctttgacttagaactgacagatcaacttgacaaaagtgttcagctgtcatggaccccaggcgatgacaacaatagccccattacaaaattcatcatcgaatatgaagatgcaatgcacaagccagggctgtggcaccaccaaactgaagtttctggaacacagaccacagcccagctgaagctgtctccttacgtgaactactccttccgcgtgatggcagtgaacagcattgggaagagcttgcccagcgaggcgtctgagcagtatttgacgaaagcctcagaaccagataaaaaccccacagctgtggaaggactgggatcagagcctgataatttggtgattacgtggaagcccttgaatggtttcgaatctaatgggccaggccttcagtacaaagttagctggcgccagaaagatggtgatgatgaatggacatctgtggttgtggcaaatgtatccaaatatattgtctcaggcacgccaacctttgttccatacctgatcaaagttcaggccctgaatgacatggggtttgcccccgagccagctgtagtcatgggacattctggagaagacctcccaatggtggctcctgggaacgtgcgtgtgaatgtggtgaacagtaccttagccgaggtgcactgggacccagtacctctgaaaagcatccgaggacacctacaaggctatcggatttactattggaagacccagagttcatctaaaagaaacagacgtcacattgagaaaaagatcctcaccttccaaggcagcaagactcatggcatgttgccggggctagagccctttagccactacacactgaatgtccgagtggtcaatgggaaaggggagggcccagccagccctgacagagtctttaatactccagaaggagtccccagtgctccctcgtctttgaagattgtgaatccaacactggactctctcactttggaatgggatccaccgagccacccgaatggcattttgacagagtacaccttaaagtatcagccaattaacagcacacatgaattaggccctctggtagatttgaaaattcctgccaacaagacacggtggactttaaaaaatttaaatttcagcactcgatataagttttatttctatgcacaaacatcagcaggatcaggaagtcaaattacagaggaagcagtaacaactgtggatgaagctggtattcttccacctgatgtaggtgcaggcaaagttcaagcagtaaatcccaggatcagcaatcttactgctgcagctgctgagacctatgccaatatcagttgggaatatgagggaccagagcatgtgaacttttatgttgaatatggtgtagcaggcagcaaagaagaatggagaaaagaaattgtaaatggttctcggagcttctttgggttaaagggtctaatgccaggaacagcatacaaagttcgagttggtgctgtgggggactctggttttgtgagttcagaggatgtgtttgagacaggcccagcgatggcaagccggcaggtggatattgcaactcagggctggttcattggtctgatgtgtgctgttgctctccttatcttaattttgctgattgtttgcttcatcagaagaaacaagggtggtaaatatccagttaaagaaaaggaagatgcccatgctgaccctgaaatccagcctatgaaggaagatgatgggacatttggagaatacagttcattgaaaaatgatgcagaagaccacaagcctttgaaaaaaggaagtcgaactccttcagacaggactgtgaaaaaagaagatagtgacgacagcctagttgactatggagaaggggttaatggccagttcaatgaggatggctcctttattggacaatacagtggtaagaaagagaaagagccggctgaaggaaacgaaagctcagaggcaccttctcctgtcaacgccatgaattcctttgtttaatttttaagctctttgccaatattccatttctctagaatgtttatcctaagcacttgtttgtcagccctctcatactatgaacatatgggtagagagtatattttctgctgtatgttagtattatgagaatagttacagcaaaaacataactcagtcaaatgatatgttaatatgaactggaatgcaaagtgcatactttttcattcaaaatgggtattcttgatttcctcagaactgataaaaaataatgcaacatcaccaacagatcctgttatttcctctgcaggatacagttcaatatgatgcatgaaaaatgctccacatttaaaggacatacccgtgtatgttatgaaaacatggtttgatactttgtttatactaccctcagctgaacccctatatatgaattccgttttcattgtcaagaatgttactgtagtattctctagaacttcaatgtctttgtggacattgttgtgaaattggtgactatgtatagctgtcgttagtctttttgggagactgttaggaacagtttgtacagtatatacttgctaaatgagttcattatgacagtcacattgctgatgcttactgagaactattacctactcttggctcctgttactccgtaggcttcttaatcttccaggcattacagcagcacagtgttctactttttacatcatttctatgttcggttgtttttaggcataaacaatgtgtattgcagtgcatttcggcatttgtgccatactgaaagaatcaaaaacaaatcatccaaattaaatttcaaacattatttcagagaacacagggcaagacacatacagtgccttcagatattaagcattccacaacatcgtgcattctgtatcagctggtccagtccattctgggtcctagattactgtcattgtctaaaagtaacttttaaaaagcagagttcatgaaaactgcaatgctgggaaaagaaggaaacatgaaaataaaaataagacagtttattagaaatagcatttcctcataagcataaaaagaaaatctttgttgccaactgaagcacatgatgattttgtggtcctttatggtttctattacattcagtaagaaagatgtcaacatgctagaaaattaattttaaaactaagttattccaacactaaaagcatacaacagcatgccaacagtaatatattattctccaagactttacctatgtaagtgttcaaaactctgcagcattaaacaacgtgtatgcaaattgttatggatacatttcagaatctaagaaatcaggcaagtgcttaaaaggccaacggtccaagggattacatctgcagtttaaaaagtaaatatatattctatcgtattcataaacaatatctatcaaatgggttacctccaaatatgaaaatctataacaacctatggttgaaggaatgctcagtttcatttgccaataaattggtttctcataacttgcatcaagtttaattttaagtaaagctttttatatgtagatattttgttgaatttgtaaatacacttaaaatgtagatgctatatgcttataggtgttacatacaaataaacatgcaatgtttatgttgtactgtataagaggtaagctaattaatgcagtgaatgggattggaaagcatctacttaaatatctattgggttcccccctccccccaccttttttgctgtgaaactgaaatagtgaacttttctacgtattgacagcagatttttcgatgaaatcttcagagctttgcctatggggcacagtaggcctagtaacctggcatgtttgatatatgtaggtaaagcataatttaaagtaatcccaggtaaagatggccctaaatactttcatgtctctatattcatttttcacagatccacctgtctcttgaaaatataaaaagacaaaacaggtttgccttggcatcagagagcacaaagattaaaagttactttaaatttgccaatattttgggagaacaataaaactacattttttcctcttccatactggtagatgcgaaatttatctgtgcatgaaagggtcacttctgtaatagtgcaacagatttggtattaaaaattaaatgtggttttaaaagttcctctctcttttgtaatttatgttcccaattgagtgtgaatgtccaagtaatggtgtatgtaatggtacaggcaaatgtgactggatttccctcaaaaaagtaactattaaacagtcttgatctctttgtgacttttaa

SEQ ID NO: 6992 - DNA, 649 bp, Homo sapiens
gagccgcagccgcagcgaggccggcgggcgggagcgcacggaggtggggtcggccaggccggtgcgggctccttgcggcaggtcccaagagggttcggtccgagcccggtgggaggctcccggagcgcagcctgggcccagcccaccccgcgccggcggccatggcaggcaccctggacctggacaagggctgcacggtggaggagctgctccgcgggtgcatcgaagccttcgatgactccgggaaggtgcgggacccgcagctggtgcgcatgttcctcatgatgcacccctggtacatcccctcctctcagctggcggccaagctgctccacatctaccaacaatcccggaaggacaactccaattccctgcaggtgaaaacgtgccacctggtcaggtactggatctccgccttcccagcggagtttgacttgaacccggagttggctgagcagatcaaggagctgaaggctctgctagaccaagaagggaaccgacggcacagcagcctaatcgacatagacagcgtactgtgagctcctcgagggcaggaaccgtgtcttactcatctctgtattcccagcgcctagcacagtgcctggcacagaccctacctacaagtggaagcggcaggtgactcagcgga

SEQ ID NO: 6993 - DNA, 3138 bp, Homo sapiens; identical to SEQ ID NO: 1153

SEQ ID NO: 6994 - DNA, 6281 bp, Homo sapiens
gtctgctggagttcattttccccaaaaacggacccaccatgggcagacgcaccattagcacagtccccaaaggagatgcccaggactgtgggatggtcttgtgaaggtcgatgcacagatattgcagaggaatgctttaacttctagaaaataattctttcaagaagatcagggacaactgatttgaagtctactctgtgcttctaaatccccaattctgctgaaagtgagataccctagagccctagagccccagcagcacccagccaaacccacctccaccatgggggccatgactcagctgttggcaggtgtctttcttgctttccttgccctcgctaccgaaggtggggtcctcaagaaagtcatccggcacaagcgacagagtggggtgaacgccaccctgccagaagagaaccagccagtggtgtttaaccacgtttacaacatcaagctgccagtgggatcccagtgttcggtggatctggagtcagccagtggggagaaagacctggcaccgccttcagagcccagcgaaagctttcaggagcacacagtggatggggaaaaccagattgtcttcacacatcgcatcaacatcccccgccgggcctgtggctgtgccgcagcccctgatgttaaggagctgctgagcagactggaggagctggagaacctggtgtcttccctgagggagcaatgtactgcaggagcaggctgctgtctccagcctgccacaggccgcttggacaccaggcccttctgtagcggtcggggcaacttcagcactgaaggatgtggctgtgtctgcgaacctggctggaaaggccccaactgctctgagcccgaatgtccaggcaactgtcaccttcgaggccggtgcattgatgggcagtgcatctgtgacgacggcttcacgggcgaggactgcagccagctggcttgccccagcgactgcaatgaccagggcaagtgcgtaaatggagtctgcatctgtttcgaaggctacgccggggctgactgcagccgtgaaatctgcccagtgccctgcagtgaggagcacggcacatgtgtagatggcttgtgtgtgtgccacgatggctttgcaggcgatgactgcaacaagcctctgtgtctcaacaattgctacaaccgtggacgatgcgtggagaatgagtgcgtgtgtgatgagggtttcacgggcgaagactgcagtgagctcatctgccccaatgactgcttcgaccggggccgctgcatcaatggcacctgctactgcgaagaaggcttcacaggtgaagactgcgggaaacccacctgcccacatgcctgccacacccagggccggtgtgaggaggggcagtgtgtatgtgatgagggctttgccggtgtggactgcagcgagaagaggtgtcctgctgactgtcacaatcgtggccgctgtgtagacgggcggtgtgagtgtgatgatggtttcactggagctgactgtggggagctcaagtgtcccaatggctgcagtggccatggccgctgtgtcaatgggcagtgtgtgtgtgatgagggctatactggggaggactgcagccagctacggtgccccaatgactgtcacagtcggggccgctgtgtcgagggcaaatgtgtatgtgagcaaggcttcaagggctatgactgcagtgacatgagctgccctaatgactgtcaccagcacggccgctgtgtgaatggcatgtgtgtttgtgatgacggctacacaggggaagactgccgggatcgccaatgccccagggactgcagcaacaggggcctctgtgtggacggacagtgcgtctgtgaggacggcttcaccggccctgactgtgcagaactctcctgtccaaatgactgccatggccagggtcgctgtgtgaatgggcagtgcgtgtgccatgaaggatttatgggcaaagactgcaaggagcaaagatgtcccagtgactgtcatggccagggccgctgcgtggacggccagtgcatctgccacgagggcttcacaggcctggactgtggccagcactcctgccccagtgactgcaacaacttaggacaatgcgtctcgggccgctgcatctgcaacgagggctacagcggagaagactgctcagaggtgtctcctcccaaagacctcgttgtgacagaagtgacggaagagacggtcaacctggcctgggacaatgagatgcgggtcacagagtaccttgtcgtgtacacgcccacccacgagggtggtctggaaatgcagttccgtgtgcctggggaccagacgtccaccatcatccaggagctggagcctggtgtggagtactttatccgtgtatttgccatcctggagaacaagaagagcattcctgtcagcgccagggtggccacgtacttacctgcacctgaaggcctgaaattcaagtccatcaaggagacatctgtggaagtggagtgggatcctctagacattgcttttgaaacctgggagatcatcttccggaatatgaataaagaagatgagggagagatcaccaaaagcctgaggaggccagagacctcttaccggcaaactggtctagctcctgggcaagagtatgagatatctctgcacatagtgaaaaacaatacccggggccctggcctgaagagggtgaccaccacacgcttggatgcccccagccagatcgaggtgaaagatgtcacagacaccactgccttgatcacctggttcaagcccctggctgagatcgatggcattgagctgacctacggcatcaaagacgtgccaggagaccgtaccaccatcgatctcacagaggacgagaaccagtactccatcgggaacctgaagcctgacactgagtacgaggtgtccctcatctcccgcagaggtgacatgtcaagcaacccagccaaagagaccttcacaacaggcctcgatgctcccaggaatcttcgacgtgtttcccagacagataacagcatcaccctggaatggaggaatggcaaggcagctattgacagttacagaattaagtatgcccccatctctggaggggaccacgctgaggttgatgttccaaagagccaacaagccacaaccaaaaccacactcacaggtctgaggccgggaactgaatatgggattggagtttctgctgtgaaggaagacaaggagagcaatccagcgaccatcaacgcagccacagagttggacacgcccaaggaccttcaggtttctgaaactgcagagaccagcctgaccctgctctggaagacaccgttggccaaatttgaccgctaccgcctcaattacagtctccccacaggccagtgggtgggagtgcagcttccaagaaacaccacttcctatgtcctgagaggcctggaaccaggacaggagtacaatgtcctcctgacagccgagaaaggcagacacaagagcaagcccgcacgtgtgaaggcatccactgaacaagcccctgagctggaaaacctcaccgtgactgaggttggctgggatggcctcagactcaactggaccgcagctgaccaggcctatgagcactttatcattcaggtgcaggaggccaacaaggtggaggcagctcggaacctcaccgtgcctggcagccttcgggctgtggacataccgggcctcaaggctgctacgccttatacagtctccatctatggggtgatccagggctatagaacaccagtgctctctgctgaggcctccacaggggaaactcccaatttgggagaggtcgtggtggccgaggtgggctgggatgccctcaaactcaactggactgctccagaaggggcctatgagtactttttcattcaggtgcaggaggctgacacagtagaggcagcccagaacctcaccgtcccaggaggactgaggtccacagacctgcctgggctcaaagcagccactcattataccatcaccatccgcggggtcactcaggacttcagcacaacccctctctctgttgaagtcttgacagaggaggttccagatatgggaaacctcacagtgaccgaggttagctgggatgctctcagactgaactggaccacgccagatggaacctatgaccagtttactattcaggtccaggaggctgaccaggtggaagaggctcacaatctcacggttcctggcagcctgcgttccatggaaatcccaggcctcagggctggcactccttacacagtcaccctgcacggcgaggtcaggggccacagcactcgaccccttgctgtagaggtcgtcacagaggatctcccacagctgggagatttagccgtgtctgaggttggctgggatggcctcagactcaactggaccgcagctgacaatgcctatgagcactttgtcattcaggtgcaggaggtcaacaaagtggaggcagcccagaacctcacgttgcctggcagcctcagggctgtggacatcccgggcctcgaggctgccacgccttatagagtctccatctatggggtgatccggggctatagaacaccagtactctctgctgaggcctccacagccatgggctccccaaaggaagtcattttctcagacatcactgaaaattcggctactgtcagctggagggcacccacagcccaagtggagagcttccggattacctatgtgcccattacaggaggtacaccctccatggtaactgtggacggaaccaagactcagaccaggctggtgaaactcatacctggcgtggagtaccttgtcagcatcatcgccatgaagggctttgaggaaagtgaacctgtctcagggtcattcaccacagctctggatggcccatctggcctggtgacagccaacatcactgactcagaagccttggccaggtggcagccagccattgccactgtggacagttatgtcatctcctacacaggcgagaaagtgccagaaattacacgcacggtgtccgggaacacagtggagtatgctctgaccgacctcgagcctgccacggaatacacactgagaatctttgcagagaaagggccccagaagagctcaaccatcactgccaagttcacaacagacctcgattctccaagagacttgactgctactgaggttcagtcggaaactgccctccttacctggcgacccccccgggcatcagtcaccggttacctgctggtctatgaatcagtggatggcacagtcaaggaagtcattgtgggtccagataccacctcctacagcctggcagacctgagcccatccacccactacacagccaagatccaggcactcaatgggcccctgaggagcaatatgatccagaccatcttcaccacaattggactcctgtaccccttccccaaggactgctcccaagcaatgctgaatggagacacgacctctggcctctacaccatttatctgaatggtgataaggctgaggcgctggaagtcttctgtgacatgacctctgatgggggtggatggattgtgttcctgagacgcaaaaacggacgcgagaacttctaccaaaactggaaggcatatgctgctggatttggggaccgcagagaagaattctggcttgggctggacaacctgaacaaaatcacagcccaggggcagtacgagctccgggtggacctgcgggaccatggggagacagcctttgctgtctatgacaagttcagcgtgggagatgccaagactcgctacaagctgaaggtggaggggtacagtgggacagcaggtgactccatggcctaccacaatggcagatccttctccacctttgacaaggacacagattcagccatcaccaactgtgctctgtcctacaaaggggctttctggtacaggaactgtcaccgtgtcaacctgatggggagatatggggacaataaccacagtcagggcgttaactggttccactggaagggccacgaacactcaatccagtttgctgagatgaagctgagaccaagcaacttcagaaatcttgaaggcaggcgcaaacgggcataaattccagggaccactgggtgagagaggaataaggcccagagcgaggaaaggattttaccaaagcatcaatacaaccagcccaaccatcggtccacacctgggcatttggtgagagtcaaagctgaccatggatccctggggccaacggcaacagcatgggcctcacctcctctgtgatttctttctttgcaccaaagacatcagtctccaa

SEQ ID NO: 6995 - DNA, 1486 bp, Homo sapiens; identical to SEQ ID NO: 4550

SEQ ID NO: 6996 - DNA, 2409 bp, Homo sapiens
aatgtctgttgaactgaatgagtgagggtcatgttgctctctcgcttaaaaaccttccatggctccctattgccttcaacatgcctcctctgggcagcttggcgttcctgcctcatcttccactgccaccacccatcccacacacctcctcctgtagctgcgctgggtcggctccccgtcggctgagctctcgagtcctttctcatcatggtgctctgctcatatcatcccccttgctgcctcctccgtgttaccaagactcagttcaggcatgaagtctccgtgggctctgagggttcggggctcttccggggtagaatttgtcgttcccacctctgttttccatggcactttgtacagactcctgtacaaagacctctgtacatgtgtcacgctgttttgtgatcatgtgtttctgtgtctgtctccctcagtagactgtgagctcctcgagggcaggaaccgtgtcttactcatctctgtattcccagcgcctagcacagtgcctggcacagagtacgttgttcataaatgtgtgttgagtgcatgacggggtcgggggagatgaggaggagttgctgggactgggaacattcgtgcctaggacagtgcctcgcattatgtaggttctcagtaagcgtgaatggtgtgtctgtgtgagtggggggccacgagtcatgcgcatgtccagcaaagggctcactacccctgcccccccagccctacctacaagtggaagcggcaggtgactcagcggaaccctgtgggacagaaaaagcgcaagatgtccctgttgtttgaccacctggagcccatggagctggcggagcatctcacctacttggagtatcgctccttctgcaagatcctgtttcaggactatcacagtttcgtgactcatggctgcactgtggacaaccccgtcctggagcggttcatctccctcttcaacagcgtctcacagtgggtgcagctcatgatcctcagcaaacccacagccccgcagcgggccctggtcatcacacactttgtccacgtggcggagaagctgctacagctgcagaacttcaacacgctgatggcagtggtcgggggcctgagccacagctccatctcccgcctcaaggagacccacagccacgttagccctgagaccatcaagctctgggagggtctcacggaactagtgacggcgacaggcaactatggcaactaccggcgtcggctggcagcctgtgtgggcttccgcttcccgatcctgggtgtgcacctcaaggacctggtggccctgcagctggcactgcctgactggctggacccagcccggacccggctcaacggggccaagatgaagcagctctttagcatcctggaggagctggccatggtgaccagcctgcggccaccagtacaggccaaccccgacctgctgagcctgctcacggtgtctctggatcagtatcagacggaggatgagctgtaccagctgtccctgcagcgggagccgcgctccaagtcctcgccaaccagccccacgagttgcaccccaccaccccggcccccggtactggaggagtggacctcggctgccaaacccaagctggatcaggccctcgtggtggagcacatcgagaagatggtggagtctgtgttccggaactttgacgtcgatggggatggccacatctcacaggaagaattccagatcatccgtgggaacttcccttacctcagcgcctttggggacctcgaccagaaccaggatggctgcatcagcagggaggagatggtttcctatttcctgcgctccagctctgtgttgggggggcgcatgggcttcgtacacaacttccaggagagcaactccttgcgccccgtcgcctgccgccactgcaaagccctgatcctgggcatctacaagcagggcctcaaatgccgagcctgtggagtgaactgccacaagcagtgcaaggatcgcctgtcagttgagtgtcggcgcagggcccagagtgtgagcctggaggggtctgcaccctcaccctcacccatgcacagccaccatcaccgcgccttcagcttctctctgccccgccctggcaggcgaggctccaggcctccagcagagatccgtgaggaggaggtacagacggtggaggatggggtgtttgacatccacttgtaatagatgctgtggttggatcaaggactcattcctgccttggagaaaatacttcaaccagagcagggagcctgggggtgtcggggcaggaggctggggatgggggtgggatatgagggtggcatgcagctgagggcagggccagggctggtgtccctaaggttgtacagactcttgtgaatatttgtattttccagatggaataaaaaggcccgtgtaattaaccttca

SEQ ID NO: 6997 - DNA, 574 bp, Homo sapiens
gacaaaggagcggaggagcagtcgcagctgctttccgaggaagccggtgttgccgagattgccaaaatgctttggagtttttaactgaatctaagaaaagtccaaaatagatttgagactgtaaaaacagaaactgcagcaagggggattcagtgccaatgcatcaacaaaaaagacaaccagagttagtggaaggaaatcttcctgttttcgtgttccccacggagctcatattttatgcagatgatcagtcaacacataagcaagtgttgacactgtacaatccctatgagtttgccttaaagttcaaaggtgagtctcctagctctattttctgggtttttaactggtccctactaattttttacttgtagaaactaattaaaaaaaaaaaacactaatggccattgtgactttttctttcagttttgtgtactactccaaataagtatgttgtcgttgatgctgcaggtgcagtaaagcctcagtgttgtgtggatatgtaagtcaagatcaattcctggtaacacgttttaagtgtgttaatatttatgtttttaacttgaaaaaaaaa

SEQ ID NO: 6998 - DNA, 1263 bp, Homo sapiens
ggaacagctgcagccggcgctgggcccgcctggaatgcgggaacaggctgcacaccaggacttttatggaaacttgctgctggagacggcggcggcggcggcggcagcggcagccagaggactcccagcggctggagcagaagtgttagcggccagagctcccagacccctacccacagccaggcgggacgcgcacagtccctccacgcggaaagaagtaccttcgccggtcaccggctcctgcagggtgcaaatatatacagagcttcataatcagcccaagaccacatagagcaaacatgaatgatatttcccaaaaggctgagattaaagaaatgcttgcttctgatgatgaggaagatgtatcttctaaagtagaaaaggcttatgttccaaaattaacaggaactgtgaagggtagatttgctgaaatggagaaacaaagacaagaggaacaaaggaagagaacggaggaggaacgaaaacgcagaattgagcaggatatgttagaaaagaggaaaatacagcgtgaattagcaaaaagggctgaacagattgaggacataaacaatacgggaactgaatcagcatcagaggaaggagatgattcactacttataactgtggtacctgtcaaatcatataaaacatctggaaaaatgaaaaagaattttgaggatctagaaaaagaacgtgaagagaaagaaaggatcaagtacgaggaagataaaagaataagatatgaagaacaacgaccatctctcaaggaagcaaagtgtctttcattagttatggatgatgaaatagaaagtgaagcaaaaaaagaatcactttctcccggaaaattgaaactaacttttgaagaactggagcgacaaagacaagaaaaccgaaagaagcaagctgaagaggaagcaagaaaacgtttagaagaagagaagcgtgcttttgaagaagcaaggcggcaaatggtaaatgaagatgaggaaaaccaagacacagcaaaaatttttaaagggtaccgccctggtaaactcaaactcagttttgaagaaatggaaaggcaaagaagagaagatgaaaaaaggaaagcagaagaagaagccagaaggagaatagaggaagaaaagaaggcgtttgctgaagcaaggagaaatatggtagtagatgatgactccccagagatgtataagacaatctctcaagaatttcttacaccgggaaaactggaaattaattttgaagaattattaaaacaaaaaa

SEQ ID NO: 6999 - DNA, 405 bp, Homo sapiens
gacacaaggagaggcttggagagagcagacgccttctggattcaagaagacgaggcccattcccctcaggctcacctgttactcggcctcccagaaagatggataggagaaatgactacggatatagggtgcctctatttcagtccaagcatctgaatggggatgagagaagtggcagtaattacaggcggatcccatggggccggaggcctgcaccaccgcgagatgtggccattttacaagaaagggctaataagttggtgaaatacctgttggttaaggaccagacaaagatccccatcaaacgctcagacatgctgagggatgtcatccaagaatatgatgaatatttcccagaaatcattgaacgagcaagctacactctggagaagatgtttcgagtca

SEQ ID NO: 7000 - DNA, 429 bp, Homo sapiens
ccctttaatgagttcttgttttcctgactgcagctctcttcattctgccaaccttttccaactccatgatgatcctgcaggtttcagggggcccctggacagtggctctgacagcattactgatggtgctgctcatatctgtggtccagagcagggccactccagagaattccgtctaccaggaacggcaggaatgctatgcgttcaatgggactcagcgcgttgtggacgggctcatctacaaccgggaggaatacgtgcattttgacagcgcagtgggggagttcctagcagtgatggagctggggcggcccataggcgagtacttcaatagccagaaggactttatggaacggaagcgagccgaggtggacaaggtgtgcagacacaagtacgagctgatggagccactcatccggcagcgccgag

SEQ ID NO: 7001 - DNA, 1747 bp, Homo sapiens
agacgcgcgagtctcaggtcccgctaattacctggcgggtgctgcccacccctgccctcgcgcacctagcgcggtggcaggcgggaaggcggggcctgggggagccccacccctggagactgcggctggggcctccctctcctccgcccgcccgcctgccactagctcattgcgcctctcctgcagtctgattggcaccggctcccattccggctccagcctccaatccgacccccatttcggctgcagcctcggacctagctccggccctcggtctatccggttgcatcctccctccctgttccggatcttatcttgcgccagcgcctactccaggatcccgtagccagacctcaagccatggctggtcccttctcccgtctgctgtccgcccgcccgggactcaggctcctggctttggccggagcggggtctctagccgctgggtttctgctccgaccggaacctgtacgagctgccagtgaacgacggaggctgtatcccccgagcgctgagtacccagacctccgaaagcacaacaactgcatggccagtcacctgaccccagcagtctatgcacggctctgcgacaagaccacacccactggttggacgctagatcagtgtatccagactggcgtggacaaccctggccaccccttcatcaagactgtgggcatggtggctggagatgaggagacctatgaggtatttgctgacctgtttgaccctgtgatccaagagcgacacaatggatatgacccccggacaatgaagcacaccacggatctagatgccagtaaaatccgttctggctactttgatgagaggtatgtattgtcctctagagtcagaactggccgaagcatccgaggactcagtctgcctccagcttgcactcgagcagagcgacgagaggtggaacgtgttgtggtggatgcactgagtggcctgaagggtgacctggctggacgttactataggctcagtgagatgacagaggctgaacagcagcagcttattgatgaccactttctgtttgataagcctgtgtccccgttgctgactgcagcaggaatggctcgagactggccagatgctcgtggaatttggcacaacaatgagaagagcttcctgatctgggtgaatgaggaggatcatacacgggtgatctccatggagaagggtggtaacatgaagagagtgtttgaaagattctgccgaggcctcaaagaggtggagagacttatccaagaacgtggctgggagttcatgtggaatgagcgtttgggatacatcttgacctgtccatctaacctgggcactggacttcgggcaggagtgcacatcaaactgcccctgctaagcaaagatagccgcttcccaaagatcctggagaacctaagactccaaaaacgtggtactggaggagtggacactgctgctacaggcggtgtctttgatatttctaatttggaccgactaggcaaatcagaggtggagctggtgcaactggtcatcgatggagtaaactatttgattgattgtgaacggcgtctggagagaggccaggatatccgcatccccacacctgtcatccacaccaagcattaactccccatcgccagctgatgactcaagattcccaggagttctgctcattctaatgatggcccattctacttgctctggacctgcccccgcatcccctgcctccatcctagtaaagactccttgctatgctgca

SEQ ID NO: 7002 - DNA, 580 bp, Homo sapiens
ggtgcaagaggcgcaaacaagccaatcccaggaggaaaaacgtggtgaactatgacaatgtagtggacacaggttctgaaacagatgaggaagacaagcttcatattgctgaggatgacggtattgccaaccctctggaccaggagacgagtccagctagtgtgcccaaccatgagtcctccccacacgtgagccaagctctgttgccaagagaggaagaggaagatgaaataagggagggtggagtggaacacccctggcacaacaacgagattctacaagcctctgtagatggtccagtgaagaatgcaaattgcacatcagattttgaggaatactttgccaaaagaaaactggaggaacgcgatggtcatgcagtcagcatcgaggagtaccttcagcgcagtgacacagccattatttacccagaagcccctgaggagctgtctcgccttggcacgccagaggccaatgggcaagaagaaaatgacctgccacctggaactccagatgcttttgcccaactgctgacctgcccctactgcgaccggggctacaagcgcttgacatcactgaagga

SEQ ID NO: 7003 - DNA, 1569 bp, Homo sapiens
cggattgtcagactgctcctccctcttctttagactgccacgaggaaaaagcagatgtgagaactcaaggttcagggctgctcttctaagaaacaagtctgccataatctccatctgtgttggaatctgttaactaatgaactggtctctgtgcaaatcctgagtgctaaagcttccaacaagactgatgctagctcgtgtcaccaggaagatgctacgtcatgccaagtgttttcagcgcctagcaatttttggttctgtgagggcactgcataaagataatagaacagcaacccctcagaatttctccaactatgaatccatgaaacaggacttcaaactggggattccagagtatttcaactttgctaaagatgtcctggaccaatggactgataaggaaaaggctggaaagaaaccttcaaatccagccttctggtggatcaacagaaatggagaagagatgcgatggagttttgaggaactgggatctctgtccagaaaatttgccaatatactttcagaagcctgttccctacaaagaggagatcgggtaattctgattctgcccagggtcccagagtggtggcttgcaaatgtggcctgtctgcgaacagggacagttttaattccaggaaccactcagctgacccagaaagacattctctacagactacaatcttcaaaagcaaactgcattatcaccaatgatgttttagccccagcagtagacgctgttgcatccaaatgtgaaaatctgcactccaagctgattgtatcagagaactccagagaggggtgggggaacctcaaggagttgatgaaacatgccagtgacagccacacctgtgtgaagacaaaacacaatgagatcatggccatattctttaccagtggaacaagtggatatccgaaaatgactgcacacacccacagcagttttggtttaggattatctgtaaatggaaggttctggctagatttgacaccctcagatgtgatgtggaatacctcagatacgggctgggcaaagtctgcatggagtagtgttttttctccgtggatccagggagcatgtgtattcacacaccatttaccccgttttgagccgacttctatcttgcaaacactctccaagtaccccatcacagtcttctgttcagcaccaactgtataccgaatgcttgtacagaatgatataaccagctataagtttaaaagcttaaagcactgtgtgagtgctggggaaccaattacccctgacgtgactgaaaaatggagaaacaagacgggcctggatatctacgaaggatatggacagactgaaacggtgctaatctgtggaaattttaagggaatgaaaattaaacctggctcaatgggaaaaccttctcctgctttcgatgttaaggtttgcacatccccttccaggagaatgtttaacaacccaatctgtacactacctacctaccgcttacccccatataaactttctttgttatgatggtgattccattttacttccatgatactttaatttttataaatatgtgaaaatgattagaaatg

SEQ ID NO: 7004 - DNA, 609 bp, Homo sapiens
gaaacatttaccagatgtgtggcttgagtgtccattcccgcaacaaaaacgctctgcagtaaagctccgagatggctgtgtttgtgttggactgctctagatgcacaaccctcctggacaaagcgtttttcctcagccttcaccacccatggaggaggtgtgattacctctattcacagaaaggagactgggacccaaccaaggcaagtcatttgcttcagaccacagagcaaagaatcattctgtcattccagaaatatttgtcaggcgcccctggtgtgtcaggtagacgcaccctctgaagatggtgactccctcctgagaagctggaccccttggtaaaagacaaggccttctccaagaagaatatgaaagtgttactcagacttatttgtttcatagctctactgatttcttctctggaggctgataaatgcaaggaacgtgaagaaaaaataattttagtgtcatctgcaaatgaaattgatgttcgtccctgtcctcttaacccaaatgaacacaaaggcactataacttggtataaagatgacagcaagacacctgtatctacagaacaagcctccaggattcatcaacacaaagagaaac
